United States Patent Application Publication US 2018/0126003 A1 - sequence listing, part 73

SEQ ID NO: 132683 - DNA, 2946 bp, Artificial Sequence
  derived and/or modified sequence
aagtaaaaaaatggaagggggaaaaggcaaagtattctgccttccaagttagatagctatctttatgaaaggacatatttcaaaggcaatataaagtctttatggtgctcttacctacctatatttgaattgggggatgcttcacctgcttattagtgaaagaagaaagaatacacttagtaaattaaattttttttaaaactttgtctttgctcagaaccagctccacccaaatcactcttcgcagtgaacaaaacccagacttcagtgactttgctgtgggtggaagagggagtagctgatttctttgaagttttctgtcaacaagttggctccagtcagaaaaccaaacttcaggaaccagttgctgtttcttcccatgtcgtgaccatctccagccttcttcctgccactgcctacaattgtagtgtcaccagctttagccatgacagccccagtgtccctacgttcatagccgtctcaacaatggttacagagatgaatcccaatgtggtagtgatctccgtgctggccatccttagcacacttttaattggactgttgcttgttaccctcattattcttaggaaaaagcatctgcagatggctagggagtgtggagctggtacatttgtcaattttgcatccttagagagggatggaaagcttccatacaactggagtaaaaatggtttaaagaagaggaaactgacaaacccggttcaactggatgactttgatgcctatattaaggatatggccaaagactctgactataaattttctcttcagtttgaggagttgaaattgattggactggatatcccacactttgctgcagatcttccactgaatcgatgtaaaaaccgttacacaaacatcctaccatatgacttcagccgtgtgagattagtctccatgaatgaagaggaaggtgcagactacatcaatgccaactatattcctggatacaactcaccccaggagtatattgccacccaggggccactgcctgaaaccagaaatgacttctggaagatggtcctgcaacaaaagtctcagattattgtcatgctcactcagtgtaatgagaaaaggagggtgaaatgtgaccattactggccattcacggaagaacctatagcctatggagacatcactgtggagatgatttcagaggaagagcaggacgactgggcctgtagacacttccggatcaactatgctgacgagatgcaggatgtgatgcattttaactacactgcatggcctgatcatggtgtgcccacagcaaatgctgcagaaagtatcctgcagtttgtacacatggtccgacagcaagctaccaagagcaaaggtcccatgatcattcactgcagtgctggcgtgggacggacaggaacattcattgccctggacaggctcttgcagcacattcgggatcatgagtttgttgacatcttagggctggtgtcagaaatgaggtcataccggatgtctatggtacagacagaggagcagtacatttttatccatcagtgtgtgcaactgatgtggatgaagaagaagcagcagttctgcatcagtgatgtcatatacgagaatgttagcaagtcctagttcagaatccggagcagagaggacatgatgtgcgcccatcctcccttgcttccagattgttttagtgggccctgatggtcatttttctaaacagaggccctgctttgtaatatgtggccaaggagataatttatctcacagaagcaccgggaagacttagccttaaagagcctacagtgtccttttggactctttcacttcgggacatttaataatggaccaaattcaacagaacaccaggaaggtcaagacgctctccaaagggcaggaagtacagcacttccgaagagtttagttggccctttgctggttgggctgagttttttatttttaagtgtttgtttttcagtgcaataatttttgtgtgtgtgtgattcttatcagaaagttgaattgttttctgcctacaccgttcatcagccccataacccaggaaggaacaggcattgttagcatcagattatacctcattattaaaaggaggcatggccacacatgaagaaatggtcattctacttcaaagaaattgagccagcactatctgtactccaacattaccggatctggattggggaggttggtcagggaagagaggggttctacccacagatcaactgtgtaatcttttactattcaagctataattcagcttcaaagtagagtagaaaaaaaattgtcttaactgttctagttcttgatggttttcttccttattaacagttggtgtttcttccttggcccttttggactaatgttactgtccaagttctttctcaagaaaccacatctggttcagaagagtgtcaagttggactctttgaactctgttgctgtctgagcaatcgtggtgcctagactttgcattccttgttctgttgacctgcatacatgtgagagctatttctttaagaactatataggctgtgaaaacgcactttctttcccccaaagagctgggaatttatgaagttatggcaatgaactgcagcatgctgggacaattatttgactacttttttttgtaatattgtcaaatgtctctatggattctgacagagatttctttttgttttgttattcttttggttgtcagtttcattttaacgagtgtaactagtaacattttattctttggattttgtataattacagtacatgattgtgtattgtgacatgaatgctgtcaaaatgacattgatggcattgtgaagcctgttactttgtgtcacttcctgataaataagaggtgatgacatggatatacaacagaaaacactttgagttgaaagtaaacacaagctggctgcttccctgtggcaactgtgg

SEQ ID NO: 132684 - DNA, 3978 bp, Artificial Sequence
  derived and/or modified sequence
aagtaaaaaaatggaagggggaaaaggcaaagtattctgccttccaagttagatagctatctttatgaaaggacatatttcaaaggcaatataaagtctttatggtgctcttacctacctatatttgaattgggggatgcttcacctgcttattagtgaaagaagaaagaatacacttagtaaattaaattttttttaaaactttgtctttgctcagaaccagctccacccaaatcactcttcgcagtgaacaaaacccagacttcagtgactttgctgtgggtggaagagggagtagctgatttctttgaagttttctgtcaacaagttggctccagtcagaaaaccaaacttcaggaaccagttgctgtttcttcccatgtcgtgaccatctccagccttcttcctgccactgcctacaattgtagtgtcaccagctttagccatgacagccccagtgtccctacgttcatagccgtctcaacaatggttacagagatgaatcccaatgtggtagtgatctccgtgctggccatccttagcacacttttaattggactgttgcttgttaccctcattattcttaggaaaaagcatctgcagatggctagggagtgtggagctggtacatttgtcaattttgcatccttagagagggatggaaagcttccatacaactggagtaaaaatggtttaaagaagaggaaactgacaaacccggttcaactggatgactttgatgcctatattaaggatatggccaaagactctgactataaattttctcttcagtttgaggagttgaaattgattggactggatatcccacactttgctgcagatcttccactgaatcgatgtaaaaaccgttacacaaacatcctaccatatgacttcagccgtgtgagattagtctccatgaatgaagaggaaggtgcagactacatcaatgccaactatattcctggatacaactcaccccaggagtatattgccacccaggggccactgcctgaaaccagaaatgacttctggaagatggtcctgcaacaaaagtctcagattattgtcatgctcactcagtgtaatgagaaaaggagggtgaaatgtgaccattactggccattcacggaagaacctatagcctatggagacatcactgtggagatgatttcagaggaagagcaggacgactgggcctgtagacacttccggatcaactatgctgacgagatgcaggatgtgatgcattttaactacactgcatggcctgatcatggtgtgcccacagcaaatgctgcagaaagtatcctgcagtttgtacacatggtccgacagcaagctaccaagagcaaaggtcccatgatcattcactgcagtgctggcgtgggacggacaggaacattcattgccctggacaggctcttgcagcacattcgggatcatgagtttgttgacatcttagggctggtgtcagaaatgaggtcataccggatgtctatggtacagacagaggagcagtacatttttatccatcagtgtgtgcaactgatgtggatgaagaagaagcagcagttctgcatcagtgatgtcatatacgagaatgttagcaagtcctagttcagaatccggagcagtaagtggagaagagctctccacgagtgctcagtcttagaactattagagggggatgtgatggatgggacaaaagacagcagtagccatttgtattgactctgacttcacatgagtatttcttcccagctcctggcctcacatgggtggtcacagggagaaacaagtactgtagcagatctttgagtttcaatgcaccttggttggtgttggcaacaaacaggagcttctgcacatcatgatgactttacctccattccctctacccagaaccctaaattattctgttattggatctgtgcctgtaatatcaggatactaccatccaaatctatctagatatcttgtgcaaatattttattgattacaagggctgtatacggggttacaaaaagacatgagctggattggacactcctaaaaccaaaaacaacagtgacaatagagtctcaggatagcagagtctgaaaataccttggtctcccccattatgtgagcccttacttgagagcttcatgaagacacttgtaacatattcaacgtcctgtactccagttttgactacgagatcagattttggaggtgtaagtaaacttggctgaggtaacagtaatctgcccatttagttcagtaaacagactgtagagtgtctgactatactgggggaagaggagccaatgacagggtagggagatgacagtggtgcatgatgggagaatcatgaaagtctgggaagcatatggaccagtgggaaggataggattagcactgcacctctacatccatcaagagagacagagcgcacaatggagcaggaaggataaaaaataaagaaagacagagagaaacaaatttgctgggagagggaaagacattcagacccacagaaaggaggcagcacacagagaaagatgcacagatcaacccacatctgcatgggttgtgagactgagcatagtgagagcagtggtggagcaatagaagattgctgtgacaccaggctgcttactgtctttctttgtctcattcacaggagaggacatgatgtgcgcccatcctcccttgcttccagattgttttagtgggccctgatggtcatttttctaaacagaggccctgctttgtaatatgtggccaaggagataatttatctcacagaagcaccgggaagacttagccttaaagagcctacagtgtccttttggactctttcacttcgggacatttaataatggaccaaattcaacagaacaccaggaaggtcaagacgctctccaaagggcaggaagtacagcacttccgaagagtttagttggccctttgctggttgggctgagttttttatttttaagtgtttgtttttcagtgcaataatttttgtgtgtgtgtgattcttatcagaaagttgaattgttttctgcctacaccgttcatcagccccataacccaggaaggaacaggcattgttagcatcagattatacctcattattaaaaggaggcatggccacacatgaagaaatggtcattctacttcaaagaaattgagccagcactatctgtactccaacattaccggatctggattggggaggttggtcagggaagagaggggttctacccacagatcaactgtgtaatcttttactattcaagctataattcagcttcaaagtagagtagaaaaaaaattgtcttaactgttctagttcttgatggttttcttccttattaacagttggtgtttcttccttggcccttttggactaatgttactgtccaagttctttctcaagaaaccacatctggttcagaagagtgtcaagttggactctttgaactctgttgctgtctgagcaatcgtggtgcctagactttgcattccttgttctgttgacctgcatacatgtgagagctatttctttaagaactatataggctgtgaaaacgcactttctttcccccaaagagctgggaatttatgaagttatggcaatgaactgcagcatgctgggacaattatttgactacttttttttgtaatattgtcaaatgtctctatggattctgacagagatttctttttgttttgttattcttttggttgtcagtttcattttaacgagtgtaactagtaacattttattctttggattttgtataattacagtacatgattgtgtattgtgacatgaatgctgtcaaaatgacattgatggcattgtgaagcctgttactttgtgtcacttcctgataaataagaggtgatgacatggatatacaacagaaaacactttgagttgaaagtaaacacaagctggctgcttccctgtggcaactgtgg

SEQ ID NO: 132685 - DNA, 3567 bp, Artificial Sequence
  derived and/or modified sequence
atgggccacctgcccaccggcatccacggcgccagaagactgctgcccctgctgtggctgttcgtgctgttcaagaacgccaccgccttccacgtgaccgtgcaggacgacaacaacatcgtggtgagcctggaggccagcgacgtgatcagccccgccagcgtgtacgtggtgaagatcaccggcgagagcaagaactacttcttcgagttcgaggagttcaacagcaccctgcccccccccgtgatcttcaaggccagctaccacggcctgtactacatcatcaccctggtggtggtgaacggcaacgtggtgaccaagcccagcagaagcatcaccgtgctgaccaagcccctgcccgtgaccagcgtgagcatctacgactacaagcccagccccgagaccggcgtgctgttcgagatccactaccccgagaagtacaacgtgttcaccagagtgaacatcagctactgggagggcaaggacttcagaaccatgctgtacaaggacttcttcaagggcaagaccgtgttcaaccactggctgcccggcatgtgctacagcaacatcaccttccagctggtgagcgaggccaccttcaacaagagcaccctggtggagtacagcggcgtgagccacgagcccaagcagcacagaaccgccccctaccccccccagaacatcagcgtgagaatcgtgaacctgaacaagaacaactgggaggagcagagcggcaacttccccgaggagagcttcatgagaagccaggacaccatcggcaaggagaagctgttccacttcaccgaggagacccccgagatccccagcggcaacatcagcagcggctggcccgacttcaacagcagcgactacgagaccaccagccagccctactggtgggacagcgccagcgccgcccccgagagcgaggacgagttcgtgagcgtgctgcccatggagtacgagaacaacagcaccctgagcgagaccgagaagagcaccagcggcagcttcagcttcttccccgtgcagatgatcctgacctggctgccccccaagccccccaccgccttcgacggcttccacatccacatcgagagagaggagaacttcaccgagtacctgatggtggacgaggaggcccacgagttcgtggccgagctgaaggagcccggcaagtacaagctgagcgtgaccaccttcagcagcagcggcagctgcgagaccagaaagagccagagcgccaagagcctgagcttctacatcagccccagcggcgagtggatcgaggagctgaccgagaagccccagcacgtgagcgtgcacgtgctgagcagcaccaccgccctgatgagctggaccagcagccaggagaactacaacagcaccatcgtgagcgtggtgagcctgacctgccagaagcagaaggagagccagagactggagaagcagtactgcacccaggtgaacagcagcaagcccatcatcgagaacctggtgcccggcgcccagtaccaggtggtgatctacctgagaaagggccccctgatcggcccccccagcgaccccgtgaccttcgccatcgtgcccaccggcatcaaggacctgatgctgtaccccctgggccccaccgccgtggtgctgagctggaccagaccctacctgggcgtgttcagaaagtacgtggtggagatgttctacttcaaccccgccaccatgaccagcgagtggaccacctactacgagatcgccgccaccgtgagcctgaccgccagcgtgagaatcgccaacctgctgcccgcctggtactacaacttcagagtgaccatggtgacctggggcgaccccgagctgagctgctgcgacagcagcaccatcagcttcatcaccgcccccgtggcccccgagatcaccagcgtggagtacttcaacagcctgctgtacatcagctggacctacggcgacgacaccaccgacctgagccacagcagaatgctgcactggatggtggtggccgagggcaagaagaagatcaagaagagcgtgaccagaaacgtgatgaccgccatcctgagcctgccccccggcgacatctacaacctgagcgtgaccgcctgcaccgagagaggcagcaacaccagcatgctgagactggtgaagctggagcccgccccccccaagagcctgttcgccgtgaacaagacccagaccagcgtgaccctgctgtgggtggaggagggcgtggccgacttcttcgaggtgttctgccagcaggtgggcagcagccagaagaccaagctgcaggagcccgtggccgtgagcagccacgtggtgaccatcagcagcctgctgcccgccaccgcctacaactgcagcgtgaccagcttcagccacgacagccccagcgtgcccaccttcatcgccgtgagcaccatggtgaccgagatgaaccccaacgtggtggtgatcagcgtgctggccatcctgagcaccctgctgatcggcctgctgctggtgaccctgatcatcctgagaaagaagcacctgcagatggccagagagtgcggcgccggcaccttcgtgaacttcgccagcctggagagagacggcaagctgccctacaactggagcaagaacggcctgaagaagagaaagctgaccaaccccgtgcagctggacgacttcgacgcctacatcaaggacatggccaaggacagcgactacaagttcagcctgcagttcgaggagctgaagctgatcggcctggacatcccccacttcgccgccgacctgcccctgaacagatgcaagaacagatacaccaacatcctgccctacgacttcagcagagtgagactggtgagcatgaacgaggaggagggcgccgactacatcaacgccaactacatccccggctacaacagcccccaggagtacatcgccacccagggccccctgcccgagaccagaaacgacttctggaagatggtgctgcagcagaagagccagatcatcgtgatgctgacccagtgcaacgagaagagaagagtgaagtgcgaccactactggcccttcaccgaggagcccatcgcctacggcgacatcaccgtggagatgatcagcgaggaggagcaggacgactgggcctgcagacacttcagaatcaactacgccgacgagatgcaggacgtgatgcacttcaactacaccgcctggcccgaccacggcgtgcccaccgccaacgccgccgagagcatcctgcagttcgtgcacatggtgagacagcaggccaccaagagcaagggccccatgatcatccactgcagcgccggcgtgggcagaaccggcaccttcatcgccctggacagactgctgcagcacatcagagaccacgagttcgtggacatcctgggcctggtgagcgagatgagaagctacagaatgagcatggtgcagaccgaggagcagtacatcttcatccaccagtgcgtgcagctgatgtggatgaagaagaagcagcagttctgcatcagcgacgtgatctacgagaacgtgagcaagagctag

SEQ ID NO: 132686 - protein, 657 aa, Artificial Sequence
  derived and/or modified sequence
MRRAVCFPALCLLLNLHAAGCFSGNNDHFLAINQKKSGKPVFIYKHSQDIEKSLDIAPQKIYRHSYHSSSEAQVSKRHQIVNSAFPRPAYDPSLNLLAMDGQDLEVENLPIPAANVIVVTLQMDVNKLNITLLRIFRQGVAAALGLLPQQVHINRLIGKKNSIELFVSPINRKTGISDALPSEEVLRSLNINVLHQSLSQFGITEVSPEKNVLQGQHEADKIWSKEGFYAVVIFLSIFVIIVTCLMILYRLKERFQLSLRQDKEKNQEIHLSPITLQPALSEAKTVHSMVQPEQAPKVLNVVVDPQGRGAPEIKATTATSVCPSPFKMKPIGLQERRGSNVSLTLDMSSLGNIEPFVSIPTPREKVAMEYLQSASRILTRSQLRDVVASSHLLQSEFMEIPMNFVDPKEIDIPRHGTKNRYKTILPNPLSRVCLRPKNVTDSLSTYINANYIRGYSGKEKAFIATQGPMINTVDDFWQMVWQEDSPVIVMITKLKEKNEKCVLYWPEKRGIYGKVEVLVISVNECDNYTIRNLVLKQGSHTQHVKHYWYTSWPDHKTPDSAQPLLQLMLDVEEDRLASQGRGPVVVHCSAGIGRTGCFIATSIGCQQLKEEGVVDALSIVCQLRMDRGGMVQTSEQYEFVHHALCLYESRLSAETVQ

SEQ ID NO: 132687 - DNA, 1974 bp, Artificial Sequence
  derived and/or modified sequence
atgagaagagccgtgtgcttccccgccctgtgcctgctgctgaacctgcacgccgccggctgcttcagcggcaacaacgaccacttcctggccatcaaccagaagaagagcggcaagcccgtgttcatctacaagcacagccaggacatcgagaagagcctggacatcgccccccagaagatctacagacacagctaccacagcagcagcgaggcccaggtgagcaagagacaccagatcgtgaacagcgccttccccagacccgcctacgaccccagcctgaacctgctggccatggacggccaggacctggaggtggagaacctgcccatccccgccgccaacgtgatcgtggtgaccctgcagatggacgtgaacaagctgaacatcaccctgctgagaatcttcagacagggcgtggccgccgccctgggcctgctgccccagcaggtgcacatcaacagactgatcggcaagaagaacagcatcgagctgttcgtgagccccatcaacagaaagaccggcatcagcgacgccctgcccagcgaggaggtgctgagaagcctgaacatcaacgtgctgcaccagagcctgagccagttcggcatcaccgaggtgagccccgagaagaacgtgctgcagggccagcacgaggccgacaagatctggagcaaggagggcttctacgccgtggtgatcttcctgagcatcttcgtgatcatcgtgacctgcctgatgatcctgtacagactgaaggagagattccagctgagcctgagacaggacaaggagaagaaccaggagatccacctgagccccatcaccctgcagcccgccctgagcgaggccaagaccgtgcacagcatggtgcagcccgagcaggcccccaaggtgctgaacgtggtggtggacccccagggcagaggcgcccccgagatcaaggccaccaccgccaccagcgtgtgccccagccccttcaagatgaagcccatcggcctgcaggagagaagaggcagcaacgtgagcctgaccctggacatgagcagcctgggcaacatcgagcccttcgtgagcatccccacccccagagagaaggtggccatggagtacctgcagagcgccagcagaatcctgaccagaagccagctgagagacgtggtggccagcagccacctgctgcagagcgagttcatggagatccccatgaacttcgtggaccccaaggagatcgacatccccagacacggcaccaagaacagatacaagaccatcctgcccaaccccctgagcagagtgtgcctgagacccaagaacgtgaccgacagcctgagcacctacatcaacgccaactacatcagaggctacagcggcaaggagaaggccttcatcgccacccagggccccatgatcaacaccgtggacgacttctggcagatggtgtggcaggaggacagccccgtgatcgtgatgatcaccaagctgaaggagaagaacgagaagtgcgtgctgtactggcccgagaagagaggcatctacggcaaggtggaggtgctggtgatcagcgtgaacgagtgcgacaactacaccatcagaaacctggtgctgaagcagggcagccacacccagcacgtgaagcactactggtacaccagctggcccgaccacaagacccccgacagcgcccagcccctgctgcagctgatgctggacgtggaggaggacagactggccagccagggcagaggccccgtggtggtgcactgcagcgccggcatcggcagaaccggctgcttcatcgccaccagcatcggctgccagcagctgaaggaggagggcgtggtggacgccctgagcatcgtgtgccagctgagaatggacagaggcggcatggtgcagaccagcgagcagtacgagttcgtgcaccacgccctgtgcctgtacgagagcagactgagcgccgagaccgtgcagtag

SEQ ID NO: 132688 - DNA, 1974 bp, Artificial Sequence
  derived and/or modified sequence
atgagacgagccgtgtgttttccggctctgtgtcttctcctgaatttacatgctgccggctgcttctctgggaacaacgaccattttcttgcaataaaccaaaaaaaatcgggcaaaccagtcttcatttacaaacactctcaggatattgaaaagagcctcgacatagcccctcagaagatttaccgacattcatatcatagctcatccgaagcacaagtcagtaagcgtcatcagatcgtgaactcagccttcccccgccccgcctacgatccctctctcaacctgctggctatggatggccaagatctggaggtcgagaacctgcctatcccggccgccaacgttatcgttgtcaccctgcagatggacgtcaacaagctcaacatcacattactgaggatttttagacaaggcgttgcagccgccctggggttgctccctcagcaagtgcacataaacaggcttattgggaagaagaacagcattgaactgttcgttagcccaatcaaccggaagaccggaatatcagacgcactgccatccgaagaagtcctcaggtccttgaacattaatgtacttcaccagtcactgtcccagttcggtatcacagaagtttccccagagaagaatgtacttcagggacagcacgaggcagataaaatttggagtaaggagggcttctacgccgtagtgatattcctctcgattttcgtgatcatcgtcacctgcctgatgatcctgtacagattgaaagaacgctttcagctatcccttaggcaggacaaagagaaaaaccaagaaattcacttgtcccctattacattgcagcctgccttgtccgaggccaagaccgtccattcgatggtccaacccgagcaggcacccaaagtccttaacgtggtggtggacccgcagggtcggggggccccggagatcaaggcgaccactgcaacctccgtctgcccttctcccttcaaaatgaagcccattggcctgcaggagaggaggggatcgaatgttagtctgacgctcgatatgagctccctcggcaacatcgaaccttttgtatctatcccgacaccccgcgagaaagtggctatggagtacctgcaaagtgctagccgaattctcactcggtctcagctcagagatgttgtggcaagcagccacctacttcagtcagagttcatggagattccaatgaatttcgtggatcctaaagaaattgacatcccccgccacggtaccaaaaaccggtacaagacgattctcccaaacccactgagcagagtctgtcttcgccccaagaacgtaactgattccctgtctacctacataaacgctaactacattcgcggatacagcgggaaggagaaagctttcattgccacgcagggccctatgataaatacagttgacgacttttggcaaatggtctggcaggaggattcccccgtaatagtcatgatcaccaaattgaaagagaagaatgaaaagtgtgtgctctactggccagaaaagaggggaatttatgggaaagtggaggtgttagtgatttcagtgaatgagtgcgacaactacacaatacgtaacctagtcctgaaacaggggtcgcacacgcagcatgtgaagcactattggtacacatcctggcccgatcacaaaacaccagattccgcccaacccctgctgcagttaatgttagacgttgaagaggatcggttggctagccaggggcgaggtcccgtcgtggtgcactgctctgctgggatcgggcgcactggatgttttattgctacgtccattgggtgccagcagttgaaggaggagggcgtcgttgacgcactgtcaatcgtctgccagctgcggatggatcgcggtggaatggtgcagacgtctgaacagtatgagttcgtccaccacgctctgtgcctatatgagagccggttaagtgccgaaaccgtacagtag

SEQ ID NO: 132689 - DNA, 1974 bp, Artificial Sequence
  derived and/or modified sequence
atgagaagagctgtgtgcttccctgccctgtgcctgctgctgaacctgcacgccgccggctgcttcagcggcaacaatgaccacttcctggccatcaaccagaagaagagcggcaagcctgtgttcatctacaagcacagccaggacatcgagaagagcctggacatcgccccccagaagatctaccgccacagctaccacagcagcagcgaggcccaggtgtccaagaggcaccagatcgtgaacagcgccttccccaggcctgcctatgaccccagcctgaacctgctggccatggatggccaggacctggaggtggagaacctgcccatcccagctgccaacgtgattgtggtgaccctgcagatggatgtgaacaagctgaacatcaccctgctgcgcatcttccggcagggcgtggccgccgccctgggcctgctgccccagcaggtgcacatcaaccggctgattggcaagaagaacagcattgagctgtttgtgagccccatcaacaggaagacaggcatcagtgatgccctgcccagcgaggaggtgctgcggagcctgaacatcaacgtgctgcaccagagcctgagccagtttggcatcacagaggtgtccccagagaagaatgtgctgcagggccagcatgaagctgacaagatctggagcaaggagggcttctatgctgtggtgatcttcctgagcatcttcgtcatcatcgtgacctgcctgatgatcctgtaccgcctgaaggagcgcttccagctgagcctgcggcaggacaaggagaagaaccaggagatccacctgagccccatcaccctgcagcctgccctgtctgaggccaagacagtgcacagcatggtgcagcctgagcaggcccccaaggtgctgaatgtggtggtggacccccagggccgcggggcccctgagatcaaggccaccacagccacctctgtgtgccccagccccttcaagatgaagcccatcggcctgcaggagcggcggggcagcaatgtgtccctgaccctggacatgagcagcctgggcaacatcgagccctttgtgtccatccccaccccccgggagaaggtggccatggagtacctgcagagcgccagccgcatcctgaccaggagccagctgagagatgtggtggccagcagccacctgctgcagagcgagttcatggagatccccatgaactttgtggaccccaaggagattgacatccccaggcatggcaccaagaaccgctacaagaccatcctgcccaaccccctgagccgggtgtgcctgcggcccaagaatgtgacagacagcctgagcacctacatcaatgccaactacatccggggctacagcggcaaggagaaggccttcatcgccacccagggccccatgatcaacacagtggatgacttctggcagatggtgtggcaggaggacagccctgtgattgtgatgatcaccaagctgaaggagaagaatgagaagtgtgtgctgtactggccagagaagaggggcatctacggcaaggtggaggtgctggtgatctctgtgaatgaatgtgacaactacaccatccggaacctggtgctgaagcagggcagccacacccagcacgtgaagcactactggtacacctcctggccagaccacaagaccccagacagcgcccagcccctgctgcagctgatgctggatgtggaggaggaccggctggccagccagggccggggccctgtggtggtgcactgcagcgctggcatcggccgcacaggctgcttcatcgccaccagcatcggctgccagcagctgaaggaggagggcgtggtggatgccctgagcatcgtgtgccagctgaggatggaccggggcggcatggtgcagaccagcgagcagtatgaatttgtgcaccacgccctgtgcctgtatgagagccggctgtctgctgagaccgtgcagtag

SEQ ID NO: 132690 - DNA, 1974 bp, Artificial Sequence
  derived and/or modified sequence
atgcggcgggccgtgtgcttccccgccctgtgcctgctgctgaacctccatgcggccgggtgtttttccggaaacaacgaccactttctggctatcaaccagaaaaagagcggcaagcccgtatttatatataaacactcacaggatatcgagaaatccctggatatagccccccagaagatctaccgccacagttaccacagcagctcagaggcccaagtttccaaaaggcatcagatcgtcaattcagcctttccccgcccagcgtacgatcccagtctgaacctgcttgcaatggacggccaagatctagaagtggagaatcttccaattcctgcagccaatgtgatagttgtaaccttgcagatggacgttaataaactgaatataaccctgctgagaatcttcagacagggggtggccgccgccctgggcttgctgcctcaacaggtccatatcaaccgcctgatcggcaagaaaaacagcatagaactattcgtttctcccatcaataggaagaccgggatatctgacgccctcccctctgaggaggtgctccgtagcctgaatattaacgttttacaccagtccctctcacaatttggtatcactgaagtcagtcctgaaaagaacgtcctccagggccagcacgaagctgacaaaatctggtctaaagaagggttctatgcagtggtgatctttcttagcatttttgtgattattgtaacttgccttatgatcctctatcgcctaaaggaaaggtttcagctgtcactgaggcaagacaaggaaaagaaccaggaaattcatctttcccctatcacgcttcagcccgcactgtctgaagccaaaaccgtgcacagcatggtgcagccagagcaggccccgaaggtgttgaacgtggttgtagatccacagggacgcggcgcccctgagatcaaagcaacaactgctacttctgtctgtccctcgcctttcaaaatgaagcctatcgggctccaggagcgcagaggctcaaacgtgtctctgacgttggatatgagcagcttgggaaacatcgagccttttgtctcaatccccacaccccgcgagaaggtggccatggaatatctccaatctgctagcaggattcttacacgctcacaactgcgggatgtggtggcttcttcacacctgctgcagtccgagtttatggagattcctatgaactttgttgatccaaaagagatcgacatcccaaggcacggaacgaagaacaggtacaaaaccattttaccaaatcccctttctagggtatgtctgcgcccaaaaaatgtgacggactctctgtctacgtacatcaacgcgaattacattagaggatattccggtaaggaaaaagccttcattgccactcaggggccgatgattaacaccgtggatgacttttggcagatggtttggcaagaggattctccggtgatcgtcatgatcactaaactaaaagagaagaacgagaaatgcgtgctctattggccggaaaagaggggaatctacggtaaagttgaggtgctcgtcattagcgttaacgaatgtgacaattacacaatcaggaatctggtgctgaagcaaggaagccacacacagcatgtgaaacactattggtacacttcatggccagaccataagactccagatagtgcccagccattgttacagttaatgctggacgttgaggaggaccgtcttgcctcacagggccggggtcctgtagtggtacattgttccgcgggtatcgggaggaccggatgcttcatcgcaacatctataggctgtcaacagctcaaggaggaaggagtggtcgatgctttaagcatagtttgtcagctgcgtatggatagaggagggatggtgcagactagcgagcagtacgagttcgtgcaccacgctctgtgcttatacgaatcccgtctgtccgctgaaacagtccaatag

SEQ ID NO: 132691 - DNA, 3529 bp, Artificial Sequence
  derived and/or modified sequence
accaccccagcgatggagcctactctgctccaagccgccgctaagacccggagaagcggaatttcactttgaaattcccttgcctcgtgagggccggcgctgggcatgctcagtagccgcggcgctgctgctgggctgctgggctggcgcggagtccaccctgccgtctccgccttggcttctgggcgtccagaaggccaggcatttgccgcctctgagcgcttctgttccccttacccgcaacctcctactgctcttcctctctccctctcttagggaggttgaagctggtgctggtttctgtcggcgccacagactgactgctctgcaaaccccagccgaggacctgaatcccggagactagaagacccttggcggtggctctttctaatagcactttacctgaagtggggtcgtggtggagtttctcctccacctctcaatgcaaacactatgcggagagcagtctgcttccctgcgctgtgcctgctccttaatcttcacgctgcagggtgcttttcaggaaacaatgatcattttttggcaattaatcagaagaagagtgggaagccggtattcatttataagcattcacaagacattgagaagagcctggatatagccccacaaaaaatctacagacatagctaccattcctcttccgaagctcaagtaagcaaacgccaccagattgtcaattcagcatttcctagacccgcatatgacccgtctctcaatctgctggccatggatggtcaagatcttgaagtggaaaatctcccaatcccagcagcaaatgtaattgtggtgacactgcaaatggatgtaaacaagctgaacataaccttgcttcggatcttccgccaaggagtggctgcagctttaggactcttaccccagcaagtgcacatcaatcgcctcattggaaagaagaacagtattgaactgtttgtgtctcccataaaccgaaaaacaggaatttctgatgctctgccctctgaggaagttcttcgttcacttaatatcaatgttttgcatcaaagtttatcccagtttggaattacagaagtctctcctgagaaaaatgttttacaagggcagcatgaagcggacaaaatctggagcaaagaaggattttatgctgttgtcatttttctcagcatctttgttattatagtaacgtgtttgatgattctttacagattaaaagaaagatttcagctttccttaagacaagacaaagagaaaaaccaggagatccacctatcgcccatcacattacagccagcactgtccgaggcaaagacagtccacagcatggtccaacctgagcaggccccaaaggtactgaatgttgtcgtggaccctcaaggccgaggtgctcctgagatcaaagctaccaccgctacctctgtttgcccttctcctttcaaaatgaagcccataggacttcaagagagaagagggtccaacgtatctcttacattggacatgagtagcttggggaacattgaaccctttgtgtctataccaacaccacgggagaaggtagcaatggagtatctgcagtcagccagccgaattctcacaaggtctcagctgagggacgtcgtggcaagttcacatttactccaaagtgaattcatggaaataccaatgaactttgtggatcccaaagaaattgatattccgcgtcatggaactaaaaatcgctataagaccattttaccaaatcccctcagcagagtgtgtttaagaccaaaaaatgtaaccgattcattgagcacctacattaatgctaattatattaggggctacagtggcaaggagaaagccttcattgccacgcagggccccatgatcaacaccgtggatgatttctggcagatggtttggcaggaagacagccctgtgattgttatgatcacaaaactcaaagaaaaaaatgagaaatgtgtgctatactggccggaaaagagagggatatatggaaaagttgaggttctggttatcagtgtaaatgaatgtgataactacaccattcgaaaccttgtcttaaagcaaggaagccacacccaacatgtgaagcattactggtacacctcatggcctgatcacaagactccagacagtgcccagcccctcctacagctcatgctggatgtagaagaagacagacttgcttcccagggccgagggcctgtggttgtccactgcagtgcaggaataggtagaacagggtgttttattgctacatccattggctgtcaacagctgaaagaagaaggagttgtggatgcactaagcattgtctgccagcttcgtatggatagaggtggaatggtgcaaaccagtgagcagtatgaatttgtgcaccatgctctgtgcctgtatgagagcagactttcagcagagactgtccagtgagtcattgaagacttgtcagaccatcaatctcttggggtgattaatcaaattacccacccaaggcttctagaaggagcttcctgcaatggaaggaaggagaagctctgaagcccatgtatggcatggattgtggaagactgggcaacatatttaagatttccagctccttgtgtatatgaatgcatttgtaagcatcccccaaattattctgaaggttttttgatgatggaggtatgataggtttatcacacagcctaaggcagattttgttttgtctgtactgactctatctgccacacagaatgtatgtatgtaatattcagtaataaatgtcatcaggtgatgactggatgagctgctgaagacattcgtattatgtgttagatgctttaatgtttgcaaaatctgtcttgtgaatggactgtcagctgttaaactgttcctgttttgaagtgctattacctttctcagttaccagaatcttgctgctaaagttgcaagtgattgataatggatttttaacagagaagtctttgtttttgaaaaacaaaaatcaaaaacagtaactattttatatggaaatgtgtcttgataatattacctattaaatgtgtatttatagtccctcctatcaaacaattacagagcacaatgattgtcattgggtatatatgtatttactctctattattgggcataaaggtggcttctgctccagaactctatccactgtatttccacatcgtgagtcattttactttaaaagggaaaaacaaatttgtagcaactctgaagtatcaagagttttaactacttgtctctcttttgctaagaagggatttttgaatatgctatctacctggaatctctctctcaacaaaaggtatatgccttcaggaatgatataatctgtcccattttcgaggctccttataaggacatttccatgtatgtccttacatttctgaaagctttcaatcttcaagagacaaaaaaaattaaaataactaccctcagcaaacactagctgttctgctcatatatgaatttttaatgcagcaatgttgactttgtttcatactgccaataaactcttaatact

SEQ ID NO: 132692 - DNA, 1974 bp, Artificial Sequence
  derived and/or modified sequence
atgagacgagcggtgtgtttcccggcattgtgccttctgttgaatttacacgccgctggatgcttctccgggaacaacgatcattttctcgcaatcaaccagaagaaatctgggaaacctgtcttcatctacaagcactcacaagacattgagaaaagtcttgacatcgcaccgcagaaaatataccgtcactcctatcacagctcgtcagaagcacaggtgagtaagagacatcagatcgttaattcagcttttcctcgaccagcgtacgatccctctctgaacctgctcgccatggacggacaggacctcgaggtggagaatctgcctattcccgctgcaaacgtcattgtggtgaccctgcagatggatgtgaataagctcaatattacacttttgcgtatcttccgccagggcgtggccgcagctttaggtctccttccacaacaggtgcatatcaatcggctgataggtaaaaagaattctatcgagctgttcgtaagccccataaatcggaaaacaggaatatctgatgccctaccttccgaggaagtccttcgttcactgaatatcaacgtcttacatcaaagcctcagccagttcggaatcacagaagtatctcctgagaaaaacgtgctgcagggccagcacgaagctgacaagatctggtccaaggaaggtttttacgccgtagtaatctttctgtcaatttttgttattatcgtaacatgtcttatgatcctgtaccgcctgaaagaacgcttccaactgtccctacggcaagataaggagaagaatcaggaaattcacctgagccctattactttacagcccgctttatccgaagcaaagaccgtccactcaatggttcagcccgaacaggcgccaaaggtgctcaacgtcgtggtagacccgcaagggaggggagcaccggaaattaaagccaccaccgctacatcagtctgtccaagtcctttcaagatgaagcccatcggcctgcaagaaagacggggatcaaatgtttctctgacgttggatatgtcttctttgggcaatattgaaccatttgtctctattcccacacccagggagaaggtggccatggaatatctacagagcgccagtagaattctgacaaggtcccagctgcgcgacgtagtggccagtagccaccttctgcagagtgagtttatggaaatacctatgaattttgtggaccccaaggagattgacatccctaggcacggaactaaaaacagatataagacgatactgccgaatccgctctctagagtttgcttaagacctaagaatgtgacagattccctatctacatacatcaacgcaaattacatacgaggctacagcgggaaggagaaggcgtttattgccacccagggcccaatgatcaacacagttgatgacttctggcagatggtttggcaggaagatagccccgtgatcgttatgatcaccaaacttaaggaaaagaatgaaaaatgcgtactgtattggcctgagaagcgcggaatttatgggaaggttgaggtgcttgtgatcagcgtgaacgagtgcgacaattacaccataagaaacctggttctgaaacagggctctcacactcagcacgtgaaacattactggtatacctcttggccggatcataagaccccggatagcgcccagcccttactgcagttaatgcttgacgtcgaggaagacagacttgcaagccagggaaggggcccagttgtcgtgcactgcagtgccggaatcggcaggactgggtgcttcatcgccacctcaataggctgtcaacaactgaaggaggagggcgttgtagatgcactgtcaattgtgtgccagctgcgaatggatcggggaggcatggtccaaactagtgaacagtacgagtttgttcaccatgctctgtgtctttatgaaagtaggttaagtgcagagactgtccagtag

SEQ ID NO: 132693 - protein, 1948 aa, Artificial Sequence
  derived and/or modified sequence
MAPTWGPGMVSVVGPMGLLVVLLVGGCAAEEPPRFIKEPKDQIGVSGGVASFVCQATGDPKPRVTWNKKGKKVNSQRFETIEFDESAGAVLRIQPLRTPRDENVYECVAQNSVGEITVHAKLTVLREDQLPSGFPNIDMGPQLKVVERTRTATMLCAASGNPDPEITWFKDFLPVDPSASNGRIKQLRSDQAFSHLPTGALQIESSEETDQGKYECVATNSAGVRYSSPANLYVRVWRTVRRVAPRFSILPMSHEIMPGGNVNITCVAVGSPMPYVKWMQGAEDLTPEDDMPVGRNVLELTDVKDSANYTCVAMSSLGVIEAVAQITVKSLPKAPGTPMVTENTATSITITWDSGNPDPVSYYVIEYKSKSQDGPYQIKEDITTTRYSIGGLSPNSEYEIWVSAVNSIGQGPPSESVVTRTGEQAPASAPRNVQARMLSATTMIVQWEEPVEPNGLIRGYRVYYTMEPEHPVGNWQKHNVDDSLLTTVGSLLEDETYTVRVLAFTSVGDGPLSDPIQVKTQQGVPGQPMNLRAEARSETSITLSWSPPRQESIIKYELLFREGDHGREVGRTFDPTTSYVVEDLKPNTEYAFRLAARSPQGLGAFTPVVRQRTLQSKPSAPPQDVKCVSVRSTAILVSWRPPPPETHNGALVGYSVRYRPLGSEDPEPKEVNGIPPTTTQILLEALEKWTQYRITTVAHTEVGPGPESSPVVVRTDEDVPSAPPRKVEAEALNATAIRVLWRSPAPGRQHGQIRGYQVHYVRMEGAEARGPPRIKDVMLADAQWETDDTAEYEMVITNLQPETAYSITVAAYTMKGDGARSKPKVVVTKGAVLGRPTLSVQQTPEGSLLARWEPPAGTAEDQVLGYRLQFGREDSTPLATLEFPPSEDRYTASGVHKGATYVFRLAARSRGGLGEEAAEVLSIPEDTPRGHPQILEAAGNASAGTVLLRWLPPVPAERNGAIVKYTVAVREAGALGPARETELPAAAEPGAENALTLQGLKPDTAYDLQVRAHTRRGPGPFSPPVRYRTFLRDQVSPKNFKVKMIMKTSVLLSWEFPDNYNSPTPYKIQYNGLTLDVDGRTTKKLITHLKPHTFYNFVLTNRGSSLGGLQQTVTAWTAFNLLNGKPSVAPKPDADGFIMVYLPDGQSPVPVQSYFIVMVPLRKSRGGQFLTPLGSPEDMDLEELIQDISRLQRRSLRHSRQLEVPRPYIAARFSVLPPTFHPGDQKQYGGFDNRGLEPGHRYVLFVLAVLQKSEPTFAASPFSDPFQLDNPDPQPIVDGEEGLIWVIGPVLAVVFIICIVIAILLYKNKPDSKRKDSEPRTKCLLNNADLAPHHPKDPVEMRRINFQTPDSGLRSPLREPGFHFESMLSHPPIPIADMAEHTERLKANDSLKLSQEYESIDPGQQFTWEHSNLEVNKPKNRYANVIAYDHSRVILQPIEGIMGSDYINANYVDGYRCQNAYIATQGPLPETFGDFWRMVWEQRSATIVMMTRLEEKSRIKCDQYWPNRGTETYGFIQVTLLDTIELATFCVRTFSLHKNGSSEKREVRQFQFTAWPDHGVPEYPTPFLAFLRRVKTCNPPDAGPIVVHCSAGVGRTGCFIVIDAMLERIKPEKTVDVYGHVTLMRSQRNYMVQTEDQYSFIHEALLEAVGCGNTEVPARSLYAYIQKLAQVEPGEHVTGMELEFKRLANSKAHTSRFISANLPCNKFKNRLVNIMPYESTRVCLQPIRGVEGSDYINASFIDGYRQQKAYIATQGPLAETTEDFWRMLWENNSTIVVMLTKLREMGREKCHQYWPAERSARYQYFVVDPMAEYNMPQYILREFKVTDARDGQSRTVRQFQFTDWPEQGVPKSGEGFIDFIGQVHKTKEQFGQDGPISVHCSAGVGRTGVFITLSIVLERMRYEGVVDIFQTVKMLRTQRPAMVQTEDEYQFCYQAALEYLGSFDHYAT

SEQ ID NO: 132694 - protein, 1948 aa, Artificial Sequence
  derived and/or modified sequence
MAPTWGPGMVSVVGPMGLLVVLLVGGCAAEEPPRFIKEPKDQIGVSGGVASFVCQATGDPKPRVTWNKKGKKVNSQRFETIEFDESAGAVLRIQPLRTPRDENVYECVAQNSVGEITVHAKLTVLREDQLPSGFPNIDMGPQLKVVERTRTATMLCAASGNPDPEITWFKDFLPVDPSASNGRIKQLRSETFESTPIRGALQIESSEETDQGKYECVATNSAGVRYSSPANLYVRELREVRRVAPRFSILPMSHEIMPGGNVNITCVAVGSPMPYVKWMQGAEDLTPEDDMPVGRNVLELTDVKDSANYTCVAMSSLGVIEAVAQITVKSLPKAPGTPMVTENTATSITITWDSGNPDPVSYYVIEYKSKSQDGPYQIKEDITTTRYSIGGLSPNSEYEIWVSAVNSIGQGPPSESVVTRTGEQAPASAPRNVQARMLSATTMIVQWEEPVEPNGLIRGYRVYYTMEPEHPVGNWQKHNVDDSLLTTVGSLLEDETYTVRVLAFTSVGDGPLSDPIQVKTQQGVPGQPMNLRAEARSETSITLSWSPPRQESIIKYELLFREGDHGREVGRTFDPTTSYVVEDLKPNTEYAFRLAARSPQGLGAFTPVVRQRTLQSKPSAPPQDVKCVSVRSTAILVSWRPPPPETHNGALVGYSVRYRPLGSEDPEPKEVNGIPPTTTQILLEALEKWTQYRITTVAHTEVGPGPESSPVVVRTDEDVPSAPPRKVEAEALNATAIRVLWRSPAPGRQHGQIRGYQVHYVRMEGAEARGPPRIKDVMLADAQWETDDTAEYEMVITNLQPETAYSITVAAYTMKGDGARSKPKVVVTKGAVLGRPTLSVQQTPEGSLLARWEPPAGTAEDQVLGYRLQFGREDSTPLATLEFPPSEDRYTASGVHKGATYVFRLAARSRGGLGEEAAEVLSIPEDTPRGHPQILEAAGNASAGTVLLRWLPPVPAERNGAIVKYTVAVREAGALGPARETELPAAAEPGAENALTLQGLKPDTAYDLQVRAHTRRGPGPFSPPVRYRTFLRDQVSPKNFKVKMIMKTSVLLSWEFPDNYNSPTPYKIQYNGLTLDVDGRTTKKLITHLKPHTFYNFVLTNRGSSLGGLQQTVTAWTAFNLLNGKPSVAPKPDADGFIMVYLPDGQSPVPVQSYFIVMVPLRKSRGGQFLTPLGSPEDMDLEELIQDISRLQRRSLRHSRQLEVPRPYIAARFSVLPPTFHPGDQKQYGGFDNRGLEPGHRYVLFVLAVLQKSEPTFAASPFSDPFQLDNPDPQPIVDGEEGLIWVIGPVLAVVFIICIVIAILLYKNKPDSKRKDSEPRTKCLLNNADLAPHHPKDPVEMRRINFQTPDSGLRSPLREPGFHFESMLSHPPIPIADMAEHTERLKANDSLKLSQEYESIDPGQQFTWEHSNLEVNKPKNRYANVIAYDHSRVILQPIEGIMGSDYINANYVDGYRCQNAYIATQGPLPETFGDFWRMVWEQRSATIVMMTRLEEKSRIKCDQYWPNRGTETYGFIQVTLLDTIELATFCVRTFSLHKNGSSEKREVRQFQFTAWPDHGVPEYPTPFLAFLRRVKTCNPPDAGPIVVHCSAGVGRTGCFIVIDAMLERIKPEKTVDVYGHVTLMRSQRNYMVQTEDQYSFIHEALLEAVGCGNTEVPARSLYAYIQKLAQVEPGEHVTGMELEFKRLANSKAHTSRFISANLPCNKFKNRLVNIMPYESTRVCLQPIRGVEGSDYINASFIDGYRQQKAYIATQGPLAETTEDFWRMLWENNSTIVVMLTKLREMGREKCHQYWPAERSARYQYFVVDPMAEYNMPQYILREFKVTDARDGQSRTVRQFQFTDWPEQGVPKSGEGFIDFIGQVHKTKEQFGQDGPISVHCSAGVGRTGVFITLSIVLERMRYEGVVDIFQTVKMLRTQRPAMVQTEDEYQFCYQAALEYLGSFDHYAT

SEQ ID NO: 132695 - protein, 1949 aa, Artificial Sequence
  derived and/or modified sequence
MAPTWGPGMVSVVGPMGLLVVLLVGGCAAEEPPRFIKEPKDQIGVSGGVASFVCQATGDPKPRVTWNKKGKKVNSQRFETIEFDESAGAVLRIQPLRTPRDENVYECVAQNSVGEITVHAKLTVLREDQLPSGFPNIDMGPQLKVVERTRTATMLCAASGNPDPEITWFKDFLPVDPSASNGRIKQLRRSETFESTPIRGALQIESSEETDQGKYECVATNSAGVRYSSPANLYVRELREVRRVAPRFSILPMSHEIMPGGNVNITCVAVGSPMPYVKWMQGAEDLTPEDDMPVGRNVLELTDVKDSANYTCVAMSSLGVIEAVAQITVKSLPKAPGTPMVTENTATSITITWDSGNPDPVSYYVIEYKSKSQDGPYQIKEDITTTRYSIGGLSPNSEYEIWVSAVNSIGQGPPSESVVTRTGEQAPASAPRNVQARMLSATTMIVQWEEPVEPNGLIRGYRVYYTMEPEHPVGNWQKHNVDDSLLTTVGSLLEDETYTVRVLAFTSVGDGPLSDPIQVKTQQGVPGQPMNLRAEARSETSITLSWSPPRQESIIKYELLFREGDHGREVGRTFDPTTSYVVEDLKPNTEYAFRLAARSPQGLGAFTPVVRQRTLQSKPSAPPQDVKCVSVRSTAILVSWRPPPPETHNGALVGYSVRYRPLGSEDPEPKEVNGIPPTTTQILLEALEKWTQYRITTVAHTEVGPGPESSPVVVRTDEDVPSAPPRKVEAEALNATAIRVLWRSPAPGRQHGQIRGYQVHYVRMEGAEARGPPRIKDVMLADAQWETDDTAEYEMVITNLQPETAYSITVAAYTMKGDGARSKPKVVVTKGAVLGRPTLSVQQTPEGSLLARWEPPAGTAEDQVLGYRLQFGREDSTPLATLEFPPSEDRYTASGVHKGATYVFRLAARSRGGLGEEAAEVLSIPEDTPRGHPQILEAAGNASAGTVLLRWLPPVPAERNGAIVKYTVAVREAGALGPARETELPAAAEPGAENALTLQGLKPDTAYDLQVRAHTRRGPGPFSPPVRYRTFLRDQVSPKNFKVKMIMKTSVLLSWEFPDNYNSPTPYKIQYNGLTLDVDGRTTKKLITHLKPHTFYNFVLTNRGSSLGGLQQTVTAWTAFNLLNGKPSVAPKPDADGFIMVYLPDGQSPVPVQSYFIVMVPLRKSRGGQFLTPLGSPEDMDLEELIQDISRLQRRSLRHSRQLEVPRPYIAARFSVLPPTFHPGDQKQYGGFDNRGLEPGHRYVLFVLAVLQKSEPTFAASPFSDPFQLDNPDPQPIVDGEEGLIWVIGPVLAVVFIICIVIAILLYKKKPHSKRKDSEPRTKCLLNNADLAPHHPKDPVEMRRINFQTPDSGLRSPLREPGFHFESMLSHPPIPIADMAEHTERLKANDSLKLSQEYESIDPGQQFTWEHSNLEVNKPKNRYANVIAYDHSRVILQPIEGIMGSDYINANYVDGYRCQNAYIATQGPLPETFGDFWRMVWEQRSATIVMMTRLEEKSRIKCDQYWPNRGTETYGFIQVTLLDTIELATFCVRTFSLHKNGSSEKREVRQFQFTAWPDHGVPEYPTPFLAFLRRVKTCNPPDAGPIVVHCSAGVGRTGCFIVIDAMLERIKPEKTVDVYGHVTLMRSQRNYMVQTEDQYSFIHEALLEAVGCGNTEVPARSLYAYIQKLAQVEPGEHVTGMELEFKRLANSKAHTSRFISANLPCNKFKNRLVNIMPYESTRVCLQPIRGVEGSDYINASFIDGYRQQKAYIATQGPLAETTEDFWRMLWENNSTIVVMLTKLREMGREKCHQYWPAERSARYQYFVVDPMAEYNMPQYILREFKVTDARDGQSRTVRQFQFTDWPEQGVPKSGEGFIDFIGQVHKTKEQFGQDGPISVHCSAGVGRTGVFITLSIVLERMRYEGVVDIFQTVKMLRTQRPAMVQTEDEYQFCYQAALEYLGSFDHYAT

SEQ ID NO: 132696 - DNA, 5847 bp, Artificial Sequence
  derived and/or modified sequence
atggcccccacctgggggcctgggatggtttcggtggtgggtcctatggggctgctggtcgtgctcttagttggggggtgcgccgctgaagagccccccagattcataaaggaacccaaggaccagataggagtttctgggggggtcgctagtttcgtgtgtcaggcgacaggagacccaaaaccccgggttacttggaacaagaaaggcaaaaaggtgaattctcagagatttgagaccatcgagtttgatgagtccgctggggctgtgctgcgaatccaacccttaagaacacccagggacgaaaatgtgtacgagtgcgtcgctcagaacagcgtgggagagataacagttcacgctaagctgaccgtgctgcgggaggaccaacttccctccgggtttcctaacattgatatgggcccccagctaaaggtggtcgaacggacccgcactgctactatgttgtgcgccgcaagtggtaatccagaccccgaaatcacttggttcaaggatttccttcctgttgacccaagtgcttccaatggccggattaaacagctcagatcagatcaggcctttagtcatctcccaaccggagcccttcaaattgaatctagtgaggagactgaccaagggaagtatgagtgcgtcgctactaactccgcaggagtgcgctatagtagcccagcaaatctttatgtcagggtttggaggacggttcgtagggtggctccacgcttctccatcctgcccatgagtcacgaaataatgcctggtggcaatgttaatattacgtgcgttgctgtcgggtcccccatgccctacgttaagtggatgcaaggggctgaggacctgacccctgaagacgatatgcccgtgggaagaaacgtgcttgaactgaccgacgtgaaggacagcgcgaattacacctgtgtggctatgtctagcctaggcgtgatcgaagccgtcgctcagatcaccgtcaagtcccttcccaaggctcctgggacgccaatggtgaccgaaaacacagctacctccattacaattacctgggattctggaaatcctgaccccgtctcatactacgtcatagaatataaatccaagtcccaggatggaccataccagataaaggaggacatcactacaacgagatattccataggcggtctttcccccaactcggagtacgaaatctgggtttctgctgtgaattcaataggccaagggcctccttcagagtccgtagttactaggactggagaacaagctccggcgtccgccccacgaaatgtacaggcccggatgttaagcgcaactactatgatcgtgcagtgggaagagccagtggagcctaatggcctgattagagggtatcgagtttactacacaatggagcccgagcacccagtcggtaactggcaaaagcacaatgtggacgattcattgctgacaactgttgggtccttgctggaggacgagacttataccgtgcgggtcttggcttttacatcagtcggggatggaccactgtccgaccccatccaggtgaagacccagcaaggagtgcctggtcagcccatgaacctccgcgccgaagcacgatcggaaactagcatcacactctcctggtcaccaccaagacaggaatcaattattaaatacgagcttctgtttcgcgagggggaccatggccgtgaggtgggtcgcacttttgatccaacaacaagctatgtggtggaagacttgaagccaaacacggagtatgccttccggcttgctgcgaggtcacctcaagggctgggcgccttcaccccggtcgtgcgacaacgaaccttgcagagcaaaccaagtgcacctcctcaagatgtaaagtgcgtgtcggtgagaagcaccgctatactggttagctggagacctccccccccagagactcataacggcgccctggtcggctactccgtcagatatcggcccctgggcagtgaagaccctgagcctaaagaggtaaacggaataccgccgaccactactcagatccttcttgaggctctcgaaaaatggactcagtaccgaattaccactgtagcccacacagaagtcggccctgggcctgagagttcacccgtcgttgttaggaccgacgaagatgtgcccagtgctcccccccgcaaagttgaagccgaggccctgaatgccacagcaatacgggtgttgtggcgcagtccagcacctggccgccaacatggtcaaatacgtggataccaggtgcattacgtccgcatggaaggagcagaggcgcgcggacccccccgaattaaagatgttatgctcgccgatgcacagtgggagacagacgacaccgctgaatatgaaatggtcataaccaatttacagcctgagacggcctatagtatcactgtggcagcctacacaatgaaaggcgatggggcaaggtccaaaccaaaggtggtggtgactaaaggagccgttctgggcaggccaacgttatccgtgcagcagacccccgagggcagtctgctggcaagatgggaaccccccgcaggcaccgctgaagaccaggtactggggtatagattacagtttggacgagaggactccacacccctcgcgacactcgagttccccccaagtgaagatcgctataccgcctcgggcgttcacaagggggccacatacgtcttccgactggccgcccgtagccgcggaggcctgggcgaggaggccgcagaagttctctctattcctgaagatacaccccggggccaccctcagattctggaggccgccggaaatgcgagtgcgggaactgtccttcttaggtggctgcctccagtacccgctgagaggaacggtgctattgtaaagtacactgtcgccgtgagggaggcaggcgctctgggacccgcaagggaaacagaactgccagccgcagcagagcccggcgcagaaaatgcactgactcttcagggtctaaaacctgacacggcatacgatctgcaggtgcgcgcgcacaccagacgcggtcctgggcccttcagtcctcctgtgagataccgcactttcttgcgcgatcaggtcagccctaagaatttcaaggttaagatgatcatgaagacttcagttctcctgtcttgggaatttccagacaactataattctccaacaccgtacaaaatacagtataacggactgactttagatgtggatggcagaacaacaaaaaaattgatcacacatttgaaaccacacacattttacaacttcgttctcactaatcgaggctcatccctgggcggccttcagcagacggttaccgcctggaccgccttcaatttgctgaatggaaaacccagtgtagcccccaaacctgatgcggacggcttcataatggtgtatctgccggacggccagagtcccgtgccagtgcagtcctacttcattgtgatggtgcctctgcggaagagcagagggggtcagtttctgacccccttggggtccccggaagacatggatctagaggaactcattcaagatatcagtaggctccaaaggcgatcacttaggcacagccgccaacttgaagtaccccggccttatattgccgctagatttagtgttctgcccccaactttccaccctggggatcagaaacagtacgggggatttgacaaccgggggcttgagcccggccaccggtacgtccttttcgtcctggccgtactgcagaaaagcgagcctacatttgccgcctcccccttcagcgaccctttccaactggataaccccgatccgcagcctattgtggatggtgaagagggactcatctgggtgatcgggccagtgctagctgtggtttttattatttgcatcgtgatcgccatacttttgtacaaaaacaaacccgatagcaagagaaaagacagtgaaccccgcactaagtgtcttctcaacaacgcagatctcgcgccacatcaccccaaagatccagtcgaaatgagaaggattaactttcagacacccgatagcggtctcagaagcccactgagagagccaggctttcattttgagagcatgttgagccaccctcccatcccaatagctgatatggccgaacacacagagcgcctgaaggcaaatgacagcctgaaactctcacaagagtatgagtctatcgatcccgggcagcagtttacatgggagcatagtaaccttgaagtaaacaagcccaagaacagatatgctaacgtaatcgcttatgaccacagcagggttatcctgcagcccattgaggggatcatgggctccgattatatcaacgcaaattacgtcgatggctatcgctgccagaatgcctacatcgcaacccagggaccgctccccgagacattcggtgacttttggcgtatggtgtgggaacagcgctctgcaaccattgtgatgatgaccaggctggaagaaaaatctcgaattaagtgcgaccagtactggcccaatcgtgggactgagacttatgggttcatccaggtaacactcctcgatactattgagttagctactttctgcgtgcgaactttcagcctgcacaagaacggttctagtgaaaaacgggaggtcagacagtttcagttcactgcctggcctgatcacggggttcctgaatatccaaccccatttctggccttcctaaggagagttaagacatgcaaccccccagacgctggccccatcgtagtccactgtagtgccggagttggtagaaccggctgcttcattgttatagacgctatgcttgagagaatcaagcccgaaaagacagttgatgtttatggccacgtgactctgatgaggagtcagaggaattacatggtgcagaccgaggatcagtactctttcatacatgaggcactgctggaagctgtgggctgtggcaataccgaggttcccgcacgatccctgtacgcatacattcaaaaactcgcacaagtggagccgggcgaacacgtgactggaatggagctggagtttaagaggttagctaattcaaaagcccacacaagcagatttatctctgccaatctgccatgcaataagttcaaaaatcggctggtaaacattatgccgtatgagtccacaagggtatgccttcaacctatccgcggcgtggagggtagtgactacatcaacgctagcttcattgacggatatcgacagcagaaggcgtatattgccacccagggcccactcgccgagacaacagaggatttttggcgtatgttatgggagaataattccaccatagtagtcatgctcacaaaactgagggagatgggccgcgagaagtgccaccagtattggcccgctgagcggagtgcccgttaccaatactttgtggtggatcccatggccgaatacaacatgccccagtacatccttagagaattcaaggtcactgatgccagggacggacaatccagaacagttcgccagttccaattcactgattggcctgaacagggagtgccaaagtctggagaagggttcatagactttatagggcaggtgcacaagactaaagagcagttcgggcaggatgggcctattagcgtgcattgtagcgccggggtgggccgcaccggtgttttcatcaccctatcaattgtgctggaacgcatgcggtacgagggcgttgtcgacattttccagactgttaaaatgctacggacccaaaggcctgccatggtgcagaccgaggatgagtaccagttttgttatcaggctgcgctggagtacctaggctccttcgatcattatgcgacatag

SEQ ID NO: 132697 - DNA, 5847 bp, Artificial Sequence
  derived and/or modified sequence
atggcgcctacttggggcccggggatggtatcggtcgtgggacctatgggactgttggtggtgctcttggttggcggttgtgccgccgaggagcctcccagatttatcaaagaaccaaaagaccagatcggggtgtctgggggggtggcctcattcgtctgtcaggccacaggagacccaaaacctcgggtaacatggaataaaaaaggcaaaaaggtgaactcgcaaagattcgagactattgagttcgacgagtccgccggagccgtgctcaggatccagcccctccgaacaccgcgcgatgaaaatgtgtacgagtgtgtagcacaaaatagcgtcggtgagatcactgtacacgcaaagctgacagttctgagggaggatcaactacctagtggcttccctaacattgacatggggccacagctgaaagttgttgagcggaccagaactgccaccatgttgtgtgcggccagtggaaatcccgaccccgaaataacgtggttcaaggacttcttacctgtggaccccagcgcaagtaatggcagaatcaagcagttgagatcagaaacctttgagtccactccaattcgcggcgccctacagatcgaatccagtgaggagaccgaccagggcaagtacgagtgcgtggctaccaactctgcgggggtgagatactcctccccggcaaatctgtacgtccgggagctgcgagaggtgaggagggtggcaccccgcttcagcatcctacccatgtcccacgaaatcatgccaggcggcaatgtaaacatcacatgcgtggccgtgggctcaccaatgccttacgtcaagtggatgcaaggggccgaggacttaactcccgaggacgacatgcccgtgggacggaacgtgctggagttaaccgatgtgaaagacagtgccaattacacctgcgtggcaatgtccagcctgggtgttatcgaggccgtggcacagatcacggtgaaaagtttgcccaaggcacctgggacaccaatggtaacagagaatacggcgacatcaattacaattacttgggactccggaaatccagatcctgtttcatattatgtcatcgagtataaatcaaagtcacaggatggtccttaccagatcaaagaagatattactactacccgctacagcattggcgggctgtctcctaattcagagtacgaaatctgggttagcgccgttaatagtattggtcagggtcctccatccgaatcagtcgtcaccagaactggcgagcaggcaccggcatcagctccacgtaacgttcaggccaggatgctgagcgctactacaatgatagttcaatgggaagagcccgtagagcccaatggcctcattaggggctaccgggtgtattatactatggaacctgagcaccccgtaggtaattggcaaaaacacaacgtggatgattccctgcttactactgttggctccctgctagaagacgaaacatacaccgtgcgggtcctggctttcaccagcgtcggtgacggtcctctgagcgaccctatacaggtcaagacacagcagggcgtgccgggacagccaatgaatctcagagcggaggctcggtctgagacttccattaccctaagttggagccctccaaggcaggaatctatcatcaagtacgagctcctgttcagagagggagatcatggaagagaagtgggcagaacatttgatcctacaaccagctatgtagtggaggatctaaaaccaaatacagagtatgccttccgattagccgcaagatcccctcagggcctcggtgcgtttacacctgtagtgaggcagcggactcttcagtctaaaccttcagcacctccacaggacgtcaaatgcgtgtccgtgcggagcaccgcgatactggtgtcttggagaccaccaccacccgaaactcacaacggcgcccttgttgggtattcggtccggtaccgaccccttggctcggaggatccagagccaaaggaagtgaacggaatcccaccgacaaccacccaaatcctcctagaagctctggaaaagtggacccagtaccgaataacaacggttgcgcacaccgaggtcggaccaggccccgaatcaagccctgtggttgtgcgcactgacgaagatgttccatccgcaccacccaggaaagtcgaggctgaggctcttaacgccactgctataagagttctctggaggtctccagccccgggcaggcaacacggacagatacgggggtaccaagtgcactacgttcggatggaaggagctgaagctagaggacctcctcgaatcaaggatgtaatgctagccgacgcacaatgggaaacggatgataccgcagagtatgagatggtgattactaatctgcagccggaaaccgcctacagcatcacagtggccgcttacaccatgaaaggcgatggcgctcgaagcaaacctaaagtggtggtgaccaagggggctgttttgggaagacccaccctgtctgtacagcaaactccagaagggtccctgctggctaggtgggaacctcccgcaggcacggcagaggaccaagtcctggggtacaggcttcagttcggtagagaagacagcaccccacttgcaactttggagtttccacccagcgaagataggtatactgcttcgggcgtgcacaagggagcgacctatgtgttccgcctcgccgcccgttcgcgaggcggcttaggggaggaggccgcagaggtcttgagtatcccagaagacacgcctaggggccatcctcagatcttagaggctgccggaaacgctagcgcgggcactgttctcctgagatggcttcccccggtgcctgccgaaagaaacggggctatagtgaagtacaccgtcgcagttagagaggccggtgccctgggcccggcacgagaaactgaacttccggctgctgctgaacccggagcggagaacgcattgaccctccagggacttaaacctgacacagcctatgatctgcaggtcagagcccatacccggcgcggccctgggcccttctcacctcctgtgaggtatcggaccttccttagagatcaagttagccctaagaacttcaaggtaaaaatgattatgaagacttccgtgctgctgtcctgggaattcccggataactataattcacctaccccttataagatccagtataacggtctgacactggatgtggatggacggaccactaagaagctcatcacacatctcaagccacataccttctacaactttgtgctcacaaacaggggcagctcactgggcgggctgcagcaaactgtcacggcttggaccgcattcaacctccttaatggcaagccttcagtagcgcccaagcccgatgcagacggattcatcatggtttatttgcccgacggacaatctcccgtccccgtgcagtcctacttcatcgttatggtgcctctcagaaaatctcgcggagggcaatttctgactccactggggagccccgaagatatggatctcgaagaactgatccaagacatctcccgtctccagcgtagatcattgcggcacagccgccagttggaggttcccagaccatacatcgctgcccggtttagcgtgctcccccctacctttcaccctggggatcaaaagcagtatggtggattcgacaacagaggcctggaacccggtcaccgttacgtgctttttgtcctggctgtactgcagaagagcgagcccacatttgccgcttcaccgttcagtgaccccttccagctggacaaccccgaccctcagccaattgtggacggggaggaaggcttgatttgggtcatcggcccagtcttggccgtggtgttcattatctgtatcgttatcgccatcctgctgtataagaacaaacccgattccaagcgcaaggattcagaacccagaactaagtgcctcctgaacaacgccgatctagcccctcaccatcccaaagaccccgtcgagatgagacgaattaattttcaaaccccagatagtggcctgcggtctccactgagagagcccggttttcattttgagtcaatgctgagccacccacccatacctatcgccgatatggcagagcataccgaacgacttaaggcaaacgattcccttaagttatcccaggagtatgaatccatcgacccgggccaacagtttacgtgggagcacagtaatctagaggtgaataaaccaaagaacaggtatgcaaacgtaatagcctatgaccatagccgggtcatccttcagcctatcgagggaattatgggaagtgactatatcaatgctaactacgtcgatggttacagatgtcagaatgcctatattgcgacgcagggcccgctgccagagaccttcggggacttttggaggatggtttgggagcagcggtctgccaccatagtgatgatgaccagactggaggagaagtctagaataaagtgtgaccagtattggcccaatcgggggacggagacttatggcttcatacaagtgactcttctggacactatagagctggccacattctgtgtgcgcaccttttccttgcacaagaacgggtcgagtgagaagcgtgaggtgcggcagttccaattcaccgcatggcctgaccatggggtgcctgagtatccgacacctttcttagccttcctgcgtagagttaaaacctgtaacccacccgacgctggccctatcgtcgttcattgctcagcgggcgtgggtagaacagggtgtttcatcgtaatcgacgctatgctggaaaggataaagcctgaaaaaaccgtggacgtgtacggccatgttacattaatgcgaagtcagagaaattacatggtgcagaccgaggatcagtactcctttattcacgaggcccttctggaagccgtgggctgcggcaatactgaggtgcctgccagatccctgtacgcttacattcagaagttggcccaagttgagccaggcgagcacgtgactgggatggaattggaatttaagcgcttggccaactctaaggcccataccagtaggtttatcagcgccaatcttccatgtaacaaatttaaaaatagacttgttaatattatgccttatgaatctacgcgcgtctgtctccaaccgattcggggggtcgaggggagtgactacatcaatgcaagtttcatcgatgggtacagacaacagaaagcctacatcgccacccaagggccactggccgaaacaaccgaagacttctggaggatgttgtgggaaaacaacagtacaatcgttgtgatgctcacgaagctccgcgagatggggcgtgagaagtgccaccagtattggcccgcagagcgcagcgcccgctatcagtacttcgtagttgaccccatggcggagtacaacatgccccagtatatcctgcgcgaattcaaagtgaccgacgctagagatggccaaagtcggactgttcgtcaattccagtttaccgattggcctgagcagggggtccctaagagtggagaagggttcattgattttatcggacaggtgcacaaaacaaaagaacaattcggccaagatggcccaatctcagtgcattgtagtgctggcgtcggccgaaccggcgttttcatcaccctgtcaatcgttctcgagcggatgagatacgaaggcgtcgtcgacatcttccagaccgtgaaaatgctcaggactcaaaggcctgcaatggttcagaccgaggacgaatatcaattctgctatcaagcggccctggagtacttgggatcatttgatcactatgccacctag

SEQ ID NO: 132698 - DNA, 5850 bp, Artificial Sequence
  derived and/or modified sequence
atggctccgacgtggggacccggaatggtatccgtcgtggggcctatgggcttgctggtcgttctccttgtaggcggttgcgccgctgaggaaccgccaaggttcatcaaggagcctaaggaccagatcggggtgagcggcggagtggctagcttcgtatgtcaggcaacgggcgaccccaagccacgggtgacgtggaacaagaaaggaaagaaggtgaatagccagcggtttgaaacaatcgaatttgacgagtcggcaggcgccgtgctgaggattcaaccgctgaggaccccccgcgacgagaacgtttatgaatgtgtggcgcagaatagtgtgggggagattacagtccatgctaaactcactgtattgagagaggaccagctgcccagcgggtttcctaacattgatatgggcccccaactgaaggtggtggagcgaactcgaaccgccacaatgctgtgcgccgcctctgggaaccccgaccccgagattacgtggttcaaggactttctgcccgtcgatccgagcgcgtccaacggaaggatcaaacagctccgcagatctgagacttttgagagtacacccatcaggggggctctgcagattgagagttcagaggaaaccgaccagggtaagtacgagtgcgtggctacaaactccgccggcgtgcgatattcttcccctgcaaatctgtacgtccgcgaactgagagaggtgcggcgcgtggctccccgtttttccattctccctatgtcccatgagattatgccaggcgggaacgtcaacattacctgcgtggctgtggggtcccccatgccttacgtcaagtggatgcaaggagcagaagatctgactccagaagatgacatgccggtggggaggaacgtgttggagctgactgatgttaaagacagcgcaaattatacttgcgtggcaatgtctagtctgggtgtaatcgaggccgtcgcacaaatcacggtcaagtcccttcccaaggccccgggaacccccatggtgacagaaaatacagccacaagtattaccattacatgggattccgggaaccctgatcctgtttcctactatgtcattgaatacaaaagtaaaagccaagacgggccctaccagataaaagaagatatcaccacaacacgttatagtataggaggtctgtctcctaactccgagtacgagatttgggtgtctgcagtaaatagcatagggcagggccccccttcagaaagcgtggtgacacgtacaggggaacaggcccccgcatctgccccaaggaatgtgcaagccagaatgctgtctgctactaccatgatcgtgcaatgggaggagccagtagagccaaatggccttattaggggataccgggtttactacaccatggagcctgaacacccggtgggaaactggcagaagcacaatgtggatgactctctgttgacgaccgtaggatccctgctcgaagacgagacttacacggtccgtgtactggcttttactagcgtcggggacgggcctctgtccgatccaatccaggtcaagacccagcaaggagttccaggccagcctatgaatctgagggctgaagcacggtccgagactagcattaccctttcatggagtccccctcgtcaggagagcatcatcaagtatgaactacttttcagggaaggcgaccatggcagagaagtggggcgaacttttgatccaactactagttacgtcgtggaagacctcaaaccaaacacggagtacgcatttagactcgccgcccggagtcctcagggcctaggggcgttcactccagttgtacggcaaaggactctccaatcgaagcctagcgctccccctcaggatgtcaaatgtgtgagcgttcggagcaccgcgatcttggtgagctggcggccacccccacctgaaacacacaacggagctctggtggggtacagcgtgaggtataggcctctggggagcgaagatcctgaacccaaagaggtcaacggaatcccgcccacgacaacccagatacttctggaagccctggagaaatggacacagtacaggattaccacggtcgctcacacagaggtcggaccagggccggaatcgtctcccgtcgttgtcagaacagatgaagacgtgccaagcgccccaccacggaaggtcgaggcagaggctttgaacgccacagccatcagggtgttgtggcgaagcccagcgcctgggcgacagcacggacagatcaggggttaccaggtgcactacgtgaggatggagggagccgaagcccggggaccacccaggatcaaagacgtcatgttggcagacgcgcaatgggagactgatgatacggctgaatatgaaatggtgattacgaacctccagcctgagacagcatactctattactgttgccgcctatacaatgaagggcgacggcgccaggagcaagcccaaggtggtggtaacaaagggagccgtcctcggcaggccaactctgtctgtacagcagaccccagagggttccctcctcgcccgctgggagccgccagccggtactgcagaagatcaagtgctgggataccggctccagtttgggcgggaagattccactcctctggccacccttgaatttcctccaagcgaagaccggtacaccgcctcaggggttcataaaggcgcaacctacgtgtttcgtctggccgctcgttctcgcggtggcttaggggaggaagccgccgaggtactatcaatacctgaggacacgccaaggggccatcctcaaatattagaggctgccggcaacgcatccgccggcactgtgctgttgagatggctgccccctgtccccgctgaaagaaacggggccatagtaaaatacacagttgcagtgcgggaggcaggcgctttaggacccgcacgtgagactgagctccccgcggcagctgaaccaggtgctgagaacgccctgactcttcagggtctgaagccagacactgcctacgacttgcaggtgagggcccatacacgtaggggccccggcccatttagccctcctgtgaggtatcggaccttcttaagagaccaggttagccctaaaaactttaaagtgaagatgatcatgaaaacttccgttctgctaagttgggagttcccggacaattacaactcccctactccttataagatccagtacaacgggttaacgcttgatgttgacggccgcaccaccaaaaaacttattacacaccttaaacctcataccttttataactttgtgctcacaaataggggctcttcgctcggaggcctgcagcagacagtgaccgcctggaccgcgttcaacctgctcaacggcaagccctcggttgctcccaaaccggacgccgatgggtttatcatggtgtacttgcctgacggtcaatcacctgtgccagtgcaaagctactttattgtgatggtgcccctgcgcaaatcaagaggcgggcagtttctgactcccttagggtcaccagaggatatggatcttgaagaattgatccaggacatctccagactgcaaaggcggagtcttaggcacagtagacagcttgaggttccacggccttacattgctgcaagattctccgtccttccaccgactttccaccccggtgaccagaaacagtacggcggattcgataacagggggttggagccaggtcacaggtatgtgcttttcgtcctggctgtacttcagaagtccgagcccacgttcgcagcttctccttttagcgatccatttcagctggacaatcctgaccctcagcccatcgtggacggggaagaggggcttatctgggtcatcggacctgttctggccgttgttttcatcatctgcattgtgatcgcaatcctattatacaaaaaaaaaccacactccaagcgcaaggactccgagccccgcaccaaatgtctgttaaacaatgcggatctggccccacaccatcctaaagacccggtggaaatgagacgtattaatttccagaccccggatagtgggttgaggtctccacttagagaacctggatttcactttgaaagtatgctctcacatcctcccatccctattgccgacatggccgagcatacagagcgattgaaggctaatgacagcctgaaactgagccaggagtatgaatccattgacccaggccagcaatttacctgggaacatagcaatctggaagttaacaagcccaagaaccgctacgccaatgttattgcctacgaccactcacgcgttattcttcagcccatcgaagggattatggggtctgactatataaatgcaaactacgtggacgggtatagatgtcaaaatgcatatatcgccacacagggccccctgcctgaaacctttggagatttttggcgcatggtctgggagcagcggagtgccaccatagtgatgatgactcgcctggaggaaaagtctcggatcaaatgtgatcagtactggccaaatcgcggcactgaaacttacgggttcatccaggttacactgctggacacaatagagctggctaccttctgcgttcggacattttccctgcataagaatggcagcagtgagaagcgtgaggttcgccagttccagttcaccgcctggcctgatcatggcgttcccgagtacccaacaccattcctggctttcctcaggcgggttaagacctgcaatcctccagacgctgggcctatcgttgtgcattgtagcgccggagtgggacgaacagggtgctttatagttattgacgctatgctagagcgtattaagccagagaagactgtcgacgtgtacggccatgtaacattgatgcgctcacaacgcaactacatggtgcagaccgaagatcagtatagttttatacacgaggctctcctcgaggccgtcggctgtgggaacaccgaggtgccagctaggagcctgtacgcctacatacagaaacttgcccaggtggagcctggagagcatgttacggggatggaactggagtttaaaagactggccaattccaaagcacacacttctcgcttcatctccgctaaccttccatgtaacaaatttaaaaataggctggtaaatattatgccctatgagtcaactagagtgtgcttgcagcccattcgcggcgtcgagggctctgactacatcaatgcctcctttatagacggttacaggcaacagaaggcttatatcgccacacagggcccattagctgaaactactgaggacttttggagaatgctctgggaaaacaatagcaccatcgtagtcatgctcacaaagctgagggagatggggcgcgagaagtgtcaccagtactggcctgcagaaaggagcgcccgttatcagtatttcgttgtggatcctatggcagaatataacatgccccagtacattttacgcgagttcaaagtaaccgacgctcgagacgggcagtcgcgcacagtgcgccagttccaatttactgattggccggagcagggagtgccaaaatcaggtgagggcttcattgacttcattggccaggtgcacaaaaccaaggagcagttcggacaggatggccctatctccgtacactgttctgccggcgtgggtcggacaggtgtattcatcacactaagtatcgtgcttgaaaggatgagatatgagggtgtggttgacatttttcagaccgtgaagatgctgagaacccagaggccagcaatggtacagacggaggacgaataccaattttgttaccaggccgctttggaatacctgggatctttcgatcattacgcaacctag

SEQ ID NO: 132699 - DNA, 5847 bp, Artificial Sequence
  derived and/or modified sequence
atggcccccacctggggccctggcatggtgtctgtggtgggccccatgggcctgctggtggtgctgctggtgggcggctgtgccgctgaggagcccccacgcttcatcaaggagcccaaggaccagattggagtgtctgggggcgtggccagctttgtgtgccaggccactggagaccccaagccccgggtgacctggaacaagaagggcaagaaggtgaacagccagagatttgagaccattgaatttgatgagagcgctggagctgtgctgcgcatccagcccctgcggaccccaagagatgaaaatgtgtatgaatgtgtggcccagaacagcgtgggggagatcaccgtgcacgccaagctgactgtgctgcgggaggaccagctgcccagcggcttccccaacatcgacatgggcccccagctgaaggtggtggagaggaccaggacagccaccatgctgtgtgccgccagcggcaacccagaccctgagatcacctggttcaaggacttcctgcctgtggaccccagcgccagcaatggccgcatcaagcagctgcggagtgaccaggccttcagccacctgcccaccggggccctgcagatcgagagcagcgaggagacagaccagggcaagtatgaatgtgtggccaccaacagcgctggggtgcgctacagcagccctgccaacctgtatgtgcgggtgtggaggacagtgagaagagtggccccccgcttcagcatcctgcccatgagccatgagatcatgcctggaggaaatgtgaacatcacctgtgtggccgtgggcagccccatgccctacgtgaagtggatgcagggcgctgaggacctgaccccagaagatgacatgcctgtgggcagaaatgtgctggagctgacagatgtgaaggacagcgccaactacacctgtgtggccatgagcagcctgggcgtcatcgaggccgtggcccagatcaccgtgaagagcctgcccaaggcccctggcacccccatggtgacagagaacacagccaccagcatcaccatcacctgggacagcggcaacccagaccctgtgtcctactacgtgattgagtacaagagcaagagccaggacggcccctaccagatcaaggaggacatcaccaccacccgctacagcattggaggcctgagccccaacagtgaatatgagatctgggtgtctgctgtgaacagcatcggccagggcccccccagcgagagcgtggtgaccaggactggagagcaggccccagccagcgcccccagaaatgtgcaggccaggatgctgagcgccaccaccatgattgtgcagtgggaggagcctgtggagcccaacggcctcatccggggctacagagtgtactacaccatggagcctgagcaccctgtgggcaactggcagaagcacaacgtggatgacagcctgctgaccaccgtgggcagcctgctggaggatgagacctacacagtgcgggtgctggccttcacctctgtgggagatggccccctgagtgaccccatccaggtgaagacccagcagggcgtgcccggccagcccatgaacctgcgggcagaggcccggtctgagaccagcatcaccctgtcctggagccccccccggcaggagagcatcatcaagtatgagctgctcttccgggagggggaccacggccgggaggtgggccgcacctttgaccccaccaccagctatgtggtggaggacctgaagcccaacacagaatatgccttccggctggccgcccggagcccccagggcctgggcgccttcacccctgtggtgcggcagaggaccctgcagagcaagcccagcgccccaccccaggatgtgaagtgtgtgtctgtgcgcagcacagccatcctggtgtcctggaggcctcctcctcctgagacccacaacggggccctggtgggctacagcgtgcgctaccggcccctgggcagcgaggaccctgagcccaaggaggtgaatggcatcccccccaccaccacccagatcctgctggaggccctggagaagtggacccagtaccgcatcaccaccgtggcccacacagaggtgggccctggccctgagagcagccctgtggtggtgaggacagatgaagatgtgcccagcgccccacccaggaaggtggaggccgaggccctgaatgccacagccatccgggtgctgtggaggagccctgcccctggccggcagcacggccagatccggggctaccaggtgcactacgtgaggatggagggcgctgaggcccggggccccccacgcatcaaggatgtgatgctggctgatgcccagtgggagacagatgacacagcagaatatgagatggtgatcaccaacctgcagcctgagacagcctacagcatcaccgtggccgcctacaccatgaagggagatggagcccggagcaagcccaaggtggtggtgaccaagggagctgtgctgggccggcccaccctgtctgtgcagcagaccccagagggcagcctgctggcccgctgggagcccccagctggaacagctgaggaccaggtgctgggctaccgcctgcagtttggaagagaggacagcacccccctggccaccctggagttccccccatctgaagatcgctacacagccagcggcgtgcacaagggggccacctacgtgttccggctggccgcccggagcagaggaggcctgggggaggaggccgctgaggtgctgagcatccctgaggacaccccccggggccacccccagatcctggaggccgctggaaatgccagcgctggcaccgtgctgctgcgctggctgccccctgtgcctgctgagagaaatggagccatcgtgaagtacacagtggccgtgcgggaggccggggccctgggccctgcccgggagacagagctgcctgctgctgctgagcctggagcagaaaatgccctgaccctgcagggcctgaagccagacacagcctatgacctgcaggtgcgggcccacacccggcggggccctggccccttcagcccccctgtgcgctaccgcaccttcctgcgggaccaggtgagccccaagaacttcaaggtgaagatgatcatgaagacctctgtgctgctgtcctgggagttcccagacaactacaacagccccaccccctacaagatccagtacaacggcctgaccctggatgtggatggccgcaccaccaagaagctgatcacccacctgaagccccacaccttctacaactttgtgctgaccaacagaggcagcagcctgggcggcctgcagcagacagtgacagcctggacagccttcaacctgctgaatggcaagcccagcgtggcccccaagccagatgctgatggcttcatcatggtgtacctgcctgatggccagagccctgtgcctgtgcagagctacttcatcgtgatggtgcccctgaggaagagccggggcggccagttcctgacccccctgggcagccctgaggacatggacctggaggagctgatccaggacatcagccggctgcagaggaggagcctgcggcacagccggcagctggaggtgccccggccctacatcgccgcccgcttctctgtgctgccccccaccttccaccctggggaccagaagcagtatggaggctttgacaacagaggcctggagcccggccaccgctacgtgctgtttgtgctggccgtgctgcagaagtctgagcccacctttgctgccagccccttcagtgaccccttccagctggacaacccagacccccagcccatcgtggatggagaggagggcctcatctgggtgattggccctgtgctggccgtggtgttcatcatctgcatcgtgattgccatcctgctgtacaagaacaagccagacagcaagaggaaggacagcgagcccaggaccaagtgcctgctgaacaatgctgacctggccccccaccaccccaaggaccctgtggagatgaggcgcatcaacttccagaccccagattctggcctgcggagccccctgcgggagcccggcttccactttgagagcatgctgagccacccccccatccccatcgctgacatggccgagcacacagagcggctgaaggccaatgacagcctgaagctgagccaggagtatgagagcattgaccccggccagcagttcacctgggagcacagcaacctggaggtgaacaagcccaagaacagatatgccaacgtcatcgcctatgaccacagcagggtcatcctgcagcccatcgagggcatcatgggcagtgactacatcaatgccaactacgtggatggctaccgctgccagaatgcctacatcgccacccagggccccctgcctgagaccttcggggacttctggaggatggtgtgggagcagaggtctgccaccatcgtgatgatgacccggctggaggagaagagccgcatcaagtgtgaccagtactggcccaacagaggaacagagacctacggcttcatccaggtgaccctgctggacaccatcgagctggccaccttctgtgtgaggaccttcagcctgcacaagaatggcagcagcgagaagcgggaggtgcggcagttccagttcaccgcctggccagaccacggcgtgcctgagtaccccacccccttcctggccttcctgcggcgggtgaagacctgcaaccccccagatgctggccccatcgtggtgcactgcagcgctggggtgggccgcacaggctgcttcatcgtgattgatgccatgctggagcgcatcaagccagagaagacagtggatgtgtatggccacgtgaccctgatgaggagccagaggaactacatggtgcagacagaggaccagtacagcttcatccacgaggccctgctggaggccgtgggctgcggcaacacagaggtgcctgcccggagcctgtatgcctacatccagaagctggcccaggtggagcctggagagcacgtgacaggcatggagctggagttcaagaggctggccaacagcaaggcccacaccagccgcttcatcagcgccaacctgccctgcaacaagttcaagaaccggctggtgaacatcatgccctatgagagcaccagggtgtgcctgcagcccatccggggcgtggagggcagtgactacatcaatgccagcttcattgatggctaccggcagcagaaggcctacatcgccacccagggccccctggccgagaccacagaggacttctggaggatgctgtgggagaacaacagcaccatcgtggtgatgctgaccaagctgcgggagatgggccgggagaagtgccaccagtactggccagctgagaggtctgcccgctaccagtactttgtggtggaccccatggccgagtacaacatgccccagtacatcctgcgggagttcaaggtgacagatgccagagatggccagagcaggacagtgcggcagttccagttcacagactggccagagcagggcgtgcccaagagcggggagggcttcatcgacttcatcggccaggtgcacaagaccaaggagcagtttggccaggacggccccatctctgtgcactgcagcgctggggtgggccgcactggagtcttcatcaccctgagcatcgtgctggagaggatgagatatgagggcgtggtggacatcttccagacagtgaagatgctgcggacccagaggcctgccatggtgcagacagaagatgagtaccagttctgctaccaggccgccctggagtacctgggcagctttgaccactacgccacctag

SEQ ID NO: 132700 - DNA, 5847 bp, Artificial Sequence
  derived and/or modified sequence
atggcccccacctggggccctggcatggtgtctgtggtgggccccatgggcctgctggtggtgctgctggtgggcggctgtgccgctgaggagcccccacgcttcatcaaggagcccaaggaccagattggagtgtctgggggcgtggccagctttgtgtgccaggccactggagaccccaagccccgggtgacctggaacaagaagggcaagaaggtgaacagccagagatttgagaccattgaatttgatgagagcgctggagctgtgctgcgcatccagcccctgcggaccccaagagatgaaaatgtgtatgaatgtgtggcccagaacagcgtgggggagatcaccgtgcacgccaagctgactgtgctgcgggaggaccagctgcccagcggcttccccaacatcgacatgggcccccagctgaaggtggtggagaggaccaggacagccaccatgctgtgtgccgccagcggcaacccagaccctgagatcacctggttcaaggacttcctgcctgtggaccccagcgccagcaatggccgcatcaagcagctgcggtctgagacctttgagagcacccccatccggggggccctgcagatcgagagcagcgaggagacagaccagggcaagtatgaatgtgtggccaccaacagcgctggggtgcgctacagcagccctgccaacctgtatgtgcgggagctgcgggaggtgagaagagtggccccccgcttcagcatcctgcccatgagccatgagatcatgcctggaggaaatgtgaacatcacctgtgtggccgtgggcagccccatgccctacgtgaagtggatgcagggcgctgaggacctgaccccagaagatgacatgcctgtgggcagaaatgtgctggagctgacagatgtgaaggacagcgccaactacacctgtgtggccatgagcagcctgggcgtcatcgaggccgtggcccagatcaccgtgaagagcctgcccaaggcccctggcacccccatggtgacagagaacacagccaccagcatcaccatcacctgggacagcggcaacccagaccctgtgtcctactacgtgattgagtacaagagcaagagccaggacggcccctaccagatcaaggaggacatcaccaccacccgctacagcattggaggcctgagccccaacagtgaatatgagatctgggtgtctgctgtgaacagcatcggccagggcccccccagcgagagcgtggtgaccaggactggagagcaggccccagccagcgcccccagaaatgtgcaggccaggatgctgagcgccaccaccatgattgtgcagtgggaggagcctgtggagcccaacggcctcatccggggctacagagtgtactacaccatggagcctgagcaccctgtgggcaactggcagaagcacaacgtggatgacagcctgctgaccaccgtgggcagcctgctggaggatgagacctacacagtgcgggtgctggccttcacctctgtgggagatggccccctgagtgaccccatccaggtgaagacccagcagggcgtgcccggccagcccatgaacctgcgggcagaggcccggtctgagaccagcatcaccctgtcctggagccccccccggcaggagagcatcatcaagtatgagctgctcttccgggagggggaccacggccgggaggtgggccgcacctttgaccccaccaccagctatgtggtggaggacctgaagcccaacacagaatatgccttccggctggccgcccggagcccccagggcctgggcgccttcacccctgtggtgcggcagaggaccctgcagagcaagcccagcgccccaccccaggatgtgaagtgtgtgtctgtgcgcagcacagccatcctggtgtcctggaggcctcctcctcctgagacccacaacggggccctggtgggctacagcgtgcgctaccggcccctgggcagcgaggaccctgagcccaaggaggtgaatggcatcccccccaccaccacccagatcctgctggaggccctggagaagtggacccagtaccgcatcaccaccgtggcccacacagaggtgggccctggccctgagagcagccctgtggtggtgaggacagatgaagatgtgcccagcgccccacccaggaaggtggaggccgaggccctgaatgccacagccatccgggtgctgtggaggagccctgcccctggccggcagcacggccagatccggggctaccaggtgcactacgtgaggatggagggcgctgaggcccggggccccccacgcatcaaggatgtgatgctggctgatgcccagtgggagacagatgacacagcagaatatgagatggtgatcaccaacctgcagcctgagacagcctacagcatcaccgtggccgcctacaccatgaagggagatggagcccggagcaagcccaaggtggtggtgaccaagggagctgtgctgggccggcccaccctgtctgtgcagcagaccccagagggcagcctgctggcccgctgggagcccccagctggaacagctgaggaccaggtgctgggctaccgcctgcagtttggaagagaggacagcacccccctggccaccctggagttccccccatctgaagatcgctacacagccagcggcgtgcacaagggggccacctacgtgttccggctggccgcccggagcagaggaggcctgggggaggaggccgctgaggtgctgagcatccctgaggacaccccccggggccacccccagatcctggaggccgctggaaatgccagcgctggcaccgtgctgctgcgctggctgccccctgtgcctgctgagagaaatggagccatcgtgaagtacacagtggccgtgcgggaggccggggccctgggccctgcccgggagacagagctgcctgctgctgctgagcctggagcagaaaatgccctgaccctgcagggcctgaagccagacacagcctatgacctgcaggtgcgggcccacacccggcggggccctggccccttcagcccccctgtgcgctaccgcaccttcctgcgggaccaggtgagccccaagaacttcaaggtgaagatgatcatgaagacctctgtgctgctgtcctgggagttcccagacaactacaacagccccaccccctacaagatccagtacaacggcctgaccctggatgtggatggccgcaccaccaagaagctgatcacccacctgaagccccacaccttctacaactttgtgctgaccaacagaggcagcagcctgggcggcctgcagcagacagtgacagcctggacagccttcaacctgctgaatggcaagcccagcgtggcccccaagccagatgctgatggcttcatcatggtgtacctgcctgatggccagagccctgtgcctgtgcagagctacttcatcgtgatggtgcccctgaggaagagccggggcggccagttcctgacccccctgggcagccctgaggacatggacctggaggagctgatccaggacatcagccggctgcagaggaggagcctgcggcacagccggcagctggaggtgccccggccctacatcgccgcccgcttctctgtgctgccccccaccttccaccctggggaccagaagcagtatggaggctttgacaacagaggcctggagcccggccaccgctacgtgctgtttgtgctggccgtgctgcagaagtctgagcccacctttgctgccagccccttcagtgaccccttccagctggacaacccagacccccagcccatcgtggatggagaggagggcctcatctgggtgattggccctgtgctggccgtggtgttcatcatctgcatcgtgattgccatcctgctgtacaagaacaagccagacagcaagaggaaggacagcgagcccaggaccaagtgcctgctgaacaatgctgacctggccccccaccaccccaaggaccctgtggagatgaggcgcatcaacttccagaccccagattctggcctgcggagccccctgcgggagcccggcttccactttgagagcatgctgagccacccccccatccccatcgctgacatggccgagcacacagagcggctgaaggccaatgacagcctgaagctgagccaggagtatgagagcattgaccccggccagcagttcacctgggagcacagcaacctggaggtgaacaagcccaagaacagatatgccaacgtcatcgcctatgaccacagcagggtcatcctgcagcccatcgagggcatcatgggcagtgactacatcaatgccaactacgtggatggctaccgctgccagaatgcctacatcgccacccagggccccctgcctgagaccttcggggacttctggaggatggtgtgggagcagaggtctgccaccatcgtgatgatgacccggctggaggagaagagccgcatcaagtgtgaccagtactggcccaacagaggaacagagacctacggcttcatccaggtgaccctgctggacaccatcgagctggccaccttctgtgtgaggaccttcagcctgcacaagaatggcagcagcgagaagcgggaggtgcggcagttccagttcaccgcctggccagaccacggcgtgcctgagtaccccacccccttcctggccttcctgcggcgggtgaagacctgcaaccccccagatgctggccccatcgtggtgcactgcagcgctggggtgggccgcacaggctgcttcatcgtgattgatgccatgctggagcgcatcaagccagagaagacagtggatgtgtatggccacgtgaccctgatgaggagccagaggaactacatggtgcagacagaggaccagtacagcttcatccacgaggccctgctggaggccgtgggctgcggcaacacagaggtgcctgcccggagcctgtatgcctacatccagaagctggcccaggtggagcctggagagcacgtgacaggcatggagctggagttcaagaggctggccaacagcaaggcccacaccagccgcttcatcagcgccaacctgccctgcaacaagttcaagaaccggctggtgaacatcatgccctatgagagcaccagggtgtgcctgcagcccatccggggcgtggagggcagtgactacatcaatgccagcttcattgatggctaccggcagcagaaggcctacatcgccacccagggccccctggccgagaccacagaggacttctggaggatgctgtgggagaacaacagcaccatcgtggtgatgctgaccaagctgcgggagatgggccgggagaagtgccaccagtactggccagctgagaggtctgcccgctaccagtactttgtggtggaccccatggccgagtacaacatgccccagtacatcctgcgggagttcaaggtgacagatgccagagatggccagagcaggacagtgcggcagttccagttcacagactggccagagcagggcgtgcccaagagcggggagggcttcatcgacttcatcggccaggtgcacaagaccaaggagcagtttggccaggacggccccatctctgtgcactgcagcgctggggtgggccgcactggagtcttcatcaccctgagcatcgtgctggagaggatgagatatgagggcgtggtggacatcttccagacagtgaagatgctgcggacccagaggcctgccatggtgcagacagaagatgagtaccagttctgctaccaggccgccctggagtacctgggcagctttgaccactacgccacctag

SEQ ID NO: 132701 - DNA, 5850 bp, Artificial Sequence
  derived and/or modified sequence
atggcccccacctggggccctggcatggtgtctgtggtgggccccatgggcctgctggtggtgctgctggtgggcggctgtgccgctgaggagcccccacgcttcatcaaggagcccaaggaccagattggagtgtctgggggcgtggccagctttgtgtgccaggccactggagaccccaagccccgggtgacctggaacaagaagggcaagaaggtgaacagccagagatttgagaccattgaatttgatgagagcgctggagctgtgctgcgcatccagcccctgcggaccccaagagatgaaaatgtgtatgaatgtgtggcccagaacagcgtgggggagatcaccgtgcacgccaagctgactgtgctgcgggaggaccagctgcccagcggcttccccaacatcgacatgggcccccagctgaaggtggtggagaggaccaggacagccaccatgctgtgtgccgccagcggcaacccagaccctgagatcacctggttcaaggacttcctgcctgtggaccccagcgccagcaatggccgcatcaagcagctgcggcgctctgagacctttgagagcacccccatccggggggccctgcagatcgagagcagcgaggagacagaccagggcaagtatgaatgtgtggccaccaacagcgctggggtgcgctacagcagccctgccaacctgtatgtgcgggagctgcgggaggtgcggcgggtggccccccgcttcagcatcctgcccatgagccatgagatcatgcctggaggaaatgtgaacatcacctgtgtggccgtgggcagccccatgccctacgtgaagtggatgcagggcgctgaggacctgaccccagaagatgacatgcctgtgggcagaaatgtgctggagctgacagatgtgaaggacagcgccaactacacctgtgtggccatgagcagcctgggcgtgattgaagctgtggcccagatcaccgtgaagagcctgcccaaggcccctggcacccccatggtgacagaaaatacagccaccagcatcaccatcacctgggacagcggcaacccagaccctgtgtcctactacgtgattgagtacaagagcaagagccaggacggcccctaccagatcaaggaggacatcaccaccacccgctacagcatcggcggcctgagccccaacagtgaatatgagatctgggtgtctgctgtgaacagcatcggccagggccccccatctgagagcgtggtgaccaggactggagagcaggccccagccagcgcccccagaaatgtgcaggccaggatgctgagcgccaccaccatgattgtgcagtgggaggagcctgtggagcccaacggcctcatccggggctacagagtgtactacaccatggagcctgagcaccctgtgggcaactggcagaagcacaacgtggatgacagcctgctgaccaccgtgggcagcctgctggaggatgagacctacacagtgcgggtgctggccttcacctctgtgggagatggccccctgagtgaccccatccaggtgaagacccagcagggcgtgcccggccagcccatgaacctgcgggcagaggcccggtctgagaccagcatcaccctgtcctggagccccccccggcaggagagcatcatcaagtatgagctgctcttccgggagggggaccacggccgggaggtgggccgcacctttgaccccaccaccagctatgtggtggaggacctgaagcccaacacagaatatgccttccggctggccgcccggagcccccagggcctgggcgccttcacccctgtggtgcggcagaggaccctgcagagcaagcccagcgccccaccccaggatgtgaagtgtgtgtctgtgcgcagcacagccatcctggtgtcctggaggcctcctcctcctgagacccacaatggagccctggtgggctacagcgtgcgctaccggcccctgggctctgaagatcctgagcccaaggaggtgaatggcatcccccccaccaccacccagatcctgctggaggccctggagaagtggacccagtaccgcatcaccaccgtggcccacacagaggtgggccctggccctgagagcagccctgtggtggtgaggacagatgaagatgtgcccagcgccccacccaggaaggtggaggccgaggccctgaatgccacagccatccgggtgctgtggaggagccctgcccctggccggcagcacggccagatccggggctaccaggtgcactacgtgaggatggagggcgctgaggcccggggccccccacgcatcaaggatgtgatgctggctgatgcccagtgggagacagatgacacagcagaatatgagatggtgatcaccaacctgcagcctgagacagcctacagcatcaccgtggccgcctacaccatgaagggagatggagcccggagcaagcccaaggtggtggtgaccaagggagctgtgctgggccggcccaccctgtctgtgcagcagaccccagagggcagcctgctggcccgctgggagcccccagctggaacagctgaggaccaggtgctgggctaccgcctgcagtttggccgggaggacagcacccccctggccaccctggagttccccccatctgaggaccgctacacagccagcggcgtgcacaagggggccacctacgtgttccggctggccgcccggagccggggcggcctgggggaggaggccgctgaggtgctgagcatccctgaggacaccccccggggccacccccagatcctggaggccgctggaaatgccagcgctggcaccgtgctgctgcgctggctgccccctgtgcctgctgagagaaatggagccatcgtgaagtacacagtggccgtgcgggaggccggggccctgggccctgcccgggagacagagctgcctgctgctgctgagcccggggctgaaaatgccctgaccctgcagggcctgaagccagacacagcctatgacctgcaggtgcgggcccacacccggcggggccctggccccttcagcccccctgtgcgctaccgcaccttcctgcgggaccaggtgagccccaagaacttcaaggtgaagatgatcatgaagacctctgtgctgctgtcctgggagttcccagacaactacaacagccccaccccctacaagatccagtacaacggcctgaccctggatgtggatggccgcaccaccaagaagctgatcacccacctgaagccccacaccttctacaactttgtgctgaccaacagaggcagcagcctgggcggcctgcagcagacagtgacagcctggacagccttcaacctgctgaatggcaagcccagcgtggcccccaagccagatgctgatggcttcatcatggtgtacctgcctgatggccagagccctgtgcctgtgcagagctacttcatcgtgatggtgcccctgaggaagagcagaggaggccagttcctgacccccctgggcagccctgaggacatggacctggaggagctgatccaggacatcagccggctgcagaggaggagcctgcggcacagccggcagctggaggtgccccggccctacatcgccgcccgcttctctgtgctgccccccaccttccaccctggggaccagaagcagtatggaggctttgacaacagaggcctggagcccggccacagatatgtgctgtttgtgctggccgtgctgcagaagtctgagcccacctttgctgccagccccttcagtgaccccttccagctggacaacccagacccccagcccatcgtggatggagaggagggcctcatctgggtgattggccctgtgctggccgtggtgttcatcatctgcatcgtcatcgccatcctgctgtacaagaagaagccccacagcaagaggaaggacagcgagcccaggaccaagtgcctgctgaacaatgctgacctggccccccaccaccccaaggaccctgtggagatgaggcgcatcaacttccagaccccagacagcggcctgcggagccccctgcgggagcccggcttccactttgagagcatgctgagccacccccccatccccatcgctgacatggccgagcacacagagcggctgaaggccaatgacagcctgaagctgagccaggagtatgagagcattgatcctggccagcagttcacctgggagcacagcaacctggaggtgaacaagcccaagaacagatatgccaacgtgattgcctatgaccacagcagggtcatcctgcagcccatcgagggcatcatgggcagtgactacatcaatgccaactacgtggatggctaccgctgccagaatgcctacatcgccacccagggccccctgcctgagacctttggagacttctggaggatggtgtgggagcagaggtctgccaccatcgtgatgatgacccggctggaggagaagagccgcatcaagtgtgaccagtactggcccaacagaggaacagagacctacggcttcatccaggtgaccctgctggacaccatcgagctggccaccttctgtgtgaggaccttcagcctgcacaagaatggcagcagcgagaagcgggaggtgcggcagttccagttcaccgcctggccagaccatggagtgcctgagtaccccacccccttcctggccttcctgcggcgggtgaagacctgcaaccccccagatgctggccccatcgtggtgcactgcagcgctggggtgggccgcacaggctgcttcatcgtgattgatgccatgctggagcgcatcaagccagagaagacagtggatgtgtatggccacgtgaccctgatgaggagccagaggaactacatggtgcagacagaggaccagtacagcttcatccacgaggccctgctggaggccgtgggctgcggcaacacagaggtgcctgcccggagcctgtatgcctacatccagaagctggcccaggtggagcccggggagcacgtgacaggcatggagctggagttcaagaggctggccaacagcaaggcccacaccagccgcttcatcagcgccaacctgccctgcaacaagttcaagaaccggctggtgaacatcatgccctatgagagcaccagggtgtgcctgcagcccatccggggcgtggagggcagtgactacatcaatgccagcttcattgatggctaccggcagcagaaggcctacatcgccacccagggccccctggccgagaccacagaggacttctggaggatgctgtgggagaacaacagcaccatcgtggtgatgctgaccaagctgcgggagatgggccgggagaagtgccaccagtactggccagctgagaggtctgcccgctaccagtactttgtggtggaccccatggccgagtacaacatgccccagtacatcctgcgggagttcaaggtgacagatgccagagatggccagagcaggacagtgcggcagttccagttcacagactggccagagcagggcgtgcccaagtctggagagggcttcatcgacttcatcggccaggtgcacaagaccaaggagcagtttggccaggacggccccatctctgtgcactgcagcgctggggtgggccgcactggagtcttcatcaccctgagcatcgtgctggagaggatgagatatgaaggagtggtggacatcttccagacagtgaagatgctgcggacccagaggcctgccatggtgcagacagaagatgagtaccagttctgctaccaggccgccctggagtacctgggcagctttgaccactacgccacctag

SEQ ID NO: 132702 - DNA, 5847 bp, Artificial Sequence
  derived and/or modified sequence
atggcccccacctggggccccggcatggtgagcgtggtgggccccatgggcctgttggtggtacttctagtggggggctgcgcagctgaggagccccctaggtttattaaggaacccaaggaccagataggagtgtcaggcggcgtggcttcttttgtgtgtcaagccacgggcgacccaaaacctcgcgtgacctggaacaagaaaggcaagaaggttaactcacaacgattcgaaacgattgagtttgacgagtcagctggcgccgtgctccgtattcagcctttgaggactccacgggacgagaatgtctacgagtgtgtggctcaaaacagtgtcggagagatcaccgtgcacgctaagcttacagtcctgagagaggaccagctgccatccggattcccaaacatcgacatgggcccacagctgaaggtggtcgaaagaaccaggacagccactatgctgtgcgctgcttcaggaaaccctgaccctgagatcacctggtttaaggatttcctgcctgtggatccttctgcctccaatggaagaattaagcagcttcgctccgatcaggctttctctcatcttccgaccggagcactccagattgaatcttccgaagaaactgaccaaggcaaatacgagtgtgttgccactaacagcgcgggggtccgatactctagtccagccaatctctatgttcgtgtgtggcggactgtgcggagagtcgcgcctcgcttttccatcctacctatgagccacgagattatgccagggggtaacgtgaacattacatgcgtcgcggtcgggagcccaatgccatacgtgaaatggatgcagggcgctgaggacctgacccctgaggacgacatgcctgtcggaaggaatgttttagaacttaccgacgtcaaggattccgccaactacacctgtgtggccatgtcatcactaggagttattgaggccgttgcccagatcactgtcaaaagcctgcccaaggccccaggcacacccatggtaacagagaatacagccacgtctattacaatcacttgggattctggtaacccagacccagtgagctattacgtcattgaatataagtccaaatcccaggacggtccctatcaaatcaaagaagacattactaccacccgctacagcattggaggcctgtctcctaattctgagtatgagatttgggtgagcgctgtgaactcaatcggtcagggccccccgtcagagtcggtagtaactcgcaccggcgagcaggcgcccgccagtgcaccccgaaatgtacaagccagaatgctaagtgctacgaccatgatagtccaatgggaagaacccgtggaaccaaatgggctgatccgggggtatagagtctattataccatggagccagaacacccagtcgggaactggcaaaagcacaatgtagacgacagcctacttactaccgtcggctctctgcttgaggacgagacttacaccgtcagagtgctggctttcacgtccgtgggggatggccctctgtcagatcccatccaagttaaaacacagcagggggtgcccgggcagccaatgaatctgcgtgccgaggcaagatccgaaacctcaattactctgtcatggtccccccctcggcaggaatctatcatcaagtacgaactgctattccgtgagggagatcacgggcgagaggtggggcgcacgttcgatcctactaccagctacgtggttgaggacctgaaaccgaatactgaatatgcatttcgtctggcagctcgctccccacaagggttgggagctttcactcctgtagtgcgacagaggacattgcaaagcaaaccttctgctcctcctcaggacgttaagtgtgtctcagtgagatccacagccattcttgtgtcttggcgaccaccgcctccagaaacacataacggcgccttggtcggctattccgttagatataggcccctcggctctgaggacccagagccaaaagaggtaaatggaattccaccaaccaccacccagattctcctggaagcccttgaaaagtggacacagtataggataactaccgtggcacacacggaagtgggtcccggacctgagagtagtccagtcgtggtaagaacggacgaggatgtgccctctgcccccccccggaaggtggaagccgaggcactcaacgctactgcaatccgagtgctgtggagatctccggcaccggggcgtcaacatggccagattcggggatatcaagtgcactatgtaaggatggaaggggctgaagctagaggtcccccccgtattaaggatgttatgttagctgacgcgcagtgggagacggatgacactgccgagtacgagatggttatcaccaacttgcagcccgaaacagcctacagtattactgtggcagcctacacaatgaagggcgacggcgcccgcagcaaacctaaggttgttgtgactaaaggcgctgttctcggccggccaacgttatcagtccagcagacgccggagggaagcttgctggctcgctgggagccgcccgcaggcacagcagaggatcaggtcctgggatacaggctccagtttggtcgagaggacagtacccctctagctacactggaatttccacctagtgaagatcgttacacagcttccggtgttcataagggagccacgtatgttttccggctagctgcgagatcccgggggggcctgggagaagaggctgccgaggtgctatctattcccgaggataccccacgggggcatccacagattctggaggctgcaggcaacgccagcgccggaaccgtgctgctaagatggctcccacccgtcccggctgaacggaatggcgccatcgttaagtacaccgtggcagtcagggaggctggggcccttggtccagctcgtgagaccgaactgccagctgcggccgagcccggagccgagaatgccctcacgctgcagggactcaagccggataccgcttacgatctacaggtaagagctcacacgaggcgcggaccaggaccattttctcctccggtgagatacagaacctttctacgtgatcaggtgagccccaaaaattttaaggttaagatgataatgaagacctctgtcttgcttagttgggaatttccggacaattacaactcacccaccccatacaagatccaatataacggactgacactggacgtggacggcagaaccacaaagaaactgattacccatcttaagccacacacattttacaactttgtactgactaaccgagggagctctctgggcgggctgcaacagacagtcaccgcgtggaccgccttcaacttgctgaacggaaagcccagtgtcgcacccaaaccagacgccgatggatttattatggtctatctccccgatggacagtcacctgtgcctgtgcagagctacttcatcgtgatggtgccactccggaagagccgcggtggacagttcttgacccctctgggtagccccgaagacatggacctcgaggaattgatacaggatatttccagactgcagcgccgatcactgagacatagcaggcagctggaagttcctcgcccttatattgcggctcgctttagcgtattgccaccaaccttccatcccggcgaccagaagcagtatggcggcttcgacaatcgtggcctggagccgggccaccgatatgtgcttttcgtgttggccgtactccaaaaaagtgaacccacattcgccgcctctcccttcagcgacccctttcaactcgacaacccggacccccagcctattgtagacggggaagagggtttaatctgggtgataggacctgtcctggctgtcgtgtttattatttgtatcgttatcgccattctgttgtataagaacaaaccagatagtaagcgaaaggatagcgagccaagaactaagtgcttattgaacaacgccgatctggccccccatcaccccaaggaccctgtggagatgagacgcatcaattttcagaccccagacagcgggctgcgctctccactacgcgaacccggtttccattttgagtcaatgctgtctcacccacctatccccatagcagatatggccgagcatacagaacgcctgaaggctaatgactcactcaaactgtcacaggagtacgagtctatagatcctggtcagcagttcacctgggagcattcaaatcttgaggtgaacaagcccaagaatcgctacgccaacgttatagcttatgatcactccagagttattttgcagccaatcgagggtatcatgggctccgattacattaatgcgaactatgtggacggatatcgatgccaaaatgcctacatcgcgacccaaggacctttaccagagacattcggtgatttctggcggatggtgtgggaacagagatctgcaaccatagtgatgatgacgcgcctggaggaaaaaagccgaataaagtgcgatcagtactggcccaatcgcgggaccgaaacatatggattcattcaggttacacttctcgatacaattgagctggccaccttctgcgttcgaaccttctcacttcataaaaacggctccagcgaaaaacgggaagttcgtcagtttcagtttacggcatggcccgaccacggtgtgccggagtatccaaccccattcctggcttttctgaggcgggtcaaaacttgcaatccacctgacgctgggcctatcgtggtgcactgttcagcaggagtcggccgaactggctgcttcatcgtcattgacgcgatgttggagcgcatcaagcctgagaaaacagtcgacgtctacgggcacgtcactctgatgcgcagccagcgaaactacatggtgcaaaccgaggatcagtattcctttatccacgaggccttactcgaggcggttggatgtgggaacacggaggtaccagcgcgaagtctgtacgcgtacattcagaaactggctcaggttgaaccaggggaacatgtgacaggaatggagctcgaatttaagcgactcgctaattctaaggcccataccagtcgtttcatcagcgcaaatctgccttgcaacaagtttaaaaatcgcctggtgaacattatgccctatgaaagcactcgggtctgcctccagccaatccgcggagtggagggatccgactacattaatgcaagcttcatcgacgggtacaggcagcagaaggcatacattgcaacgcaaggccctttggccgaaacaaccgaagatttctggagaatgctttgggaaaataactccaccattgtggtgatgcttacaaaactgcgcgaaatgggtagagaaaaatgtcaccagtactggccggcagagcgcagtgcaagatatcagtacttcgttgttgatcctatggctgaatacaacatgcctcagtacatattgcgtgaattcaaggttacggacgctagagatggtcagagtcgcactgtccggcagttccagttcactgattggcctgagcaaggcgtgcctaaatccggagagggctttattgactttatcggtcaggtgcacaagaccaaggagcagttcgggcaggatggccctattagcgtgcattgtagcgccggggtggggcgtacaggtgttttcatcaccctgtctattgtgctggagagaatgcggtatgagggagtggtggacattttccagaccgtgaaaatgttgcgtacccagcgccctgcgatggttcagacggaggatgaataccagttctgctaccaggctgccctcgagtatctgggaagtttcgaccattatgccacatag

SEQ ID NO: 132703 - DNA, 5847 bp, Artificial Sequence
  derived and/or modified sequence
atggcccccacctggggccccggcatggtgagcgtggtgggccccatggggcttctggttgtgttgctcgtcggcggctgtgccgctgaagagccgccccgctttatcaaagagcccaaggatcagatcggagtgagcgggggtgtggcgtctttcgtttgtcaggccactggggacccaaagccaagagttacatggaacaaaaagggtaagaaggtgaactctcagcgcttcgagacgatcgaattcgatgagagcgccggtgcagtgctgagaattcagccccttagaacgcccagagatgagaatgtttatgaatgcgtggcccagaacagtgttggcgaaattaccgtgcatgcaaaactcactgtgctgagggaggatcagctgccatctggattcccaaacattgacatggggccacagctgaaggtcgtagaacggaccagaaccgccactatgctttgcgcagcaagcggcaatccagaccccgagataacatggtttaaagatttcttacctgtggatcccagtgccagtaacggccgaatcaaacagctgcgatcagaaacgttcgagtcaacaccaattcggggcgcactgcaaatagagagctctgaagagacagatcaggggaagtacgaatgcgtggccaccaactccgccggcgtgaggtatagtagtcccgccaacctatatgtacgggagctccgagaggtaagaagggttgccccgaggtttagtatccttcctatgagtcatgagatcatgcctgggggcaatgttaatataacttgcgtggcagtgggcagtcctatgccatatgtcaaatggatgcaaggggctgaggacctgacgcccgaggacgacatgcctgtcggccgaaacgtgttagaactgactgacgttaaagattctgctaactatacttgcgttgccatgtctagtctcggggtaatcgaggcagtggcacagattacagtgaagtcactgcccaaagcaccggggacgcccatggtgacagagaacacagcaacgtccattaccattacatgggactccggcaacccggatcctgtgtcatactacgtaatcgagtacaagagtaagagtcaggacgggccctaccagatcaaagaggacattactaccactagatactcaatcggggggctctcccccaactcagaatacgagatttgggttagcgcagtgaactccattggccagggtccgccatctgaatctgtggtcactaggacaggcgagcaggccccagcatccgcacctaggaacgtccaagcacggatgctctcagcaaccaccatgatcgtgcaatgggaggaacccgtcgaacccaatgggttaatcagaggataccgcgtctattatacaatggaaccagaacatcctgtcggcaactggcagaaacacaacgtggatgacagtttgctgactaccgtgggatccttgctcgaggatgaaacctatactgttagggttttggcttttacgagtgtcggcgatggccccctgagcgatcccatacaggtcaaaacccaacagggcgtgccagggcaaccaatgaacttgcgggccgaggcccgcagcgagacgtccatcactctctcttggtcaccacctcgacaggagtcaattattaaatacgagctactgtttagggaaggagaccacggcagggaggtgggtcgcaccttcgaccctaccacgtcttatgtggtggaggatctgaagccgaatacagaatacgccttcaggctggcagctagatctccgcagggcctcggtgcttttacccccgtggttcgccaaagaactttgcagtctaagccatccgccccgcctcaggacgtgaaatgcgtgagtgtgaggtccacagcaatcctagtgtcctggcgccctcctccacccgaaacccataacggcgcacttgtgggctactcagtccgctaccgccccttgggaagcgaggatcctgaaccgaaggaagtgaacggtattccaccaaccacgacccagatacttcttgaggctctggagaagtggacgcagtataggataacaactgtcgcacatactgaggtgggtccaggacctgagtcctcacccgtagttgtacgcacagatgaagacgtgccctccgctccccctaggaaggtggaggccgaagctcttaacgccaccgccatacgggtgctgtggaggtcccctgccccagggcgccagcacgggcagataagggggtaccaggtccactacgtgcgaatggaaggtgccgaggcccgcggtccacctcggatcaaggacgtgatgctcgcagatgcccagtgggagactgacgatacggcagaatacgagatggttatcaccaatctacagccagaaactgcatattccatcactgttgctgcctataccatgaaaggggatggggccaggtccaagccgaaggtggttgtgaccaaaggagccgtgctgggacggcccacactgagtgtgcagcagacgcctgaagggtccctgctcgcaagatgggagcctccagctggtactgctgaggatcaagtgcttggctaccggctccagttcggccgggaagactctacgcccctcgcgacactagagtttcctccctcggaggacaggtatactgcttcaggagtgcacaagggggcaacatatgtctttaggctcgccgctcgcagccgtggcggcttgggagaggaggctgctgaggtactttcaatccccgaagacactccaagaggtcacccacagattctcgaagccgctggcaatgcctcagcgggtactgtgcttttgcggtggttgccaccggttcccgccgaaaggaacggagcaattgttaagtatactgtcgctgtgagagaagcgggtgcgctgggtccggcccgggaaaccgaattacctgccgcagccgagccgggtgccgaaaacgcattaacactccaaggacttaagcctgacactgcgtacgatctccaggtgagagcccatacccgcagaggccccggccctttctcacctcctgtgagatatagaacattcctgcgagaccaggtcagtcccaagaacttcaaggtgaaaatgataatgaaaacgagtgttctcctctcctgggagttccctgacaattataatagcccgaccccatataaaattcagtacaatggactgacccttgacgtggacggccgcaccaccaagaaattgattacccacttgaaaccccataccttctataacttcgtcttgaccaaccgcggcagttctctaggcggactccagcagactgtcaccgcctggacagcatttaaccttctcaacggaaaaccaagcgtagcaccaaaaccagacgccgacgggtttatcatggtttacctgcccgatggacaatctccagttccagtgcagagctactttatcgtgatggtcccgttacgaaagagcagaggaggacaattcctgaccccactcggctcgcctgaagacatggatttggaagaactgattcaggatatttctcgtctgcagaggcgcagtcttcgtcacagccgtcagcttgaggtgcctcgcccctacattgccgctcggttttccgtgctgccacccacattccaccccggcgatcaaaagcaatacggggggttcgacaacaggggcctagaacccggtcacagatacgtgctctttgtactcgccgttttacagaaatccgagccaacattcgccgcaagcccattttctgatccattccagctagacaatcctgaccctcagcctatcgtagatggcgaggagggcctaatctgggttatcggaccagtgttggcagtggtgttcattatctgcatcgtcattgctatactgctctataaaaataaacctgattctaaacgcaaagactctgagccaagaacaaagtgcttactcaacaacgctgacctagctccccaccatcctaaagacccggtcgaaatgagacggattaatttccagactccagactctggactgcggagccctctgcgtgagcctggctttcactttgagagcatgctatcacatccgcctataccgatcgccgatatggctgagcataccgaaaggcttaaggccaatgactccctaaaactctctcaggagtatgaatctatcgaccctggacagcagtttacttgggagcactcgaacttagaagttaataagcctaagaacaggtacgcaaacgttattgcctacgatcacagccgggtgattctccagcctatcgaggggatcatggggtccgattacatcaacgcaaattacgttgacgggtacaggtgtcagaatgcctacatcgccactcagggacccctgcctgaaacattcggtgacttctggcgaatggtgtgggagcagaggagcgctaccatagtgatgatgacgcgactggaggaaaaaagtcggatcaagtgcgaccagtattggcctaacagaggaaccgagacttacggattcatccaagtcaccctactggatacgattgagctggccaccttttgtgttcgcacattctctctgcacaaaaatggctccagtgaaaagcgcgaagttagacagttccagtttaccgcctggccagatcatggtgtgcccgaatacccaaccccgtttctggctttcttgaggagagtgaagacatgcaacccacctgatgcggggcccatcgtggttcactgttccgcaggcgtgggcagaactggctgtttcatcgttatagacgctatgttggaaagaatcaaacctgaaaagacggtggatgtgtatggccacgtaacgcttatgagatctcagaggaactatatggtacagaccgaggatcagtacagtttcattcacgaagctctattggaagcagtcggctgcggcaatacagaagtgcccgccagatctctctatgcatacatacaaaagcttgcacaggtggagccaggcgaacatgtgactggcatggagttagagttcaagcgcttggcgaactccaaagctcacacgagcaggtttatttcagccaacctgccttgcaacaaattcaagaaccgcctggtaaacattatgccatatgaatccaccagagtatgcctgcagcccatacgcggagtagagggctcagactatatcaacgctagctttatcgacggataccggcagcagaaagcctatatagccacgcagggtccattagcagagaccaccgaggatttttggagaatgctctgggagaacaatagtaccatcgtggtgatgcttactaaacttcgggagatgggtcgcgaaaagtgccatcaatattggcccgccgaacgctcagcaagataccaatatttcgtggtcgacccaatggcagagtacaacatgccacaatacatcttaagagagttcaaggttactgatgcccgtgacgggcaaagcagaacagtccggcagttccagtttacagactggcctgaacagggtgtgccaaagtcaggagagggctttatcgacttcattggacaggtgcataaaacaaaggaacagtttggccaagacggtcccatttctgttcattgctcagccggagttggacgtacgggcgtcttcataaccctatccatagtgcttgagcgcatgagatacgagggtgtggtagacattttccagactgttaaaatgctgcgcacccagcgccccgccatggtgcagactgaggacgagtaccaattctgttaccaggctgccctggagtacttaggctcatttgaccactatgctacctag

SEQ ID NO: 132704 - DNA, 5850 bp, Artificial Sequence
  derived and/or modified sequence
atggcccccacctggggccccggcatggtgagcgtggtgggccccatgggactgctggttgtcctcctagttggcggctgtgcggccgaggaaccgcccagatttatcaaagaacccaaagatcaaattggagtgagtggtggcgtggcgtcctttgtctgccaggctaccggagatcctaagcccagagtcacgtggaacaagaaaggcaaaaaagtaaattctcagcggttcgagacaattgaatttgacgaaagcgctggcgccgtcttgcggatccagccgcttcggaccccaagagatgaaaacgtctatgaatgcgtagcacagaactcagtgggagagatcaccgtccatgctaaattgacggtgcttcgagaggatcaactgccaagcggattccccaacattgatatgggcccccagcttaaagtcgtggaaaggacaaggacagccactatgttgtgcgccgcaagcgggaatcctgatccagagatcacctggttcaaagattttctgccagtcgatccctctgcgagcaacggtagaatcaaacaactccgacgtagcgaaacctttgaatcaacgcctattcgcggcgccctgcagattgaatccagtgaggagactgaccaaggtaaatatgagtgtgttgctaccaactccgctggggtgcgctatagctctcccgcgaacctatacgtcagggagctccgcgaagtcagaagggtggccccgcgattctcaatattgcccatgagtcatgagattatgcctggaggaaacgtcaacatcacctgcgtcgccgttgggtctccaatgccatatgtgaagtggatgcaaggggccgaggatttaaccccagaagacgatatgccagtcggcaggaatgtcctcgaattgaccgatgtgaaggatagcgccaactatacttgcgtcgctatgagctctctcggggtgatcgaagcagttgcccagatcacggtgaagagcctcccgaaggcccccggaactcctatggtcacggaaaacacagcaacttctataaccattacttgggattcaggcaacccggaccccgtcagctactacgttattgagtacaaatcaaagtctcaggatggtccataccagattaaagaagatattactactacgcgatactccatcggggggcttagcccaaactcagagtacgagatctgggtgagcgccgtgaattcaattggacaggggccaccctctgaatcagtcgtgacaagaacaggcgaacaggctccggcttccgccccccgcaacgtacaggcccggatgctcagcgcaactacaatgatagtgcagtgggaagagcccgtagaaccgaatggccttattcgaggctaccgagtgtattacactatggaaccagagcaccctgttggaaattggcaaaagcacaatgttgacgatagcttgctgactactgtgggctcattgctggaggacgaaacatatacggtacgggtgctggcatttacgtcggtgggagatgggcctctgtcagaccccatacaggtcaaaacccagcaaggcgtgccaggccagcccatgaaccttcgggcagaagccaggtctgagacctctataactctgtcctggtctcctcctcggcaagaatcaatcatcaagtacgagctgttatttcgcgaaggtgaccacggaagagaagtcggacgtacatttgatcccaccacctcttatgtggttgaggacttgaagcccaacaccgagtacgccttccgactggctgccagaagcccacaagggctgggggccttcactccggtcgtgcgacagcgcacccttcagtctaagccgagtgcaccgcctcaagatgtcaagtgcgtttctgtgaggtccactgctatactcgtgtcttggcggcccccccctcccgagactcacaacggcgctctggtcggctactcagtaaggtacaggcctttgggatctgaggatcccgagccaaaagaagtgaacgggatcccacccactacaactcagatcttgcttgaggcactcgagaaatggacccagtacagaatcaccacagtggcccatactgaggtcgggcctggtcccgaatcatcaccggtggtagtaagaaccgatgaagacgtgccttctgcaccccctcgaaaggtagaggcagaggccctgaacgccacagccattagggttctttggaggagcccagcccccggcaggcagcatggccagatcagaggctaccaggtacactatgttcgcatggagggggcggaggcaaggggcccaccccggataaaagacgtgatgctcgcagacgcacagtgggaaacagatgacacggcagaatacgagatggtgatcaccaacctacaacccgaaactgcctactccatcaccgtggccgcatacaccatgaagggtgatggagctcggtctaaacctaaggtcgtggtgactaagggggccgtgctgggccggcctacgctatccgttcaacaaacaccagagggaagtctgcttgccaggtgggaacccccagcaggaacagcggaggatcaagttctgggctatcgactgcagttcggccgagaagattccacccccctggcaacacttgaatttcctccctcagaagatcgttacacagcatctggtgtgcacaagggcgccacatacgtcttccggctggcggctagaagtcggggcgggcttggggaagaagcagccgaagtattaagtatacccgaggacacacctcgcggacatcctcagattctggaggcagccgggaacgcgtctgccggcaccgttctcctccggtggttaccacccgtgcctgctgagcggaatggagctatcgtgaaatacacagtggcggtgagggaggcgggagctctagggccagctagagagaccgagctcccagcagctgctgagcccggggctgaaaacgcactcactctgcagggactgaaaccggatacagcatacgacctacaagtgcgcgcacacacgaggcgagggcctgggcccttcagtccccccgtgcgttatcgaacattcttgcgggatcaagtttcccccaaaaactttaaagtgaaaatgatcatgaagacatcagtcctgctgagctgggaatttcccgataattataactccccgactccttataagattcagtataacggtctgacattggacgtggatggtcggaccaccaagaaactgatcacacacctgaaacctcacacgttttataatttcgtgttaacgaaccgtggctcttccctgggcgggctgcagcagacagtgacagcgtggacggcctttaatctcctgaacggtaagccttcggtggcccccaagcccgacgcagacggtttcatcatggtgtatttgcctgacgggcaatctcccgtcccagttcagtcttacttcattgttatggtgcccctcagaaaatctagaggaggccagtttctcacacccctgggttcccctgaggatatggatcttgaggagctaattcaagatatcagccgcctccagcgccgatcccttagacattcgagacaattagaagtgcccagaccatatatcgccgccagatttagtgtgcttccacccacattccacccaggggaccaaaaacagtatggcgggttcgacaaccgaggactggagcctggacacaggtatgtgcttttcgtactcgccgtgcttcagaagagtgagcccactttcgcagcctcacccttttctgacccgttccagcttgataaccctgacccgcagccaatcgtcgacggcgaggagggcctgatatgggttattgggccagtcctcgccgtcgtttttattatctgcatcgtaattgctattctcctttacaaaaagaagcctcatagcaagagaaaagactccgaaccccgcaccaagtgtctcctgaacaatgcggacctggcgcctcaccacccaaaagatccagttgagatgaggaggattaattttcaaacccccgattcagggctgcgctcacctctgagagagcctggatttcactttgagtctatgttgagccaccccccaatccccatcgccgacatggctgagcacacagagcggctcaaagccaacgattcccttaagttgagtcaggagtatgagtcaatcgaccctgggcaacaattcacttgggagcactccaacctggaggtaaataagcccaagaaccgttacgctaatgttattgcatacgatcattcacgcgtgatcttgcaaccaatcgaagggattatgggctctgattacattaacgcaaactacgtggacgggtacaggtgccagaatgcatatatagccactcagggccccctgcccgaaacattcggcgatttctggagaatggtgtgggagcaaagatcagctaccattgtcatgatgacccgtctggaagaaaaatcgcgcatcaaatgcgatcaatattggcccaataggggtacagagacttatggtttcatccaggtgacgttattggatactatagaacttgcaaccttttgtgtccgcacattttcattacataaaaatggcagtagtgagaagcgggaggttcgacagtttcagttcacagcttggcctgatcacggggtcccggaataccccacaccctttcttgcttttttgcgacgtgtgaagacctgcaacccaccggatgctggcccaatcgtggttcactgctccgcaggcgtaggacgcacagggtgctttattgtaatcgatgccatgctagaaagaatcaagccagaaaagactgtagacgtatatggccatgtcacactgatgagatcacaacggaactatatggtgcagacagaagatcagtactcattcatacacgaagcattattagaggctgtgggctgcggcaacacagaggtcccggcacgctcattgtacgcctacatccagaaactggcgcaagtggaacctggggagcacgtaacggggatggaattagagttcaagaggctcgccaattctaaagctcacaccagccgcttcatatctgcgaacctgccctgtaacaagttcaagaaccgccttgtgaacataatgccatatgaaagcacccgggtgtgcctgcagccaattcggggagtcgagggcagcgattacatcaacgcctctttcattgacggctacagacaacagaaggcctatatcgcaacacaaggccctctcgccgagacgaccgaggatttctggcggatgctttgggagaacaactccacaatcgtggttatgttaactaaactgcgtgagatgggacgtgaaaaatgccatcaatactggcctgctgagcgctccgctcgctatcaatatttcgtggttgaccctatggcagagtacaatatgccgcagtatatcctgcgcgaattcaaggtaaccgacgcacgggatgggcagagcagaaccgttcgacagtttcaattcacagactggccagagcaaggcgtgcctaagtccggtgaaggatttatagatttcatcggccaagttcataaaacgaaggaacaatttggacaggacggcccaatctccgtgcattgtagtgcgggggttggtcgcacgggtgtgtttatcaccttaagtatcgtcctcgagcgcatgaggtacgaaggggtagtggacatttttcagactgtgaagatgctgaggacccagcggccagccatggtccaaaccgaggatgagtaccagttctgctatcaggctgcattagagtacctcggctcctttgaccactacgcaacttag

SEQ ID NO: 132705 - DNA, 5846 bp, Artificial Sequence
  derived and/or modified sequence
atggcccctacgtggggtcctggaatggtatcagtagtaggacctatggggttgcttgttgtccttttggtagggggatgtgccgcagaggaacccccaaggtttatcaaggaacccaaggaccagatcggcgtgagtggcggagtggctagttttgtgtgccaggctacaggagatcctaagcctcgtgtgacctggaacaaaaaaggaaaaaaggttaacagtcagaggttcgaaaccattgagtttgacgaaagcgctggggctgtcctgagaattcagcccctccggacacctcgtgacgagaatgtctatgagtgcgtcgctcagaactcggtgggggagataacagtgcacgcaaaactgaccgtccttcgcgaggaccagttgccgtctggcttccctaacattgatatgggaccccagttaaaggtggttgagcgtacaaggacagccacaatgctttgcgcggcatcaggcaatcctgacccggaaatcacctggttcaaggacttcctgccagtcgacccgtctgctagcaacggcagaataaagcagcttcggagcgatcaggcctttagccacttgccaaccggggctctccagatcgagtcatccgaggaaactgatcaaggaaagtacgagtgcgtggctaccaactccgcaggggtgaggtattcctcccctgcaaatctatatgtccgcgtgtggcgtacggtgaggagagtggccccaaggttcagtatcctccctatgagtcacgagatcatgcctgggggaaatgtcaacattacctgcgttgccgtgggcagtcctatgccatatgtgaagtggatgcaaggagccgaagatctaacccccgaagacgacatgcccgtcggacgtaatgtgctcgaattaactgacgtcaaagactcagccaactacacctgtgtggccatgtcctcactgggggtgattgaagccgtggcacagattaccgtcaagtccctcccaaaagccccagggactcccatggtgactgaaaacaccgccaccagtattaccatcacttgggattctggcaaccccgacccagtctcctactatgttatcgaatataagtccaaaagccaagatgggccataccagattaaagaagatataaccacgacaaggtactcaatagggggactctcaccaaacagtgaatacgagatttgggttagtgcagtcaactcgatcgggcagggccctccttcagaaagtgttgtcacacggacaggggaacaggcgcctgcctccgcccctagaaatgtgcaagctcgcatgctgagcgctaccactatgatagtgcagtgggaggagcccgtggaaccaaacggactgattcgcggttatagggtgtattacacaatggagcccgaacaccccgtcgggaactggcaaaagcataacgttgatgatagcctccttacaaccgtaggatcacttctggaagacgagacttatactgtgagagtgctggcctttacatctgtgggcgacggcccactgtcggatcccatccaggtcaagacacaacagggtgtgcccggacagcctatgaacctgagggcggaggcacgcagtgaaacttctataaccttgtcttggagcccccctcgtcaggagagtataattaagtacgagcttctgtttagagaaggggaccacgggagggaggtggggcgaaccttcgaccctacaaccagttacgtggtcgaggacctgaagccaaacaccgagtacgccttccggcttgcagcacgctcaccacaaggtctaggagctttcacaccagtcgtcagacagagaacactgcaaagtaaaccaagcgcccctcctcaggatgtgaaatgtgtgagcgtgaggagcaccgccatcctggtgagctggcgcccaccgcctccagagacacataacggggctctggtcggatactctgtcaggtacaggcctctgggaagcgaggacccagagcccaaagaagtgaacggtatcccacccacgactacacagatactactggaagcactggaaaagtggacccagtaccgaattaccaccgtggctcatacagaagtgggaccagggcctgagtcatcgcctgtggtggtccgcactgacgaggacgtgccaagtgctcctcctaggaaggtggaggcagaggccctgaacgccactgccatacgggtgctgtggcgctctcccgcaccaggcagacaacacggccagattcggggatatcaagtgcactacgtgagaatggagggggctgaagccagaggccctcccaggataaaggatgtgatgttggccgatgcccagtgggagactgatgataccgccgaatacgagatggtgattactaatcttcagccagaaactgcatactcaatcacggtcgctgcctacaccatgaaaggcgatggagctcggtctaagcccaaggttgtggtgacgaagggagcggtgctgggcagacctactttgtcagtccagcagaccccagagggatctctgttagctaggtgggagccacctgctggcaccgctgaggaccaagttctggggtatcggctgcagttcggtagggaagactctaccccgttggcaaccctggaattccctccttccgaagatcgttatactgcaagtggagtccataagggcgctacctacgtgtttagacttgcagcccgatctagggggggtttgggtgaggaagcggcagaggttcttagtatcccagaggacacccccaggggtcatccccaaatcctagaggccgcaggaaacgcctctgcagggacagtcctgctgcgctggctcccacccgtccctgccgaaaggaacggcgctatagtgaaatatactgtggccgtgcgtgaggccggtgcacttggtcccgctagggaaaccgaattaccagcagccgctgaacctggagctgaaaatgcattgacactccaaggtctgaaaccggacacagcatatgatctgcaggttcgggcacacacaagaagaggcccaggtccttttagcccacccgtgagatatcgcacattcttgcgcgatcaggtcagtccaaaaaacttcaaggtgaaaatgataatgaagactagtgtgttactgagctgggaatttcccgacaactataattcaccaaccccttacaaaatccagtataacggcctcacgctggacgtggatggtcggacgactaagaagttgattacccatttaaaaccacacacgttttataactttgtactcacaaatcggggaagttccctgggcggattgcagcagactgtaaccgcatggaccgcgtttaatctgctcaacggtaaaccaagcgtggcaccaaaacccgacgccgacggctttattatggtctaccttccggatggacaaagccccgtcccagtacagagctatttcatcgtaatggtccccttgcggaagtcaagaggcggacagtttttaacccccctgggttcccccgaagacatggatctggaggagttgatccaggacatttcccgcctgcaacgcagatccctgcgtcacagtaggcagctggaggtcccaaggccttatatcgcagctcgctttagcgtgcttcctcccacctttcaccccggagaccagaagcagtacggaggctttgacaatagagggctcgagccaggccataggtatgtcttatttgtgctggctgtgctccaaaaaagtgaaccaacgttcgccgcaagtcctttttcagacccatttcaactggataaccccgacccccagccgatagtggatggagaagaagggctcatctgggttattgggcctgtcctggcagtggtatttattatctgtatcgtgatcgccattttactttacaagaataagccagatagcaagagaaaggatagcgagccgagaactaagtgcctactgaacaacgcagatctggccccacaccatcccaaagatccggtggaaatgaggcgtatcaacttccagacccctgactcaggcttgagatctcctctgcgggaaccagggtttcacttcgagtctatgctgtcccaccctcctatccctatcgccgacatggcggaacacaccgagagactcaaggcaaatgacagcctaaaattgtctcaggagtacgaaagtattgatccaggccagcagtttacctgggagcattcaaaccttgaagtgaacaaaccaaagaaccggtatgccaacgtgattgcatatgaccacagtcgtgtgatactgcaacctatcgaagggattatgggtagtgattacatcaatgccaactacgttgatggctatagatgccagaacgcgtacatcgcaacacaagggccactgccagagacgtttggagacttctggcgcatggtgtgggaacaaaggtcagcgactatcgtcatgatgacacggctggaagagaaatcccggattaaatgcgatcagtattggccaaaccgaggaactgagacctacggttttatacaggtgacactgctggatactatcgaactggccacattttgcgtgcgtacgttttccctgcacaaaaatggctcaagcgagaaacgtgaggtcaggcaattccagtttacggcttggcctgatcacggagtgccggaataccctacccctttcttggcctttctccggagggtcaagacatgcaaccccccagacgctggcccaatcgtcgtgcactgttctgcgggtgttgggaggacaggctgcttcatcgtgattgacgccatgcttgagcggattaagcccgaaaagacagtcgacgtgtatggtcacgtcacattaatgcggtcacagaggaactatatggtgcaaacagaggaccagtactcttttatacatgaggccctcctggaagctgtgggttgcggtaacaccgaggtacctgcacgctcgctgtacgcctatatacagaaattggcacaagtggaaccaggcgagcacgtcacaggcatggagctggagttcaagaggttggctaattctaaagcccacacatcacgctttatctccgccaaccttccctgtaataaattcaagaataggctggtcaacattatgccttatgaaagcactcgagtttgtttgcagccgatccgaggtgtggagggttcagactatattaacgccagcttcattgatgggtacagacaacagaaggcgtatatagccacgcaaggcccactcgcagagacaactgaagacttctggcgaatgttatgggagaataactccactatcgttgtgatgctaaccaaactgcgggagatggggagagagaagtgtcatcagtactggccggctgagcggtccgctagatatcagtactttgtggtggaccccatggctgaatacaatatgccacaatatatcctgcgcgaatttaaggtcacagacgccagagatggccaatcccgcaccgtccgacagtttcagtttacagactggcccgaacagggggtgcccaaatcaggtgaaggtttcattgactttatcggacaggtgcataaaacaaaagaacagttcgggcaagacggacccattagcgtgcactgcagcgccggagtcggcagaacaggtgtcttcatcactctttccatcgtactggagcgcatgcgctacgaaggagtggtggacattttccagacggtcaagatgttgagaacacaaagaccagccatggtccaaaccgaggatgagtaccagttctgttatcaagccgcactggagtaccttgggtcatttgaccactacgccaccta

SEQ ID NO: 132706 - DNA, 5846 bp, Artificial Sequence
  derived and/or modified sequence
atggctcctacttgggggccagggatggtcagtgtagttgggccaatgggcctgctagtagtcctcctggtcggtggatgcgccgcagaggagccaccaaggtttatcaaagagcccaaagatcagataggcgtgtccggaggcgtggccagctttgtgtgccaggctactggcgatccgaagccacgcgtaacctggaataagaaaggcaagaaagtgaactcccaacggtttgaaacaatagagtttgacgagagtgcaggggctgtcctccggattcagccactgcgcactcctcgggatgagaacgtttacgagtgtgtcgcccagaatagtgtcggggaaatcaccgttcatgccaagctaacagtgctgcgggaagaccagcttccttcaggctttccaaatattgatatgggaccccagttaaaagttgttgagcgcacacgaactgcaactatgctgtgtgcagcctctggcaatcctgatccagagattacatggtttaaagattttctgcccgtggacccctctgcgtctaatggcaggattaagcaactgaggagtgagactttcgaatccacccctatccgcggagctctgcagatagaatctagcgaagagacagaccagggaaaatacgaatgcgttgccaccaattccgctggcgttagatattcaagccctgctaatctttacgtccgcgagctcagagaggtacggagggtagctccaagattttcaatcttacctatgtcgcacgagattatgccaggtggaaacgtgaacatcacctgcgtggctgtgggctcacctatgccttatgtgaagtggatgcagggagctgaggacttaacacccgaagacgacatgcccgtcggtaggaatgttctggagctgactgatgtgaaggactccgccaactacacttgtgttgctatgagctctttgggggttatcgaagctgtggctcaaatcacagtgaagagcttgcctaaggccccaggtaccccgatggtgaccgaaaacaccgctacctccattacaattacgtgggacagcggtaatccagacccggtcagctattatgtgattgagtacaaatccaagtctcaggacggaccttatcagataaaggaggatattaccactacacggtactccatcggtggactgtctcccaacagtgagtacgaaatttgggtctcagctgtcaactctatcgggcaaggtcccccatctgagagcgtagtcaccaggacaggggagcaagcgccagcaagtgcgccacgcaatgtccaagctcgcatgctcagcgccacaactatgattgtgcagtgggaagagcccgttgaacccaacgggctgatccgcggatatagggtctactatacaatggaacccgaacaccctgttggcaactggcagaaacacaacgtcgacgatagcctcttgaccacagttggttctttgctggaggacgaaacttatacagtgcgggtactggcgtttacatctgtcggtgatgggccactgagtgatccaattcaagtcaagacacagcagggcgtcccaggacagcccatgaacctccgcgctgaggcacggtcggaaacctcaattacgctgtcttggtccccgccacgccaagagtccataattaaatatgagctcttatttagggaaggagatcatgggagagaagtaggcagaacattcgatcctaccacttcatatgtcgtggaggatttaaaaccgaatactgaatacgcctttcggctggcagcgagatcgccacagggcctgggcgctttcacaccagttgttagacagcgaactctgcagtctaagccatcagcccctcctcaggatgtgaaatgcgtttccgtgcgcagcactgctatactggtttcttggagaccccctccacctgagacgcacaacggagctctggttggctattcagttagatatagacctctggggtcagaggaccccgagccaaaggaggtgaatggaattccacctacaacaacgcagattctcttagaagccctggagaagtggacccaataccgtattacaaccgtagctcatactgaagtgggtcctggaccagagtctagtcctgtggttgttaggactgatgaagacgtgccttctgcccctccacgcaaggtcgaagccgaggctctgaatgcaacagctattagagtgctgtggcggagcccagctccgggacgtcagcacggccagatccgcggatatcaggtccattatgtgcgtatggagggggctgaggcaaggggacctccacgcatcaaggatgtcatgcttgcggacgcacagtgggagaccgacgatactgccgagtacgagatggttattactaacctgcagcccgagactgcatactccattactgttgccgcttatacaatgaaaggggacggtgccaggagtaaaccaaaagtagtcgtgaccaagggcgcagttcttggccgtcctacccttagtgtccagcagacgcccgaaggctcactcctggccaggtgggagccccctgccggaaccgcagaagaccaagtactcggatacaggctccagttcggcagggaagactcaacacctcttgccacgcttgagttcccacccagcgaagaccggtacaccgccagtggagtacacaagggagctacttacgtcttccgactggccgcaagaagccggggaggcctcggtgaggaggccgcagaggtgctctctattcccgaagacaccccgcgtggccacccacagattcttgaggccgctggcaacgctagtgccggaaccgtgcttttacgttggctgccccctgtgcccgctgagagaaatggagcgatcgtgaaatatacggttgctgtaagagaggcaggggcactgggccctgcaagggagacggaactccccgctgccgctgagcccggagccgaaaatgcactaactctgcagggactgaagccagatacagcctacgatctgcaagtcagagcccacacgagaagaggccctggcccttttagtcctccggtccgatacagaacttttctgcgagaccaggttagtcctaaaaatttcaaagtgaagatgatcatgaaaacctccgtgctgctcagctgggaatttccagataactacaattcccccacaccttacaaaatccagtataatggcttgacactggacgttgatggacgaaccactaagaagcttatcactcatttaaaacctcacaccttctacaatttcgtcctgacaaaccggggaagctcgctcggaggcctccagcaaactgttacggcttggaccgccttcaatttgctcaacggaaaaccaagcgttgcacccaagccagatgcagacgggttcatcatggtgtatctgcccgacggtcagagcccagtgcccgttcagtcctactttattgtgatggtgccactaagaaaaagccgcggtgggcagtttttaacccctctgggaagtcctgaagatatggaccttgaggaattgatccaggatatctcccggctgcagaggcgatccctcaggcactcacgccagcttgaggtgccaaggccctatattgcagccagatttagtgtgctgccccctacgtttcatcctggtgatcagaagcaatacggagggtttgacaatagaggcctggagccgggacaccggtatgtcctttttgtgcttgctgtcctgcagaaatctgagcccacattcgcagcatctcccttcagtgatccattccaactggacaatcctgaccctcagcctatcgtcgacggtgaggagggccttatttgggttataggtcctgtgctggcagtagtgttcataatttgtatcgttatcgcaatactcctgtacaagaacaaaccagattctaagcgtaaggactccgaaccgagaactaagtgcctgctgaacaacgcagatctcgctccacaccacccaaaagacccagttgaaatgcgccgtatcaattttcagacaccagactctggtttgcgctcccctctaagggaaccaggtttccactttgagtcaatgcttagccacccacccattcccatcgctgacatggccgagcacactgagcgcctcaaggcaaacgatagcctgaagcttagtcaggaatacgaatccattgaccccggtcagcagtttacttgggagcattccaaccttgaggtcaataagcccaagaatcgctacgcgaacgttatcgcgtatgatcattcccgagtcattctgcaacctattgagggtatcatggggagcgattatattaacgcaaattatgttgacggatacaggtgccagaatgcctatatcgccacccaaggccctctgcctgagacctttggtgatttttggcggatggtttgggagcagaggtcggctaccatcgtgatgatgacaaggctcgaggaaaagagtcgcatcaaatgtgatcaatattggccaaaccggggtactgaaacttatgggtttattcaggtgaccctcttggacacaattgaactagccacgttttgtgtaaggacattctctctgcacaagaatggcagttcagaaaagagggaagtccggcagttccagttcactgcctggcccgaccacggggtaccagaataccctactccctttctcgctttcctaagaagagtgaagacatgtaaccctcctgatgcaggtccaatagtggttcactgcagcgctggcgttggacgaacaggttgctttattgtcatagacgcgatgctggaacgcatcaaacccgagaagacagtagatgtgtacggccatgtgaccttaatgcgtagtcaacggaactacatggtccagaccgaggaccaatatagttttatccacgaagccttgctagaagcggtaggctgcggcaatacagaggtacccgctcgttccctttatgcttatattcaaaagttggcccaggtcgaaccaggcgaacatgtcactggtatggagctggagttcaaaaggttagctaacagtaaggcacatacctcacgtttcatttctgcgaacttaccctgcaataagttcaaaaaccggcttgtaaatatcatgccttatgaatccactagagtttgcttgcagccgatccgtggtgttgaaggctccgattacatcaacgcttctttcatcgacggttaccgccaacagaaagcatacattgcaactcagggacccctggccgaaacaaccgaagacttctggcgcatgttatgggaaaacaatagtacaatcgtcgtgatgctcaccaagctcagagaaatgggtcgcgaaaaatgtcaccagtattggccggctgagaggagcgccagatatcagtatttcgtcgtggaccccatggcagagtacaacatgccacaatatatcctgcgcgaatttaaggtgactgacgccagagacggccagagcagaacagtccgccagttccaattcaccgactggcccgaacaaggtgtgccgaagagcggggaggggtttattgatttcatcggacaagtgcacaaaacaaaggagcagttcggacaggacgggcctatttcagtccactgctccgccggagtgggcaggaccggtgtatttattaccctgagcattgtcttggagcgtatgcgctacgagggagtggtagacatctttcagaccgtcaaaatgctgcgcacacaacgcccagcaatggtgcagactgaggatgaatatcagttttgttaccaagccgcactggagtacctaggaagcttcgaccactacgcaacata

SEQ ID NO: 132707 - DNA, 5849 bp, Artificial Sequence
  derived and/or modified sequence
atggccccaacctggggcccaggcatggtgtccgtggtaggcccaatgggtttactggtggtgctgctcgtcggtggatgcgcagcggaagagcctcctcgctttattaaagaacccaaagaccagatcggcgtctctggtggcgtggccagcttcgtttgccaggcaaccggagaccccaagccccgagtgacatggaacaaaaaggggaaaaaggtgaactctcaaagattcgagaccatcgagttcgacgaatccgccggagccgttctgcggattcagcctctgaggacaccaagagatgagaacgtgtatgagtgcgtggcccagaacagtgtgggagaaatcaccgtgcacgctaaactgaccgtgctaagggaagaccagcttccatctggttttccgaatattgatatgggaccccagcttaaagtcgtggagcggaccaggaccgccactatgctgtgcgccgctagtgggaaccccgatccagaaatcacatggttcaaggattttctacctgttgacccaagcgcctctaacggcaggattaagcagttgcgcagatccgaaacctttgagtctaccccgatacgcggagcactgcagatcgagagctccgaggagactgaccagggcaaatacgaatgtgtggcaacaaatagcgctggcgtgcggtattcaagtcctgcaaacctatacgttcgggagctgcgggaggtgagacgcgtcgccccaagattcagtatcttgcccatgagtcatgaaatcatgcctgggggtaacgttaacatcacgtgtgttgcagtgggatcacccatgccatacgtgaagtggatgcagggtgccgaggatctgacccctgaggacgatatgcctgtgggaaggaatgttttagagctgacagatgtgaaggacagtgccaattatacgtgcgtggcaatgagcagccttggagtgattgaagccgttgcccagatcactgtcaagagcctgccaaaggctcctgggacaccgatggtgactgaaaacacggccaccagcatcacaataacttgggatagtgggaacccagatcccgtatcctattatgtgatcgaatacaagtccaaatctcaggacggcccttaccagataaaagaagatatcacgactaccaggtactcgataggcggtctgagccccaatagcgaatacgagatttgggtttctgcagttaacagtataggtcaggggcctccctcggagtccgttgtcacccgcactggagaacaggcccctgctagcgcacccaggaatgtacaggccagaatgctctcagcaacgaccatgatcgttcaatgggaggagcccgtggagccaaacggcctgatcagagggtacagagtgtattatacgatggaaccagaacaccctgtgggtaactggcagaagcacaatgtcgatgactctcttttaactaccgtggggtcacttctggaggatgaaacctataccgtacgggtgcttgcatttacaagtgtgggggatgggcctttaagcgatccaatccaggtgaaaacgcaacagggcgtgcccggtcaaccaatgaaccttagggccgaagccaggtccgagacctccatcacactcagctggtccccacccagacaagagtcaattataaagtatgaactgctgtttcgggagggggaccacgggagggaggtcggaagaactttcgacccaaccacaagttatgtcgtggaggatctcaagccgaatacagagtacgcattcaggttagccgctagaagccctcagggactgggcgctttcacccctgtggtaagacagcgaaccctacagtccaagccaagtgctcccccacaggatgttaaatgtgtgtccgttaggtcaacagcaatactggtcagttggaggcctccccctcccgagacgcacaacggcgcactggtgggttattccgttcggtacagacccctgggatcagaggatccagagcccaaagaggtgaacggaatccctcccactaccacacagatcctcctcgaggctcttgagaagtggacccagtatagaataactacagtggcccatacagaggttggacctggcccagaatcctcccccgtcgtggtgcgaacagacgaagatgtgccttctgcacctcctcgaaaggtggaagcggaagctctgaacgccacagctattagggtcctctggcggagcccagcgcctggcagacagcacggccaaataaggggctatcaggtccattacgtacgtatggagggtgccgaagctagagggccaccgcgtattaaagatgtaatgttggcagacgcacagtgggagactgatgatacagctgagtacgagatggtgataaccaatcttcaacctgagaccgcttacagcatcaccgtggcagcgtacaccatgaaaggggacggcgcacggagtaagccaaaggtggttgtgacaaagggggctgttcttggtcgaccgaccctttccgtgcagcaaactccggagggatccctgcttgccagatgggagccaccagctggcaccgctgaggaccaggtgttgggctataggctgcagtttgggagagaagattccactcctctcgccacgctggagttcccaccatccgaagacagatataccgctagcggggtgcacaaaggcgcaacttacgtgtttcgcttggccgctcgctccagaggcggtctgggcgaggaggctgctgaggtgctctcaatacctgaagatacgcctcggggtcatccacagatcctggaagccgcaggaaacgcatctgccggtactgttctgcttcggtggctacccccagttcccgctgagcggaacggcgctattgtcaagtataccgtggcagtgagagaagcgggagccctcgggccagccagagagactgagctccctgccgcagcagagccgggagccgagaatgcgctgaccttacagggcctgaaaccagacacagcatacgatctgcaggtgagggcgcacacaaggcgaggacccggacctttttccccccctgtgcgatatcgcacctttctgcgtgaccaagtttcacccaagaactttaaagtgaaaatgattatgaaaacctccgtgctgttgagttgggagttcccagataactacaacagtccaactccctacaagatacaatataacgggctgacacttgacgtagacggcaggaccacgaagaaacttatcacacatcttaagcctcacacattttataatttcgtgctcactaatcggggtagtagtctggggggactgcagcagactgtgaccgcctggacagctttcaacctgcttaacgggaaaccttctgtggctccaaaaccagatgcagatggttttatcatggtgtatctgcccgatggccaatctccggtcccagtccagtcgtacttcatagttatggtgccattaagaaagtcaagaggcggacagttcctgacgcccctgggatcccccgaggatatggatttagaagagctgatccaggatatttcaagactgcagaggcgatcactgagacatagcaggcaactggaagtgcccaggccgtacatcgctgcacgattcagcgtgcttccaccaacatttcaccccggagaccaaaaacagtacggaggttttgataacaggggtctcgagccaggacaccgatacgtgctgttcgtgctggccgtgttacagaaatctgagcccacctttgcggcatcaccgttcagcgatcctttccagctggacaaccctgatccacaacccattgtcgacggggaggaagggctgatctgggttatcggcccagtgctggcagtggtgtttatcatttgtatagtgatcgccatcctcctgtataagaaaaaaccccacagcaagcggaaagattccgaacccaggactaagtgtttgctcaataacgcagatctcgccccacaccatcccaaagatcctgttgaaatgaggcgaattaatttccagaccccagactccggactgagaagcccccttagggaacccggattccactttgagagcatgcttagtcacccacccatccctatcgccgacatggccgagcacactgaacggctcaaggcaaatgacagcctgaagctcagccaggaatatgaatccatcgaccccggtcagcagttcacatgggaacactcaaatctggaggttaacaagcctaaaaaccgatatgcaaatgtaattgcctacgatcactctcgcgtgatcttacagccaatcgagggcatcatgggttcagactacataaatgccaactacgtcgatggctatcgctgtcagaatgcatacatagcaacccaaggaccgctccctgaaactttcggggatttttggaggatggtttgggagcagcgatcggctacaatcgttatgatgacaagactggaggagaagtcccgaataaagtgtgatcaatactggcctaatcgcggtactgagacatacgggttcatccaggttacactgctggatactatcgaactggccactttctgcgttagaacattcagtctgcataaaaatggttcctccgagaaacgtgaggtacggcaatttcagtttactgcctggccggaccatggggtgcctgagtacccaactcccttccttgcatttcttaggcgagtgaaaacatgtaacccacccgacgcaggtcccatcgtcgtccattgtagcgcaggggtggggcgtaccggctgtttcattgtgatcgacgccatgctggaaagaatcaaacctgagaagacggtagatgtgtatggtcatgtaacgcttatgcgatcacaacgcaattatatggtgcaaacagaagaccagtactcttttatccacgaagcccttctagaggctgtgggatgtggcaatactgaggtccccgctcgctcactgtacgcctatatccagaaacttgcacaggtggagcctggcgaacatgtgacaggaatggagctggagtttaagaggttggcgaactccaaggctcatacgtccaggtttatttccgccaacctcccttgtaataagtttaaaaaccgccttgtgaacatcatgccctacgaatcgaccagagtgtgtctccagccaatccgaggagtggagggatctgattacatcaatgcctccttcatcgatgggtaccgacagcagaaagcgtatatcgcgactcagggccctttggccgagaccaccgaagacttttggcgaatgttgtgggaaaacaactctacaatcgtcgttatgttgactaagttgcgagaaatgggtcgagaaaaatgccaccagtattggcccgcagaacggtccgcacgctaccagtacttcgtagtcgacccaatggccgaatacaatatgccgcaatacatcctgcgtgaatttaaggtgaccgatgccagggacggtcagagcaggaccgttaggcagttccagttcactgattggcccgagcagggtgtccctaagagcggagaaggatttattgattttattggccaagtgcataaaacaaaagaacagttcggccaggacggcccaatttccgtccactgtagtgccggagtgggccgtactggcgtgtttataacgctcagtatcgtgcttgagcgcatgaggtacgaaggagtggtggacatcttccagaccgttaagatgctccgaacacagaggcccgctatggtgcagacagaggacgaataccaattctgctaccaggctgccctggagtacttggggtcatttgatcactacgcgacata

SEQ ID NO: 132708 - DNA, 7347 bp, Artificial Sequence
  derived and/or modified sequence
cctcgcgccgcccgcccggcagcccggccggcgcgcgcacgccgcgagccgctggcgctcgggctccgctcggatcccatgcaacagccacgatgtgaagcggggcagagccgggggagcccagcccagccagcctccagacgttgccccatctgacgctcggctcgaggcctctctgtgagggaccggggggccatccccctccagggcggagatcggaggtcgctgccaagcatggcgcccacctggggccctggcatggtgtctgtggttggtcccatgggcctccttgtggtcctgctcgttggaggctgtgcagcagaagagccccccaggtttatcaaagaacccaaggaccagatcggcgtgtcggggggtgtggcctctttcgtgtgtcaggccacgggtgaccccaagccacgagtgacctggaacaagaagggcaagaaggtcaactctcagcgctttgagacgattgagtttgatgagagtgcaggggcagtgctgaggatccagccgctgaggacaccgcgggatgaaaacgtgtacgagtgtgtggcccagaactcggttggggagatcacagtccatgccaagcttactgtcctccgagaggaccagctgccctctggcttccccaacatcgacatgggcccacagttgaaggtggtggagcggacacggacagccaccatgctctgtgcagccagcggcaaccctgaccctgagatcacctggttcaaggacttcctgcctgtggatcctagtgccagcaatggacgcatcaaacagctgcgatcagaccaagctttttcccatcttcccacaggagccctgcagattgaaagcagtgaggaaaccgaccagggcaaatatgagtgtgtggccaccaacagcgccggcgtgcgctactcctcacctgccaacctctacgtgcgagtttggagaacagtccgccgcgtggccccgcgcttctccatcctgcccatgagccacgagatcatgccagggggcaacgtgaacatcacctgcgtggccgtgggctcgcccatgccatacgtgaagtggatgcagggggccgaggacctgacccccgaggatgacatgcccgtgggtcggaacgtgctggaactcacagatgtcaaggactcggccaactacacctgcgtggccatgtccagcctgggcgtcattgaggcggttgctcagatcacggtgaaatctctccccaaagctcccgggactcccatggtgactgagaacacagccaccagcatcaccatcacgtgggactcgggcaacccagatcctgtgtcctattacgtcatcgaatataaatccaagagccaagacgggccgtatcagattaaagaggacatcaccaccacacgttacagcatcggcggcctgagccccaactcggagtacgagatctgggtgtcggccgtcaactccatcggccaggggccccccagcgagtccgtggtcacccgcacaggcgagcaggccccggccagcgcgccgcggaacgtgcaagcccggatgctcagcgcgaccaccatgattgtgcagtgggaggagccggtggagcccaacggcctgatccgcggctaccgcgtctactacaccatggaaccggagcaccccgtgggcaactggcagaagcacaacgtggacgacagcctgctgaccaccgtgggcagcctgctggaggacgagacctacaccgtgcgggtgctcgccttcacctccgtcggcgacgggcccctctcggaccccatccaggtcaagacgcagcagggagtgccgggccagcccatgaacctgcgggccgaggccaggtcggagaccagcatcacgctgtcctggagccccccgcggcaggagagtatcatcaagtacgagctcctcttccgggaaggcgaccatggccgggaggtgggaaggaccttcgacccgacgacttcctacgtggtggaggacctgaagcccaacacggagtacgccttccgcctggcggcccgctcgccgcagggcctgggcgccttcacccccgtggtgcggcagcgcacgctgcagtccaaaccgtcagccccccctcaagacgttaaatgtgtcagcgtgcgctccacggccattttggtaagttggcgcccgccgccgccggaaacgcacaacggggccctggtgggctacagcgtccgctaccgaccgctgggctcagaggacccggaacccaaggaggtgaacggcatccccccgaccaccactcagatcctgctggaggccttggagaagtggacccagtaccgcatcacgactgtcgctcacacagaggtgggaccagggcccgagagctcgcccgtggtcgtccgcaccgacgaggatgtgcccagcgcgccgccgcggaaggtggaggcggaggcgctcaacgccacggccatccgcgtgctgtggcgctcgcccgcgcccggccggcagcacggccagatccgcggctaccaggtccactacgtgcgcatggagggcgccgaggcccgcgggccgccgcgcatcaaggacgtcatgctggccgatgcccagtgggagacggatgacacggccgaatatgagatggtcatcacaaacttgcagcctgagaccgcgtactccatcacggtagccgcctacaccatgaagggcgatggcgctcgcagcaaacccaaggtggttgtgaccaagggagcagtgctgggccgcccaaccctgtcggtgcagcagacccccgagggcagcctgctggcacgctgggagcccccggctggcaccgcggaggaccaggtgctgggctaccgcctgcagtttggccgtgaggactcgacgcccctggccaccctggagttcccgccctccgaggaccgctacacggcatcaggcgtgcacaagggggccacgtatgtgttccggcttgcggcccggagccgcggcggcctgggcgaggaggcagccgaggtcctgagcatcccggaggacacgccccgtggccacccgcagattctggaggcggccggcaacgcctcggccgggaccgtccttctccgctggctgccacccgtgcccgccgagcgcaacggggccatcgtcaaatacacggtggccgtgcgggaggccggtgccctgggccctgcccgagagactgagctgccggcagcggctgagccgggcgcggagaacgcgctcacgctgcagggcctgaagcccgacacggcctatgacctccaagtgcgagcccacacgcgccggggccctggccccttcagcccccccgtccgctaccggacgttcctgcgggaccaagtctcgcccaagaacttcaaggtgaaaatgatcatgaagacatcagttctgctcagctgggagttccctgacaactacaactcacccacaccctacaagatccagtacaatgggctcacactggatgtggatggccgtaccaccaagaagctcatcacgcacctcaagccccacaccttctacaactttgtgctgaccaatcgcggcagcagcctgggcggcctccagcagacggtcaccgcctggactgccttcaacctgctcaacggcaagcccagcgtcgcccccaagcctgatgctgacggcttcatcatggtgtatcttcctgacggccagagccccgtgcctgtccagagctatttcattgtgatggtgccactgcgcaagtctcgtggaggccaattcctgaccccgctgggtagcccagaggacatggatctggaagagctcatccaggacatctcacggctacagaggcgcagcctgcggcactcgcgtcagctggaggtgccccggccctatattgcagctcgcttctctgtgctgccacccacgttccatcccggcgaccagaagcagtatggcggcttcgataaccggggcctggagcccggccaccgctatgtcctcttcgtgcttgccgtgcttcagaagagcgagcctacctttgcagccagtcccttctcagaccccttccagctggataacccggacccccagcccatcgtggatggcgaggaggggcttatctgggtgatcgggcctgtgctggccgtggtcttcataatctgcattgtcattgctatcctgctctacaagaacaaacccgacagtaaacgcaaggactcagaaccccgcaccaaatgcctcctgaacaatgccgacctcgcccctcaccaccccaaggaccctgtggaaatgagacgcattaacttccagactccagattcaggcctcaggagccccctcagggagccggggtttcactttgaaagcatgcttagccacccgccaattcccatcgcagacatggcggagcacacggagcggctcaaggccaacgacagcctcaagctctcccaggagtatgagtccatcgaccctggacagcagttcacatgggaacattccaacctggaagtgaacaagccgaagaaccgctatgccaacgtcatcgcctatgaccactcccgtgtcatcctccagcccattgaaggcatcatgggcagtgattacatcaatgccaactacgtggacggctaccggtgtcagaacgcgtacattgccacgcaggggccgctgcctgagacctttggggacttctggcgtatggtgtgggagcagcggtcggcgaccatcgtcatgatgacgcggctggaggagaagtcacggatcaagtgtgatcagtattggcccaacagaggcacggagacctacggcttcatccaggtcacgttgctagataccatcgagctggccacattctgcgtcaggacattctctctgcacaagaatggctccagtgagaaacgcgaggtccgccagttccagtttacggcgtggccggaccatggcgtgcccgaatacccaacgcccttcctggctttcctgcggagagtcaagacctgcaacccgccagatgccggccccatcgtggttcactgcagtgccggtgtgggccgcacaggctgctttatcgtcatcgacgccatgcttgagcggatcaagccagagaagacagtcgatgtctatggccacgtgacgctcatgaggtcccagcgcaactacatggtgcagacggaggaccagtacagcttcatccacgaggccctgctggaggccgtgggctgtggcaacacagaagtgcccgcacgcagcctctatgcctacatccagaagctggcccaggtggagcctggcgaacacgtcactggcatggaactcgagttcaagcggctggctaactccaaggcccacacgtcacgcttcatcagtgccaatctgccttgtaacaagttcaagaaccgcctggtgaacatcatgccctatgagagcacacgggtctgtctgcaacccatccggggtgtggagggctctgactacatcaacgccagcttcattgatggctacaggcagcagaaggcctacatcgcgacacaggggccgctggcggagaccacggaagacttctggcgcatgctgtgggagaacaattcgacgatcgtggtgatgctgaccaagctgcgggagatgggccgggagaagtgtcaccagtactggccggccgagcgctctgcccgctaccagtactttgtggtagatccgatggcagaatacaacatgcctcagtatatcctgcgagagttcaaggtcacagatgcccgggatggccagtcccggactgtccggcagttccagttcacagactggccggaacagggtgtgccaaagtcgggggagggcttcatcgacttcattggccaagtgcataagactaaggagcagtttggccaggacggccccatctctgtccactgcagtgccggcgtgggcaggacgggcgtcttcatcacgcttagcatcgtgctggagcggatgcggtatgaaggcgtggtggacatctttcagacggtgaagatgctacgaacccagcggccggccatggtgcagacagaggatgagtaccagttctgttaccaggcggcactggagtacctcggaagctttgaccactatgcaacctaaagccatggttccccccaggcccgacaccactggccccggatgcctctgcccctcccgggcggacctcctgaggcctggacccccagtgggcagggcaggaggtggcagcggcagcagctgtgtttctgcaccatttccgaggacgacgcagcccctcgagcccccccaccggccccggccgccccagcgacctccctggcaccggccgccgccttcaaatacttggcacattcctcctttccttccaattccaaaaccagattccggggtggggggtggggggatggtgagcaaataggagtgctccccagaaccagaggagggtggggcacagaccatagacggacccctcgtcctcccccagcggtggtagggggacccggggggctcctccccgctctgcagcctggggacactgggctgggaccagaatccagctttcttttaaaactctcagtgtaactgtatcccgtgacatttcattttttttaaatagtgtatttttttttccatttttttttttaagagaaacaaacaaaagactcgccagtcaatgactttcaaagagaactaactttggcttattcatattctgttcaaagacagtctattttttcactgtagaaagcgtccttgtgtgatagttacgttcgcaaacgcgcacgccaggcccatggctgtaccttggcttttttttttttttttttttttttaatttttcctaccatcagaaagtgtgctttgctcacagaagaatgggatgtccttttttctttcttggctttttttttccccctttttgtttcatttttataaattaaattttcagacatatcaaatacagttctgagggtaaggtcatgggggagctcggacccagtggcgttgggtgcggttgagggggacgctgctgtaagaggagagagatgacagtggtcctcctctgagagcctgagctgtctccccgtctcccgcccccaaggagacagagaggatcctacttcttcggggacagtggctgtatggctgtgctgccccacatcagggaccctttccccctgggactgtggggcagtttgggagcaaaaccagaaggacaggcccccctctacccgcctaccctgagcaagcgagttgttcctctttgtacaagggcaggtctgcggttactttcaacactgtttattccagcggaagcagccgggtggttttcccacccccgtgtatgtagatatatcgactttgtattaaaggaagatcgtctga

SEQ ID NO: 132709 - DNA, 7347 bp, Artificial Sequence
  derived and/or modified sequence
cctcgcgccgcccgcccggcagcccggccggcgcgcgcacgccgcgagccgctggcgctcgggctccgctcggatcccatgcaacagccacgatgtgaagcggggcagagccgggggagcccagcccagccagcctccagacgttgccccatctgacgctcggctcgaggcctctctgtgagggaccggggggccatccccctccagggcggagatcggaggtcgctgccaagcatggcgcccacctggggccctggcatggtgtctgtggttggtcccatgggcctccttgtggtcctgctcgttggaggctgtgcagcagaagagccccccaggtttatcaaagaacccaaggaccagatcggcgtgtcggggggtgtggcctctttcgtgtgtcaggccacgggtgaccccaagccacgagtgacctggaacaagaagggcaagaaggtcaactctcagcgctttgagacgattgagtttgatgagagtgcaggggcagtgctgaggatccagccgctgaggacaccgcgggatgaaaacgtgtacgagtgtgtggcccagaactcggttggggagatcacagtccatgccaagcttactgtcctccgagaggaccagctgccctctggcttccccaacatcgacatgggcccacagttgaaggtggtggagcggacacggacagccaccatgctctgtgcagccagcggcaaccctgaccctgagatcacctggttcaaggacttcctgcctgtggatcctagtgccagcaatggacgcatcaaacagctgcgatcagaaacctttgaaagcactccgattcgaggagccctgcagattgaaagcagtgaggaaaccgaccagggcaaatatgagtgtgtggccaccaacagcgccggcgtgcgctactcctcacctgccaacctctacgtgcgagagcttcgagaagtccgccgcgtggccccgcgcttctccatcctgcccatgagccacgagatcatgccagggggcaacgtgaacatcacctgcgtggccgtgggctcgcccatgccatacgtgaagtggatgcagggggccgaggacctgacccccgaggatgacatgcccgtgggtcggaacgtgctggaactcacagatgtcaaggactcggccaactacacctgcgtggccatgtccagcctgggcgtcattgaggcggttgctcagatcacggtgaaatctctccccaaagctcccgggactcccatggtgactgagaacacagccaccagcatcaccatcacgtgggactcgggcaacccagatcctgtgtcctattacgtcatcgaatataaatccaagagccaagacgggccgtatcagattaaagaggacatcaccaccacacgttacagcatcggcggcctgagccccaactcggagtacgagatctgggtgtcggccgtcaactccatcggccaggggccccccagcgagtccgtggtcacccgcacaggcgagcaggccccggccagcgcgccgcggaacgtgcaagcccggatgctcagcgcgaccaccatgattgtgcagtgggaggagccggtggagcccaacggcctgatccgcggctaccgcgtctactacaccatggaaccggagcaccccgtgggcaactggcagaagcacaacgtggacgacagcctgctgaccaccgtgggcagcctgctggaggacgagacctacaccgtgcgggtgctcgccttcacctccgtcggcgacgggcccctctcggaccccatccaggtcaagacgcagcagggagtgccgggccagcccatgaacctgcgggccgaggccaggtcggagaccagcatcacgctgtcctggagccccccgcggcaggagagtatcatcaagtacgagctcctcttccgggaaggcgaccatggccgggaggtgggaaggaccttcgacccgacgacttcctacgtggtggaggacctgaagcccaacacggagtacgccttccgcctggcggcccgctcgccgcagggcctgggcgccttcacccccgtggtgcggcagcgcacgctgcagtccaaaccgtcagccccccctcaagacgttaaatgtgtcagcgtgcgctccacggccattttggtaagttggcgcccgccgccgccggaaacgcacaacggggccctggtgggctacagcgtccgctaccgaccgctgggctcagaggacccggaacccaaggaggtgaacggcatccccccgaccaccactcagatcctgctggaggccttggagaagtggacccagtaccgcatcacgactgtcgctcacacagaggtgggaccagggcccgagagctcgcccgtggtcgtccgcaccgacgaggatgtgcccagcgcgccgccgcggaaggtggaggcggaggcgctcaacgccacggccatccgcgtgctgtggcgctcgcccgcgcccggccggcagcacggccagatccgcggctaccaggtccactacgtgcgcatggagggcgccgaggcccgcgggccgccgcgcatcaaggacgtcatgctggccgatgcccagtgggagacggatgacacggccgaatatgagatggtcatcacaaacttgcagcctgagaccgcgtactccatcacggtagccgcctacaccatgaagggcgatggcgctcgcagcaaacccaaggtggttgtgaccaagggagcagtgctgggccgcccaaccctgtcggtgcagcagacccccgagggcagcctgctggcacgctgggagcccccggctggcaccgcggaggaccaggtgctgggctaccgcctgcagtttggccgtgaggactcgacgcccctggccaccctggagttcccgccctccgaggaccgctacacggcatcaggcgtgcacaagggggccacgtatgtgttccggcttgcggcccggagccgcggcggcctgggcgaggaggcagccgaggtcctgagcatcccggaggacacgccccgtggccacccgcagattctggaggcggccggcaacgcctcggccgggaccgtccttctccgctggctgccacccgtgcccgccgagcgcaacggggccatcgtcaaatacacggtggccgtgcgggaggccggtgccctgggccctgcccgagagactgagctgccggcagcggctgagccgggcgcggagaacgcgctcacgctgcagggcctgaagcccgacacggcctatgacctccaagtgcgagcccacacgcgccggggccctggccccttcagcccccccgtccgctaccggacgttcctgcgggaccaagtctcgcccaagaacttcaaggtgaaaatgatcatgaagacatcagttctgctcagctgggagttccctgacaactacaactcacccacaccctacaagatccagtacaatgggctcacactggatgtggatggccgtaccaccaagaagctcatcacgcacctcaagccccacaccttctacaactttgtgctgaccaatcgcggcagcagcctgggcggcctccagcagacggtcaccgcctggactgccttcaacctgctcaacggcaagcccagcgtcgcccccaagcctgatgctgacggcttcatcatggtgtatcttcctgacggccagagccccgtgcctgtccagagctatttcattgtgatggtgccactgcgcaagtctcgtggaggccaattcctgaccccgctgggtagcccagaggacatggatctggaagagctcatccaggacatctcacggctacagaggcgcagcctgcggcactcgcgtcagctggaggtgccccggccctatattgcagctcgcttctctgtgctgccacccacgttccatcccggcgaccagaagcagtatggcggcttcgataaccggggcctggagcccggccaccgctatgtcctcttcgtgcttgccgtgcttcagaagagcgagcctacctttgcagccagtcccttctcagaccccttccagctggataacccggacccccagcccatcgtggatggcgaggaggggcttatctgggtgatcgggcctgtgctggccgtggtcttcataatctgcattgtcattgctatcctgctctacaagaacaaacccgacagtaaacgcaaggactcagaaccccgcaccaaatgcctcctgaacaatgccgacctcgcccctcaccaccccaaggaccctgtggaaatgagacgcattaacttccagactccagattcaggcctcaggagccccctcagggagccggggtttcactttgaaagcatgcttagccacccgccaattcccatcgcagacatggcggagcacacggagcggctcaaggccaacgacagcctcaagctctcccaggagtatgagtccatcgaccctggacagcagttcacatgggaacattccaacctggaagtgaacaagccgaagaaccgctatgccaacgtcatcgcctatgaccactcccgtgtcatcctccagcccattgaaggcatcatgggcagtgattacatcaatgccaactacgtggacggctaccggtgtcagaacgcgtacattgccacgcaggggccgctgcctgagacctttggggacttctggcgtatggtgtgggagcagcggtcggcgaccatcgtcatgatgacgcggctggaggagaagtcacggatcaagtgtgatcagtattggcccaacagaggcacggagacctacggcttcatccaggtcacgttgctagataccatcgagctggccacattctgcgtcaggacattctctctgcacaagaatggctccagtgagaaacgcgaggtccgccagttccagtttacggcgtggccggaccatggcgtgcccgaatacccaacgcccttcctggctttcctgcggagagtcaagacctgcaacccgccagatgccggccccatcgtggttcactgcagtgccggtgtgggccgcacaggctgctttatcgtcatcgacgccatgcttgagcggatcaagccagagaagacagtcgatgtctatggccacgtgacgctcatgaggtcccagcgcaactacatggtgcagacggaggaccagtacagcttcatccacgaggccctgctggaggccgtgggctgtggcaacacagaagtgcccgcacgcagcctctatgcctacatccagaagctggcccaggtggagcctggcgaacacgtcactggcatggaactcgagttcaagcggctggctaactccaaggcccacacgtcacgcttcatcagtgccaatctgccttgtaacaagttcaagaaccgcctggtgaacatcatgccctatgagagcacacgggtctgtctgcaacccatccggggtgtggagggctctgactacatcaacgccagcttcattgatggctacaggcagcagaaggcctacatcgcgacacaggggccgctggcggagaccacggaagacttctggcgcatgctgtgggagaacaattcgacgatcgtggtgatgctgaccaagctgcgggagatgggccgggagaagtgtcaccagtactggccggccgagcgctctgcccgctaccagtactttgtggtagatccgatggcagaatacaacatgcctcagtatatcctgcgagagttcaaggtcacagatgcccgggatggccagtcccggactgtccggcagttccagttcacagactggccggaacagggtgtgccaaagtcgggggagggcttcatcgacttcattggccaagtgcataagactaaggagcagtttggccaggacggccccatctctgtccactgcagtgccggcgtgggcaggacgggcgtcttcatcacgcttagcatcgtgctggagcggatgcggtatgaaggcgtggtggacatctttcagacggtgaagatgctacgaacccagcggccggccatggtgcagacagaggatgagtaccagttctgttaccaggcggcactggagtacctcggaagctttgaccactatgcaacctaaagccatggttccccccaggcccgacaccactggccccggatgcctctgcccctcccgggcggacctcctgaggcctggacccccagtgggcagggcaggaggtggcagcggcagcagctgtgtttctgcaccatttccgaggacgacgcagcccctcgagcccccccaccggccccggccgccccagcgacctccctggcaccggccgccgccttcaaatacttggcacattcctcctttccttccaattccaaaaccagattccggggtggggggtggggggatggtgagcaaataggagtgctccccagaaccagaggagggtggggcacagaccatagacggacccctcgtcctcccccagcggtggtagggggacccggggggctcctccccgctctgcagcctggggacactgggctgggaccagaatccagctttcttttaaaactctcagtgtaactgtatcccgtgacatttcattttttttaaatagtgtatttttttttccatttttttttttaagagaaacaaacaaaagactcgccagtcaatgactttcaaagagaactaactttggcttattcatattctgttcaaagacagtctattttttcactgtagaaagcgtccttgtgtgatagttacgttcgcaaacgcgcacgccaggcccatggctgtaccttggcttttttttttttttttttttttttaatttttcctaccatcagaaagtgtgctttgctcacagaagaatgggatgtccttttttctttcttggctttttttttccccctttttgtttcatttttataaattaaattttcagacatatcaaatacagttctgagggtaaggtcatgggggagctcggacccagtggcgttgggtgcggttgagggggacgctgctgtaagaggagagagatgacagtggtcctcctctgagagcctgagctgtctccccgtctcccgcccccaaggagacagagaggatcctacttcttcggggacagtggctgtatggctgtgctgccccacatcagggaccctttccccctgggactgtggggcagtttgggagcaaaaccagaaggacaggcccccctctacccgcctaccctgagcaagcgagttgttcctctttgtacaagggcaggtctgcggttactttcaacactgtttattccagcggaagcagccgggtggttttcccacccccgtgtatgtagatatatcgactttgtattaaaggaagatcgtctga

SEQ ID NO: 132710 - DNA, 7350 bp, Artificial Sequence
  derived and/or modified sequence
cctcgcgccgcccgcccggcagcccggccggcgcgcgcacgccgcgagccgctggcgctcgggctccgctcggatcccatgcaacagccacgatgtgaagcggggcagagccgggggagcccagcccagccagcctccagacgttgccccatctgacgctcggctcgaggcctctctgtgagggaccggggggccatccccctccagggcggagatcggaggtcgctgccaagcatggcgcccacctggggccctggcatggtgtctgtggttggtcccatgggcctccttgtggtcctgctcgttggaggctgtgcagcagaagagccccccaggtttatcaaagaacccaaggaccagatcggcgtgtcggggggtgtggcctctttcgtgtgtcaggccacgggtgaccccaagccacgagtgacctggaacaagaagggcaagaaggtcaactctcagcgctttgagacgattgagtttgatgagagtgcaggggcagtgctgaggatccagccgctgaggacaccgcgggatgaaaacgtgtacgagtgtgtggcccagaactcggttggggagatcacagtccatgccaagcttactgtcctccgagaggaccagctgccctctggcttccccaacatcgacatgggcccacagttgaaggtggtggagcggacacggacagccaccatgctctgtgcagccagcggcaaccctgaccctgagatcacctggttcaaggacttcctgcctgtggatcctagtgccagcaatggacgcatcaaacagctgcgacgttcagaaacctttgaaagcactccgattcgaggagccctgcagattgaaagcagtgaggaaaccgaccagggcaaatatgagtgtgtggccaccaacagcgccggcgtgcgctactcctcacctgccaacctctacgtgcgagagcttcgagaagtccgccgcgtggccccgcgcttctccatcctgcccatgagccacgagatcatgccagggggcaacgtgaacatcacctgcgtggccgtgggctcgcccatgccatacgtgaagtggatgcagggggccgaggacctgacccccgaggatgacatgcccgtgggtcggaacgtgctggaactcacagatgtcaaggactcggccaactacacctgcgtggccatgtccagcctgggcgtcattgaggcggttgctcagatcacggtgaaatctctccccaaagctcccgggactcccatggtgactgagaacacagccaccagcatcaccatcacgtgggactcgggcaacccagatcctgtgtcctattacgtcatcgaatataaatccaagagccaagacgggccgtatcagattaaagaggacatcaccaccacacgttacagcatcggcggcctgagccccaactcggagtacgagatctgggtgtcggccgtcaactccatcggccaggggccccccagcgagtccgtggtcacccgcacaggcgagcaggccccggccagcgcgccgcggaacgtgcaagcccggatgctcagcgcgaccaccatgattgtgcagtgggaggagccggtggagcccaacggcctgatccgcggctaccgcgtctactacaccatggaaccggagcaccccgtgggcaactggcagaagcacaacgtggacgacagcctgctgaccaccgtgggcagcctgctggaggacgagacctacaccgtgcgggtgctcgccttcacctccgtcggcgacgggcccctctcggaccccatccaggtcaagacgcagcagggagtgccgggccagcccatgaacctgcgggccgaggccaggtcggagaccagcatcacgctgtcctggagccccccgcggcaggagagtatcatcaagtacgagctcctcttccgggaaggcgaccatggccgggaggtgggaaggaccttcgacccgacgacttcctacgtggtggaggacctgaagcccaacacggagtacgccttccgcctggcggcccgctcgccgcagggcctgggcgccttcacccccgtggtgcggcagcgcacgctgcagtccaaaccgtcagccccccctcaagacgttaaatgtgtcagcgtgcgctccacggccattttggtaagttggcgcccgccgccgccggaaacgcacaacggggccctggtgggctacagcgtccgctaccgaccgctgggctcagaggacccggaacccaaggaggtgaacggcatccccccgaccaccactcagatcctgctggaggccttggagaagtggacccagtaccgcatcacgactgtcgctcacacagaggtgggaccagggcccgagagctcgcccgtggtcgtccgcaccgacgaggatgtgcccagcgcgccgccgcggaaggtggaggcggaggcgctcaacgccacggccatccgcgtgctgtggcgctcgcccgcgcccggccggcagcacggccagatccgcggctaccaggtccactacgtgcgcatggagggcgccgaggcccgcgggccgccgcgcatcaaggacgtcatgctggccgatgcccagtgggagacggatgacacggccgaatatgagatggtcatcacaaacttgcagcctgagaccgcgtactccatcacggtagccgcctacaccatgaagggcgatggcgctcgcagcaaacccaaggtggttgtgaccaagggagcagtgctgggccgcccaaccctgtcggtgcagcagacccccgagggcagcctgctggcacgctgggagcccccggctggcaccgcggaggaccaggtgctgggctaccgcctgcagtttggccgtgaggactcgacgcccctggccaccctggagttcccgccctccgaggaccgctacacggcatcaggcgtgcacaagggggccacgtatgtgttccggcttgcggcccggagccgcggcggcctgggcgaggaggcagccgaggtcctgagcatcccggaggacacgccccgtggccacccgcagattctggaggcggccggcaacgcctcggccgggaccgtccttctccgctggctgccacccgtgcccgccgagcgcaacggggccatcgtcaaatacacggtggccgtgcgggaggccggtgccctgggccctgcccgagagactgagctgccggcagcggctgagccgggcgcggagaacgcgctcacgctgcagggcctgaagcccgacacggcctatgacctccaagtgcgagcccacacgcgccggggccctggccccttcagcccccccgtccgctaccggacgttcctgcgggaccaagtctcgcccaagaacttcaaggtgaaaatgatcatgaagacatcagttctgctcagctgggagttccctgacaactacaactcacccacaccctacaagatccagtacaatgggctcacactggatgtggatggccgtaccaccaagaagctcatcacgcacctcaagccccacaccttctacaactttgtgctgaccaatcgcggcagcagcctgggcggcctccagcagacggtcaccgcctggactgccttcaacctgctcaacggcaagcccagcgtcgcccccaagcctgatgctgacggcttcatcatggtgtatcttcctgacggccagagccccgtgcctgtccagagctatttcattgtgatggtgccactgcgcaagtctcgtggaggccaattcctgaccccgctgggtagcccagaggacatggatctggaagagctcatccaggacatctcacggctacagaggcgcagcctgcggcactcgcgtcagctggaggtgccccggccctatattgcagctcgcttctctgtgctgccacccacgttccatcccggcgaccagaagcagtatggcggcttcgataaccggggcctggagcccggccaccgctatgtcctcttcgtgcttgccgtgcttcagaagagcgagcctacctttgcagccagtcccttctcagaccccttccagctggataacccggacccccagcccatcgtggatggcgaggaggggcttatctgggtgatcgggcctgtgctggccgtggtcttcataatctgcattgtcattgctatcctgctctacaagaagaagccccatagtaaacgcaaggactcagaaccccgcaccaaatgcctcctgaacaatgccgacctcgcccctcaccaccccaaggaccctgtggaaatgagacgcattaacttccagactccagattcaggcctcaggagccccctcagggagccggggtttcactttgaaagcatgcttagccacccgccaattcccatcgcagacatggcggagcacacggagcggctcaaggccaacgacagcctcaagctctcccaggagtatgagtccatcgaccctggacagcagttcacatgggaacattccaacctggaagtgaacaagccgaagaaccgctatgccaacgtcatcgcctatgaccactcccgtgtcatcctccagcccattgaaggcatcatgggcagtgattacatcaatgccaactacgtggacggctaccggtgtcagaacgcgtacattgccacgcaggggccgctgcctgagacctttggggacttctggcgtatggtgtgggagcagcggtcggcgaccatcgtcatgatgacgcggctggaggagaagtcacggatcaagtgtgatcagtattggcccaacagaggcacggagacctacggcttcatccaggtcacgttgctagataccatcgagctggccacattctgcgtcaggacattctctctgcacaagaatggctccagtgagaaacgcgaggtccgccagttccagtttacggcgtggccggaccatggcgtgcccgaatacccaacgcccttcctggctttcctgcggagagtcaagacctgcaacccgccagatgccggccccatcgtggttcactgcagtgccggtgtgggccgcacaggctgctttatcgtcatcgacgccatgcttgagcggatcaagccagagaagacagtcgatgtctatggccacgtgacgctcatgaggtcccagcgcaactacatggtgcagacggaggaccagtacagcttcatccacgaggccctgctggaggccgtgggctgtggcaacacagaagtgcccgcacgcagcctctatgcctacatccagaagctggcccaggtggagcctggcgaacacgtcactggcatggaactcgagttcaagcggctggctaactccaaggcccacacgtcacgcttcatcagtgccaatctgccttgtaacaagttcaagaaccgcctggtgaacatcatgccctatgagagcacacgggtctgtctgcaacccatccggggtgtggagggctctgactacatcaacgccagcttcattgatggctacaggcagcagaaggcctacatcgcgacacaggggccgctggcggagaccacggaagacttctggcgcatgctgtgggagaacaattcgacgatcgtggtgatgctgaccaagctgcgggagatgggccgggagaagtgtcaccagtactggccggccgagcgctctgcccgctaccagtactttgtggtagatccgatggcagaatacaacatgcctcagtatatcctgcgagagttcaaggtcacagatgcccgggatggccagtcccggactgtccggcagttccagttcacagactggccggaacagggtgtgccaaagtcgggggagggcttcatcgacttcattggccaagtgcataagactaaggagcagtttggccaggacggccccatctctgtccactgcagtgccggcgtgggcaggacgggcgtcttcatcacgcttagcatcgtgctggagcggatgcggtatgaaggcgtggtggacatctttcagacggtgaagatgctacgaacccagcggccggccatggtgcagacagaggatgagtaccagttctgttaccaggcggcactggagtacctcggaagctttgaccactatgcaacctaaagccatggttccccccaggcccgacaccactggccccggatgcctctgcccctcccgggcggacctcctgaggcctggacccccagtgggcagggcaggaggtggcagcggcagcagctgtgtttctgcaccatttccgaggacgacgcagcccctcgagcccccccaccggccccggccgccccagcgacctccctggcaccggccgccgccttcaaatacttggcacattcctcctttccttccaattccaaaaccagattccggggtggggggtggggggatggtgagcaaataggagtgctccccagaaccagaggagggtggggcacagaccatagacggacccctcgtcctcccccagcggtggtagggggacccggggggctcctccccgctctgcagcctggggacactgggctgggaccagaatccagctttcttttaaaactctcagtgtaactgtatcccgtgacatttcattttttttaaatagtgtatttttttttccatttttttttttaagagaaacaaacaaaagactcgccagtcaatgactttcaaagagaactaactttggcttattcatattctgttcaaagacagtctattttttcactgtagaaagcgtccttgtgtgatagttacgttcgcaaacgcgcacgccaggcccatggctgtaccttggcttttttttttttttttttttttttaatttttcctaccatcagaaagtgtgctttgctcacagaagaatgggatgtccttttttctttcttggctttttttttccccctttttgtttcatttttataaattaaattttcagacatatcaaatacagttctgagggtaaggtcatgggggagctcggacccagtggcgttgggtgcggttgagggggacgctgctgtaagaggagagagatgacagtggtcctcctctgagagcctgagctgtctccccgtctcccgcccccaaggagacagagaggatcctacttcttcggggacagtggctgtatggctgtgctgccccacatcagggaccctttccccctgggactgtggggcagtttgggagcaaaaccagaaggacaggcccccctctacccgcctaccctgagcaagcgagttgttcctctttgtacaagggcaggtctgcggttactttcaacactgtttattccagcggaagcagccgggtggttttcccacccccgtgtatgtagatatatcgactttgtattaaaggaagatcgtctga

SEQ ID NO: 132711 - DNA, 5847 bp, Artificial Sequence
  derived and/or modified sequence
atggcccccacctggggccccggcatggtgagcgtggtgggccccatgggcctgctggtggtgctgctggtgggcggctgcgccgccgaggagccccccagattcatcaaggagcccaaggaccagatcggcgtgagcggcggcgtggccagcttcgtgtgccaggccaccggcgaccccaagcccagagtgacctggaacaagaagggcaagaaggtgaacagccagagattcgagaccatcgagttcgacgagagcgccggcgccgtgctgagaatccagcccctgagaacccccagagacgagaacgtgtacgagtgcgtggcccagaacagcgtgggcgagatcaccgtgcacgccaagctgaccgtgctgagagaggaccagctgcccagcggcttccccaacatcgacatgggcccccagctgaaggtggtggagagaaccagaaccgccaccatgctgtgcgccgccagcggcaaccccgaccccgagatcacctggttcaaggacttcctgcccgtggaccccagcgccagcaacggcagaatcaagcagctgagaagcgaccaggccttcagccacctgcccaccggcgccctgcagatcgagagcagcgaggagaccgaccagggcaagtacgagtgcgtggccaccaacagcgccggcgtgagatacagcagccccgccaacctgtacgtgagagtgtggagaaccgtgagaagagtggcccccagattcagcatcctgcccatgagccacgagatcatgcccggcggcaacgtgaacatcacctgcgtggccgtgggcagccccatgccctacgtgaagtggatgcagggcgccgaggacctgacccccgaggacgacatgcccgtgggcagaaacgtgctggagctgaccgacgtgaaggacagcgccaactacacctgcgtggccatgagcagcctgggcgtgatcgaggccgtggcccagatcaccgtgaagagcctgcccaaggcccccggcacccccatggtgaccgagaacaccgccaccagcatcaccatcacctgggacagcggcaaccccgaccccgtgagctactacgtgatcgagtacaagagcaagagccaggacggcccctaccagatcaaggaggacatcaccaccaccagatacagcatcggcggcctgagccccaacagcgagtacgagatctgggtgagcgccgtgaacagcatcggccagggcccccccagcgagagcgtggtgaccagaaccggcgagcaggcccccgccagcgcccccagaaacgtgcaggccagaatgctgagcgccaccaccatgatcgtgcagtgggaggagcccgtggagcccaacggcctgatcagaggctacagagtgtactacaccatggagcccgagcaccccgtgggcaactggcagaagcacaacgtggacgacagcctgctgaccaccgtgggcagcctgctggaggacgagacctacaccgtgagagtgctggccttcaccagcgtgggcgacggccccctgagcgaccccatccaggtgaagacccagcagggcgtgcccggccagcccatgaacctgagagccgaggccagaagcgagaccagcatcaccctgagctggagcccccccagacaggagagcatcatcaagtacgagctgctgttcagagagggcgaccacggcagagaggtgggcagaaccttcgaccccaccaccagctacgtggtggaggacctgaagcccaacaccgagtacgccttcagactggccgccagaagcccccagggcctgggcgccttcacccccgtggtgagacagagaaccctgcagagcaagcccagcgcccccccccaggacgtgaagtgcgtgagcgtgagaagcaccgccatcctggtgagctggagaccccccccccccgagacccacaacggcgccctggtgggctacagcgtgagatacagacccctgggcagcgaggaccccgagcccaaggaggtgaacggcatcccccccaccaccacccagatcctgctggaggccctggagaagtggacccagtacagaatcaccaccgtggcccacaccgaggtgggccccggccccgagagcagccccgtggtggtgagaaccgacgaggacgtgcccagcgccccccccagaaaggtggaggccgaggccctgaacgccaccgccatcagagtgctgtggagaagccccgcccccggcagacagcacggccagatcagaggctaccaggtgcactacgtgagaatggagggcgccgaggccagaggcccccccagaatcaaggacgtgatgctggccgacgcccagtgggagaccgacgacaccgccgagtacgagatggtgatcaccaacctgcagcccgagaccgcctacagcatcaccgtggccgcctacaccatgaagggcgacggcgccagaagcaagcccaaggtggtggtgaccaagggcgccgtgctgggcagacccaccctgagcgtgcagcagacccccgagggcagcctgctggccagatgggagccccccgccggcaccgccgaggaccaggtgctgggctacagactgcagttcggcagagaggacagcacccccctggccaccctggagttcccccccagcgaggacagatacaccgccagcggcgtgcacaagggcgccacctacgtgttcagactggccgccagaagcagaggcggcctgggcgaggaggccgccgaggtgctgagcatccccgaggacacccccagaggccacccccagatcctggaggccgccggcaacgccagcgccggcaccgtgctgctgagatggctgccccccgtgcccgccgagagaaacggcgccatcgtgaagtacaccgtggccgtgagagaggccggcgccctgggccccgccagagagaccgagctgcccgccgccgccgagcccggcgccgagaacgccctgaccctgcagggcctgaagcccgacaccgcctacgacctgcaggtgagagcccacaccagaagaggccccggccccttcagcccccccgtgagatacagaaccttcctgagagaccaggtgagccccaagaacttcaaggtgaagatgatcatgaagaccagcgtgctgctgagctgggagttccccgacaactacaacagccccaccccctacaagatccagtacaacggcctgaccctggacgtggacggcagaaccaccaagaagctgatcacccacctgaagccccacaccttctacaacttcgtgctgaccaacagaggcagcagcctgggcggcctgcagcagaccgtgaccgcctggaccgccttcaacctgctgaacggcaagcccagcgtggcccccaagcccgacgccgacggcttcatcatggtgtacctgcccgacggccagagccccgtgcccgtgcagagctacttcatcgtgatggtgcccctgagaaagagcagaggcggccagttcctgacccccctgggcagccccgaggacatggacctggaggagctgatccaggacatcagcagactgcagagaagaagcctgagacacagcagacagctggaggtgcccagaccctacatcgccgccagattcagcgtgctgccccccaccttccaccccggcgaccagaagcagtacggcggcttcgacaacagaggcctggagcccggccacagatacgtgctgttcgtgctggccgtgctgcagaagagcgagcccaccttcgccgccagccccttcagcgaccccttccagctggacaaccccgacccccagcccatcgtggacggcgaggagggcctgatctgggtgatcggccccgtgctggccgtggtgttcatcatctgcatcgtgatcgccatcctgctgtacaagaacaagcccgacagcaagagaaaggacagcgagcccagaaccaagtgcctgctgaacaacgccgacctggccccccaccaccccaaggaccccgtggagatgagaagaatcaacttccagacccccgacagcggcctgagaagccccctgagagagcccggcttccacttcgagagcatgctgagccacccccccatccccatcgccgacatggccgagcacaccgagagactgaaggccaacgacagcctgaagctgagccaggagtacgagagcatcgaccccggccagcagttcacctgggagcacagcaacctggaggtgaacaagcccaagaacagatacgccaacgtgatcgcctacgaccacagcagagtgatcctgcagcccatcgagggcatcatgggcagcgactacatcaacgccaactacgtggacggctacagatgccagaacgcctacatcgccacccagggccccctgcccgagaccttcggcgacttctggagaatggtgtgggagcagagaagcgccaccatcgtgatgatgaccagactggaggagaagagcagaatcaagtgcgaccagtactggcccaacagaggcaccgagacctacggcttcatccaggtgaccctgctggacaccatcgagctggccaccttctgcgtgagaaccttcagcctgcacaagaacggcagcagcgagaagagagaggtgagacagttccagttcaccgcctggcccgaccacggcgtgcccgagtaccccacccccttcctggccttcctgagaagagtgaagacctgcaacccccccgacgccggccccatcgtggtgcactgcagcgccggcgtgggcagaaccggctgcttcatcgtgatcgacgccatgctggagagaatcaagcccgagaagaccgtggacgtgtacggccacgtgaccctgatgagaagccagagaaactacatggtgcagaccgaggaccagtacagcttcatccacgaggccctgctggaggccgtgggctgcggcaacaccgaggtgcccgccagaagcctgtacgcctacatccagaagctggcccaggtggagcccggcgagcacgtgaccggcatggagctggagttcaagagactggccaacagcaaggcccacaccagcagattcatcagcgccaacctgccctgcaacaagttcaagaacagactggtgaacatcatgccctacgagagcaccagagtgtgcctgcagcccatcagaggcgtggagggcagcgactacatcaacgccagcttcatcgacggctacagacagcagaaggcctacatcgccacccagggccccctggccgagaccaccgaggacttctggagaatgctgtgggagaacaacagcaccatcgtggtgatgctgaccaagctgagagagatgggcagagagaagtgccaccagtactggcccgccgagagaagcgccagataccagtacttcgtggtggaccccatggccgagtacaacatgccccagtacatcctgagagagttcaaggtgaccgacgccagagacggccagagcagaaccgtgagacagttccagttcaccgactggcccgagcagggcgtgcccaagagcggcgagggcttcatcgacttcatcggccaggtgcacaagaccaaggagcagttcggccaggacggccccatcagcgtgcactgcagcgccggcgtgggcagaaccggcgtgttcatcaccctgagcatcgtgctggagagaatgagatacgagggcgtggtggacatcttccagaccgtgaagatgctgagaacccagagacccgccatggtgcagaccgaggacgagtaccagttctgctaccaggccgccctggagtacctgggcagcttcgaccactacgccacctag

SEQ ID NO: 132712 - DNA, 5847 bp, Artificial Sequence
  derived and/or modified sequence
atggcccccacctggggccccggcatggtgagcgtggtgggccccatgggcctgctggtggtgctgctggtgggcggctgcgccgccgaggagccccccagattcatcaaggagcccaaggaccagatcggcgtgagcggcggcgtggccagcttcgtgtgccaggccaccggcgaccccaagcccagagtgacctggaacaagaagggcaagaaggtgaacagccagagattcgagaccatcgagttcgacgagagcgccggcgccgtgctgagaatccagcccctgagaacccccagagacgagaacgtgtacgagtgcgtggcccagaacagcgtgggcgagatcaccgtgcacgccaagctgaccgtgctgagagaggaccagctgcccagcggcttccccaacatcgacatgggcccccagctgaaggtggtggagagaaccagaaccgccaccatgctgtgcgccgccagcggcaaccccgaccccgagatcacctggttcaaggacttcctgcccgtggaccccagcgccagcaacggcagaatcaagcagctgagaagcgagaccttcgagagcacccccatcagaggcgccctgcagatcgagagcagcgaggagaccgaccagggcaagtacgagtgcgtggccaccaacagcgccggcgtgagatacagcagccccgccaacctgtacgtgagagagctgagagaggtgagaagagtggcccccagattcagcatcctgcccatgagccacgagatcatgcccggcggcaacgtgaacatcacctgcgtggccgtgggcagccccatgccctacgtgaagtggatgcagggcgccgaggacctgacccccgaggacgacatgcccgtgggcagaaacgtgctggagctgaccgacgtgaaggacagcgccaactacacctgcgtggccatgagcagcctgggcgtgatcgaggccgtggcccagatcaccgtgaagagcctgcccaaggcccccggcacccccatggtgaccgagaacaccgccaccagcatcaccatcacctgggacagcggcaaccccgaccccgtgagctactacgtgatcgagtacaagagcaagagccaggacggcccctaccagatcaaggaggacatcaccaccaccagatacagcatcggcggcctgagccccaacagcgagtacgagatctgggtgagcgccgtgaacagcatcggccagggcccccccagcgagagcgtggtgaccagaaccggcgagcaggcccccgccagcgcccccagaaacgtgcaggccagaatgctgagcgccaccaccatgatcgtgcagtgggaggagcccgtggagcccaacggcctgatcagaggctacagagtgtactacaccatggagcccgagcaccccgtgggcaactggcagaagcacaacgtggacgacagcctgctgaccaccgtgggcagcctgctggaggacgagacctacaccgtgagagtgctggccttcaccagcgtgggcgacggccccctgagcgaccccatccaggtgaagacccagcagggcgtgcccggccagcccatgaacctgagagccgaggccagaagcgagaccagcatcaccctgagctggagcccccccagacaggagagcatcatcaagtacgagctgctgttcagagagggcgaccacggcagagaggtgggcagaaccttcgaccccaccaccagctacgtggtggaggacctgaagcccaacaccgagtacgccttcagactggccgccagaagcccccagggcctgggcgccttcacccccgtggtgagacagagaaccctgcagagcaagcccagcgcccccccccaggacgtgaagtgcgtgagcgtgagaagcaccgccatcctggtgagctggagaccccccccccccgagacccacaacggcgccctggtgggctacagcgtgagatacagacccctgggcagcgaggaccccgagcccaaggaggtgaacggcatcccccccaccaccacccagatcctgctggaggccctggagaagtggacccagtacagaatcaccaccgtggcccacaccgaggtgggccccggccccgagagcagccccgtggtggtgagaaccgacgaggacgtgcccagcgccccccccagaaaggtggaggccgaggccctgaacgccaccgccatcagagtgctgtggagaagccccgcccccggcagacagcacggccagatcagaggctaccaggtgcactacgtgagaatggagggcgccgaggccagaggcccccccagaatcaaggacgtgatgctggccgacgcccagtgggagaccgacgacaccgccgagtacgagatggtgatcaccaacctgcagcccgagaccgcctacagcatcaccgtggccgcctacaccatgaagggcgacggcgccagaagcaagcccaaggtggtggtgaccaagggcgccgtgctgggcagacccaccctgagcgtgcagcagacccccgagggcagcctgctggccagatgggagccccccgccggcaccgccgaggaccaggtgctgggctacagactgcagttcggcagagaggacagcacccccctggccaccctggagttcccccccagcgaggacagatacaccgccagcggcgtgcacaagggcgccacctacgtgttcagactggccgccagaagcagaggcggcctgggcgaggaggccgccgaggtgctgagcatccccgaggacacccccagaggccacccccagatcctggaggccgccggcaacgccagcgccggcaccgtgctgctgagatggctgccccccgtgcccgccgagagaaacggcgccatcgtgaagtacaccgtggccgtgagagaggccggcgccctgggccccgccagagagaccgagctgcccgccgccgccgagcccggcgccgagaacgccctgaccctgcagggcctgaagcccgacaccgcctacgacctgcaggtgagagcccacaccagaagaggccccggccccttcagcccccccgtgagatacagaaccttcctgagagaccaggtgagccccaagaacttcaaggtgaagatgatcatgaagaccagcgtgctgctgagctgggagttccccgacaactacaacagccccaccccctacaagatccagtacaacggcctgaccctggacgtggacggcagaaccaccaagaagctgatcacccacctgaagccccacaccttctacaacttcgtgctgaccaacagaggcagcagcctgggcggcctgcagcagaccgtgaccgcctggaccgccttcaacctgctgaacggcaagcccagcgtggcccccaagcccgacgccgacggcttcatcatggtgtacctgcccgacggccagagccccgtgcccgtgcagagctacttcatcgtgatggtgcccctgagaaagagcagaggcggccagttcctgacccccctgggcagccccgaggacatggacctggaggagctgatccaggacatcagcagactgcagagaagaagcctgagacacagcagacagctggaggtgcccagaccctacatcgccgccagattcagcgtgctgccccccaccttccaccccggcgaccagaagcagtacggcggcttcgacaacagaggcctggagcccggccacagatacgtgctgttcgtgctggccgtgctgcagaagagcgagcccaccttcgccgccagccccttcagcgaccccttccagctggacaaccccgacccccagcccatcgtggacggcgaggagggcctgatctgggtgatcggccccgtgctggccgtggtgttcatcatctgcatcgtgatcgccatcctgctgtacaagaacaagcccgacagcaagagaaaggacagcgagcccagaaccaagtgcctgctgaacaacgccgacctggccccccaccaccccaaggaccccgtggagatgagaagaatcaacttccagacccccgacagcggcctgagaagccccctgagagagcccggcttccacttcgagagcatgctgagccacccccccatccccatcgccgacatggccgagcacaccgagagactgaaggccaacgacagcctgaagctgagccaggagtacgagagcatcgaccccggccagcagttcacctgggagcacagcaacctggaggtgaacaagcccaagaacagatacgccaacgtgatcgcctacgaccacagcagagtgatcctgcagcccatcgagggcatcatgggcagcgactacatcaacgccaactacgtggacggctacagatgccagaacgcctacatcgccacccagggccccctgcccgagaccttcggcgacttctggagaatggtgtgggagcagagaagcgccaccatcgtgatgatgaccagactggaggagaagagcagaatcaagtgcgaccagtactggcccaacagaggcaccgagacctacggcttcatccaggtgaccctgctggacaccatcgagctggccaccttctgcgtgagaaccttcagcctgcacaagaacggcagcagcgagaagagagaggtgagacagttccagttcaccgcctggcccgaccacggcgtgcccgagtaccccacccccttcctggccttcctgagaagagtgaagacctgcaacccccccgacgccggccccatcgtggtgcactgcagcgccggcgtgggcagaaccggctgcttcatcgtgatcgacgccatgctggagagaatcaagcccgagaagaccgtggacgtgtacggccacgtgaccctgatgagaagccagagaaactacatggtgcagaccgaggaccagtacagcttcatccacgaggccctgctggaggccgtgggctgcggcaacaccgaggtgcccgccagaagcctgtacgcctacatccagaagctggcccaggtggagcccggcgagcacgtgaccggcatggagctggagttcaagagactggccaacagcaaggcccacaccagcagattcatcagcgccaacctgccctgcaacaagttcaagaacagactggtgaacatcatgccctacgagagcaccagagtgtgcctgcagcccatcagaggcgtggagggcagcgactacatcaacgccagcttcatcgacggctacagacagcagaaggcctacatcgccacccagggccccctggccgagaccaccgaggacttctggagaatgctgtgggagaacaacagcaccatcgtggtgatgctgaccaagctgagagagatgggcagagagaagtgccaccagtactggcccgccgagagaagcgccagataccagtacttcgtggtggaccccatggccgagtacaacatgccccagtacatcctgagagagttcaaggtgaccgacgccagagacggccagagcagaaccgtgagacagttccagttcaccgactggcccgagcagggcgtgcccaagagcggcgagggcttcatcgacttcatcggccaggtgcacaagaccaaggagcagttcggccaggacggccccatcagcgtgcactgcagcgccggcgtgggcagaaccggcgtgttcatcaccctgagcatcgtgctggagagaatgagatacgagggcgtggtggacatcttccagaccgtgaagatgctgagaacccagagacccgccatggtgcagaccgaggacgagtaccagttctgctaccaggccgccctggagtacctgggcagcttcgaccactacgccacctag

SEQ ID NO: 132713 - DNA, 5850 bp, Artificial Sequence
  derived and/or modified sequence
atggcccccacctggggccccggcatggtgagcgtggtgggccccatgggcctgctggtggtgctgctggtgggcggctgcgccgccgaggagccccccagattcatcaaggagcccaaggaccagatcggcgtgagcggcggcgtggccagcttcgtgtgccaggccaccggcgaccccaagcccagagtgacctggaacaagaagggcaagaaggtgaacagccagagattcgagaccatcgagttcgacgagagcgccggcgccgtgctgagaatccagcccctgagaacccccagagacgagaacgtgtacgagtgcgtggcccagaacagcgtgggcgagatcaccgtgcacgccaagctgaccgtgctgagagaggaccagctgcccagcggcttccccaacatcgacatgggcccccagctgaaggtggtggagagaaccagaaccgccaccatgctgtgcgccgccagcggcaaccccgaccccgagatcacctggttcaaggacttcctgcccgtggaccccagcgccagcaacggcagaatcaagcagctgagaagaagcgagaccttcgagagcacccccatcagaggcgccctgcagatcgagagcagcgaggagaccgaccagggcaagtacgagtgcgtggccaccaacagcgccggcgtgagatacagcagccccgccaacctgtacgtgagagagctgagagaggtgagaagagtggcccccagattcagcatcctgcccatgagccacgagatcatgcccggcggcaacgtgaacatcacctgcgtggccgtgggcagccccatgccctacgtgaagtggatgcagggcgccgaggacctgacccccgaggacgacatgcccgtgggcagaaacgtgctggagctgaccgacgtgaaggacagcgccaactacacctgcgtggccatgagcagcctgggcgtgatcgaggccgtggcccagatcaccgtgaagagcctgcccaaggcccccggcacccccatggtgaccgagaacaccgccaccagcatcaccatcacctgggacagcggcaaccccgaccccgtgagctactacgtgatcgagtacaagagcaagagccaggacggcccctaccagatcaaggaggacatcaccaccaccagatacagcatcggcggcctgagccccaacagcgagtacgagatctgggtgagcgccgtgaacagcatcggccagggcccccccagcgagagcgtggtgaccagaaccggcgagcaggcccccgccagcgcccccagaaacgtgcaggccagaatgctgagcgccaccaccatgatcgtgcagtgggaggagcccgtggagcccaacggcctgatcagaggctacagagtgtactacaccatggagcccgagcaccccgtgggcaactggcagaagcacaacgtggacgacagcctgctgaccaccgtgggcagcctgctggaggacgagacctacaccgtgagagtgctggccttcaccagcgtgggcgacggccccctgagcgaccccatccaggtgaagacccagcagggcgtgcccggccagcccatgaacctgagagccgaggccagaagcgagaccagcatcaccctgagctggagcccccccagacaggagagcatcatcaagtacgagctgctgttcagagagggcgaccacggcagagaggtgggcagaaccttcgaccccaccaccagctacgtggtggaggacctgaagcccaacaccgagtacgccttcagactggccgccagaagcccccagggcctgggcgccttcacccccgtggtgagacagagaaccctgcagagcaagcccagcgcccccccccaggacgtgaagtgcgtgagcgtgagaagcaccgccatcctggtgagctggagaccccccccccccgagacccacaacggcgccctggtgggctacagcgtgagatacagacccctgggcagcgaggaccccgagcccaaggaggtgaacggcatcccccccaccaccacccagatcctgctggaggccctggagaagtggacccagtacagaatcaccaccgtggcccacaccgaggtgggccccggccccgagagcagccccgtggtggtgagaaccgacgaggacgtgcccagcgccccccccagaaaggtggaggccgaggccctgaacgccaccgccatcagagtgctgtggagaagccccgcccccggcagacagcacggccagatcagaggctaccaggtgcactacgtgagaatggagggcgccgaggccagaggcccccccagaatcaaggacgtgatgctggccgacgcccagtgggagaccgacgacaccgccgagtacgagatggtgatcaccaacctgcagcccgagaccgcctacagcatcaccgtggccgcctacaccatgaagggcgacggcgccagaagcaagcccaaggtggtggtgaccaagggcgccgtgctgggcagacccaccctgagcgtgcagcagacccccgagggcagcctgctggccagatgggagccccccgccggcaccgccgaggaccaggtgctgggctacagactgcagttcggcagagaggacagcacccccctggccaccctggagttcccccccagcgaggacagatacaccgccagcggcgtgcacaagggcgccacctacgtgttcagactggccgccagaagcagaggcggcctgggcgaggaggccgccgaggtgctgagcatccccgaggacacccccagaggccacccccagatcctggaggccgccggcaacgccagcgccggcaccgtgctgctgagatggctgccccccgtgcccgccgagagaaacggcgccatcgtgaagtacaccgtggccgtgagagaggccggcgccctgggccccgccagagagaccgagctgcccgccgccgccgagcccggcgccgagaacgccctgaccctgcagggcctgaagcccgacaccgcctacgacctgcaggtgagagcccacaccagaagaggccccggccccttcagcccccccgtgagatacagaaccttcctgagagaccaggtgagccccaagaacttcaaggtgaagatgatcatgaagaccagcgtgctgctgagctgggagttccccgacaactacaacagccccaccccctacaagatccagtacaacggcctgaccctggacgtggacggcagaaccaccaagaagctgatcacccacctgaagccccacaccttctacaacttcgtgctgaccaacagaggcagcagcctgggcggcctgcagcagaccgtgaccgcctggaccgccttcaacctgctgaacggcaagcccagcgtggcccccaagcccgacgccgacggcttcatcatggtgtacctgcccgacggccagagccccgtgcccgtgcagagctacttcatcgtgatggtgcccctgagaaagagcagaggcggccagttcctgacccccctgggcagccccgaggacatggacctggaggagctgatccaggacatcagcagactgcagagaagaagcctgagacacagcagacagctggaggtgcccagaccctacatcgccgccagattcagcgtgctgccccccaccttccaccccggcgaccagaagcagtacggcggcttcgacaacagaggcctggagcccggccacagatacgtgctgttcgtgctggccgtgctgcagaagagcgagcccaccttcgccgccagccccttcagcgaccccttccagctggacaaccccgacccccagcccatcgtggacggcgaggagggcctgatctgggtgatcggccccgtgctggccgtggtgttcatcatctgcatcgtgatcgccatcctgctgtacaagaagaagccccacagcaagagaaaggacagcgagcccagaaccaagtgcctgctgaacaacgccgacctggccccccaccaccccaaggaccccgtggagatgagaagaatcaacttccagacccccgacagcggcctgagaagccccctgagagagcccggcttccacttcgagagcatgctgagccacccccccatccccatcgccgacatggccgagcacaccgagagactgaaggccaacgacagcctgaagctgagccaggagtacgagagcatcgaccccggccagcagttcacctgggagcacagcaacctggaggtgaacaagcccaagaacagatacgccaacgtgatcgcctacgaccacagcagagtgatcctgcagcccatcgagggcatcatgggcagcgactacatcaacgccaactacgtggacggctacagatgccagaacgcctacatcgccacccagggccccctgcccgagaccttcggcgacttctggagaatggtgtgggagcagagaagcgccaccatcgtgatgatgaccagactggaggagaagagcagaatcaagtgcgaccagtactggcccaacagaggcaccgagacctacggcttcatccaggtgaccctgctggacaccatcgagctggccaccttctgcgtgagaaccttcagcctgcacaagaacggcagcagcgagaagagagaggtgagacagttccagttcaccgcctggcccgaccacggcgtgcccgagtaccccacccccttcctggccttcctgagaagagtgaagacctgcaacccccccgacgccggccccatcgtggtgcactgcagcgccggcgtgggcagaaccggctgcttcatcgtgatcgacgccatgctggagagaatcaagcccgagaagaccgtggacgtgtacggccacgtgaccctgatgagaagccagagaaactacatggtgcagaccgaggaccagtacagcttcatccacgaggccctgctggaggccgtgggctgcggcaacaccgaggtgcccgccagaagcctgtacgcctacatccagaagctggcccaggtggagcccggcgagcacgtgaccggcatggagctggagttcaagagactggccaacagcaaggcccacaccagcagattcatcagcgccaacctgccctgcaacaagttcaagaacagactggtgaacatcatgccctacgagagcaccagagtgtgcctgcagcccatcagaggcgtggagggcagcgactacatcaacgccagcttcatcgacggctacagacagcagaaggcctacatcgccacccagggccccctggccgagaccaccgaggacttctggagaatgctgtgggagaacaacagcaccatcgtggtgatgctgaccaagctgagagagatgggcagagagaagtgccaccagtactggcccgccgagagaagcgccagataccagtacttcgtggtggaccccatggccgagtacaacatgccccagtacatcctgagagagttcaaggtgaccgacgccagagacggccagagcagaaccgtgagacagttccagttcaccgactggcccgagcagggcgtgcccaagagcggcgagggcttcatcgacttcatcggccaggtgcacaagaccaaggagcagttcggccaggacggccccatcagcgtgcactgcagcgccggcgtgggcagaaccggcgtgttcatcaccctgagcatcgtgctggagagaatgagatacgagggcgtggtggacatcttccagaccgtgaagatgctgagaacccagagacccgccatggtgcagaccgaggacgagtaccagttctgctaccaggccgccctggagtacctgggcagcttcgaccactacgccacctag

SEQ ID NO: 132714 - protein, 2315 aa, Artificial Sequence
  derived and/or modified sequence
MRILKRFLACIQLLCVCRLDWANGYYRQQRKLVEEIGWSYTGALNQKNWGKKYPTCNSPKQSPINIDEDLTQVNVNLKKLKFQGWDKTSLENTFIHNTGKTVEINLTNDYRVSGGVSEMVFKASKITFHWGKCNMSSDGSEHSLEGQKFPLEMQIYCFDADRFSSFEEAVKGKGKLRALSILFEVGTEENLDFKAIIDGVESVSRFGKQAALDPFILLNLLPNSTDKYYIYNGSLTSPPCTDTVDWIVFKDTVSISESQLAVFCEVLTMQQSGYVMLMDYLQNNFREQQYKFSRQVFSSYTGKEEIHEAVCSSEPENVQADPENYTSLLVTWERPRVVYDTMIEKFAVLYQQLDGEDQTKHEFLTDGYQDLGAILNNLLPNMSYVLQIVAICTNGLYGKYSDQLIVDMPTDNPELDLFPELIGTEEIIKEEEEGKDIEEGAIVNPGRDSATNQIRKKEPQISTTTHYNRIGTKYNEAKTNRSPTRGSEFSGKGDVPNTSLNSTSQPVTKLATEKDISLTSQTVTELPPHTVEGTSASLNDGSKTVLRSPHMNLSGTAESLNTVSITEYEEESLLTSFKLDTGAEDSSGSSPATSAIPFISENISQGYIFSSENPETITYDVLIPESARNASEDSTSSGSEESLKDPSMEGNVWFPSSTDITAQPDVGSGRESFLQTNYTEIRVDESEKTTKSFSAGPVMSQGPSVTDLEMPHYSTFAYFPTEVTPHAFTPSSRQQDLVSTVNVVYSQTTQPVYNGETPLQPSYSSEVFPLVTPLLLDNQILNTTPAASSSDSALHATPVFPSVDVSFESILSSYDGAPLLPFSSASFSSELFRHLHTVSQILPQVTSATESDKVPLHASLPVAGGDLLLEPSLAQYSDVLSTTHAASETLEFGSESGVLYKTLMFSQVEPPSSDAMMHARSSGPEPSYALSDNEGSQHIFTVSYSSAIPVHDSVGVTYQGSLFSGPSHIPIPKSSLITPTASLLQPTHALSGDGEWSGASSDSEFLLPDTDGLTALNISSPVSVAEFTYTTSVFGDDNKALSKSEIIYGNETELQIPSFNEMVYPSESTVMPNMYDNVNKLNASLQETSVSISSTKGMFPGSLAHTTTKVFDHEISQVPENNFSVQPTHTVSQASGDTSLKPVLSANSEPASSDPASSEMLSPSTQLLFYETSASFSTEVLLQPSFQASDVDTLLKTVLPAVPSDPILVETPKVDKISSTMLHLIVSNSASSENMLHSTSVPVFDVSPTSHMHSASLQGLTISYASEKYEPVLLKSESSHQVVPSLYSNDELFQTANLEINQAHPPKGRHVFATPVLSIDEPLNTLINKLIHSDEILTSTKSSVTGKVFAGIPTVASDTFVSTDHSVPIGNGHVAITAVSPHRDGSVTSTKLLFPSKATSELSHSAKSDAGLVGGGEDGDTDDDGDDDDDDRGSDGLSIHKCMSCSSYRESQEKVMNDSDTHENSLMDQNNPISYSLSENSEEDNRVTSVSSDSQTGMDRSPGKSPSANGLSQKHNDGKEENDIQTGSALLPLSPESKAWAVLTSDEESGSGQGTSDSLNENETSTDFSFADTNEKDADGILAAGDSEITPGFPQSPTSSVTSENSEVFHVSEAEASNSSHESRIGLAEGLESEKKAVIPLVIVSALTFICLVVLVGILIYWRKCFQTAHFYLEDSTSPRVISTPPTPIFPISDDVGAIPIKHFPKHVADLHASSGFTEEFETLKEFYQEVQSCTVDLGITADSSNHPDNKHKNRYINIVAYDHSRVKLAQLAEKDGKLTDYINANYVDGYNRPKAYIAAQGPLKSTAEDFWRMIWEHNVEVIVMITNLVEKGRRKCDQYWPADGSEEYGNFLVTQKSVQVLAYYTVRNFTLRNTKIKKGSQKGRPSGRVVTQYHYTQWPDMGVPEYSLPVLTFVRKAAYAKRHAVGPVVVHCSAGVGRTGTYIVLDSMLQQIQHEGTVNIFGFLKHIRSQRNYLVQTEEQYVFIHDTLVEAILSKETEVLDSHIHAYVNALLIPGPAGKTKLEKQFQLLSQSNIQQSDYSAALKQCNREKNRTSSIIPVERSRVGISSLSGEGTDYINASYIMGYYQSNEFIITQHPLLHTIKDFWRMIWDHNAQLVVMIPDGQNMAEDEFVYWPNKDEPINCESFKVTLMAEEHKCLSNEEKLIIQDFILEATQDDYVLEVRHFQCPKWPNPDSPISKTFELISVIKEEAANRDGPMIVHDEHGGVTAGTFCALTTLMHQLEKENSVDVYQVAKMINLMRPGVFADIEQYQFLYKVILSLVSTRQEENPSTSLDSNGAALPDGNIAESLESLV

SEQ ID NO: 132715 - DNA, 77 bp, Artificial Sequence
  derived and/or modified sequence
tggaatggaatggaatgaaataaacacgaatagaatggaacggaatggaacggaatggaatggaatggaatggaaag

SEQ ID NO: 132716 - DNA, 6948 bp, Artificial Sequence
  derived and/or modified sequence
atgagaatactgaaacggttcctggcctgtattcagcttttgtgcgtttgcaggttggattgggctaatggatattaccgccaacaaagaaagctcgtcgaggaaattggctggagctacaccggagctctaaatcagaagaactggggaaagaaatatccaacatgtaattcccccaaacagagccctatcaatatagatgaggatctgacacaggtaaatgtgaacctgaaaaaactgaagtttcagggctgggacaagacttccctggaaaacactttcatccacaacactggcaagacagtagaaattaacctgactaatgactaccgcgtgtcaggcggggtgtcagaaatggtgtttaaagctagcaagataacattccactggggtaaatgtaatatgtcatcagatggatccgaacactcacttgagggccaaaagttcccactcgagatgcagatctattgcttcgacgcagataggttctctagttttgaagaggctgtcaagggaaaggggaagcttagagccttgtctatactgttcgaagttggcacagaggaaaaccttgatttcaaagcaattatcgatggagttgagtcggtgtctagatttggaaagcaggccgcgctagaccctttcatcttgctcaaccttctgccaaacagtactgacaaatattatatatataacggaagtctcaccagcccaccctgtactgatactgtggattggatcgtgttcaaggataccgtctcaatcagtgaatcccaacttgcagttttttgcgaggtgttgaccatgcagcaatcgggttatgtgatgctcatggattatttgcagaacaattttagagagcaacagtataaattttcgagacaagtgttctcatcttacacaggaaaagaagaaattcacgaggctgtgtgttcaagcgagccggagaatgtccaggctgatccagagaattacacctcgttgctcgtgacctgggagcgaccccgcgtggtgtacgacaccatgatcgaaaagttcgcagtcctatatcagcagcttgatggcgaggatcaaactaaacatgagttcctgacggatggctaccaggatcttggcgctatactgaacaatctgcttccgaatatgtcatatgtgttacaaatcgttgctatctgtacgaacggtctctacggaaaatactccgaccaattaattgtggatatgcccacagacaatccagagctggatctatttcctgagctcataggcactgaggaaattatcaaggaagaagaggaaggcaaggacattgaggagggagctatcgtcaacccaggcagggattcagcaacaaaccaaattagaaagaaggaaccacagatctccacaacgacccattataatagaatcggaaccaagtacaatgaagcgaaaacaaaccggtcccccaccagggggagcgagttttccgggaagggggatgtgcccaacacctctctcaatagtacttcccagccagtgacgaagctagccaccgaaaaggacatttctctgaccagccagaccgttacagaactgcccccccacaccgtggagggcacaagtgcatccctaaacgatggaagtaaaactgttcttaggtcccctcatatgaatctctccggcaccgcggagtctctcaacacggtctctattaccgaatacgaggaagaatccctgctgaccagtttcaaactggacaccggggccgaggactcaagtggatccagccccgccacatccgctatacccttcataagtgaaaacatttcccaggggtatatcttttcctcagagaatccggagacaatcacttatgatgtgctgattccagaaagcgctaggaatgcatcagaagactcgacctcctcaggtagcgaggagtctctgaaggatccttctatggaaggtaatgtctggttcccgtcctctacggacatcaccgcgcaacctgatgtggggtccggaagagagtccttcctccaaacaaattacactgagatccgcgttgatgagagtgaaaagacgacaaaatccttttctgcaggacctgtcatgtcccaagggccgtctgtgactgacctcgagatgccccactactccacatttgcttattttccaaccgaggttacccctcacgctttcacgccctcctctcgtcagcaagacttggtttcaacagtgaatgtcgtgtattcccagactacacagccggtgtataatggggagacccctttacagcccagctacagctctgaggtgttcccacttgtgacgcctctcctgctggataaccagattctgaataccactccggctgcatcttctagcgacagtgctctgcatgcaaccccagtcttccctagcgtggatgtgagtttcgaaagtatacttagcagctatgatggtgcgcctcttctcccattctccagcgcaagctttagttctgaactgtttaggcacctgcataccgtaagccagatcctgccccaggtaaccagtgcaacagagtctgacaaagtgccattacacgccagcctgcctgtggccggcggcgaccttctcctggaaccttccttagctcagtacagcgatgttctgagtactactcacgctgcctcggagacgctagaatttgggagtgagtccggagtgttgtacaaaaccttaatgttctcacaggtggagcctcctagctcagacgccatgatgcacgcgcgctcttcgggccctgagcccagctatgcgctcagcgacaacgaaggatctcaacacatcttcaccgtcagttacagttccgctattcctgtgcacgacagcgtgggtgtaacttatcagggtagccttttttctggcccctctcatattccaatcccaaagagttctcttataacgccaactgcctccctgctgcagccaacccacgccctcagcggggacggtgagtggagcggcgcatcatccgactccgagttccttctaccagatacagacggcctcaccgcgctcaacatttcttccccagtctccgtagctgaatttacctacactacatccgtgttcggagacgacaacaaggctttgtcaaagtcagagataatttacgggaacgagaccgagctgcaaattccgtcctttaacgaaatggtttacccgtccgaaagtactgtcatgcccaatatgtacgataatgtgaataaactgaacgcttcattacaggagacatcggtgtccattagtagcactaaaggaatgttcccaggatctcttgcgcacacaaccaccaaggtttttgatcatgagatctcgcaagtgcccgaaaataatttcagcgtgcagcctacccacacagtgtcccaggctagcggcgatacatctcttaagcctgtcctgtcggctaactccgagcctgcatcaagcgacccagcgtcatccgagatgctcagcccttcaactcagcttttgttttatgagaccagtgcttcctttagcaccgaggtactgttgcagccctcatttcaggcgagcgacgtggacacactccttaaaaccgtgttgcccgccgtcccgtccgacccaatactagtggagaccccaaaagtcgacaaaattagttccaccatgctacacttgatcgttagtaactcagcctcttcggaaaacatgctacattcaacgtcggtgccggtgtttgacgtgtctccaacatcccacatgcattcagcgagcttgcaaggcctcaccatttcttatgcctccgaaaagtatgaacccgtgctgctgaagagcgagtctagtcatcaggttgttccttctctatactcaaatgatgaacttttccaaacagctaacctcgagattaaccaggcacaccctccaaagggtaggcacgtgttcgctaccccagtcttgtcgatcgacgagcccctgaatactctgatcaacaaattaattcatagcgacgagatcttgaccagcactaaaagttcagtcactggcaaagtgttcgcaggtatcccaaccgttgcctccgatacttttgtgtctaccgaccactccgtccccattgggaatggacacgtcgcaatcacggcagtcagtcctcaccgtgatggcagcgtcacaagcaccaaactcttgttcccctctaaagccacatctgaactgtctcattccgccaagtctgacgcagggctggtgggtggcggcgaggacggcgatacagacgacgatggcgatgacgacgacgacgacagagggagcgacggcctatctatccacaaatgcatgagttgctcttcataccgcgaaagccaggagaaggtgatgaacgacagcgatacccacgagaactccctgatggatcagaacaatcctatttcttattcactctctgagaactcggaggaggacaaccgggttacctccgtctcgagtgacagccagacaggaatggacaggtcccccggcaagtcccctagtgcgaatggtctgtcccagaaacataatgatggcaaggaagagaacgacatacaaaccgggtccgctttattgcccctgtctcctgaaagcaaggcttgggccgtcctgacctccgatgaggagtcaggcagcggccagggaacctccgattctttaaacgaaaatgagactagcactgatttctctttcgccgataccaatgagaaggatgcggacgggatccttgctgccggagacagtgagatcacacctggcttcccacagtcgccgacaagtagtgtgacctcagagaactcggaggtatttcacgtctcagaggctgaggcgtctaacagctcccacgaaagtcggatcggcttggccgaaggtctcgaatcagagaaaaaggctgtgatccccctggtcattgtgagcgcactcacattcatttgccttgtggttctagtgggtatactcatctactggaggaagtgcttccaaacagctcacttctacctggaggattccacgagccccagagtcatcagcacccctccaacacctatctttcctatctcagatgacgttggtgccattccaatcaagcatttccccaaacacgtagctgatttgcacgccagtagcggctttacagaagagtttgaaaccttgaaagaattctatcaggaggttcagtcctgcaccgtagacttgggtatcacagccgactcctctaaccaccccgacaataaacataaaaatagatatatcaacatcgtagcctacgaccactcccgggtgaaacttgcgcaactcgccgagaaggacggcaaacttaccgactacatcaatgccaattacgtggatggttacaacagacccaaagcttatatcgccgctcagggccccttgaagtctacagccgaggatttctggcggatgatctgggaacataacgtcgaggtcattgtgatgatcaccaacctggtcgagaagggacggcgcaaatgtgaccaatactggcctgccgatggctccgaagagtatggcaattttctggttacccagaaatctgtgcaagtgttggcgtattacactgtgcggaatttcacactgaggaatacgaaaatcaagaaaggctcacaaaaaggacgaccctccgggcgcgtggttacccaataccattacacgcagtggccggacatgggggtcccagaatactcactgcccgtgctcacgttcgtgcgaaaagcggcatacgcaaaaaggcatgctgtgggccccgtggtcgtgcattgcagcgctggcgtggggcggacgggaacatatatagttttggactcaatgctccaacaaattcagcatgagggcacggtaaacatcttcgggtttttgaagcacattcggtcacagcggaattacctcgtacagaccgaggaacagtatgtatttattcacgatacactggtcgaagccatactgtccaaggagacagaggtcctggattctcatattcatgcgtacgtgaacgcattactgatcccaggtcccgcaggcaagactaagcttgaaaagcagttccagttgctctctcagtcaaatattcagcagtcagactattcggccgcactgaagcagtgcaacagagagaaaaaccggacctcatctatcatccccgtggagcggtctcgggtcgggatctctagcctaagcggcgaaggaaccgattatattaatgcctcctatatcatgggctattatcagtcaaacgaattcatcatcactcaacaccctctgttacacaccataaaagacttttggcgtatgatctgggatcacaacgctcagctggtggtgatgattcccgacggtcagaacatggcagaggacgagtttgtgtattggccaaataaagacgagccaattaattgcgaaagtttcaaagtgaccctgatggccgaggaacacaagtgcctcagtaacgaggaaaaactgataattcaggactttatattagaggccactcaggacgattatgtgttggaggttcggcacttccagtgccccaagtggcccaatcccgactcacccataagcaaaaccttcgaactcatctcagtgattaaagaggaggctgccaaccgtgacggccccatgatcgtccatgatgagcacggaggggtaacagccggtacgttctgtgccctgaccacactgatgcaccagttagagaaagaaaactctgtcgacgtttaccaggtggccaaaatgatcaatttgatgcggcccggcgtattcgccgacatcgagcagtatcagtttctctacaaagttattttatcattggtgagcacaagacaggaagagaatccctcgaccagcttggatagtaatggcgctgcactgcccgacggaaacatcgcagaatcgctcgagtcccttgtttag

SEQ ID NO: 132717 - DNA, 6948 bp, Artificial Sequence
  derived and/or modified sequence
atgaggatcctgaagcgcttcctggcctgcatccagctgctgtgtgtgtgccgcctggactgggccaacggctactaccggcagcagaggaagctggtggaggagatcggctggagctacacaggagccctgaaccagaagaactggggcaagaagtaccccacctgcaacagccccaagcagagccccatcaacattgatgaggacctgacccaggtgaatgtgaacctgaagaagctgaagttccagggctgggacaagaccagcctggagaacaccttcatccacaacacaggcaagacagtggagatcaacctgaccaatgactacagagtgtctggaggagtgtctgagatggtgttcaaggccagcaagatcaccttccactggggcaagtgcaacatgagcagtgatggcagcgagcacagcctggagggccagaagttccccctggagatgcagatctactgctttgatgctgaccgcttcagcagctttgaggaggccgtgaagggcaagggcaagctgcgggccctgagcatcctgtttgaggtgggcacagaggagaacctggacttcaaggccatcattgatggagtggagagcgtgtccagatttgggaagcaggccgccctggaccccttcatcctgctgaacctgctgcccaacagcacagacaagtactacatctacaacggcagcctgaccagccccccctgcacagacacagtggactggatcgtgttcaaggacacagtgtccatcagcgagagccagctggccgtgttctgtgaggtgctgaccatgcagcagagcggctacgtgatgctgatggactacctgcagaacaacttccgggagcagcagtacaagttcagccggcaggtgttcagcagctacacaggcaaggaggagatccatgaagctgtgtgcagcagcgagccagaaaatgtgcaggccgaccctgagaactacaccagcctgctggtgacctgggagcggccccgggtggtgtatgacaccatgattgagaagtttgctgtgctgtaccagcagctggatggagaggaccagaccaagcatgagttcctgacagatggctaccaggacctgggcgccatcctgaacaacctgctgcccaacatgtcctatgtgctgcagatcgtggccatctgcaccaacggcctgtatggcaagtacagcgaccagctgattgtggacatgcccacagacaaccctgagctggacctcttccctgagctgattggaacagaggagatcatcaaggaggaggaggagggcaaggacatcgaggagggcgccatcgtgaaccctggccgggacagcgccaccaaccagatcaggaagaaggagccccagatcagcaccaccacccactacaaccgcatcggcaccaagtacaatgaggccaagaccaacagaagccccacccggggcagcgagttcagcgggaaaggagatgtgcccaacaccagcctgaacagcaccagccagcctgtgaccaagctggccacagagaaggacatcagcctgaccagccagacagtgacagagctgcccccccacacagtggagggcaccagcgccagcctgaatgatggcagcaagacagtgctgcggagcccccacatgaacctgagcggcacagctgagagcctgaacacagtgtccatcacagaatatgaggaggagagcctgctgaccagcttcaagctggacacaggagctgaggacagcagcggcagcagccctgccaccagcgccatccccttcatcagcgagaacatcagccagggctacatcttcagcagcgagaaccctgagaccatcacctatgatgtgctgatccctgagagcgccagaaatgccagcgaggacagcaccagcagcggcagcgaggagagcctgaaggaccccagcatggagggcaatgtgtggttccccagcagcacagacatcacagcccagccagatgtgggcagcggccgggagagcttcctgcagaccaactacacagagatccgggtggatgagagcgagaagaccaccaagagcttctctgctggccctgtgatgagccagggccccagcgtgacagacctggagatgccccactacagcacctttgcctacttccccacagaggtgaccccccacgccttcacccccagcagccggcagcaggacctggtgtccacagtgaatgtggtgtacagccagaccacccagcctgtgtacaacggggagacccccctgcagcccagctacagcagcgaggtgttccccctggtgacccccctgctgctggacaaccagatcctgaacaccaccccagctgccagcagcagtgacagcgccctgcacgccacccctgtgttccccagcgtggatgtgtcctttgagagcatcctgagcagctatgatggagcccccctgctgcccttcagcagcgccagcttcagcagcgagctgttccgccacctgcacacagtgtcccagatcctgccccaggtgaccagcgccacagaaagtgacaaggtgcccctgcacgccagcctgcctgtggccggcggggacctgctgctggagcccagcctggcccagtacagtgatgtgctgagcaccacccatgctgccagcgagaccctggagtttggcagcgagagcggcgtgctgtacaagaccctgatgttcagccaggtggagccccccagcagtgatgccatgatgcacgcccggagcagcggccctgagcccagctatgccctgagtgacaatgaaggcagccagcacatcttcaccgtgtcctacagcagcgccatccctgtgcatgattctgtgggcgtgacctaccagggcagcctcttcagcggccccagccacatccccatccccaagagcagcctcatcacccccacagccagcctgctgcagcccacccacgccctgtctggagatggagagtggagcggggccagcagtgacagcgagttcctgctgcctgacacagatggcctgacagccctgaacatcagcagccctgtgtctgtggccgagttcacctacaccacctctgtgtttggagatgacaacaaggccctgagcaagtctgagatcatctatggaaatgaaacagagctgcagatccccagcttcaatgagatggtgtaccccagcgagagcacagtgatgcccaacatgtatgacaacgtgaacaagctgaatgccagcctgcaggagacctctgtgtccatcagcagcaccaagggcatgtttcctggcagcctggcccacaccaccaccaaggtgtttgaccacgagatcagccaggtgcctgagaacaacttctctgtgcagcccacccacacagtgtcccaggccagcggggacaccagcctgaagcctgtgctgagcgccaacagcgagcccgccagcagtgaccctgccagcagcgagatgctgagccccagcacccagctgctcttctatgagaccagcgccagcttcagcacagaggtgctgctgcagcccagcttccaggccagtgatgtggacaccctgctgaagacagtgctgcctgctgtgcccagcgaccccatcctggtggagacccccaaggtggacaagatcagcagcaccatgctgcacctgattgtgagcaacagcgccagcagcgagaacatgctgcacagcacctctgtgcctgtgtttgatgtgagccccaccagccacatgcacagcgccagcctgcagggcctgaccatctcctatgccagcgagaagtatgagcctgtgctgctgaagtctgagagcagccaccaggtggtgcccagcctgtacagcaatgatgagctgttccagacagccaacctggagatcaaccaggcccacccccccaagggccgccacgtgtttgccacccctgtgctgagcattgatgagcccctgaacaccctcatcaacaagctgatccacagtgatgagatcctgaccagcaccaagagctctgtgacaggcaaggtgtttgctggcatccccaccgtggccagtgacacctttgtgtccacagaccacagcgtgcccatcggaaatggacatgtggccatcacagctgtgagcccccacagagatggctctgtgaccagcaccaagctgctcttccccagcaaggccaccagcgagctgagccacagcgccaagagtgatgctggcctggtgggcggcggagaagatggagacacagatgatgatggagatgatgatgatgatgaccggggcagtgatggcctgagcatccacaagtgcatgagctgcagcagctaccgggagagccaggagaaggtgatgaatgacagcgacacccatgagaacagcctgatggaccagaacaaccccatctcctacagcctgtctgaaaattctgaggaggacaacagagtgacctctgtgtccagtgacagccagacaggcatggacaggagccctgggaagagccccagcgccaacggcctgagccagaagcacaatgatggcaaggaggagaatgacatccagacaggcagcgccctgctgcccctgagccctgagagcaaggcctgggccgtgctgaccagtgatgaggagagcggcagcggccagggcaccagtgacagcctgaatgaaaatgagaccagcacagacttctcctttgctgacaccaatgagaaggatgctgatggcatcctggccgccggggacagcgagatcaccccaggcttcccccagagccccaccagctctgtgaccagcgagaacagcgaggtgttccacgtgtctgaggccgaggccagcaacagcagccatgagagcagaattggcctggccgagggcctggagagcgagaagaaggctgtgatccccctggtgattgtgtctgccctgaccttcatctgcctggtggtgctggtgggcatcctgatctactggaggaagtgcttccagacagcccacttctacctggaggacagcaccagccccagggtcatcagcaccccacccacccccatcttccccatcagtgatgatgtgggcgccatccccatcaagcacttccccaagcacgtggccgacctgcacgccagcagcggcttcacagaggagtttgagaccctgaaggagttctaccaggaggtgcagagctgcaccgtggacctgggcatcacagctgacagcagcaaccacccagacaacaagcacaagaaccgctacatcaacatcgtggcctatgaccacagccgggtgaagctggcccagctggccgagaaggatggcaagctgacagactacatcaatgccaactacgtggatggctacaaccggcccaaggcctacatcgccgcccagggccccctgaagagcacagctgaggacttctggaggatgatctgggagcacaacgtggaggtgattgtgatgatcaccaacctggtggagaagggccgcaggaaatgtgaccagtactggccagcagatggcagcgaggagtatggcaacttcctggtgacccagaagtctgtgcaggtgctggcctactacacagtgaggaacttcaccctgaggaacaccaagatcaagaagggcagccagaagggccggcccagcggccgggtggtgacccagtaccactacacccagtggccagacatgggcgtgcctgagtacagcctgcctgtgctgacctttgtgaggaaggccgcctatgccaagagacatgctgtgggccctgtggtggtgcactgcagcgctggggtgggccgcacaggcacctacatcgtgctggacagcatgctgcagcagatccagcacgagggcaccgtgaacatcttcggcttcctgaagcacatccgcagccagaggaactacctggtgcagacagaggagcagtatgtgttcatccatgacaccctggtggaggccatcctgagcaaggagacagaggtgctggacagccacatccacgcctacgtgaatgccctgctgatccctggccctgctgggaagaccaagctggagaagcagttccagctgctgagccagagcaacatccagcagagcgactacagcgctgccctgaagcagtgcaaccgggagaagaacagaaccagcagcatcatccctgtggagaggagccgggtgggcatcagcagcctgtctggagagggcacagactacatcaatgccagctacatcatgggctactaccagagcaatgagttcatcatcacccagcaccccctgctgcacaccatcaaggacttctggaggatgatctgggaccacaatgcccagctggtggtgatgatcccagatggccagaacatggctgaagatgaatttgtgtactggcccaacaaggatgagcccatcaactgtgagagcttcaaggtgaccctgatggccgaggagcacaagtgcctgagcaatgaggagaagctgatcatccaggacttcatcctggaggccacccaggatgattatgtgctggaggtgcgccacttccagtgccccaagtggcccaacccagacagccccatcagcaagacctttgagctgatcagcgtcatcaaggaggaggccgccaacagagatggccccatgattgtgcatgatgaacatggaggagtgacagctggcaccttctgtgccctgaccaccctgatgcaccagctggagaaggagaacagcgtggatgtgtaccaggtggccaagatgatcaacctgatgaggcctggggtgtttgctgacatcgagcagtaccagttcctgtacaaggtgatcctgagcctggtgtccacccggcaggaggagaaccccagcaccagcctggacagcaatggagctgccctgcctgatggcaacattgctgagagcctggagagcctggtgtag

SEQ ID NO: 132718 - DNA, 6948 bp, Artificial Sequence
  derived and/or modified sequence
atgcggatcctgaagcggttcctggcctgcatccagctgctgtgcgtttgcagacttgactgggctaacggctattaccggcagcagagaaaattagtggaagaaataggttggagttatacaggagccctaaatcagaaaaactgggggaagaaatatcctacctgtaactctcccaaacagtctcctataaatattgatgaagatttaactcaggtgaacgtgaatctgaagaagctgaagttccaggggtgggacaagacaagcctggagaacaccttcattcacaacactggaaagacagtcgaaatcaacctcacaaacgattatagagtgtcaggaggcgtcagcgagatggtgttcaaggccagtaagattaccttccactggggaaaatgcaacatgagctctgacggttccgagcattccctggagggacagaagtttcctctcgagatgcagatatactgcttcgatgcagaccgcttctcctccttcgaggaggctgtaaagggtaaggggaaattacgcgccttgagcatcctgtttgaggttggaaccgaagagaacttggactttaaagccatcattgacggtgtcgagagtgttagtcggttcgggaaacaggctgcccttgacccattcattttgttaaatctgcttcctaactctacggataagtattacatttataacggctccttaacgtcacccccctgcaccgatacagtcgattggattgtttttaaggatacagtctccatttctgagagtcagctcgctgtgttttgcgaggtgctgaccatgcagcaatcgggatacgttatgttaatggattatctgcagaataacttccgtgagcagcagtataagttcagcaggcaggtgtttagctcgtacaccgggaaggaggagattcatgaggctgtatgctccagcgagcctgagaatgtgcaggctgatcccgagaattacacgagtctgctcgttacatgggaacgtccacgtgtagtgtacgacacaatgattgaaaagttcgcagtgctgtatcagcagctggacggtgaagaccagacgaagcatgagtttttgactgacggataccaagacctcggtgccatcttaaacaatcttctacccaatatgagttatgtacttcagatcgttgccatatgtactaacggtctctatggaaagtacagcgaccaattgattgtggatatgccaacagacaaccccgaactggacctcttcccagaactcataggaactgaagaaattatcaaagaggaagaggagggaaaagatatcgaggaaggtgctatcgtgaacccaggcagagacagcgcaacaaaccagatacgaaaaaaggagccccaaatcagcacaaccacccactataaccgcatcggcactaaatacaatgaggccaaaacaaaccggtcaccaacaaggggctcagagtttagcgggaagggtgacgtgcccaatacaagtttgaactccacaagccagcctgtgactaagctggctaccgaaaaggacatctcactcacctcgcaaacggttacggagctcccaccacacaccgtagaagggacctcagcgagcctgaacgatggatctaagacggttctaagaagccctcacatgaacctgtcgggcacagcagaaagcctgaacacagtaagcattaccgagtatgaggaggagtctctgcttaccagtttcaagctcgatacaggagccgaggattcatctggaagctcgcccgctactagcgccattccgtttatttcggagaacataagccaggggtatatcttttcgagtgaaaacccagagaccatcacctacgatgttctaatacctgagagcgcccggaacgctagtgaggattctacctcgtctggcagtgaagagtctttaaaggatccatccatggaggggaatgtatggttcccatccagtaccgacatcacagctcagccagacgtggggtctggcagggaaagtttcctgcaaaccaactacactgaaattagagttgacgaatcggaaaaaactaccaagtctttctccgccggtcccgtaatgtctcagggtcccagcgtgactgacctggagatgccacactacagtacctttgcctattttccgacagaagtaactccccacgcctttacaccatctagtagacaacaggacctggtgtctaccgtgaatgtggtgtactcccagacaactcagccggtttacaatggcgagacccccctgcagcctagctattcgtccgaggtgttccctttggtcaccccgctcctgctggataaccagattctgaacacgacacctgctgcgagcagctcagactctgcgttacacgcaacaccagtgttcccatctgtggacgtgtcctttgaatccatcctgtcctcctatgatggggctcccctcctacccttctccagtgccagcttttcatctgaactgttccgccatttgcacacagtgtctcagattttgccgcaggttacaagcgccactgaaagcgacaaagtgccactgcacgccagtctgcccgtggcaggtggagatctgcttcttgagccctctctggcccaatacagtgatgtcctcagcacaacccacgcagcatccgagaccctggagtttgggtccgaaagtggggtactgtacaagaccctgatgtttagccaggtggagcccccctcttctgacgctatgatgcatgcgcggagctctggcccggagcctagttacgccctatccgacaatgagggcagccaacacatcttcacagtgtcttattcctctgccattccggtgcatgatagtgttggcgtaacatatcaaggatccctgttctctggcccatcccatatcccaatccctaagagctcactcatcactccaaccgccagtctgctgcagccaacacacgcgttgagcggtgatggcgaatggtcgggcgctagcagcgattccgagtttttgctgcctgacacggacggtctcactgctcttaacatcagtagccctgtcagcgtagctgaatttacctatacgacgagcgtctttggagatgacaacaaagcattatccaaatctgagattatatatggtaacgaaaccgaattgcagatccccagtttcaacgagatggtgtacccatcagaaagcaccgtgatgccaaacatgtatgacaatgtgaacaaactgaatgcttctttgcaggagaccagtgtcagcatctcctcaacaaaaggcatgttccccggatccctggcacatacaactaccaaggtcttcgatcacgaaatcagccaggtgcctgaaaataacttctccgtgcagcccacgcatacagtgtctcaagcatctggtgacacatcactgaaacctgtcttgtcagcaaactcggagccagcgtcctctgaccccgcctcaagcgagatgctgagcccaagcacacagttgctgttttacgaaaccagcgcaagcttcagcactgaagttctcttacagcctagtttccaggctagtgatgtagacacgctgctcaaaacagtgcttccagccgtcccgtccgatccaatcttggttgaaactccaaaggtggacaagatctcttccacaatgctgcacctaatcgttagcaatagtgcttcatccgaaaacatgctccatagcaccagtgtacccgtcttcgacgtctctcccacttcccacatgcattccgcctctctccagggcctgaccattagctacgctagcgaaaagtacgaaccggtgctgctcaagagtgagtcatcacaccaggtggtgccttctctatacagtaacgatgagctcttccagacggcaaatctcgagataaaccaggcccatcctcccaagggcagacatgtgtttgccactcctgtgttatccatcgacgaaccccttaacacccttatcaacaagctgatacattccgacgagatcctgactagcactaagagctcagtgaccgggaaggtgtttgcgggcattcctactgtcgcttctgatacatttgtgagcacagaccattccgtgcccatagggaacgggcatgtcgctatcaccgcagtaagcccacatagagacggttccgtaacctcaacgaagctgctattcccctccaaagcgacatccgagctatctcactcggcgaagtctgacgctgggttggtcggcgggggggaggatggggatacagacgatgatggcgacgacgatgatgacgataggggcagcgatgggctgtccattcacaaatgtatgagctgttcttcttaccgggaatcccaagaaaaagttatgaatgacagcgacacgcacgaaaactcactcatggatcagaataatcctatctcatacagcctcagtgagaattctgaggaggacaaccgtgttacatctgtgtcctccgattctcagacggggatggatagatctcccggaaagtctccatcagcaaacggtctgtcccagaagcacaatgacgggaaagaagaaaacgatattcaaactggttccgcacttttacctctgtcaccagagagtaaggcttgggccgtcttgacctccgatgaagagagcgggagcggccagggtacaagtgactcactgaatgaaaacgagactagtactgacttttctttcgctgacaccaatgagaaagatgctgacgggatccttgcagccggagattcagaaatcacacccggtttcccccagtcaccaacctcctcagtgacatctgaaaacagcgaggtgttccatgtatcggaagccgaggcctccaattcttcacacgaatcacggataggactcgccgaaggcctggagagcgaaaagaaggccgtgattcccctggtgattgtgtccgcactgacctttatttgtcttgtagtactagttggtatcctaatctattggaggaagtgcttccagaccgcccacttctatttagaggacagtacttctcctagggttatctctactccacccacccccatattccctatttctgacgacgtgggagctatccccatcaagcacttccctaagcacgtagccgacctgcacgctagcagcgggtttactgaagagttcgaaacactcaaagaattttatcaggaagtgcagtcttgtactgtggacctgggcataaccgccgactcctctaaccacccagacaataagcataagaaccgttatattaacatcgtcgcatacgaccatagtagggtaaaactggcccagctggcggagaaggacggcaaacttacggactacatcaacgccaattatgtggatggctacaatagaccaaaagcctacatcgctgcacaagggcctctgaagtccactgcagaggatttttggcgcatgatctgggaacataacgtcgaggtcattgtgatgatcaccaatctagtggagaagggtcgccgcaagtgcgatcagtactggcccgccgatggcagtgaggaatacggtaattttctggtgacacagaaatcggtacaagtgcttgcatattacacagtcagaaacttcaccctccgcaacacaaaaattaaaaagggctctcaaaaagggcgaccgtcaggccgcgttgtgacgcaataccactatacccagtggccggatatgggggtaccagaatacagcctccccgtgctgacatttgtccggaaggctgcgtacgccaagagacacgctgttggacccgtggttgttcactgctctgcaggcgtcggaagaaccgggacatacatcgtgctggattctatgttgcagcagatccagcacgagggtacggtgaatatctttggcttcctgaaacatatcagatcccagcggaattacctagtccagaccgaggagcagtatgtctttatccacgacacactcgtcgaggcaatcctgtccaaagaaaccgaagtcctggacagccatattcatgcctatgttaatgctctgctcatacccggacctgctggcaagacaaagcttgaaaaacagttccagttgctctcacagtcaaacatccagcagagtgactattccgcagcattgaagcagtgtaatagggaaaaaaatcgcacctcctccataatcccggttgagcgcagccgggtggggatttcaagtttgagcggcgaaggtacagattacattaatgccagctatatcatgggatactaccagtcaaacgaattcatcattacacagcacccactgttacatactatcaaggacttttggcggatgatctgggaccacaacgcacagctggtagtgatgatcccagacgggcagaatatggctgaagatgagtttgtgtattggcccaacaaggatgaaccaattaactgcgaaagcttcaaagttaccctgatggccgaggaacataaatgcctatctaatgaggagaagttaatcatacaggactttatcctggaagccacgcaagatgattacgtccttgaggtgagacatttccagtgtcctaaatggccaaatcccgacagccctatctcgaagaccttcgagctgattagcgtcattaaggaagaggcagctaacagggatgggcctatgattgtgcacgacgagcacggaggcgtaacagccggaacattctgcgctctaacaactttgatgcatcagctggagaaagaaaactcggtggatgtgtaccaggtggccaagatgataaaccttatgagacccggtgtcttcgccgatatcgaacagtaccagtttctatataaagtgatattaagcctggtttctacacgtcaggaggagaacccctctaccagcctcgactccaatggcgctgccctgcctgacggaaacatcgcagagtcactagagtctctggtgtag

SEQ ID NO: 132719 - DNA, 6947 bp, Artificial Sequence
  derived and/or modified sequence
atgcgcattctgaaaagattcctcgcctgcattcagctgctatgcgtctgccgtctcgattgggccaatgggtactaccgacagcagcgcaaacttgttgaggagatcgggtggagttacactggggcattgaaccagaagaactggggcaagaagtacccaacctgtaatagtcccaaacagtctccaattaacatcgatgaagacctgacacaggtcaacgtgaatttgaagaagctgaagttccaaggctgggataaaacttcccttgaaaatacatttatacataatactggaaagacagtagagataaaccttaccaatgactatagggtgtcaggtggtgtgagtgagatggtctttaaagcttcgaaaattactttccattggggcaagtgcaatatgtctagcgacgggtccgaacacagtctggagggacagaaattccctctggagatgcagatctattgctttgatgccgatcgcttttcaagctttgaagaggccgttaagggcaagggcaaactgagggctctgagcattctattcgaggtcggaaccgaagagaatctggacttcaaagctataattgatggtgtggaaagcgtgtccagatttggcaagcaggcagccctggatcccttcatactgttaaacctgctgcctaacagcaccgataagtactacatctataacggcagtctgacctctccaccgtgtaccgatacggtggattggatcgtcttcaaggatactgtgagtattagtgaaagtcaattagcggttttctgtgaagtgcttaccatgcagcagagtggatatgtgatgttaatggattatcttcagaacaactttcgtgagcagcaatacaagtttagccgccaagttttttcttcctacaccgggaaggaagaaatccatgaagccgtgtgttcatccgagcccgaaaacgtgcaggcagatccagaaaattacacgtccctactggtgacgtgggagcggccacgtgtggtttacgacaccatgattgaaaagttcgctgtcctgtaccagcagctggatggagaagaccagacaaaacacgagttcctgaccgatgggtaccaggacctgggcgctatcctgaacaacctgctgcctaatatgagctatgtcttgcaaattgtggccatatgcacaaacggcctttacggtaagtacagcgatcagctcattgtggacatgcctactgataatccagagctggatctctttcccgaactcatcggtacagaggagattataaaagaagaagaagagggtaaagatattgaggagggagcgattgtcaaccctgggagagatagcgcgacgaaccaaataaggaagaaagaaccacagatctccacaactacccactacaatagaattggaaccaagtataacgaagctaaaacgaacaggtccccgacccggggatcggagttcagcggcaaaggggatgtgcccaacaccagcctaaacagcacatcgcagccggtaacaaaattagcaacagaaaaagatattagccttacgtctcagaccgtgacggagctgccccctcacaccgttgagggtacatccgctagtttgaacgacggcagtaaaacagtattgcgctcaccacacatgaatctgagcggcaccgcagagagccttaatactgtgtctattaccgaatatgaagaggagtcattactgactagctttaagctcgacactggggctgaggattcaagtgggagcagccccgcaacaagcgcgattccctttatcagcgaaaatatctcacagggatacatcttcagttctgagaatcccgaaacaattacctacgacgtgttaattcccgaatctgcgagaaacgccagcgaagacagtacctccagtggatcagaggaaagcctcaaagacccatctatggaggggaacgtgtggtttcccagctctaccgatataaccgctcagcctgatgtcgggtcgggtagagaatctttcctccagaccaactacaccgagatacgggtggacgagagtgaaaagactaccaagagcttctctgccggaccagttatgtctcagggaccatctgtcacagatctggagatgcctcattatagcactttcgcttactttccaaccgaggtgactccccacgctttcacacccagttcccgccagcaggacctggtgagcacagtcaacgttgtgtattcgcaaaccacacaaccagtgtacaatggagagaccccactgcagccaagctactcctcagaggtgttccccctcgtcactccgctgctgctggataaccagatcctgaacacgactccggcagcctcttcttctgactccgccctgcatgctacaccagtttttccctctgtggatgtatcttttgagagcatcctgagctcgtacgacggagcccctctgctccctttttcatcagcatcgttctcaagtgagttatttcggcacctgcacacagtgtctcagattttaccgcaggtcactagtgccacagagagcgataaggttccactgcacgcatccctccccgtggcaggcggagacctgctgctcgaacccagcctggcacagtattcagatgtgctgagcaccacccatgctgccagcgagaccttagaatttggctctgagagcggagtcctctataaaactctgatgttttctcaagtggagccacccagcagtgacgctatgatgcatgccagatcttccggacctgaaccgagctacgctctgtctgataatgagggtagtcagcacatttttacggtgtcctacagttctgcaatccctgtgcacgattctgtcggggtgacataccagggaagtcttttcagcggtccctcccacatccctatccctaagtccagcttgattacgcctaccgcctccctgctccagccaacacacgccttgagcggggatggggaatggtctggggctagctcagattcagaattcctcctaccagacaccgatgggctcaccgcgctgaatatctcttcacccgtgtccgttgcagagttcacctacaccaccagcgtgtttggcgacgacaacaaggccctgtcaaaaagcgagatcatttacgggaacgaaaccgagttgcagattccctcgttcaacgaaatggtctatccttctgaaagcacagtcatgccgaatatgtacgacaatgtgaataaacttaatgcctcccttcaggaaactagtgtctcaatctccagcaccaagggcatgttcccaggatccctcgcccacaccaccacgaaagtgtttgaccacgaaatttcccaggtcccagagaacaactttagcgtgcaaccaactcacaccgtctctcaggcgagcggggacacatccctcaagcccgttctgtctgccaattctgaaccagcatcctccgatcccgcatcctccgagatgctgtctccctccacacagttgctattttacgaaacaagcgcaagctttagcacggaggtattgctgcaacctagcttccaggcctctgatgtagatacactgcttaagaccgtgctccctgcagtcccaagtgatccgattttggtggagaccccaaaagttgataagatctctagcactatgctgcatctcattgtgagtaacagtgcatcttcagaaaacatgctccactccacgtccgtcccggtatttgatgtgtcccctacctctcacatgcactctgcctctctacaagggcttacaatcagctatgcgagcgaaaagtacgaaccagttctgttaaagagcgaatcatcacatcaggtggttccgtctctctatagtaatgacgagctgttccagaccgccaatctggagatcaaccaagcccaccctcccaagggcagacacgttttcgcaacccccgttctctcgatcgatgagccactcaacacactcatcaacaaactgatccactcggatgagatcctgacctcaaccaaatctagtgtaacaggcaaggtcttcgccggaatccccaccgtggcctctgacacattcgtgtccaccgaccacagcgttcccatcgggaacggccacgtcgccatcactgccgtgagccctcaccgtgacggcagcgtcacttctacgaaactcctgtttccgtctaaggcgacatccgaattgtcacactccgccaaaagtgatgccggattggtcgggggaggggaagacggggacactgatgacgacggggatgatgacgatgacgacagagggagcgacgggctctccattcacaagtgtatgtcttgttcttcctaccgagagtcgcaggaaaaggtaatgaacgactccgacactcacgaaaactcactcatggatcaaaataatccgatctcttattcactttcagagaatagtgaggaagataaccgagtcacgagcgtgtcctccgatagccaaacgggcatggatagatctcctggaaagtctccaagcgccaatggcttgtcccagaagcacaacgatggaaaggaggaaaacgatatccaaacaggctccgccttgcttcccttatcgccagagtccaaagcatgggccgtactgacgtcagatgaagagagcgggtctggccaaggaacctcggattccctcaatgagaatgaaacatcaacagatttcagctttgctgacactaatgagaaagacgccgatggcattctcgctgcaggcgacagcgagattactcctggcttcccacagtcaccgacctcgagcgttacttcagagaatagcgaagtcttccacgtctcggaagccgaagcttcaaacagctcccacgaaagtcgcattggcctggcagaagggttagagtcagagaagaaagccgtgattccattggtcatcgtgtctgctctgaccttcatttgtttggtggtgctcgtcggtatcctaatttactggcggaagtgcttccagactgcccacttctacttggaagattcgacgtccccacgggtgatatccactccacctacaccgatcttccccatctccgacgatgtcggggctatcccgattaagcatttccctaagcacgtggccgacctgcacgccagttcagggtttacagaggaattcgagacactgaaggagttctaccaggaggttcagtcttgtaccgtagatttagggatcaccgctgacagttccaatcaccctgataataaacacaaaaacagatacatcaacattgtcgcctatgatcacagcagggttaagttagcccagcttgctgaaaaggatggaaagttgacagactacatcaacgctaattatgtggacgggtataacaggcctaaggcctacatagcagctcagggcccactgaagtcaacagcggaagatttttggaggatgatttgggaacacaacgtcgaggtcatcgtgatgataactaaccttgttgaaaaggggagaagaaagtgcgaccagtattggccagctgacgggtccgaagagtatgggaatttcctcgtgactcagaagtcagtgcaggtgctcgcatactacaccgtcaggaattttactctccgtaacacaaagattaaaaagggaagccagaaaggcaggcctagtgggagagtggtgacccagtatcattacacccaatggccagatatgggcgtgcctgaatatagccttccagtgttaactttcgtgagaaaggccgcatacgccaagagacacgcagtcgggcctgtcgtggtccattgttccgcaggcgtgggcaggaccggaacgtacatcgtgttggatagtatgcttcagcaaatccagcatgaaggcacagttaacatcttcggatttctcaaacacattagaagtcagaggaactacctggtgcagactgaggagcagtacgtgtttattcatgacactcttgtagaggccatcctgtcaaaggaaaccgaggtgctggattcgcatatacacgcctatgtgaacgctctgctgattcccggaccagctggaaaaaccaagttggaaaagcagtttcagcttctcagtcaatccaatattcagcagagtgactactccgcggctctgaaacagtgcaatagagagaaaaaccgcactagctctattattccagtcgagagatcgagagtcggaattagtagtctgtcaggggagggaactgactacattaacgcatcgtatatcatgggctactatcaaagcaacgagttcataattactcagcacccgcttctgcacaccatcaaagacttttggcggatgatctgggatcacaacgcacaacttgtcgtcatgattcctgacggtcagaatatggccgaagatgaatttgtgtactggccgaacaaagatgaacccatcaattgtgagagcttcaaggtgaccttaatggcagaggagcacaagtgtctcagcaacgaagaaaagctgattatacaggacttcatcctggaggcaacacaggatgattatgtgctggaagtaaggcactttcagtgccccaagtggccgaatcctgactctccaatttccaagactttcgaactgataagcgtaataaaggaggaggcagcaaaccgggacgggcctatgatcgtgcatgacgaacacggcggtgtcacagccggaactttttgcgccttgaccacacttatgcaccagctggaaaaagaaaatagcgtcgacgtttaccaggtggctaagatgattaacctgatgcgcccaggggtgttcgccgacatcgaacaataccaattcctttataaagtgattttgagcctcgtgagtaccaggcaggaagagaacccgagcactagcctcgattctaatggcgctgctctccccgacgggaatatagccgagagcctggaatcccttgtgta

SEQ ID NO: 132720 - DNA, 8175 bp, Artificial Sequence
  derived and/or modified sequence
aggagccgcggcgcgcacagccgggctggagcgcgcacccggcactgaggcttcgctgctctcggagcgctcagaccgcggccgccgcagccggcgaaagaggcaaagtcccgcacgccggaggacatgcgcctcggctagcggccccgggccccaccaccgtgcggctttctccagattattcctctctcgctgtctctgactgtctctctctgtctctgtctctgtctctctctctctcacacacacacacacacacacaaacacacatacgcacgcacgatctcacttcgatctatacactggaggattaaaacaaacaaacaaaaaaaacatttccttcgctccccctccctctccactctgagaagcagaggagccgcacggcgaggggccgcagaccgtctggaaatgcgaatcctaaagcgtttcctcgcttgcattcagctcctctgtgtttgccgcctggattgggctaatggatactacagacaacagagaaaacttgttgaagagattggctggtcctatacaggagcactgaatcaaaaaaattggggaaagaaatatccaacatgtaatagcccaaaacaatctcctatcaatattgatgaagatcttacacaagtaaatgtgaatcttaagaaacttaaatttcagggttgggataaaacatcattggaaaacacattcattcataacactgggaaaacagtggaaattaatctcactaatgactaccgtgtcagcggaggagtttcagaaatggtgtttaaagcaagcaagataacttttcactggggaaaatgcaatatgtcatctgatggatcagagcatagtttagaaggacaaaaatttccacttgagatgcaaatctactgctttgatgcggaccgattttcaagttttgaggaagcagtcaaaggaaaagggaagttaagagctttatccattttgtttgaggttgggacagaagaaaatttggatttcaaagcgattattgatggagtcgaaagtgttagtcgttttgggaagcaggctgctttagatccattcatactgttgaaccttctgccaaactcaactgacaagtattacatttacaatggctcattgacatctcctccctgcacagacacagttgactggattgtttttaaagatacagttagcatctctgaaagccagttggctgttttttgtgaagttcttacaatgcaacaatctggttatgtcatgctgatggactacttacaaaacaattttcgagagcaacagtacaagttctctagacaggtgttttcctcatacactggaaaggaagagattcatgaagcagtttgtagttcagaaccagaaaatgttcaggctgacccagagaattataccagccttcttgttacatgggaaagacctcgagtcgtttatgataccatgattgagaagtttgcagttttgtaccagcagttggatggagaggaccaaaccaagcatgaatttttgacagatggctatcaagacttgggtgctattctcaataatttgctacccaatatgagttatgttcttcagatagtagccatatgcactaatggcttatatggaaaatacagcgaccaactgattgtcgacatgcctactgataatcctgaacttgatcttttccctgaattaattggaactgaagaaataatcaaggaggaggaagagggaaaagacattgaagaaggcgctattgtgaatcctggtagagacagtgctacaaaccaaatcaggaaaaaggaaccccagatttctaccacaacacactacaatcgcatagggacgaaatacaatgaagccaagactaaccgatccccaacaagaggaagtgaattctctggaaagggtgatgttcccaatacatctttaaattccacttcccaaccagtcactaaattagccacagaaaaagatatttccttgacttctcagactgtgactgaactgccacctcacactgtggaaggtacttcagcctctttaaatgatggctctaaaactgttcttagatctccacatatgaacttgtcggggactgcagaatccttaaatacagtttctataacagaatatgaggaggagagtttattgaccagtttcaagcttgatactggagctgaagattcttcaggctccagtcccgcaacttctgctatcccattcatctctgagaacatatcccaagggtatatattttcctccgaaaacccagagacaataacatatgatgtccttataccagaatctgctagaaatgcttccgaagattcaacttcatcaggttcagaagaatcactaaaggatccttctatggagggaaatgtgtggtttcctagctctacagacataacagcacagcccgatgttggatcaggcagagagagctttctccagactaattacactgagatacgtgttgatgaatctgagaagacaaccaagtccttttctgcaggcccagtgatgtcacagggtccctcagttacagatctggaaatgccacattattctacctttgcctacttcccaactgaggtaacacctcatgcttttaccccatcctccagacaacaggatttggtctccacggtcaacgtggtatactcgcagacaacccaaccggtatacaatggtgagacacctcttcaaccttcctacagtagtgaagtctttcctctagtcacccctttgttgcttgacaatcagatcctcaacactacccctgctgcttcaagtagtgattcggccttgcatgctacgcctgtatttcccagtgtcgatgtgtcatttgaatccatcctgtcttcctatgatggtgcacctttgcttccattttcctctgcttccttcagtagtgaattgtttcgccatctgcatacagtttctcaaatccttccacaagttacttcagctaccgagagtgataaggtgcccttgcatgcttctctgccagtggctgggggtgatttgctattagagcccagccttgctcagtattctgatgtgctgtccactactcatgctgcttcagagacgctggaatttggtagtgaatctggtgttctttataaaacgcttatgttttctcaagttgaaccacccagcagtgatgccatgatgcatgcacgttcttcagggcctgaaccttcttatgccttgtctgataatgagggctcccaacacatcttcactgtttcttacagttctgcaatacctgtgcatgattctgtgggtgtaacttatcagggttccttatttagcggccctagccatataccaatacctaagtcttcgttaataaccccaactgcatcattactgcagcctactcatgccctctctggtgatggggaatggtctggagcctcttctgatagtgaatttcttttacctgacacagatgggctgacagcccttaacatttcttcacctgtttctgtagctgaatttacatatacaacatctgtgtttggtgatgataataaggcgctttctaaaagtgaaataatatatggaaatgagactgaactgcaaattccttctttcaatgagatggtttacccttctgaaagcacagtcatgcccaacatgtatgataatgtaaataagttgaatgcgtctttacaagaaacctctgtttccatttctagcaccaagggcatgtttccagggtcccttgctcataccaccactaaggtttttgatcatgagattagtcaagttccagaaaataacttttcagttcaacctacacatactgtctctcaagcatctggtgacacttcgcttaaacctgtgcttagtgcaaactcagagccagcatcctctgaccctgcttctagtgaaatgttatctccttcaactcagctcttattttatgagacctcagcttcttttagtactgaagtattgctacaaccttcctttcaggcttctgatgttgacaccttgcttaaaactgttcttccagctgtgcccagtgatccaatattggttgaaacccccaaagttgataaaattagttctacaatgttgcatctcattgtatcaaattctgcttcaagtgaaaacatgctgcactctacatctgtaccagtttttgatgtgtcgcctacttctcatatgcactctgcttcacttcaaggtttgaccatttcctatgcaagtgagaaatatgaaccagttttgttaaaaagtgaaagttcccaccaagtggtaccttctttgtacagtaatgatgagttgttccaaacggccaatttggagattaaccaggcccatcccccaaaaggaaggcatgtatttgctacacctgttttatcaattgatgaaccattaaatacactaataaataagcttatacattccgatgaaattttaacctccaccaaaagttctgttactggtaaggtatttgctggtattccaacagttgcttctgatacatttgtatctactgatcattctgttcctataggaaatgggcatgttgccattacagctgtttctccccacagagatggttctgtaacctcaacaaagttgctgtttccttctaaggcaacttctgagctgagtcatagtgccaaatctgatgccggtttagtgggtggtggtgaagatggtgacactgatgatgatggtgatgatgatgatgatgacagaggtagtgatggcttatccattcataagtgtatgtcatgctcatcctatagagaatcacaggaaaaggtaatgaatgattcagacacccacgaaaacagtcttatggatcagaataatccaatctcatactcactatctgagaattctgaagaagataatagagtcacaagtgtatcctcagacagtcaaactggtatggacagaagtcctggtaaatcaccatcagcaaatgggctatcccaaaagcacaatgatggaaaagaggaaaatgacattcagactggtagtgctctgcttcctctcagccctgaatctaaagcatgggcagttctgacaagtgatgaagaaagtggatcagggcaaggtacctcagatagccttaatgagaatgagacttccacagatttcagttttgcagacactaatgaaaaagatgctgatgggatcctggcagcaggtgactcagaaataactcctggattcccacagtccccaacatcatctgttactagcgagaactcagaagtgttccacgtttcagaggcagaggccagtaatagtagccatgagtctcgtattggtctagctgaggggttggaatccgagaagaaggcagttataccccttgtgatcgtgtcagccctgacttttatctgtctagtggttcttgtgggtattctcatctactggaggaaatgcttccagactgcacacttttacttagaggacagtacatcccctagagttatatccacacctccaacacctatctttccaatttcagatgatgtcggagcaattccaataaagcactttccaaagcatgttgcagatttacatgcaagtagtgggtttactgaagaatttgagacactgaaagagttttaccaggaagtgcagagctgtactgttgacttaggtattacagcagacagctccaaccacccagacaacaagcacaagaatcgatacataaatatcgttgcctatgatcatagcagggttaagctagcacagcttgctgaaaaggatggcaaactgactgattatatcaatgccaattatgttgatggctacaacagaccaaaagcttatattgctgcccaaggcccactgaaatccacagctgaagatttctggagaatgatatgggaacataatgtggaagttattgtcatgataacaaacctcgtggagaaaggaaggagaaaatgtgatcagtactggcctgccgatgggagtgaggagtacgggaactttctggtcactcagaagagtgtgcaagtgcttgcctattatactgtgaggaattttactctaagaaacacaaaaataaaaaagggctcccagaaaggaagacccagtggacgtgtggtcacacagtatcactacacgcagtggcctgacatgggagtaccagagtactccctgccagtgctgacctttgtgagaaaggcagcctatgccaagcgccatgcagtggggcctgttgtcgtccactgcagtgctggagttggaagaacaggcacatatattgtgctagacagtatgttgcagcagattcaacacgaaggaactgtcaacatatttggcttcttaaaacacatccgttcacaaagaaattatttggtacaaactgaggagcaatatgtcttcattcatgatacactggttgaggccatacttagtaaagaaactgaggtgctggacagtcatattcatgcctatgttaatgcactcctcattcctggaccagcaggcaaaacaaagctagagaaacaattccagctcctgagccagtcaaatatacagcagagtgactattctgcagccctaaagcaatgcaacagggaaaagaatcgaacttcttctatcatccctgtggaaagatcaagggttggcatttcatccctgagtggagaaggcacagactacatcaatgcctcctatatcatgggctattaccagagcaatgaattcatcattacccagcaccctctccttcataccatcaaggatttctggaggatgatatgggaccataatgcccaactggtggttatgattcctgatggccaaaacatggcagaagatgaatttgtttactggccaaataaagatgagcctataaattgtgagagctttaaggtcactcttatggctgaagaacacaaatgtctatctaatgaggaaaaacttataattcaggactttatcttagaagctacacaggatgattatgtacttgaagtgaggcactttcagtgtcctaaatggccaaatccagatagccccattagtaaaacttttgaacttataagtgttataaaagaagaagctgccaatagggatgggcctatgattgttcatgatgagcatggaggagtgacggcaggaactttctgtgctctgacaacccttatgcaccaactagaaaaagaaaattccgtggatgtttaccaggtagccaagatgatcaatctgatgaggccaggagtctttgctgacattgagcagtatcagtttctctacaaagtgatcctcagccttgtgagcacaaggcaggaagagaatccatccacctctctggacagtaatggtgcagcattgcctgatggaaatatagctgagagcttagagtctttagtttaacacagaaaggggtgggggaactcacatctgagcattgttttcctcttcctaaaattaggcaggaaaatcagtctagttctgttatctgttgatttcccatcacctgacagtaactttcatgacataggattctgccgccaaatttatatcattaacaatgtgtgcctttttgcaagacttgtaatttacttattatgtttgaactaaaatgattgaattttacagtatttctaagaatggaattgtggtatttttttctgtattgattttaacagaaaatttcaatttatagaggttaggaattccaaactacagaaaatgtttgtttttagtgtcaaatttttagctgtatttgtagcaattatcaggtttgctagaaatataacttttaatacagtagcctgtaaataaaacactcttccatatgatattcaacattttacaactgcagtattcacctaaagtagaaataatctgttacttattgtaaatactgccctagtgtctccatggaccaaatttatatttataattgtagatttttatattttactactgagtcaagttttctagttctgtgtaattgtttagtttaatgacgtagttcattagctggtcttactctaccagttttctgacattgtattgtgttacctaagtcattaactttgtttcagcatgtaattttaacttttgtggaaaatagaaataccttcattttgaaagaagtttttatgagaataacaccttaccaaacattgttcaaatggtttttatccaaggaattgcaaaaataaatataaatattgccattaa

SEQ ID NO: 132721 - DNA, 6948 bp, Artificial Sequence
  derived and/or modified sequence
atgagaatcctgaagagattcctggcctgcatccagctgctgtgcgtgtgcagactggactgggccaacggctactacagacagcagagaaagctggtggaggagatcggctggagctacaccggcgccctgaaccagaagaactggggcaagaagtaccccacctgcaacagccccaagcagagccccatcaacatcgacgaggacctgacccaggtgaacgtgaacctgaagaagctgaagttccagggctgggacaagaccagcctggagaacaccttcatccacaacaccggcaagaccgtggagatcaacctgaccaacgactacagagtgagcggcggcgtgagcgagatggtgttcaaggccagcaagatcaccttccactggggcaagtgcaacatgagcagcgacggcagcgagcacagcctggagggccagaagttccccctggagatgcagatctactgcttcgacgccgacagattcagcagcttcgaggaggccgtgaagggcaagggcaagctgagagccctgagcatcctgttcgaggtgggcaccgaggagaacctggacttcaaggccatcatcgacggcgtggagagcgtgagcagattcggcaagcaggccgccctggaccccttcatcctgctgaacctgctgcccaacagcaccgacaagtactacatctacaacggcagcctgaccagccccccctgcaccgacaccgtggactggatcgtgttcaaggacaccgtgagcatcagcgagagccagctggccgtgttctgcgaggtgctgaccatgcagcagagcggctacgtgatgctgatggactacctgcagaacaacttcagagagcagcagtacaagttcagcagacaggtgttcagcagctacaccggcaaggaggagatccacgaggccgtgtgcagcagcgagcccgagaacgtgcaggccgaccccgagaactacaccagcctgctggtgacctgggagagacccagagtggtgtacgacaccatgatcgagaagttcgccgtgctgtaccagcagctggacggcgaggaccagaccaagcacgagttcctgaccgacggctaccaggacctgggcgccatcctgaacaacctgctgcccaacatgagctacgtgctgcagatcgtggccatctgcaccaacggcctgtacggcaagtacagcgaccagctgatcgtggacatgcccaccgacaaccccgagctggacctgttccccgagctgatcggcaccgaggagatcatcaaggaggaggaggagggcaaggacatcgaggagggcgccatcgtgaaccccggcagagacagcgccaccaaccagatcagaaagaaggagccccagatcagcaccaccacccactacaacagaatcggcaccaagtacaacgaggccaagaccaacagaagccccaccagaggcagcgagttcagcggcaagggcgacgtgcccaacaccagcctgaacagcaccagccagcccgtgaccaagctggccaccgagaaggacatcagcctgaccagccagaccgtgaccgagctgcccccccacaccgtggagggcaccagcgccagcctgaacgacggcagcaagaccgtgctgagaagcccccacatgaacctgagcggcaccgccgagagcctgaacaccgtgagcatcaccgagtacgaggaggagagcctgctgaccagcttcaagctggacaccggcgccgaggacagcagcggcagcagccccgccaccagcgccatccccttcatcagcgagaacatcagccagggctacatcttcagcagcgagaaccccgagaccatcacctacgacgtgctgatccccgagagcgccagaaacgccagcgaggacagcaccagcagcggcagcgaggagagcctgaaggaccccagcatggagggcaacgtgtggttccccagcagcaccgacatcaccgcccagcccgacgtgggcagcggcagagagagcttcctgcagaccaactacaccgagatcagagtggacgagagcgagaagaccaccaagagcttcagcgccggccccgtgatgagccagggccccagcgtgaccgacctggagatgccccactacagcaccttcgcctacttccccaccgaggtgaccccccacgccttcacccccagcagcagacagcaggacctggtgagcaccgtgaacgtggtgtacagccagaccacccagcccgtgtacaacggcgagacccccctgcagcccagctacagcagcgaggtgttccccctggtgacccccctgctgctggacaaccagatcctgaacaccacccccgccgccagcagcagcgacagcgccctgcacgccacccccgtgttccccagcgtggacgtgagcttcgagagcatcctgagcagctacgacggcgcccccctgctgcccttcagcagcgccagcttcagcagcgagctgttcagacacctgcacaccgtgagccagatcctgccccaggtgaccagcgccaccgagagcgacaaggtgcccctgcacgccagcctgcccgtggccggcggcgacctgctgctggagcccagcctggcccagtacagcgacgtgctgagcaccacccacgccgccagcgagaccctggagttcggcagcgagagcggcgtgctgtacaagaccctgatgttcagccaggtggagccccccagcagcgacgccatgatgcacgccagaagcagcggccccgagcccagctacgccctgagcgacaacgagggcagccagcacatcttcaccgtgagctacagcagcgccatccccgtgcacgacagcgtgggcgtgacctaccagggcagcctgttcagcggccccagccacatccccatccccaagagcagcctgatcacccccaccgccagcctgctgcagcccacccacgccctgagcggcgacggcgagtggagcggcgccagcagcgacagcgagttcctgctgcccgacaccgacggcctgaccgccctgaacatcagcagccccgtgagcgtggccgagttcacctacaccaccagcgtgttcggcgacgacaacaaggccctgagcaagagcgagatcatctacggcaacgagaccgagctgcagatccccagcttcaacgagatggtgtaccccagcgagagcaccgtgatgcccaacatgtacgacaacgtgaacaagctgaacgccagcctgcaggagaccagcgtgagcatcagcagcaccaagggcatgttccccggcagcctggcccacaccaccaccaaggtgttcgaccacgagatcagccaggtgcccgagaacaacttcagcgtgcagcccacccacaccgtgagccaggccagcggcgacaccagcctgaagcccgtgctgagcgccaacagcgagcccgccagcagcgaccccgccagcagcgagatgctgagccccagcacccagctgctgttctacgagaccagcgccagcttcagcaccgaggtgctgctgcagcccagcttccaggccagcgacgtggacaccctgctgaagaccgtgctgcccgccgtgcccagcgaccccatcctggtggagacccccaaggtggacaagatcagcagcaccatgctgcacctgatcgtgagcaacagcgccagcagcgagaacatgctgcacagcaccagcgtgcccgtgttcgacgtgagccccaccagccacatgcacagcgccagcctgcagggcctgaccatcagctacgccagcgagaagtacgagcccgtgctgctgaagagcgagagcagccaccaggtggtgcccagcctgtacagcaacgacgagctgttccagaccgccaacctggagatcaaccaggcccacccccccaagggcagacacgtgttcgccacccccgtgctgagcatcgacgagcccctgaacaccctgatcaacaagctgatccacagcgacgagatcctgaccagcaccaagagcagcgtgaccggcaaggtgttcgccggcatccccaccgtggccagcgacaccttcgtgagcaccgaccacagcgtgcccatcggcaacggccacgtggccatcaccgccgtgagcccccacagagacggcagcgtgaccagcaccaagctgctgttccccagcaaggccaccagcgagctgagccacagcgccaagagcgacgccggcctggtgggcggcggcgaggacggcgacaccgacgacgacggcgacgacgacgacgacgacagaggcagcgacggcctgagcatccacaagtgcatgagctgcagcagctacagagagagccaggagaaggtgatgaacgacagcgacacccacgagaacagcctgatggaccagaacaaccccatcagctacagcctgagcgagaacagcgaggaggacaacagagtgaccagcgtgagcagcgacagccagaccggcatggacagaagccccggcaagagccccagcgccaacggcctgagccagaagcacaacgacggcaaggaggagaacgacatccagaccggcagcgccctgctgcccctgagccccgagagcaaggcctgggccgtgctgaccagcgacgaggagagcggcagcggccagggcaccagcgacagcctgaacgagaacgagaccagcaccgacttcagcttcgccgacaccaacgagaaggacgccgacggcatcctggccgccggcgacagcgagatcacccccggcttcccccagagccccaccagcagcgtgaccagcgagaacagcgaggtgttccacgtgagcgaggccgaggccagcaacagcagccacgagagcagaatcggcctggccgagggcctggagagcgagaagaaggccgtgatccccctggtgatcgtgagcgccctgaccttcatctgcctggtggtgctggtgggcatcctgatctactggagaaagtgcttccagaccgcccacttctacctggaggacagcaccagccccagagtgatcagcaccccccccacccccatcttccccatcagcgacgacgtgggcgccatccccatcaagcacttccccaagcacgtggccgacctgcacgccagcagcggcttcaccgaggagttcgagaccctgaaggagttctaccaggaggtgcagagctgcaccgtggacctgggcatcaccgccgacagcagcaaccaccccgacaacaagcacaagaacagatacatcaacatcgtggcctacgaccacagcagagtgaagctggcccagctggccgagaaggacggcaagctgaccgactacatcaacgccaactacgtggacggctacaacagacccaaggcctacatcgccgcccagggccccctgaagagcaccgccgaggacttctggagaatgatctgggagcacaacgtggaggtgatcgtgatgatcaccaacctggtggagaagggcagaagaaagtgcgaccagtactggcccgccgacggcagcgaggagtacggcaacttcctggtgacccagaagagcgtgcaggtgctggcctactacaccgtgagaaacttcaccctgagaaacaccaagatcaagaagggcagccagaagggcagacccagcggcagagtggtgacccagtaccactacacccagtggcccgacatgggcgtgcccgagtacagcctgcccgtgctgaccttcgtgagaaaggccgcctacgccaagagacacgccgtgggccccgtggtggtgcactgcagcgccggcgtgggcagaaccggcacctacatcgtgctggacagcatgctgcagcagatccagcacgagggcaccgtgaacatcttcggcttcctgaagcacatcagaagccagagaaactacctggtgcagaccgaggagcagtacgtgttcatccacgacaccctggtggaggccatcctgagcaaggagaccgaggtgctggacagccacatccacgcctacgtgaacgccctgctgatccccggccccgccggcaagaccaagctggagaagcagttccagctgctgagccagagcaacatccagcagagcgactacagcgccgccctgaagcagtgcaacagagagaagaacagaaccagcagcatcatccccgtggagagaagcagagtgggcatcagcagcctgagcggcgagggcaccgactacatcaacgccagctacatcatgggctactaccagagcaacgagttcatcatcacccagcaccccctgctgcacaccatcaaggacttctggagaatgatctgggaccacaacgcccagctggtggtgatgatccccgacggccagaacatggccgaggacgagttcgtgtactggcccaacaaggacgagcccatcaactgcgagagcttcaaggtgaccctgatggccgaggagcacaagtgcctgagcaacgaggagaagctgatcatccaggacttcatcctggaggccacccaggacgactacgtgctggaggtgagacacttccagtgccccaagtggcccaaccccgacagccccatcagcaagaccttcgagctgatcagcgtgatcaaggaggaggccgccaacagagacggccccatgatcgtgcacgacgagcacggcggcgtgaccgccggcaccttctgcgccctgaccaccctgatgcaccagctggagaaggagaacagcgtggacgtgtaccaggtggccaagatgatcaacctgatgagacccggcgtgttcgccgacatcgagcagtaccagttcctgtacaaggtgatcctgagcctggtgagcaccagacaggaggagaaccccagcaccagcctggacagcaacggcgccgccctgcccgacggcaacatcgccgagagcctggagagcctggtgtag

SEQ ID NO: 132722 - protein, 381 aa, Artificial Sequence
  derived and/or modified sequence
MHLLAILFCALWSAVLAENSDDYDLMYVNLDNEIDNGLHPTEDPTPCACGQEHSEWDKLFIMLENSQMRERMLLQATDDVLRGELQRLREELGRLAESLARPCAPGAPAEARLTSALDELLQATRDAGRRLARMEGAEAQRPEEAGRALAAVLEELRQTRADLHAVQGWAARSWLPAGCETAILFPMRSKKIFGSVHPVRPMRLESFSACIWVKATDVLNKTILFSYGTKRNPYEIQLYLSYQSIVFVVGGEENKLVAEAMVSLGRWTHLCGTWNSEEGLTSLWVNGELAATTVEMATGHIVPEGGILQIGQEKNGCCVGGGFDETLAFSGRLTGFNIWDSVLSNEEIRETGGAESCHIRGNIVGWGVTEIQPHGGAQYVS

SEQ ID NO: 132723 - DNA, 1146 bp, Artificial Sequence
  derived and/or modified sequence
atgcacctcctcgccatcctgttctgcgcgctgtggtcagccgtcctcgccgagaactctgatgactacgacttgatgtatgtgaacctcgataatgagattgacaacggcctccaccctacagaggatcccaccccctgcgcctgcggccaggagcattctgagtgggataagctattcattatgttggagaactcgcagatgcgggaacgaatgttgctgcaggcaacagacgacgtactccggggggagttgcaacgactgcgcgaagaactaggccggcttgccgagagcctagcccggccatgcgcaccgggcgcacctgccgaagcaaggttgacgtcagccctcgatgagctgctgcaggctacgagggatgctggcaggaggctggcccgaatggaaggggccgaggcccagaggccagaggaagcaggcagggcattggccgccgttctcgaagaactgaggcagacaagagctgacctgcacgccgtacagggctgggcagcccggagctggctgcccgccggctgcgaaaccgcaatcctcttccccatgagatctaagaagatctttggaagcgtacatccagtgaggccaatgagattggagtccttctcagcttgtatatgggtgaaggcgacagacgtgttaaataaaacaattttattcagctatggaacgaaaagaaatccctacgaaattcagctgtacctgtcataccagagcatagtcttcgtcgtgggaggagaagagaataagcttgtggctgaggcgatggtctctttaggcagatggacgcatctatgcggcacatggaacagtgaagaggggctaaccagtctgtgggtgaacggtgagctagccgccacgaccgtcgagatggccactgggcacattgttcctgagggtggaatcctgcagatcggtcaagagaagaacggttgttgcgtcggcgggggttttgacgagaccctggcctttagtggacggctgactggctttaatatttgggattctgtgctgtccaatgaggaaattagggagaccggcggtgcggaatcctgccacatccggggaaatatcgtaggatggggcgtgaccgagattcagcctcacggtggggcacagtacgtcagctag

SEQ ID NO: 132724 - DNA, 1146 bp, Artificial Sequence
  derived and/or modified sequence
atgcacctgctggccatcctcttctgtgccctgtggagcgctgtgctggccgagaacagtgatgattatgacctgatgtatgtgaacctggacaatgaaattgacaatggcctgcaccccacagaggaccccaccccctgtgcctgtggccaggagcacagcgagtgggacaagctgttcatcatgctggagaacagccagatgagggagaggatgctgctgcaggccacagatgatgtgctgcggggggagctgcagaggctgcgggaggagctgggccgcctggccgagagcctggcccggccctgtgcccctggggccccagctgaggcccggctgaccagcgccctggatgagctgctgcaggccaccagagatgctggaagaaggctggccaggatggagggcgctgaggcccagaggcctgaggaggccggccgggccctggccgctgtgctggaggagctgcggcagaccagggctgacctgcatgctgtgcagggctgggccgcccgctcctggctgcctgctggctgtgaaacagccatcctcttccccatgaggagcaagaagatctttggatctgtgcaccctgtgcggcccatgaggctggagagcttcagcgcctgcatctgggtgaaggccacagatgtgctgaacaagaccatcctcttctcctatggcaccaagaggaacccctatgagatccagctgtacctgagctaccagagcatcgtgtttgtggtgggcggggaggagaacaagctggtggccgaggccatggtgtccctgggccgctggacccacctgtgtggcacctggaacagcgaggagggcctgaccagcctgtgggtgaatggagagctggccgccaccaccgtggagatggccaccggccacatcgtgcctgagggcggcatcctgcagatcggccaggagaagaatggctgctgcgtgggcggcggctttgatgagaccctggccttcagcggccgcctgaccggcttcaacatctgggacagcgtgctgagcaatgaggagatccgggagactggaggagctgagagctgccacatccggggcaacatcgtgggctggggcgtgacagagatccagccccacggcggggcccagtatgtgtcctag

SEQ ID NO: 132725 - DNA, 1146 bp, Artificial Sequence
  derived and/or modified sequence
atgcacctgctggccatcctgttctgcgccctgtggagcgccgtgttggctgagaactcagatgactacgatctgatgtatgtgaacttggacaatgagatcgataatggtcttcacccgacagaagacccgacaccctgcgcctgtggacaggagcacagcgagtgggacaaactcttcattatgttggaaaatagccaaatgcgcgagcgtatgctgctgcaggcgacagacgatgtactgcgaggggagctgcaacgactaagggaagagttgggaagactggctgagagcctggctcggccctgcgccccaggtgcccctgctgaggcacggctcacgtcagctcttgatgaactgttacaggcaactagagacgcaggaaggagactcgcacgaatggaaggagctgaggcacaacgacccgaggaggctggcagggcgttagcagccgttctggaggaactgaggcaaactagagcagatctccatgctgtccaaggatgggccgcccggtcttggctccctgccggctgcgaaactgcaatcctgttccctatgcgctccaagaagatcttcggcagtgtccaccccgtaagaccaatgcgcttggaaagctttagcgcatgcatctgggtgaaagccactgatgtgctgaataaaactatcctattttcttatgggacaaagaggaacccatacgagatccaactctacctgtcataccaatcaattgtgttcgtggttggaggcgaagagaataagctagtagcagaggcaatggtgtcattaggacgctggacccacttgtgcggtacttggaacagcgaggagggcctaacttccctgtgggtgaacggcgaactggcggccaccactgtcgagatggctacaggtcacatcgttcccgagggcggcatcctacagatcggccaggagaagaacggatgttgcgtgggaggaggcttcgacgaaactctggcgttcagcggcagactaaccggttttaacatatgggacagtgttctctccaacgaagagatcagagagacaggtggggccgagtcctgccacattaggggcaatatcgtggggtggggggttaccgagatacagcctcatggtggggcacagtacgtgagttag

SEQ ID NO: 132726 - DNA, 1940 bp, Artificial Sequence
  derived and/or modified sequence
tcattcatccccattcaggctttcctcagcatttattaaggactctctgctccagcctctcactctcactctcctccgctcaaactcagctcacttgagagtctcctcccgccagctgtggaaagaactttgcgtctctccagcaatgcatctccttgcgattctgttttgtgctctctggtctgcagtgttggccgagaactcggatgattatgatctcatgtatgtgaatttggacaacgaaatagacaatggactccatcccactgaggaccccacgccgtgcgcctgcggtcaggagcactcggaatgggacaagctcttcatcatgctggagaactcgcagatgagagagcgcatgctgctgcaagccacggacgacgtcctgcggggcgagctgcagaggctgcgggaggagctgggccggctcgcggaaagcctggcgaggccgtgcgcgccgggggctcccgcagaggccaggctgaccagtgctctggacgagctgctgcaggcgacccgcgacgcgggccgcaggctggcgcgtatggagggcgcggaggcgcagcgcccagaggaggcggggcgcgccctggccgcggtgctagaggagctgcggcagacgcgagccgacctgcacgcggtgcagggctgggctgcccggagctggctgccggcaggttgtgaaacagctattttattcccaatgcgttccaagaagatttttggaagcgtgcatccagtgagaccaatgaggcttgagtcttttagtgcctgcatttgggtcaaagccacagatgtattaaacaaaaccatcctgttttcctatggcacaaagaggaatccatatgaaatccagctgtatctcagctaccaatccatagtgtttgtggtgggtggagaggagaacaaactggttgctgaagccatggtttccctgggaaggtggacccacctgtgcggcacctggaattcagaggaagggctcacatccttgtgggtaaatggtgaactggcggctaccactgttgagatggccacaggtcacattgttcctgagggaggaatcctgcagattggccaagaaaagaatggctgctgtgtgggtggtggctttgatgaaacattagccttctctgggagactcacaggcttcaatatctgggatagtgttcttagcaatgaagagataagagagaccggaggagcagagtcttgtcacatccgggggaatattgttgggtggggagtcacagagatccagccacatggaggagctcagtatgtttcataaatgttgtgaaactccacttgaagccaaagaaagaaactcacacttaaaacacatgccagttgggaaggtctgaaaactcagtgcataataggaacacttgagactaatgaaagagagagttgagaccaatctttatttgtactggccaaatactgaataaacagttgaaggaaagacattggaaaaagcttttgaggataatgttactagactttatgccatggtgctttcagtttaatgctgtgtctctgtcagataaactctcaaataattaaaaaggactgtattgttgaacagagggacaattgttttacttttctttggttaattttgttttggccagagatgaattttacattggaagaataacaaaataagatttgttgtccattgttcattgttattggtatgtaccttattacaaaaaaaagatgaaaacatatttatactacaaggtgacttaacaactataaatgtagtttatgtgttataatcgaatgtcacgtttttgagaagatagtcatataagttatattgcaaaagggatttgtattaatttaagactatttttgtaaagctctactgtaaataaaatattttataaaactagctcacgtcatttaattataaatttaagagatgttttgga

SEQ ID NO: 132727 - DNA, 1146 bp, Artificial Sequence
  derived and/or modified sequence
atgcatctcttagccatactgttttgcgcgctctggagtgccgtcctcgctgaaaattccgatgattatgatttaatgtatgtcaatctggataacgagatcgacaacggtctccaccccacggaggacccaactccttgcgcgtgtgggcaagagcacagtgagtgggataagctgttcatcatgcttgagaactcccagatgcgggaaagaatgttgctgcaagcgaccgacgatgtgcttaggggagagctgcagcgactgcgggaggaattggggaggctagctgaaagcttagcccgtccctgcgcgccaggcgcaccagccgaggctaggctaacctctgcacttgacgagcttttacaggctacaagagatgccggtcggcgactggcacggatggagggggcagaggcgcaaaggcctgaggaagctggtcgggctctggcagctgtactggaggagctgcggcagacgagagcagacctccacgctgtccagggatgggccgctaggtcctggctccccgcaggctgcgagaccgctatcctcttccctatgcggtctaagaagatcttcgggtccgtgcaccccgttcggcctatgcgcttagagagtttcagcgcatgcatttgggtaaaggccactgacgtgctcaataagaccatcctgttttcatacggcacgaagcgcaatccatacgaaattcagctgtatctgtcctaccaatcaatcgtctttgtcgtcggaggtgaggagaacaaattggttgcggaggcaatggtgagtctcggcaggtggactcacctgtgtggcacatggaatagcgaagaaggcctgacctccctctgggtcaacggagagctggccgctacaacagtggaaatggccacagggcacattgtaccggagggcggtatcctgcagatcgggcaggaaaagaatggctgctgcgttggtggtggctttgacgagacacttgccttctctggcaggctgactggttttaacatttgggattccgtcctgagcaacgaggaaatcagagaaactgggggagcggagtcctgtcacatcagagggaacattgtgggctggggcgtgaccgagatccagcctcatggtggcgctcaatatgtgtcgtag

SEQ ID NO: 132728 - DNA, 1146 bp, Artificial Sequence
  derived and/or modified sequence
atgcacctgctggccatcctgttctgcgccctgtggagcgccgtgctggccgagaacagcgacgactacgacctgatgtacgtgaacctggacaacgagatcgacaacggcctgcaccccaccgaggaccccaccccctgcgcctgcggccaggagcacagcgagtgggacaagctgttcatcatgctggagaacagccagatgagagagagaatgctgctgcaggccaccgacgacgtgctgagaggcgagctgcagagactgagagaggagctgggcagactggccgagagcctggccagaccctgcgcccccggcgcccccgccgaggccagactgaccagcgccctggacgagctgctgcaggccaccagagacgccggcagaagactggccagaatggagggcgccgaggcccagagacccgaggaggccggcagagccctggccgccgtgctggaggagctgagacagaccagagccgacctgcacgccgtgcagggctgggccgccagaagctggctgcccgccggctgcgagaccgccatcctgttccccatgagaagcaagaagatcttcggcagcgtgcaccccgtgagacccatgagactggagagcttcagcgcctgcatctgggtgaaggccaccgacgtgctgaacaagaccatcctgttcagctacggcaccaagagaaacccctacgagatccagctgtacctgagctaccagagcatcgtgttcgtggtgggcggcgaggagaacaagctggtggccgaggccatggtgagcctgggcagatggacccacctgtgcggcacctggaacagcgaggagggcctgaccagcctgtgggtgaacggcgagctggccgccaccaccgtggagatggccaccggccacatcgtgcccgagggcggcatcctgcagatcggccaggagaagaacggctgctgcgtgggcggcggcttcgacgagaccctggccttcagcggcagactgaccggcttcaacatctgggacagcgtgctgagcaacgaggagatcagagagaccggcggcgccgagagctgccacatcagaggcaacatcgtgggctggggcgtgaccgagatccagccccacggcggcgcccagtacgtgagctag

SEQ ID NO: 132729 - protein, 282 aa, Artificial Sequence
  derived and/or modified sequence
MPLLTQQIQDEDDQYSLVASLDNVRNLSTILKAIHFREHATCFATKNGIKVTVENAKCVQANAFIQAGIFQEFKVQEESVTFRINLTVLLDCLSIFGSSPMPGTLTALRMCYQGYGYPLMLFLEEGGVVTVCKINTQEPEETLDFDFCSTNVINKIILQSEGLREAFSELDMTSEVLQITMSPDKPYFRLSTFGNAGSSHLDYPKDSDLMEAFHCNQTQVNRYKISLLKPSTKALVLSCKVSIRTDNRGFLSLQYMIRNEDGQICFVEYYCCPDEEVPESES

SEQ ID NO: 132730 - protein, 246 aa, Artificial Sequence
  derived and/or modified sequence
MPLLTQQIQDEDDQYSLVASLDNVRNLSTILKAIHFREHATCFATKNGIKVTVENAKCVQANAFIQGTLTALRMCYQGYGYPLMLFLEEGGVVTVCKINTQEPEETLDFDFCSTNVINKIILQSEGLREAFSELDMTSEVLQITMSPDKPYFRLSTFGNAGSSHLDYPKDSDLMEAFHCNQTQVNRYKISLLKPSTKALVLSCKVSIRTDNRGFLSLQYMIRNEDGQICFVEYYCCPDEEVPESES

SEQ ID NO: 132731 - DNA, 849 bp, Artificial Sequence
  derived and/or modified sequence
atgcccctgctgacccagcagatccaggacgaggacgaccagtacagcctggtggccagcctggacaacgtgagaaacctgagcaccatcctgaaggccatccacttcagagagcacgccacctgcttcgccaccaagaacggcatcaaggtgaccgtggagaacgccaagtgcgtgcaggccaacgccttcatccaggccggcatcttccaggagttcaaggtgcaggaggagagcgtgaccttcagaatcaacctgaccgtgctgctggactgcctgagcatcttcggcagcagccccatgcccggcaccctgaccgccctgagaatgtgctaccagggctacggctaccccctgatgctgttcctggaggagggcggcgtggtgaccgtgtgcaagatcaacacccaggagcccgaggagaccctggacttcgacttctgcagcaccaacgtgatcaacaagatcatcctgcagagcgagggcctgagagaggccttcagcgagctggacatgaccagcgaggtgctgcagatcaccatgagccccgacaagccctacttcagactgagcaccttcggcaacgccggcagcagccacctggactaccccaaggacagcgacctgatggaggccttccactgcaaccagacccaggtgaacagatacaagatcagcctgctgaagcccagcaccaaggccctggtgctgagctgcaaggtgagcatcagaaccgacaacagaggcttcctgagcctgcagtacatgatcagaaacgaggacggccagatctgcttcgtggagtactactgctgccccgacgaggaggtgcccgagagcgagagctag

SEQ ID NO: 132732 - DNA, 741 bp, Artificial Sequence
  derived and/or modified sequence
atgcccctgctgacccagcagatccaggacgaggacgaccagtacagcctggtggccagcctggacaacgtgagaaacctgagcaccatcctgaaggccatccacttcagagagcacgccacctgcttcgccaccaagaacggcatcaaggtgaccgtggagaacgccaagtgcgtgcaggccaacgccttcatccagggcaccctgaccgccctgagaatgtgctaccagggctacggctaccccctgatgctgttcctggaggagggcggcgtggtgaccgtgtgcaagatcaacacccaggagcccgaggagaccctggacttcgacttctgcagcaccaacgtgatcaacaagatcatcctgcagagcgagggcctgagagaggccttcagcgagctggacatgaccagcgaggtgctgcagatcaccatgagccccgacaagccctacttcagactgagcaccttcggcaacgccggcagcagccacctggactaccccaaggacagcgacctgatggaggccttccactgcaaccagacccaggtgaacagatacaagatcagcctgctgaagcccagcaccaaggccctggtgctgagctgcaaggtgagcatcagaaccgacaacagaggcttcctgagcctgcagtacatgatcagaaacgaggacggccagatctgcttcgtggagtactactgctgccccgacgaggaggtgcccgagagcgagagctag

SEQ ID NO: 132733 - DNA, 849 bp, Artificial Sequence
  derived and/or modified sequence
atgcctctgctcacgcagcagattcaggatgaggacgatcagtacagcctagtcgctagcttggacaatgtaagaaatttgtcaacaattttgaaagccattcattttcgtgaacacgcgacgtgctttgcgaccaagaatggaattaaagtgactgtggagaacgccaagtgtgtccaagcaaacgcttttattcaggccggaatctttcaggagtttaaggtgcaagaagagagcgtgacatttagaatcaacctcacagtgctgctggactgtctaagcatcttcggaagttcacctatgcccggaactttgacagccctgaggatgtgttaccagggttacggataccccctgatgctatttttagaggaaggcggagtcgtgacagtgtgcaaaataaacacccaggagccagaggagacacttgacttcgatttttgtagcactaacgtgataaataaaatcattttgcagagtgaggggctgagggaggcattctctgagcttgatatgacttcagaggtcctgcagatcactatgagccctgataagccatactttcgcttgtccacatttggtaacgcagggtcctcccacttggattaccctaaggactccgacctgatggaagcattccactgcaatcagacacaagttaatagatacaagatctctctgctaaaaccttccactaaggctttggttctgtcgtgcaaggttagcatccgtacagacaataggggctttttgtctctgcagtatatgatccggaacgaggatggccaaatttgtttcgtggagtactattgctgccccgatgaggaagtaccagagtccgagtcgtag

SEQ ID NO: 132734 - DNA, 849 bp, Artificial Sequence
  derived and/or modified sequence
atgcctctcttgacacaacagatccaggatgaggacgatcagtattcactcgtcgcgtcacttgacaatgtacggaatctgagcacaatcctcaaagcaatccacttcagagaacatgctacatgctttgcaaccaaaaacggaataaaagttactgtggagaatgccaaatgtgtccaggcgaatgctttcatccaagcaggcattttccaagagttcaaggttcaggaagagtctgtgactttccgcatcaatctgactgtgctgttagattgcttaagcatcttcggctctagcccaatgcccgggacccttaccgccctgcgcatgtgctaccaagggtacggatatcctctgatgctcttcctggaagagggcggcgtcgtaacagtatgtaagatcaatacacaggaacctgaggagacactggacttcgacttctgctccacaaatgtgattaacaagatcatcctgcagagcgagggcttgcgggaagcattttcggaactggatatgacttctgaggttctccagattacgatgtcccccgataaaccctatttccgcctgagtacttttggaaatgctgggagtagtcacctcgattacccaaaagacagcgatttgatggaggccttccattgcaaccagacccaagtcaatcgctacaaaatttcactgctgaagccttctaccaaagcgctggtcctgagttgtaaagtgtccattaggacagataatcgggggttcctgtccttacagtacatgatcaggaacgaggatgggcagatctgctttgttgaatactactgctgccctgacgaagaggtgcctgagtctgaatcttag

SEQ ID NO: 132735 - DNA, 741 bp, Artificial Sequence
  derived and/or modified sequence
atgcccctgctgactcagcagattcaagacgaggatgatcaatactctctcgtggcctcactggacaatgtgcggaacttgagcacaatccttaaggctatccacttccgggagcacgctacctgctttgcgactaaaaacggaatcaaggttactgtcgagaacgccaagtgcgtgcaggccaacgcattcatccagggcactttgaccgccctaagaatgtgctatcaaggctatggatatcctctaatgctattcttggaagagggcggcgtcgttaccgtttgtaaaataaatactcaagagccagaagaaacgctcgactttgacttttgctctacaaacgtgatcaacaaaattattctgcagtcagaagggctgcgcgaggccttttccgaactagatatgacttcagaggtgctgcagatcacaatgtccccagacaaaccttattttcggctgagtacattcggaaacgcagggagttcccaccttgattatcccaaggactctgacttgatggaggccttccattgtaatcagacacaagtgaatcgctataaaatcagccttttaaaaccgtcgaccaaagccctcgtcctctcctgtaaagtgagcattcgcacagataacaggggcttcctgagcctgcaatacatgattaggaatgaagacggtcagatctgcttcgtcgagtactactgttgtcctgatgaggaggtccctgagtctgaatcatag

SEQ ID NO: 132736 - DNA, 849 bp, Artificial Sequence
  derived and/or modified sequence
atgcccctgctgacccagcagatccaggatgaagatgaccagtacagcctggtggccagcctggacaacgtgaggaacctgagcaccatcctgaaggccatccacttccgggagcacgccacctgctttgccaccaagaatggcatcaaggtgacagtggagaatgccaagtgtgtgcaggccaatgccttcatccaggccggcatcttccaggagttcaaggtgcaggaggagagcgtgaccttccgcatcaacctgactgtgctgctggactgcctgagcatcttcggcagcagccccatgcctggcaccctgacagccctgaggatgtgctaccagggctacggctaccccctgatgctgttcctggaggagggcggcgtggtgacagtgtgcaagatcaacacccaggagcctgaggagaccctggactttgacttctgcagcaccaacgtcatcaacaagatcatcctgcagagcgagggcctgcgggaggccttcagcgagctggacatgaccagcgaggtgctgcagatcaccatgagcccagacaagccctacttccggctgagcacctttggaaatgccggcagcagccacctggactaccccaaggacagcgacctgatggaggccttccactgcaaccagacccaggtgaaccgctacaagatcagcctgctgaagcccagcaccaaggccctggtgctgagctgcaaggtgtccatcagaacagacaacagaggcttcctgagcctgcagtacatgatcagaaatgaagatggccagatctgctttgtggagtactactgctgcccagatgaggaggtgcctgagagcgagagctag

SEQ ID NO: 132737 - DNA, 741 bp, Artificial Sequence
  derived and/or modified sequence
atgcccctgctgacccagcagatccaggatgaagatgaccagtacagcctggtggccagcctggacaacgtgaggaacctgagcaccatcctgaaggccatccacttccgggagcacgccacctgctttgccaccaagaatggcatcaaggtgacagtggagaatgccaagtgtgtgcaggccaatgccttcatccagggcaccctgacagccctgaggatgtgctaccagggctacggctaccccctgatgctgttcctggaggagggcggcgtggtgacagtgtgcaagatcaacacccaggagcctgaggagaccctggactttgacttctgcagcaccaacgtcatcaacaagatcatcctgcagagcgagggcctgcgggaggccttcagcgagctggacatgaccagcgaggtgctgcagatcaccatgagcccagacaagccctacttccggctgagcacctttggaaatgccggcagcagccacctggactaccccaaggacagcgacctgatggaggccttccactgcaaccagacccaggtgaaccgctacaagatcagcctgctgaagcccagcaccaaggccctggtgctgagctgcaaggtgtccatcagaacagacaacagaggcttcctgagcctgcagtacatgatcagaaatgaagatggccagatctgctttgtggagtactactgctgcccagatgaggaggtgcctgagagcgagagctag

SEQ ID NO: 132738 - DNA, 849 bp, Artificial Sequence
  derived and/or modified sequence
atgcccctgctgacccagcagatccaggacgaggacgaccagtactcccttgttgctagcttggataacgtacgaaacctaagcacaatcctgaaggcgattcacttccgggaacatgctacctgctttgccaccaagaatggcatcaaggtgaccgtcgaaaatgcaaaatgtgttcaagccaacgcttttatccaagccgggatcttccaagagtttaaggtacaggaagagtccgtcacgttccggatcaatctgactgtgctccttgattgtctttcaatttttggatcatctcccatgccggggaccctaacagccctgagaatgtgttaccagggctatgggtatcctctgatgctctttttggaggaagggggtgtagtcaccgtatgtaagattaacacacaagaacctgaggagacactggacttcgacttctgttcaacgaacgtgattaacaagataatcctgcaatccgaagggctgagggaagccttctccgagttagacatgactagcgaggtgcttcagattacaatgagcccagacaaaccatatttccggctgtccacattcgggaatgccggtagcagtcacctggattaccctaaggattctgatctgatggaggcatttcactgtaatcagacccaggtcaatagatataaaattagcttacttaagcctagcacaaaagcgctcgtcctctcctgtaaagtgtccataagaactgacaatcggggattcctgagtctgcaatacatgatccgcaatgaggatggccagatctgctttgtggagtactattgttgccctgacgaagaggttcccgaaagcgaaagctag

SEQ ID NO: 132739 - DNA, 849 bp, Artificial Sequence
  derived and/or modified sequence
atgcccctgctgacccagcagatccaggacgaggacgaccagtacagcctggtggcgagtctggataacgtgcggaatttgagtactattctcaaggccatacattttagagagcacgctacatgctttgctaccaaaaatggaatcaaagtcactgtggagaatgctaaatgtgttcaggctaatgcattcatccaggcaggcatttttcaagaattcaaggtgcaggaggagtccgtgacatttcgcatcaaccttaccgtgctgctggactgcctcagcatctttggatctagcccaatgcccggaactctgactgccctaagaatgtgctatcaggggtacggttaccctctgatgttgtttctggaagaaggtggagtcgtgactgtctgcaaaattaatacccaggaaccagaggaaaccctggatttcgatttttgttctacgaatgtcatcaacaagatcatcctccagtctgagggactgagagaggcctttagtgaattggatatgacctcagaagttctgcagattactatgagccctgacaagccatatttccggctgagcaccttcggcaatgcaggctcaagccacttggactaccccaaggattccgatctaatggaagccttccattgcaatcagacacaggtgaataggtataaaatctctctcctgaaacctagcaccaaagcacttgttcttagctgcaaagtgtcaatacgtaccgacaaccgcgggttcctgagcctccaatatatgatcaggaatgaagacggtcagatttgctttgtggagtattattgttgccccgacgaagaggttcctgagtcggagagttag

SEQ ID NO: 132740 - DNA, 741 bp, Artificial Sequence
  derived and/or modified sequence
atgcccctgctgacccagcagatccaggacgaggacgaccagtactcattggtcgccagcttagataatgtcagaaacttgagcaccatattaaaagccattcacttcagagaacacgccacatgcttcgccaccaaaaacgggataaaagtgacggtggagaatgccaagtgtgtccaggcaaatgccttcatccagggcacacttactgcactgagaatgtgctatcaagggtatggataccctcttatgttgtttctcgaagaaggtggcgtggtgactgtctgcaaaattaacacccaggagcctgaagagactttggacttcgacttctgcagcactaacgtgatcaataaaattatcttgcagtctgaagggttaagggaggccttctctgaactggatatgactagcgaggtgttgcagatcactatgtcccccgacaagccgtattttagactgagcacattcggcaacgcaggaagctcgcatctagattaccccaaagactccgacttgatggaggcatttcactgcaatcaaactcaggtgaatagatataagatctcactactgaaaccctccacaaaggctttggttctctcttgcaaagtgagcatccgaactgacaaccgtgggttcctctcacttcagtacatgatccggaacgaagatggccaaatatgctttgtcgagtactactgttgcccggatgaagaggtgcccgagtccgaatcctag

SEQ ID NO: 132741 - DNA, 849 bp, Artificial Sequence
  derived and/or modified sequence
atgcctctgctgacacagcagatacaagacgaggacgaccagtattctcttgttgccagcctcgacaacgtcagaaacttatccacaatactgaaggccatacattttcgagaacacgctacctgcttcgctaccaaaaatggcatcaaagtgactgtcgaaaacgcaaaatgcgtccaggctaatgcttttatccaggccggaattttccaggagttcaaagtgcaggaggaatcggtaacattccgcatcaacctgactgtgctgttggactgcttgagcatcttcggctcgtcaccaatgccagggacgctgaccgcattgagaatgtgttaccagggatatggatatccccttatgctcttcttggaggaaggcggagtcgtgacagtgtgcaaaatcaacacacaggagccagaagagaccttagacttcgacttctgctctaccaatgtgatcaacaagatcattttgcaatccgagggtcttcgcgaggcgttttcggagttggacatgacctcggaagtgctccaaatcactatgtctccggacaagccgtactttaggttgtccacattcggtaatgctggctccagccacctcgactaccctaaggattccgatctgatggaggcgttccattgcaaccaaactcaggtgaaccgctataagatctccctcttaaaaccaagcacaaaagccctggtgctgtcttgtaaggtgagcatccgaacagataacagaggatttttgagcctgcagtatatgattcgtaacgaagacggccagatttgctttgttgagtactattgttgcccagacgaagaggtgcctgaaagcgagtcatag

SEQ ID NO: 132742 - DNA, 849 bp, Artificial Sequence
  derived and/or modified sequence
atgccccttttaacacaacagattcaggacgaggacgatcagtactcgctggtggctagcctagataatgtgcggaaccttagtacgattctgaaggcgattcattttagagagcacgccacctgttttgccaccaagaacggaattaaagtcacggtcgagaacgcgaagtgtgtccaggcgaacgccttcattcaagcaggtatattccaggagttcaaggtccaggaggagagcgtgaccttccgcataaacctaaccgttctccttgattgcctgtcgatttttgggagctccccaatgcctggcaccctgaccgcccttcggatgtgctaccagggctacggatacccacttatgctgtttctggaggaaggcggtgtagtgacggtctgcaagatcaacacccaggaacctgaggagaccctggattttgatttttgcagtaccaacgtgatcaacaaaataatcctccagagcgaaggtctgcgagaggcattctcggaattggatatgactagtgaagtgctccagattaccatgtctccagataaaccttactttcggctctccactttcggaaacgccggaagcagtcatctggactacccaaaggactccgatctgatggaggcttttcactgcaatcaaacccaggtcaacaggtataagatatctttactcaaaccgagcaccaaagccctagtgctgtcctgtaaagtttctatacgcactgataatcggggattcctatccttgcagtacatgatcagaaatgaggacgggcagatttgtttcgtagagtattactgttgtcccgatgaagaggttcccgagagtgaaagctag

SEQ ID NO: 132743 - DNA, 741 bp, Artificial Sequence
  derived and/or modified sequence
atgccgctgctaactcagcagattcaggatgaagacgaccagtacagcttagtagcttccctcgataatgttcggaatctgagcacaatcctaaaagctatacatttccgggaacacgccacatgcttcgccactaagaacggaattaaggtcaccgttgaaaacgccaagtgtgtgcaggccaatgctttcatacaaggaacgctaactgctttgcggatgtgttaccagggctacggctatccattgatgctctttctagaggaaggaggggtggtgactgtctgcaaaatcaatacacaagaaccggaagaaacattagattttgacttttgttccacaaatgtaattaataagatcattttacagtcagaagggcttcgcgaggccttcagcgagttggacatgaccagtgaagtgttgcagatcaccatgagtcccgataagccctatttcaggctctcaactttcggaaatgcgggttccagccatttggactatcccaaagactccgacttaatggaggctttccactgcaaccagacacaggttaatagatacaaaatttctctgttaaagccaagtactaaggctctggttcttagctgcaaggtgagtattcgaaccgacaatagggggttcttgagcctgcagtacatgattagaaatgaggatggacaaatctgttttgtggagtactattgttgtcccgatgaagaggtaccagagagcgagagttag

SEQ ID NO: 132744 - DNA, 2341 bp, Artificial Sequence
  derived and/or modified sequence
catgagctaccatgcccggccatactgttcttgcctgtaaaataacccactgcttaaaaataaataaataacctggcatttagaaataggctctgactccaacttaaaaagtgctttgaattctatcccaggtccatttttcaataaaaacagttaaaaaaaaaaaaaaaaaggcccaaaaagcaacatgtggcagtccttagcacttaggacaaaccatcccacctatctcaggaccttcagaagcattacagtgaaggcattcctggaccttcaagaaatgtttcaataatattaggacacctgttttaaaaagtaaagaatctacctaatgaaatctaaagaatttcttacgaaatgttaactggaaaaattgtggcacttgaaaggataaaaggcattgtgtttttttcgtgagaacactgaacaaatgaagaatatataaaataagtgaaaacataaaaatagggtctcacactgttgcccaggctgaagtgctcacggctcactgcagtttcaagttcctgggctcaaagatgggagtctccctatgttgcccaggctggtctccaacacctgggctcaagtggcttggcctcccaaagcgctgggattataggtctgtgccgcctccttccggtctcggtggcgcggcacgcgcggctctctaggcctccttcagctctgtggtgacggtggccgaggtggagggccggtctgaagagtggcgggactggcttcacttcctccgcggttcctcggagccgcctcgctcctcttcagggactttgctgagaagggctctcgggcgtccagaccccaccgcaaaggtgtttggcgatccgccgagaagttgttggccccaggagcatccctcggggccgaatgcgcagtggacgatgccccttctgacccaacagatccaagacgaggatgatcagtacagccttgtggccagccttgacaacgttaggaatctctccactatcttgaaagctattcatttccgagaacatgccacgtgtttcgcaactaaaaatggtatcaaagtaacagtggaaaatgcaaagtgtgtgcaagcaaatgcttttattcaggctggaatatttcaggagtttaaagttcaggaagagtctgttacttttcgaattaatttaactgtccttttagactgtttatctatttttggatcaagtcctatgccagggactttaactgcacttcgaatgtgttaccaaggttatggttaccctttgatgctgttcctggaagaaggaggagtggtgacagtctgcaaaatcaatacacaggaacctgaggagaccctggactttgatttctgcagcaccaatgttattaataaaattattctgcagtcagaggggctccgtgaagcattttctgaattggatatgacgagtgaagtcctacaaattaccatgtctcctgacaagccttatttcaggttatctacttttggaaatgcaggaagttcccaccttgactatcccaaagattctgatttgatggaagcatttcattgtaatcagacccaagtcaacagatacaagatttccttactgaaaccctctacaaaggcattagtcctatcttgtaaggtatctattcggacagataacagaggcttcctttcattacagtatatgattagaaatgaagatggacaaatatgttttgtggaatattactgctgccctgatgaagaagttcctgaatctgagtcttgagtatgacaattcactgatatttatgtgtacatttatgatagatgaagttcttattctgagtacagtactctttgtcatttcatattggattttctatagagaagaagcacaatggggaagataggagcaaggtcatgtaccctaatagttactatgttttgtaaatccattttgtagagggcatgtaaataaatgttttcctgtagtcatagattattcaggactgtcctttagttctgtcttttgaactcatgggaataattgtgagtcagcgtaacatttcaagagtctaaaggtggccgggtgtggtggctttaatcccagcactttgggaagccgaggtgggcggatcacctgaggtcaggagttcgagaccagcctgaccaacgtggagaaaccccatctctactaaaaatacaaaaaattagccggacgtggtggcacatgcctgtaatgccagctactcgggaggctgaggcaggagaattgcttgaacccgggaggcggaggttgtggtgagctgagatgacgccattgcactccagcctaggcaataagagcaaaactctgcctcaaaaaaaaaaaaaaaaaaa

SEQ ID NO: 132745 - DNA, 5770 bp, Artificial Sequence
  derived and/or modified sequence
gcttgccatcacaccacacggggtcatttacttatcacctactccgcgctagagtactatgctaagtgcggaggacgcaaaaattaatgtcaaagataatccttgttcacagtattctgtctagcttaagaagagttcttagttgaatgaaagctaattctaacaacttgtgtgcacttcttttgaataaaaaccatcaacttatttgaattcttaagtttcctcctaaactccaacatttcaggaggaagaggtcacattctagtcatctttgcaatctcaaacccaaaggaagcctaacttggtacagtgcatggcacattcaatgtctgttgaatacaagtaaagctcatactacctagtctatttttcagtatctcttgagttaatgacctggttaacaagtcagagtcacagtcccaagggcaacaactttttaaaggctcccctaacgtacttcaggatccctgactgagagtggctgactatggcagtatatgggcatactaatcactggagaaataatagcgagaaataaccaaggaaaagcactactctccaaaaacattaaaaaaaaaaaacaactgaacaactagtaagaaagaacgctggatctgagcaccctgtaagtcgcttccccgtgggccgggtaaaggttttaaaacccgccgcctccaggaagacggccacgtgcacaaggattagctgcaaactccgtgcccagtctggccgggagaattgctaaaaccgacctaccgttaacacccgggctactctgaaattaagcaaggctgtagtcaagtaagtaacccaagaaaaggcgcacagagccgccgccgcaggtgtagcccggggacatcccctcctaccttgcaaacggggcctgggatccggtccctctcttcttcctccacctcctctgctgtggcgtgccgcttagctggcggctccgcatctatttcgtttctttttggcttcttcgcctgaactgcaaagcctccacgccgtttcctcttggttgccgccatcttgcctcgccgcccgcgctcttggcctcctttccggcgctgccgctcgctcctatttccgatctctatggttcggcggctctaagcgctcagctccgcggtcgtcctccaggtctgtgccgcctccttccggtctcggtggcgcggcacgcgcggctctctaggcctccttcagctctgtggtgacggtggccgaggtggagggccggtctgaagagtggcgggactggcttcacttcctccgcggttcctcggagccgcctcgctcctcttcagggactttgctgagaagggctctcgggcgtccagaccccaccgcaaaggtgtttggcgatccgccgagaagttgttggccccaggagcatccctcggggccgaatgcgcagtggacgatgccccttctgacccaacagatccaagacgaggatgatcagtacagccttgtggccagccttgacaacgttaggaatctctccactatcttgaaagctattcatttccgagaacatgccacgtgtttcgcaactaaaaatggtatcaaagtaacagtggaaaatgcaaagtgtgtgcaagcaaatgcttttattcaggctggaatatttcaggagtttaaagttcaggaagagtctgttacttttcgaattaatttaactgtccttttagactgtttatctatttttggatcaagtcctatgccagggactttaactgcacttcgaatgtgttaccaaggttatggttaccctttgatgctgttcctggaagaaggaggagtggtgacagtctgcaaaatcaatacacaggaacctgaggagaccctggactttgatttctgcagcaccaatgttattaataaaattattctgcagtcagaggggctccgtgaagcattttctgaattggatatgacgagtgaagtcctacaaattaccatgtctcctgacaagccttatttcaggttatctacttttggaaatgcaggaagttcccaccttgactatcccaaagattctgatttgatggaagcatttcattgtaatcagacccaagtcaacagatacaagatttccttactgaaaccctctacaaaggcattagtcctatcttgtaaggtatctattcggacagataacagaggcttcctttcattacagtatatgattagaaatgaagatggacaaatatgttttgtggaatattactgctgccctgatgaagaagttcctgaatctgagtcttgagtatgacaattcactgatatttatgtgtacatttatgatagatgaagttcttattctgagtacagtactctttgtcatttcatattggattttctatagagaagaagcacaatggggaagataggagcaaggtcatgtaccctaatagttactatgttttgtaaatccattttgtagagggcatgtaaataaatgttttcctgtagtcatagattattcaggactgtcctttagttctgtcttttgaactcatgggaataattgtgagtcagcgtaacatttcaagagtctaaaggtggccgggtgtggtggctttaatcccagcactttgggaagccgaggtgggcggatcacctgaggtcaggagttcgagaccagcctgaccaacgtggagaaaccccatctctactaaaaatacaaaaaattagccggacgtggtggcacatgcctgtaatgccagctactcgggaggctgaggcaggagaattgcttgaacccgggaggcggaggttgtggtgagctgagatgacgccattgcactccagcctaggcaataagagcaaaactctgcctcaaaaaaaaaaaaaaaaaaagtctaaaggcttaaagtttgatgcagctacctgaaatgatcttttatttatttattattagaaaaagcaaaggcatatgggcattgcttattagtttgaattctagagactagatcttaaagtagtggttctcaaagtgttgtgcccgcaccaacatcagaatggcctgcaaacttgtagcaaactctggggaggaggccagcattctgtattttaacaagcttccctcaggagattctgatgcctgctaaattttgggaaccactgttttaaaggaaactttttttttctttaatagcatttaattgtatgagatgattgcttttacatgtgatttccttgcaaatgttctgaagttgaggcatcaccaaacaagtctgaacaattctttatgtgatttatttttaaagtagaccttttgaagagatctatgaatgggatataaagcaattttcagtgttacaggttttcttcttcttctcaaaactgtttgctgtaagtaactgcaatcagtacttactactttccatttgcttatgagtttcttgacaaatcaaggtgtagaaaaccagttattaagtgattttgtactttcctggtagttgtcactaaaataatttttgtggcatataaatatatttaataaaatgcaaaaattatcttcctgtctagtagaaaaaattacatgagtaaagtgaagcttctgtctttgttactgtaccaggtgacaacagctgagtgtccctccatggacagtcactattggccttttgagtgagacagttctttaggataaaaacctgtcatcccattgcaggattcatttagcctttctggcccttacccactgatgctagtcattgtgaccaccccacctcccccaaataaaagtgtgccaaactattcattgttgagaaccattcaattgtattcaccaaaattggaggatatattggaatgccctaccttaatataggtcacatagcattagagaaaattggtttggagagtattacagcaaagtgtgctgcaaggaggctactccagcacaatggcaggcactgcttcccaggcatatggacaattctgggaggtggccagggtcagcacctgataactagtaagtgtctcaatctcagcatacaaaatttagcagtgactacaaaagaagttggaattttctaaaatgtttgtattcaagaaggaaacaaatgaatttactaaatgttgtcagagtattttttgtttagataaccaccaagaacagaacaaacctaaaagatacttgggaaaatatctaatcagtcaacattctaaggactgttaaatgtgaaatagcatagttattttttgtcttttgttactagtgtgaacaaagaacggcgcctaacatataatgggcatttagtaactctgttagatgaaagactctccaatttcagattttcttttagcatcttattagtcactacttaattctgatgatttagctctaaatttattttgatctcagtttttttatttttatttttggagacaagatcttgctctgttgcccaggctggagtacagttgtaggattacagttcactccagcctcaatctcctaggctcaagcaatcctcccatctcagcttcccaaatagctacgactacaggtgcatgcctccatgccctgctaatttttgtattttttgtagagatggggttttactatgttccctaggctaatcttgaactcctgagctcaagcaatccacccgcctcggcctcccaaagggctgggattacaggcgtgagctatcatgcctggcctaatgtattttttaaaagttgaatctaaaaagaatttaaaacaaatataaatcagctcagtaaggatggatatttttgtacatttaaaactattattttaggccgggagtggtggctcacacctgtaatcccagcattttgggaagccgaggcagggggatcatctgaggtcaggaagttcgagatcagcctggccaacatggtgaaacccctacctctactaaaaatacaaaaattagctgggtgtggtggtgggtgtctgtaatcccagctacttgagaggctgaggcaagagaatcacttgaaactggaaggcgggggttgcagtgagccgagattgcaccattgcactccagcctgggtgacagagcaagactccgtctcaaaaacaaaaaaaattaaaataaaaattattgttttagctgcatgtcttcagctatttagaattcaaagactaatgaattgtttctaagtcaccctaacatcaaggtacttattttataaagaatttcctccttatttgtgttctaattgacccaggaatttttactttaataaaagtttaactttatttcctatggaaaatcactagggggagtgctccctcaggcagagcaggcgacactttggtgccactacaaattgatgtgtagtatatagaagaatacagtcttatatttaaagacttttagttctgtctttttgaagtttatctctctttctagtaaaatggtgcttactgtgaatggataatcttttttttcatttttcatttgttgatttcccattcgatgatgtagtgcttccaccgagaattgatgaaatgcttcaaaataataaaagtatttgttaaattccactttaataaaaataaggcatgtaacacagtcattttaacaggaagccacagggtttctgtggtgttaccaaagtcctagtaaaaattaattaaaattgctaaaagggcagaatgtggcactctcaacagtggggtaggcagtccttcagaacatagagacttccttctttccttccctgtcttcacattgcttgtcccttatccccacctgaaataaaatctattgggtcctga

SEQ ID NO: 132746 - DNA, 1151 bp, Artificial Sequence
  derived and/or modified sequence
gtggagggccggtctgaagagtggcgggactggcttcacttcctccgcggttcctcggagccgcctcgctcctcttcagggactttgctgagaagggctctcgggcgtccagaccccaccgcaaaggtgtttggcgatccgccgagaagttgttggccccaggagcatccctcggggccgaatgcgcagtggacgatgccccttctgacccaacagatccaagacgaggatgatcagtacagccttgtggccagccttgacaacgttaggaatctctccactatcttgaaagctattcatttccgagaacatgccacgtgtttcgcaactaaaaatggtatcaaagtaacagtggaaaatgcaaagtgtgtgcaagcaaatgcttttattcaggggactttaactgcacttcgaatgtgttaccaaggttatggttaccctttgatgctgttcctggaagaaggaggagtggtgacagtctgcaaaatcaatacacaggaacctgaggagaccctggactttgatttctgcagcaccaatgttattaataaaattattctgcagtcagaggggctccgtgaagcattttctgaattggatatgacgagtgaagtcctacaaattaccatgtctcctgacaagccttatttcaggttatctacttttggaaatgcaggaagttcccaccttgactatcccaaagattctgatttgatggaagcatttcattgtaatcagacccaagtcaacagatacaagatttccttactgaaaccctctacaaaggcattagtcctatcttgtaaggtatctattcggacagataacagaggcttcctttcattacagtatatgattagaaatgaagatggacaaatatgttttgtggaatattactgctgccctgatgaagaagttcctgaatctgagtcttgagtatgacaattcactgatatttatgtgtacatttatgatagatgaagttcttattctgagtacagtactctttgtcatttcatattggattttctatagagaagaagcacaatggggaagataggagcaaggtcatgtaccctaatagttactatgttttgtaaatccattttgtagagggcatgtaaataaatgttttcctgtagtcatagatt

SEQ ID NO: 132747 - protein, 517 aa, Artificial Sequence
  derived and/or modified sequence
MARMGLAGAAGRWWGLALGLTAFFLPGVHSQVVQVNDSMYGFIGTDVVLHCSFANPLPSVKITQVTWQKSTNGSKQNVAIYNPSMGVSVLAPYRERVEFLRPSFTDGTIRLSRLELEDEGVYICEFATFPTGNRESQLNLTVMAKPTNWIEGTQAVLRAKKGQDDKVLVATCTSANGKPPSVVSWETRLKGEAEYQEIRNPNGTVTVISRYRLVPSREAHQQSLACIVNYHMDRFKESLTLNVQYEPEVTIEGFDGNWYLQRMDVKLTCKADANPPATEYHWTTLNGSLPKGVEAQNRTLFFKGPINYSLAGTYICEATNPIGTRSGQVEVNITEFPYTPSPPEHGRRAGPVPTAIIGGVAGSILLVLIVVGGIVVALRRRRHTFKGDYSTKKHVYGNGYSKAGIPQHHPPMAQNLQYPDDSDDEKKAGPLGGSSYEEEEEEEEGGGGGERKVGGPHPKYDEDAKRPYFTVDEAEARQDGYGDRTLGYQYDPEQLDLAENMVSQNDGSFISKKEWYV

SEQ ID NO: 132748 - DNA, 910 bp, Artificial Sequence
  derived and/or modified sequence
gctggaggggcctcccttgcccacctctcttcgctggcactggcctcccgcacccgggtctgcagtccctccgccatctcacaggtgtgcagccgctaggcctgggggatccgaatgactggggctggataggaatgccttcgtgtttcccaagaccccggggcctgctccacaaagtttgaagggtgggaggagttgaggcgccttgaattttccttcgtgagtttggagaccagccgatttttcatgaagctagcaaagactgcggtcctggatcctgcaacatatacctcattttctccaggcctctccacttgctcgagctctcagccaccaggagacagacggaaggggcttctgggctgtgttgggagcgggcactgtcccctacccactcctgcacagtttcccaaagtccagcgacctccgaccctccttgggggaaaaaataccagtacccagacaactctgcatcctgttatatgactgggcttgcttcaggaatatcttacaaagaagaagaagaagaaggaagaggaggaacggcttggagtcatgtttacatctagttctactgatccgttcacatctggagagtttatttataactccctctataactctctgtttggaggcactggtggctctactgacagactgatgtctaggaaatattgctctatgtctaaccgtacctaaatgtgctgtggttgtatttacagatttacgtttgagggaaatataattatttccattgtatttgtgcatatacagtagttataggagcagatttatatatgggaaaatatacgactctcttacagccatccggctttatgtacatttgatatcctaacagatttatatctctgaacagctatatagataaaaacgtatatcgttagaatta

SEQ ID NO: 132749 - DNA, 812 bp, Artificial Sequence
  derived and/or modified sequence
tggccgctgggaagttgggagagccaggctggggctccggcaggcccagggaaagttccctttctaggctctttattaaaaaatttaaaaggaggagttgaggcgccttgaattttccttcgtgagtttggagaccagccgatttttcatgaagctagcaaagactgcggtcctggatcctgcaacatatacctcattttctccaggcctctccacttgctcgagctctcagccaccaggagacagacggaaggggcttctgggctgtgttgggagcgggcactgtcccctacccactcctgcacagtttcccaaagtccagcgacctccgaccctccttgggggaaaaaataccagtacccagacaactctgcatcctgttatatgactgggcttgcttcaggaatatcttacaaagaagaagaagaagaaggaagaggaggaacggcttggagtcatgtttacatctagttctactgatccgttcacatctggagagtttatttataactccctctataactctctgtttggaggcactggtggctctactgacagactgatgtctaggaaatattgctctatgtctaaccgtacctaaatgtgctgtggttgtatttacagatttacgtttgagggaaatataattatttccattgtatttgtgcatatacagtagttataggagcagatttatatatgggaaaatatacgactctcttacagccatccggctttatgtacatttgatatcctaacagatttatatctctgaacagctatatagataaaaacgtatatcgttagaatta

SEQ ID NO: 132750 - DNA, 1554 bp, Artificial Sequence
  derived and/or modified sequence
atggcaagaatgggattagctggggcagccggccggtggtggggattggctctaggtctgactgctttttttctcccaggggtgcattcccaggtcgtacaagtgaatgattccatgtatggattcatcggcaccgacgtggtactgcattgttcctttgccaatcccctaccctcagtaaagataacacaggtgacctggcagaagagcacgaacggaagcaagcagaatgtagctatttataatcccagcatgggtgtgtcagtcctcgctccatacagagagcgggtcgagttcttacggcctagtttcacggacggaacgattcgcctgtccagattggaactcgaggatgagggcgtgtacatctgcgagttcgcgacctttccaaccggcaaccgtgaaagccagcttaatttaaccgtgatggcgaagccgacaaattggattgaggggacccaggccgtattacgggctaaaaaagggcaggatgacaaagtactggtggctacctgtaccagcgctaacgggaaacctcctagtgttgtttcctgggagacacgattaaagggcgaagcagagtaccaagagattagaaacccaaatggaactgtcaccgtcatctctagataccgcctagtgccaagccgcgaagcgcaccaacagtccctggcctgcattgtcaactatcacatggatcggtttaaggagtctctgaccttgaatgtgcagtacgagccagaagtgaccattgagggctttgacggaaactggtacctgcagaggatggatgttaaactgacttgcaaagctgacgcaaatcctccagccacggaataccactggaccacgttaaacggctcactgcctaagggggtggaagctcaaaaccggaccctgtttttcaaggggcctatcaattattctctggctggcacttacatctgtgaagccactaaccccattggtacaagaagcggccaagtagaggtgaatatcaccgagtttccctacacgccaagccctcccgaacatggcagaagggctggcccggtccccacggccatcataggtggcgtagctggttctatactgcttgtcctcattgtcgttggcggcattgtggtggcattgcgccgcaggaggcacaccttcaagggggactattcaaccaagaagcacgtctacggaaatggttactcaaaggcagggatccctcaacatcatccccccatggcgcagaacctccagtaccccgacgatagcgatgatgagaaaaaggccggcccattaggcgggtcctcttatgaagaagaagaggaggaggaggaaggaggtgggggaggcgagcggaaagttgggggaccacaccctaagtatgacgaggacgctaagagaccctactttacggtggatgaggctgaagcccggcaagatggatatggcgatcgcaccctcggttatcagtatgatccagaacaactggaccttgctgaaaacatggtgagccaaaatgatgggtcctttattagtaaaaaggagtggtatgtgtag

SEQ ID NO: 132751 - DNA, 1554 bp, Artificial Sequence
  derived and/or modified sequence
atggccaggatgggcctggccggggccgccggccgctggtggggcctggccctgggcctgacagccttcttcctgcccggggtgcacagccaggtggtgcaggtgaatgacagcatgtatggcttcatcggcacagatgtggtgctgcactgcagctttgccaaccccctgcccagcgtgaagatcacccaggtgacctggcagaagagcaccaacggcagcaagcagaatgtggccatctacaaccccagcatgggcgtgtctgtgctggccccctaccgggagcgggtggagttcctgcggcccagcttcacagatggcaccatccggctgagccggctggagctggaggatgagggcgtgtacatctgtgaatttgccaccttccccactggaaaccgggagagccagctgaacctgactgtgatggccaagcccaccaactggattgagggcacccaggccgtgctgcgggccaagaagggccaggatgacaaggtgctggtggccacctgcaccagcgccaacgggaagcccccatctgtggtgtcctgggagacccggctgaagggggaggccgagtaccaggagatccggaaccccaacggcaccgtgaccgtcatcagccgctaccgcctggtgcccagccgggaggcccaccagcagagcctggcctgcatcgtgaactaccacatggaccgcttcaaggagagcctgaccctgaatgtgcagtatgagcctgaggtgaccatcgagggctttgatggcaactggtacctgcagaggatggatgtgaagctgacctgcaaggcagatgccaaccccccagccacagagtaccactggaccaccctgaatggcagcctgcccaagggcgtggaggcccagaacagaaccctcttcttcaagggccccatcaactacagcctggccggcacctacatctgtgaggccaccaaccccatcggcaccaggagcggccaggtggaggtgaacatcacagagttcccctacacccccagccccccagagcacggcagaagagctggccctgtgcccacagccatcattggaggagtggccggcagcatcctgctggtgctgattgtggtgggcggcatcgtggtggccctgcggaggagaagacacaccttcaagggggactacagcaccaagaagcacgtgtatggaaatggctacagcaaggccggcatcccccagcaccacccccccatggcccagaacctgcagtacccagatgacagtgatgatgagaagaaggccggccccctgggcggcagcagctatgaggaggaggaggaggaggaggagggcggcggcggcggggagaggaaggtgggcggcccccaccccaagtatgatgaagatgccaagaggccctacttcaccgtggatgaggccgaggcccggcaggacggctatggagacaggaccctgggctaccagtatgaccctgagcagctggacctggccgagaacatggtgtcccagaatgatggcagcttcatcagcaagaaggagtggtacgtgtag

SEQ ID NO: 132752 - DNA, 1554 bp, Artificial Sequence
  derived and/or modified sequence
atggcccggatgggcctggccggcgccgccggccggtggtggggcttagctctgggcttaactgctttcttcctgccgggagtgcactcgcaggtggttcaagtcaacgactccatgtatggattcattggcactgacgtggtgctccactgcagcttcgcaaaccccctgccctccgtaaaaatcactcaggtgacctggcagaagtcaactaatgggtcaaagcagaatgttgctatctacaacccgtccatgggcgtttccgtcttagctccataccgggagagagttgagttcttacgccctagttttaccgacggaacgatcagactgtctcggctcgagctcgaggacgaaggagtctacatttgcgagtttgccacatttccaaccggaaatcgcgagagccaacttaacctgactgtgatggccaagcccacaaactggatagagggcacacaagccgtactccgggccaaaaaaggccaagatgataaggtgctagtcgcaacttgcaccagtgctaatggaaagccaccatccgtagtcagttgggagactcgcctcaagggagaggctgaataccaggagattaggaatcccaacggcacagtaacggtgatatcccgttatcggttggtcccttcccgcgaagcccaccagcaaagcctcgcctgtatcgtgaattaccacatggataggttcaaagagtccttgaccctgaatgtccaatacgagccagaggtaacaatcgaaggatttgatggcaattggtacctccagaggatggatgtgaaactgacctgcaaggctgacgctaaccctcccgccactgagtatcattggactacacttaacggcagcctgcccaagggagttgaagcccaaaataggactctgttcttcaaaggtccaatcaattactccctggcagggacctatatttgcgaagccaccaatcctatcggcacccgtagcggtcaggttgaagtaaacataacagagttcccgtataccccatcacccccagagcacgggcgacgagctggccccgtgcctactgcgataatcggcggcgtcgctgggagcatcctgctcgtcctcatcgtcgtgggggggatcgttgtagccctcaggaggcgaaggcataccttcaagggggactattctacaaaaaaacacgtatatggcaatggctacagcaaagctggtataccacagcatcaccccccgatggcccaaaatttacagtatccggacgattcagatgatgaaaagaaagcaggtcccctcgggggctctagttacgaggaagaagaagaagaagaggaagggggcggaggcggggagagaaaggtgggtggccctcaccctaaatatgacgaggatgcgaagcgcccatattttacagttgacgaggccgaagcacgtcaagatggttacggagaccggacgctgggctaccagtacgaccccgagcaacttgacctggcagaaaacatggtctcccagaacgatgggtcctttattagcaaaaaagaatggtacgtatag

SEQ ID NO: 132753 - DNA, 5840 bp, Artificial Sequence
  derived and/or modified sequence
cgcagccagagccacccgggccgccgaccgccgagccccgcgcccgccgcctgggccccgagccttctgcgccgcccgggtgcgtcccgccaccctcggaggacggccggccatggacgcctgcaagttggagccgagcgggagggtgtgagcgggccggggccaggagcccgcgccgcgcaaccgggcagccgggcgcgccgggggtgggtccctctccccagccccgctctgcgtggaagaagagggcggggaccggcgccgggaggagagcggaggaggcgaaggggcatgactcgtgcaacttgcggcgggcatctgccgagcctctgagccggcggcggcccggggcccggactgcggccgcgcggatcccacccagcccaccccgccccggccgacggctgcagctgacctggatccttcgagcgcccgccgaccgccagcgatcttccctcatcttccgggctggtttctgctgcgcgaggagcgctgccctcgccgcccctctcgccggacccccggcccccgatggctcggatggggcttgcgggcgccgctggacgctggtggggactcgctctcggcttgaccgcattcttcctcccaggcgtccactcccaggtggtccaggtgaacgactccatgtatggcttcatcggcacagacgtggttctgcactgcagctttgccaacccgcttcccagcgtgaagatcacccaggtcacatggcagaagtccaccaatggctccaagcagaacgtggccatctacaacccatccatgggcgtgtccgtgctggctccctaccgcgagcgtgtggaattcctgcggccctccttcaccgatggcactatccgcctctcccgcctggagctggaggatgagggtgtctacatctgcgagtttgctaccttccctacgggcaatcgagaaagccagctcaatctcacggtgatggccaaacccaccaattggatagagggtacccaggcagtgcttcgagccaagaaggggcaggatgacaaggtcctggtggccacctgcacctcagccaatgggaagcctcccagtgtggtatcctgggaaactcggttaaaaggtgaggcagagtaccaggagatccggaaccccaatggcacagtgacggtcatcagccgctaccgcctggtgcccagcagggaagcccaccagcagtccttggcctgcatcgtcaactaccacatggaccgcttcaaggaaagcctcactctcaacgtgcagtatgagcctgaggtaaccattgaggggtttgatggcaactggtacctgcagcggatggacgtgaagctcacctgcaaagctgatgctaaccccccagccactgagtaccactggaccacgctaaatggctctctccccaagggtgtggaggcccagaacagaaccctcttcttcaagggacccatcaactacagcctggcagggacctacatctgtgaggccaccaaccccatcggtacacgctcaggccaggtggaggtcaatatcacagaattcccctacaccccgtctcctcccgaacatgggcggcgcgccgggccggtgcccacggccatcattgggggcgtggcggggagcatcctgctggtgttgattgtggtcggcgggatcgtggtcgccctgcgtcggcgccggcacaccttcaagggtgactacagcaccaagaagcacgtgtatggcaacggctacagcaaggcaggcatcccccagcaccacccaccaatggcacagaacctgcagtaccccgacgactcagacgacgagaagaaggccggcccactgggtggaagcagctatgaggaggaggaggaggaggaggagggcggtggagggggcgagcgcaaggtgggcggcccccaccccaaatatgacgaggacgccaagcggccctacttcaccgtggatgaggccgaggcccgtcaggacggctacggggaccggactctgggctaccagtacgaccctgagcagctggacttggctgagaacatggtttctcagaacgacgggtctttcatttccaagaaggagtggtacgtgtagccccccttccagagcctctgtctgtgaccgctcctccccagcccctccccgcacgccccctgcccaccccccacctcccactccaggagctgaacagagacttgcccagctgcccaaagccagccccgaactcctggggggccaggggagcccagggcagccacgacttggctttgtgttttatttcctccctctcctccgcccttccccatggtgttgtgttcgactgtggctttagtgttactgtatcttccctttacgggccccacctgcctgccctctgtgtagggagccctgttctcgtcttgtgtacctgggcatccctccagggtttggggagccagcctcccccgcccccctacactggaatttgtttgtgtttcttcactgggggtggagggctcaaggggctctaagagggaaaagctccccacacccccagatgctgctcctcctcccggctagagggaacccaacacccaccagtgaaatctgatgcagctgggagtttggaccttgggtctagacagctggtgcgcccaagaggtagggggaggggtgcggcttctccccagttcccagggagtcttgtttgttaagcggggccttgggcagtgttttcctgctgagggtggttttacattttttttcctcattggcccacagagagtggagttggcctagctctgacgcgtcccctctttatccccaatgtgccccctccattaggggctccaggtgggctccagcccacacttgctctctgcctctgctgacacgtgcacacacacacacatgcacacactgctcctctctgcctgctttcccctggagtcccatgccctgccccatccagacactgcccaaggcccacccgtctatttccacctcattccccctttaagctgagaatggggtctgcctatagaagcttccagagacagctgagactgggtccccggtgcctccaccctaggatctcaggcctgccccaaactgcttcttacagcgtggaggtttctctgatttctcccttatctagcaacacttggttcttttggctagtcagggctgggatcccagggggatccacctgcaggagtcagaggtaaagaagcatccacacggagggtagtggggaaggaagcccacatggcagaagctctgcaaacacagtccgagggactgaggagtccatacaatgcctcacacacaaaggccattgtcaaagcctcgggcctggcagaaagtgaggggggtggggccgctaggccacctcctgctcagccacccctggtcctcattctgggatgaggggagggcctaggagaagccctccctttcagtgcagattcccttcttgaatgggacattgagttcctatcagccaccccagactgggtcttcccatgtatataatggaggaagacccctcccagccctctcagtcccccagctcaaagtgcctcagttcctccatctgctcccagatcccctggcactctagacaggcatgcccatgggaaggaccctgggatggagaggcaggcttcgcggcccttcatgcctgcccactgggattccagttaactcaccccagggtgtcaggggctctgcaggatggcaagtgttggggaggagggaggcagaccactctgtgccccacgggcactgacccaccctgccataggcttcctaagggagccccccaacccctcccctcccctccctggtgctgctattgaaccccctgccagctccatttctgccctggcaaccctgggcccagcaggtgggtcgtcgttgtctggccctcactgccctggccccagcccaggctgcccagtagccacgtagcagaagtctgaagccatgccagccctggtgcggctctcccctctacacatttggggtactggatagggtgaagttaggggagaaaattgtggagtctttccagccacagggcagagggaggtggaggagctgggctgcttttcccagcagtattagtgtcccccaggacaggggaccttttccacattacatcactgccccatcccaccttacaacactctggcccctctgcttggtccccttttcccccaggcaggaggcaatcccaggggcctgcctgatagaggcatttcctgtccctgtctcctcctgcatctcctttatcctgcactgccaccctctattccccattctgtgttggactttgaaggccccaagcccagccaaagcactgagttcccccttaagacacctccacaccctccccacaagcaaagcacaaattttggggtccatgtagcatgggccacgtaggaggctcctgacttgccaggggcccagcctcagcatacccaccgagcagctgccagcctgggctgagggtgggcatgaggcaggagtcagcacttggacctagggatgtgaggttttctgtgccccaagtttgtgggaaggtgggcactactgctgggcccacagacacagccagctggcaaaagggaggtctagcccagcagagagatgaggacattttgcttctccttcatgcccacagcatgagctgagcttctgctttgctggaaatgaaataaacttggtatgaattgtgccaaggcctccccagttgtcatcctgcctcttgttgccctccctgtccttgccccccaccccacacccatgcccctgtttccttacagattttgatattgttctaatgtgtaatagaaccagccgagtccccttttatcagaagggtctgaaaagcagcagcacagagtaggtgaacacaggcctgcaagtgcgaccacctcagacccagtacgtgtgcccacagtggacacactcacacctccaacacacccacgcgcaggcatgtgtacacgcatgtacacacgcatgcatgcacagccagatggccactcagcacagatgtggcagagggaatggtctgatcctgctgaaagccattaaggagaaacgaatttcccagtgcccgggctgcaagagagccttataggggccctgtttcctgggcatgcgcttcctctgccagccaacccccacttgcccaagtcactggtgcaataacttttctgccttcctcagagcagagaaattgggaattgtgttaggtgggtgtgggcagctctgctgagccaagcagacacggatgtcccctcttctgggaggagggtagtgctcccaggcctcaggagtccagacagagacccccaaagcctgactgccaacagaaaccctctcctagtgaggggcaggtgggtgtgccccaggtccccacacccacagggaggcttcacacactgcccagtaccggggatgccaggaggcaggcccctctgctgctgccactgctgccaacactgcccagcttgtgaggccaggaggagcccctgtcccactcggtgctgctgctcttctgacccctgctgtgaggaatgggattcttggtcgaaaaaattggttttccttttttgtataaatgaaaagaatccaggagaagctgccaccctcccctcccagcgtgatgcgctaccttgcttcggcgtcttgtcgccctttccgcctttggtccagggacagcccagcagatcctcctggttctgacctggggggtgtttgcatcacccccttttacttgtattaaaaaaaaatgatgggttgaaaatgtactgaggattaaaaatgtacttttttataaataaagtgtttaaaacaaa

SEQ ID NO: 132754 - DNA, 1554 bp, Artificial Sequence
  derived and/or modified sequence
atggcccgaatgggcttagccggtgctgccggacggtggtgggggttggccctcggtcttacagcgttctttctccctggcgtgcattctcaggtggttcaggtaaacgacagtatgtatgggttcatcgggacagatgtggtcctgcactgctcctttgcgaatcccctgccaagcgtgaaaattacccaggtaacctggcaaaagagcactaacggctctaaacaaaatgtcgccatctacaatcccagcatgggtgtcagtgttcttgccccttacagggaaagggttgagttccttcggccttcttttacggatggcactattagactgagccgacttgaactggaggatgaaggcgtctacatctgtgagttcgccacttttcccacgggcaatcgtgagtcccagctcaatttgactgtcatggccaagccgactaactggatagaaggtactcaggccgtattaagagcaaagaagggccaggatgacaaagttctcgtggccacatgtacatcggctaatggcaagcctccttccgttgtatcttgggagacgcggctcaaaggcgaggcggagtatcaggagattcggaaccccaacggaacagtgacagtgatcagcagatacaggctcgtgccttcccgagaagctcatcaacagtccctcgcatgcatcgttaattatcacatggatagatttaaagagtcacttacactcaatgttcagtacgaaccagaggtgacaatcgaaggcttcgacggcaattggtatttgcagagaatggacgttaaactcacctgtaaagccgacgcaaatccacccgctactgaatatcattggaccacgctcaacgggagcctgcctaagggcgtggaagctcagaatcgtactctattcttcaaagggccaatcaactatagccttgccggaacctacatctgcgaggcgactaaccccatcggaacgcgatctggccaggtcgaagtaaatatcaccgaattcccatacacaccgtccccgccagagcacggcaggagagccggaccggtgcctacagccatcattgggggtgtcgctggctctatcctgctggtgttgatcgtggtaggtggtatcgtggtggcactaaggcggagacgacacactttcaagggcgactactccactaaaaagcacgtgtacggaaacggctacagcaaagctggtattccccagcatcatcctcctatggcgcagaaccttcagtatccagatgatagcgatgacgaaaagaaggccggacccctggggggttccagttacgaggaagaggaggaagaggaggagggtggcggaggaggtgaacgaaaagttggcggaccacatccaaagtatgatgaggacgcaaaacggccatacttcaccgtggacgaagcagaggctaggcaggacggatacggggatagaacactgggataccagtatgacccagaacaattagacctagccgagaacatggtcagccagaacgacggttcattcatatcgaagaaagaatggtacgtctag

SEQ ID NO: 132755 - DNA, 1554 bp, Artificial Sequence
  derived and/or modified sequence
atggccagaatgggcctggccggcgccgccggcagatggtggggcctggccctgggcctgaccgccttcttcctgcccggcgtgcacagccaggtggtgcaggtgaacgacagcatgtacggcttcatcggcaccgacgtggtgctgcactgcagcttcgccaaccccctgcccagcgtgaagatcacccaggtgacctggcagaagagcaccaacggcagcaagcagaacgtggccatctacaaccccagcatgggcgtgagcgtgctggccccctacagagagagagtggagttcctgagacccagcttcaccgacggcaccatcagactgagcagactggagctggaggacgagggcgtgtacatctgcgagttcgccaccttccccaccggcaacagagagagccagctgaacctgaccgtgatggccaagcccaccaactggatcgagggcacccaggccgtgctgagagccaagaagggccaggacgacaaggtgctggtggccacctgcaccagcgccaacggcaagccccccagcgtggtgagctgggagaccagactgaagggcgaggccgagtaccaggagatcagaaaccccaacggcaccgtgaccgtgatcagcagatacagactggtgcccagcagagaggcccaccagcagagcctggcctgcatcgtgaactaccacatggacagattcaaggagagcctgaccctgaacgtgcagtacgagcccgaggtgaccatcgagggcttcgacggcaactggtacctgcagagaatggacgtgaagctgacctgcaaggccgacgccaacccccccgccaccgagtaccactggaccaccctgaacggcagcctgcccaagggcgtggaggcccagaacagaaccctgttcttcaagggccccatcaactacagcctggccggcacctacatctgcgaggccaccaaccccatcggcaccagaagcggccaggtggaggtgaacatcaccgagttcccctacacccccagcccccccgagcacggcagaagagccggccccgtgcccaccgccatcatcggcggcgtggccggcagcatcctgctggtgctgatcgtggtgggcggcatcgtggtggccctgagaagaagaagacacaccttcaagggcgactacagcaccaagaagcacgtgtacggcaacggctacagcaaggccggcatcccccagcaccacccccccatggcccagaacctgcagtaccccgacgacagcgacgacgagaagaaggccggccccctgggcggcagcagctacgaggaggaggaggaggaggaggagggcggcggcggcggcgagagaaaggtgggcggcccccaccccaagtacgacgaggacgccaagagaccctacttcaccgtggacgaggccgaggccagacaggacggctacggcgacagaaccctgggctaccagtacgaccccgagcagctggacctggccgagaacatggtgagccagaacgacggcagcttcatcagcaagaaggagtggtacgtgtag

SEQ ID NO: 132756 - protein, 479 aa, Artificial Sequence
  derived and/or modified sequence
MARAAALLPSRSPPTPLLWPLLLLLLLETGAQDVRVQVLPEVRGQLGGTVELPCHLLPPVPGLYISLVTWQRPDAPANHQNVAAFHPKMGPSFPSPKPGSERLSFVSAKQSTGQDTEAELQDATLALHGLTVEDEGNYTCEFATFPKGSVRGMTWLRVIAKPKNQAEAQKVTFSQDPTTVALCISKEGRPPARISWLSSLDWEAKETQVSGTLAGTVTVTSRFTLVPSGRADGVTVTCKVEHESFEEPALIPVTLSVRYPPEVSISGYDDNWYLGRTDATLSCDVRSNPEPTGYDWSTTSGTFPTSAVAQGSQLVIHAVDSLFNTTFVCTVTNAVGMGRAEQVIFVRETPRASPRDVGPLVWGAVGGTLLVLLLLAGGSLAFILLRVRRRRKSPGGAGGGASGDGGFYDPKAQVLGNGDPVFWTPVVPGPMEPDGKDEEEEEEEEKAEKGLMLPPPPALEDDMESQLDGSLISRRAVYV

SEQ ID NO: 132757 - DNA, 1440 bp, Artificial Sequence
  derived and/or modified sequence
atggcacgcgcagctgccctgttgccgagtagatccccccccactccgctgctgtggccactcctgttgctgctcctgctggagacaggtgcccaggatgtccgggtccaagtgctgcccgaggtgaggggacagcttggcggtactgtggaactgccctgtcatctgttgcctcccgtcccaggtctctatatatccctggtcacatggcagcggcctgacgctcctgccaatcaccagaacgtggcggctttccaccctaaaatggggccatcatttccgagtcccaaaccagggagtgaacgcttaagttttgtaagtgccaaacagagcacagggcaggacactgaggcagaactgcaggatgctacgctggctctgcacggtttaaccgtcgaggacgagggaaactatacatgcgaattcgcaactttcccgaaaggttctgtaaggggcatgacgtggttgcgcgttattgctaaacctaaaaaccaggcagaagctcagaaggtgacctttagtcaggaccccacaacagtcgccctttgcatttcaaaggagggccgccctcccgctaggattagctggttatcgtccctagattgggaggctaaggaaacacaggtgtccggcacactggccggcacagtgacagtgacctctagatttactctcgtgcccagcggaagggccgatggcgtgaccgtaacgtgcaaggtagagcacgagagtttcgaagaacctgcactcattcccgtgacactttccgtgcggtaccccccagaagtttccatcagtggttacgacgacaattggtatcttgggcgaacggatgctacgctaagctgcgatgtcaggtctaaccctgaaccaacagggtacgattggagcaccacgtctggaacatttcctacttcagcggttgcccagggttcacagctcgtgatccatgccgtggactcgctattcaacacgacctttgtatgcaccgtaactaacgctgtggggatgggacgcgccgagcaggtgatatttgtgcgggagactcccagagcttcacctcgcgatgtgggtcctctcgtatggggagcagtgggtggcaccctattagtgcttttactgttagccgggggctcactggcgttcatcctgcttagggtacgccgtagacgaaagtcgccgggcggggcggggggaggagcttcaggagacggagggttctacgacccaaaggcacaggtgctggggaacggcgaccccgtgttttggactcctgtggtaccaggccctatggagccagacggtaaagacgaagaagaagaggaggaggaggagaaggctgagaaaggcttaatgctgccacctccacctgctctggaagacgacatggagagccagctcgacggtagtctgatcagtcggagagcggtgtatgtgtag

SEQ ID NO: 132758 - DNA, 1440 bp, Artificial Sequence
  derived and/or modified sequence
atggcccgggctgctgccctgctgcccagccgcagcccccccacccccctgctgtggcccctgctgctgctgctgctgctggagactggagcccaggatgtgcgggtgcaggtgctgcctgaggtgcggggccagctgggcggcaccgtggagctgccctgccacctgctgccccctgtgcccggcctgtacatcagcctggtgacctggcagaggccagatgccccagccaaccaccagaatgtggccgccttccaccccaagatgggccccagcttccccagccccaagccaggcagcgagcggctgagctttgtgtctgccaagcagagcacaggccaggacacagaggccgagctgcaggatgccaccctggccctgcacggcctgactgtggaggatgagggcaactacacctgtgaatttgccaccttccccaagggctctgtgcggggcatgacctggctgcgggtgattgccaagcccaagaaccaggccgaggcccagaaggtgaccttcagccaggaccccaccaccgtggccctgtgcatcagcaaggagggccggcccccagcccgcatctcctggctgagcagcctggactgggaggccaaggagacccaggtgtctggcaccctggccggcaccgtgacagtgaccagccgcttcaccctggtgcccagcggccgggcagatggagtgacagtgacctgcaaggtggagcacgagagctttgaggagcccgccctgatccctgtgaccctgtctgtgcgctacccacctgaggtgtccatcagcggctatgatgacaactggtacctgggccgcacagatgccaccctgagctgtgatgtgcgcagcaaccctgagcccaccggctatgactggagcaccaccagcggcaccttccccaccagcgctgtggcccagggcagccagctggtgattcatgctgtggacagcctcttcaacaccacctttgtgtgcaccgtgaccaatgctgtgggcatgggccgggcagagcaggtgatctttgtgcgggagaccccccgggccagccccagagatgtgggccccctggtgtggggcgctgtgggcggcaccctgctggtgctgctgctgctggccggcggcagcctggccttcatcctgctgcgggtgagaagaagaaggaagagccctgggggcgccggcggcggggccagcggagatggcggcttctatgaccccaaggcccaggtgctgggcaatggagaccccgtcttctggacccctgtggtgcccggccccatggagccagatggcaaggatgaggaggaggaggaggaggaggagaaggccgagaagggcctgatgctgcccccacctccagccctggaggatgacatggagagccagctggatggcagcctcatcagccggcgggctgtgtatgtgtag

SEQ ID NO: 132759 - DNA, 1440 bp, Artificial Sequence
  derived and/or modified sequence
atggcccgggccgccgccctgctgcccagccggagcccccccacccccctgttatggcctctgctactactgcttctcctggaaacaggggcccaggacgtgagagttcaggtactgcctgaggtacgagggcagttaggcgggacagtagaacttccttgtcacctgctcccacccgtccccggactctatatctctctcgttacctggcagaggcccgacgctcccgcaaatcaccaaaacgtcgcagcattccatccaaaaatggggccttccttccccagcccaaaacctggatccgagcgacttagctttgtgtccgccaaacaaagtaccggccaggacacagaggcggagctgcaggacgccaccctggcgctccacgggttgacagtggaggacgaaggcaattacacctgtgagtttgccactttccctaagggctccgttcgtgggatgacatggctgagggtcattgctaagcccaagaatcaagcagaggcgcagaaggtcaccttctcacaggaccctaccaccgttgcactgtgtatatccaaagaaggccggccacccgcacgcatctcttggttgtcatccctggattgggaagcaaaggagacacaagtcagtggcacattggccggcaccgtgactgtgacgtcccggttcaccctggttcccagcggcagagccgacggagtcaccgtcacttgtaaggttgaacacgagtctttcgaggaaccagccctgattcctgtgacactgtcagtgcggtaccctccagaggtttctatctcaggttatgacgataactggtatctgggccgcactgatgccactttgtcctgtgatgttcggtccaaccccgagcccacaggatatgactggtcaactaccagtggcacattcccaacctccgccgtggcccagggcagtcagctggtgatccatgcagtggattctctgttcaataccacatttgtgtgcacagttactaatgccgtcggcatgggccgggctgagcaggtgatatttgtgcgcgagaccccaagggcctctcctagagacgtaggtcctctcgtttggggtgccgttggaggcaccctcctggtgctccttttgctagccgggggctccttggctttcatcctgctgcgcgtgcggagaaggcgcaagtctcctggaggtgctggaggtggcgcttccggcgatggcggattctacgaccctaaagcacaggtcctgggcaacggtgacccagtgttctggactcccgttgtgccaggaccaatggagcccgacggcaaggatgaggaggaagaggaggaggaagagaaagctgagaagggtctgatgctgcctccccccccagcattagaggatgatatggagtcacagctggatggctccctgatatcccggagagctgtgtatgtttag

SEQ ID NO: 132760 - DNA, 2150 bp, Artificial Sequence
  derived and/or modified sequence
agaattctttggcaggggcgaccttagaatcctggggaggagcgagaatggaatcccggggaggaacaggggtggaatccggggggcggggtcagaacgccaggagggggcggggccggagccagggtcggcttgactcgggggagcagcgggtggatcctgtgacgtcagcgggttcgaaccgccggagctgagcgagaggccgggggtgccgagccgggcggggagagctgggccgggagagcagaacagggaggctagagcgcagcgggaaccggcccggagccggagccggagccccacaggcacctactaaaccgcccagccgatcggcccccacagagtggcccgcgggcctccggccgggcccagtcccctcccgggccctccatggcccgggccgctgccctcctgccgtcgagatcgccgccgacgccgctgctgtggccgctgctgctgctgctgctcctggaaaccggagcccaggatgtgcgagttcaagtgctacccgaggtgcgaggccagctcgggggcaccgtggagctgccgtgccacctgctgccacctgttcctggactgtacatctccctggtgacctggcagcgcccagatgcacctgcgaaccaccagaatgtggccgccttccaccctaagatgggtcccagcttccccagcccgaagcctggcagcgagcggctgtccttcgtctctgccaagcagagcactgggcaagacacagaggcagagctccaggacgccacgctggccctccacgggctcacggtggaggacgagggcaactacacttgcgagtttgccaccttccccaaggggtccgtccgagggatgacctggctcagagtcatagccaagcccaagaaccaagctgaggcccagaaggtcacgttcagccaggaccctacgacagtggccctctgcatctccaaagagggccgcccacctgcccggatctcctggctctcatccctggactgggaagccaaagagactcaggtgtcagggaccctggccggaactgtcactgtcaccagccgcttcaccttggtgccctcgggccgagcagatggtgtcacggtcacctgcaaagtggagcatgagagcttcgaggaaccagccctgatacctgtgaccctctctgtacgctaccctcctgaagtgtccatctccggctatgatgacaactggtacctcggccgtactgatgccaccctgagctgtgacgtccgcagcaacccagagcccacgggctatgactggagcacgacctcaggcaccttcccgacctccgcagtggcccagggctcccagctggtcatccacgcagtggacagtctgttcaataccaccttcgtctgcacagtcaccaatgccgtgggcatgggccgcgctgagcaggtcatctttgtccgagaaacccccagggcctcgccccgagatgtgggcccgctggtgtggggggccgtgggggggacactgctggtgctgctgcttctggctggggggtccttggccttcatcctgctgagggtgaggaggaggaggaagagccctggaggagcaggaggaggagccagtggcgacgggggattctacgatccgaaagctcaggtgttgggaaatggggaccccgtcttctggacaccagtagtccctggtcccatggaaccagatggcaaggatgaggaggaggaggaggaggaagagaaggcagagaaaggcctcatgttgcctccacccccagcactcgaggatgacatggagtcccagctggacggctccctcatctcacggcgggcagtttatgtgtgacctggacacagacagagacagagccaggcccggccctcccgcccccgacctgaccacgccggcctagggttccagactggttggacttgttcgtctggacgacactggagtggaacactgcctcccactttcttgggacttggagggaggtggaacagcacactggacttctcccgtctctagggctgcatggggagcccggggagctgagtagtggggatccagagaggacccccgcccccagagacttggttttggctccagccttcccctggccccgtgacactcaggagttaataaatgccttggaggaaaacatc

SEQ ID NO: 132761 - DNA, 1440 bp, Artificial Sequence
  derived and/or modified sequence
atggcacgagccgctgctctgctcccttcccgaagtcccccaacgcccttactttggcccctgctgttgctgttacttctcgagacaggcgcacaggacgtgagggtgcaggtcctgcctgaggtcagaggacagttaggtgggactgtggagctgccctgtcatctgctgccaccagtgccaggcctctacataagcctggtcacttggcagcgtcctgacgcacccgctaatcaccagaacgtggccgcattccaccctaagatggggcctagctttccttctcctaaacctggttccgagcgcctgtcatttgtctctgcaaaacagtccacgggccaggacacagaggctgaactgcaggatgccactctggcactgcacgggttaaccgttgaagacgaaggtaattacacctgtgagtttgcgacttttcctaaaggatccgttcgcggtatgacatggctcagggtaattgcaaagccgaaaaaccaggcggaggcccaaaaggtgacgttttcacaggacccgactacagtagctctgtgcatatccaaagagggtagaccccctgcacgtataagctggctctccagtcttgactgggaggccaaagagacccaggtaagcggaactttagccggtacggtaaccgtaacaagccggtttacactggttccaagcggcagagcggatggtgtgacagttacctgtaaagtggaacatgaaagctttgaagaaccggctttgatccctgtgaccctgtctgtcaggtacccgccagaggtgagtatttcaggctacgacgacaattggtatctcggaaggactgacgcaacattatcctgcgatgtcaggagtaaccccgaacccactggctatgactggtccaccacgtctgggacttttccaacttccgccgtcgcccaaggcagtcagctggtaatccacgctgtggactcacttttcaacaccacttttgtctgcaccgttactaacgccgtgggaatgggcagggctgagcaggtgatattcgttcgcgagaccccacgtgcctctcctcgagacgtgggccctttggtttggggggcagtcggtggcacactgttggttctgctgctcctggcagggggttccctggcttttatcttattgcgtgtcaggcggcgaaggaagtcacctgggggtgcaggtggcggtgcctctggagacggtggcttctatgaccctaaggctcaagtcctcggcaatggagatcctgtcttttggactcctgtcgttccgggacctatggaacccgacgggaaagatgaagaggaggaggaagaagaagaaaaggctgagaaggggctcatgctgcctccccctcccgcattggaagatgacatggaatctcaactagatggctctctgatcagtcgaagggctgtttacgtgtag

SEQ ID NO: 132762 - DNA, 1440 bp, Artificial Sequence
  derived and/or modified sequence
atggccagagccgccgccctgctgcccagcagaagcccccccacccccctgctgtggcccctgctgctgctgctgctgctggagaccggcgcccaggacgtgagagtgcaggtgctgcccgaggtgagaggccagctgggcggcaccgtggagctgccctgccacctgctgccccccgtgcccggcctgtacatcagcctggtgacctggcagagacccgacgcccccgccaaccaccagaacgtggccgccttccaccccaagatgggccccagcttccccagccccaagcccggcagcgagagactgagcttcgtgagcgccaagcagagcaccggccaggacaccgaggccgagctgcaggacgccaccctggccctgcacggcctgaccgtggaggacgagggcaactacacctgcgagttcgccaccttccccaagggcagcgtgagaggcatgacctggctgagagtgatcgccaagcccaagaaccaggccgaggcccagaaggtgaccttcagccaggaccccaccaccgtggccctgtgcatcagcaaggagggcagaccccccgccagaatcagctggctgagcagcctggactgggaggccaaggagacccaggtgagcggcaccctggccggcaccgtgaccgtgaccagcagattcaccctggtgcccagcggcagagccgacggcgtgaccgtgacctgcaaggtggagcacgagagcttcgaggagcccgccctgatccccgtgaccctgagcgtgagatacccccccgaggtgagcatcagcggctacgacgacaactggtacctgggcagaaccgacgccaccctgagctgcgacgtgagaagcaaccccgagcccaccggctacgactggagcaccaccagcggcaccttccccaccagcgccgtggcccagggcagccagctggtgatccacgccgtggacagcctgttcaacaccaccttcgtgtgcaccgtgaccaacgccgtgggcatgggcagagccgagcaggtgatcttcgtgagagagacccccagagccagccccagagacgtgggccccctggtgtggggcgccgtgggcggcaccctgctggtgctgctgctgctggccggcggcagcctggccttcatcctgctgagagtgagaagaagaagaaagagccccggcggcgccggcggcggcgccagcggcgacggcggcttctacgaccccaaggcccaggtgctgggcaacggcgaccccgtgttctggacccccgtggtgcccggccccatggagcccgacggcaaggacgaggaggaggaggaggaggaggagaaggccgagaagggcctgatgctgccccccccccccgccctggaggacgacatggagagccagctggacggcagcctgatcagcagaagagccgtgtacgtgtag

SEQ ID NO: 132763 - protein, 299 aa, Artificial Sequence
  derived and/or modified sequence
MAAAEEGCSVGAEADRELEELLESALDDFDKAKPSPAPPSTTTAPDASGPQKRSPGDTAKDALFASQEKFFQELFDSELASQATAEFEKAMKELAEEEPHLVEQFQKLSEAAGRVGSDMTSQQEFTSCLKETLSGLAKNATDLQNSSMSEEELTKAMEGLGMDEGDGEGNILPIMQSIMQNLLSKDVLYPSLKEITEKYPEWLQSHRESLPPEQFEKYQEQHSVMCKICEQFEAETPTDSETTQKARFEMVLDLMQQLQDLGHPPKELAGEMPPGLNFDLDALNLSGPPGASGEQCLIM

SEQ ID NO: 132764 - protein, 279 aa, Artificial Sequence [sequence omitted]

SEQ ID NO: 132765 - protein, 209 aa, Artificial Sequence
  derived and/or modified sequence
MKELAEEEPHLVEQFQKLSEAAGRVGSDMTSQQEFTSCLKETLSGLAKNATDLQNSSMSEEELTKAMEGLGMDEGDGEGNILPIMQSIMQNLLSKDVLYPSLKEITEKYPEWLQSHRESLPPEQFEKYQEQHSVMCKICEQFEAETPTDSETTQKARFEMVLDLMQQLQDLGHPPKELAGEMPPGLNFDLDALNLSGPPGASGEQCLIM

SEQ ID NO: 132766 - DNA, 900 bp, Artificial Sequence
  derived and/or modified sequence
atggctgcggctgaggagggatgctctgtaggagcagaggccgacagagagctggaggagctgcttgagtccgccctcgacgacttcgataaagctaaaccctcccctgcccccccttcaaccaccacagcccccgatgcgagtgggccacagaaacggtcccctggtgacaccgcgaaagacgcgctttttgccagtcaggaaaagttcttccaggagcttttcgactcagaactggcctcccaggcaacagctgagtttgagaaggctatgaaagagcttgcggaagaggaaccccacttggtggaacaattccagaagctcagcgaggcagctggtagagtgggcagcgatatgacaagccaacaagaattcaccagctgcctcaaagagacattatcaggattagcaaagaatgccaccgatctgcagaactccagcatgtctgaggaagagctcaccaaagcgatggagggacttgggatggatgagggggacggggaaggcaatattttacccatcatgcagtctatcatgcagaatctcttgtcaaaggacgtgctatatccaagtctgaaagagatcaccgaaaagtatccggagtggctgcagtcacatcgcgagtctttgccccccgagcaattcgaaaaatatcaggaacagcacagcgtaatgtgcaagatctgcgaacagtttgaggccgaaaccccaacagactctgagaccacacagaaagcccgctttgagatggttctcgacttgatgcagcaactgcaggatctcggccacccccccaaggaactggctggtgagatgccgcccggactcaattttgacctcgacgccctcaatctgagtggacctcccggcgccagtggtgagcaatgtctcatcatgtag

SEQ ID NO: 132767 - DNA, 840 bp, Artificial Sequence
  derived and/or modified sequence
atggagtctggcgctctggatgactttgataaagccaagccaagtcccgccccacctagtacaaccactgcacccgacgccagcggccctcagaaacgatcccccggcgatactgccaaggatgcccttttcgcttcacaggaaaagttctttcaggaattgtttgactccgagcttgcctctcaggctacagctgagtttgagaaggcgatgaaagagctggccgaggaggagcctcatcttgtggagcaatttcaaaagctgtcagaggccgccggccgggtgggctcagatatgacctcccagcaggaattcacctcttgtctcaaggagacgctctccggacttgccaagaacgcaacagacctgcagaactcatcaatgagtgaggaggaactgaccaaagccatggaaggtctcggcatggacgaaggtgacggcgagggtaatattctgccaatcatgcagtccatcatgcagaatctgctaagtaaggacgttctgtatccaagtcttaaggagatcacagagaagtatccagaatggctccagtcccatagagagagtctaccccccgaacagttcgagaaatatcaggaacaacattccgttatgtgcaagatctgtgaacagtttgaggctgagacccctacagactcggagacaactcagaaggctcggttcgagatggttttggatctgatgcagcagctgcaggatttgggccaccctccaaaagagttggctggagagatgccaccaggtttgaacttcgacctggatgccttaaacctttctggaccgccaggggcttccggagagcaatgcctgattatgtag

SEQ ID NO: 132768 - DNA, 630 bp, Artificial Sequence
  derived and/or modified sequence
atgaaggagctggcagaggaagagccccacctggtggaacaattccaaaagctgagtgaagccgctggacgggttggcagcgacatgacttctcaacaggagttcacctcgtgccttaaagagacattgtcaggcctggcaaagaacgctaccgacctgcagaattccagtatgagcgaggaggaactaactaaggcaatggaaggtctgggaatggatgagggcgacggagagggtaacatcctccccatcatgcaatctattatgcaaaatttacttagtaaagacgtcctctatccttccttgaaagagatcactgaaaaataccccgagtggctgcagtctcacagagagagtctgccaccagagcagttcgagaagtatcaggagcagcattcagtgatgtgtaagatttgtgaacaatttgaagcggagactcctacagatagcgaaactacacagaaagcccggttcgagatggtcctagacctgatgcaacagctgcaggatctggggcatcccccaaaggagctcgcaggagaaatgccccctggtctgaactttgacctggatgccctaaacctgtccggccctccaggggctagcggtgagcagtgcttgattatgtag

SEQ ID NO: 132769 - DNA, 900 bp, Artificial Sequence
  derived and/or modified sequence
atggctgctgctgaggagggctgcagcgtgggcgctgaggccgaccgggagctggaggagctgctggagagcgccctggatgactttgacaaggccaagcccagccctgccccacccagcaccaccacagccccagatgccagcggcccccagaagaggagccctggggacacagccaaggatgccctgtttgccagccaggagaagttcttccaggagctgtttgattctgagctggccagccaggccacagctgagtttgagaaggccatgaaggagctggccgaggaggagccccacctggtggagcagttccagaagctgtctgaggccgccggccgggtgggcagtgacatgaccagccagcaggagttcaccagctgcctgaaggagaccctgagcggcctggccaagaatgccacagacctgcagaacagctccatgtctgaggaggagctgaccaaggccatggagggcctgggcatggatgaaggagatggagagggcaacatcctgcccatcatgcagagcatcatgcagaacctgctgagcaaggatgtgctgtaccccagcctgaaggagatcacagagaagtacccagagtggctgcagagccaccgggagagcctgcccccagagcagtttgagaagtaccaggagcagcacagcgtgatgtgcaagatctgtgagcagtttgaggccgagacccccacagacagcgagaccacccagaaggccaggtttgagatggtgctggacctgatgcagcagctgcaggacctgggccacccccccaaggagctggccggggagatgcctcctggcctgaactttgacctggatgccctgaacctgagcggccccccaggggccagcggggagcagtgcctgatcatgtag

SEQ ID NO: 132770 - DNA, 840 bp, Artificial Sequence
  derived and/or modified sequence
atggagagcggggccctggatgactttgacaaggccaagcccagccctgccccacccagcaccaccacagccccagatgccagcggcccccagaagaggagccctggggacacagccaaggatgccctgtttgccagccaggagaagttcttccaggagctgtttgattctgagctggccagccaggccacagctgagtttgagaaggccatgaaggagctggccgaggaggagccccacctggtggagcagttccagaagctgtctgaggccgccggccgggtgggcagtgacatgaccagccagcaggagttcaccagctgcctgaaggagaccctgagcggcctggccaagaatgccacagacctgcagaacagctccatgtctgaggaggagctgaccaaggccatggagggcctgggcatggatgaaggagatggagagggcaacatcctgcccatcatgcagagcatcatgcagaacctgctgagcaaggatgtgctgtaccccagcctgaaggagatcacagagaagtacccagagtggctgcagagccaccgggagagcctgcccccagagcagtttgagaagtaccaggagcagcacagcgtgatgtgcaagatctgtgagcagtttgaggccgagacccccacagacagcgagaccacccagaaggccaggtttgagatggtgctggacctgatgcagcagctgcaggacctgggccacccccccaaggagctggccggggagatgcctcctggcctgaactttgacctggatgccctgaacctgagcggccccccaggggccagcggggagcagtgcctgatcatgtag

SEQ ID NO: 132771 - DNA, 630 bp, Artificial Sequence
  derived and/or modified sequence
atgaaggagctggccgaggaggagccccacctggtggagcagttccagaagctgtctgaggccgccggccgggtgggcagtgacatgaccagccagcaggagttcaccagctgcctgaaggagaccctgagcggcctggccaagaatgccacagacctgcagaacagctccatgtctgaggaggagctgaccaaggccatggagggcctgggcatggatgaaggagatggagagggcaacatcctgcccatcatgcagagcatcatgcagaacctgctgagcaaggatgtgctgtaccccagcctgaaggagatcacagagaagtacccagagtggctgcagagccaccgggagagcctgcccccagagcagtttgagaagtaccaggagcagcacagcgtgatgtgcaagatctgtgagcagtttgaggccgagacccccacagacagcgagaccacccagaaggccaggtttgagatggtgctggacctgatgcagcagctgcaggacctgggccacccccccaaggagctggccggggagatgcctcctggcctgaactttgacctggatgccctgaacctgagcggccccccaggggccagcggggagcagtgcctgatcatgtag

SEQ ID NO: 132772 - DNA, 900 bp, Artificial Sequence
  derived and/or modified sequence
atggccgccgccgaggagggctgcagcgtgggcgccgaggccgaccgcgaactcgaggaacttctagagtccgctctggatgactttgataaggcaaagccctcaccagcacctccctcgacaactactgctccggatgctagtggaccccagaaacgttcccccggcgacacagcgaaagacgcactgttcgcttcccaggagaagttctttcaggagctgttcgacagcgagcttgccagccaagcaaccgccgagtttgagaaggcaatgaaggagcttgctgaagaggagccgcacctggtagagcaatttcaaaaactgagtgaggctgcgggcagagtggggagcgatatgacgagccagcaagaatttacatcttgcctgaaggagacactctcaggcctagccaaaaatgctactgatctgcaaaattcctcaatgtccgaagaagaactgaccaaggccatggagggacttggtatggacgagggggatggagaaggcaatatcctgcctattatgcagagcattatgcaaaacttgctttctaaggacgttctctacccatccctgaaagagatcacagagaagtatccggagtggctgcagtcccatcgcgaatctctaccccccgaacaattcgaaaaataccaggaacaacactctgtaatgtgcaagatttgtgagcagtttgaggcggagacgcccaccgattcagaaacaacccaaaaggccaggttcgaaatggtactcgacctcatgcagcaacttcaggacctcggacacccaccaaaagagctggctggcgagatgcctcccgggttaaacttcgatctcgatgccctgaatctaagcggaccgccgggcgcttcaggcgaacagtgtctgatcatgtag

SEQ ID NO: 132773 - DNA, 840 bp, Artificial Sequence
  derived and/or modified sequence
atggagagcggcgccctggacgacttcgacaaggccaagcccagccccgctcccccatcaaccaccaccgccccggacgcctcgggcccccagaagaggagccccggggacacggccaaggacgctctcttcgcctctcaggaaaagttttttcaggaactcttcgattccgagctggcatcacaggctaccgctgagttcgaaaaggccatgaaggaactggccgaagaggagcctcacctggtagagcagtttcagaaactgagcgaagctgccgggcgggtcggctccgacatgacatcccaacaggaatttacctcgtgtctgaaggagactctgtctggtctcgcgaagaacgctacagatctgcagaatagcagtatgagtgaagaagaactaaccaaagccatggagggcttggggatggacgaaggcgacggggaagggaacatcctccccataatgcagtctatcatgcaaaaccttctaagcaaagacgtgctgtacccgtctctgaaggaaatcacggagaagtacccggagtggctccaatctcaccgggagtccctgccccccgaacagtttgagaaataccaggagcagcatagcgtgatgtgtaaaatctgcgagcagtttgaggccgagactccaacagactcggaaacaacccagaaggctagatttgaaatggtgctggatctcatgcagcaactgcaggatctcgggcaccctccaaaggagctcgccggcgaaatgcctcccggcctgaactttgacctcgatgcccttaatctgtctggcccgcccggtgccagcggggagcaatgtttgattatgtag

SEQ ID NO: 132774 - DNA, 630 bp, Artificial Sequence
  derived and/or modified sequence
atgaaggagctggccgaggaggagccccacctggtggagcagttccagaaattgagcgaagcagctggacgggtgggttccgatatgacttcacagcaggaatttacatcttgtcttaaagaaaccttgagcggcctcgctaagaatgccacagacctccaaaatagttccatgagcgaggaagaactcaccaaggctatggagggtctcggtatggacgagggagatggggagggtaatattctgcctatcatgcaaagtatcatgcagaatctcttgtctaaggacgttctttacccatctctcaaggagatcaccgagaagtatccggagtggctccaatctcatcgtgagagtttaccccccgagcagttcgagaaatatcaggagcaacactccgttatgtgcaagatctgtgagcaatttgaggctgaaactcccacagactctgagaccactcaaaaggctcgatttgagatggtcctcgatcttatgcagcagctccaggatttaggacaccctccaaaggagttggcaggcgagatgccacccggcttgaattttgatctggatgctctgaatttgtcaggtccccctggggcatccggtgagcaatgcctgattatgtag

SEQ ID NO: 132775 - DNA, 3661 bp, Artificial Sequence
  derived and/or modified sequence
acggcaagtcggaggtagcaagatggccgccgctgaggaaggctgtagtgtcggggccgaagcggacagggaattggaggagcttctggaaagtgctcttgatgatttcgataaagccaaaccctccccagcacccccttctaccaccacggcccctgatgcttcggggccccagaagagatcgccaggagacactgccaaagatgccctcttcgcttcccaagagaagtttttccaggaactattcgacagtgaactggcttcccaagccactgcggagttcgagaaggcaatgaaggagttggctgaggaagaaccccacctggtggagcagttccaaaagctctcagaggctgcagggagagtgggcagtgatatgacctcccaacaagaattcacttcttgcctaaaggaaacactaagtggattagccaaaaatgccactgaccttcagaactccagcatgtcggaagaagagctgaccaaggccatggaggggctaggcatggacgaaggggatggggaagggaacatcctccccatcatgcagagtattatgcagaacctactctccaaggatgtgctgtacccatcactgaaggagatcacagaaaagtatccagaatggttgcagagtcatcgggaatctctacctccagagcagtttgaaaaatatcaggagcagcacagcgtcatgtgcaaaatatgtgagcagtttgaggcagagacccccacagacagtgaaaccactcaaaaggctcgttttgagatggtgctggatcttatgcagcagctacaagatttaggccatcctccaaaagagctggctggagagatgcctcctggcctcaactttgacctggatgccctcaatctttcgggcccaccaggtgccagtggtgaacagtgtctgatcatgtgaaacacaacacgttttcctctctgagtcccagctatggggaacatctggagtcagcagaaccattgggacctgaggcaggagtgtcacctgcgggagaagtctgcccgctgccctctgtcatcccattcaagattgtgccataccagctgaggtttttcctctgtctctctaggaatagggtctgtttcacaggccatttctgtgaaccctactccattgtggtttctgccactatcaaagttccagctacctgcaaggtgaaggaaggcatcccttttggggcatgcactttctttcctttctcaaaataatgttatatgtggccacactgatgttcacctttacgtccagggtctttgtgccttgtctctactccctctcttggatctggggaggaggggcagagacctgggactctgtatttctatagttctcctggcagagcctttgagaatggggagaaacagcctgggctggggctacaggtctgtcactatgctctcttgccttcagacagaccattctgaattctctaaagggaaagggcttttgcatctaatcacaatagagttgaaagagaggccttaggattctcctctctctaggtgctgagccctcacctccctgttccaggctgagaactcaaatggttaccctgcttcttcctacaatgctgtgtgatatgggtgaacccagcccctgaccttcctctatcccctgcccatcctcccttttacctcctctcttttttaaacacctgtttatcccaacctttttgagctcaagctgtgataaagaagggcccatcctatttcccctcatctagtccatttacgattctcactgactccccgtcttcctggcagacacaaataaacccagtgtcaggtctaggaaattaatggctattcttccccagatacattctggcttatttgagatacatgattctcttagaatcctgtcccttggttcaggaaagtagcttggaaaaggagtaggggtatagcttgggtcccttttcctgcaaggccccatggggcagaatataataaatattctgagtgaggagtgtggtctttttctgatcttcctcagcttccgtaagttgcagagtgaggtatattaggagactagttctacacaatattgtaatgctgggttccatcaacacccaccttccacaactcagtctgcacctcagttggcaaaggagactggatggccatctttcctcatgttcccttgagtatttcaatgtagaaagcccttcaagtggtattatattttaaccttttacattattgttattaatgttagtaatatattgttatgttttctaaattatttttctttaagctgacgtggctttttttctgtggctcccagtgggtctacggaccttggctgacatatgttggtaggtactctggtcagctcagctggctgtcctggttcactcagaagataagtctctccaaagcaaattcacatgcattatgagtcgctttgagcttctgacatgtcacttgccccgaggttaaaacttttcaccccttgaagaccttacatgttttatggtattggtgaggaaggaaatgttctcaaggtctcaggctatttgggaaattccaactcctataccttaccagagcatggaagagcccagatctgaatgtaaaacgtctctgttctgccagagatggaaaaaatacaggtatacttgtgatatagtcatggggcttcagtgtcactattttctccttaaagctccagccaaaaactggacaaggatagagaggaggagggaagaacaaaagagcccttctctatgaaccttgtgccttctgtcctaccagttttcttttacagattctcacttctgctagcctagccagggcttactccaggaatctaaatagatgccctagtccactttatctttgttcccaaggcactcatttttattttgattttgattgaatgtgagcaggttgacctcaggtcacactttgttccaaaaacttttggaattattccaggacttgtggtggagttatggtactctagggcagtctttctcaaactatgtatggtaaaggaccaggttttttgttttccagtccttcacttatcaatatgcattcctattgcccatgacaggtatggagttcacactgtgtgctgccgacccggcaagtttgacagcacccaaactggccagactgttctgtaggttaagtccattgatcatgtacttggatatcacagcaacattgaaatgctaaaaagtttttaaacactctcaatttctaattcaccatgtcacagactggtgaaaaaaaaaaaaaggtgttcactgaccagcacaagtctgcagatcatctttgagtagcactgttttggggccctcggtctctctgaagaccctagcagaactgatacctacctgtatctcttgttctctcctatttgagtttcacttccagagaacttgttcttcagcaagaatgtgtcactagtaaggacatctctagcatttctctagccttccttttctgctgctcaaaaataatcgttacaaagcttaggtttaagctgtatatgaaatatttatgcgactctcaaactttaaaggagttgctcctttgttccaaaattaaatgtgttagataaatttgtgattgtatgggtggcttcatgaattaagaattgaattaatacagactttttgataat

SEQ ID NO: 132776 - DNA, 1910 bp, Artificial Sequence
  derived and/or modified sequence
atggagtctggtgctcttgatgatttcgataaagccaaaccctccccagcacccccttctaccaccacggcccctgatgcttcggggccccagaagagatcgccaggagacactgccaaagatgccctcttcgcttcccaagagaagtttttccaggaactattcgacagtgaactggcttcccaagccactgcggagttcgagaaggcaatgaaggagttggctgaggaagaaccccacctggtggagcagttccaaaagctctcagaggctgcagggagagtgggcagtgatatgacctcccaacaagaattcacttcttgcctaaaggaaacactaagtggattagccaaaaatgccactgaccttcagaactccagcatgtcggaagaagagctgaccaaggccatggaggggctaggcatggacgaaggggatggggaagggaacatcctccccatcatgcagagtattatgcagaacctactctccaaggatgtgctgtacccatcactgaaggagatcacagaaaagtatccagaatggttgcagagtcatcgggaatctctacctccagagcagtttgaaaaatatcaggagcagcacagcgtcatgtgcaaaatatgtgagcagtttgaggcagagacccccacagacagtgaaaccactcaaaaggctcgttttgagatggtgctggatcttatgcagcagctacaagatttaggccatcctccaaaagagctggctggagagatgcctcctggcctcaactttgacctggatgccctcaatctttcgggcccaccaggtgccagtggtgaacagtgtctgatcatgtgaaacacaacacgttttcctctctgagtcccagctatggggaacatctggagtcagcagaaccattgggacctgaggcaggagtgtcacctgcgggagaagtctgcccgctgccctctgtcatcccattcaagattgtgccataccagctgaggtttttcctctgtctctctaggaatagggtctgtttcacaggccatttctgtgaaccctactccattgtggtttctgccactatcaaagttccagctacctgcaaggtgaaggaaggcatcccttttggggcatgcactttctttcctttctcaaaataatgttatatgtggccacactgatgttcacctttacgtccagggtctttgtgccttgtctctactccctctcttggatctggggaggaggggcagagacctgggactctgtatttctatagttctcctggcagagcctttgagaatggggagaaacagcctgggctggggctacaggtctgtcactatgctctcttgccttcagacagaccattctgaattctctaaagggaaagggcttttgcatctaatcacaatagagttgaaagagaggccttaggattctcctctctctaggtgctgagccctcacctccctgttccaggctgagaactcaaatggttaccctgcttcttcctacaatgctgtgtgatatgggtgaacccagcccctgaccttcctctatcccctgcccatcctcccttttacctcctctcttttttaaacacctgtttatcccaacctttttgagctcaagctgtgataaagaagggcccatcctatttcccctcatctagtccatttacgattctcactgactccccgtcttcctggcagacacaaataaacccagtgtcaggtctaggaaattaatggctattcttccccagatacattctggcttatttgagatacatgattctcttagaatcctgtcccttggttcaggaaagtagcttggaaaaggagtaggggtatagcttgggtcccttttcctgcaaggccccatggggcagaatataataaatattctgagtgagg

SEQ ID NO: 132777 - DNA, 1972 bp, Artificial Sequence
  derived and/or modified sequence
agatggccgccgctgaggaaggctgtagtgtcggggccgaagcggacagggaattggaggagcttctggaaagtgctcttgatgatttcgataaagccaaaccctccccagcacccccttctaccaccacggcccctgatgcttcggggccccagaagagatcgccaggagacactgccaaagatgccctcttcgcttcccaagagaagtttttccaggaactattcgacagtgaactggcttcccaagccactgcggagttcgagaaggcaatgaaggagttggctgaggaagaaccccacctggtggagcagttccaaaagctctcagaggctgcagggagagtgggcagtgatatgacctcccaacaagaattcacttcttgcctaaaggaaacactaagtggattagccaaaaatgccactgaccttcagaactccagcatgtcggaagaagagctgaccaaggccatggaggggctaggcatggacgaaggggatggggaagggaacatcctccccatcatgcagagtattatgcagaacctactctccaaggatgtgctgtacccatcactgaaggagatcacagaaaagtatccagaatggttgcagagtcatcgggaatctctacctccagagcagtttgaaaaatatcaggagcagcacagcgtcatgtgcaaaatatgtgagcagtttgaggcagagacccccacagacagtgaaaccactcaaaaggctcgttttgagatggtgctggatcttatgcagcagctacaagatttaggccatcctccaaaagagctggctggagagatgcctcctggcctcaactttgacctggatgccctcaatctttcgggcccaccaggtgccagtggtgaacagtgtctgatcatgtgaaacacaacacgttttcctctctgagtcccagctatggggaacatctggagtcagcagaaccattgggacctgaggcaggagtgtcacctgcgggagaagtctgcccgctgccctctgtcatcccattcaagattgtgccataccagctgaggtttttcctctgtctctctaggaatagggtctgtttcacaggccatttctgtgaaccctactccattgtggtttctgccactatcaaagttccagctacctgcaaggtgaaggaaggcatcccttttggggcatgcactttctttcctttctcaaaataatgttatatgtggccacactgatgttcacctttacgtccagggtctttgtgccttgtctctactccctctcttggatctggggaggaggggcagagacctgggactctgtatttctatagttctcctggcagagcctttgagaatggggagaaacagcctgggctggggctacaggtctgtcactatgctctcttgccttcagacagaccattctgaattctctaaagggaaagggcttttgcatctaatcacaatagagttgaaagagaggccttaggattctcctctctctaggtgctgagccctcacctccctgttccaggctgagaactcaaatggttaccctgcttcttcctacaatgctgtgtgatatgggtgaacccagcccctgaccttcctctatcccctgcccatcctcccttttacctcctctcttttttaaacacctgtttatcccaacctttttgagctcaagctgtgataaagaagggcccatcctatttcccctcatctagtccatttacgattctcactgactccccgtcttcctggcagacacaaataaacccagtgtcaggtctaggaaattaatggctattcttccccagatacattctggcttatttgagatacatgattctcttagaatcctgtcccttggttcaggaaagtagcttggaaaaggagtaggggtatagcttgggtcccttttcctgcaaggccccatggggcagaatataataaatattctgagtgagg

SEQ ID NO: 132778 - DNA, 894 bp, Artificial Sequence
  derived and/or modified sequence
acggcaagtcggaggtagcaagatggccgccgctgaggaaggctgtagtgtcggggccgaagcggacagggaattggaggagcttctggaaagtgctcttgatgatttcgataaagccaaaccctccccagcacccccttctaccaccacggcccctgatgcttcggggccccagaagagatcgccaggagacactgccaaagatgccctcttcgcttcccaagagaagtttttccaggaactattcgacagtgaactggcttcccaagccactgcggagttcgagaaggcaatgaaggagttggctgaggaagaaccccacctggtggagcagttccaaaagctctcagaggctgcagggagagtggaactccagcatgtcggaagaagagctgaccaaggccatggaggggctaggcatggacgaaggggatggggaagggaacatcctccccatcatgcagagtattatgcagaacctactctccaaggatgtgctgtacccatcactgaaggagatcacagaaaagtatccagaatggttgcagagtcatcgggaatctctacctccagagcagtttgaaaaatatcaggagcagcacagcgtcatgtgcaaaatatgtgagcagtttgaggcagagacccccacagacagtgaaaccactcaaaaggctcgttttgagatggtgctggatcttatgcagcagctacaagatttaggccatcctccaaaagagctggctggagagatgcctcctggcctcaactttgacctggatgccctcaatctttcgggcccaccaggtgccagtggtgaacagtgtctgatcatgtgaaacacaacacgttttcctctctgagtcccagctatggggaacatctggagtcagcaga

SEQ ID NO: 132779 - DNA, 900 bp, Artificial Sequence
  derived and/or modified sequence
atggctgccgctgaggaaggttgctccgtcggggctgaggcagacagggagctcgaagagctgttagagtcagcccttgacgatttcgataaggcgaagccttcaccagctcctccaagcaccacaacagctcctgatgcatcaggcccacagaaaagatcccccggtgacaccgccaaggatgcccttttcgccagccaggagaagtttttccaagaactatttgattcagagttagccagtcaggccaccgctgagtttgagaaggccatgaaagagctcgcggaagaggagccccatcttgttgaacagttccagaagctgtcggaagccgcaggtagagtaggctccgatatgacctcacaacaggagtttacttcctgcctgaaggagactctgtccggcttagcaaaaaatgcaaccgatctgcagaattcatcgatgtccgaggaagaactgacaaaggccatggaaggacttggaatggatgaaggagacggcgaggggaacattttacctattatgcagtccatcatgcagaatctgctgtctaaggacgtgctctacccttcgttgaaagagatcacagaaaagtacccagaatggctgcaatcccatcgagagagtctgcctccggagcaattcgagaagtaccaagaacagcattctgtcatgtgcaagatttgcgaacagttcgaagcggagactcctactgacagcgaaactacccagaaggctaggttcgagatggtactggacttgatgcagcaactccaggatctgggtcacccacctaaagagctcgccggagagatgcctccgggtctgaattttgatctagatgccctgaacctaagtgggccacccggagcctccggagaacagtgtctcattatgtag

SEQ ID NO: 132780 - DNA, 840 bp, Artificial Sequence
  derived and/or modified sequence
atggagtctggcgcactggatgactttgataaagctaagccctcccccgcaccgccatctaccacaactgccccagacgcctcggggccacagaaaaggtcccccggagacactgcaaaggacgccctattcgcctctcaggaaaagttcttccaagagctgttcgatagtgagttagcctctcaggccaccgccgagtttgagaaagccatgaaggaattggcggaagaggagcctcatcttgttgagcagttccagaaactctcagaagccgctggccgagtgggctccgacatgacttcccagcaggagtttactagctgtctgaaagagacactgagcgggcttgccaaaaacgctactgacctgcagaacagctccatgtcagaggaagagcttacgaaagcgatggaaggcctgggcatggatgaaggagacggcgaagggaacatcctccctatcatgcaaagcattatgcagaaccttttgagtaaggatgtgctctacccctcactgaaggagataacggagaaataccccgaatggcttcagtcgcatagggagtcccttccaccagagcagtttgaaaagtatcaagaacagcattccgttatgtgcaagatttgcgaacagtttgaggccgagactcctacagattccgagactacccagaaggcccgattcgagatggtgctggatctaatgcagcagcttcaagatctgggacatccacccaaagaactagcaggcgaaatgccccctgggctcaacttcgacctggacgcactcaacctttccggcccacccggagcatctggtgaacaatgcctcattatgtag

SEQ ID NO: 132781 - DNA, 630 bp, Artificial Sequence
  derived and/or modified sequence
atgaaggaactggccgaagaagaacctcacctggtggaacagttccagaaattaagcgaggctgccggtagggttggcagcgacatgactagccagcaggaatttaccagttgtctgaaagaaaccctgtccggtctggctaaaaacgcaactgacttgcagaactcctccatgtctgaagaggaactgaccaaggccatggaaggcctgggcatggacgagggcgacggggaaggcaatattcttcccatcatgcagtctattatgcagaatttgctgagtaaggacgtgctgtacccctctctgaaggagatcactgaaaagtatcctgagtggctgcaaagtcacagagagtccttgcccccagagcagttcgaaaagtatcaagagcagcacagcgtgatgtgcaagatctgtgagcagtttgaggccgaaaccccaaccgactccgagacaactcaaaaggcacgatttgaaatggtgctggatctgatgcagcagctccaggatctgggtcaccctccaaaggagttagctggggaaatgccacccggattgaacttcgatctggacgctctcaatctgagtgggcctcctggggcatctggcgagcagtgcttgatcatgtag

SEQ ID NO: 132782 - DNA, 900 bp, Artificial Sequence
  derived and/or modified sequence
atggccgccgccgaggagggctgcagcgtgggcgccgaggccgacagagagctggaggagctgctggagagcgccctggacgacttcgacaaggccaagcccagccccgccccccccagcaccaccaccgcccccgacgccagcggcccccagaagagaagccccggcgacaccgccaaggacgccctgttcgccagccaggagaagttcttccaggagctgttcgacagcgagctggccagccaggccaccgccgagttcgagaaggccatgaaggagctggccgaggaggagccccacctggtggagcagttccagaagctgagcgaggccgccggcagagtgggcagcgacatgaccagccagcaggagttcaccagctgcctgaaggagaccctgagcggcctggccaagaacgccaccgacctgcagaacagcagcatgagcgaggaggagctgaccaaggccatggagggcctgggcatggacgagggcgacggcgagggcaacatcctgcccatcatgcagagcatcatgcagaacctgctgagcaaggacgtgctgtaccccagcctgaaggagatcaccgagaagtaccccgagtggctgcagagccacagagagagcctgccccccgagcagttcgagaagtaccaggagcagcacagcgtgatgtgcaagatctgcgagcagttcgaggccgagacccccaccgacagcgagaccacccagaaggccagattcgagatggtgctggacctgatgcagcagctgcaggacctgggccacccccccaaggagctggccggcgagatgccccccggcctgaacttcgacctggacgccctgaacctgagcggcccccccggcgccagcggcgagcagtgcctgatcatgtag

SEQ ID NO: 132783 - DNA, 840 bp, Artificial Sequence
  derived and/or modified sequence
atggagagcggcgccctggacgacttcgacaaggccaagcccagccccgccccccccagcaccaccaccgcccccgacgccagcggcccccagaagagaagccccggcgacaccgccaaggacgccctgttcgccagccaggagaagttcttccaggagctgttcgacagcgagctggccagccaggccaccgccgagttcgagaaggccatgaaggagctggccgaggaggagccccacctggtggagcagttccagaagctgagcgaggccgccggcagagtgggcagcgacatgaccagccagcaggagttcaccagctgcctgaaggagaccctgagcggcctggccaagaacgccaccgacctgcagaacagcagcatgagcgaggaggagctgaccaaggccatggagggcctgggcatggacgagggcgacggcgagggcaacatcctgcccatcatgcagagcatcatgcagaacctgctgagcaaggacgtgctgtaccccagcctgaaggagatcaccgagaagtaccccgagtggctgcagagccacagagagagcctgccccccgagcagttcgagaagtaccaggagcagcacagcgtgatgtgcaagatctgcgagcagttcgaggccgagacccccaccgacagcgagaccacccagaaggccagattcgagatggtgctggacctgatgcagcagctgcaggacctgggccacccccccaaggagctggccggcgagatgccccccggcctgaacttcgacctggacgccctgaacctgagcggcccccccggcgccagcggcgagcagtgcctgatcatgtag

SEQ ID NO: 132784 - DNA, 630 bp, Artificial Sequence
  derived and/or modified sequence
atgaaggagctggccgaggaggagccccacctggtggagcagttccagaagctgagcgaggccgccggcagagtgggcagcgacatgaccagccagcaggagttcaccagctgcctgaaggagaccctgagcggcctggccaagaacgccaccgacctgcagaacagcagcatgagcgaggaggagctgaccaaggccatggagggcctgggcatggacgagggcgacggcgagggcaacatcctgcccatcatgcagagcatcatgcagaacctgctgagcaaggacgtgctgtaccccagcctgaaggagatcaccgagaagtaccccgagtggctgcagagccacagagagagcctgccccccgagcagttcgagaagtaccaggagcagcacagcgtgatgtgcaagatctgcgagcagttcgaggccgagacccccaccgacagcgagaccacccagaaggccagattcgagatggtgctggacctgatgcagcagctgcaggacctgggccacccccccaaggagctggccggcgagatgccccccggcctgaacttcgacctggacgccctgaacctgagcggcccccccggcgccagcggcgagcagtgcctgatcatgtag

SEQ ID NO: 132785 - protein, 557 aa, Artificial Sequence
  derived and/or modified sequence
MDDLDALLADLESTTSHISKRPVFLSEETPYSYPTGNHTYQEIAVPPPVPPPPSSEALNGTILDPLDQWQPSSSRFIHQQPQSSSPVYGSSAKTSSVSNPQDSVGSPCSRVGEEEHVYSFPNKQKSAEPSPTVMSTSLGSNLSELDRLLLELNAVQHNPPGFPADEANSSPPLPGALSPLYGVPETNSPLGGKAGPLTKEKPKRNGGRGLEDVRPSVESLLDELESSVPSPVPAITVNQGEMSSPQRVTSTQQQTRISASSATRELDELMASLSDFKFMAQGKTGSSSPPGGPPKPGSQLDSMLGSLQSDLNKLGVATVAKGVCGACKKPIAGQVVTAMGKTWHPEHFVCTHCQEEIGSRNFFERDGQPYCEKDYHNLFSPRCYYCNGPILDKVVTALDRTWHPEHFFCAQCGAFFGPEGFHEKDGKAYCRKDYFDMFAPKCGGCARAILENYISALNTLWHPECFVCRECFTPFVNGSFFEHDGQPYCEVHYHERRGSLCSGCQKPITGRCITAMAKKFHPEHFVCAFCLKQLNKGTFKEQNDKPYCQNCFLKLFC

SEQ ID NO: 132786 - protein, 795 aa, Artificial Sequence [sequence omitted]

SEQ ID NO: 132787 - DNA, 2388 bp, Artificial Sequence
  derived and/or modified sequence
atgctctctcaagtgtaccggtgcggatttcagccctttaatcagcacctgctgccatgggttaaatgtactacagtgtttcgcagccactgtatacaaccctctgtgattcggcatgtccgcagttggtccaatatcccgtttatcacagtcccactgtcaaggacgcatggaaagtcatttgcccatcgatccgagctcaaacatgcaaaacgcattgtggtgaagttgggaagtgctgttgtgacccgtggggatgaatgtgggctggcactcgggcggcttgcttctatcgtggagcaggtgtcagtcctgcagaaccagggacgcgaaatgatgcttgtgacgagcggtgccgtcgcattcggcaagcagagactgcgccacgagattttgctctcccagtctgtgagacaggcattacattccggccagaaccagttgaaggaaatggcaatcccagttctggaggcgagagcgtgcgccgccgccggccagtccgggctgatggccctgtacgaggctatgttcacacaatattccatctgtgcggcgcagattttggtgactaacctggactttcatgacgaacagaagcgtaggaacctcaatgggacattgcatgaactgttgaggatgaacattgttccaattgtcaatactaatgatgcggtcgtcccgcctgcagagcctaattctgacctgcagggagtgaacgtgatcagtgttaaagataatgattccctggccgctaggcttgccgttgagatgaagaccgacctcctcattgtgctgtctgacgtggagggactgttcgatagtcccccgggatctgacgatgcgaagctgatcgatatcttttaccctggcgatcagcagtccgtgaccttcggaacgaaatctcgcgtcggcatgggcggcatggaggcaaaagtgaaggctgctctctgggctttacaaggtggtacctccgtcgttattgcgaatggcacccatcctaaagtgagtggccacgtcattacagacatcgttgagggcaaaaaggtcgggacctttttttcggaggtgaaaccggcagggcctacagtggaacagcagggagaaatggctagatctgggggcaggatgctcgctaccttggaacctgagcagcgggcagagatcatccaccacctagcagatttactgactgaccaacgagacgagatcttactagccaacaagaaagatctggaagaggccgagggcagactggctgcacctctactgaaacgtctgtcactctcgacctccaaactaaattctttggccataggtctgagacaaatcgccgcctcttctcaggactctgtgggcagggtgttacgtcggacccggattgccaaaaacctcgagttggaacaggtgacagtccctattggggtgcttctggtgatttttgagtctcggccagactgcctgccacaggttgctgcattggcaattgcctccggcaacggattgttgctgaagggtggaaaggaggcagcccacagcaatagaattctgcacctcctgactcaggaggctctctcaattcacggcgttaaggaggcagtacagctcgttaacacaagggaagaagtggaagatttatgtcgactcgacaagatgattgatcttattatcccccgtgggtcttcccagttagtcagggatattcagaaggctgcaaagggcattcccgtgatgggacactcggagggtatctgccacatgtacgtggactcagaagctagcgtggataaggtgactcgcttagttcgcgacagcaaatgcgagtatccagctgcctgtaacgcactggagacgctgctcatccatagggatcttctgcgcaccccactgttcgatcaaatcatcgatatgcttagagttgagcaggtcaaaatacacgctgggcctaaatttgcaagctacctaacattctctccttccgaggtgaagtccctgagaacagagtacggcgacctggagttgtgcattgaagtcgtcgacaatgtccaggatgccattgaccacatacacaaatatggaagttctcacactgatgtcatcgtgactgaggacgagaacactgccgagttttttcttcagcatgtggattccgcatgcgtgttttggaacgcttccaccagatttagcgatggataccgcttcggcctcggtgccgaagtgggcatctccaccagtcgcatccacgctagaggtcccgtggggctggaggggctgctgaccaccaaatggctcctgaggggcaaagatcatgtcgtgagcgacttcagcgagcacggatctcttaaatatttgcacgagaatctacctattccacagcgcaacaccaactag

SEQ ID NO: 132788 - DNA, 2388 bp, Artificial Sequence
  derived and/or modified sequence
atgctgagccaggtgtaccgctgtggcttccagcccttcaaccagcacctgctgccctgggtgaagtgcaccaccgtcttccgcagccactgcatccagcccagcgtcatcagacatgtgcgctcctggagcaacatccccttcatcaccgtgcccctgagcaggacccacggcaagagctttgcccacaggtctgagctgaagcacgccaagagaattgtggtgaagctgggcagcgctgtggtgaccagaggagatgaatgtggcctggccctgggccgcctggccagcatcgtggagcaggtgtctgtgctgcagaaccagggccgggagatgatgctggtgaccagcggggctgtggccttcggcaagcagaggctgcggcatgagatcctgctgagccagagcgtgcggcaggccctgcacagcggccagaaccagctgaaggagatggccatccctgtgctggaggcccgggcctgtgccgccgccggccagagcggcctgatggccctgtatgaggccatgttcacccagtacagcatctgtgccgcccagatcctggtgaccaacctggacttccatgatgagcagaagagaagaaacctgaatggcaccctgcacgagctgctgaggatgaacatcgtgcccatcgtgaacaccaatgatgctgtggtgcccccagctgagcccaacagcgacctgcagggcgtgaatgtcatctctgtgaaggacaatgacagcctggccgcccggctggccgtggagatgaagacagacctgctgattgtgctgagtgatgtggagggcctgtttgacagccccccaggcagtgatgatgccaagctgattgacatcttctacccaggggaccagcagagcgtgaccttcggcaccaagagccgggtgggcatgggcggcatggaggccaaggtgaaggccgccctgtgggccctgcagggcggcacctctgtggtgattgccaacggcacccaccccaaggtgtctggccacgtgatcacagacatcgtggagggcaagaaggtgggcaccttcttcagcgaggtgaagccagctggccccaccgtggagcagcagggcgagatggcccggagcggcggccgcatgctggccaccctggagcctgagcagagagctgagatcatccaccacctggccgacctgctgacagaccagagagatgagatcctgctggccaacaagaaggacctggaggaggccgagggccgcctggccgcccccctgctgaagaggctgagcctgagcaccagcaagctgaacagcctggccatcggcctgcggcagattgctgccagcagccaggacagcgtgggccgggtgctgcggaggacccgcatcgccaagaacctggagctggagcaggtgacagtgcccatcggcgtgctgctggtgatctttgagagcaggccagactgcctgccccaggtggccgccctggccatcgccagcggaaatggcctgctgctgaagggcggcaaggaggccgcccacagcaaccgcatcctgcacctgctgacccaggaggccctgagcatccatggagtgaaggaggccgtgcagctggtgaacacccgggaggaggtggaggacctgtgccgcctggacaagatgattgacctgatcatcccccggggcagcagccagctggtgcgggacatccagaaggccgccaagggcatccctgtgatgggccacagcgagggcatctgccacatgtatgtggacagcgaggcctctgtggacaaggtgacccggctggtgcgggacagcaaatgtgagtacccagctgcctgcaatgccctggagaccctgctgatccaccgggacctgctgcggacccccctgtttgaccagatcatcgacatgctgcgggtggagcaggtgaagatccacgccggccccaagtttgccagctacctgaccttcagccccagcgaggtgaagagcctgaggacagaatatggagacctggagctgtgcatcgaggtggtggacaacgtgcaggatgccatcgaccacatccacaagtatggcagcagccacacagatgtgattgtgacagaagatgagaacacagctgagttcttcctgcagcacgtggacagcgcctgtgtgttctggaatgccagcacccgcttcagtgatggctacagatttggcctgggcgctgaggtgggcatcagcaccagccgcatccacgcccggggccctgtgggcctggagggcctgctgaccaccaagtggctgctgcggggcaaggaccacgtggtgtctgacttcagcgagcacggcagcctgaagtacctgcacgagaacctgcccatcccccagaggaacaccaactag

SEQ ID NO: 132789 - DNA, 3349 bp, Artificial Sequence
  derived and/or modified sequence
gcgggacgtggacggaagaaaaaagagagtgagcgagcgccggaatcagcccggcgtggagtgcggacccgcggtagtgccagggggcgaaggcggcggtggtgaggaagatactttggttagtgaccacatcgcagcatgttgagtcaagtttaccgctgtgggttccagcccttcaaccaacatcttctgccctgggtcaagtgtacaaccgtcttcagatctcattgtatccagccttcagtcatcagacatgttcgttcttggagcaacatcccgtttatcactgtacccctcagtcgtacacatggcaagtccttcgcccaccgcagtgagctgaagcatgccaagagaatcgtggtgaagctcggcagtgccgtggtgacccgaggggatgaatgtggcctggccctggggcgcttggcatctattgttgagcaggtatcagtgctgcagaatcagggcagagagatgatgctggtgaccagtggagccgtagcctttggcaaacaacgcttgcgccatgagatccttctgtctcagagcgtgcggcaggccctccactcggggcagaaccagctgaaagaaatggcaattccagtcttagaggcacgagcctgtgcagctgccggacagagtgggctgatggccttgtatgaggctatgtttacccagtacagcatctgtgctgcccagattttggtgaccaatttggatttccatgatgagcagaagcgccggaacctcaatggaacacttcatgaactccttagaatgaacattgtccccattgtcaacacaaatgatgctgttgtccccccagctgagcccaacagtgacctgcagggggtaaatgttattagtgttaaagataatgatagcctggctgcccgactggctgtggaaatgaaaactgatctcttgattgttctttcagatgtagaaggcctttttgacagccccccaggttcagatgatgcaaagcttattgatatattttatcccggagatcagcagtctgtgacatttggaaccaagtctagagtgggaatgggtggcatggaagccaaggtgaaagcagccctctgggctttgcaaggtggcacttctgttgttattgccaatggaacccacccaaaggtgtctgggcacgtcatcacagacattgtggaggggaagaaagttggtaccttcttttcagaagtaaagcctgcaggccctactgttgagcagcagggagaaatggcgcgatctggaggaaggatgttggccaccttggaacctgagcagagagcagaaattatccatcatctggctgatctgttgacggaccagcgtgatgagatcctgttagccaacaaaaaagacttggaggaggcagaggggagacttgcagctcctctgctgaaacgtttaagcctctccacatccaaattgaacagcctggccatcggtctgcgacagatcgcagcctcctcccaggacagcgtgggacgtgttttgcgccgcacccgaatcgccaaaaacttggaactggaacaagtgactgtcccaattggagttctgctggtgatctttgaatctcgtcctgactgtctaccccaggtggcagctttggctatcgcaagtggcaatggcttgttactcaaaggagggaaggaggctgcacacagcaaccggattctccacctcctgacccaggaggctctctcaatccatggagtcaaggaggccgtgcaactggtgaataccagagaagaagttgaagatctttgccgcctagacaaaatgatagatctgatcattccacgtggctcttcccagctggtcagagacatccagaaagctgctaaggggattccagtgatggggcacagcgaagggatctgtcacatgtatgtggattccgaggccagtgttgataaggtcaccaggctagtcagagactctaaatgtgaatatccagctgcctgtaatgctttggagactttgttaatccaccgggatctgctcaggacaccattatttgaccagatcattgatatgctgagagtggaacaggtaaaaattcatgcaggccccaaatttgcctcctatctgaccttcagcccctccgaagtgaagtcactccgaactgagtatggggacctggaattatgcattgaagtagtggacaacgttcaggatgccattgaccacatccacaagtatggcagctcccacacggatgtcatcgtcacagaggacgaaaacacagcggagttcttcctgcagcacgtagacagtgcctgtgtgttctggaatgccagcactcgcttttctgatggttaccgctttggactgggagctgaagtgggaatcagtacatcgagaatccacgcccggggaccagtaggacttgagggactgcttactactaagtggctgctgcgagggaaggaccacgtggtctcagatttctcagagcatggaagtttaaaatatcttcatgagaacctccctattcctcagagaaacaccaactgaaaagagccaggaaaacccgggaattttccaaaaggtcttcacgttaaacttgtcttatctcaggagagagcccgctcttgtctcccagttcctggtagggtctgcctgttggaaagtgtacctggatgcttctgggctccgtttggcaatagcagtcttggctgatgtgcacagtctggctcccagctcaccctttttttttaaagtaagaaaatagttgctaccgatagggactttgccaagtccaattatcttctaggattgaaaggtgcattttccccataaaaaaggcgaggaaaacccatggctgctttgtgtcacctcagtgacttacagtcccccttggcatttagttggtactagagccagtcatccttaacaaatcttttcacattttatttctttcacatgtagtcatcttcaaaaaggaaagatttggaattttagaaaaggggcaactcttctttttagcattctcatcagaaagtcacaaaaatcgatggaatcatttccactgggaagattgaccttttgtatttatttgtggggtaaattaataagcattccagatgcttgcagcttcctgcatccaggagatgctgtgttccccgtgatgcagctggaacccaagctgcagcaggagatgcaagtttcaggatgttccccactgagctggaggaatatctacagcagtgatgcttgaaatttttgtatgaattattttgtcgtcctacccttttcctccaaaacaaaaattagaggattattttaatactttggattcttcccccttttttgagaaataaagttttttatgaaaagc

SEQ ID NO: 132790 - DNA, 2388 bp, Artificial Sequence
  derived and/or modified sequence
atgctgagccaggtgtaccggtgcggcttccagcccttcaaccagcatctcctgccttgggtaaaatgtacaaccgtgttcagaagccactgtatacagcccagtgtgatccggcacgtccggagttggagcaacatcccttttatcaccgtccctctgtctcggacccacggcaagtcatttgctcataggtctgagttgaagcatgccaagcgcatcgttgtcaaactcggatcagcagtggtgacccggggtgatgagtgcggcctggcccttgggagactcgcttctattgtcgagcaggtctcagtcctgcagaaccaagggcgagaaatgatgttggtcacctccggcgccgtggccttcggaaaacagaggcttaggcatgagatcctgctctctcaatctgtgcgccaggcactccatagcggccagaaccagttaaaagagatggctatcccggtcctagaagcaagagcctgtgccgctgctggccagagcggcttgatggctctgtacgaagcgatgtttacccaatattccatctgtgccgcgcagatcctggtcactaacctcgattttcacgatgagcagaaaaggaggaatcttaacggaaccctccacgaattgttgcgcatgaacatcgtgccaatcgtgaacacgaacgacgccgtcgtccctccggctgagcctaatagcgaccttcaaggcgtaaacgtgattagcgttaaggacaacgactctctggctgcaagattagccgtggagatgaagaccgacttgctaatagtcctgagtgacgttgaaggtctgtttgattccccaccaggctctgacgacgccaagctgatagacattttctatcctggggatcagcaaagcgtaacctttggtaccaagtcccgagtcggcatgggcggcatggaggccaaagtcaaggccgccctgtgggctcttcaagggggtacgtccgtggtaattgcaaatggcacacatcctaaggtgtccgggcatgtgattacagacattgtggaaggtaaaaaggttggtacatttttctcagaagtgaagcctgcaggccctaccgttgaacaacaaggcgaaatggcacgctcaggtggacggatgttggccacactagagcctgaacagcgtgccgaaatcatccatcacctggccgacctgttgacagatcaacgtgacgagatcttactagctaataagaaagatcttgaagaagctgaaggacgcctggcggctcctctactcaaacgcctgagcctcagcacaagcaaattgaactcattggcgattggcttgaggcagatcgccgcgagctctcaggattccgtgggtcgtgtgctgagacgtacgcgaatcgctaagaacctcgagctagagcaggtaacagttccaatcggcgttctgctggtcattttcgagagcagaccagattgcctcccccaggtggcagccctggcaattgcttcaggtaatggcctcctcctcaaagggggtaaagaggcagctcactcaaatcgtattctgcacctgcttactcaggaggcactgagtatccacggcgtcaaggaagcggtacagttggttaatacccgggaggaagttgaggatctatgccggctggacaaaatgatcgacctcattatcccaaggggcagctctcaattggttcgagacatccagaaggctgcaaagggcatacctgttatggggcacagcgaggggatatgccacatgtatgtcgactctgaagcaagtgtagataaggtcacaagattagtcagagatagcaagtgtgaatatcccgccgcatgtaatgccctggagactctgctcatccacagagacctgctacgcacaccccttttcgatcagatcatcgacatgctgcgcgtcgaacaggtaaaaattcatgcgggccctaagttcgcatcatatctgacattctccccgagcgaggttaagtcgctgcggacagagtacggggacctggagctatgcatcgaggtcgtcgataacgttcaggacgccatagatcacattcacaaatacgggtcttcccacaccgatgttatagtgactgaggacgagaacactgccgaatttttcttacaacacgtggactcggcctgcgtcttctggaatgcttcaactagattctcggatgggtacagatttgggctcggggccgaggtggggatatccactagtcgtatacatgcccgaggcccagtcggactcgagggtctgctgaccacgaaatggctgctccgaggcaaggatcacgtggttagtgacttctctgagcacgggtccctcaaatatcttcatgagaacctgccaattcctcagagaaatactaactag

SEQ ID NO: 132791 - DNA, 2388 bp, Artificial Sequence
  derived and/or modified sequence
atgttatcgcaagtgtatagatgcggattccaacctttcaatcagcacttactgccgtgggtcaagtgcaccacagtgtttaggtctcattgcattcagcccagtgttattcggcatgtccggtcctggagtaatattccgttcatcactgttccactatctagaacacatggaaagtcctttgcccacagatccgagcttaaacacgccaaacgcattgtggtgaagctcggctctgctgtcgttactcgtggtgacgagtgcggcctagctctcggtcgcttagcttctattgtcgagcaggtgtcagtgctgcagaatcagggaagagagatgatgttggtaacctctggagcggtagccttcgggaagcagcgtctaagacacgagatccttctgagccagtcagtgcggcaggccctgcattccggccaaaaccagcttaaggaaatggccatcccggtcctcgaagccagagcctgtgcagccgcagggcagagtggtttgatggctctttacgaagccatgttcactcagtacagcatttgcgcagcccagatcctcgtcaccaacctcgactttcacgacgagcaaaagcggagaaacctcaatggcactctccatgaacttctccgcatgaatatcgttccaatcgtcaataccaatgatgctgtggtccctcctgccgaacctaacagtgatctccaaggggtcaacgtgataagcgttaaggacaatgacagccttgctgcacgcctcgcagtggagatgaagaccgatctattgatcgtgcttagtgacgtggaaggcctcttcgattctccgccagggagcgacgacgctaagttgatcgacatcttttacccaggtgaccagcagtcagtcacctttgggaccaaatctagagtcgggatgggtggcatggaggccaaagtcaaagccgctctgtgggcacttcagggcggtacatctgtggtcatcgcaaatggcacccatcctaaggtgtctgggcatgtgatcacagacattgtggagggtaagaaagtgggcacctttttctctgaggtgaagcctgcagggccaactgtggagcagcagggtgagatggcgcgatcaggcggacgaatgctcgccacccttgagcccgagcaacgggcagaaatcatccaccatctggctgatctgcttacagaccagagagatgagattctcctggccaacaagaaggatcttgaagaggcggagggacggctagctgcccctctcctaaagagactgtccttatctacttcaaagctcaactctctcgctatcggactgaggcagatcgccgcatcatcacaggatagcgtaggcagggtgctccgcagaaccagaattgccaagaacctagagttagaacaggttacagtcccaataggagtcctgttggtcatctttgagtctcgacccgattgtctcccacaagtggctgcccttgccatcgctagcgggaacgggctgttgctgaagggcggtaaggaggctgcacacagtaatcgtatcctacatctgttgacgcaggaggcactgtcaattcacggagtgaaggaagcagtccaactggttaatacccgggaggaggtggaggatctgtgcaggctggacaagatgattgatttaattataccgcgagggagctcccagctagttcgcgacatacagaaggccgcaaaggggatcccagtgatgggccattccgaaggcatctgtcatatgtacgtggattctgaagctagtgttgataaggtcacacgactcgtgcgggatagcaagtgtgagtatccagccgcatgtaacgcactggaaaccctactcatacatagagacctcctgaggacccctctcttcgatcaaataatagacatgttgcgcgtggagcaagtcaaaatccacgcaggaccgaaatttgcctcttatctcaccttctccccctctgaggtcaaatctctcaggacagagtatggcgatctagaactttgcatcgaggtggtggataacgtacaggatgccattgaccatatccacaagtacgggagcagtcacacagatgttatcgttactgaggacgaaaatactgccgaattcttcttgcaacatgtggatagtgcatgtgttttctggaacgccagtaccagattttcagatgggtataggtttgggctcggggctgaggttggcatctctaccagccgtatccacgctcgtggcccagtcggccttgaaggattgttgactactaagtggctcctccggggaaaggaccatgtggtgtcagacttttcggagcacggttcactgaaatatctgcacgaaaacttaccgatccctcagcgaaacacgaattag

SEQ ID NO: 132792 - DNA, 2388 bp, Artificial Sequence
  derived and/or modified sequence
atgctgagccaggtgtacagatgcggcttccagcccttcaaccagcacctgctgccctgggtgaagtgcaccaccgtgttcagaagccactgcatccagcccagcgtgatcagacacgtgagaagctggagcaacatccccttcatcaccgtgcccctgagcagaacccacggcaagagcttcgcccacagaagcgagctgaagcacgccaagagaatcgtggtgaagctgggcagcgccgtggtgaccagaggcgacgagtgcggcctggccctgggcagactggccagcatcgtggagcaggtgagcgtgctgcagaaccagggcagagagatgatgctggtgaccagcggcgccgtggccttcggcaagcagagactgagacacgagatcctgctgagccagagcgtgagacaggccctgcacagcggccagaaccagctgaaggagatggccatccccgtgctggaggccagagcctgcgccgccgccggccagagcggcctgatggccctgtacgaggccatgttcacccagtacagcatctgcgccgcccagatcctggtgaccaacctggacttccacgacgagcagaagagaagaaacctgaacggcaccctgcacgagctgctgagaatgaacatcgtgcccatcgtgaacaccaacgacgccgtggtgccccccgccgagcccaacagcgacctgcagggcgtgaacgtgatcagcgtgaaggacaacgacagcctggccgccagactggccgtggagatgaagaccgacctgctgatcgtgctgagcgacgtggagggcctgttcgacagcccccccggcagcgacgacgccaagctgatcgacatcttctaccccggcgaccagcagagcgtgaccttcggcaccaagagcagagtgggcatgggcggcatggaggccaaggtgaaggccgccctgtgggccctgcagggcggcaccagcgtggtgatcgccaacggcacccaccccaaggtgagcggccacgtgatcaccgacatcgtggagggcaagaaggtgggcaccttcttcagcgaggtgaagcccgccggccccaccgtggagcagcagggcgagatggccagaagcggcggcagaatgctggccaccctggagcccgagcagagagccgagatcatccaccacctggccgacctgctgaccgaccagagagacgagatcctgctggccaacaagaaggacctggaggaggccgagggcagactggccgcccccctgctgaagagactgagcctgagcaccagcaagctgaacagcctggccatcggcctgagacagatcgccgccagcagccaggacagcgtgggcagagtgctgagaagaaccagaatcgccaagaacctggagctggagcaggtgaccgtgcccatcggcgtgctgctggtgatcttcgagagcagacccgactgcctgccccaggtggccgccctggccatcgccagcggcaacggcctgctgctgaagggcggcaaggaggccgcccacagcaacagaatcctgcacctgctgacccaggaggccctgagcatccacggcgtgaaggaggccgtgcagctggtgaacaccagagaggaggtggaggacctgtgcagactggacaagatgatcgacctgatcatccccagaggcagcagccagctggtgagagacatccagaaggccgccaagggcatccccgtgatgggccacagcgagggcatctgccacatgtacgtggacagcgaggccagcgtggacaaggtgaccagactggtgagagacagcaagtgcgagtaccccgccgcctgcaacgccctggagaccctgctgatccacagagacctgctgagaacccccctgttcgaccagatcatcgacatgctgagagtggagcaggtgaagatccacgccggccccaagttcgccagctacctgaccttcagccccagcgaggtgaagagcctgagaaccgagtacggcgacctggagctgtgcatcgaggtggtggacaacgtgcaggacgccatcgaccacatccacaagtacggcagcagccacaccgacgtgatcgtgaccgaggacgagaacaccgccgagttcttcctgcagcacgtggacagcgcctgcgtgttctggaacgccagcaccagattcagcgacggctacagattcggcctgggcgccgaggtgggcatcagcaccagcagaatccacgccagaggccccgtgggcctggagggcctgctgaccaccaagtggctgctgagaggcaaggaccacgtggtgagcgacttcagcgagcacggcagcctgaagtacctgcacgagaacctgcccatcccccagagaaacaccaactag

SEQ ID NO: 132793 - protein, 843 aa, Artificial Sequence
  derived and/or modified sequence
MAKPLTDSEKRKQISVRGLAGLGDVAEVRKSFNRHLHFTLVKDRNVATPRDYFFALAHTVRDHLVGRWIRTQQHYYERDPKRIYYLSLEFYMGRTLQNTMVNLGLQNACDEAIYQLGLDLEELEEIEEDAGLGNGGLGRLAACFLDSMATLGLAAYGYGIRYEFGIFNQKIVNGWQVEEADDWLRYGNPWEKARPEYMLPVHFYGRVEHTPDGVKWLDTQVVLAMPYDTPVPGYKNNTVNTMRLWSAKAPNDFKLQDFNVGDYIEAVLDRNLAENISRVLYPNDNFFEGKELRLKQEYFVVAATLQDIIRRFKSSKFGCRDPVRTCFETFPDKVAIQLNDTHPALSIPELMRILVDVEKVDWDKAWEITKKTCAYTNHTVLPEALERWPVSMFEKLLPRHLEIIYAINQRHLDHVAALFPGDVDRLRRMSVIEEGDCKRINMAHLCVIGSHAVNGVARIHSEIVKQSVFKDFYELEPEKFQNKTNGITPRRWLLLCNPGLADTIVEKIGEEFLTDLSQLKKLLPLVSDEVFIRDVAKVKQENKLKFSAFLEKEYKVKINPSSMFDVHVKRIHEYKRQLLNCLHVVTLYNRIKRDPAKAFVPRTVMIGGKAAPGYHMAKLIIKLVTSIGDVVNHDPVVGDRLKVIFLENYRVSLAEKVIPAADLSQQISTAGTEASGTGNMKFMLNGALTIGTMDGANVEMAEEAGAENLFIFGLRVEDVEALDRKGYNAREYYDHLPELKQAVDQISSGFFSPKEPDCFKDIVNMLMHHDRFKVFADYEAYMQCQAQVDQLYRNPKEWTKKVIRNIACSGKFSSDRTITEYAREIWGVEPSDLQIPPPNIPRD

SEQ ID NO: 132794 - protein, 245 aa, Artificial Sequence
  derived and/or modified sequence
  misc_feature (1)..(1): Xaa can be any naturally occurring amino acid
XKHHHTVPPSVTPKALDRSPPCPEMFTRAAPGYHMAKLIIKLVTSIGDVVNHDPVVGDRLKVIFLENYRVSLAEKVIPAADLSQQISTAGTEASGTGNMKFMLNGALTIGTMDGANVEMAEEAGAENLFIFGLRVEDVEALDRKGYNAREYYDHLPELKQAVDQISSGFFSPKEPDCFKDIVNMLMHHDRFKVFADYEAYMQCQAQVDQLYRNPKEWTKKVIRNIACSGKFSSDRTITEYAREIW

SEQ ID NO: 132795 - DNA, 738 bp, Artificial Sequence
  derived and/or modified sequence
taaaagcaccaccatacagtgccccccagcgtcactcctaaagctctcgatcgcagcccaccctgtccggagatgttcactcgcgccgctcctggttaccacatggctaaactgatcattaaactcgtgaccagcattggggatgtcgttaaccatgatccagttgtcggggacaggctgaaagtcattttcctggaaaattatagggtgtccttagctgaaaaagtcataccggcggccgatctgtcccagcagatttcaacagccgggaccgaggcgtctggaacaggaaatatgaaatttatgcttaatggcgccctgacaattggaaccatggacggcgcaaatgttgaaatggctgaagaagccggagctgagaatctctttatttttggattgcgcgtggaagacgtggaggcgttagatcggaaggggtataatgcacgtgagtactatgaccatcttcccgagctgaagcaggctgtagatcagatctcatccggatttttctccccgaaggagcccgattgtttcaaagatattgtcaatatgctgatgcaccatgaccgttttaaggtctttgccgattacgaggcatacatgcagtgccaggcacaagtggaccaactctacaggaaccccaaggagtggacaaaaaaggtgatccgcaacatcgcctgttccggaaagttttctagtgaccgcaccatcacagagtatgcacgcgaaatttggtag

SEQ ID NO: 132796 - DNA, 2532 bp, Artificial Sequence
  derived and/or modified sequence
atggccaagcccttgactgactcagagaaacgaaagcagattagtgtgaggggactggctggcctcggggacgtcgccgaagtgcggaagtcttttaacaggcatctgcattttaccctagttaaggatcgtaacgtagctactcctcgcgattatttcttcgcgctcgcacataccgtacgggatcacctcgttggtaggtggattcggactcagcagcattactatgagagagacccgaagagaatctattatcttagtctcgagttttatatgggacggacactgcagaacacgatggtgaacctgggccttcagaacgcttgcgacgaggccatctatcagcttgggcttgacctggaggagctcgaggaaatcgaagaggatgctggcctcggcaatggagggttggggaggctggcagcatgcttcctagattctatggccactttgggactcgccgcatacggctacggtattaggtacgaatttggcatctttaatcagaaaatagtgaacggctggcaagttgaggaggctgacgactggctcaggtatgggaatccgtgggaaaaagctaggcccgaatacatgctgcccgttcacttctatggccgggttgagcataccccagacggggttaaatggcttgatacccaggtcgtgctggctatgccttacgacacacctgtgcctgggtacaagaacaacactgtcaacaccatgcgcctttggtccgcaaaggctccaaatgactttaagctacaggacttcaatgtgggagattacatcgaggctgtgctcgaccgcaacctcgcggagaatatctcccgggtgctgtatcccaatgacaatttttttgaggggaaagagctacgcctgaagcaggaatatttcgtcgtcgccgcgactctgcaagatattatccgaaggtttaaaagctcaaagtttggctgccgagatccagtgcgaacctgctttgagactttccctgacaaggtagctatccagctaaatgatacccatccagccctatcaatccccgaactcatgcggatcctcgtggatgtagaaaaagttgattgggataaggcttgggagattactaaaaaaacatgcgcctacactaatcatacagtgctacccgaggccctggagcgatggcccgtgtccatgtttgagaaacttctgccacgacatctggaaataatctacgccatcaatcaacgacacttagatcatgtggccgctctgtttccaggagatgtcgaccggctgcgacgtatgagcgtgatagaggagggtgattgtaagcgaatcaatatggctcacctctgcgtgatcggctcccatgctgtcaatggcgttgcacggattcacagcgaaattgtgaagcagagcgttttcaaagacttctacgagctcgaacccgagaagttccagaataaaactaacggcatcacgcctcgacggtggctgctgctgtgtaaccctgggctggctgacacgattgtggaaaagatcggcgaagaatttctgactgacttgtcccagttaaagaaactcctgcccttggtgtcagacgaggtgttcattcgagatgtagccaaggttaagcaagagaataaattaaaattcagcgcttttctggagaaagagtataaggtgaaaatcaacccctcttccatgtttgacgtgcacgtgaagcggatccacgaatacaaaagacaactgttgaattgtttgcacgtggtgaccctttacaaccgcattaaaagagaccccgcaaaagcttttgtgccccgcacagtaatgatcggagggaaggccgcgcctgggtaccacatggctaagctaatcattaagctcgtgaccagtattggggatgtcgttaatcatgatcccgtggtgggcgaccgcctgaaggtcatttttttggagaattacagggtgagcctggccgagaaggttataccagccgctgatcttagtcaacagatatcaacggccgggaccgaggcatctggcaccgggaatatgaagtttatgctgaatggagcactgactatcgggacgatggacggcgcgaatgtcgaaatggcagaagaagctggagccgagaacctgtttatttttggtttgagagtggaagacgtggaggcattggatcggaagggatataatgcacgggaatattatgaccacctgccggagctgaagcaggcagtggaccagataagctcgggctttttctctccaaaggaaccagactgtttcaaagacattgttaacatgttaatgcaccacgaccgatttaaagtgtttgccgactatgaggcctacatgcaatgccaggctcaggtcgatcaactttacagaaaccctaaggaatggaccaaaaaagtaatacggaatattgcttgctcaggtaaatttagtagcgatagaaccattaccgaatacgcacgggagatctggggcgtggaaccttcggacctccagattccaccacctaatatccctagagattag

SEQ ID NO: 132797 - DNA, 738 bp, Artificial Sequence
  derived and/or modified sequence
tgaaagcaccaccacacagtgccccccagcgtgacccccaaggccctggacaggagccccccctgcccagagatgttcaccagggctgcccctggctaccacatggccaagctgatcatcaagctggtgaccagcattggagatgtggtgaaccacgaccctgtggtgggggaccggctgaaggtgatcttcctggagaactacagagtgtccctggccgagaaggtgatcccagctgctgacctgagccagcagatcagcacagctggaacagaggccagcggcaccggcaacatgaagttcatgctgaatggagccctgaccatcggcaccatggatggagccaacgtggagatggccgaggaggccggggctgagaacctcttcatcttcggcctgcgggtggaggatgtggaggccctggacaggaagggctacaatgcccgggagtactatgaccacctgcctgagctgaagcaggccgtggaccagatcagcagcggcttcttcagccccaaggagccagactgcttcaaggacatcgtgaacatgctgatgcaccacgaccgcttcaaggtgtttgctgactatgaggcctacatgcagtgccaggcccaggtggaccagctgtacagaaaccccaaggagtggaccaagaaggtgatcagaaatattgcctgcagcggcaagttcagcagtgacaggaccatcacagaatatgcccgggagatctggtag

SEQ ID NO: 132798 - DNA, 2532 bp, Artificial Sequence
  derived and/or modified sequence
atggccaagcccctgacagacagcgagaagaggaagcagatctctgtgcggggcctggccggcctgggagatgtggccgaggtgaggaagagcttcaacagacacctgcacttcaccctggtgaaggacagaaatgtggccaccccccgggactacttctttgccctggcccacacagtgcgggaccacctggtgggccgctggatccgcacccagcagcactactatgaaagagaccccaagaggatctactacctgagcctggagttctacatgggccgcaccctgcagaacaccatggtgaacctgggcctgcagaatgcctgtgatgaggccatctaccagctgggcctggacctggaggagctggaggagattgaggaggatgctggcctgggcaatggaggcctgggccgcctggccgcctgcttcctggacagcatggccaccctgggcctggccgcctacggctacggcatccgctatgaatttggcatcttcaaccagaagatcgtgaatggctggcaggtggaggaggctgatgactggctgcgctatggcaacccctgggagaaggcccggcctgagtacatgctgcctgtgcacttctacggccgggtggagcacaccccagatggagtgaagtggctggacacccaggtggtgctggccatgccctatgacacccctgtgcccggctacaagaacaacacagtgaacaccatgaggctgtggagcgccaaggccccaaatgacttcaagctgcaggacttcaacgtgggggactacatcgaggccgtgctggacaggaacctggccgagaacatcagccgggtgctgtacccaaatgacaacttctttgagggcaaggagctgcggctgaagcaggagtactttgtggtggccgccaccctgcaggacatcatccgccgcttcaagagcagcaagtttggctgccgggaccctgtgaggacctgctttgagaccttcccagacaaggtggccatccagctgaatgacacccacccagccctgagcatccctgagctgatgaggatcctggtggatgtggagaaggtggactgggacaaggcctgggagatcaccaagaagacctgtgcctacaccaaccacacagtgctgcctgaggccctggagcgctggcctgtgtccatgtttgagaagctgctgcccaggcacctggagatcatctatgccatcaaccagaggcacctggaccacgtggccgccctcttccctggagatgtggaccggctgcggaggatgtctgtcatcgaggagggggactgcaagaggatcaacatggcccacctgtgtgtgattggcagccatgctgtgaatggagtggcccgcatccacagcgagatcgtgaagcagagcgtcttcaaggacttctatgagctggagcctgagaagttccagaacaagaccaacggcatcaccccccggcgctggctgctgctgtgcaaccctggcctggccgacaccatcgtggagaagatcggggaggagttcctgacagacctgagccagctgaagaagctgctgcccctggtgtctgatgaggtgttcatcagagatgtggccaaggtgaagcaggagaacaagctgaagttcagcgccttcctggagaaggagtacaaggtgaagatcaaccccagctccatgtttgatgtgcacgtgaagaggatccacgagtacaagaggcagctgctgaactgcctgcacgtggtgaccctgtacaaccgcatcaagagggaccctgccaaggcctttgtgcccaggacagtgatgattggaggcaaggccgcccctggctaccacatggccaagctgatcatcaagctggtgaccagcattggagatgtggtgaaccacgaccctgtggtgggggaccggctgaaggtgatcttcctggagaactacagagtgtccctggccgagaaggtgatcccagctgctgacctgagccagcagatcagcacagctggaacagaggccagcggcactggaaacatgaagttcatgctgaatggagccctgaccatcggcaccatggatggagccaacgtggagatggccgaggaggccggggctgaaaatctcttcatcttcggcctgcgggtggaggatgtggaggccctggacaggaagggctacaatgcccgggagtactatgaccacctgcctgagctgaagcaggccgtggaccagatcagcagcggcttcttcagccccaaggagccagactgcttcaaggacatcgtgaacatgctgatgcaccacgaccgcttcaaggtgtttgctgactatgaggcctacatgcagtgccaggcccaggtggaccagctgtacagaaaccccaaggagtggaccaagaaggtgatccggaacatcgcctgcagcggcaagttcagcagtgacaggaccatcacagaatatgcccgggagatctggggcgtggagcccagcgacctgcagatccccccacccaacatcccccgggactag

SEQ ID NO: 132799 - DNA, 738 bp, Artificial Sequence
  derived and/or modified sequence
tgaaagcaccaccacaccgtgccccccagcgtgacccccaaggccctggacaggtccccaccatgtccagagatgtttaccagggccgctccaggatatcacatggctaaattgataatcaagctggtgacctccatcggcgacgtcgtgaaccacgatccagtggtgggtgaccggctaaaggttatcttcctggagaattaccgcgtgtcgctggcggaaaaagtgatcccagcagccgacctctcccaacagataagcacagcggggacagaggccagtgggactggcaacatgaagttcatgctgaatggagccctcacgatcggtacaatggatggggccaatgtcgagatggccgaggaagccggcgccgagaatttattcatcttcgggctgcgcgtggaggatgtggaagcattagaccgtaaaggctataatgcccgggagtattacgatcatctgccggaactcaagcaggctgtggaccagatctccagtggcttcttctcaccaaaagagcccgattgctttaaagacatcgtcaatatgttaatgcaccacgataggttcaaggttttcgcggactacgaagcttatatgcagtgtcaggcgcaggtggatcagctctaccgcaatccaaaagaatggaccaagaaggtcattagaaatattgcatgctccggaaagttctctagcgataggactatcacggagtacgcacgggaaatttggtag

SEQ ID NO: 132800 - DNA, 2532 bp, Artificial Sequence
  derived and/or modified sequence
atggccaagcccctgaccgacagcgagaagcggaagcagatcagcgttaggggcttggccggtctaggggatgttgccgaggtcaggaagtcctttaaccgccacctccactttaccctagtaaaagaccgaaatgtcgcaaccccaagagactactttttcgcgttggcacatacagtccgcgatcacctggtagggcgctggattcgcactcagcagcactattacgaaagagatccgaagcggatctattacctgtccctcgagttctatatgggcaggactctccagaacaccatggtcaatttgggattgcagaatgcttgtgacgaagcaatctaccagctaggcttggacctggaggagctggaagagatcgaggaggatgccggcctgggcaacggcggtctgggtaggttggcagcctgctttttagatagcatggccacacttggcttggccgcgtacggttatggaataaggtatgagtttggaatttttaaccagaaaatcgtgaacggatggcaagttgaagaggccgacgactggctgcggtacggtaatccgtgggagaaagcacgccccgagtacatgctgccggtccatttttacgggcgagtggagcacactcctgacggcgtgaagtggctggacacacaagttgtgctggccatgccctacgacacgccagtgccggggtataagaacaacaccgttaataccatgcgcctctggtctgccaaagccccgaatgacttcaaactgcaagatttcaatgtgggggactatatcgaggcagttcttgaccgcaatctggccgagaacatttcacgcgtgctatatccgaatgacaacttcttcgaaggaaaggagttgcgactgaaacaggagtatttcgtcgtggccgcaactttacaagatattatcaggaggttcaagtctagcaagtttgggtgcagggatcctgtgagaacatgcttcgagaccttcccagacaaggtggccatacagttgaatgatacacatcctgcgctgagtatacctgaactgatgcggatcttggttgatgtcgaaaaggtcgattgggacaaagcgtgggagataacgaaaaagacgtgtgcttatacaaatcatacagtactgccggaagccctggagcgctggcctgttagcatgtttgaaaaactgctgccccgccacctcgagattatctacgctattaatcagcgtcatcttgaccatgttgccgcactgtttcctggagacgtggacagacttcgccggatgagcgtgatcgaagaaggtgattgcaaacgtatcaacatggcacatctttgcgtgatcggctctcatgctgtcaacggagttgcacgaatccattcggagatagtcaagcaatccgtgtttaaggatttctacgaactcgaacccgagaagttccaaaacaaaaccaatggcatcacacccagacgatggctgctgttgtgtaatcccggccttgccgacactattgtggaaaaaattggcgaagaatttttaacggatctgtcgcagctcaaaaagctcctccccctggtttccgacgaagtctttatccgtgatgtggccaaagtcaagcaggaaaataagctgaaattcagcgccttcctcgaaaaggagtacaaggtcaagatcaatcctagttccatgttcgatgtccacgtgaagagaatccacgagtataagcgacaactgttgaattgcctacacgtggtgacactttacaatcgcataaaacgtgaccctgccaaagcgtttgtgcccagaactgtgatgataggaggcaaagctgcccccggatatcacatggcaaagctaattataaagcttgtgacctcaattggtgacgtggtcaatcacgatccggtagtgggcgacaggctcaaagtgatttttttagagaactaccgtgtctccttggcagaaaaagtaattcccgcggctgacctcagccagcagatcagtactgctggtacggaggcctcgggtaccggcaacatgaagttcatgctgaatggagctctcacaattgggaccatggacggcgctaacgtagagatggctgaagaagcgggtgcagagaatttattcatcttcggtttgagagtggaggatgtcgaagccctagatagaaaaggctacaacgcccgcgaatattacgatcatctccccgagttaaagcaggctgttgatcagatctcttccggtttcttctcacccaaagagccagattgtttcaaggacatagtaaacatgttgatgcatcacgacaggtttaaggtcttcgccgattatgaggcctatatgcaatgtcaggcacaagtggaccagctgtaccgaaaccctaaagaatggaccaagaaggtaatcagaaatatcgcctgctccggtaaattttcctctgatagaacaatcaccgaatacgcccgcgaaatctggggcgttgagcctagtgacctgcaaataccgccgcccaacattcctagagattag

SEQ ID NO: 132801 - DNA, 4134 bp, Artificial Sequence
  derived and/or modified sequence
cgcagtgccgggcgccagagcagcggcgccagagcagctgcaccatcccggcgttcgcgtgtgccgccgctttcctcctccatctcttttcctccgcctccgccggcgcgatggcgaagccgctgacggacagcgagaagcggaagcagatcagcgtgcgcggcctggcggggctaggcgacgtggccgaggtgcggaagagcttcaaccggcacttgcacttcacgctggtcaaggaccgcaatgtggccacgccccgcgactacttcttcgcgctggcgcacacggtgcgcgaccacctcgtgggccgctggatccgcacgcagcagcactactacgagcgcgaccccaagcgcatttattatctttccctggaattctacatgggtcgcacgctgcagaacacgatggtgaacctgggccttcagaatgcctgcgatgaagccatctatcagttggggttagacttggaggaactcgaggagatagaagaagatgctggccttgggaatggaggcctggggaggctggcagcgtgtttccttgactcaatggctaccttgggcctggcagcatacggctatggaatccgctatgaatttgggatttttaaccagaagattgtcaatggctggcaggtagaggaggccgatgactggctgcgctacggcaacccctgggagaaagcgcggcctgagtatatgcttcccgtgcacttctacggacgcgtggagcacacccccgacggcgtgaagtggctggacacacaggtggtgctggccatgccctacgacaccccagtgcccggctacaagaacaacaccgtcaacaccatgcggctgtggtccgccaaggctcccaacgacttcaagctgcaggacttcaacgtgggagactacatcgaggcggtcctggaccggaacttggctgagaacatctccagggtcctgtatccaaatgataacttctttgaggggaaggagctgcggctgaagcaggagtacttcgtggtggccgccacgctccaggacatcatccgccgcttcaagtcgtccaagttcggctgccgggaccctgtgagaacctgtttcgagacgttcccagacaaggtggccatccagctgaacgacacccaccccgccctctccatccctgagctcatgcggatcctggtggacgtggagaaggtggactgggacaaggcctgggaaatcacgaagaagacctgtgcatacaccaaccacactgtgctgcctgaggccttggagcgctggcccgtgtccatgtttgagaagctgctgccgcggcacctggagataatctatgccatcaaccagcggcacctggaccacgtggccgcgctgtttcccggcgatgtggaccgcctgcgcaggatgtctgtgatcgaggagggggactgcaagcggatcaacatggcccacctgtgtgtgattgggtcccatgctgtcaatggtgtggcgaggatccactcggagatcgtgaaacagtcggtctttaaggatttttatgaactggagccagagaagttccagaataagaccaatggcatcaccccccgccggtggctgctgctgtgcaacccggggctggccgataccatcgtggagaaaattggggaggagttcctgactgacctgagccagctgaagaagctgctgccgctggtcagtgacgaggtgttcatcagggacgtggccaaggtcaaacaggagaacaagctcaagttctcggccttcctggagaaggagtacaaggtgaagatcaacccctcctccatgttcgatgtgcatgtgaagaggatccacgagtacaagcggcagctgctcaactgcctgcacgtcgtcaccctgtacaatcgaatcaagagagacccggccaaggcttttgtgcccaggactgttatgattgggggcaaggcagcgcccggttaccacatggccaagctgatcatcaagttggtcacctccatcggcgacgtcgtcaatcatgacccagttgtgggtgacaggttgaaagtgatcttcctggagaactaccgtgtgtccttggctgagaaagtgatcccggccgctgatctgtcgcagcagatctccactgcaggcaccgaggcctcaggcacaggcaacatgaagttcatgctcaacggggccctcaccatcggcaccatggacggcgccaacgtggagatggccgaggaggccggggccgagaacctcttcatcttcggcctgcgggtggaggatgtcgaggccttggaccggaaagggtacaatgccagggagtactacgaccacctgcccgagctgaagcaggccgtggaccagatcagcagtggctttttttctcccaaggagccagactgcttcaaggacatcgtgaacatgctgatgcaccatgacaggttcaaggtgtttgcagactatgaagcctacatgcagtgccaggcacaggtggaccagctgtaccggaaccccaaggagtggaccaagaaggtcatcaggaacatcgcctgctcgggcaagttctccagtgaccggaccatcacggagtatgcacgggagatctggggtgtggagccctccgacctgcagatcccgccccccaacatcccccgggactaggcacaccctgccttggcgggaccagcgggcatttgttttcttgctgactttgcacctccttttttccccaaacactttgccagccactggtggtccctgcttttctgagtaccatgtttccaggaggggccatgggggtcagggtggttttgagagagcagggtaaggaaggaatgtgctagaagtgctcctagtttcttgtaaaggaagccagagttgacagtacaaagggtcgtggccagccctgcagcttcagcacctgccccacccagagtgggagtcaggtggagccacctgctgggctcccccagaactttgcacacatcttgctatgtattagccgatgtctttagtgttgagcctctggattctggggtctgggccagtggccatagtgaagcctgggaatgagtgttactgcagcatctgggctgccagccacagggaagggccaagccccatgtagccccagtcatcctgcccagccctgcctcctggccatgccgggaggggtcggatcctctaggcatcgccttcacagccccctgccccctgccctctgtcctggctctgcacctggtatatgggtcatggacccagatggggctttccctttgtagccatccaatgggcattgtgtgggtgcttggaacccgggatgactgagggggacactggagtgggtgcttgtgtctgctgtctcagaggccttggtcaggatgaagttggctgacacagcttagcttggttttgcttattcaaaagagaaaataactacacatggaaatgaaactagctgaagccttttcttgttttagcaactgaaaattgtacttggtcacttttgtgcttgaggaggcccattttctgcctggcagggggcaggtctgtgccctcccgctgactcctgctgtgtcctgaggtgcatttcctgttgtacacacaagggccaggctccattctccctccctttccaccagtgccacagcctcgtctggaaaaaggaccaggggtcccggaggaacccatttgtgctctgcttggacagcaggcctggcactgggaggtgggggtgagcccctcacagccttgcccctccccaaggctggcaacctgcctcccattgcccaagagagagggcagggaacaggctactgtccttccctgtggaattgccgagaaatctagcaccttgcatgctggatctgggctgcggggaggctctttttctccctggcctccagtgcccaccaggaggatctgcgcacggtgcacagcccaccagagcactacagccttttattgagtggggcaagtgctgggctgtggtcgtgccctgacagcatcttccccaggcagcggctctgtggaggaggccatactcccctagttggccactggggccaccaccctgaccaccactgtgcccctcattgttactgccttgtgagataaaaactgattaaacctttgtggctgtggttggctgaca

SEQ ID NO: 132802 - DNA, 734 bp, Artificial Sequence
  derived and/or modified sequence
tgaaacatcaccacacagtaccaccatccgtcacacctaaagcattggacaggagtcctccgtgtcctgaaatgttcactcgggcagcgcccggttaccacatggccaagctgatcatcaagttggtcacctccatcggcgacgtcgtcaatcatgacccagttgtgggtgacaggttgaaagtgatcttcctggagaactaccgtgtgtccttggctgagaaagtgatcccggccgctgatctgtcgcagcagatctccactgcaggcaccgaggcctcaggcacaggcaacatgaagttcatgctcaacggggccctcaccatcggcaccatggacggcgccaacgtggagatggccgaggaggccggggccgagaacctcttcatcttcggcctgcgggtggaggatgtcgaggccttggaccggaaagggtacaatgccagggagtactacgaccacctgcccgagctgaagcaggccgtggaccagatcagcagtggctttttttctcccaaggagccagactgcttcaaggacatcgtgaacatgctgatgcaccatgacaggttcaaggtgtttgcagactatgaagcctacatgcagtgccaggcacaggtggaccagctgtaccggaaccccaaggagtggaccaagaaggtcatcaggaacatcgcctgctcgggcaagttctccagtgaccggaccatcacggagtatgcacgggagatctgg

SEQ ID NO: 132803 - DNA, 738 bp, Artificial Sequence
  derived and/or modified sequence
tgaaaacaccatcacaccgtgccaccatctgtgacacccaaggcactcgacaggagccctccatgtcctgagatgttcacccgcgcagcccctgggtatcatatggccaaactgattatcaagctggtaacctcgattggagacgtcgtaaatcatgatccagtggttggagatcggctgaaagtgatttttttggagaattaccgcgtttcgctcgcagagaaagtgatcccggcagctgacctaagccagcagatttccaccgccggtacagaggccagtggcacggggaacatgaaatttatgctcaacggtgctttgaccataggcaccatggatggcgctaacgttgagatggccgaagaggccggagcagagaatctcttcatctttggcctcagggtagaagatgtcgaggctctagatagaaagggctataatgcacgagagtattatgatcatctgccagaactgaaacaggccgtggaccaaattagtagtggattcttctctccaaaggagcctgattgtttcaaggacattgttaacatgttgatgcaccacgaccgcttcaaggtcttcgctgattacgaggcttatatgcaatgccaggcccaagtcgatcagctgtacagaaacccgaaagagtggactaaaaaggtcatacggaacatagcttgcagcggcaaatttagcagtgaccgcaccatcaccgaatacgcgagagaaatctggtag

SEQ ID NO: 132804 - DNA, 2532 bp, Artificial Sequence
  derived and/or modified sequence
atggcgaagcctctgacagatagtgagaaaaggaaacagatatcggtgcggggactggcgggtctgggggacgtggccgaggtaagaaagtcctttaacagacacctgcactttacactggttaaggacaggaacgtcgctacaccacgcgactacttcttcgctttagcccacactgtaagagaccaccttgtgggtagatggatccggactcaacagcattactacgaaagagaccctaagagaatatattacctgagcctggagttctacatgggaaggaccctgcaaaacacaatggtaaaccttgggctgcagaatgcctgcgacgaggcgatttaccagttagggctggatctagaagaacttgaggaaatcgaggaagatgcaggcctaggcaatggcggtctgggacgcctggcagcctgctttctcgattcgatggcgaccttggggcttgccgcatacggctacggaatccgctacgagtttgggattttcaaccaaaagatagtgaatggctggcaggtggaagaggcagacgactggctgaggtacggcaatccatgggagaaggctcgccctgagtatatgctgcccgttcacttttatggcagagtggaacatacacctgacggggttaagtggctcgatactcaggtggtcctcgcaatgccatacgatactcccgtcccaggttataagaataacacagtgaacactatgcgcctgtggtccgccaaggcccctaacgactttaaactccaggactttaacgtgggcgattacatcgaggcagtgctcgaccggaatcttgccgagaacatttctagggtgctgtacccaaacgacaacttcttcgaaggcaaggaactgaggcttaaacaggaatacttcgtggtggccgctacgctccaggacattatccgacggttcaagtcaagtaaatttggttgtagagatcctgttagaacatgcttcgagacgttccccgataaagtagcaatacaactgaatgatactcatcctgcgcttagcatcccagagctcatgcgtatcctggtggacgtggaaaaggtcgattgggacaaggcatgggagatcacgaaaaagacatgtgcatatacaaatcataccgtattgcctgaggccctggaaagatggccagttagtatgttcgagaaactgctccccaggcacctcgaaatcatatacgcaatcaaccagagacacctcgaccacgtggcggctttgtttcccggagatgtcgaccgtctgagacgcatgtcagttattgaggagggagactgcaaaaggatcaatatggcccatctgtgtgtgataggttcccacgcggtaaacggagtggcaaggatccatagcgaaattgtaaagcagtcagtgttcaaggacttctacgagttggagcctgaaaagtttcaaaataaaactaacggtatcaccccaaggagatggctgctcctctgcaaccccggtctcgctgacacaattgttgagaagatcggcgaggagttcctgactgacctctcacagctgaagaagctgctcccattggtttcagacgaggtgtttattcgcgacgttgccaaggtgaagcaggagaataaattaaaattttcagcattcctggaaaaagagtataaggtgaagatcaacccgtctagcatgttcgacgtccacgtcaagaggatccatgaatacaagcgccaactcctcaactgtttgcacgtggtgacgctgtataatcgcataaagcgagacccagctaaagcctttgtcccacgaaccgtaatgattggcggtaaagccgctcctggttaccacatggccaagctaatcatcaagttggtcacaagcatcggggatgtagtgaatcacgatccagtggttggcgacaggctcaaagtgattttcctggaaaattatcgggtcagtctggccgagaaggtgatcccagcagccgatctgtcacagcaaatctcaaccgccggaacagaagcctcaggcacaggcaatatgaagttcatgctcaacggcgcactgacaataggcactatggatggcgcaaatgtcgaaatggcagaggaagccggagcagagaatttattcatattcggattgagagttgaagatgtggaggctttagacagaaaagggtacaatgccagagaatactatgatcacctgcccgaattgaaacaagccgtcgaccagatttccagcgggttcttttctcccaaagagcctgactgctttaaggatatagtgaatatgctaatgcaccatgatcgtttcaaggtgttcgcggattatgaagcctacatgcagtgccaggcccaagtggaccagttgtacagaaatcccaaagaatggacaaaaaaagtgatccggaatattgcttgtagtgggaaattcagctcagaccgcaccattactgagtacgccagggagatttggggcgtggaaccgagcgatctgcagatccctccgccaaacatacccagggattag

SEQ ID NO: 132805 - DNA, 738 bp, Artificial Sequence
  derived and/or modified sequence
tgaaagcaccaccacaccgtgccccccagcgtgacccccaaggccctggacagaagccccccctgccccgagatgttcaccagagccgcccccggctaccacatggccaagctgatcatcaagctggtgaccagcatcggcgacgtggtgaaccacgaccccgtggtgggcgacagactgaaggtgatcttcctggagaactacagagtgagcctggccgagaaggtgatccccgccgccgacctgagccagcagatcagcaccgccggcaccgaggccagcggcaccggcaacatgaagttcatgctgaacggcgccctgaccatcggcaccatggacggcgccaacgtggagatggccgaggaggccggcgccgagaacctgttcatcttcggcctgagagtggaggacgtggaggccctggacagaaagggctacaacgccagagagtactacgaccacctgcccgagctgaagcaggccgtggaccagatcagcagcggcttcttcagccccaaggagcccgactgcttcaaggacatcgtgaacatgctgatgcaccacgacagattcaaggtgttcgccgactacgaggcctacatgcagtgccaggcccaggtggaccagctgtacagaaaccccaaggagtggaccaagaaggtgatcagaaacatcgcctgcagcggcaagttcagcagcgacagaaccatcaccgagtacgccagagagatctggtag

SEQ ID NO: 132806 - DNA, 2532 bp, Artificial Sequence
  derived and/or modified sequence
atggccaagcccctgaccgacagcgagaagagaaagcagatcagcgtgagaggcctggccggcctgggcgacgtggccgaggtgagaaagagcttcaacagacacctgcacttcaccctggtgaaggacagaaacgtggccacccccagagactacttcttcgccctggcccacaccgtgagagaccacctggtgggcagatggatcagaacccagcagcactactacgagagagaccccaagagaatctactacctgagcctggagttctacatgggcagaaccctgcagaacaccatggtgaacctgggcctgcagaacgcctgcgacgaggccatctaccagctgggcctggacctggaggagctggaggagatcgaggaggacgccggcctgggcaacggcggcctgggcagactggccgcctgcttcctggacagcatggccaccctgggcctggccgcctacggctacggcatcagatacgagttcggcatcttcaaccagaagatcgtgaacggctggcaggtggaggaggccgacgactggctgagatacggcaacccctgggagaaggccagacccgagtacatgctgcccgtgcacttctacggcagagtggagcacacccccgacggcgtgaagtggctggacacccaggtggtgctggccatgccctacgacacccccgtgcccggctacaagaacaacaccgtgaacaccatgagactgtggagcgccaaggcccccaacgacttcaagctgcaggacttcaacgtgggcgactacatcgaggccgtgctggacagaaacctggccgagaacatcagcagagtgctgtaccccaacgacaacttcttcgagggcaaggagctgagactgaagcaggagtacttcgtggtggccgccaccctgcaggacatcatcagaagattcaagagcagcaagttcggctgcagagaccccgtgagaacctgcttcgagaccttccccgacaaggtggccatccagctgaacgacacccaccccgccctgagcatccccgagctgatgagaatcctggtggacgtggagaaggtggactgggacaaggcctgggagatcaccaagaagacctgcgcctacaccaaccacaccgtgctgcccgaggccctggagagatggcccgtgagcatgttcgagaagctgctgcccagacacctggagatcatctacgccatcaaccagagacacctggaccacgtggccgccctgttccccggcgacgtggacagactgagaagaatgagcgtgatcgaggagggcgactgcaagagaatcaacatggcccacctgtgcgtgatcggcagccacgccgtgaacggcgtggccagaatccacagcgagatcgtgaagcagagcgtgttcaaggacttctacgagctggagcccgagaagttccagaacaagaccaacggcatcacccccagaagatggctgctgctgtgcaaccccggcctggccgacaccatcgtggagaagatcggcgaggagttcctgaccgacctgagccagctgaagaagctgctgcccctggtgagcgacgaggtgttcatcagagacgtggccaaggtgaagcaggagaacaagctgaagttcagcgccttcctggagaaggagtacaaggtgaagatcaaccccagcagcatgttcgacgtgcacgtgaagagaatccacgagtacaagagacagctgctgaactgcctgcacgtggtgaccctgtacaacagaatcaagagagaccccgccaaggccttcgtgcccagaaccgtgatgatcggcggcaaggccgcccccggctaccacatggccaagctgatcatcaagctggtgaccagcatcggcgacgtggtgaaccacgaccccgtggtgggcgacagactgaaggtgatcttcctggagaactacagagtgagcctggccgagaaggtgatccccgccgccgacctgagccagcagatcagcaccgccggcaccgaggccagcggcaccggcaacatgaagttcatgctgaacggcgccctgaccatcggcaccatggacggcgccaacgtggagatggccgaggaggccggcgccgagaacctgttcatcttcggcctgagagtggaggacgtggaggccctggacagaaagggctacaacgccagagagtactacgaccacctgcccgagctgaagcaggccgtggaccagatcagcagcggcttcttcagccccaaggagcccgactgcttcaaggacatcgtgaacatgctgatgcaccacgacagattcaaggtgttcgccgactacgaggcctacatgcagtgccaggcccaggtggaccagctgtacagaaaccccaaggagtggaccaagaaggtgatcagaaacatcgcctgcagcggcaagttcagcagcgacagaaccatcaccgagtacgccagagagatctggggcgtggagcccagcgacctgcagatccccccccccaacatccccagagactag

SEQ ID NO: 132807 - protein, 847 aa, Artificial Sequence
  derived and/or modified sequence
MAKPLTDQEKRRQISIRGIVGVENVAELKKSFNRHLHFTLVKDRNVATTRDYYFALAHTVRDHLVGRWIRTQQHYYDKCPKRVYYLSLEFYMGRTLQNTMINLGLQNACDEAIYQLGLDIEELEEIEEDAGLGNGGLGRLAACFLDSMATLGLAAYGYGIRYEYGIFNQKIRDGWQVEEADDWLRYGNPWEKSRPEFMLPVHFYGKVEHTNTGTKWIDTQVVLALPYDTPVPGYMNNTVNTMRLWSARAPNDFNLRDFNVGDYIQAVLDRNLAENISRVLYPNDNFFEGKELRLKQEYFVVAATLQDIIRRFKASKFGSTRGAGTVFDAFPDQVAIQLNDTHPALAIPELMRIFVDIEKLPWSKAWELTQKTFAYTNHTVLPEALERWPVDLVEKLLPRHLEIIYEINQKHLDRIVALFPKDVDRLRRMSLIEEEGSKRINMAHLCIVGSHAVNGVAKIHSDIVKTKVFKDFSELEPDKFQNKTNGITPRRWLLLCNPGLAELIAEKIGEDYVKDLSQLTKLHSFLGDDVFLRELAKVKQENKLKFSQFLETEYKVKINPSSMFDVQVKRIHEYKRQLLNCLHVITMYNRIKKDPKKLFVPRTVIIGGKAAPGYHMAKMIIKLITSVADVVNNDPMVGSKLKVIFLENYRVSLAEKVIPATDLSEQISTAGTEASGTGNMKFMLNGALTIGTMDGANVEMAEEAGEENLFIFGMRIDDVAALDKKGYEAKEYYEALPELKLVIDQIDNGFFSPKQPDLFKDIINMLFYHDRFKVFADYEAYVKCQDKVSQLYMNPKAWNTMVLKNIAASGKFSSDRTIKEYAQNIWNVEPSDLKISLSNESNKVNGN

SEQ ID NO: 132808 - DNA, 2544 bp, Artificial Sequence
  derived and/or modified sequence
atggccaagcccctgaccgaccaggagaagagaagacagatcagcatcagaggcatcgtgggcgtggagaacgtggccgagctgaagaagagcttcaacagacacctgcacttcaccctggtgaaggacagaaacgtggccaccaccagagactactacttcgccctggcccacaccgtgagagaccacctggtgggcagatggatcagaacccagcagcactactacgacaagtgccccaagagagtgtactacctgagcctggagttctacatgggcagaaccctgcagaacaccatgatcaacctgggcctgcagaacgcctgcgacgaggccatctaccagctgggcctggacatcgaggagctggaggagatcgaggaggacgccggcctgggcaacggcggcctgggcagactggccgcctgcttcctggacagcatggccaccctgggcctggccgcctacggctacggcatcagatacgagtacggcatcttcaaccagaagatcagagacggctggcaggtggaggaggccgacgactggctgagatacggcaacccctgggagaagagcagacccgagttcatgctgcccgtgcacttctacggcaaggtggagcacaccaacaccggcaccaagtggatcgacacccaggtggtgctggccctgccctacgacacccccgtgcccggctacatgaacaacaccgtgaacaccatgagactgtggagcgccagagcccccaacgacttcaacctgagagacttcaacgtgggcgactacatccaggccgtgctggacagaaacctggccgagaacatcagcagagtgctgtaccccaacgacaacttcttcgagggcaaggagctgagactgaagcaggagtacttcgtggtggccgccaccctgcaggacatcatcagaagattcaaggccagcaagttcggcagcaccagaggcgccggcaccgtgttcgacgccttccccgaccaggtggccatccagctgaacgacacccaccccgccctggccatccccgagctgatgagaatcttcgtggacatcgagaagctgccctggagcaaggcctgggagctgacccagaagaccttcgcctacaccaaccacaccgtgctgcccgaggccctggagagatggcccgtggacctggtggagaagctgctgcccagacacctggagatcatctacgagatcaaccagaagcacctggacagaatcgtggccctgttccccaaggacgtggacagactgagaagaatgagcctgatcgaggaggagggcagcaagagaatcaacatggcccacctgtgcatcgtgggcagccacgccgtgaacggcgtggccaagatccacagcgacatcgtgaagaccaaggtgttcaaggacttcagcgagctggagcccgacaagttccagaacaagaccaacggcatcacccccagaagatggctgctgctgtgcaaccccggcctggccgagctgatcgccgagaagatcggcgaggactacgtgaaggacctgagccagctgaccaagctgcacagcttcctgggcgacgacgtgttcctgagagagctggccaaggtgaagcaggagaacaagctgaagttcagccagttcctggagaccgagtacaaggtgaagatcaaccccagcagcatgttcgacgtgcaggtgaagagaatccacgagtacaagagacagctgctgaactgcctgcacgtgatcaccatgtacaacagaatcaagaaggaccccaagaagctgttcgtgcccagaaccgtgatcatcggcggcaaggccgcccccggctaccacatggccaagatgatcatcaagctgatcaccagcgtggccgacgtggtgaacaacgaccccatggtgggcagcaagctgaaggtgatcttcctggagaactacagagtgagcctggccgagaaggtgatccccgccaccgacctgagcgagcagatcagcaccgccggcaccgaggccagcggcaccggcaacatgaagttcatgctgaacggcgccctgaccatcggcaccatggacggcgccaacgtggagatggccgaggaggccggcgaggagaacctgttcatcttcggcatgagaatcgacgacgtggccgccctggacaagaagggctacgaggccaaggagtactacgaggccctgcccgagctgaagctggtgatcgaccagatcgacaacggcttcttcagccccaagcagcccgacctgttcaaggacatcatcaacatgctgttctaccacgacagattcaaggtgttcgccgactacgaggcctacgtgaagtgccaggacaaggtgagccagctgtacatgaaccccaaggcctggaacaccatggtgctgaagaacatcgccgccagcggcaagttcagcagcgacagaaccatcaaggagtacgcccagaacatctggaacgtggagcccagcgacctgaagatcagcctgagcaacgagagcaacaaggtgaacggcaactag

SEQ ID NO: 132809 - DNA, 2544 bp, Artificial Sequence
  derived and/or modified sequence
atggccaagccacttacagaccaagaaaagcgtaggcaaatcagtatcagagggattgtgggagtggaaaatgtggccgaattaaaaaagagttttaatagacatttacatttcactctggtaaaagaccgaaatgtggcgacgaccagggactattactttgcgttggctcacaccgtaagggatcacttggtcggtcggtggatccggacccagcagcattattatgataaatgtcccaaacgggtgtattatcttagcctagagttttacatgggccgtaccctgcagaacaccatgatcaacttagggttgcagaacgcctgcgatgaggccatctatcagctcggcctggacatagaagaactcgaggaaattgaagaagatgcaggcctggggaacggtggtctgggccggttggccgcctgttttcttgatagcatggccaccctgggcctggccgcctacggctacggaataaggtatgagtatgggatttttaatcagaagataagagatgggtggcaggttgaggaagccgatgattggctgagatatgggaatccatgggagaaaagccgcccagaattcatgctgcccgtccacttctacggtaaggttgagcataccaacaccggaactaaatggatcgatacccaggtcgtcctggccctgccctacgacacacccgtccccggctacatgaataatactgtgaacacaatgcgtctctggtccgcacgcgcacccaacgactttaacttacgtgatttcaacgtaggagattacatccaagcagtgctggaccggaatctcgctgagaatatcagtcgtgtgctgtatcctaatgacaatttctttgagggcaaggaacttcgtttgaagcaggagtactttgtcgttgcagcaacactgcaggatatcattaggcgattcaaagcgagcaagttcggcagcacccgcggcgccggcacagtgtttgacgccttccccgatcaggtagctatccagctcaacgacacccaccccgctctggctattcccgagctgatgaggatctttgtggatatcgaaaagttgccttggtccaaggcttgggaactgacacagaagactttcgcctacacaaatcacactgtcctgcctgaagccttggaacgctggcctgtcgatctagtggagaagctcctgcctcgccacctggagatcatttatgaaattaaccaaaaacatctcgatcggatagtggccctcttccccaaagacgttgacagactgcgccgtatgagtctgattgaggaagagggttctaaaaggatcaatatggcgcatctttgtatagtaggatcgcacgctgtgaatggcgtggccaagatccacagcgacatcgttaagacaaaggtatttaaagattttagcgagctagagcctgacaagttccagaataagactaacgggatcacgccacgtagatggttgctcctttgtaacccgggactcgctgagctcattgctgagaagatcggggaagattacgtcaaagacttgagccagctgacaaagctgcacagttttctgggtgatgacgtgtttttgcgtgagttggctaaagttaagcaggagaacaagttgaaattcagccaattcctggaaaccgagtacaaggtgaagatcaacccaagtagcatgtttgatgttcaggtgaaacgcattcatgagtacaaacggcagctgctgaattgcctgcacgtgatcaccatgtataaccgtataaaaaaggatcctaagaagcttttcgtgccccgaacagtcatcattggcggtaaagccgctccaggctatcacatggccaaaatgattatcaagctaataacgtccgtcgctgatgtcgtcaataacgacccaatggtggggtctaaacttaaggtgatcttcctggaaaactatagggtctccttggccgaaaaagtcattccagccacagacctgtcagaacaaatctcaaccgccggcaccgaagccagtgggaccggcaacatgaagttcatgctgaatggagcactgaccataggcacaatggatggtgctaacgttgagatggctgaagaagccggggaagagaacctatttatcttcggcatgcgaatcgacgacgtcgccgcgcttgacaagaaggggtatgaggccaaggagtactatgaagcactccccgagctgaaactggtgattgaccaaatagataatggtttcttcagtcccaagcaaccagatctttttaaggacattatcaatatgcttttctaccatgatcggtttaaggtgttcgccgactatgaagcctacgtaaagtgtcaggataaagttagtcagctgtacatgaatccaaaagcctggaatactatggtcctgaaaaacatcgccgcttccggaaagtttagttctgacagaactattaaagaatatgctcagaatatctggaacgtggaaccaagtgatctcaaaatttccctgtccaatgaaagtaataaagtgaacgggaattag

SEQ ID NO: 132810 - DNA, 2544 bp, Artificial Sequence
  derived and/or modified sequence
atggccaagcccctgacagaccaggagaagaggcggcagatcagcatccggggcatcgtgggcgtggagaatgtggccgagctgaagaagagcttcaacagacacctgcacttcaccctggtgaaggacagaaatgtggccaccacccgggactactactttgccctggcccacacagtgcgggaccacctggtgggccgctggatccgcacccagcagcactactatgacaagtgccccaagagggtgtactacctgagcctggagttctacatgggccgcaccctgcagaacaccatgatcaacctgggcctgcagaatgcctgtgatgaggccatctaccagctgggcctggacatcgaggagctggaggagattgaggaggatgctggcctgggcaatggaggcctgggccgcctggccgcctgcttcctggacagcatggccaccctgggcctggccgcctacggctacggcatccgctatgaatatggcatcttcaaccagaagatcagagatggctggcaggtggaggaggctgatgactggctgcgctatggcaacccctgggagaagagcaggcctgagttcatgctgcctgtgcacttctacggcaaggtggagcacaccaacacaggcaccaagtggattgacacccaggtggtgctggccctgccctatgacacccctgtgcccggctacatgaacaacacagtgaacaccatgaggctgtggagcgcccgggccccaaatgacttcaacctgcgggacttcaacgtgggggactacatccaggccgtgctggacaggaacctggccgagaacatcagccgggtgctgtacccaaatgacaacttctttgagggcaaggagctgcggctgaagcaggagtactttgtggtggccgccaccctgcaggacatcatccgccgcttcaaggccagcaagtttggcagcaccagaggagctggcaccgtgtttgatgccttcccagaccaggtggccatccagctgaatgacacccacccagccctggccatccctgagctgatgaggatctttgtggacatcgagaagctgccctggagcaaggcctgggagctgacccagaagacctttgcctacaccaaccacacagtgctgcctgaggccctggagcgctggcctgtggacctggtggagaagctgctgcccaggcacctggagatcatctatgagatcaaccagaagcacctggacagaattgtggccctcttccccaaggatgtggaccggctgcggaggatgagcctcatcgaggaggagggcagcaagaggatcaacatggcccacctgtgcatcgtgggcagccatgctgtgaatggagtggccaagatccacagcgacatcgtgaagaccaaggtgttcaaggacttcagcgagctggagccagacaagttccagaacaagaccaacggcatcaccccccggcgctggctgctgctgtgcaaccctggcctggccgagctgattgctgagaagatcggggaggactatgtgaaggacctgagccagctgaccaagctgcacagcttcctgggagatgatgtgttcctgcgggagctggccaaggtgaagcaggagaacaagctgaagttcagccagttcctggagacagagtacaaggtgaagatcaaccccagctccatgtttgatgtgcaggtgaagaggatccacgagtacaagaggcagctgctgaactgcctgcacgtgatcaccatgtacaaccgcatcaagaaggaccccaagaagctgtttgtgcccaggacagtcatcatcggcggcaaggccgcccctggctaccacatggccaagatgatcatcaagctgatcacctctgtggctgatgtggtgaacaatgaccccatggtgggcagcaagctgaaggtgatcttcctggagaactacagagtgtccctggccgagaaggtgatcccagccacagacctgtctgagcagatcagcacagctggaacagaggccagcggcactggaaacatgaagttcatgctgaatggagccctgaccatcggcaccatggatggagccaacgtggagatggccgaggaggccggggaggagaacctcttcatcttcggcatgagaattgatgatgtggccgccctggacaagaagggctatgaggccaaggagtactatgaggccctgcctgagctgaagctggtgattgaccagattgacaatggcttcttcagccccaagcagcctgacctcttcaaggacatcatcaacatgctgttctaccatgaccgcttcaaggtgtttgctgactatgaggcctacgtgaagtgccaggacaaggtgtcccagctgtacatgaaccccaaggcctggaacaccatggtgctgaagaacattgctgccagcggcaagttcagcagtgacaggaccatcaaggagtatgcccagaacatctggaatgtggagcccagcgacctgaagatcagcctgagcaatgaaagcaacaaggtgaatggaaattag

SEQ ID NO: 132811 - DNA, 2544 bp, Artificial Sequence
  derived and/or modified sequence
atggccaagcccctgaccgaccaggagaagcggcggcagatcagcattcgcggcatcgtgggtgtggaaaatgtagctgagctgaaaaaatccttcaatcggcacctccacttcactctggtgaaggatagaaatgtggcgacaacaagggactattacttcgccttagctcacacggtgcgagaccacttagtgggtaggtggatccgaacacagcagcattattatgataaatgtcccaaaagggtgtactacctgtctctcgaattttatatgggccggactctgcagaatactatgattaacttaggcttgcagaatgcctgtgatgaagcgatctatcagctggggctagatattgaggaactcgaagagattgaagaagacgcgggcctggggaacggcggcctcgggagattagcagcctgctttctggacagcatggctaccctgggccttgccgcctatgggtatggaatccgttacgaatatgggatctttaaccagaagattcgcgacggatggcaagtcgaggaggccgatgattggctgcgctacggtaacccctgggaaaagagcaggcctgaattcatgctgcccgtccacttttacggcaaggtcgaacacacgaacacggggaccaaatggatcgatactcaggtggtgctggccctgccgtatgatacccccgtcccaggatacatgaacaacaccgttaacactatgcgactgtggtcagctagggccccaaatgactttaacctgagggactttaacgtgggcgactatatacaggcagtcctcgaccggaatctcgccgaaaacatttcgagagtcctgtaccctaacgataatttttttgagggtaaggagctcaggttgaaacaggagtacttcgtcgtcgcggctaccctccaagatatcattcgtcgcttcaaagcttcaaagttcggctccactcggggcgccggcacagtgttcgacgcctttcctgatcaggtagctattcagttaaacgacactcaccctgctttagccattcctgagcttatgagaatctttgtcgatatcgaaaaattgccgtggagcaaggcctgggagctgacccagaaaacgttcgcgtacacaaatcatacggttctcccagaagcccttgaacgctggcccgtggatctcgtggagaagctgttgccgcgtcatttagaaattatctacgaaatcaatcaaaagcatttagaccggattgtggctctattcccaaaggatgtcgaccgactgcgcagaatgagcctgatagaagaggaaggctcaaagcgcatcaacatggcccacttgtgtattgtgggatctcacgcagtgaacggagtggcgaagattcactcggacatagttaaaacaaaggtgttcaaggatttcagcgaacttgaaccagataagtttcagaacaagacaaacgggatcactcctcgaaggtggctgctgttgtgtaatccaggactcgctgaactcatagccgaaaaaattggagaggattacgtcaaagatctaagtcagctcactaagctgcatagttttctcggcgatgatgtctttcttcgcgagctggccaaggtgaagcaggagaataagttaaagttttcccagtttcttgaaacggagtataaggtgaaaattaatccttcaagcatgttcgatgtccaagtgaaaaggatccacgagtataaacgccaactccttaattgcctccatgtcataaccatgtataataggattaagaaggatccaaagaaactgtttgtcccacgtacagtgatcataggtggaaaagccgcgcccgggtatcatatggcaaagatgatcataaaactgattaccagcgtggccgatgtggtcaataacgaccctatggtcggatccaagctcaaggtgatcttcctggagaattaccgagtgagcctggctgagaaggtgatccccgccactgacttgagcgagcagatcagcactgccgggaccgaagccagtggcacagggaacatgaaatttatgttaaacggagcccttaccattggcactatggatggagccaatgtggagatggctgaagaggccggggaggagaacctgttcatctttgggatgcgaattgacgatgtggccgcgcttgataagaagggctatgaggctaaggaatactacgaggcgctgccagagctaaaacttgtgatcgaccagatcgataacggattttttagccccaagcagcctgacttatttaaggacataattaacatgctgttctatcatgatcgcttcaaggtgtttgccgattatgaagcctatgttaagtgtcaggacaaggtttcccaattgtacatgaatcccaaagcttggaacacaatggtccttaaaaatatcgctgcatcaggtaagttttcttctgataggacaattaaggaatacgctcaaaatatctggaatgtggagccaagcgacctgaaaatctccctaagcaatgagtctaacaaagtaaacggcaactag

SEQ ID NO: 132812 - DNA, 2544 bp, Artificial Sequence
  derived and/or modified sequence
atggcaaagcctctgacagaccaggagaagcggaggcagatttctattcggggtatagtgggcgtggaaaacgttgctgagcttaagaagtcttttaatcgccatttgcactttacgctcgtgaaggaccgtaatgtcgccacaacacgcgactactactttgccctggctcataccgtgcgcgaccatctggtcggacggtggattcgaactcagcagcactattacgacaaatgtccaaaaagagtctactatctgtctcttgaattttacatgggcagaaccttgcagaacaccatgatcaacctgggcctgcagaatgcctgcgacgaagctatctaccaactggggctggatatagaagagctcgaagagatcgaggaggacgctggactgggtaatggtggactagggcgactggctgcctgcttcctcgattctatggctacactgggactcgcggcatatggctacgggatccggtacgaatatggaatctttaaccagaagattagggacgggtggcaagtcgaagaagctgacgactggctgaggtatggaaacccctgggagaagagtaggccggagtttatgcttccggttcatttttatggaaaagtcgaacatactaacactgggacaaaatggatcgatacacaggtggtactcgcactgccttacgatactccagtgcccggatatatgaataacacagtgaataccatgcgcctttggagcgctcgggcaccgaatgacttcaatctccgcgactttaatgtcggcgattatattcaggcagttctggacaggaatctcgcagaaaacatcagcagagtgctgtatcccaacgacaatttcttcgaggggaaggaactcagattgaagcaagagtacttcgtggtggccgctacgctgcaagatatcatccgaagattcaaagcctcaaaattcgggtcgacccgcggagctggcacagtctttgatgcctttcctgaccaggtggctattcagctcaatgacacgcaccccgcacttgccatcccagagcttatgcgtatttttgtcgacatcgagaaactgccatggagcaaagcctgggagttgacccaaaagacatttgcctatactaaccacacggtgctgcctgaagctctggagaggtggcccgtggatcttgttgaaaagctgctgcctcggcatctggaaatcatttacgagataaaccaaaagcacctggataggatagtcgctttgttcccaaaggacgtagataggctgagaaggatgtccctaatcgaagaggagggcagcaaacgtattaatatggcacacctgtgtatcgttggttctcacgctgtgaatggcgtagccaagattcactctgacattgtgaaaacaaaagtgttcaaggattttagtgagctcgaaccagacaaatttcaaaacaaaacaaatgggatcacaccgagacggtggctgcttctgtgtaacccgggtctggccgagctcatagcagagaaaatcggagaagactacgtcaaggatctgtctcagttgactaaactgcacagcttcctgggggatgacgtgttcctgagggagctggcaaaggtcaagcaggagaataaacttaagttttctcaatttctagagaccgagtataaagtgaaaatcaatccaagcagcatgttcgacgtacaggtgaaaagaatccacgagtacaaaagacagctgttgaattgccttcacgtcattactatgtacaaccggattaagaaggatcctaagaagctgtttgtgcctagaaccgtgattattggtggaaaagccgctcccggatatcatatggccaaaatgatcataaagctcattacctccgtggcggacgtggtgaacaacgatcccatggtagggtctaagttgaaagtaattttcctggagaactatcgcgtgagtcttgcagagaaggtgatacccgcaaccgacctgtccgaacagatctcgacagcaggcaccgaggccagtggcacaggcaacatgaagttcatgctcaacggtgcacttacgattggaacaatggatggcgctaacgtggagatggccgaggaggccggagaggaaaacctgttcatattcggcatgcgtatcgatgacgtcgctgccttagacaagaagggctatgaggcaaaagaatattatgaggccctgccagagctaaaactggtcattgaccagattgacaacggattttttagcccaaagcagcccgatctgttcaaagatatcatcaatatgctcttttatcacgatcggttcaaagtgttcgcagactacgaagcatacgtgaagtgccaagacaaagtctctcagctgtacatgaaccctaaggcgtggaatacaatggtgctgaagaacatcgctgcctccggcaagttctcaagcgaccgcaccattaaagagtacgcacagaatatttggaacgtggagccttccgatctcaaaatttctctttccaatgagtccaataaggtgaatgggaactag

SEQ ID NO: 132813 - DNA, 2687 bp, Artificial Sequence
  derived and/or modified sequence
gggaaataagagagaaaagaagagtaagaagaaatataagagccaccatggcgaaaccgcttactgatcaggagaagcgccgacaaatctcgatcagaggtatcgtaggtgtggaaaacgtcgccgagcttaagaaatcgttcaaccgccacttgcatttcacgttggtgaaggaccgcaacgtggcgaccacgcgggattactactttgcattggcccacacagtgcgggatcatctggtcgggaggtggatcagaacacaacagcactactacgataagtgcccgaaaagagtgtattatctttcgcttgagttctacatgggaagaacactccagaatacgatgatcaatcttgggcttcagaacgcatgcgacgaagccatctaccagttgggattggacatcgaagagcttgaagagattgaggaggacgccggactcgggaatggtggactggggcgacttgcggcgtgtttcttggactccatggcgaccctgggcctggcggcatatggatatggaatcagatatgagtatgggatctttaaccagaaaattcgggatggatggcaggtcgaagaagctgacgattggctgagatacgggaatccttgggaaaaatcccgacccgagttcatgctcccggtacatttctacgggaaggtagagcatacaaacaccggcaccaagtggatcgatacccaagtcgtattggcgttgccgtatgacactccggtccccgggtatatgaacaacactgtcaatacaatgcggttgtggtcggccagagcgcccaacgactttaatctccgcgacttcaatgtgggagattacattcaagccgtgctggacaggaacctcgccgagaacatttcgcgggtgctctacccaaatgacaacttcttcgaggggaaagagctgcggcttaaacaggaatacttcgtcgtcgcggcgacgcttcaagatatcattcgacggtttaaggcatccaagttcggttcgacaagaggtgcgggaacggtgtttgatgcctttcccgatcaggtcgccatccagcttaacgatacccaccctgccctcgcaatccctgaactcatgaggatctttgtggatattgagaaacttccctggtcaaaggcgtgggaactgactcaaaagacgttcgcatacacaaaccacacagtactccccgaggcgctggaacgctggccagtagacctggtggagaaactgctgccaaggcacctcgaaatcatctacgagatcaatcagaaacacttggatcggattgtagctcttttccccaaggacgtggatcgcttgaggcgcatgtccctcatcgaggaagaagggtcaaagaggatcaatatggctcatctctgcatcgtaggctcacacgcggtgaacggggtagccaagatccactcggacattgtcaaaacgaaagtctttaaagattttagcgaacttgagcccgataagtttcagaacaagacgaatgggattacgcctcggagatggttgcttctgtgtaatccggggttggctgagcttatcgcggagaaaatcggcgaggactacgtgaaagatctgtcgcaattgacgaaactccattcgtttctgggtgacgatgtattccttcgcgagctcgcaaaagtaaagcaggagaataagctgaagttctcccagtttttggagacagagtataaggtgaagatcaatccgtcaagcatgtttgacgtacaagtaaagcggattcacgagtataagcggcaacttcttaattgcctgcacgtcatcacaatgtataatcgcatcaaaaaggacccgaagaaattgttcgtgcctagaacagtcatcattggtggaaaggctgcacccggataccatatggccaaaatgatcatcaagctgattacgagcgtggccgacgtggtgaataacgacccgatggtcggatcaaaattgaaggtaatctttttggaaaactatagagtctcgcttgcggaaaaggtgattcccgcaacggacctgtcggaacagatctcaaccgctggcacagaggcctcgggaacgggaaacatgaagttcatgttgaatggcgctctcacaattggaaccatggatggagcaaatgtagaaatggcagaggaggctggagaagaaaacttgtttatctttggtatgcgcatcgacgatgtagcggcattggacaaaaagggttacgaagcgaaggagtactacgaggcccttccggagttgaaactcgtcatcgatcagattgacaatggctttttctcgcccaagcagcccgacctcttcaaggacatcatcaatatgctgttctaccacgataggttcaaggtgttcgccgattacgaggcgtatgtcaaatgtcaggataaagtaagccagctctatatgaaccccaaagcctggaatacaatggtgcttaagaatattgcggcgtccgggaaattcagcagcgaccgcacgattaaggagtacgcacagaatatctggaacgtcgagcccagcgacctcaaaatctccttgtcaaacgaatccaacaaggtgaacggaaactgataagctgccttctgcggggcttgccttctggccatgcccttcttctctcccttgcacctgtacctcttggtctttgaataaagcctgagtaggaag

SEQ ID NO: 132814 - DNA, 3048 bp, Artificial Sequence
  derived and/or modified sequence
ggaaatccggaagggagcctccgagcccaggtcccgggctggcaggggtctcgccggcgcttggacctcgtctcccacccccgagcccactgcggccccagagcctcgggaggggccgggcacttcctctgccctccggcctggggcaggggccgggacgcggtgggagtgcagcggggacggcaccgcccgagggggcgggccccaaactttcgtgcgcgttgaaagctgctggcgcggcggggcggactccacccctgcccggcagcccagcgcctccggccgcacttccagctctctgcgcagcccgccgcgcagcccgccgccccagccatggcgaagcccctgacggaccaggagaagcggcggcagatcagcatccgcggcatcgtgggcgtggagaacgtggcagagctgaagaagagtttcaaccggcacctgcacttcacgctggtcaaggaccgcaacgtggccaccacccgcgactactacttcgcgctggcgcacacggtgcgcgaccacctggtggggcgctggatccgcacgcagcagcactactacgacaagtgccccaagagggtatattacctctctctggaattttacatgggccgaacattacagaacaccatgatcaacctcggtctgcaaaatgcctgtgatgaggccatttaccagcttggattggatatagaagagttagaagaaattgaagaagatgctggacttggcaatggtggtcttgggagacttgctgcctgcttcttggattccatggcaaccctgggacttgcagcctatggatacggcattcggtatgaatatgggattttcaatcagaagatccgagatggatggcaggtagaagaagcagatgattggctcagatatggaaacccttgggagaagtcccgcccagaattcatgctgcctgtgcacttctatggaaaagtagaacacaccaacaccgggaccaagtggattgacactcaagtggtcctggctctgccatatgacacccccgtgcccggctacatgaataacactgtcaacaccatgcgcctctggtctgctcgggcaccaaatgactttaacctcagagactttaatgttggagactacattcaggctgtgctggaccgaaacctggccgagaacatctcccgggtcctctatcccaatgacaatttttttgaagggaaggagctaagattgaagcaggaatactttgtggtggctgcaaccttgcaagatatcatccgccgtttcaaagcctccaagtttggctccacccgtggtgcaggaactgtgtttgatgccttcccggatcaggtggccatccagctgaatgacactcaccctgcactcgcgatccctgagctgatgaggatttttgtggatattgaaaaactgccctggtccaaggcatgggagctcacccagaagaccttcgcctacaccaaccacacagtgctcccggaagccctggagcgctggcccgtggacctggtggagaagctgctccctcgacatttggaaatcatttatgagataaatcagaagcatttagatagaattgtggccttgtttcctaaagatgtggaccgtctgagaaggatgtctctgatagaagaggaaggaagcaaaaggatcaacatggcccatctctgcattgtcggttcccatgctgtgaatggcgtggctaaaatccactcagacatcgtgaagactaaagtattcaaggacttcagtgagctagaacctgacaagtttcagaataaaaccaatgggatcactccaaggcgctggctcctactctgcaacccaggacttgcagagctcatagcagagaaaattggagaagactatgtgaaagacctgagccagctgacgaagctccacagcttcctgggtgatgatgtcttcctccgggaactcgccaaggtgaagcaggagaataagctgaagttttctcagttcctggagacggagtacaaagtgaagatcaacccatcctccatgtttgatgtccaggtgaagaggatacatgagtacaagcgacagctcttgaactgtctgcatgtgatcacgatgtacaaccgcattaagaaagaccctaagaagttattcgtgccaaggacagttatcattggtggtaaagctgccccaggatatcacatggccaaaatgatcataaagctgatcacttcagtggcagatgtggtgaacaatgaccctatggttggaagcaagttgaaagtcatcttcttggagaactacagagtatctcttgctgaaaaagtcattccagccacagatctgtcagagcagatttccactgcaggcaccgaagcctcggggacaggcaatatgaagttcatgctaaatggggccctaactatcgggaccatggatggggccaatgtggaaatggcagaagaagctggggaagagaacctgttcatctttggcatgaggatagatgatgtggctgctttggacaagaaagggtacgaggcaaaagaatactatgaggcacttccagagctgaagctggtcattgatcaaattgacaatggctttttttctcccaagcagcctgacctcttcaaagatatcatcaacatgctattttatcatgacaggtttaaagtctttgcagactacgaagcctatgtcaagtgtcaagataaagtgagtcagctgtacatgaatccaaaggcctggaacacaatggtactcaaaaacatagctgcctcggggaaattctccagtgaccgaacaattaaagaatatgcccaaaacatctggaacgtggaaccttcagatctaaagatttctctatccaatgaatctaacaaagtcaatggaaattgaactctagaattgtctctagaaaacatagcttcttactgaacttgaacatttttacaacattcactggtttttgttttgttagctaataatctataatagttgagtatctctgggaatggggagggaaattatatgtaatagagcttaaaaataaagtgtcaatttccaagg

SEQ ID NO: 132815 - DNA, 2541 bp, Artificial Sequence
  derived and/or modified sequence
atggcaaagccactcactgaccaggagaagagacgtcagatctcgatccgaggtattgtgggggtggaaaacgtcgctgaactgaagaagagctttaatcgacatctgcactttaccctggtgaaggaccggaacgtggcaaccactcgggattactatttcgcccttgctcataccgtcagggaccatctggtcggtcgctggattcgcacccaacaacactactatgataaatgcccaaaaagggtgtactacctgagccttgaattctacatgggacgtactctccaaaatactatgattaacctgggtctgcagaacgcctgcgatgaagcaatttaccagctgggtctggatattgaagaactcgaagaaatcgaagaggacgccggacttggtaatggtggtctgggaaggcttgcagcatgttttttggattcgatggccactcttggactggctgcatacggttacggaatccgttacgagtatgggattttcaaccagaaaatacgggatggctggcaagtcgaggaggcagatgattggcttagatacggcaatccttgggagaagagtagaccggaattcatgctccccgtgcacttttacggtaaggtggaacataccaataccgggaccaagtggattgacacccaggtcgttcttgccttgccatacgatactccggttccaggatacatgaacaatactgtcaatacgatgcgactgtggtcggcacgcgccccaaatgatttcaaccttagggacttcaacgttggagactatatccaagcagtcctggaccgaaaccttgccgagaacatttcacgagtcctgtaccctaatgacaacttcttcgagggaaaggaacttcggttgaagcaagaatactttgtagtcgctgcgactctgcaagacataattcgcaggttcaaggcttcaaagtttggatcgaccagaggagcaggaactgtgtttgatgcatttccagaccaagtggcaattcagctgaacgacacgcatcctgcattggccatacctgagcttatgagaatctttgtcgatattgaaaagctcccatggtccaaagcatgggaacttacccaaaaaacttttgcatacactaatcataccgtgctgcccgaagcactcgaaagatggcctgtggatcttgtggaaaaacttcttccaaggcatctcgaaatcatatacgagataaaccaaaagcatctcgaccgtattgtcgctcttttccccaaagatgtggatagactccgtcggatgtcactcattgaggaagagggaagcaagagaattaacatggcacatctttgcatcgttggatcccatgcagtcaacggggtggcaaagatccactcagacattgttaagacgaaggtgttcaaggacttctcggagttggagcctgataagtttcagaacaaaacgaacggaatcacccctaggcggtggctcctcctctgtaatccgggacttgcagagctgattgcagaaaagatcggagaagattacgtgaaggatctgagccaactgaccaagctgcattccttccttggtgacgatgtttttcttcgggagctcgcaaaggtgaaacaggaaaacaagctgaagttttcccaatttctcgaaactgaatacaaagtgaagattaatccctcgtctatgtttgatgtacaagtaaaaagaattcacgagtacaagaggcaattgctcaattgtctgcacgtcattacgatgtacaatcgaatcaagaaggatcccaagaaactctttgtgcctcgtaccgtgatcattggcggtaaggcggccccgggctaccacatggccaaaatgatcatcaagctgatcacctcggtggccgatgtggtgaacaacgaccctatggtgggaagcaaacttaaggtgatctttctggagaactaccgagtgtccctggcagagaaggtgattcctgcgacggatctgtcagagcaaatctcaactgcagggactgaagcatcgggtaccggaaacatgaagtttatgcttaacggcgctctgacgataggtaccatggatggagcaaatgtggagatggcggaagaagccggggaagagaacctgttcatttttggaatgcgcatagatgacgttgccgccttggataagaagggatatgaagcaaaagaatactacgaagccctgccagaacttaagctggtgattgatcagatcgataacggctttttcagcccaaagcaacctgacttgtttaaagacatcattaacatgctgttttaccacgacaggtttaaagtgtttgcagattacgaagcatacgtcaaatgtcaggataaggtgagccagctgtacatgaatcctaaggcatggaatactatggtccttaagaacatcgcagcgtcgggcaaattctcgtctgatcgtaccatcaaagaatacgcgcagaacatctggaacgtggaaccttccgacttgaagatttcccttagcaatgaatctaacaaggtcaacggaaac

SEQ ID NO: 132816 - DNA, 2541 bp, Artificial Sequence
  derived and/or modified sequence
atggccaaaccattgactgaccaggagaagagacgtcaaatcagcatccgcggaattgtgggtgtggagaatgtggcagagctcaagaagagttttaaccggcaccttcactttaccctggtgaaggacaggaacgtagctacaacccgtgactactacttcgcgctagcccatacagttcgagaccacctggtgggccggtggatccgtacgcaacaacattattacgataagtgtccaaagcgcgtctattacctgagccttgagttctacatgggcagaacgctccagaacacaatgattaacctcggactgcaaaacgcttgtgatgaagccatctaccagttaggcctggatattgaagaactggaggagatcgaggaagatgcgggcctggggaacggcggactgggtcgcctcgcggcctgttttctagattcgatggcgactctgggactagccgcatatggttatggcatccgatatgagtacggtattttcaaccaaaaaatcagagacggatggcaggtcgaggaggcagatgattggctcaggtatggcaatccatgggagaagagccgcccagagttcatgctccctgtgcacttttatggcaaggttgagcacaccaacacaggcacgaagtggatagacactcaagtggtgttggccttgccgtatgatactccggtgccgggttacatgaataatacggtaaacacgatgcgactgtggagcgcgcgcgccccaaatgacttcaatctgcgtgatttcaacgtcggtgattatattcaagcagtcctggaccgcaatctggcggagaacatctcccgcgtgctgtacccaaatgataatttcttcgagggcaaggagttgcgcctgaagcaggagtacttcgtggtggcagctaccctgcaagatatcattagacgtttcaaggcttccaagttcggctcgacacgaggagcgggaacggtattcgacgcgttcccggatcaagtcgccatccagttgaacgatacccatcccgccctggcaatccccgagctcatgcggatattcgtagatatcgaaaagctgccgtggtcaaaggcctgggagctgacccagaaaacctttgcctataccaatcacacagttctccccgaggccctcgaacggtggccagtagatcttgtcgaaaagctgcttccccgccacctggagattatatacgaaattaatcaaaaacacctggaccggatcgtggccctgtttcccaaggatgtcgatcgtctgagacgtatgagcctgatcgaggaggagggctcgaagcgaatcaacatggcgcatctttgtatcgtcggctcccacgcggtaaacggcgtggccaagatacactccgacatcgtgaagacaaaggtgttcaaggatttctcggaattggaaccggataaattccagaataagacgaacggtattacaccgcgccgctggctgctgctctgcaacccaggactggctgaattaatcgcagagaagatcggagaggattacgtcaaagatctgtcacaactgacgaagctccactcgtttctaggcgacgatgtgtttctgcgagagctggccaaggtcaaacaggagaataagctcaaattctctcagttcttggagacagagtacaaagtgaaaattaacccctcatcaatgtttgatgttcaagtgaagcgtatacacgagtacaagcgccagctgctaaattgcctacacgtgataacgatgtacaatcggatcaagaaggatcccaagaagttgttcgtgccccgtaccgttatcatcggcggcaaggcggctcccggttaccacatggctaagatgattattaaactaattacctctgttgccgatgttgtgaacaacgacccgatggtgggaagtaagcttaaagtgattttcttggagaactacagggtgtccctggccgaaaaggtgattcccgcgacagacttgagtgagcaaataagcaccgcaggcacggaggcatcgggcaccggcaatatgaagttcatgttgaatggcgcgctgaccatcggcacgatggatggcgccaacgtagagatggccgaagaagccggcgaggagaacctgttcatctttggcatgcgtatcgacgacgtggcggcactggataaaaagggctacgaagccaaagagtactatgaggcgttgcctgaactgaagctggtcattgaccagatcgataatggtttcttctcgcccaagcagcccgacctcttcaaggatatcatcaacatgctgttctaccatgatcggtttaaagtgttcgccgattacgaagcctacgtaaagtgccaggataaggtaagccagttgtatatgaacccaaaggcatggaataccatggtcctgaagaatatagctgcaagcgggaaattcagcagtgatcgcacaatcaaggagtatgcccagaatatatggaacgtggaaccaagcgacctgaaaatcagcctttcaaatgagtccaataaggttaacggtaat

SEQ ID NO: 132817 - DNA, 2541 bp, Artificial Sequence
  derived and/or modified sequence
atggctaaacccctcactgaccaggaaaagcgccgccagatttcgatccgtgggatcgtcggcgtggagaatgtggcagaactcaagaaatcgttcaaccggcatctgcatttcactctggtgaaggaccggaacgttgcaactaccagggactactattttgcactggcgcatactgtccgcgaccacttggtgggcagatggatccggacccagcagcattactacgacaagtgtcctaagcgtgtgtactacctgtcacttgagttctatatgggacggactctgcaaaacaccatgattaaccttggccttcagaacgcatgtgatgaagctatctaccaactggggctggatatcgaagagctcgaggaaattgaggaggatgcgggacttggaaacggtgggctgggacgcctggcagcctgcttcttggactcaatggcgactctcggactggctgcttacggttacggaatcaggtacgaatacggcatcttcaaccagaagatccgggatggttggcaggtggaagaagcagatgactggcttcggtacgggaatccttgggagaagtcccggccggaattcatgctcccggtccatttctatgggaaggtcgaacacaccaataccggcactaagtggattgacacccaggtggtgcttgccctgccgtacgacaccccggtccccggatacatgaacaacactgttaataccatgaggttgtggtctgcgcgcgcgcctaacgactttaaccttcgcgacttcaacgttggggattacatccaggccgtcctggatcgcaacctggctgagaatatctcacgcgtgctgtacccgaatgacaacttcttcgaaggaaaggagctgagactcaaacaagaatactttgtggtggcggccaccctccaggatatcatcagacgcttcaaggccagcaagttcggaagcacccgaggtgccggaaccgtgtttgacgccttccctgatcaagtggccatccagctcaatgatactcaccccgcgcttgcaatcccagagctgatgagaatctttgtggatatcgaaaagctcccatggtccaaagcatgggaactgacccagaaaacttttgcttacactaaccataccgttctgccggaagcccttgagcggtggccggtagacctggtcgagaagctcctcccacggcacctcgaaatcatctacgagattaatcagaaacaccttgaccggattgtcgccctgttccctaaagatgtggacaggcttagacgcatgtcccttattgaagaggagggatcaaaacggatcaacatggcgcacctgtgcattgtgggatcacatgccgtgaatggagtggccaaaattcattccgacatcgtgaaaaccaaggtgtttaaggatttctctgaactcgagccagacaagtttcaaaacaagactaatggaattacccctcgccgctggctgctgctgtgtaatccaggattggcagaactgatagcggaaaagatcggtgaggactacgttaaggatctgagccaattgaccaagctgcactcgttcctcggagatgatgtattcttgcgggaactggctaaggtgaagcaagagaacaagctcaagttttcccagttcttggagactgaatacaaagtcaaaatcaatcccagctcgatgtttgacgtgcaggtgaagcgcatacatgaatacaaacggcaactgctcaactgcctgcacgtgatcacgatgtacaaccggatcaaaaaggaccccaagaagctcttcgtgccgcggacggtgatcatcggcggcaaggccgccccgggataccatatggcgaagatgatcatcaagttgatcacctccgtggccgacgtggtgaataacgacccaatggtcggctcgaaactgaaagttatcttcctcgaaaactatcgggtgtccctggccgagaaggtgatcccggcgactgaccttagcgagcaaataagcaccgcgggaaccgaggcgtcgggaaccggcaacatgaagtttatgctgaacggcgccctcactatcggaactatggacggagcaaatgttgaaatggcagaggaagcgggcgaagagaacctgtttatcttcggaatgcgaatcgatgacgtggcggccctcgataagaagggctacgaagcgaaggagtactacgaggccctcccagagctcaagctggtgatcgatcaaatcgacaatggattcttcagccccaagcagccagacctctttaaggatatcattaacatgctcttctatcatgaccgctttaaagtgttcgccgattacgaggcatacgtgaagtgccaagataaggtgtcccaattgtacatgaacccgaaggcctggaacaccatggtcctgaagaacatcgccgcgtcgggaaagttctcatccgatcgcaccatcaaggaatacgcccagaacatctggaacgtggaaccaagcgatctcaaaatctcgctgtccaacgaaagcaataaggtgaatggaaat

SEQ ID NO: 132818 - DNA, 2541 bp, Artificial Sequence
  derived and/or modified sequence
atggcaaagccgcttacggaccaggaaaagagacgtcagatttccattagaggtatcgtgggcgtggagaacgtggcggagctgaagaagagcttcaacagacatctccatttcactcttgtgaaagacagaaacgtggccactaccagggattactactttgcactggcacatacggtcagggatcacctggtgggccgctggattagaactcaacaacattactacgataaatgtcctaaaagagtgtactaccttagccttgagttttacatgggacgcactctgcagaacaccatgatcaatcttggtctgcagaacgcatgcgacgaggcaatttaccaattgggcctggatattgaggaactggaggaaatcgaggaggatgcaggactgggaaatggagggctgggaaggttggctgcctgttttcttgattcaatggccaccctgggacttgcagcctacggatacggaatcagatacgagtacggtatattcaaccagaaaatacgggacggctggcaagtggaggaggcagacgattggctgcgatacggcaatccctgggagaagagcagaccagagttcatgcttccagtgcacttttatgggaaagtggagcatactaacaccgggaccaagtggatcgacacccaagtggtgctcgcactcccctacgataccccagtgccaggatacatgaataacactgtgaacactatgcgtctctggtcagctcgcgcacccaatgatttcaatttgcgtgactttaacgtcggcgattacatccaagcagtccttgaccgcaatcttgcagaaaacatatcgcgagtgctgtacccaaacgataacttctttgaggggaaggaattgagactgaagcaggagtactttgtcgtcgcagccactctccaggacattattcggagattcaaggcgtctaaattcgggtccacgcggggagcaggcaccgtattcgatgccttcccagaccaggtcgcgattcaacttaacgacactcatcctgcacttgcaatacctgaacttatgcgcatttttgtggacattgaaaagctcccctggtccaaggcgtgggaactgacccagaaaacttttgcatatactaaccatactgtgttgcctgaagcactggaaaggtggcccgttgatttggttgaaaagctgctcccaagacatttggagataatctatgaaatcaaccagaagcacctggatcggattgtggctctctttccaaaggatgtggatcggctgaggcggatgagccttatcgaagaggaagggtcaaagcggattaacatggctcatttgtgtatcgtgggctcgcacgcagtcaacggtgtagctaagattcactcggatatcgtgaaaactaaggtgttcaaagatttctccgaactcgagccggataagtttcaaaacaagactaacggcattacccctagacggtggctgctcctgtgtaacccaggccttgccgaactgattgcggaaaagattggagaagattacgtgaaagacctgtcccaactgaccaagctgcattccttcctcggagatgatgttttccttagagaacttgcgaaagtgaaacaagagaacaagctgaaattctcgcaattcttggaaaccgagtataaggtgaagattaaccccagctccatgttcgacgtgcaagtgaagcggattcatgagtacaaaagacaactgctgaattgccttcatgtgattaccatgtataatcggatcaaaaaggatccaaagaaactgtttgtgccccgcactgttatcataggtggtaaggcagcacccggttaccatatggcgaagatgattatcaaactcattaccagcgttgcggacgtggtcaataatgaccctatggtcggaagcaagctgaaggtgattttcctggaaaactacagggtgtcgctcgcggagaaagtgataccagctactgatcttagcgagcaaatttcaaccgcaggaaccgaggcaagcggaactgggaatatgaagtttatgctgaacggtgcactcactattggtactatggacggtgccaacgtcgaaatggcagaggaggcaggcgaagaaaatcttttcatctttggaatgcgcattgatgatgtggcagcactggataagaagggatacgaggcaaaggaatactacgaagcactcccagaacttaaacttgtgatcgatcaaattgataatgggttcttttcccctaagcaacctgatctcttcaaggatatcataaacatgctcttttaccatgataggtttaaggtctttgcggattacgaggcctacgtcaagtgtcaggataaagtctcacaactttacatgaatccaaaagcatggaacaccatggtgctgaaaaacattgccgcatcagggaagttttcgtccgatcgaaccattaaagaatacgcacaaaacatttggaatgtggaaccctcagatctcaaaatctctcttagcaatgaatccaataaggtcaacggtaat

SEQ ID NO: 132819 - DNA, 2541 bp, Artificial Sequence
  derived and/or modified sequence
atggctaaaccactgaccgaccaggagaagagaaggcagatttccatcagaggaattgtgggcgtagaaaatgtggcagaactaaagaaatcctttaacaggcacctgcattttaccctggtcaaggacagaaatgtggctaccacccgggactattactttgccctcgcacacacggttcgcgatcatcttgtcgggagatggatccgaacccagcagcattattacgataaatgccctaaacgcgtctactatctgagtttggagttctatatgggacggacactccagaataccatgatcaatctgggactacagaacgcctgcgacgaggctatctatcagctggggcttgacatcgaagagctggaagagattgaggaggatgctggtctgggtaacggcggcttaggccgcttggccgcatgttttctggactctatggctactctggggctcgctgcatacgggtacggcatcagatatgaatatggcatttttaatcagaagatacgagatggttggcaggtggaggaggctgacgattggctgcgttacggaaacccctgggaaaagtcacgcccagagttcatgttgccagtccacttctacggcaaggtcgagcatactaatacgggaactaagtggattgatactcaggtcgtgttggccctgccctacgatacccccgtgccaggctacatgaataacactgtgaataccatgcggctttggtcagctcgtgccccgaacgatttcaatctgcgcgactttaacgtcggcgattatatccaagccgtactggatagaaacctcgcagagaacatctctcgcgtattgtatcccaacgataacttcttcgaagggaaggagctgcgtctgaagcaagaatacttcgtcgtcgccgcaactctgcaggatataatccgcagattcaaggcatctaaatttggcagcacacgtggggctgggacagtcttcgacgcctttccagaccaggttgcaattcagttaaacgacacacaccctgctcttgccatcccggagctgatgaggattttcgttgatattgaaaagcttccatggagcaaggcctgggagcttactcagaaaaccttcgcttacactaaccataccgtactcccagaggccctcgagagatggcctgtggacttggttgaaaagcttttgcccagacacctggaaattatttacgaaattaaccagaaacatctggaccgtatcgtggccctgtttcctaaggacgttgaccggttgcggcgcatgagcctcattgaggaagagggaagtaaacgcattaatatggcacacttgtgcatcgtggggagtcacgccgtgaacggcgtagccaaaattcatagtgacattgtaaagaccaaggtgtttaaagacttctctgaactggaacctgacaaattccagaataagacgaacggaatcacgccccggagatggctgcttttgtgcaacccagggctggccgagctcattgccgagaagattggtgaagattacgtgaaagatttgtctcagctcaccaagctgcactcttttcttggggacgatgtttttctgcgggaattagccaaggtcaagcaggagaacaaacttaaattttcacagttcctcgagacggaatataaggtcaagataaatcctagtagtatgttcgatgtgcaggtgaagaggattcacgagtacaaacggcagctgctcaactgcttgcacgtaattactatgtataaccggattaaaaaggatcccaagaagctattcgtgccacgaaccgtgataatcggtggtaaagcggccccgggctatcacatggccaaaatgataattaaactgataaccagcgtagccgatgttgttaacaacgaccctatggtaggcagtaagctgaaagtgattttcctggagaattatagggtgtctttggctgaaaaagtgatccccgcgaccgatctgagcgaacagatctctaccgctggcacagaggctagtgggactgggaacatgaagtttatgcttaatggcgcgcttacaataggtaccatggacggtgcgaacgttgagatggccgaagaagctggggaggagaatttgtttatttttgggatgcgaatcgacgatgtcgcagcgctagataagaagggctacgaggccaaagagtattatgaggccctaccggaactgaagctcgtgatcgaccagatcgataacggtttcttttctcctaaacagcccgatctgttcaaagacatcattaacatgctgttctatcacgaccgctttaaggtatttgcagactacgaggcttacgtcaagtgccaggacaaggtgagtcagctgtatatgaatcccaaggcctggaacacgatggtactgaagaacatagcggccagtggtaagttcagcagcgatcggaccatcaaagaatatgcccaaaatatctggaacgtggagccatcggacctgaaaatttctctgtcaaatgagtccaataaggtcaatggtaac

SEQ ID NO: 132820 - DNA, 2541 bp, Artificial Sequence
  derived and/or modified sequence
atggcgaagcctctgactgatcaggaaaaacggcgtcaaatctccatccgcggaatcgtgggagtagagaacgtggccgaactcaagaagagtttcaaccgccatcttcatttcaccctggttaaggaccgcaacgtggccaccacgcgagactactacttcgcattggcgcacaccgtgcgggaccatctggtcgggaggtggattcggacccagcaacattactacgacaaatgccccaaaagagtctactacctctcgctcgagttctacatggggagaaccctgcagaataccatgataaacttgggtctgcagaatgcatgtgacgaagctatttaccaactcggactcgacatcgaagaacttgaggagatcgaggaggatgcaggactgggaaatgggggactgggacggctggccgcctgttttctggactcaatggcgacccttggattggccgcctatggatacggaatccgttacgaatacggaattttcaatcagaaaatcagagacggttggcaggtcgaggaagccgacgattggctgcggtacggaaacccatgggagaagtcgcggccagaattcatgcttccagtccatttctacggaaaggtggaacacactaacacgggcaccaagtggatcgatacgcaagtggtgctggctctcccgtacgacaccccggtcccgggttacatgaacaacactgtcaataccatgagactttggtcagcgcgagcgccaaatgactttaacctccgcgatttcaatgtcggcgactatatccaagccgtgctcgatagaaatttggccgagaatatctcccgtgtgctctacccgaatgacaatttcttcgaaggtaaagagctgaggctgaagcaggagtactttgtggttgccgcgactctgcaggacattattcggcggtttaaggcctcgaagttcggctccactcgcggagccgggactgtgttcgatgccttcccggatcaagtggcaatccagctcaacgacactcacccggctctggccatcccagaactgatgcggatcttcgtggatatcgagaaactcccttggagcaaggcctgggaactgacgcaaaagacctttgcctacaccaaccacactgtcctcccggaagcattggagcgatggcccgtggatctggtggagaagctgctgccgagacatctggaaatcatctatgaaatcaatcaaaagcacctcgacagaatcgtcgctctgttcccaaaggatgtggatagattgcgcagaatgtcgctgattgaggaagagggctccaagcggataaacatggcccacctgtgcattgttggaagccacgcggtcaatggggtggctaagatccacagcgatatcgtcaaaaccaaggtctttaaggacttttcggagctcgagcctgataagttccagaataagaccaacggtataactccgcgccggtggctcttgctgtgcaaccccggcctggcggaactgatcgctgagaagatcggagaggactacgtcaaggacctgagtcagctcacgaagctccactcattcctcggagacgacgttttccttcgggagctggccaaggtgaaacaggaaaacaaactgaaattctcgcagttcctcgaaactgagtataaggtcaagattaacccatcctccatgtttgatgtgcaggtgaaaaggatccatgagtacaagcgccagctgctcaactgcttgcacgtcatcactatgtacaataggatcaagaaagatcctaaaaagctgttcgtgcctcggaccgtgatcattgggggaaaggccgctccgggataccatatggcaaagatgatcatcaaactgatcacgagcgtcgctgacgtcgttaacaacgacccaatggtgggttccaagctcaaggtgatcttccttgaaaactaccgcgtgtcactggcagagaaggtaatcccggcgaccgacctcagcgagcagatctcgactgctggaactgaagcctcaggcactggcaacatgaaattcatgctgaacggtgccctgaccattggaactatggatggggcgaacgtggaaatggctgaagaagccggagaagaaaacctgttcatcttcggaatgagaatcgacgatgtggcggcgttggacaaaaagggttacgaagccaaagagtactacgaggccctccctgaactcaagctggtgattgatcagatcgataatggtttcttttccccaaaacaaccggacctgttcaaggacatcattaacatgttgttttatcacgaccgctttaaagtgttcgctgactacgaggcgtacgtgaaatgccaggataaagtcagccaactgtacatgaaccctaaggcatggaataccatggtgcttaagaatatcgcggcgtccggaaagttctcgagcgaccggactataaaggagtacgcccagaacatctggaacgtggaaccctcagacttgaagatcagcctgtcaaacgaatccaacaaggtcaatggaaac

SEQ ID NO: 132821 - DNA, 2541 bp, Artificial Sequence
  derived and/or modified sequence
atggccaaacctttaaccgaccaggagaagcggcggcaaatcagcatcagaggaattgtgggggttgagaacgtggcggagctgaaaaaatcctttaacagacacctacacttcactcttgttaaagaccgaaatgtagccactacccgagactattattttgccctggcccacaccgtgcgggaccacttggtgggacggtggattagaactcagcaacattattatgataagtgtccaaagcgagtgtactatctgagcttggagttctatatggggcgtacgttacagaatacaatgatcaatctggggctgcaaaatgcctgtgatgaagcaatctatcagttgggcctagacatagaggaacttgaagaaattgaggaggatgccgggcttgggaatgggggtctgggacggctcgcagcgtgcttcttggattccatggccacactgggcctagccgcttatggctatgggatccgctacgagtatgggatttttaatcaaaagatccgcgacgggtggcaggtggaggaggctgacgactggttgagatatgggaacccctgggagaagtctcgtccagaattcatgttgcctgtacacttctacggcaaggtcgaacatactaacacaggaaccaaatggatcgacactcaggtggtgctggcactgccatacgacacccccgtaccaggctacatgaacaacaccgtgaacactatgcgcctgtggagcgctcgggccccgaatgattttaacctcagagattttaacgtgggggattatatacaggctgtccttgacaggaacctggccgaaaatatttcccgcgtgttatatcccaacgacaacttctttgagggcaaggaactaaggctcaagcaagaatattttgtcgtggcagcaacgctccaggatatcatcagacgctttaaagcaagtaagttcgggtctacccgcggcgccgggacagtgttcgacgctttcccagaccaagtggctattcaacttaacgatacccatccagcccttgcaattcctgagctcatgcggatttttgtagatattgagaagctaccttggtctaaggcttgggagctgactcagaaaacctttgcctataccaatcatacagtgctgcctgaagccctcgaaaggtggccggtcgatctcgtggagaagctcctacctcgacatctggaaattatctatgagataaatcagaagcatctggatcggatcgtggcactgtttcctaaggatgtggatcgcctcaggcggatgtcattaattgaagaagaggggagcaaaagaatcaacatggctcatctctgtattgttggcagtcatgccgttaacggtgtggcgaagatccatagcgacatcgtaaagacaaaagtgtttaaggattttagcgagctggagcccgataaattccagaataaaacaaacggcatcacccctcgtagatggctactgctttgtaatcctggcttagcagagctcatagccgaaaaaattggcgaggactacgtgaaggacttgagtcagctgacaaagctgcacagctttttgggagatgatgtcttcttgagagagttggcaaaagtgaagcaagaaaacaagctcaaattctcccaattccttgaaacagagtacaaagtaaaaatcaatccttcatctatgtttgatgtgcaggtcaagcgcattcacgagtacaagcgacagcttttgaattgtctgcatgtgattaccatgtataacagaatcaagaaggatccaaagaaattgttcgtacctcgcaccgtgattatcgggggaaaggccgctcctggataccacatggccaaaatgatcatcaagttaatcacgtcagtggcggacgtggtgaacaacgatcctatggtgggcagcaaacttaaggttattttcctcgagaactatcgagtctctttggccgagaaggttatccctgcgactgacctttctgagcagatctctacagcaggaacagaggccagcggcaccggtaatatgaaattcatgctgaatggtgctctgacaattggcacaatggacggggccaacgttgaaatggcagaggaagcaggcgaggaaaatctctttatattcggcatgagaatcgacgacgtggctgccctcgacaagaagggctatgaagcgaaagagtattacgaagctctgccagagttgaagcttgtaattgatcagatagacaacggtttcttctccccaaaacagcctgatctgtttaaggacataattaatatgctattctaccatgatcgatttaaagtttttgctgactacgaggcgtacgtcaaatgtcaggacaaagtgtcacagctatacatgaatccgaaggcctggaacaccatggtgttaaagaacattgctgcctcaggcaagttctccagcgacaggaccataaaggaatatgcacagaacatatggaatgtggagccttccgacctgaaaatttcactgtccaatgaaagtaataaggtgaacggcaac

SEQ ID NO: 132822 - DNA, 2541 bp, Artificial Sequence
  derived and/or modified sequence
atggccaagccacttactgaccaagagaaaagacgacaaatctcgattcgcggcatcgtgggtgtcgaaaacgtggcagaactgaagaaatcgtttaaccggcatcttcattttacgcttgtgaaggaccgcaatgtggcaaccacccgagattactacttcgcccttgcacacaccgtgcgggaccatcttgtgggtaggtggattcgcactcaacagcattactacgacaaatgccctaaaagagtgtactaccttagccttgaattctacatgggacgtaccctgcagaacactatgataaatctgggcctgcaaaacgcatgcgatgaagcaatttaccaactcgggctggacatcgaggaacttgaggaaatcgaagaggacgcgggcctgggaaacggcgggcttggaaggttggcagcctgttttctggacagtatggccaccctgggactggccgcctacggatacggcatccggtacgaatacggcatattcaaccagaagattcgggatggatggcaagtcgaggaagcagacgactggttgaggtacggaaacccttgggagaagtcgaggcccgagttcatgcttccagtccatttctatggcaaagtcgaacatactaacacgggaactaaatggatagatacccaagtggtgctggcacttccctacgatactcctgtgcctggttacatgaacaacaccgtcaatactatgagactttggtcggcccgggctcctaacgactttaaccttcgggactttaatgtgggagattacatccaggcagtccttgatcgcaacctcgcagaaaacatctcacgggtgctttacccaaacgataacttctttgaggggaaggaacttcggctgaagcaagaatacttcgtggtggcagcaactctgcaggacattatcagaagatttaaggcttcaaagtttggttcgactcgcggtgccggtactgtgtttgatgcatttccagatcaagtggcaatccaacttaacgatactcacccagctctggctatccctgaactcatgaggatttttgtcgatatcgaaaagctcccatggtccaaggcctgggaactgactcagaaaacctttgcatacaccaaccacactgtgcttccagaagcactggaaagatggcctgtggaccttgtggaaaagctcctcccccgacatctggagatcatctacgaaatcaaccaaaagcatctggacagaatcgtggcgctttttcctaaggatgtggataggttgaggcggatgtcccttatcgaagaagagggtagtaagagaattaacatggctcatctgtgtattgtggggtcccatgctgtgaatggagtggcgaagatccatagcgatattgtgaaaacgaaggtgttcaaggatttttccgagttggaacccgacaaattccagaataagaccaatggaattaccccccgcaggtggttgctgctgtgtaaccctggtctggccgagcttattgcagagaaaattggagaggactacgtcaaagatctgagccaactgactaagctgcattcctttcttggcgatgatgtgttccttcgcgaactggcaaaagttaagcaggagaacaaactgaagttttcacaattccttgaaactgaatacaaggtgaagattaatccatcgtcgatgtttgatgtccaagtgaagcgcatccatgaatacaagaggcaactgcttaactgtctccatgtgattaccatgtacaacagaatcaaaaaagacccgaaaaagttgtttgtgccacgtactgtgattatagggggaaaggcagcaccaggatatcatatggctaagatgattatcaaactgataactagcgtcgccgatgtcgtgaataatgatcccatggtcgggtcaaagctgaaggtgattttcttggagaactaccgtgtctcccttgcagaaaaggttatcccagcgacggatctttcggagcaaataagcaccgcgggtaccgaggcaagcggtaccggaaacatgaagtttatgcttaacggtgcgctgaccataggaaccatggatggggcaaacgtggagatggcagaggaagccggggaggaaaatcttttcattttcggaatgaggattgacgatgtcgccgctcttgacaaaaagggctacgaagcaaaggaatactacgaagctctgccagaacttaaactcgtgattgatcagatcgacaacgggttcttttcgcccaagcagcccgatctgtttaaggacataatcaacatgctgttctaccacgatcggtttaaggttttcgcagactatgaagcatacgtcaagtgtcaagacaaagtgagccaactttacatgaatcctaaggcatggaacaccatggtcttgaaaaacattgctgccagcggaaagttttcaagcgatagaactattaaggagtatgcacagaacatatggaatgtggaaccttcggaccttaagattagcctctcaaacgaatcgaacaaggtgaatgggaat

SEQ ID NO: 132823 - DNA, 2541 bp, Artificial Sequence
  derived and/or modified sequence
atggcaaagccccttacagatcaggaaaaacgaaggcagatctccattcgagggatcgtgggcgtcgagaatgtggcggaactgaagaaaagctttaataggcatctacacttcaccttggtgaaggatcgtaacgtggccacaacacgagactattacttcgcgctcgcccacaccgtgcgcgaccaccttgtggggcgttggatcagaacccagcaacactattacgataagtgtcctaaacgagtgtactacctgtctctggaattttacatgggacgaacgctccagaatactatgatcaatctgggcctgcagaacgcctgcgacgaagccatctaccagcttgggcttgacatcgaagagttagaggagattgaggaagatgccggtcttggtaatggggggctgggcagactcgctgcctgttttttggactccatggctacgctaggcctagccgcctatggatacgggataaggtatgagtatgggattttcaaccagaagatccgagatggctggcaggtcgaggaagctgatgactggttgcgatacggcaatccgtgggaaaagtctcgccccgagtttatgctgcccgtgcacttttatggtaaagttgaacatacgaacaccggaaccaagtggatcgatacccaggttgtactggccctgccctacgacaccccagttccaggctacatgaacaataccgtgaacacgatgcgactgtggagtgcaagagcccctaacgattttaatctaagagacttcaatgtcggagattacattcaggcagtgctagatcggaatctggccgaaaatattagcagagtgttgtacccaaacgataactttttcgagggcaaagaactccgactgaaacaagagtattttgttgtagcagccactctccaagacattatacgtcgatttaaagcctcaaaattcgggagcacccgaggggccggtaccgtgttcgatgcatttcctgaccaggttgccatccagcttaatgatacccatccagcactcgcgatcccagagctcatgaggatttttgttgacatcgaaaaactgccctggagtaaagcgtgggaactcacccaaaaaacatttgcatataccaaccataccgtcttgccggaggccctcgaacgatggcctgtggatctggtagaaaagctgctgccacgacacctggagattatctacgagatcaatcagaagcacctcgatcgtatcgtggctctattccctaaagacgttgaccgactgcgaaggatgtccctgatagaggaggagggaagtaaacgaattaacatggcccacctatgtatcgtggggtcacacgcggtaaatggagttgccaaaattcactccgacatcgtcaaaaccaaagtgttcaaggatttctcagagctggaacccgacaaattccaaaacaagactaatggcattacccctcggcgatggctactgctctgcaaccccggtctcgctgaactgatcgccgagaagatcggtgaagattacgtgaaggatctgagccagttgacgaagcttcattccttcctgggggacgacgtttttctacgggaactcgctaaagtgaagcaggagaacaaactgaagttctcccagttcctggagaccgagtataaggtcaaaatcaatccctcatctatgttcgacgtgcaggtgaagcgaatacatgagtacaagaggcaactgctgaattgcctccacgttatcaccatgtacaacagaattaaaaaggatcccaaaaaactgtttgtcccccgaactgtcattattggaggcaaggccgccccaggttatcatatggctaagatgataatcaagttgatcaccagcgttgcagatgtggtaaataacgatccgatggtcggcagcaaactgaaagtaatctttctggaaaactatagagtctctctggctgaaaaggttatcccagccacagatttaagcgaacagatttcaaccgctggcacggaggccagcggcaccggcaacatgaaatttatgctcaatggcgctctcaccatcgggactatggacggcgctaacgtggaaatggcagaagaggccggcgaagagaatctttttattttcgggatgcgaatagatgatgtcgctgctttggacaaaaagggctacgaggctaaggagtattatgaagcgctgcctgaactgaaacttgtaatcgatcagatcgacaatggatttttttcccctaaacagcctgacctcttcaaggacatcatcaacatgttattctaccatgatcgattcaaagtgtttgctgactacgaggcatacgtgaaatgccaagataaggtgagccaactatacatgaacccaaaggcttggaataccatggtgctaaagaacattgctgcctccgggaaattctcctcggatcgcacaattaaagaatatgcacagaatatttggaatgtagaaccgtccgatcttaagatcagcttgtccaacgaatccaataaagtcaatggaaat

SEQ ID NO: 132824 - DNA, 2541 bp, Artificial Sequence
  derived and/or modified sequence
atggccaagcctctgaccgatcaggagaaaagaaggcagatctcgatccggggcatcgttggggttgagaacgtggccgagctcaagaaaagcttcaatagacaccttcatttcaccctcgtcaaggatcgcaatgtggccacgaccagggactactatttcgcactggcacacaccgtccgcgatcatctggtgggacgctggatccggacccagcagcattactacgataaatgccccaaaagagtgtactacctctctctcgagttttatatgggccgaaccttgcagaacactatgatcaacctcggcctgcagaatgcctgcgacgaagccatctatcagcttggcctggacattgaggagctcgaagagatcgaggaggacgcagggctcggaaatggaggcttaggcagactggccgcatgcttccttgatagcatggccactttgggattagctgcatatggttatggaattcgttacgaatacggcattttcaaccaaaagatccgagatggctggcaggtcgaggaagctgatgactggcttcgatacggaaatccatgggagaagtctcgccctgagtttatgcttcccgtgcatttctatggaaaagtagagcacaccaacacaggcactaagtggatcgacacccaggtggtacttgctttgccatacgacacaccagtacctggttatatgaacaacaccgtcaatacaatgcgtctatggtccgcacgggcacccaacgactttaatcttcgggacttcaacgttggtgactacatacaagccgtgttagacaggaacctagctgaaaacatttcacgggtcctatacccgaacgacaatttttttgagggtaaagagctgcgcttgaagcaagagtatttcgttgtcgccgctacgcttcaggatatcatccgccgattcaaggcctcgaagtttggatccaccaggggtgcaggcactgtgtttgacgcctttccagaccaagtggctatccagttaaacgacacacacccagcattagccattcccgagctgatgagaatctttgtggatattgaaaaactgccctggtctaaggcctgggagttgactcaaaagaccttcgcctacactaatcataccgtgctcccagaggctcttgagcgatggccagtcgacctcgtggaaaagctattaccgagacatctcgagatcatctacgagataaaccaaaaacacctcgatcgtattgttgccctgttcccaaaggacgtggacaggctgcgccgaatgagtctgattgaggaggaaggaagcaagaggattaacatggcacatctttgtatcgtcggctctcacgcagttaacggcgtggcaaagatacatagtgatatagtgaagacaaaggtcttcaaggacttctcagaactcgagcctgacaaatttcagaataagactaacgggatcacacctagacggtggttgctactttgtaatcctggactcgcggaattaatagctgaaaaaatcggggaggactatgttaaagatctttcacagctaaccaagctgcacagtttcctcggcgacgatgtattcctgagagagctcgccaaagttaagcaggaaaataaactcaagttctcacagttcctcgagaccgagtacaaggtgaagattaatcccagtagtatgttcgacgttcaagtgaaacgcatccatgaatataaaagacagctgctgaattgtctgcacgtgattaccatgtataatcggatcaaaaaagatcccaagaaactatttgttccaaggacagtcatcatcggcggcaaagccgcaccaggttaccacatggcaaagatgattatcaagctgatcacaagtgttgccgacgttgtgaataatgacccaatggtgggtagtaagttgaaagtcatctttctggagaattatagggtgtctttagccgagaaggtgattcccgccacggacctgagcgagcagatctccactgccggcaccgaggcctctggaactgggaacatgaagttcatgctgaatggagctcttacgatcggtacaatggacggcgcaaacgtcgagatggctgaagaagcaggcgaagagaacctattcatctttggaatgagaatcgatgacgtggctgctctggataagaaaggatacgaagcaaaagaatactatgaggcccttcctgagttgaagctggtaattgatcagattgacaacgggttttttagcccgaaacagccggacctgtttaaagacataattaacatgctcttctatcacgacaggttcaaggtattcgccgattatgaggcttacgtgaagtgtcaagacaaagttagtcagctctatatgaatcctaaggcttggaacacaatggtcctgaaaaacatcgccgcttctgggaagttctcatctgatcgaactatcaaggagtacgcacagaacatctggaatgtagaacctagcgacttaaagatctcactttctaacgagtcaaacaaagtcaatggaaac

SEQ ID NO: 132825 - DNA, 2541 bp, Artificial Sequence
  derived and/or modified sequence
atggctaagccccttacagaccaggagaagagacgtcagattagcattaggggcattgttggcgtcgagaacgtggcagaactgaagaaatcgttcaaccgacacctccactttaccctggttaaggatagaaacgtggcaaccacccgcgattattacttcgccctggcacatactgttagagatcacctggtcgggaggtggattcggacccaacagcattattatgataagtgtcctaagagggtgtactatctctccctggaattctacatgggtaggacgctgcaaaacacaatgattaacttgggcctccagaatgcttgtgatgaagccatttaccagctgggcctcgatattgaggaactcgaggagatcgaggaggacgccggattgggcaatggtgggcttgggaggctcgcggcctgtttcttagacagtatggcaactttgggtctcgccgcctacggatacgggattagatatgagtacgggattttcaaccaaaagatccgcgatggatggcaggtggaggaggctgacgactggttacgctacggcaacccatgggagaaatcccgacctgaatttatgctgcctgtgcatttctatgggaaagtggaacatactaacaccggaactaaatggatcgacacccaagtggtgcttgcgttgccttatgacactcccgtgccagggtacatgaacaacaccgtgaatacgatgcgcctctggtccgcccgggcccccaatgacttcaacctgcgggacttcaacgtaggagactatatacaggcggtgctggaccgcaatctagcagaaaatatatcccgagtgctctatcctaacgataacttctttgagggcaaggagctgcggttgaagcaggaatactttgtggtggctgccactttgcaggacataattagaaggtttaaagcatcgaaattcggaagtactaggggtgccggaacagtgttcgacgccttcccagatcaggtagctattcagctgaatgatactcacccagcgttagccattcctgagcttatgcgcatcttcgtcgacatcgagaagttaccctggagcaaggcctgggagctgactcagaagacgtttgcttatactaaccatacagtgctgcccgaagctctcgagcgatggccagtagacttagtggaaaaattgctgccgcgtcatcttgagatcatttacgagatcaaccaaaagcacctcgacaggatcgttgccctctttccaaaagacgtggaccgcttgcgtcggatgtctctgatagaggaggagggctctaagaggatcaacatggcccacctgtgtattgtgggaagtcacgccgtcaacggcgtggcaaagatacacagtgatatcgtgaaaaccaaagtgtttaaggactttagtgaactggagcccgacaaatttcagaacaagacaaatggcattacccctcggcgatggctgcttctgtgcaaccccgggctggctgagctgattgctgagaaaataggcgaagattatgtgaaagacctcagccagctgacgaaactccatagtttcctgggtgacgatgtgtttctgcgggagttggctaaggtcaaacaggagaacaaacttaagttctcccagttcctggaaaccgagtataaggtaaagatcaatccaagttccatgtttgacgtacaggtcaagcgcatccacgagtataagagacagctgctgaactgtctacacgtcatcacgatgtataaccggatcaaaaaagacccgaagaagctctttgtccctaggacagtgatcatcggcggcaaagcggcccctgggtatcacatggcaaagatgatcatcaagctgatcacgagcgtggccgacgtggtgaataatgaccctatggtgggctcaaagctgaaagtgattttccttgagaactatcgtgtatcattggcggaaaaggtgatacctgccacagacctctcagaacaaatttctacggccggcacggaggcctcgggtacaggaaacatgaagttcatgttgaacggagctctcacgattgggaccatggatggcgcaaatgtcgaaatggcagaagaagctggtgaggagaacctattcatcttcgggatgaggattgacgacgtcgccgctctagacaagaaggggtatgaagctaaggaatattacgaggctctgcctgaactgaagcttgtgatcgatcaaattgacaacgggtttttttcacccaagcaaccagatttgtttaaagatatcatcaatatgctgttttaccacgacaggttcaaggtgttcgctgattatgaagcctacgtcaaatgtcaggacaaggtctcccaactgtatatgaaccccaaggcctggaatacaatggtcttgaagaatattgcagcctcaggaaaatttagctcagatcggacaatcaaggagtacgctcagaacatctggaatgttgagccaagcgacctgaaaatttccctgtctaatgagagtaataaagtaaatggaaat

SEQ ID NO: 132826 - DNA, 2541 bp, Artificial Sequence
  derived and/or modified sequence
atggctaagccacttactgaccaggagaaaaggaggcagatcagcattcggggaatagttggcgttgagaatgttgcggaactgaagaagtcatttaataggcacctgcatttcacactggtaaaggaccgcaacgttgctaccaccagggactactacttcgcgttagcccatacagtccgggatcatctggtgggacgatggatccggacacagcaacattactacgacaaatgcccaaagcgggtctattatcttagtctggagttctatatgggtagaaccctccagaatacaatgattaaccttggcctgcagaatgcatgtgatgaggctatctatcagctgggtcttgacatcgaagagctagaggagatagaagaagacgcgggactgggaaacggtggattggggagactcgcagcatgctttctcgatagcatggccaccctgggccttgcggcctacggctacggtatcagatacgaatacgggatctttaaccagaaaattcgggacgggtggcaggtcgaggaagcagatgactggttgcggtatggaaatccttgggaaaagagccgaccagagttcatgctgcccgtgcacttctatggaaaggtggagcatacaaatacaggtacaaagtggatagatactcaggttgtcttagcattgccctacgacacccctgtgcctggttacatgaacaacaccgtaaacaccatgcgactgtggagcgcccgggccccaaacgacttcaacctccgtgattttaacgtgggggactacatccaagccgtgctggatagaaacctggctgaaaacattagccgcgttctataccccaacgataactttttcgaaggcaaagagctgaggttaaaacaggagtactttgtggtggccgcgacactacaagatattatcagaaggttcaaagcctctaaatttggtagcacaaggggtgctggaactgtgtttgacgcctttcccgatcaagtggctattcagttgaacgacacccaccctgctttagcaatccccgagttaatgcgcatatttgtcgacattgaaaaacttccctggtccaaggcctgggaactgacccaaaagacatttgcgtatactaatcatactgtgttgccagaggccctagagcggtggcccgtagacttggtggagaagttgctccctaggcatctcgagatcatttacgaaataaatcaaaaacaccttgacaggattgtagcactgtttcccaaggatgtcgatcgactgcgaaggatgagcctgatcgaggaggaggggtccaagcggatcaatatggcccacctgtgtatagtgggctctcatgctgtgaacggggtggcgaaaatccattcagacatagttaaaacgaaagtcttcaaagatttctccgaactggaaccagacaagttccagaacaaaacgaacggcattactccccggcgctggctgctcctgtgcaacccgggacttgcagaactcattgctgagaagatcggggaggactatgtgaaagatctttcccaactgaccaagctccattctttcctgggggacgacgtgttcctcagagaattagccaaggtgaagcaggagaacaagctaaaattctctcagttcctggaaaccgaatacaaagttaagataaacccctcaagtatgtttgacgtacaggtgaaaaggatccacgaatataaaagacagctgcttaactgcctacacgtgattactatgtataacaggattaagaaggatcctaagaaacttttcgttccgcggactgtcattatcggaggtaaagcagcccctggctatcatatggcaaaaatgatcataaaactgatcacatctgtagccgacgtggtcaacaacgacccaatggtgggatctaaactgaaggtgatctttctggaaaactacagggtctctctcgcagagaaagtgatccccgccacagatctgagtgaacagatctctaccgccgggacagaagccagcgggacagggaacatgaaattcatgctcaatggcgcccttaccatagggacaatggatggggcgaacgtggagatggccgaagaggccggtgaggaaaacctcttcattttcggtatgaggattgacgacgtggctgccctggataagaagggttacgaagccaaggagtactatgaggcattgccggaactaaaattggtcatagatcaaattgacaacggctttttttcacctaaacagccggatctcttcaaggatatcataaacatgttgttttaccacgatagattcaaggtctttgccgattatgaagcttatgtcaagtgccaggacaaggtttcccaactatatatgaatccgaaggcatggaatacaatggtgttgaaaaacatagctgcttctggcaagttctcttctgataggaccattaaggagtatgctcagaacatttggaacgtcgaaccttcggatctgaaaatctccctgagtaacgagtccaacaaggttaacggtaac

SEQ ID NO: 132827 - DNA, 2541 bp, Artificial Sequence
  derived and/or modified sequence
atggcaaaacctctcaccgaccaagagaagcgtcggcaaattagcattcgcggtatcgtgggagtggaaaacgtcgcggagcttaagaagtcttttaacagacacctccacttcaccctggtgaaggatagaaatgtggcgactactagggactactacttcgccctggcgcataccgtgcgggatcacctcgtgggacgctggatccggacccagcaacattactacgacaaatgtccaaaaagggtttactatcttagcctcgaattctatatgggacgcacccttcagaatactatgattaatctgggtctgcagaatgcgtgcgacgaagccatctaccagctgggactggacatagaggagcttgaagaaatcgaggaggacgccggactcggaaacggtggactgggacgactcgccgcctgttttctggattccatggcaacgctgggtctggccgcttacggatacggtattagatacgaatacggaatctttaaccagaagatccgggatggatggcaggttgaggaagctgacgactggttgcgctacggaaatccctgggagaagagccgcccggaattcatgctgccggtccatttctacggaaaggtggagcacaccaatactggcactaagtggatcgatacccaagtggttctggctctgccttacgacaccccggtgccaggctacatgaataacactgtcaatactatgcgcctgtggagcgcacgggcgccgaacgacttcaacctgcgggatttcaacgtgggcgattacattcaagcagtactcgaccgcaacctggccgagaacatctccagggtgctctacccaaacgacaactttttcgagggaaaagaactccggcttaagcaggaatacttcgtggtggcggccaccctccaggacatcattagaagatttaaggcgtcgaagttcggatcgacccgcggcgccggcaccgtctttgacgctttcccggatcaggtcgcgatccagctgaacgatactcatccagcgctggcaattccggagttgatgcggatcttcgtcgatatcgaaaagttgccgtggtccaaggcttgggaattgacccaaaagacgttcgcatacactaaccacaccgtgctgcctgaagctctggagcgatggccggtagaccttgtggaaaagctcctgcctcggcacctcgagatcatctacgaaatcaatcaaaaacacctggataggatagtcgccctgttccccaaggacgtcgatcgcttgaggcgcatgtcgctgatcgaagaagaaggatcgaagcgcatcaacatggctcatttgtgtatcgtcgggtcacatgcggtcaatggggtggctaaaatccacagtgacatcgtcaaaacgaaggtgtttaaggatttctcagagctggagcccgataagttccagaataagaccaacggcatcaccccgcgccgttggctgttgctgtgcaacccaggactggcggagctcatcgcggagaaaatcggcgaagattacgtgaaagaccttagtcagctgaccaagctgcacagctttcttggcgatgacgttttcctccgggaacttgcaaaagtgaaacaagaaaacaagctgaagttttcccagttccttgaaaccgaatacaaggtgaagattaacccttcaagcatgttcgacgtgcaggtgaaacggatccacgagtacaaacgccagctcctgaactgtctccatgtcatcactatgtacaatcggatcaagaaggacccgaagaagctgtttgtcccgaggactgtgattatcggcggaaaagccgcgccgggataccacatggccaaaatgatcattaagctgatcacttccgtggccgacgtcgtgaataacgatcctatggtcggctcgaaactcaaggtcatctttctggagaactatagagtgtccctggctgaaaaggtgataccggctaccgatctctcagagcagatctctactgccgggaccgaggcttccggcactggaaatatgaaattcatgctgaatggtgcactcactatcggaacgatggatggcgcaaatgtggaaatggccgaggaggcgggtgaagaaaacctgtttatcttcggtatgcgcattgacgatgtggcagcactggacaagaaaggttacgaagcgaaggaatactacgaggccctccctgaactgaagctggtgatcgaccaaatcgataatggattcttctcgccgaaacagcctgatctgttcaaagacatcatcaacatgctgttctaccacgacagattcaaggtgttcgcagactacgaggcctatgtgaagtgccaagataaggtgtcgcagctttacatgaacccaaaagcctggaatactatggtgttgaagaatatcgccgcttcagggaaattctcttcggatagaactataaaggaatacgcccaaaacatctggaatgtggagccatcggacttgaagatctctctctccaacgagtcgaacaaggtgaatggaaac

SEQ ID NO: 132828 - DNA, 2541 bp, Artificial Sequence
  derived and/or modified sequence
atggctaaaccattgaccgatcaggaaaaacggcggcaaatttctataagaggaattgttggtgtcgaaaacgttgccgaactgaaaaagagcttcaaccgccatctccatttcacgcttgtaaaagatcgtaacgtggctaccaccagggattactattttgctctcgctcacacagtgagagatcacctagtgggacgttggattcggacgcagcagcattattatgataaatgtcccaagcgagtttactacctatctctcgagttctacatgggccggactctgcagaataccatgatcaatctgggcctccagaatgcatgtgacgaggcgatctaccagctcggtctggacatagaggagttggaagagattgaagaggacgcgggcctgggcaatggcgggctaggtagactagccgcctgttttcttgactcaatggccacactgggcctagccgcctacggctacgggatcaggtatgagtatggcatttttaaccagaagattcgcgatggctggcaggtggaagaagcggatgattggctccgctatggcaatccttgggagaagagcaggccagagtttatgcttcctgtgcacttttatggcaaggtcgagcacaccaatacaggaactaaatggatcgacactcaggtagtgcttgccctcccgtacgacaccccagttccaggttacatgaacaatactgttaacactatgagattgtggagcgcccgcgctcccaatgatttcaacctgcgggatttcaacgtcggcgactacatccaggccgtcctagataggaatttggcagaaaacatttcccgggtgctgtacccgaatgataatttctttgaaggtaaggagctgaggcttaagcaggagtatttcgtcgtggctgccaccttgcaggatatcattaggcggtttaaagctagcaagttcgggtcaaccagaggggccgggacggttttcgatgcattcccagaccaggtcgcgattcaactgaacgatactcaccctgctttggctatcccggagctgatgcggatcttcgtcgacatcgagaagctcccttggagtaaggcttgggaactgacgcagaaaacattcgcttataccaatcataccgtgctcccggaagctttggaaagatggccagtggacttagttgaaaaactactgccccggcatttggagattatctatgaaatcaaccagaagcatctggatcgcattgtcgcgctgtttccgaaggacgttgatcgtctgcgtcggatgtcccttattgaagaggagggaagtaaacgtattaatatggctcacttatgcatagtgggatcccacgccgtgaacggggtggccaagatccactcagatattgtgaagactaaggtgttcaaagatttttctgaactggagccagataagtttcaaaacaagacgaacggtattacgccccggagatggttgttgctttgcaaccctgggctcgctgagctgatcgccgagaagatcggagaagattacgtaaaagatctatcccagctcacaaagctccacagtttcctgggggatgacgtattcttgcgggaattggctaaagttaagcaggagaataagctgaagttctcccagttccttgaaaccgagtacaaggtgaaaataaacccgtcttcaatgttcgacgttcaggtcaagagaatccacgagtacaaacggcagcttctcaactgcttgcacgttatcaccatgtataaccgcatcaagaaggacccaaaaaaactgtttgtgccgagaaccgtgattatcggcggaaaggcggcccccggttaccatatggctaagatgattataaaattgatcaccagtgtcgctgatgtcgtgaataatgaccctatggtaggcagcaagctgaaggtgatattcctggagaattatcgcgtctcactggccgagaaagtcatccccgcgacggatctgtctgagcagataagcacagccggcaccgaagcctcaggtaccggcaacatgaaattcatgcttaatggtgctttgacaataggcactatggatggggcgaacgtagaaatggctgaagaagcaggagaagagaatctcttcatttttgggatgcggatcgacgacgtggccgctctggacaagaagggctatgaggccaaggagtactacgaggccttgcctgagctcaagctggtgattgaccagatcgataacgggtttttcagtccaaaacagcctgatctttttaaagacataatcaacatgctcttctatcacgaccgcttcaaagtctttgcagattacgaggcctatgtgaaatgccaggacaaggtgagccagctttatatgaaccccaaggcttggaacacaatggtcctgaaaaacatcgctgctagcgggaaattctctagcgacaggacgatcaaggagtatgcccagaacatctggaacgtggaaccaagcgatttgaagatctcattatctaatgaatccaataaagtgaacggcaac

SEQ ID NO: 132829 - DNA, 2541 bp, Artificial Sequence
  derived and/or modified sequence
atggcaaagccactcaccgatcaggaaaagcggcgccagattagcattagaggtatcgtgggagtcgaaaatgtggcagaactgaagaaaagtttcaataggcaccttcattttacgctggtgaaggatagaaatgtggcaactaccagagattactacttcgcactcgcacatactgtccgagatcatcttgtgggaaggtggatcaggacgcagcaacattactacgacaagtgccccaagcgggtgtactacctctcactggagttttacatgggcagaacccttcaaaacactatgattaacttggggctccaaaatgcctgcgatgaggcaatataccaactgggcttggacattgaagagctcgaagaaattgaagaagatgcaggactcggaaacgggggccttggtcgacttgccgcgtgttttctggattcgatggccaccttgggactggcggcttatggttacgggatccggtacgaatatgggatctttaaccaaaagatccgcgacggatggcaagtggaagaagcagacgattggctccgttacggaaatccgtgggaaaaatcacggcccgaattcatgctccctgtccacttctacggtaaagtcgaacataccaatactggaaccaagtggatagatacgcaagtggtccttgcattgccttacgacacgcctgtgccgggatacatgaacaacaccgtgaatacgatgcgactctggtcggctcgtgctccgaacgactttaatctcagggacttcaacgtgggagactacatacaggccgtgttggatagaaatcttgccgaaaacatctcgcgtgtgctttatccaaatgacaactttttcgaggggaaagagctgcgactgaaacaggaatacttcgtggtcgcggcaaccctgcaagacatcattcggaggttcaaggcgagcaaattcggttccactagaggcgcaggtaccgtttttgatgccttcccagatcaagtggcaattcaactgaacgatacccaccctgccctcgcaattcctgaacttatgaggatttttgtggatattgagaaattgccttggtccaaggcctgggaattgactcaaaagacctttgcctacactaatcacaccgtgcttccagaggcgcttgagaggtggccagtggatctcgtcgagaaactcctcccaaggcacctggagattatctacgagattaatcagaagcatctggaccgtattgtggccctctttccaaaggatgtggacagacttcggaggatgtcattgattgaagaggagggatccaagaggataaacatggcgcacctttgcatcgtcggatcgcatgcagtcaacggcgtcgctaagattcatagcgatatcgtcaaaaccaaagtctttaaggatttttcggaactcgagccggacaaatttcagaacaagaccaacggaattactcctcggaggtggctcctgctgtgtaatccgggtttggctgaactgattgccgaaaagatcggtgaagattacgttaaggatctgagccaacttaccaagctccattcatttcttggagatgacgtgtttctccgagaacttgcaaaggtgaagcaagagaacaagctgaagttttcacaattccttgagactgaatacaaagtcaagattaaccctagttcgatgtttgatgtgcaagtgaagcggatccatgagtataagcggcagctgcttaattgtctgcatgtcatcaccatgtacaaccgcatcaagaaagaccccaagaagttgtttgtgccacggactgtgattatcggagggaaagcagcgccaggttaccacatggccaagatgatcataaagctgataactagcgtggccgacgtggtgaacaatgatccgatggtgggcagcaagctgaaggtcatatttctcgagaactacagggtgtccctggcagaaaaagtcatccctgcaactgatcttagcgagcagatatctactgccggaacggaggcatcgggtaccgggaatatgaagtttatgcttaatggagcgctgacgattgggaccatggatggggcaaacgtggaaatggccgaagaagcgggtgaagaaaatctcttcatcttcggcatgagaattgatgatgtggcagccctggacaaaaagggatacgaagcaaaggaatactatgaagcattgccagaactgaaactggtgatagatcaaattgataacggctttttcagccctaagcagcctgacctgtttaaagacattatcaacatgctcttttaccatgatcgcttcaaggtgttcgcagattacgaggcgtacgtgaagtgtcaagataaggtatcgcaactgtacatgaacccaaaggcttggaacactatggtccttaagaatatcgcagcttcaggaaagttttccagcgaccgcactattaaggagtacgctcagaacatttggaacgtggagccgagcgatctcaagattagcctttccaacgagtccaataaagtcaacggtaac

SEQ ID NO: 132830 - DNA, 2541 bp, Artificial Sequence
  derived and/or modified sequence
atggcaaagccgctaacggatcaggaaaaacgccgtcaaattagcatccgtgggatagtgggcgtagagaatgtggcagagctcaaaaaatctttcaatcgacatctccacttcaccctggttaaggatcgcaatgtcgccaccacgcgggactattattttgccctggcccacactgtgcgggaccaccttgtcggccgttggatcaggacccagcagcactactacgacaaatgtccaaagagggtgtactatctctcgctggaattctatatgggcagaactctgcagaataccatgattaatttaggactgcaaaacgcctgtgatgaggctatctaccaactgggcctcgatatagaggagctggaagagattgaagaagacgctggattggggaacgggggccttggcaggcttgcagcctgttttctcgattctatggctacgctgggtctagccgcatacggctatggaataaggtacgaatatggaatcttcaaccagaagatacgcgatgggtggcaggtggaggaagcagatgattggctgcgctatggaaacccttgggagaagtcccgaccagaatttatgctgccagtgcacttttatggtaaggtggagcacacaaacacaggcacaaaatggatcgatacccaggtggtgctcgcattaccatatgatactccagttccagggtatatgaacaataccgtgaacactatgcggctctggagcgcgagggcaccgaatgactttaacttgagggatttcaacgtgggggactacatccaggcagtgcttgacagaaatctcgccgagaacatcagtcgagtactatatcctaacgataatttctttgaaggcaaggaactgagactcaaacaagaatactttgtagttgctgcgacactgcaggacatcattcgccgattcaaagcttccaaattcggttctacgcgtggagccggtaccgtgtttgacgcattccccgatcaagtggcaattcagctgaacgacacacaccccgcactggcaatccccgagctgatgcggatttttgtggacattgagaaactcccatggtcaaaagcctgggagctgacgcagaagaccttcgcttacactaaccatactgtcctgccagaagcccttgagcgctggcccgtggatctggtcgagaaattactgccacgccatctggaaattatctacgaaattaatcaaaagcacctggatcgcattgttgcgctgtttccaaaggacgtggatcgcttgcgcagaatgagcctcatcgaggaagaaggaagcaagagaataaatatggcccacctttgtatcgtaggatctcacgcggttaatggtgtagccaaaattcatagcgacatcgtgaaaactaaggtgttcaaagacttcagcgaattggaaccggataagtttcaaaacaagaccaatggaattacccctcgaaggtggttgctgctctgcaatcccgggcttgcagagcttatcgctgagaaaatcggtgaggactacgtgaaagatctgtctcagctgacaaagttgcatagttttttgggcgatgacgtcttcttacgggaactggcaaaggttaaacaggagaataagttgaaattctcacagttcctggaaacggagtacaaggtaaagatcaacccatcgtccatgtttgatgtgcaggtgaaaagaatacacgagtacaagaggcaactgttgaactgcctgcacgtgatcactatgtacaataggatcaagaaggaccctaaaaagttgttcgttccgcgaactgttatcatcggaggtaaggctgcaccagggtaccacatggctaagatgatcatcaaactaataacctccgtagccgacgtggtgaacaacgatccaatggtggggagcaaattgaaagttatctttctggaaaactatcgtgtgagcctcgcagaaaaggtgattcccgctactgatttgtctgagcagatctctaccgctggaactgaggcctctggcaccggcaacatgaagttcatgctgaatggcgccctcaccatcggcacaatggacggggcgaacgttgagatggcagaggaagcaggcgaggagaacctgtttattttcggcatgcgtatcgatgatgtggctgccctagacaaaaaaggctatgaagccaaggagtattacgaagccctgcccgagctgaaacttgtgatcgaccagattgataatggcttcttctccccgaagcaacccgatctgttcaaagacattattaatatgctgttttaccacgacagattcaaagtttttgccgactatgaggcctatgtgaagtgccaggacaaagtcagtcagctgtatatgaaccccaaggcctggaatacaatggttctgaagaacatcgccgcctcaggaaagttctctagtgatcggactataaaggaatatgcccagaatatttggaacgtggaacctagcgacctgaagatcagcctgagcaatgagtccaataaagttaatgggaac

SEQ ID NO: 132831 - DNA, 2541 bp, Artificial Sequence
  derived and/or modified sequence
atggccaagcctctgactgaccaagaaaagcgacggcaaatttccatccgcggaatcgtcggtgtggagaacgtcgccgaattgaaaaagtcgttcaaccggcacttgcacttcaccctcgtgaaggacagaaatgtggcgaccacccgcgactactacttcgctttggcccacaccgtgcgggaccatctcgttgggcggtggatccggactcagcagcattactatgacaagtgcccaaagagagtctactacctctccctggagttttacatgggcagaaccttgcaaaacacgatgatcaacctcggtctgcaaaacgcgtgtgatgaagcgatttaccagctgggccttgatattgaggagctggaggagatcgaggaggatgccgggctgggaaacgggggactgggacgtcttgccgcgtgtttcctcgactcaatggcgacgctgggattggcggcatatgggtacggaatcagatacgaatacggtatcttcaaccaaaagatacgagatggatggcaggtggaagaagcggacgattggcttagatacgggaacccgtgggagaagtctcgacctgagttcatgcttccggtgcacttttacggaaaggtcgaacataccaataccggaactaaatggattgatactcaagtggtgttggcgctcccgtacgatactccagtgccgggctacatgaacaacaccgtgaacaccatgagactgtggtccgctcgcgccccgaacgatttcaatctgagagacttcaacgtgggagactacatccaagccgtgctcgacagaaatctggcagagaatatctcaagggtcctttaccccaacgataactttttcgagggaaaggaactgaggctgaaacaggagtacttcgtggtggctgcgactctgcaagacatcatacgccgattcaaagcgagcaaatttggctccactagaggtgcgggaaccgtgttcgacgcattcccggaccaggtggctattcagctgaacgacacccaccctgcactggcaatcccggaactgatgaggatctttgtggacatcgaaaagctcccgtggagcaaggcgtgggagttgacgcagaaaacctttgcttataccaatcatactgtgctcccagaagctctggagcgctggccagtggatcttgtggaaaagctcctccctcgccacttggagatcatctacgagatcaaccagaaacaccttgatcgcatcgtggctctgttccctaaggacgtcgatcgcctccgcagaatgtcccttatcgaagaagagggatcaaaacgcatcaatatggcgcacctctgcatcgtgggttcacacgccgtcaatggcgtcgcgaagatacattcggacatcgtcaaaacgaaggtctttaaggatttttccgaattggaaccggataagttccagaacaaaaccaatggaattactcctcgccgctggctgctgctctgcaatccgggactggccgaattgatcgctgaaaagatcggggaggactacgtcaaggatcttagccaactgaccaagctccactcgttcctcggcgatgacgttttcctgcgtgaactggccaaggtgaagcaggagaataagttgaagttttcacagtttttggaaaccgaatacaaggtcaagatcaatccaagcagcatgtttgatgtccaggttaagagaattcacgagtacaagcggcaacttctgaactgtctgcatgtcattactatgtacaaccggattaagaaagacccgaagaaactgttcgtcccgcgaactgtgatcatcgggggaaaggccgctccgggttatcatatggcaaagatgatcatcaaactgatcacctccgtggcagatgtcgtgaacaatgatccaatggtgggatcaaagctgaaggtcatttttctcgagaactaccgggtgagcctggccgaaaaggtgatccctgccaccgacctctcggaacagatctcgacggccggcactgaagcctcgggaactggaaacatgaagttcatgctgaacggagctcttactatcggcactatggatggcgccaacgtcgaaatggccgaagaggccggagaggaaaatctgttcatctttggtatgagaatcgacgacgtggctgcgttggacaagaaaggatacgaggccaaagaatactacgaggctctgcccgagctgaagctcgtcatcgaccaaatcgacaacggcttcttctcgccaaaacagccagacctgttcaaagacatcatcaacatgctcttttaccacgatcggttcaaagtgttcgcagactacgaagcatacgttaagtgccaagataaagtctctcagctgtatatgaatcctaaagcctggaatactatggtgttgaaaaacatcgctgcctcagggaagttctccagcgatcggactatcaaagaatacgcgcagaatatctggaacgttgagccgtccgatctgaagatctcgctgtcgaacgaatccaacaaggtgaatgggaac

SEQ ID NO: 132832 - DNA, 2541 bp, Artificial Sequence
  derived and/or modified sequence
atggcaaagccactgactgaccaggagaagcggaggcaaatctcaatccgcggaatcgtcggagtggagaacgtcgcggagctcaagaagtccttcaatagacacctccacttcaccctcgtgaaagatcggaatgtcgccaccactcgggattactacttcgcgcttgctcacaccgttagggatcatctggtcggacggtggatcaggacccaacaacactattacgacaaatgcccgaaacgcgtgtactacctgtcactggaattctatatgggacgcactttgcagaacactatgatcaacctgggacttcagaatgcttgtgatgaagccatctatcagctgggactggacatcgaggaactggaggaaatcgaagaggacgctggcctcggtaatggaggtttgggtcggctggcggcctgcttcctggactccatggcaaccctgggactggcagcgtacggatacggaattcggtacgaatatggaatcttcaatcagaaaatccgagacggatggcaagtcgaggaggccgatgattggctccgctacggcaacccttgggagaagtcaagacctgagttcatgctcccggtgcacttctatggcaaggtggagcatacgaacaccggaactaaatggattgacacccaagtggtgttggccctcccttacgataccccggtgccggggtacatgaacaacactgtgaatactatgcgcctgtggtcggcaagggcaccgaacgacttcaacctgagagatttcaacgtcggcgactacatccaggccgtgctcgaccgcaacctggcagagaacatttcccgggtgctttacccgaacgacaatttcttcgaaggaaaggagttgcgccttaagcaggaatacttcgtggtcgcggcaactcttcaagacatcatccggagattcaaggcctcgaagttcggaagcactcggggagcgggcaccgtctttgacgcatttccggatcaggttgcaatccaacttaacgatacccacccagccttggcaatccctgaactgatgcgaatcttcgtcgacatcgaaaaactgccttggtcaaaggcttgggaactgacccagaaaaccttcgcgtacaccaatcataccgttctgccggaagccctcgaaaggtggccggtggacctggtggagaagctgctcccgcgccacctggagatcatctacgagattaatcagaagcatctggacagaatcgtggccctgtttccaaaggacgtggaccgcctgaggcggatgtcactgatcgaagaggaaggttcgaaacgcatcaacatggctcatttgtgcatcgtcggaagccacgctgtcaatggagtggctaagattcattcagacatcgtgaaaacgaaggtgtttaaggacttctccgagctggagccagacaaattccagaacaaaactaatggcatcaccccgaggagatggcttctgctctgcaatccgggcctggcggaactgattgccgagaaaatcggggaagattatgtgaaggacctgtcacagcttactaagctgcattccttcctgggcgatgatgtgttcctcagagaactcgcgaaagtcaaacaggagaataaactcaagttctcccagttcctggaaaccgaatacaaggtgaaaatcaacccgtcctccatgttcgacgtccaagtgaagcgcattcatgaatacaaacggcagctgctcaactgcctgcacgtcattaccatgtacaaccgcatcaagaaggatccgaagaagttgttcgtgccacgcaccgtcattatcggaggaaaggcggctccgggctaccatatggcaaagatgatcatcaagctcatcacctcggttgcagatgtcgtgaacaatgacccaatggtgggatccaaattgaaggtgatcttcctggaaaactacagagtgagcctggcggaaaaagtcatccctgccacggacctttcagaacagatctcgaccgctggaactgaagctagtggaacgggaaacatgaagttcatgctcaatggagctctcaccatcgggactatggatggcgccaacgtggagatggcggaggaagcgggagaagagaatctgttcatctttgggatgagaattgacgacgtggcagcgctcgacaagaagggatacgaagccaaagagtattacgaggcactcccagagctgaaactcgtcatcgatcaaattgacaacggattcttctcgccgaaacagccagacctgttcaaggacatcattaacatgctgttttaccacgaccgctttaaggtgttcgccgactacgaggcgtacgtgaagtgccaggacaaagtgtcgcaactctacatgaacccgaaggcatggaatactatggtgctgaagaacatcgctgcaagcgggaagttctcgtccgacagaactatcaaagagtatgcgcagaacatctggaatgtggagccgtccgatctgaagatcagcctgagcaatgagtccaataaggtgaacggcaac

SEQ ID NO: 132833 - DNA, 2541 bp, Artificial Sequence
  derived and/or modified sequence
atggctaagccactcaccgaccaagagaagagacgacagatcagcatccggggaatcgtcggagttgagaacgtagctgagctgaaaaagtccttcaaccgacacctgcacttcacactggtgaaagataggaacgtagctaccactagggattattacttcgctcttgcacacactgtgagggaccatctggtgggcagatggatccgcacccagcagcactattacgataagtgtcccaagagggtgtactacctgtctctcgaattttacatggggcgaacactccaaaacactatgattaatctgggtctgcagaatgcgtgcgatgaagccatttaccagctcggattggatattgaggagctggaggagattgaggaagatgctggtctggggaacgggggcctgggtcggctggccgcgtgcttcctggattcgatggcaactcttggcctcgccgcgtacgggtatggcatacgctatgaatatgggatctttaatcagaagatccgcgacggctggcaggtggaagaggcggatgattggcttaggtacggaaacccctgggaaaagagccgtccagagtttatgctacccgtacacttctacgggaaagtcgaacacactaacactggcactaagtggattgatactcaagtggttctcgccctaccttatgacacccctgtgccgggatacatgaataacaccgttaacaccatgcgcttgtggtctgcaagagcccccaatgactttaatttgcgcgactttaatgttggtgattatatccaggcggtcctcgaccgtaatctggctgaaaatattagccgcgtgctttaccccaatgacaactttttcgaaggtaaggaactgaggctgaagcaagaatatttcgtggtcgcagcaactctgcaggatatcatccgccgtttcaaagcctcgaagtttgggtcgacacggggggctggaaccgtgttcgatgcttttcctgatcaggtggccattcagcttaatgacacacatccagccttagccattccagagttgatgcggatcttcgtcgacatcgagaagctgccatggtccaaggcgtgggaactgacacaaaaaacgttcgcatacacaaaccatactgtccttcccgaggccttggagcggtggcctgtggatttagtggaaaaactgctgcccaggcatctggaaataatctatgagattaaccagaaacacctcgaccgcatcgtcgcgctgtttcccaaggatgtagaccggctccgacggatgtctctaattgaagaagagggaagcaaaagaattaacatggcacatttgtgcatagtgggaagccatgcggtaaacggagtagctaagatccattccgatatcgtcaagaccaaagtgtttaaggatttcagcgaactggagcccgataagttccaaaataagactaatggcattactccgcgacgctggctgctcttatgcaatcctgggttggctgaactgatagcagaaaagattggtgaggactacgttaaagacctgagtcaactgaccaagttgcatagtttcctgggagatgacgtttttctccgagaattggctaaagttaaacaagagaacaaactgaagttctcacagttcctggagactgagtataaggtgaaaattaatccttcttcaatgttcgacgtgcaagtcaaacggattcatgaatacaagcgccagctcttaaactgcctacatgtgatcactatgtacaataggatcaaaaaggatcctaagaaacttttcgtgccacggactgtcattattgggggcaaggcagccccggggtaccatatggctaaaatgatcattaaactcatcacaagcgtggcagatgtcgtgaacaacgatcccatggtaggctccaaactgaaagtgatcttcctcgaaaattacagagtctccttggccgaaaaagtcatccccgcgaccgatttgagtgagcagattagtactgcgggcacagaggcgtctgggacaggcaatatgaaattcatgctcaatggagccctgaccattggtaccatggatggggccaacgtagagatggcggaagaagctggcgaggagaatctgttcatttttggcatgaggatcgacgacgtggcggctctggacaagaagggatatgaggccaaggaatattatgaagccttgcctgagctgaaattagtcatcgaccagattgataacggattctttagtccgaaacagcccgacctgtttaaggacataattaacatgctcttttaccacgacaggttcaaggtgtttgcagactacgaagcgtacgttaaatgtcaggacaaggtcagccagttgtacatgaatccaaaggcttggaacaccatggtgctcaaaaacatcgccgcatccgggaaatttagctctgatcgcactattaaagagtacgctcagaatatctggaatgtggagccctctgacctaaagatctccttgagcaacgagagcaacaaggttaatgggaat

SEQ ID NO: 132834 - DNA, 2541 bp, Artificial Sequence
  derived and/or modified sequence
atggcgaagccgctgacggatcaggagaagcgacgccagatctccatccgcggaatagttggcgtggaaaacgtggcagagcttaagaagtccttcaacaggcacctgcactttacgcttgtcaaggatcggaacgttgctaccacccgggactattacttcgcgctggcgcacaccgtgcgggaccacctggttgggcgctggatcaggacccaacagcattactacgacaaatgccctaagcgcgtgtactacctgagcctcgagttctacatgggaagaacgttgcaaaacaccatgattaatctgggtctgcagaacgcgtgtgatgaggccatctaccagcttggactggacatcgaagaactcgaggaaatcgaggaagatgctgggttgggaaatggcggcctcggacgcttggcagcttgcttcctggattcgatggcaactttgggactcgccgcctacggatacggcatccggtacgagtatggaatcttcaaccagaagattcgggacggctggcaggtggaggaggctgatgattggctgcgatacggcaatccctgggaaaagagccgaccagagttcatgctgcctgtacacttttacggaaaagtggaacacacgaacaccggcaccaaatggatcgatacccaggtggtgttggctctgccatacgacactcctgtgcccggttacatgaataacaccgtgaacactatgaggctgtggagcgccagagcgccgaacgacttcaatctgagagacttcaatgtgggggattacatccaggccgtactggaccgcaacctcgcagaaaacatcagtagggtcctctacccgaatgacaacttcttcgaaggcaaggagctgagattgaagcaagaatacttcgtcgtcgccgcaaccctccaggacatcatacggagattcaaagccagcaagttcggctcgacccgcggagccggaaccgtctttgatgcattcccagaccaagtggccatccagctgaacgacacgcaccctgccctcgccatcccggaactgatgcggatatttgtcgatatcgaaaagctgccctggtcgaaggcgtgggagctgacccaaaagactttcgcttacactaaccacaccgtgctcccggaggcgctcgaaagatggccggtggatctggtggagaagctgcttccgcgccacctggaaatcatctatgaaatcaaccagaagcacctcgacagaatcgtggcactgttcccgaaagatgtggatagactccggcgtatgtcattgattgaggaggagggtagcaaacgcatcaacatggcccacctgtgcattgtgggctcacatgccgtgaacggagttgctaagatccatagcgatatcgttaagactaaggtctttaaggacttctccgagctggagccggacaaatttcagaacaagactaatgggatcactccgaggcggtggctgcttctctgtaatccaggtctggccgagctgattgccgaaaagataggcgaggactacgtgaaggatttgagccagctcaccaaactccattcgtttctgggagacgacgtctttttgcgcgaattggcgaaggtcaaacaggagaataagctgaagttttcccagttcctggaaaccgaatacaaggtcaagattaatccgtcatccatgttcgacgtgcaagtgaagcgcattcacgaatacaagcgacagcttttgaactgtctccatgtaattaccatgtacaaccgcattaagaaggaccccaaaaaactcttcgtccctcggaccgtgatcatcggaggcaaagccgccccaggctaccacatggcaaagatgatcatcaagctcatcacttcagtggcggacgtggtgaataacgatccgatggtgggatccaagctgaaagtgatctttctggagaattacagagtttctttggcggagaaggtgatccctgccactgacctcagcgaacaaatctctaccgctggaacggaggcctcgggaaccggaaatatgaagtttatgctcaatggagctctgactatcggaactatggacggagcgaacgtcgaaatggcggaagaagcaggagaagagaatctgtttatcttcggcatgagaatcgacgacgtggctgccctggacaaaaagggttacgaagccaaagagtactatgaggcgctccccgaactcaagctggtgatcgatcaaatcgacaatggattcttctccccaaagcagccggatttgttcaaggatatcatcaacatgctgttctatcatgatcggtttaaggtgttcgcagactacgaggcctacgtcaagtgtcaagataaggtgtcccaactgtacatgaatcctaaagcctggaacaccatggtgctgaagaacattgctgcgagcggaaaattctcctcggataggactatcaaagaatacgcccagaatatctggaacgtcgagccgtccgacttgaagatctcactgagcaacgaatcgaataaggtgaatgggaac

SEQ ID NO: 132835 - DNA, 2541 bp, Artificial Sequence
  derived and/or modified sequence
atggccaagcctctaactgaccaagagaagcgaagacagatctcaatcagagggatcgtgggcgtcgagaatgttgctgagctcaaaaaatccttcaatagacatctgcactttactctggtgaaggaccgcaatgttgccacaacccgcgactattattttgctctcgcacacaccgtccgcgaccacttggtgggacggtggattcgcacccaacagcactactacgacaagtgtccgaagcgtgtgtattacctctcactggaattttacatgggacgcaccctgcagaatacaatgatcaacctggggctgcagaacgcctgcgacgaagcaatatatcagctgggtctcgacattgaggaattggaggaaattgaagaggacgcagggttggggaatgggggcctggggcgtctggcagcctgtttcctggacagtatggctacgctgggattggccgcgtacggatacgggattcggtacgagtacgggatatttaatcagaaaatcagagacggatggcaagttgaagaggctgacgactggctgaggtatgggaatccctgggagaagtcgcggcctgaattcatgcttcccgtacacttctacgggaaagtcgagcacacaaataccgggaccaagtggatcgatacccaggtagtgttggccctcccgtatgacacgccggtgcccggctatatgaataacaccgtcaatacgatgcggctgtggtccgcaagggctcccaacgattttaacttgcgcgacttcaacgttggcgactatatacaagccgtgctggacagaaatctagccgaaaacatctccagagtattgtacccgaacgacaactttttcgaggggaaagaactgagactcaagcaggaatacttcgttgttgcggcgacactgcaggatattatccgacggtttaaggcgtctaaattcgggagcacccgcggagccggaactgtgtttgatgccttccccgaccaggtggctattcaactgaacgacacgcacccagctctggctatccccgagctgatgagaattttcgtagatatcgaaaagctcccatggagcaaagcctgggagctgactcaaaaaactttcgcctacacaaaccataccgttctgccagaagctctggaaaggtggccggtagatttggtggagaaattgctgcctcgccacctggagataatttatgagatcaatcaaaaacatctggatcggatagtcgcccttttccccaaggacgttgataggttgaggcgcatgagcctgatcgaggaagaggggtccaagagaataaatatggctcatttatgcatagtggggagtcatgctgtcaatggtgtggctaagattcattctgacatcgtaaagacaaaggtgtttaaggacttctctgaattggagccagacaagttccagaataagaccaacggaattacaccccgcaggtggctcctgctgtgtaatccagggttggccgaactgatcgctgaaaaaatcggtgaggattacgtgaaagatctgtcacagctcactaaactgcactcgtttttaggggacgacgtttttttgcgggagctggccaaggtgaagcaagaaaataagctaaagttctctcaattcctcgagacggagtacaaagtcaaaataaacccaagttctatgttcgacgtgcaggtcaagaggatccatgagtataaacgacagttgcttaattgccttcacgtgattaccatgtacaacagaataaaaaaggatccgaagaagctgtttgtgccacgcactgtgatcattggggggaaggccgctcccgggtaccatatggcaaaaatgatcataaaactcatcacctccgtggcggatgtggtcaacaacgaccccatggtcggtagtaaactgaaggtgatcttcctggaaaattatcgggtgtctcttgccgagaaagtgattcctgcaaccgacctcagcgagcagatatcaaccgcgggtacggaagcaagcggcacagggaatatgaaatttatgctgaatggtgctctcacaattggcaccatggacggcgcaaacgtggaaatggcagaagaagccggagaagagaacctgttcatcttcgggatgcggatcgatgacgtggcagccctcgacaagaaggggtatgaggcaaaagagtactatgaggccctcccagagctgaagcttgtcatagatcagatcgacaacggattcttcagcccaaaacagcctgacctttttaaagatataatcaatatgctgttctaccacgatagattcaaggtcttcgctgactacgaagcttacgtgaaatgtcaggataaggtatcccagctgtacatgaatccaaaggcttggaataccatggtgctgaagaatattgctgctagtggcaagttctcaagcgatcggaccatcaaagaatacgcacaaaatatttggaacgtggaacccagcgacctgaaaatttccctgtctaacgaatctaacaaggtgaacggcaac

SEQ ID NO: 132836 - DNA, 2541 bp, Artificial Sequence
  derived and/or modified sequence
atggctaagcccctgactgaccaggaaaagagaagacagatcagtattaggggcatagtcggagttgaaaacgtggcagaactcaagaagagcttcaacagacacctgcatttcaccctcgtgaaagacaggaacgtagccacaacacgtgactactacttcgcgctggcccatactgtgcgagatcatctggttgggcgttggatcaggacacagcagcactactacgataaatgtcccaaacgagtgtactacctgagcctcgaattctatatgggccgaacactccaaaacaccatgatcaatctgggtttgcagaacgcgtgtgacgaggccatctaccagttggggctggacattgaagaactggaggagatcgaagaggatgccggactcggaaacggagggctcgggagactcgcagcctgctttcttgactccatggccacactcgggctcgctgcatacgggtacgggatacggtacgagtatggcattttcaaccagaaaatcagggatggttggcaagtcgaggaagcggacgattggttgcggtacggaaatccgtgggaaaagagcaggcccgaattcatgttacctgtgcacttttacggaaaggtggagcatacgaataccgggacaaaatggattgacacacaagttgttctcgccctcccttatgacacccctgtgcctgggtacatgaataataccgttaacaccatgagactttggtccgccagagctcccaacgacttcaatcttagggatttcaacgttggagactatatccaggctgtcctggaccgcaatctggctgagaacatatcccgggtgctctacccaaacgacaacttctttgagggcaaggaactgaggctcaaacaggagtacttcgttgtggccgccaccttgcaggacatcattcgcagatttaaagcctcgaagttcggatcaacacgtggagccggtacagtgtttgacgcattcccagaccaggtggccattcaattaaacgacacacatccagcgctcgctatccctgaattgatgcggatcttcgttgacatagaaaagttaccgtggtcgaaggcctgggaacttacccagaagactttcgcgtatacaaatcacactgtcctgcctgaagccctcgaacggtggccagtggacctcgttgagaaactgctaccgaggcacctagagatcatttacgagataaaccagaagcatctcgatcgcattgttgcacttttcccaaaggatgtcgatagactgaggaggatgtcattgattgaggaggagggatcaaaaagaatcaatatggcacacctgtgcatcgtgggttcccatgccgtgaacggcgtggctaagattcattctgacatcgtgaagactaaagtgtttaaagacttttccgaactggagccagataagttccaaaacaagaccaacggcatcacccctcgcagatggctattgctctgtaatccaggattggccgaactaattgccgagaaaataggagaagattacgtcaaagacttatcccagctaacgaagctgcattctttcctgggagatgatgtgttcttgcgagagctcgcgaaggtgaaacaagagaacaagctcaaattcagtcagttcctggaaacagagtataaagtcaaaatcaaccccagctctatgttcgacgtgcaggtaaagcgaatccacgaatataaaagacagctgctgaattgcctgcacgtcataactatgtacaacagaattaaaaaggacccgaaaaaacttttcgtgcctaggacagtgattattggaggcaaagcagcccccggataccatatggccaagatgattataaaactcataactagtgtggccgacgtggttaataatgatcctatggttggatctaaactcaaggtaatctttctggaaaactatcgggtatctctggccgaaaaggtgattcccgccaccgacttgtctgaacagatcagcacggcgggcacggaggccagcggaaccgggaacatgaaattcatgctcaacggcgccctgaccattggcactatggatggagccaacgttgagatggccgaggaagcgggagaagaaaacctgtttatatttggtatgcgaatcgatgatgtggccgctttggacaagaagggctacgaggccaaggagtattatgaggctctgccggaactcaaacttgtgattgatcagatagacaacggtttcttcagcccaaaacaaccagacctgtttaaagacattatcaacatgctcttttatcatgatcgattcaaggtttttgcagactatgaagcatacgtcaagtgtcaagacaaagtttcgcagttatatatgaatcctaaagcttggaacaccatggtactgaaaaatatcgctgcctctggaaaattctcaagcgacagaaccattaaagaatacgcacagaacatatggaatgtggagccctctgatctcaagatctccctgtctaacgaatcaaacaaggtcaacggcaat

SEQ ID NO: 132837 - DNA, 2541 bp, Artificial Sequence
  derived and/or modified sequence
atggccaagccactgactgaccaggaaaagcgcagacagatctcgatccggggaatcgtcggcgtggaaaatgttgcagaactgaagaagtccttcaatcgccacttgcactttaccctggtgaaggatagaaacgtcgcgaccactcgcgattactattttgccttggctcacactgtcagggaccacctcgtcggacgctggatacgcacccagcagcactactacgacaagtgcccaaagagagtgtactacctgagcctcgagttttacatggggcgcaccctccagaacaccatgatcaatctcgggctccagaatgcgtgcgacgaggctatctaccagctgggactcgacatcgaggagctcgaggaaatcgaagaggatgccggactgggcaacggaggactgggacggttggcagcatgttttctggatagcatggctaccctgggcctcgctgcctacggctacggcatccggtacgagtacgggattttcaaccagaagatccgggacggatggcaagtggaggaagccgatgactggctgcgctatggaaacccctgggaaaagagtcgccctgagttcatgctgcccgtgcacttctacggaaaagtggagcacactaataccggcactaaatggatcgacactcaagtggtcctcgcgctgccgtacgacactcccgttccgggatacatgaataacactgtgaataccatgcggctgtggtcggcgcgcgccccgaacgatttcaacctcagagatttcaacgtcggggactatatccaagcagtgctggacaggaacctcgcggagaacatctccagagtcctgtacccgaatgacaacttctttgaaggcaaggagctgcgcctgaaacaagaatacttcgtcgtggcggctaccctccaagatatcattaggcggttcaaagccagcaaattcggatcaacccggggagccggcaccgtgtttgatgcgtttccagaccaagtcgcgatccaactgaacgatactcatccggcactggctattccggaactgatgagaattttcgtcgacatcgagaagctgccgtggtccaaggcttgggaacttacccaaaaaactttcgcctataccaatcacaccgtcctgccggaagcacttgagcgctggcctgtggacctggtcgaaaagctgctgccacggcacctggaaatcatctacgaaatcaaccagaagcacctggatcgcatcgtcgccctgtttccaaaggacgtggatcgcctgcgcagaatgtcgctcatcgaagaagagggaagcaagcgcatcaatatggcgcacctttgcatcgtgggttcgcatgcagtgaacggggtggcgaaaatccattcggacatcgtcaagactaaggtgtttaaagacttctcagaactcgagccagataagttccagaacaagaccaacggaatcactccgcgccggtggcttctcctgtgcaacccgggacttgcggaactgattgcagagaagatcggagaagattatgtgaaggacctgtctcagctgaccaaactgcactccttcctgggcgacgacgttttcctgagggaactggccaaagtgaagcaagagaacaaactgaagttcagccagttcctggaaactgaatacaaagtgaaaatcaatccctcgtcaatgttcgacgtgcaggtgaagcggatccatgaatacaaacgccaactgctgaactgcctgcatgtcatcaccatgtataaccgtatcaaaaaagatcccaagaagctgtttgtgccgagaactgtcatcatcggcggcaaagcggcgccaggataccatatggcaaaaatgatcatcaagttgatcacctcagtggcagacgtggtgaataacgacccaatggtcggttcgaagctcaaagttatcttcctggagaactaccgcgtgtcactggcggagaaagtgattcctgccactgaccttagcgagcaaatttcgactgcaggaaccgaagcatcgggcactggaaacatgaaattcatgctgaacggagccctcactatcggcacgatggatggcgcaaacgtggagatggccgaggaggccggagaggagaacctgtttatctttgggatgcggattgatgacgtggcagcactggacaagaagggatacgaagcaaaggagtactacgaggcgctgccagagttgaaactcgtgattgaccagattgacaacggtttcttttccccgaaacaaccggacctgttcaaggacatcatcaatatgctgttttaccatgacagattcaaggtgttcgcggactacgaagcatacgtgaagtgccaggacaaggtgtcccaactgtatatgaacccgaaggcgtggaacactatggtgttgaaaaacatcgcagcctcagggaagttcagctcggatcggaccattaaagagtacgcgcagaacatctggaacgtcgaaccgtcagacctcaagatctccctttcgaatgaatccaacaaagtcaatgggaac

SEQ ID NO: 132838 - DNA, 2541 bp, Artificial Sequence
  derived and/or modified sequence
atggcaaaacctttaaccgatcaagaaaagcgcagacagatcagcatccgaggcatcgtgggcgtcgaaaacgtcgcagaactgaaaaagtcatttaaccgtcatctgcacttcaccctggtgaaagatcgtaatgtcgccacgacacgggactactatttcgcgctggcacacaccgtaagggaccatcttgtaggtcggtggataaggacgcaacaacactattatgacaagtgccctaagcgtgtctactatctctccctggaattctacatggggcggacactccagaataccatgatcaacctgggactccaaaacgcttgtgacgaagctatttatcaacttgggttagacatcgaggaacttgaagagatagaggaggacgctgggctcgggaacggaggcctgggacggctagccgcatgctttctggacagtatggctacattggggctagcagcatatggttacgggatccggtatgaatatgggatctttaatcaaaagattcgggacggctggcaggtggaggaggctgatgattggctgcggtatggcaacccctgggaaaagtccaggccggagtttatgttgccggtacacttctatgggaaagttgagcacacgaatactggtaccaagtggatcgacacccaggtcgtgctagctctgccctacgacacacccgtgcctgggtatatgaataatactgtcaacactatgagattatggagcgcccgtgcccccaacgacttcaaccttagggatttcaatgtaggggattatatccaagctgttctggaccggaatctggcagagaacatttctcgcgtgctctatccaaacgataactttttcgagggcaaggaacttcggctgaagcaggaatattttgtggtggcggcaaccctgcaagatattatccgacgatttaaggcaagtaagttcggttcgactagaggcgccggcaccgtgtttgatgcctttcccgatcaggtggccattcaactgaacgacacacatcccgccttggcaattcctgagctgatgcgcatattcgttgatattgagaaactcccttggagcaaggcctgggagctgacgcagaagacattcgcctatactaatcacaccgtgctgcccgaggctctggagcggtggccagtggacttggttgagaagttactgccccgccatcttgagatcatttacgagataaaccagaaacaccttgatagaattgtcgcgttgtttcccaaggacgtggataggctgcgtaggatgagcttgattgaggaggaggggagtaaaagaatcaacatggcgcacctgtgtattgtcggctcccacgccgtgaatggcgtggccaagatccacagtgacattgtgaagaccaaagtcttcaaagatttttctgagctggagccagacaagtttcagaacaagacgaatggaattactccacggcggtggctcctcctctgtaaccctggtctggcggagctgatcgcggaaaaaatcggtgaagattatgtcaaggacttgagccagctgaccaagctccattccttcctgggagatgacgtgtttcttcgagaactcgcaaaggtgaagcaagaaaacaagttaaagttctcccaatttttggagactgagtacaaggtgaaaatcaacccctcatccatgtttgatgttcaggtcaagagaatccatgaatacaagcggcaactcctgaattgtctacatgtgatcaccatgtacaataggataaaaaaggatccgaaaaagctttttgttccacggacagtcattattgggggcaaagcggcccctggctaccatatggctaagatgatcatcaaactcattacctcagtcgctgacgttgtgaataacgatccaatggtgggcagcaaactgaaggtgatttttctggaaaactatcgcgtgagccttgcggagaaagtcatccccgcgactgacctgagcgagcaaatcagtactgctggaactgaggcaagtggcaccgggaacatgaaattcatgctaaatggagctttaaccataggaaccatggatggagctaatgtggaaatggccgaggaggctggagaggagaacctgttcatctttggaatgcgaatcgacgacgtggctgcactcgacaagaagggatacgaagccaaggagtactacgaggcactgccggagctgaagttggtcatcgaccagatagacaacggcttcttttctccaaagcaacccgacctatttaaggacattattaatatgctcttctatcacgacaggtttaaagtgtttgccgactatgaggcttatgtcaagtgtcaggataaagtgtctcagttatacatgaacccaaaggcctggaataccatggtgttgaagaacatcgctgcctccggaaaattctcgtctgatagaactatcaaggagtacgcacagaacatatggaacgttgagcccagcgatttgaagatttctttgtcgaacgaaagcaataaggtgaatggcaat

SEQ ID NO: 132839 - DNA, 2541 bp, Artificial Sequence
  derived and/or modified sequence
atggcgaagccactgaccgaccaggaaaaacgcagacaaatctccatccgcgggatcgttggagtcgagaatgtggctgagctcaagaaatccttcaaccggcacctgcacttcactctggtgaaggacagaaacgtggccaccaccagagactactacttcgcgctcgcccacactgtcagggaccatctggtgggccgatggatccggacccagcaacattactacgacaaatgtcctaagcgggtgtattacctctcgctggagttttacatgggccggaccctgcagaacaccatgatcaacctgggattgcaaaatgcatgcgatgaagcgatttaccagctgggactggatatagaggaactcgaggagatcgaagaggacgcgggactgggaaacgggggcttgggacgcctggcagcgtgcttcctcgactccatggcaaccctgggtttggccgcctacgggtacggaattagatacgaatacggcatcttcaaccagaaaatcagggatggatggcaggtggaagaagcggacgactggctccggtacggcaacccatgggaaaagtctcggcccgagttcatgctgccggttcacttctacggaaaagtggaacacactaacaccggaaccaaatggatcgacactcaagtggtcctcgcgctcccgtacgacactccggttcctggttacatgaacaatacggtgaacacgatgcgcctgtggtcggcgcgcgccccgaacgacttcaacctgcgggatttcaatgtcggagattacatccaggctgtcctcgacagaaatctggcggaaaacatctcccgcgtgctctatcctaatgacaatttcttcgaaggcaaggagctgcgcctcaaacaggagtacttcgtggtggcggccacgctgcaagacatcatccgccgctttaaggcgtccaagtttggatcgaccagaggcgccgggaccgtgtttgacgcctttccggaccaagtcgcgatccagctcaacgacacccatcccgccctggcaatcccggaactgatgcgcatcttcgtggacatcgaaaagctgccctggtccaaggcctgggagttgacccaaaagacttttgcgtacaccaaccacactgtcctgcctgaagcgctggagagatggccagtcgacctcgtagaaaagctcttgccgagacacctggaaatcatctacgagattaatcaaaagcatcttgaccgcatcgtcgctctgttcccgaaggatgttgaccggctgcgccggatgtccttgatcgaggaggagggatcgaagcggatcaacatggcccatctctgcattgtgggatcacacgcggtgaacggggtcgccaagatccactcggacatcgtgaaaaccaaggtctttaaggattttagcgagctggaacctgacaagttccagaacaagaccaacggaattaccccacgccgctggctgttgctttgtaatcctggtctggccgagctgatcgcggaaaagatcggggaagattacgtgaaggacttgtcccaactgactaagctccactcgttcctgggagatgacgtgttcctgcgggaactggccaaagtgaagcaggagaataaactgaagttcagccagttcttggaaaccgaatacaaggtgaagatcaatccatcgtcgatgtttgacgtccaagtgaagcgcatccacgagtacaagcggcagctgctgaactgcctccatgtgatcaccatgtacaatagaattaagaaggatccaaagaaactgttcgtgccgcgcactgtcattatcggaggtaaggccgccccgggataccatatggcaaagatgatcatcaaactgattacttcagtggcggatgtggtgaataacgacccgatggtcgggtctaaacttaaagtcatcttcctcgagaattaccgggtgagtctcgctgagaaggtcatccccgctactgacctgagcgaacagatctcaaccgcaggaaccgaagcctctggaaccgggaatatgaagttcatgctcaacggagccttgaccatcggaaccatggacggggccaatgtggaaatggcggaagaagcaggggaagaaaacctgttcattttcggaatgagaattgacgacgtggcggcactcgacaaaaagggatacgaggccaaggaatactacgaggccctccctgagttgaaacttgtgatcgaccagatcgataacggattcttctcaccgaagcagccggacctcttcaaggacattatcaatatgctcttctaccacgacagattcaaggtgttcgctgactacgaggcatatgtgaagtgtcaggacaaagtgtcacagctctacatgaaccccaaagcctggaacacgatggtgctgaagaatatcgccgcatccggaaaattctcaagcgatcgcaccatcaaagagtacgcccaaaacatctggaacgtggagccgtccgacctgaagatttcgctctctaacgaatcgaacaaggtgaacggaaat

SEQ ID NO: 132840 - DNA, 2541 bp, Artificial Sequence
  derived and/or modified sequence
atggctaagcccttgactgaccaggaaaagcgcagacagatttccatacggggtattgttggagtggagaacgtggctgagcttaaaaaatcattcaacagacacctccacttcaccctggtgaaagacaggaatgttgccaccacacgcgactactattttgcattggctcacacggtgagagatcacctagtgggtcggtggataaggactcagcaacactactatgacaagtgtcctaagcgcgtgtattacctgagtcttgaattctatatggggaggacccttcagaatactatgattaatttgggacttcagaacgcttgtgatgaggcaatttaccaactgggtcttgatattgaagagctggaggagatcgaagaggatgctggcctgggcaacggcggcctaggccggctggccgcctgttttctggatagtatggccactttgggcctggcagcatatggatatggcatacgatacgaatacggaatcttcaatcaaaaaataagagacggatggcaggtggaagaggcagatgactggctgcgatacggtaacccttgggagaaaagtcgccctgaattcatgctccccgtccatttctacggaaaggtggaacacaccaacactgggactaagtggatcgatacccaggtggtcctggccctcccttatgacacaccagtgcctggttacatgaacaacactgtaaatactatgagactgtggtcagcgagagcgcccaatgatttcaatttgagagacttcaatgtaggggattacatacaggctgttctggaccgcaacttggccgagaatatcagccgcgtactgtacccaaatgataacttcttcgaagggaaggagctacgcctgaagcaagagtacttcgtcgtggccgctactctgcaggatattattcgaagatttaaggcgtccaagttcggtagcacacgtggcgccggtaccgtgtttgacgcttttcctgatcaagtggccattcagctgaatgacactcatcccgcgctcgccattccagagctaatgaggatctttgttgacatcgaaaagctcccctggtccaaggcctgggaactgacccaaaaaacgtttgcatacacaaaccacaccgttctgcctgaggccttggaacgctggcccgtggacctggtagagaagctgctgccacgacacctggagatcatctatgagatcaatcagaagcatctggaccggatcgttgcactcttccctaaggacgtggatcgcctgcgccggatgtcccttatcgaagaggaaggatccaagaggattaatatggcccatctatgcatcgttgggtcacacgctgtgaacggagtggccaagattcatagtgatattgtcaaaacaaaagtgtttaaggacttctccgagctggagcccgacaaattccaaaacaaaaccaatggcattaccccacgtcggtggcttttgctgtgtaacccaggtctcgccgaactaatcgccgagaagattggcgaggactacgtcaaagacctcagtcagttgacgaagctccattccttcctgggtgacgatgtcttccttcgggagctcgccaaagtgaagcaggagaataaacttaagttttctcagtttctggagacagagtacaaagtgaagataaatccttcatcaatgttcgacgtgcaagtaaaaaggattcacgaatataagaggcagttgttgaattgtttgcatgtgattactatgtataaccggatcaaaaaggaccccaagaagttgttcgtaccacggacggtcattatcggcggaaaagcagcaccagggtaccatatggccaagatgatcatcaaacttatcacatctgtggctgacgtggtcaacaatgacccaatggtgggtagcaaattaaaggtaatctttctggaaaattatcgcgttagtcttgccgagaaagtcatcccggcaaccgatcttagcgaacagatctccacagcgggcactgaagccagcgggaccggaaatatgaagtttatgttgaatggcgccctaactatcggaaccatggatggcgcgaatgtggaaatggcagaagaagccggagaggagaacctgttcatcttcggaatgcggatcgatgacgtagcggccctagacaagaagggctacgaagccaaggaatactacgaggcgttgcctgagttgaagctcgtgatcgaccagatcgacaatggcttctttagtcccaaacagccagatctgtttaaggacatcattaacatgcttttctaccatgatcgctttaaggtattcgctgactatgaagcatacgttaaatgccaggacaaggtatcccagttgtacatgaatccaaaggcgtggaataccatggtacttaagaatattgcagcctcaggaaaattctccagcgacaggactataaaggagtatgcacagaacatctggaatgtcgaaccctcagacctgaagatcagtctctctaacgaatcaaataaagtcaatggcaac

SEQ ID NO: 132841 - DNA, 2541 bp, Artificial Sequence
  derived and/or modified sequence
atggcgaaacctctgacagatcaagagaaaagacgccagatcagcattaggggcatagtaggggtcgagaatgttgcagagctcaaaaaatctttcaaccggcatctccatttcacattagtgaaagatcgtaatgttgcaaccactcgtgactactactttgctttagcacatactgttcgggaccatctggtcggacgctggattagaacacaacagcactattatgataagtgtcccaaacgagtgtattatttatcattagaattctacatgggtagaacacttcaaaacactatgataaatttgggactccagaatgcctgcgacgaagcaatctatcagctaggacttgatatcgaagaattggaggaaatcgaggaagatgcgggattgggcaatggcggacttggccgtctggcagcctgctttctagattctatggctacgttagggctggctgcttatggctatggtatcagatatgaatatggcatctttaatcaaaagatccgcgacggctggcaagtggaagaggcggacgattggcttagatatggaaacccgtgggaaaagagtcgccctgaatttatgctgcctgtgcacttttatggcaaggtcgaacatacaaacacgggcacaaagtggatcgatacacaagtcgtgctggccttaccttacgatacgcctgtcccgggctatatgaataataccgtgaatacgatgagactgtggagcgcgcgcgctccgaatgacttcaatctgcgggatttcaatgtcggtgattatattcaggccgtgctggataggaatctggccgagaatatatctcgggtgttatacccgaatgataatttttttgaggggaaagaactgagactgaaacaagagtatttcgtcgtggcggcgacattgcaagatattatccgcagattcaaggcttcaaaatttggatctacgcgaggagctggcactgtctttgacgcttttccggatcaggtcgcgatccagctcaatgatacacatcctgctctcgctattccggaactcatgcgtatttttgtggatatcgaaaaattaccgtggtctaaggcttgggaattaacccaaaagacgtttgcatatacgaatcatacagttctcccggaggcacttgaacgttggcccgtagatctggtggaaaaattactgccgagacacctggaaattatatatgagatcaatcaaaaacatctagaccgcatagttgcgctcttcccgaaagacgtcgatcggttgagacgcatgtcactgattgaggaggagggcagtaagcgcatcaacatggctcatttgtgtatcgtcgggagccatgccgtaaacggtgttgcgaagatccattctgatatagttaaaactaaagtcttcaaggatttctctgaactagaaccagataaattccaaaataaaacgaatggcatcaccccaagacgttggctacttctatgcaatccgggacttgcagaacttattgcagaaaaaataggtgaggactatgtgaaagatcttagccaacttacaaaactgcatagcttcctgggcgatgatgttttcctcagggaactcgcgaaagtgaaacaggagaacaaactgaaatttagtcaatttctcgagacagagtacaaggtcaagatcaatccgagtagcatgtttgacgtccaggtaaagagaattcatgaatataaaagacagctattaaactgtcttcatgtaatcacgatgtacaaccgcatcaaaaaagatcctaaaaaacttttcgtgcctcgcacagtgattatcggaggaaaagcagccccgggataccatatggcgaagatgattatcaagttgataacttccgttgctgatgtagtcaacaatgatccaatggttggctcaaaacttaaggtgattttccttgagaactatagagtttcgttggcggagaaagtcatacctgccaccgatctttcggaacaaatttctaccgctggaaccgaagcgtcgggcacgggaaacatgaaatttatgctgaacggagccttgacaatcggtacgatggatggcgcaaatgttgaaatggctgaagaagctggcgaagaaaatctttttatctttgggatgagaattgacgacgttgccgcacttgataaaaagggttatgaggcgaaagagtattacgaagctctgcctgaattgaaattggtcattgatcagattgataacggcttctttagtccgaagcagcctgatttgtttaaagatatcattaacatgttattttaccatgatcggtttaaagtgttcgccgattatgaggcatatgttaaatgtcaggacaaggttagccagctttatatgaaccctaaggcttggaacacaatggttctaaagaacatcgccgcttcaggcaaattttctagtgaccggaccataaaagagtatgctcaaaacatttggaatgttgaaccatctgatcttaagatctctttaagcaatgaaagcaataaagttaatggaaac

SEQ ID NO: 132842 - DNA, 2541 bp, Artificial Sequence
  derived and/or modified sequence
atggctaaacctcttactgatcaagaaaaaagaagacaaattagtataagaggtattgtgggggtcgaaaatgttgcagaattaaaaaaatcttttaatagacatttgcattttactttagttaaagatagaaatgtcgccacaacacgtgattattattttgcattagctcatacagttcgtgatcatttagttggtaggtggattagaacacaacaacattattatgataagtgtccaaaaagagtatattatttatcattagaattctatatgggtagaactttacaaaatacaatgattaatcttggtcttcaaaatgcatgtgacgaagcaatttatcaattaggattagatattgaagaattagaagaaattgaagaggatgcaggtttgggaaatggaggattaggtagacttgctgcttgttttcttgattcaatggcaacattaggattagctgcatatggatatggtataagatatgagtacggaattttcaatcaaaaaattcgagatggttggcaagttgaagaagctgatgattggcttagatatggtaatccatgggagaaaagtagaccagaatttatgttaccagttcatttttatggaaaggttgaacataccaatactggaacaaaatggattgatactcaagtagtacttgcacttccatatgatacacctgttcctggatatatgaataatacagttaatacaatgagattatggtcagctagagcaccaaatgattttaatcttagagattttaatgttggggattatattcaagcagtattagatagaaaccttgctgaaaatatatctagagttctttatccaaatgataatttttttgaaggtaaagaacttcgtttaaaacaagaatatttcgttgtagcagctacacttcaagatataatacgaagatttaaagcatcaaaattcggatcaactagaggtgctggaacagtttttgatgcatttccagatcaagttgcaattcaattgaatgatacacatccagctttagctattccagaattaatgagaatatttgttgatattgaaaaacttccttggtctaaagcatgggaattaacacaaaaaacatttgcatatacaaatcatacagtacttccagaagcacttgaaagatggccagttgatcttgtcgaaaaattacttccaagacatctagaaataatctatgaaataaaccaaaaacatttagatcgaattgttgctctttttcctaaagatgtagatagacttagaagaatgtctttaattgaagaagagggatccaaaagaattaatatggcccatttatgcattgttggatcacatgctgttaatggagttgcaaaaattcacagtgatattgtgaaaactaaggtatttaaggattttagtgaattagaaccagataaatttcaaaataaaactaatggaataactcctagaagatggttattgttatgtaatccaggattagcagaattaatagctgaaaaaataggggaagactacgttaaagatttgtcacaattaactaagttgcattcatttttgggagatgatgtattccttagagaattagcaaaagtaaaacaagaaaataaattaaaattttcacaatttcttgaaacagaatacaaagtaaaaattaatccatcatcaatgttcgatgttcaagttaaaagaattcatgaatataaaagacagttattgaattgtcttcatgttattacaatgtataatagaattaaaaaagatccaaagaaattgttcgttccaagaacagtgataattggtggaaaagctgcaccaggatatcatatggctaaaatgataattaaacttataacttcagttgcagacgttgttaacaacgacccaatggtaggatccaaacttaaggttatttttttggaaaattatagagtttcattagcagaaaaagttattccagcaacagatttatctgagcaaattagtactgcaggaactgaagcatcgggaacaggaaatatgaaatttatgttaaatggagctttaacaattggaactatggatggagctaatgttgaaatggctgaagaagcaggagaagaaaatttatttatttttggtatgagaattgatgatgttgcagctcttgacaagaaaggttatgaagctaaggaatattatgaagcattaccagaattaaaattagtaattgatcaaattgacaatggtttttttagtccaaaacaaccagatttatttaaagatattattaacatgttattttatcatgatagatttaaggttttcgctgattacgaagcttatgttaaatgtcaagacaaagtttcacaactttatatgaatccaaaagcatggaatactatggtgttaaagaatattgcagcttctgggaaatttagtagtgatagaacaattaaggaatatgcccaaaatatctggaatgtagaaccatcagatttaaaaattagtctttcaaatgaatcaaacaaagttaacggtaat

SEQ ID NO: 132843 - DNA, 2541 bp, Artificial Sequence
  derived and/or modified sequence
atggctaagccgttgaccgaccaggagaagagacgccagatctccattcgcggaattgttggagtggagaacgtggctgaactgaaaaagagtttcaatcggcaccttcatttcaccctggtgaaagacaggaatgtagccactacacgcgactattatttcgctctcgcccacacagtgcgggatcatctcgtgggccgatggattcgcacccaacaacattactacgacaagtgccctaagcgcgtctattatctctccctggagttctatatggggagaactcttcaaaacacaatgattaatctgggcttgcaaaatgcttgtgacgaggccatctaccaacttggtctggacatcgaggaacttgaggagattgaggaggacgctgggctcggcaatggcggactgggtaggctggctgcttgttttctcgattcaatggccactctggggctggctgcgtatggatatggtatcagatacgaatatgggatattcaatcaaaagattagagatgggtggcaggttgaagaagctgacgattggctgaggtacggcaacccttgggaaaaaagccggcctgagtttatgctgcctgtacatttctatgggaaggtggagcatactaacacggggaccaaatggatcgacacacaggtggtgctggcactgccatatgacacccccgtgcctggttacatgaacaacacagttaataccatgagactctggtctgctcgagcccccaacgattttaacctccgggatttcaacgtgggcgactacatccaagcagtgctcgatcgcaatttggccgagaacatcagcagggtgctttacccaaacgataatttttttgaaggcaaagagctgcgacttaaacaggaatatttcgtggtggcagctacattgcaggacatcatccggagattcaaggccagcaaattcggatccacaagaggtgcaggaacagtgttcgacgccttcccagaccaggtggccatacagctcaacgatacccatcctgctttggccatccccgagctgatgagaatcttcgtagacatcgagaaactcccatggagcaaggcttgggaactgacccaaaaaacgtttgcttatactaaccacaccgtgttgcctgaggcactggaacgatggcctgtcgacctggtggagaagctcctgcctcgccatctcgaaatcatctacgaaattaaccagaagcacctggaccggatagtggctctgttcccaaaggatgtggatcggttgcgaagaatgtccctgatcgaagaagaaggcagcaagcgcatcaacatggcgcacctctgcatcgttgggagccacgcagtgaacggggttgctaaaatccatagcgatatagtgaaaacgaaagtctttaaagacttctctgaactcgagcccgacaagttccaaaataagacaaatggaataaccccccgcagatggctgctcctgtgcaatcccggactggcggaactgatcgctgaaaagatcggagaagattacgtgaaggatctctctcaactcacaaaattgcactcctttttgggagacgacgtgttcctgagggaactggcgaaggtgaagcaggaaaacaaactgaagttcagtcaatttctcgagacagaatacaaggtgaagattaatcccagtagtatgttcgacgtgcaggtgaaaaggattcacgaatacaagagacagcttttgaactgcctccacgtcattaccatgtacaacaggatcaaaaaggaccctaagaaactgtttgtgcctaggactgtcattatcggtggcaaggcagccccaggataccacatggcgaaaatgatcattaagctgatcacatcagtggccgacgtcgtgaataatgaccccatggtgggatccaagctcaaggtcatctttctcgagaattaccgggtgtctttggccgagaaggttattcctgccaccgatctttccgagcaaatttcaacagctggaaccgaagcctccggtactggaaacatgaagttcatgctcaatggggctcttacaattggaacaatggatggtgccaacgtggaaatggccgaggaggccggagaggagaatttgttcatcttcggaatgagaatcgatgatgtggcagcccttgataaaaaagggtatgaagcgaaggaatactatgaggcactgcctgagctgaagcttgtcatagatcagatcgacaacgggttttttagcccgaagcagccagatctgttcaaggatatcatcaatatgctgttctatcatgatcgctttaaagtcttcgccgattatgaagcctacgtgaagtgtcaagacaaggtgtctcaactgtacatgaaccccaaggcttggaacacaatggtcctcaagaatatagccgcatctggaaaattttccagcgataggactatcaaggagtacgcccaaaacatctggaatgtggaaccctccgatctgaagatctcattgtccaacgagtctaacaaggttaacgggaat

SEQ ID NO: 132844 - DNA, 2541 bp, Artificial Sequence
  derived and/or modified sequence
atggcaaagccgctcaccgatcaggagaagaggaggcagatatcaatcagagggatagtcggcgtggagaatgtggcagaacttaagaaaagctttaaccgacacctacatttcaccctggtgaaggatcgcaacgtcgcaaccacgagagattactacttcgccctagcccacaccgtgcgtgatcatttggttgggcgctggatcaggacgcagcaacactattacgacaagtgcccaaagcgagtctactacctcagtcttgagttctatatgggaagaacactgcagaacaccatgatcaatctggggctccagaatgcgtgcgatgaggctatctatcagttgggcctggatatcgaggaattggaggaaattgaggaagacgcaggtctgggcaatgggggcctgggacgcctcgccgcttgcttcttggacagcatggccacgcttggcctcgctgcttatggctatggaatccgctatgagtacgggattttcaatcagaaaattagggacggttggcaggtcgaagaagcggatgactggcttagatacggtaatccctgggaaaagtcacgaccagaattcatgctcccagtgcatttttacggcaaagtagagcacacgaacaccggtacgaagtggattgatacccaggttgtactcgcactgccgtacgatacccctgtgcctgggtatatgaacaataccgttaacacaatgcgcttatggtctgcccgcgctcctaacgatttcaacctgcgtgacttcaatgtgggggactacattcaggctgtgctggaccgcaacctcgctgaaaatattagcagggtgctctaccctaacgataattttttcgaaggaaaggaattgcggctcaaacaggagtacttcgtcgtcgcagccaccctgcaagatataattcggaggttcaaagcaagtaaatttggtagtactcgcggggcaggcactgtgttcgacgcatttccagaccaggtggccattcagctgaacgacacccacccggcacttgccataccggaattgatgcgcattttcgtcgacattgaaaaattgccatggagcaaagcctgggaacttacccaaaagacttttgcctatacgaaccatacagtactgccagaagccttggaaaggtggcctgtagaccttgtggagaagctgctgcctcgtcatctggagatcatttatgaaatcaaccaaaagcatctggacaggatcgtggccctctttcctaaggatgtggataggctccgcagaatgtcgcttattgaggaggaaggttctaaacgcatcaacatggcccatctgtgcatcgtaggcagccacgctgtaaacggcgttgctaagatacattccgacatcgttaaaactaaggttttcaaggatttctccgagctggagcccgacaagttccagaataagaccaatggcattacaccaaggcgatggctgctgttgtgtaaccctggcttagctgagctcatagctgagaagattggggaggattacgtgaaggatctttcgcagctgaccaaattgcactcattcctcggtgatgatgtatttctgagggaattggcgaaagttaagcaagagaacaaacttaaattctcccagttcttggaaacagagtacaaagtgaagattaatccgtcaagcatgtttgatgtacaagttaaacggatccacgagtacaaacgccagctcctgaattgcttgcacgtgattactatgtacaatcggatcaagaaggatccaaagaagcttttcgtgccgagaacggttatcatcggagggaaggcggcgccaggttaccatatggcaaagatgatcataaaactcatcaccagcgttgcggacgtggtgaacaacgacccaatggtgggaagtaagctgaaagtgattttcttggagaattaccgggtctcattggctgagaaggtcataccagcaaccgacctgagcgagcaaatcagtacggcaggcaccgaagcctctggaacaggcaatatgaagtttatgttaaatggagctcttacgattggaacgatggatggggccaacgtcgagatggccgaggaggccggcgaggagaatctttttattttcggaatgcgaatcgatgacgtggccgccctggataagaagggctacgaggccaaagagtattacgaggccctgcctgaactcaagttagtgattgatcagattgataacgggttcttcagtcccaaacaacctgatctgtttaaagatatcattaatatgctcttctaccatgatagattcaaggttttcgcagactatgaagcatacgttaaatgccaagataaggtcagtcagctttatatgaaccctaaggcttggaataccatggtgctaaagaatattgcggcttccgggaagttcagtagtgacagaactatcaaagagtatgcacagaatatctggaatgtggaacccagtgacctcaagatcagcctatcaaatgagtccaataaggttaacggcaat

SEQ ID NO: 132845 - DNA, 2541 bp, Artificial Sequence
  derived and/or modified sequence
atggctaagcccctcacggaccaggagaagcggagacagatatcaatcaggggcattgtgggcgtggagaatgtggcagagctcaaaaaatccttcaacagacatctgcatttcactctcgtcaaagacagaaatgtggccacaacccgagactattacttcgccctggcgcacacagttcgggaccatctggtcggcagatggatacgaactcagcagcattactatgacaaatgccccaaaagggtgtattacctctctcttgagttttatatgggaaggacattacaaaataccatgataaatttgggcctgcagaatgcttgtgacgaagccatctaccagttagggctagacatagaggaacttgaggagatcgaggaagatgctggcttggggaatggcggcctggggagattggctgcctgctttctcgattcaatggccacactgggcctggccgcatatgggtatggcatcagatacgaatacggtatcttcaatcaaaagatccgagacggatggcaggttgaggaggcagacgactggctccgctacggcaatccgtgggagaagagccgacccgaatttatgctcccagttcacttttatggcaaagtggagcatacaaatacaggaacaaagtggattgatacccaggtagtactcgctctgccttatgatacgcctgtccctgggtatatgaataacaccgtgaacacaatgcgactctggtccgcccgggcacccaatgactttaacctgcgcgactttaatgttggcgattacattcaggccgtgctggatcgcaacctcgctgaaaatatttcccgtgtactgtaccccaacgacaactttttcgaaggaaaggaactgagactaaaacaggaatacttcgtagtagccgctactcttcaggacatcattaggcggttcaaagcgtccaagtttggctctacccgaggggcaggaacggtatttgacgcctttccagaccaggtggcgatccagctgaacgacacacaccccgcattggcaattccagaactgatgagaatatttgtggatatcgagaagctcccgtggtccaaggcatgggagctcacccagaagaccttcgcatacaccaaccacaccgtattaccagaagcacttgaacggtggccagtggacctcgtggagaaactcttaccccggcaccttgagatcatctatgaaatcaaccagaaacaccttgaccggattgtggcgttgttcccgaaggacgtggaccgactacgaaggatgtctctcattgaggaagagggcagtaaaaggataaatatggcccatttatgcattgtcggctcgcacgctgtcaacggcgtggcgaagatccattccgacattgttaaaacgaaggtcttcaaagatttcagcgagttggaacccgacaaattccagaacaagactaacggcatcactcctcgcaggtggctgctgctctgcaatccagggctggcggaactcatcgctgagaagattggcgaggactacgtcaaggatctttcccagcttaccaagttgcattcattcctcggcgatgacgtatttcttagggaacttgccaaagttaagcaggaaaataagctaaagttcagccagtttctggaaaccgagtacaaggttaagattaatccctcaagcatgttcgatgtccaggtgaaaaggattcatgaatataagaggcagctgctgaactgcctgcacgtgattaccatgtacaataggataaagaaagaccccaagaagttgtttgtgcctcgcactgttatcattggcggtaaggctgccccaggctatcatatggcaaagatgatcataaagctgattactagcgtcgctgacgttgtcaataacgatcccatggtgggaagcaaactcaaggtaatcttcttggaaaattacagagtcagcctggccgagaaagtcatcccagccaccgatctgtccgaacagatttctacagccggaaccgaagcctcagggaccggcaatatgaagtttatgctcaatggcgccctgactatcgggacaatggatggtgcgaatgtggagatggcggaagaggcaggggaggagaatttgttcatctttggtatgcgtatcgatgatgttgccgctctcgacaaaaaaggctatgaggctaaagaatattatgaagctctgccagagctgaaactcgttattgatcagatcgacaatggtttcttttctcccaagcagcctgatctgttcaaggacataatcaatatgctgttctaccacgaccggtttaaggtcttcgctgattacgaggcatatgtgaagtgccaggataaggtatctcagctgtatatgaaccctaaagcttggaacactatggtgctcaagaatattgcggcttccggcaaattttcctctgatcgcaccatcaaagaatacgcacagaacatctggaatgtggagccaagtgacctgaaaatctcactgagcaatgaatcaaacaaagtcaatggcaac

SEQ ID NO: 132846 - DNA, 2541 bp, Artificial Sequence
  derived and/or modified sequence
atggcgaagccgctgacggaccaggagaagcgcagacagatatctatccgggggattgttggggtcgaaaatgtcgccgaactgaaaaaaagcttcaaccggcatctgcactttacactggtgaaagacaggaatgtggctacaacaagagactattattttgcactggcacacactgtgcgcgaccaccttgtgggtcgctggattcgcacccagcagcactattacgacaaatgtccaaaaagggtgtactacctaagcctcgagttttatatgggtaggaccctccagaatacgatgattaaccttggattgcagaatgcttgcgacgaggcaatttaccagctcgggctagacatcgaggaactggaagagattgaggaagacgcaggactgggaaacgggggcctcggtagattagccgcgtgctttctcgattccatggcaacgttaggcctggcagcttacggttacgggatacgctacgagtacggcattttcaaccaaaaaattagagatgggtggcaggtggaggaagctgatgactggctgaggtacgggaatccttgggaaaagtcgcggccggaatttatgcttcctgtgcacttctatggaaaggtcgagcataccaacaccggaactaagtggatagatacacaagtggtgctggcactgccttacgacaccccagtgcctgggtacatgaataacacagtaaacactatgaggctgtggagtgcccgggcccctaatgactttaatctgagggatttcaatgtcggggattatatccaggcggtactggaccggaaccttgcggaaaatatcagcagagtcctatacccgaacgataatttttttgaggggaaggagttacgcttaaaacaggagtacttcgtcgtggcggccacacttcaggacatcataagaaggttcaaagcatccaaattcggcagtacccgaggtgccggaacagtttttgatgcctttcccgaccaggtggctatacagttgaacgatacacacccggcgcttgcgattcccgaactgatgaggatattcgtcgatatcgagaagcttccatggagtaaagcctgggaacttacacagaagaccttcgcgtatacaaatcacaccgtgctgcccgaagcccttgaacgctggccggtggatctggttgaaaagctattacctcgccacctcgaaatcatctatgagatcaaccagaagcacttggatcggattgtggcactgtttccaaaggacgtggatcgtctgcgccggatgtccctgatcgaggaggaaggctccaagaggatcaatatggcccacctctgcattgtcggaagccatgccgtgaacggcgtggccaagatccactctgatattgtcaaaacaaaagtgtttaaagactttagcgaacttgaacccgataagttccaaaacaaaactaatggtatcactccaaggaggtggctgctgctgtgtaatcccggcctggctgaactaatcgcggagaaaattggagaagactatgtaaaggacttgtcccagctaactaaactgcattcatttcttggagatgacgttttcctgagagaactggcaaaggtgaagcaggaaaacaagctcaaatttagtcagttcctcgagacggagtacaaggtgaaaatcaaccctagcagcatgttcgacgtgcaagtgaaaaggatacacgaatacaagcgtcaactcttgaactgcctgcacgtcattacaatgtataacagaatcaagaaagacccaaaaaagctatttgtcccaagaacagttatcattggtggcaaagcggcgcctggctatcacatggctaagatgatcatcaaactgatcacgagcgtggccgatgtcgtaaataatgaccccatggtgggatctaaactgaaggtcatctttcttgaaaactatcgagtcagcctggccgagaaagtcatacctgccacagacctgagcgagcaaatcagcactgccgggacggaggcttcagggactggaaatatgaagtttatgttgaacggggcactcacaattggaactatggacggcgccaatgtggaaatggcagaggaggcaggcgaagaaaatttattcattttcggcatgcggatcgatgatgtggcggcgctcgacaaaaaaggctacgaggctaaggaatattatgaggcgctccctgagctcaaactcgtgatcgaccagatcgacaacgggttttttagcccaaagcagcccgacctgttcaaggatattattaatatgctgttttatcacgaccgcttcaaggtcttcgctgattatgaggcatatgtcaagtgtcaggataaggtgtctcagctgtatatgaaccctaaggcatggaacacaatggttttgaaaaatatagccgcttctggcaagttcagttcagatcgtaccattaaggaatatgcccagaatatatggaacgtggaaccgtccgatctgaaaatttccttgtcaaatgagagcaataaggttaacggaaac

SEQ ID NO: 132847 - DNA, 2541 bp, Artificial Sequence
  derived and/or modified sequence
atggcaaagccactgacggatcaagagaaacgtcgacagatttccattcggggaatagtgggggtggaaaacgtcgcggaacttaagaagtccttcaaccgccatttgcactttactctggtgaaggatcggaacgtcgccactacccgcgactactactttgcgcttgcacatactgtacgcgatcaccttgtgggacgctggattcggacccaacaacattactacgataaatgtccaaagagagtctactacctttctcttgagttttacatgggccgtactttgcaaaataccatgattaatctcggactgcagaatgcatgcgatgaagctatctaccaactggggctcgatatagaagaactggaggaaatcgaagaagatgcgggattgggtaatggcggactgggaaggttggccgcttgctttttggacagcatggctactctgggacttgcagcctacggttacggcattagatacgagtacggaattttcaaccagaaaattcgcgacggttggcaagtggaagaagcagatgattggcttaggtacggaaacccatgggagaagtcaagaccggaattcatgctgccagtgcacttttacggaaaggtcgagcataccaacaccggtaccaagtggattgatactcaagtggtccttgccttgccctacgacacccctgtgcctggttatatgaacaacaccgtgaacactatgaggctgtggagtgcccgtgcacctaatgacttcaatctgagggactttaacgtcggtgattacatacaggctgtgctggaccggaacttggcagaaaacatttcgcgcgtcctgtatcctaatgataacttttttgagggtaaagaacttcgactgaaacaagaatactttgtcgtggcagctaccctccaggatatcataagacgcttcaaggcatcgaaattcgggtcgactcgtggggccggaaccgtgtttgatgcgttccctgatcaggtggcaattcaactgaacgacactcatccggcgctggcgatacccgaactgatgagaatctttgtggatattgagaaactgccatggtcaaaagcatgggagcttactcaaaagacttttgcatacaccaaccacaccgtgcttcctgaagcactggaaagatggcctgtggatctggtggagaagttgcttccacgccatcttgagattatctacgaaatcaaccagaagcaccttgatagaattgtggcattgtttccaaaggacgtggatcggctccgccggatgtctttgattgaggaagagggttcaaagcgaattaacatggctcatctgtgtattgtcggctcccatgcagtgaacggagtcgccaagatccactcggacattgtgaaaaccaaggtattcaaggacttttcagaattggaacccgataagtttcagaataagactaacgggatcacgccaagaagatggctgcttctgtgtaacccaggcctggccgaacttatcgcagaaaagataggcgaggactatgtcaaggatctttctcagcttacgaagctccatagctttctgggtgatgatgtgtttctgagagaacttgcaaaagtgaagcaagagaataagctgaagtttagccaatttctcgaaactgagtataaagtcaagatcaacccttcgtcaatgttcgatgtccaggtcaagaggatccatgaatacaagagacaactcctcaactgccttcatgtcattacgatgtacaatcggatcaagaaagatcccaaaaaactttttgtgcctaggaccgtgatcatcggtggtaaggcagccccgggctaccacatggcaaagatgatcataaaacttatcaccagcgttgctgacgttgtaaacaatgatcccatggttggaagcaagctcaaggtaatcttcctggagaactacagggtgtcccttgcagaaaaggtcattccggcaaccgatctgtcggaacaaatttcaaccgccggcacggaagcatccggaacgggcaatatgaagtttatgctcaatggtgccctgaccataggaactatggatggcgcgaacgtcgaaatggcggaggaagcaggggaggaaaaccttttcattttcggtatgcggattgacgacgttgccgcacttgataagaagggatacgaggcaaaggagtactacgaagcacttcctgaactcaagctcgtgattgatcagattgacaacggattcttctccccaaaacaaccggatctgtttaaggacattatcaacatgctcttttaccatgaccggtttaaagtgtttgccgactacgaggcatacgtgaagtgtcaagacaaagtgtcccagctctacatgaatcctaaggcgtggaataccatggtgttgaagaacattgccgcgagtggtaagttctcatcggaccgcactataaaggaatacgctcagaacatctggaatgtggaaccctccgatctcaaaatctcgctctcaaacgagagcaataaagtgaacgggaat

SEQ ID NO: 132848 - DNA, 2541 bp, Artificial Sequence
  derived and/or modified sequence
atggcaaagcccctgacagaccaggagaaacggagacagatttcaataagaggaatagtaggcgtggaaaacgtcgccgaattgaaaaaaagctttaaccggcacctgcatttcaccttagtgaaagataggaacgtcgctaccactagagactattatttcgcactggcccatactgtgagagatcacctagtggggagatggatcagaactcaacagcactattatgacaaatgccccaaacgcgtgtactacctgtccctggagttttatatgggccgcacactccagaatactatgatcaatttggggctccagaatgcctgcgacgaggccatctatcagctgggcctggatattgaagagctggaagagattgaggaggatgccgggctgggtaatggcggcctgggccggctggccgcatgtttcttggatagcatggctaccctgggcctggcagcctatggatatggcatcagatatgaatatggcatttttaaccagaagattagagatggttggcaagtcgaggaggctgacgattggttgcggtatgggaatccttgggagaaatccagacccgaatttatgttacccgtccacttctatggcaaggtcgaacataccaataccggaactaaatggatagacactcaagtggtgctcgcattaccctatgacacacctgtgccaggatacatgaataacaccgttaataccatgaggctttggagtgccagagctccgaatgacttcaacctccgagacttcaacgtgggagattacattcaggcagtgctcgaccggaacttggcagaaaatatctctagggtgctctacccaaatgataatttctttgagggtaaagagcttcggctgaagcaggagtactttgtcgtggccgcgacactccaggacattattagacgttttaaagcaagcaaattcggatcaacgcggggtgccggaacagtgtttgacgcctttcctgaccaagtcgccatccagttgaacgacacacatccagcactggcaatcccagagctcatgcgaatttttgttgatattgaaaaactgccatggagtaaagcttgggagctgacacaaaagacctttgcctatactaaccacaccgtgctgcccgaggcattggaaaggtggccagtggatctcgtggaaaaactgttgccaagacacctggaaatcatttacgaaatcaaccaaaaacatctagatagaattgtggctctgtttcccaaggacgtggaccgactgaggaggatgtccctgatcgaggaggagggttccaagcggattaacatggcacacctgtgcatcgtgggatcccatgccgttaatggagtggccaaaattcatagtgacatagtcaaaacaaaggtctttaaagacttctctgaacttgaacccgataaattccaaaataaaacaaatggcatcacacccagacgctggctactcctttgcaacccgggccttgcagagctgatcgctgaaaaaatcggagaagattatgttaaggacttgagccaattgacaaaactccactccttccttggtgatgatgtgttccttagggagctggccaaagtgaaacaggaaaataaattaaagtttagtcaattcttagagacagaatataaagttaagattaatcccagttccatgttcgacgttcaggtgaaacgcatccatgagtacaagcggcagctgctgaactgtctgcacgtcattaccatgtataatcgcatcaaaaaagatcctaagaaactgttcgtgcctaggacagttattatcggaggcaaggcggcacccggctaccatatggccaagatgataatcaagttaatcacctcggtggctgacgtcgtcaacaacgaccctatggttgggtctaagctgaaggtgatctttctggaaaactatcgagtgagcttagcggaaaaggtgatccccgctacagatctgtccgagcagatcagcacggcaggtacagaagcatcgggaaccggtaacatgaaatttatgctaaacggggcactgactatcggaaccatggacggcgccaatgtcgagatggccgaggaggccggcgaggagaatctgtttatcttcggaatgaggattgatgatgtagctgcactggacaagaagggatacgaagctaaggagtactatgaggccctccccgagctgaagctagtgattgatcagattgataatgggtttttcagcccgaaacagcctgatctttttaaagatataattaacatgcttttttatcatgatcgcttcaaggtctttgcagattacgaagcctacgttaaatgccaggataaagtaagtcaattgtatatgaatcctaaggcctggaacacaatggtccttaagaatatcgccgcctcgggaaagttttcatccgaccggactattaaagaatatgcacaaaatatttggaatgtggagccctctgacctgaaaatctccctcagcaatgaatccaacaaagttaatgggaac

SEQ ID NO: 132849 - DNA, 2541 bp, Artificial Sequence
  derived and/or modified sequence
atggccaagccattgacagatcaagagaaacgacgccaaataagtatacgtgggattgtcggagtcgaaaacgttgctgagctgaaaaaatcgttcaatcggcacctccacttcaccttggttaaggacagaaacgtggccactactcgcgattactatttcgctcttgctcacacggtgagggaccacctggtgggccgctggatccgtacccagcagcactattacgataaatgccccaagcgtgtttattacctgagccttgagttctatatgggacgcacgctccagaatacaatgatcaatcttggacttcaaaacgcctgcgacgaggccatataccagctcggcctggatatcgaggagcttgaagagatcgaagaagacgctgggctcgggaatgggggtctgggccgactggccgcctgttttttggactccatggctacattaggcctggccgcatacggctacggcatccgctatgaatatgggatattcaatcagaaaattagggacggatggcaggtggaggaggcagatgattggctgcggtatggtaacccgtgggagaagtccaggcctgagtttatgcttcctgtgcacttctacggcaaagtagaacacaccaataccgggaccaaatggatcgacacacaagtcgtgctggccctcccatacgatactcctgtgccagggtacatgaataacacagtcaacaccatgcgtctctggagtgcacgagcgcccaatgacttcaacttgcgggactttaatgttggtgactacatccaggccgtgctcgaccgcaacctggccgaaaatatcagcagggtactgtatccaaacgacaacttttttgaagggaaggagctgagactcaaacaggagtattttgtggtcgctgcaactttgcaggacatcatccgccggtttaaagcatctaagtttggttctaccaggggcgccggtacggtttttgatgccttccctgatcaagttgccatacagctcaacgacacccacccggcgttggctatccctgagctgatgagaatattcgtcgatattgagaagctcccatggtcaaaggcttgggagctcacccaaaaaactttcgcttacaccaatcacaccgttctccccgaggcgctcgagaggtggcccgtcgatctggtggagaaacttctgcctcgtcatttggagatcatatatgagatcaatcagaagcacctggaccgaatcgttgcgctctttccgaaagatgtggacaggctgcgacggatgtctctgatcgaggaggaaggctccaaaaggataaatatggctcacctgtgtattgtggggagccacgcggtgaacggtgtggcgaagatacactctgatatcgttaagaccaaagtgttcaaagatttctcggaactggagcctgacaaattccagaataagaccaacgggatcactccacggcgctggctcctgctttgcaatcccgggctggcagaactcatcgccgagaagatcggtgaagattatgtgaaggatctttcccagcttaccaagctgcattctttccttggcgatgatgtgttcctacgggagctcgccaaagtaaaacaggagaacaagctgaagttttcgcagttcctggaaacggaatataaggttaagatcaacccctccagcatgtttgacgttcaggtaaagcgcattcacgaatacaagcgccaactcctcaattgtctccacgttatcaccatgtacaaccggatcaagaaggatcccaagaagttgttcgtacctcgtactgtgataatcggaggaaaagccgctccaggctatcacatggcaaagatgatcatcaagttgattaccagcgttgccgatgtggtcaataacgatcctatggttggaagtaagctgaaggtgatattcctggagaattaccgagtgtctctagctgagaaggtgatccccgcaacagacttatcagaacagatctcaaccgcaggcactgaagccagcgggaccggtaatatgaagtttatgctgaacggcgcactcaccattggtactatggatggcgctaacgttgaaatggccgaagaggccggagaagagaatctgttcatattcggaatgagaattgatgacgtggcagcgctggacaagaagggctacgaggcgaaggagtattacgaggctctgccagaactgaagctggtcattgatcaaatagataacggctttttctccccaaagcagccagatctctttaaggacatcatcaacatgttgttttatcatgaccgcttcaaagtcttcgctgactatgaggcgtacgtgaagtgccaggataaagtgtcccaactctacatgaaccccaaggcttggaacacaatggtgctcaagaacatcgcagccagtggaaagtttagctcggaccggaccattaaagaatacgcccagaacatttggaatgtggagcctagcgatctgaagatctctcttagtaatgagtctaacaaggtcaacggtaat

SEQ ID NO: 132850 - DNA, 2541 bp, Artificial Sequence
  derived and/or modified sequence
atggctaaacctctgacagaccaggaaaagcgccgccagatatctatacgtggtatcgtgggcgttgagaacgtagctgagctgaaaaagagctttaacagacacctccactttacacttgttaaggacagaaacgttgccactactagggactactattttgccttggctcataccgtccgtgatcacctcgtgggtcgctggattagaacacagcagcattattacgacaagtgcccaaaacgtgtgtactacttgtctctcgaattctatatgggtcgtacacttcaaaacacaatgataaacctgggacttcagaacgcatgtgacgaagctatctaccagctgggactggatatcgaggagcttgaggaaatagaggaggatgcaggactcggaaacggcggccttggccgtctggctgcctgcttcttggatagcatggctacactgggactggctgcttacggttacggcatccgttacgagtacggcattttcaaccaaaagatcagggatggatggcaagtcgaggaggccgatgattggctgcgctatggtaacccctgggagaaatctaggcccgagttcatgctgcctgtccacttttatggaaaggtggagcataccaacacaggcaccaagtggatcgatacccaagtggtgttggctctgccctacgacacacctgttcctggatatatgaataataccgttaatactatgaggttgtggagtgcccgtgcaccaaacgattttaacctgagagactttaatgtgggtgactacattcaggctgtcctcgacagaaatcttgctgagaacatctcaagagtcctgtaccccaatgacaattttttcgaaggcaaggaattgagactgaagcaggagtatttcgtggttgctgctacactccaggacattattcgtcgcttcaaggcctccaagtttggctctacccgcggagctggcaccgtgttcgatgcttttcctgaccaagtcgcaatacagctgaacgacacacatcccgcattggccattcccgaactgatgcgcatcttcgtagatatcgagaagctgccatggtcaaaggcttgggagcttacacagaagaccttcgcatatacaaaccacaccgtgttgcccgaggctctcgagaggtggcctgtggatctcgtcgaaaagctcctccctcgccacctcgaaatcatctacgagatcaatcaaaagcatctggataggattgtcgctttgttccctaaagacgtggatagactgaggagaatgagcctgattgaagaagaaggttccaagcgcatcaacatggctcatctttgtatcgttggatcccacgccgtcaacggagtggccaagatccactctgacatagtgaagacaaaggtatttaaagacttttccgagctggagccagataagttccagaacaaaaccaatggaataacccctagaagatggctgcttctctgtaacccaggcttggctgagcttattgccgaaaaaatcggagaggattacgttaaggacttgagccagcttaccaagttgcactccttcttgggcgatgacgtattccttagagagttggcaaaggtaaagcaggagaacaagctcaaattctcccagttcttggaaaccgaatataaggtgaagattaacccatcctccatgttcgacgtacaagtgaaaagaatccatgagtacaagaggcagttgcttaactgcctccatgtgatcactatgtataatcgcatcaaaaaagaccccaagaaactcttcgtaccccgcactgtcatcatcggaggaaaggctgccccaggctaccatatggctaaaatgatcataaagctcatcacaagcgtcgctgacgtggtaaacaacgatccaatggtgggttccaaactgaaggtaatctttctggagaattaccgcgtgtcactggcagaaaaagttatcccagccacagacctgtctgaacagatttccaccgccggaacagaagctagtggcactggaaacatgaagtttatgctcaacggagccctcactatcggtaccatggacggtgccaatgtcgagatggccgaagaggctggcgaggaaaacctctttatcttcggcatgcgtattgatgacgtggccgcccttgacaagaaaggttacgaagccaaggagtactacgaggccctgcctgagttgaaactggtcattgaccagatcgataacggcttcttctcccccaaacagccagatttgttcaaggatatcatcaacatgttgttctaccacgatagattcaaggtgttcgcagattacgaggcttatgtgaagtgccaggataaggtctcccaactgtacatgaatcccaaagcctggaacacaatggtgctcaagaacattgccgccagtggaaagttcagctcagatcgtaccattaaggaatacgctcagaacatctggaatgtggaaccttctgacctgaagatatccctctctaatgagagtaacaaggtaaacggtaac

SEQ ID NO: 132851 - DNA, 2541 bp, Artificial Sequence
  derived and/or modified sequence
atggctaagcccctgaccgaccaagagaaacgccggcaaatcagcatccgcggaatcgttggcgtggaaaatgtggcagagctgaagaagagcttcaaccggcatttgcacttcacgctcgtgaaggaccgcaacgtggccactactcgcgattactattttgcacttgcccacactgtgagggaccacttggtcggtagatggatccgcactcagcagcactactacgacaagtgccctaagcgcgtgtattatctctctctggagttctatatgggacggaccctccagaataccatgattaatctgggcctgcagaatgcctgcgatgaagccatctaccaacttggcctggatattgaagaactggaggagatcgaagaggatgcgggcctcggaaacggtggactgggcagactcgccgcctgtttcctggactcgatggcaaccctgggcctggcagcgtacggttacggaattagatacgagtacggaatcttcaatcaaaagatccgcgacggatggcaagtggaagaagcggacgactggctcaggtacgggaacccgtgggaaaaatcccgcccggaattcatgttgccggtgcacttttacggaaaagtggagcacactaacaccggtactaagtggattgatacccaagtcgtgctcgctctcccgtatgatactccagtgccgggatacatgaacaataccgtcaacaccatgcgcctctggtcggcacgcgccccaaacgatttcaatcttcgagactttaacgtgggtgattacattcaggccgtgttggacagaaacctggccgagaacatcagccgcgtgctctaccctaacgacaacttctttgagggaaaagagctgaggctgaaacaagagtacttcgtggtggcggcgaccctccaggatatcatccggcggttcaaagcgtcgaagttcggctcaactcgcggagctggaactgtgttcgacgcgtttcccgaccaggttgctatccagctgaacgatactcaccccgcgcttgccatcccggaactcatgagaatcttcgtcgacattgaaaagttgccttggtcaaaggcctgggagctgactcagaaaaccttcgcctacactaaccataccgtactgccagaagcattggagcggtggccggtggacctcgtcgaaaagttgctgccgagacacctcgaaatcatctatgaaatcaaccagaagcatctcgacaggatcgtggccctgttcccgaaggacgttgaccggctgcgccggatgagcctgatagaagaagaggggtccaagaggatcaacatggcacacctgtgcatcgtgggctcccacgccgtgaacggtgtggccaagatccattccgacatcgtcaagacgaaggtgtttaaagatttctcagagctcgagccggacaaatttcaaaacaagacgaatggcatcaccccacggaggtggctgctgctttgcaacccgggacttgccgaacttatcgctgaaaagatcggggaggattacgtgaaagacctgtcacaactgactaagctccactccttcctgggagacgacgtgttcctgagagaattggcgaaagtgaaacaggaaaacaagctgaagttctcacaattcctggaaaccgaatacaaggtgaaaatcaacccatcaagcatgtttgatgtgcaagtgaagcggatccacgaatacaaacggcagctcctcaattgcctccacgtgatcactatgtacaatcgcattaagaaggatcccaagaagctgttcgtgccccggactgtgatcatcggaggcaaggctgcccctggctaccatatggctaaaatgatcatcaagctgatcacttccgtggccgatgttgtgaataacgatccaatggtgggatctaagttgaaggtgatcttcctggagaattaccgcgtatcgctggcggagaaagtcatacctgctaccgatctgagcgagcaaatctccaccgcgggaactgaagcgtcgggcaccgggaacatgaagttcatgctgaacggcgctctgactatcggaactatggacggcgccaacgtggagatggctgaggaagcgggtgaagaaaacctctttatcttcggaatgagaattgatgacgtggcggctctggacaagaagggttacgaagcgaaggaatactacgaagccctcccagaactgaagctggtgatcgatcagatcgacaatggcttcttctcaccgaaacagcctgacctgttcaaggacatcatcaacatgctcttttaccacgaccgtttcaaagtgttcgctgactacgaggcgtacgtcaaatgccaggataaggtatcccagctgtacatgaatccgaaggcctggaataccatggtgctcaaaaacatcgccgcgtcgggaaaattctcaagcgaccgcaccatcaaggaatatgcgcagaatatctggaatgtggaaccctccgatctgaagattagtttgtcgaacgagtccaataaagtgaacggcaac

SEQ ID NO: 132852 - DNA, 2541 bp, Artificial Sequence
  derived and/or modified sequence
atggccaaaccccttacggatcaggaaaaaagacgccagatttcgataagaggaattgtgggtgtggaaaatgtggcggagcttaagaagagctttaacaggcatctgcactttactcttgtaaaggatcgtaacgtggccaccacgagggattactacttcgctctcgcacacactgtgcgggatcatttggtggggaggtggatccgcacccaacaacactactacgataaatgtcctaagcgcgtctactacctctccctcgagttttacatggggaggaccctccagaataccatgatcaacctgggtctgcagaacgcatgtgacgaagccatctaccagctcggtttggatattgaggaacttgaagaaatcgaagaggacgccggactcggtaatggtggcctgggtaggcttgcagcatgtttcctcgattcgatggcaaccctcggactcgctgcctacggttacggaatacggtacgaatacggaatattcaaccagaagattagagatggttggcaagtggaagaagcggatgactggctgcgttacggaaacccttgggaaaagtccagaccagagtttatgctgcccgtgcacttttatggtaaggtcgagcatactaacactggcactaagtggattgacacccaagtcgttctggcacttccatacgacaccccagtgccgggatacatgaacaatactgtgaacaccatgcgcctgtggagcgcacgagcccctaacgatttcaacctgagagacttcaatgtcggggattacattcaagccgtcctggatagaaaccttgcggagaacatttcacgtgtactttaccctaatgacaacttttttgagggtaaggaactccgcctgaagcaggaatacttcgtggtcgcggcgactcttcaagacataatccgccggttcaaggcctccaagtttggatccacccgcggtgcggggactgtgttcgatgcatttccagatcaagtcgcaatccagctcaatgacacccatccagccctggcgatccccgagcttatgagaattttcgtggacatcgaaaagttgccgtggtcgaaagcatgggaactgactcaaaaaacctttgcttacaccaatcatacggtcctgcctgaggcccttgaacgctggcctgtggacctcgtggagaaacttcttcctcgccatctcgagatcatatacgaaatcaaccaaaaacatctggatcgaatcgtggccctgtttcctaaggatgtcgacaggctgcgtagaatgagtctcatcgaagaagagggttcaaaacggataaacatggctcatctgtgtatagtgggatcacatgcagttaatggagtcgccaagattcattcggacatcgtgaaaactaaagttttcaaggatttctcagaactggaacctgacaagtttcagaacaaaaccaacgggattacccctcgccgatggctgctcctttgtaacccgggcctggcagaacttattgcagaaaagatcggggaagattacgtgaaggatctctcgcagttgactaaacttcactcttttttgggtgatgatgtatttcttcgagaactcgcaaaggtgaagcaagaaaacaaactgaagtttagccaatttctcgagactgaatacaaagtgaaaatcaacccatcgtcgatgtttgacgtgcaagtgaaacgtatacacgagtataagaggcagttgctgaactgcctccacgtgatcaccatgtataacagaattaagaaggaccctaagaagttgttcgtgcctagaactgtcattataggtggtaaagcagcgccaggttaccatatggcgaaaatgatcataaagctcatcacctcggtggcagacgtcgtgaataacgatcccatggtcgggtccaagctgaaggtcattttcctggagaactatcgagtgtcccttgcagaaaaggtgattcctgcgaccgacctgtccgaacagatttccaccgcaggtacggaggcatccggcacgggcaatatgaagtttatgttgaacggggcacttaccatcggaaccatggacggggcaaacgtggagatggccgaggaggcaggagaggagaatctgttcattttcggaatgagaattgatgacgtggcagcactggataagaagggctacgaggcaaaagaatactacgaagcccttccagagcttaagctggtcatcgatcaaattgataatgggttcttttcacccaagcagccagatctctttaaggatatcataaacatgttgttttaccacgaccgcttcaaggtgttcgcagattacgaagcgtacgtgaaatgtcaggataaggttagccaactgtatatgaatcctaaggcatggaatactatggtgcttaagaacatagcggcatcgggaaagttctcgtcagatcggaccattaaagaatacgctcagaacatatggaatgtggaaccaagcgaccttaagatctcactctccaacgagtccaataaagtgaacgggaat

SEQ ID NO: 132853 - DNA, 2541 bp, Artificial Sequence
  derived and/or modified sequence
atggctaagccccttactgatcaggaaaagaggcgtcagatttcgatcagaggaatcgtcggtgtggaaaatgttgcggagctgaagaaaagcttcaaccggcacctgcactttaccctagtcaaagatagaaacgtggctacaactagagactattactttgcgttggctcacaccgtcagggaccacctcgtggggagatggatccgcacacaacagcactattacgacaagtgtcccaaacgggtttattaccttagcctagagttttacatgggtaggacccttcagaacactatgatcaatctcggactgcagaatgcctgcgatgaggccatatatcagctcggcctggacatcgaggagctcgaggagatcgaagaggacgcggggcttggcaacggtggactgggccggttggcagcttgttttctggattccatggctactcttggattagccgcctacgggtacggcatccggtatgagtacggcatctttaaccagaaaatccgggacgggtggcaggtagaggaagcagatgattggcttcggtacggaaacccgtgggaaaaaagtaggccggaattcatgttacccgtacacttttacggtaaggtggagcataccaacaccggcaccaagtggatcgacacccaagtagtgctagccctaccatatgacaccccggtgccgggctatatgaacaatacggtgaacaccatgcgactctggagtgcccgcgccccaaatgacttcaacctgcgagattttaatgtcggggactacatacaggctgtcctggaccgtaatctcgcagagaacatcagcagggtcctgtaccctaacgataatttttttgaaggtaaagaactccggctgaagcaagagtactttgtggtagctgcaactctgcaggacatcattcgcagatttaaggcttctaagtttgggagtacccgcggagctggaacagtttttgatgcctttccggatcaagtggccatccaactgaacgacactcaccccgctctcgcaattcctgagctgatgcgcatctttgtcgacatcgaaaagctgccttggagcaaggcttgggaattgactcagaagacctttgcatacactaatcacactgtcctgccagaagcactagagcgctggccggtggatcttgtagagaagttgctaccacggcatttagaaatcatttatgagataaaccagaagcatttggacaggatcgtcgccctttttccaaaagatgtggatcggctacggcggatgagcttgattgaagaggaagggagcaagagaattaacatggcacacctgtgtatcgtgggcagtcacgcagtgaacggcgtagcaaagatccactctgatattgtgaagactaaggtttttaaggacttctctgaactcgaacccgataaattccagaataagacaaacgggatcacacccagacggtggttgctgctctgtaatcctggcctggcagaactgattgctgaaaaaatcggagaagattatgtgaaggacctatcccagcttaccaagctgcattcatttctgggagacgatgtgtttctccgggagctggctaaagtgaaacaggaaaacaagctgaaattctcacagttcctggaaactgagtacaaagttaagattaatccaagtagcatgtttgatgtgcaagttaagcgtatccacgagtacaagagacagctccttaactgcctgcacgtgattacaatgtacaaccggatcaaaaaggatcccaagaaactgtttgtcccaagaacagtgattattgggggcaaggcggctccaggctatcacatggcaaaaatgatcatcaagctgatcaccagcgtagccgatgtggttaacaatgatccaatggtgggaagtaagctaaaggtgatctttttggaaaactaccgggtgagtctggccgagaaagtgatacccgccactgatctttcagagcagatctctactgcgggcaccgaggcttccggcaccggcaacatgaaatttatgctgaatggcgctctgaccattggaaccatggatggggctaacgtcgaaatggctgaagaggccggcgaagagaacctttttatttttgggatgaggatcgacgacgttgcagccctggacaaaaaagggtatgaagcaaaggaatattacgaggccttgccagaattgaaactggtaattgaccaaattgataatggtttctttagccccaaacagcccgatctgttcaaagatattatcaacatgttgttttaccacgaccgtttcaaggtgttcgccgattatgaagcctacgtgaaatgccaggacaaggtatcacagttgtacatgaatcccaaagcttggaacacaatggtacttaagaatatcgcagcaagtgggaaattcagttcggatcgcacaattaaagagtacgctcagaatatttggaacgtcgagccgtctgacctgaagatctccctgagcaatgagtccaacaaggttaacggtaac

SEQ ID NO: 132854 - DNA, 2541 bp, Artificial Sequence
  derived and/or modified sequence
atggctaagcctctcaccgatcaagagaagcgtagacagatttccataaggggtattgtaggagttgaaaacgttgcggagttgaagaaaagtttcaataggcatctccatttcacgctcgttaaagatcgtaatgttgctaccacaagggattactattttgccctcgctcatactgttcgagatcatcttgtcggacgatggattaggacacagcagcattactacgataagtgcccaaagagggtttactacttgagtttggaattctatatgggcaggactttgcaaaatacgatgataaatttgggtctgcagaatgcctgcgacgaggcaatctaccaactaggccttgatatagaggaacttgaggagatcgaagaagatgcgggacttgggaacggaggtttgggtaggctcgctgcctgtttcttagatagcatggctacactgggtctggccgcttacggttacggtatcaggtacgaatatgggatttttaaccagaaaatcagagacggttggcaagttgaggaggctgatgattggctgagatacggtaatccttgggagaagtcgcggcctgagttcatgttgccagtacatttctacggtaaggttgagcataccaacactggaactaagtggatcgacacacaggttgtgttagcactaccatatgacactccagttcctgggtatatgaacaatacagtgaacactatgcgcctatggtcggctcgagccccaaatgattttaatctccgtgattttaatgttggggactatattcaagccgtgctggacaggaatttagccgaaaacattagcagggttctctacccaaatgataacttctttgagggaaaagagctaagactgaaacaggaatatttcgtcgtagctgcaactctccaggatatcattagaagatttaaagcttctaaattcgggtctacacgaggcgccggtaccgtgttcgatgccttccctgatcaggtggctatacaactcaacgacacacatccagctttggcaattcctgaacttatgaggatcttcgttgacattgagaagcttccatggagtaaggcatgggaacttacacaaaaaacattcgcttataccaatcataccgtccttcctgaagctttagagcgctggcctgtggatttggttgagaagttgttgccccgtcaccttgagattatctatgaaataaatcaaaagcaccttgatcgcatcgtcgctttatttccaaaagacgttgaccggttgcggcgtatgtctcttattgaggaggagggttcaaagaggattaacatggctcacctttgtattgtgggatcacatgcagtcaatggagtcgcaaagatccacagtgatattgttaagactaaggtgtttaaagatttctctgagcttgaaccggacaagtttcaaaataaaacaaacgggataacaccaaggcgttggctattgctttgtaatcctggacttgccgaattgatagctgaaaagattggtgaggactacgtaaaggatctttctcaacttacaaagcttcattcctttttgggagatgatgtctttctgcgggaattggctaaagtgaagcaggagaacaagcttaagttctcgcaattcttggagaccgaatacaaggtgaaaattaatccaagctccatgttcgatgttcaggtcaagaggattcatgagtacaagaggcaattgttgaattgcttacatgtaatcactatgtataaccgcataaagaaagaccccaagaaattgtttgtgccccgtaccgtaattattggcggaaaggcagcgccggggtaccatatggcaaagatgataattaaacttataacttccgttgcagatgttgttaataacgatccaatggtaggatctaagttgaaagtaattttccttgaaaattaccgcgtgtccttggctgagaaagtgatccccgctacagacttgagtgaacaaatctccactgctggaaccgaagcttcaggcacgggtaatatgaagttcatgttgaacggagctttgacgattggtaccatggatggtgctaacgttgaaatggcagaggaggccggagaggagaatctttttatcttcgggatgagaattgatgacgtagcagctcttgataagaagggatacgaggccaaagaatattatgaagcactccccgagttgaagttggtcatcgatcaaattgataatggcttcttttcgcccaagcaacccgatctttttaaggacataattaacatgctcttctaccacgatcgtttcaaagtattcgccgattatgaagcatacgttaaatgtcaggataaggtttctcagctgtacatgaatcctaaagcctggaataccatggttcttaagaatatagctgcttccggtaaattttcttctgatcgaaccattaaagagtatgcacaaaatatttggaacgtggagccttcggatcttaaaatttctctctctaatgaatcaaacaaagtcaacggcaat

SEQ ID NO: 132855 - DNA, 2541 bp, Artificial Sequence
  derived and/or modified sequence
atggccaagccgcttactgatcaggagaaacgtagacagatctccattcggggcatcgtgggcgtggagaacgtggccgagctgaaaaagtccttcaatcgtcacctgcatttcacgctcgtgaaggacaggaatgtcgctactactcgggactactacttcgcgttggcccacaccgtgcgggaccacctggtgggccggtggatcaggactcagcagcactactacgacaagtgtccgaagcgggtctattacctgtcactggagttctacatgggtaggaccctgcagaatactatgattaacttgggcttgcagaacgcgtgtgacgaagcaatctaccaattgggacttgatatcgaagagctcgaggagatcgaggaggacgccggactcggaaatgggggcctggggaggcttgcagcgtgcttcctggattccatggctactctgggcctggccgcctacggctacgggatccgctatgagtacggcatcttcaatcagaaaatacgggatgggtggcaggtggaggaagctgatgactggctgcgctacggcaacccgtgggagaaaagccgtccggagttcatgctgccagtgcatttctacggaaaggtggaacataccaacacgggtaccaagtggatcgacactcaggtcgtgctcgccctgccgtacgatacccctgttccgggttacatgaacaacaccgttaatactatgcgcttgtggagcgctagagccccaaacgatttcaatctccgcgactttaacgtgggggactatatccaggcagtgctggaccggaacctcgcagagaacatctcgcgggtgctgtacccgaacgacaatttcttcgagggaaaggagctgcgcttgaaacaggagtatttcgtggtggccgcaaccctgcaggacatcattagacgcttcaaggcctcaaagttcgggtccacccggggagccggaactgtgttcgatgcgttcccagaccaggtcgctatccaactgaacgatactcaccctgccctggcgatcccggagcttatgagaatcttcgtggatatcgaaaagctgccatggtcaaaggcatgggagctcacccagaaaaccttcgcatacaccaatcataccgtcttgcccgaggctctggaacgctggccggtggacctggtggagaaactgctgccacgccacctcgagatcatctacgaaatcaaccagaaacacctggatagaatcgtggctttgtttcctaaggacgtagatagactgagacggatgtcccttatcgaggaagaaggttcgaaaaggatcaacatggcccatctctgcatcgtgggaagccatgctgtgaatggagtcgcgaagatccattcggacatcgtcaaaactaaggtgtttaaggacttctcggaactggaacctgataagttccagaacaagactaatggaatcaccccgagacgctggctgctgctctgcaatcccggattggccgaactgattgcggaaaagatcggagaggattacgtgaaggacctgtcccaactcaccaagctgcattcgtttcttggtgatgacgtgttcttgcgcgagttggccaaggtgaagcaagagaacaagctcaagttctcacaattcctggagactgagtacaaggtcaagataaacccctcctccatgttcgacgtgcaggtgaagcggatccacgaatacaaaagacagctcctgaactgccttcacgtgattaccatgtacaacagaatcaaaaaggaccctaagaagctgttcgtcccacggacggtgattatcggaggaaaggccgccccaggataccacatggccaagatgataatcaaactgattacgtctgtggcggacgtcgtgaacaacgaccccatggtgggctcaaagctgaaggtgatcttcctggagaactaccgcgtgagcctggccgaaaaagtgatcccggccactgacttgtccgagcaaatttcgacggccggtactgaagcctcaggaactgggaatatgaagttcatgctcaatggcgctcttacgatcggcacgatggacggtgcgaatgtcgaaatggccgaggaggcaggcgaggagaacctgtttatcttcggcatgagaatcgatgacgtcgctgcactggataagaagggctacgaagcgaaggaatactacgaagcactgccggagctgaaactggtgattgatcaaatcgacaatggattcttttcgccaaagcaaccggatctgtttaaggatatcatcaatatgctgttctaccacgatcgctttaaggtctttgccgattacgaagcctacgtaaagtgccaggacaaagtgtcacaactgtatatgaatccaaaggcctggaatacgatggtgctcaaaaacatcgctgcatcgggaaaattctcttccgataggaccatcaaggaatacgcgcaaaacatctggaacgtggaaccttccgatctgaagatctcgctcagcaacgagtcgaataaagttaacgggaac

SEQ ID NO: 132856 - DNA, 2541 bp, Artificial Sequence
  derived and/or modified sequence
atggcaaaaccattaacagaccaagagaagagaagacagatcagcattagagggatcgtcggcgtcgagaatgttgccgaactgaagaagagtttcaatcggcatctccatttcaccctggtgaaggaccgaaatgtggccacgacgcgtgactactacttcgccctggcccacaccgttagagatcacctcgtgggaaggtggatccgcacccagcagcattactatgacaagtgtccaaagagagtctattatctatctctcgaattttacatggggaggacactgcagaatactatgatcaacctgggccttcagaacgcatgtgatgaggccatataccagctggggttggacatcgaggaactggaagagatcgaagaggatgcagggcttggaaacggcggactgggaagactggccgcctgcttcctggacagcatggccacactgggcctggcggcttatggttacggaatccggtatgagtatggcatcttcaatcagaagatacgggacggctggcaggtggaggaggccgatgactggctccgatacgggaatccctgggaaaagtcccgcccagagttcatgctcccggtgcatttttacggaaaggtggagcacaccaatacaggtaccaagtggatcgatactcaagttgtcctggccctcccttacgacacaccggtgcccggatatatgaataatacagttaatactatgcgcctgtggagcgcccgcgcccccaacgattttaatctgagggactttaatgttggcgactatattcaagccgtgctggacagaaacctggctgaaaacatctcccgcgtgctgtatccgaacgataactttttcgaggggaaggaactgcggctgaaacaggagtactttgtcgtggccgctaccttacaggatatcatcaggcgattcaaggcctccaaatttgggagcacgagaggcgccggaactgtcttcgatgctttccccgaccaggtggcgatccagctgaatgacacccatccggccctagcaattcccgaacttatgaggatcttcgttgatattgagaagctgccttggtccaaagcctgggagcttacacaaaagacatttgcctatacaaatcacaccgtgctcccagaggctctcgaaagatggccagtcgatctcgtcgagaagctactgccgaggcatttagagatcatttatgaaatcaaccagaagcacctcgatcggattgtggccctgttcccaaaggatgtggatcgcctcaggaggatgtcgctcatcgaggaagaagggagtaagcgcatcaacatggcccacctttgtatcgtgggctcacatgctgtgaatggggtggccaaaatccactctgacatcgtgaaaaccaaagtgttcaaggacttctctgaactggagcccgataagtttcagaacaagaccaatggcatcacacctagaagatggcttctgctgtgcaacccaggcctcgccgaactcatagccgagaaaattggcgaagactatgtcaaggacctgtcccagcttacaaaacttcactcattccttggtgacgacgtttttcttcgcgagttggcaaaggtgaagcaggaaaataagctcaagttctcccagttcctcgagacggagtacaaggtgaaaatcaatccttcctctatgttcgatgtgcaagttaagaggatccatgaatataaacgtcagctattgaactgcctccacgtgatcaccatgtataatcggatcaagaaggacccaaagaaactctttgtacctcgcactgtgatcataggagggaaagctgcgccggggtaccatatggccaagatgatcattaagcttatcacctccgtggcagatgttgttaataacgacccaatggtcggctcaaagctcaaggtgatattcctggaaaattatcgagtgagcctcgcggagaaggtgatccccgccactgacttatcagaacagatcagtaccgccggcactgaggcatcagggactgggaatatgaagttcatgctgaatggagccctgacaattggcaccatggatggagcgaacgttgaaatggccgaagaagcaggtgaggaaaacctctttatctttggtatgcgcattgatgacgtagccgctcttgataaaaagggctacgaggccaaggagtactacgaggcgctgccagaactgaaactggtcatcgatcagatagacaatggcttctttagtccgaagcaaccagacttgttcaaggatataatcaacatgctattttatcatgaccgatttaaagtattcgctgattatgaagcctacgtgaaatgtcaggataaggtgagtcagctctatatgaatcctaaagcctggaacactatggtcctgaagaacatcgcagcgtcgggaaaattctccagcgatcggaccatcaaggagtacgcccagaacatttggaatgtggagccatcagacttgaagataagcctgtccaacgaatctaacaaggtcaatggcaat

SEQ ID NO: 132857 - DNA, 2541 bp, Artificial Sequence
  derived and/or modified sequence
atggcaaagccactcacagaccaggagaagcgcagacagatttcaatacgcggcatcgtgggggtggaaaacgtggctgagctgaagaagtcattcaaccgccatctccattttaccttggtgaaggaccggaatgtcgccacgacacgggattactattttgcactcgctcatacagtgcgggatcatctggttgggcgctggatcaggacacagcagcactactacgataaatgtcctaaaagggtctattacctgagcctggaattctatatgggtagaaccctccagaacaccatgattaacttaggattgcagaatgcttgcgatgaagccatctaccagctgggcctggacatcgaagagctggaggagatcgaggaggacgcgggcctcggcaacggcgggttgggaagacttgccgcgtgcttccttgactccatggcaacccttgggttagccgcgtacggatacggcattcggtacgagtacggtatttttaatcagaagatccgcgacggatggcaagtggaagaggccgacgattggctgaggtacggaaatccatgggaaaaatcaaggcctgagttcatgctgcctgtccacttttatggaaaggtcgaacatacaaatacagggaccaagtggatagacacgcaggttgtattggccttgccatatgacactccagtccctgggtacatgaataatacagtcaacactatgcgcctctggtccgccagagcaccaaatgacttcaatttaagggacttcaatgttggcgattacatccaggccgtcctggataggaacctggctgagaatatatcacgggtactgtacccgaacgataactttttcgaaggaaaggaattgcgcctcaagcaggaatacttcgtggtggccgctacactccaggatataataagacggtttaaggcctccaaattcggttcaacgcggggagccggcaccgtgtttgacgcctttcctgatcaggtagcaatccagttgaacgacactcaccctgctttagctatccctgaactgatgcgcatttttgtggatatcgaaaagcttccttggtcaaaagcgtgggagttgacccagaaaacttttgcatacaccaatcacacagtgctgccagaggcgctagagagatggcctgtagatttagtcgagaaactactccctaggcatctagagatcatttatgaaatcaaccaaaaacatctcgacaggattgtggccctgttccctaaagatgtggatcgcctaaggcggatgtcgttaatcgaagaggaggggtcaaagaggattaacatggcacatctgtgtatcgtgggttcccacgccgtgaatggggtggccaagatccactcagatatcgttaaaaccaaagttttcaaagatttttcagagctggagccagataagttccaaaataagacaaatggtataaccccaaggcgctggctcctgctgtgtaatcccgggctggccgagctgattgccgaaaagattggtgaggactacgtgaaggatctatctcagttgacaaagctgcactcgtttctgggggacgatgtattcctgcgggagctcgcaaaagtgaagcaggaaaacaagctcaaatttagccagtttctggaaacggagtacaaagtgaaaatcaatccgtcatcaatgttcgatgtgcaggtgaagaggattcacgaatataaaaggcaactcctgaactgtctgcacgtgatcacaatgtataataggataaagaaagatcccaagaagctgttcgtaccgagaacggttattataggaggaaaagcagcgcccgggtaccatatggctaaaatgattattaagttaattacatctgtggctgatgtggtcaacaacgacccaatggtcggctccaaactcaaggtgattttcctcgaaaattatagagtaagtctggctgagaaagtgattcccgcgactgacctttctgagcaaatctctacagccgggacagaagccagcggcacgggtaacatgaaattcatgcttaacggagcgctgactataggaacaatggacggagctaatgtcgaaatggccgaggaggccggtgaggaaaacctttttatcttcggtatgagaatcgatgacgtcgccgccctggacaaaaaaggctacgaggctaaggaatattatgaagctctccccgaactcaagctcgttatagatcagattgataacggctttttcagccccaagcagcctgatttgttcaaggacatcatcaacatgcttttctatcacgaccggttcaaagtgttcgctgattatgaggcctatgttaagtgccaggacaaggtgagtcagctttacatgaacccaaaggcctggaatactatggtgctcaagaacatcgcagcgtctgggaaattttcctctgacaggacaattaaagagtacgcacaaaatatatggaatgtggaaccctccgacctgaaaatatccttaagcaatgagagtaacaaggtgaatggcaac

SEQ ID NO: 132858 - DNA, 2541 bp, Artificial Sequence
  derived and/or modified sequence
atggccaaacctcttaccgatcaagaaaagcgcagacagatctccatccgtgggattgtgggagtggagaatgtggctgaactcaagaaatcgtttaacaggcacctccattttacccttgttaaagatagaaacgtggcaactactcgtgactattacttcgcgctggcccacacggtgagagatcacctggtgggaagatggatacgaacccaacagcattactatgataagtgtccaaagagagtgtactatctgtcgttggaattctacatggggagaaccttgcaaaacaccatgattaacttgggtctgcaaaacgcatgcgacgaagcaatataccagctgggactggacatcgaagaactggaagagatagaagaagatgcagggctgggtaatggagggcttgggcggctcgcagcctgtttcctggattcgatggcgacccttggccttgccgcatatggttacggaattaggtacgaatacgggatctttaaccagaagatcagagatggatggcaagtagaagaggccgacgactggttgcggtacggaaacccttgggaaaaatctcgcccggagttcatgctgccagtgcacttttacggaaaggtggaacacaccaataccggtactaaatggatcgatacccaggtggtcctggctttgccctacgatactcctgtgccggggtacatgaacaatacggtcaataccatgcgcctctggagcgcaagagcaccaaacgatttcaacctgcgggactttaatgtcggagactacattcaggcagtgcttgaccgaaacctggccgaaaacatttccagggtcctttacccaaatgataacttctttgaaggtaaggaactgagactgaagcaagagtactttgtggttgcagcaactcttcaggacattatccgtcgctttaaggcctccaaatttgggtcaacccgcggcgccggaacggtgttcgacgcctttcctgatcaagtggcaatccaacttaacgatacccatcctgcacttgcaatacctgaactgatgcggatttttgtggacatagaaaagctcccatggtcgaaggcatgggaactgacccaaaagacttttgcttacaccaatcatactgtgcttccagaggccctggaacggtggcccgtcgatcttgtggaaaagctcctgcctcggcatctggagattatctacgagattaatcaaaagcaccttgatagaattgtggcactgtttcccaaagatgtggatagactccgccgcatgtcgcttattgaggaagaagggtcaaagcgcatcaacatggcacatctgtgtattgtgggatcccatgccgtcaatggcgtcgcaaagattcattcggatattgtcaagacgaaggtgttcaaggactttagcgaactggaaccagataagtttcaaaacaagaccaacggaattaccccacggagatggctgcttctttgtaatcctggacttgcagaactcattgccgaaaagatcggtgaggattacgtgaaggatctgagccagctgactaaacttcatagctttcttggcgatgatgtattccttagagagctggctaaggtcaagcaagagaataagctgaagttttcgcagttcctcgaaaccgaatacaaggtgaagataaacccctcgtctatgtttgatgtccaagtgaaaagaattcatgagtataaacggcagcttctgaattgtctccatgtgatcaccatgtacaaccgcatcaagaaagaccctaaaaagctgtttgtcccacgaacggtcattattggaggaaaggcagcacctggataccacatggcgaagatgattatcaagctgattacctcagtggcggatgtggtgaacaacgacccgatggttggaagcaaacttaaggtgatttttctggaaaactacagggtgagcctggccgagaaggtcatcccagctactgatctgtcagaacaaattagcaccgcgggcaccgaggcctcaggtaccggtaacatgaagtttatgctgaacggagcactcaccattggtaccatggacggagctaacgtggagatggcagaagaagcaggagaagaaaacctgttcatattcggaatgcgtattgacgatgtggcagcacttgacaaaaagggttacgaagcaaaagagtattacgaggcactgccggagttgaagctggtgatagatcaaatcgataacggctttttctcccctaaacaaccagacttgtttaaggatatcattaacatgctgttttaccatgatcgctttaaggtctttgcagattacgaggcatacgtcaagtgtcaggacaaagtctctcaactttacatgaacccaaaggcatggaacaccatggttctcaagaatattgccgcatccggcaagttttcgtccgataggactatcaaagagtacgctcaaaacatctggaacgtggaaccctccgacctgaagatttcgttgtctaacgaatctaacaaagtgaacggcaat

SEQ ID NO: 132859 - DNA, 2541 bp, Artificial Sequence
  derived and/or modified sequence
atggccaagcctctgaccgaccaggaaaaacggcgtcagatcagcatccgcggtattgtgggggtcgagaatgtcgcagaactgaagaagtcgttcaataggcacttgcatttcaccctggtgaaagatcggaacgtggccaccacccgggactactactttgcgctcgcacacaccgtgcgggaccaccttgtgggaagatggatcaggacccaacagcactactacgacaagtgtccgaagcgagtctactacctcagccttgaattctacatgggtcgcaccttgcagaacaccatgatcaatttggggcttcagaatgcctgcgacgaagcgatctaccagctggggctcgacatcgaggaattggaggaaattgaagaggatgctggactgggaaacggaggcctgggccggctcgcggcgtgcttcctggactctatggccacgctgggtttggcggcgtacggctacgggattaggtacgagtacggcatcttcaatcagaaaattcgcgacgggtggcaagtggaagaggctgacgactggctgcgatacggaaatccatgggaaaagtcgcggccagaattcatgttgccggtgcacttctacgggaaggtcgaacacactaataccggcaccaagtggatcgatacccaggtggtcctggccctgccgtacgataccccggtgcctggctacatgaacaataccgtgaacactatgcggctgtggagcgcacgcgcaccaaacgatttcaacctgcgcgatttcaacgttggagactacatccaggcagtcctggaccgcaatctggcagagaatatctcacgggtgctctacccaaatgataacttttttgaggggaaggagctgcggctgaagcaggagtatttcgtagtggcagcgactttgcaagatatcatcagacgctttaaagcatccaagttcggatcgacccggggcgcgggaactgtgttcgacgcctttccggaccaagtggccatccagctcaacgacactcaccccgctctcgccatcccggaactgatgcgcatctttgtggacatcgaaaagctgccgtggtcgaaggcctgggagctcactcaaaagacgtttgcatacactaaccacaccgtgctcccagaagcgctggaaaggtggccggtggatctggtggagaaattgttgccgagacatctggagatcatctacgagattaaccagaaacacctcgacagaatcgtggcgcttttcccgaaggacgtcgaccgtctgcgcagaatgtccctgatagaggaagaaggatccaagcggatcaatatggctcacttgtgcattgtcggatcgcacgccgtgaacggagtcgccaagattcattcagacatcgtgaaaactaaggtgttcaaggacttttcggaactcgaaccggacaagttccagaacaaaactaacggtatcaccccgcggagatggttgctcctgtgcaacccaggactggcagagctgatcgctgagaagatcggagaggattatgtgaaagaccttagccaactgaccaaactgcactcgttccttggggatgacgtgttcctgcgcgaactcgccaaggtgaagcaggaaaacaagctgaagttttcacaatttctggaaaccgaatacaaggtcaagataaatccctcgtctatgttcgacgtccaagtgaagcgaatccatgagtacaaacgccagctcctgaactgcttgcatgtgatcaccatgtacaaccgcatcaagaaggatcctaagaagctcttcgtgccgcggacggtgatcataggaggcaaggccgcacccggataccacatggcgaagatgatcatcaaactgatcacctccgtcgcggacgtcgtgaataacgatccaatggtggggtcgaagctcaaagtgatcttcctggagaactatcgcgtgtccctggcagagaaggtgattcctgccaccgacctgtccgaacaaatctccaccgcgggcactgaggcgtcaggtactgggaacatgaagttcatgcttaacggagcactcactatcggcactatggatggtgcgaacgtcgaaatggcggaggaagccggagaggaaaaccttttcatcttcggaatgcggatcgacgacgtggcagccctcgacaagaaaggctacgaagcgaaggagtactacgaagctctgccggagctgaaacttgtgatcgaccagatcgacaacggcttcttctcaccgaaacagccggaccttttcaaagacatcatcaatatgctgttctaccacgatagattcaaggttttcgcagactacgaagcgtacgtgaagtgtcaggacaaagtgtcccagttgtacatgaacccgaaagcatggaacactatggtgttgaagaatattgcggcaagcggaaaattctcatcagatagaaccatcaaggaatatgcccagaatatctggaacgtggagccttcggacctgaagatcagcctgagcaacgaatcaaacaaggtcaatgggaac

SEQ ID NO: 132860 - DNA, 2541 bp, Artificial Sequence
  derived and/or modified sequence
atggctaagcccctaacggaccaggaaaagcgacggcagatttctatacggggtatcgtgggagtcgaaaacgtggccgaattaaagaagtctttcaacaggcatttgcactttaccctggtgaaggatcggaacgtggcaaccacaagggactactatttcgccctggctcatacggtgagggaccacctggtcgggaggtggatcaggacacagcagcattattatgataagtgtcctaaaagagtttactacttgtctttggagttctacatgggacggaccctgcagaacacaatgataaacctagggctgcagaacgcctgtgacgaagccatttatcagctgggattagatattgaggaactggaggagatcgaagaggatgcaggcctcggtaatggggggctcggtcgactggccgcctgttttctagactcaatggctactctcggattggcagcttacgggtatggcattcggtatgagtacggtatctttaatcaaaagataagagatggatggcaggtggaggaggcagatgactggcttcgatacggcaacccttgggagaagtctagacccgagttcatgttacccgtgcatttttatggtaaggtcgagcacaccaatacaggcaccaagtggatcgacacccaagttgtgttggcgttgccgtatgatactcccgtgccaggctacatgaataatactgtaaacacaatgagactgtggtccgcccgcgctcctaatgacttcaacctgcgcgactttaacgtcggtgactacatccaggccgtcttagataggaacctagcagaaaatatctctagggtactgtacccaaacgacaactttttcgaaggcaaggagcttcggttgaaacaagagtacttcgtggtcgcggccacacttcaagacatcattcggcgatttaaggccagcaagttcggatcaacccggggggccggcactgtctttgatgcatttcccgaccaggttgcaatccagctcaatgacacccatcccgcactggccatcccggaattgatgcgcatctttgtcgacatagagaagctgccttggagcaaggcatgggaactgactcagaagaccttcgcctatactaatcatactgtgttacccgaagctctggagcggtggccggtagatcttgtggaaaagctgctgccacggcatctggagataatatacgaaatcaaccagaagcacttggaccgcatcgttgctttgtttcccaaagatgtcgatcgcttgcgccgaatgagccttatcgaagaggagggatccaagcgcataaatatggcgcacttatgcattgtgggctcccacgcagtgaacggggtggcaaaaattcactctgatattgtaaaaactaaagtgttcaaagacttttctgagttggagccagacaagtttcaaaacaagacgaatggaataacaccaagacgatggcttcttctttgcaatccaggacttgccgaactgattgccgagaagattggagaggactacgtcaaagacctctctcagctgactaaactgcattcttttctgggcgatgatgtttttctaagagagctcgcaaaggttaaacaggaaaacaaactgaagttttcccagtttctggagacagaatataaggtgaagattaacccgtcaagcatgttcgacgttcaagtgaaaagaatccatgagtataaaagacaattactgaattgcctccatgtaattactatgtataatcggattaagaaggaccctaaaaagctatttgtacctcggacagtgattatcggcgggaaagcagcccccggctaccacatggcgaagatgatcattaagctgatcacgagtgtcgcagatgtcgtgaacaatgatccgatggtcgggtctaaattgaaagtcattttcttggagaattatagggtaagtcttgcagaaaaggtcatccccgctaccgacctctctgagcaaatatccacagcagggacagaggcatcaggcactgggaatatgaagtttatgctgaacggggcactgaccattgggacaatggacggcgctaatgtcgagatggccgaagaggctggggaagaaaacttgttcatcttcgggatgagaatagacgatgtggcggctctggacaagaaggggtatgaagcaaaggaatactatgaggcattgcctgaacttaagctggtgatcgatcagatcgacaacggctttttctcgcctaagcaacccgatcttttcaaggacataatcaatatgctgttttaccacgataggttcaaggttttcgccgactacgaagcctacgtcaaatgccaggacaaggtttcgcagctctacatgaaccctaaagcttggaacactatggtattaaagaatatcgccgcaagcggtaaattttcaagcgatcgtacaattaaggagtatgctcagaacatttggaatgtcgaacccagtgatctgaagatctccctgtctaatgaatcgaacaaggtgaatggcaac

SEQ ID NO: 132861 - DNA, 2541 bp, Artificial Sequence
  derived and/or modified sequence
atggccaagcctctgaccgaccaagaaaagcggagacagatttccattcgcggcatcgttggcgtggagaacgtggccgaattgaaaaagagttttaaccgccatctgcactttacattggttaaagaccgtaatgtggcgaccacgagagactattatttcgctctggctcatacagtgagggaccatctggtcgggcgttggatccgcacgcagcagcactactatgacaaatgtcccaagcgggtatactacctctctcttgaattttacatgggacgaaccttgcagaacacaatgattaatctcggcctgcagaacgcatgcgacgaggccatttatcagctcggcctcgacatcgaagagctggaggaaatcgaggaggacgcaggtctcgggaatgggggcttgggccgtttggctgcctgcttcctcgattcaatggccaccctgggtctcgctgcctatggctatggtatccggtacgagtacggaatttttaatcagaagattcgcgacggttggcaagtcgaagaagctgacgactggctgagatacggcaatccctgggaaaagtccaggcccgaattcatgctgccggtgcacttttacggcaaggtggagcacacgaacaccggaacaaaatggatcgacactcaggtcgttttggcacttccatatgacacccctgtcccaggctacatgaacaacactgtgaatacaatgagactgtggtctgcgagagctccgaatgattttaatttgcgtgatttcaacgtgggcgactatatccaagcagtgttggacaggaatttagccgagaacataagcagagtgctatatcctaacgataactttttcgagggcaaagagctgcggcttaagcaggagtatttcgtagtcgcagctacgctgcaggatatcatccgacgctttaaagcctccaagttcggctcgactaggggtgccggaaccgtatttgacgcgtttccggaccaggtagccatccagctgaacgatacccatccagccctggctatcccggaactgatgaggatctttgtcgacatcgaaaagctcccttggagtaaagcctgggagcttacccagaagactttcgcttacaccaatcatacagtcctgcctgaggccctggaaagatggcctgtcgacctggtggagaaactactgcccaggcaccttgagatcatctacgagattaatcagaaacacttggatcgaattgtggccctgtttcctaaagacgtggatcgcttgcgaagaatgagcttgatcgaggaggaaggaagcaagcgaatcaacatggcgcatttatgtatcgtgggctcgcatgcagtcaacggcgtggccaagattcactctgatattgtaaaaacaaaagtcttcaaggactttagtgagttagagcccgataagtttcaaaacaagacgaacggtatcacgcctcgccggtggttgctgctgtgtaatcccggtctggctgaactgatagccgagaagatcggggaggattacgtgaaggatttatcccagttgaccaaactacactcatttctgggcgatgacgtctttctgcgagaactggccaaggttaaacaggagaacaagttgaaatttagtcagttcctagaaaccgagtataaagtcaagatcaaccctagttctatgtttgatgtgcaggtgaaacgaatacacgagtacaagcgccagttattaaattgcctgcacgtcatcactatgtacaatcggatcaaaaaggatcccaagaagcttttcgtgccaagaacagtcatcattggtgggaaggccgctcccggttatcatatggccaagatgatcatcaagttgatcacaagtgtcgccgatgtggtcaataacgaccctatggtgggcagtaaactgaaggtcatcttcctggagaattatagagtgagcctcgccgagaaggtcattcctgccaccgacctctctgagcaaattagcaccgctggcaccgaggcgagcgggaccggaaatatgaagttcatgcttaatggcgctcttactataggtactatggatggagccaatgtcgagatggcagaggaggccggcgaggagaacttgtttatctttggcatgcggattgacgacgtggcggcactcgataaaaagggctacgaggccaaggagtattacgaggccctgcctgagctcaagctggtcattgatcagatcgacaatggtttctttagcccaaaacagcccgacctcttcaaggacattatcaatatgcttttctatcacgaccgctttaaagtgtttgcagactacgaagcctatgtaaagtgccaagacaaggttagccaactttacatgaaccccaaagcgtggaatacgatggttttaaagaatattgcagcctctggtaagttctcatctgacagaacaatcaaggagtacgcgcagaacatttggaacgtggagccttcagatctgaagatctctctgtctaacgagagcaataaggtgaacggaaat

SEQ ID NO: 132862 - DNA, 2541 bp, Artificial Sequence
  derived and/or modified sequence
atggctaagcctctaacagaccaggagaagcgtcggcagattagtatacggggcatcgtcggagttgaaaacgttgcggagctcaaaaagtctttcaatcggcacctccatttcactctggttaaggaccgaaacgtagcaaccacacgcgattactatttcgctcttgcccataccgtccgtgaccatctcgtgggccggtggattaggacacaacaacattactatgacaagtgtcctaagcgggtttactatctgtctctggagttctacatgggccgaacattgcagaataccatgataaacctgggtttgcaaaatgcctgcgacgaagccatatatcagttgggactggacatcgaagagctcgaggaaatcgaggaagacgcaggcttaggcaacggcgggctgggacgacttgccgcctgcttccttgactcaatggccacactcggcctcgccgcttatggctatggcattcggtacgagtatgggatctttaatcagaaaatacgggacggatggcaggtcgaagaggccgacgactggcttcggtacgggaacccatgggaaaaaagcaggccagaatttatgctcccagtgcacttctatggcaaagtggagcacaccaacacgggaacgaagtggatcgatactcaggtagtccttgccctgccgtatgataccccggtgcctggctacatgaataacacagttaatacaatgaggctgtggtccgcccgcgctcctaatgacttcaacctgagggatttcaacgtcggggactacattcaggctgtgctggatcggaacctggcagaaaacatctccagagtcctatacccgaacgataacttttttgaagggaaggagctacggcttaaacaggagtattttgttgtggcagccacgttgcaggacatcatccgcaggttcaaagccagcaagttcggtagtaccaggggagcaggtacggtattcgatgctttccctgatcaagtggcaattcaactgaatgacacacatccggccctggccatccctgaattaatgcgcatcttcgtagacatcgagaaactgccctggtctaaggcctgggagctcacccagaaaacctttgcctacacgaaccatacagtgctccctgaggcgctggagagatggccagtcgaccttgtggaaaagcttcttcctaggcaccttgagataatctacgaaataaatcagaaacacctcgatcggatcgtagcactcttcccaaaggacgtggaccggctgaggcgtatgagtctcatagaagaagagggatccaagcggattaacatggcccacctgtgcattgttggatcccacgccgtgaacggtgtggccaagattcactccgatatcgtgaaaaccaaggtcttcaaggatttcagtgaactggagcctgacaagtttcaaaacaaaaccaacggtatcacacctcggcgttggctcttgttatgcaacccagggctagccgagcttatcgccgagaaaattggcgaggattacgtgaaagacctctcacagcttactaagcttcacagctttctaggagatgatgtttttttgcgagagctggcgaaagtgaagcaggaaaacaaactcaaattttcgcagttcctggagacagagtataaggtgaaaatcaacccttccagtatgttcgacgtccaggttaagcggatccatgagtataaaagacagctgctcaattgtctccatgtgattaccatgtataacagaatcaaaaaggatccaaagaaactgttcgtaccacggaccgtgatcattggagggaaggcagcacctggctatcatatggccaagatgatcatcaagcttatcaccagcgtcgcagatgtggtgaacaacgatcccatggttggctctaaactcaaggtgatcttcctggaaaattaccgagtcagcctggctgagaaggtgattcctgctaccgacctgagcgagcaaatctcaaccgccggaactgaggcctccgggacgggcaacatgaaattcatgctcaacggcgcacttactatcggtactatggacggcgccaacgtggagatggccgaggaagccggagaagaaaacctgttcatcttcgggatgcggattgacgacgtggccgccctagacaaaaagggctatgaggccaaggagtactacgaggccttgcccgaattgaaactcgtcatcgatcagatagacaatgggttcttttccccaaagcagccggatctctttaaggatatcataaatatgcttttctaccatgaccggtttaaagtctttgccgactatgaagcctatgtgaagtgccaagataaagtctcacagctgtacatgaatcccaaggcttggaatactatggtactcaagaatatcgcggctagtggaaaatttagcagtgatcggacaattaaggagtacgcccagaacatttggaacgttgagccctccgatctgaagatatccctctccaacgaatccaataaggtgaatggaaat

SEQ ID NO: 132863 - DNA, 2541 bp, Artificial Sequence
  derived and/or modified sequence
atggcaaaacccttgaccgatcaggaaaagcgccgccagatctccattaggggtatcgtgggagttgagaatgtggccgagctgaagaagtccttcaacagacacctgcatttcaccctcgtgaaggatcgcaatgtcgctactactcgagattactacttcgccttggcacacaccgtgcgggatcacttggtcgggagatggatcaggactcaacaacactactacgacaaatgcccgaaaagagtctattatctgtcgctggagttctacatgggacgcaccttgcagaataccatgataaatcttggcctccaaaacgcctgcgatgaggctatttaccagctgggactggacatcgaggagctggaggagatcgaggaagatgcagggctgggcaatggaggtctggggcgcctggctgcctgcttccttgattcaatggccaccctggggctcgctgcctacgggtacgggatccggtatgaatacggcattttcaaccagaagatccgggatggatggcaagtcgaagaagccgatgactggctccggtacggaaacccatgggaaaaaagccgcccagagtttatgcttcctgtgcatttctacgggaaagtcgaacacaccaacaccggcactaaatggatcgacacccaggtggttctggcgcttccgtacgatacgccagtgccgggatacatgaacaataccgtaaataccatgcgcctgtggtccgcaagagcccccaatgactttaacctccgcgacttcaatgtgggcgattacatccaagcagttctggaccggaacctcgcggaaaacatttcccgggtcctgtaccctaacgataactttttcgaaggtaaggaactcagactgaaacaggaatactttgtggtggcagcaactctgcaggatatcatccgccgcttcaaggcttcgaagttcggaagcactcggggagccggcaccgtgttcgacgctttccctgatcaggtcgcgatccagttgaatgacactcaccctgcgcttgccatcccggaactgatgagaatcttcgtggatatcgagaagctcccgtggtccaaggcctgggagctgacccaaaaaacctttgcctacaccaaccacaccgtgctccctgaagcgctcgaaaggtggccggtggacctcgtcgaaaagctgttgcccaggcacctggagatcatttatgagattaaccagaagcaccttgaccggatcgtcgcgctgttcccgaaggacgtggatagattgagaaggatgtcgttgattgaagaagaaggaagcaagcgcatcaacatggcccatctttgcatcgttgggagccacgccgtcaacggagtggccaaaatccattccgacatagtgaaaactaaagtgttcaaggacttctcggagcttgagccagacaagttccaaaacaagactaacgggatcaccccacggagatggctgctcctctgcaacccgggactggcagagctgatcgccgaaaagattggcgaagattacgtgaaggatttgtcacaactgactaagctccatagcttcctgggagatgacgttttcctccgggagctcgcgaaggtgaagcaagaaaacaagctgaaattctcacaattcctggaaacggaatacaaggtgaaaatcaacccgtcgtcgatgttcgatgtgcaggtgaagcggatccatgagtacaagcggcaattgctgaactgcctgcatgtgattaccatgtacaacagaatcaagaaggaccctaagaaactgttcgtgccgagaactgttatcatcggaggcaaggcagccccgggatatcatatggcgaaaatgatcattaaactgatcacttccgtggccgacgtggtgaacaacgacccaatggtgggttcaaagttgaaagtcatcttccttgagaattacagagtctccctggccgagaaggtgattcccgccacggacctgtcggaacagatcagcaccgccggaactgaagcgagcggaaccggtaacatgaagtttatgctgaatggcgcattgactatcggaacgatggacggcgctaacgttgaaatggcggaagaagctggagaggaaaacctgttcatctttggcatgcgcattgacgatgtggccgccctcgacaagaagggctacgaggccaaagagtactacgaagccctgccggagttgaagctggtgatcgaccagatcgacaatggcttctttagtccaaagcagccagaccttttcaaggacatcatcaacatgcttttctaccacgaccgctttaaggtctttgctgactacgaggcatacgttaagtgtcaagacaaagtgagccagctgtacatgaaccccaaggcatggaataccatggtgctcaagaacatcgcagccagcggtaagttttcctccgatagaaccataaaggaatacgctcagaacatctggaacgtggagccttcggatttgaagataagtttgtccaatgaatccaataaagtgaacggcaat

SEQ ID NO: 132864 - DNA, 2541 bp, Artificial Sequence
  derived and/or modified sequence
atggcaaagcctcttaccgatcaagagaagagacgtcaaatatccatccgcggtatcgtgggagtggaaaacgtggcagaactgaagaaatcattcaatcgtcatcttcactttaccctggtgaaagatcggaacgtggccaccaccagggactactactttgcacttgcacatactgtgcgggatcacctggtcggaaggtggattagaacgcaacagcattactacgataaatgtcccaagcgcgtgtactacctgtccctggaattctacatggggagaactcttcagaatactatgattaacctcggcctccaaaacgcatgtgacgaggcaatttaccagctgggtctggatatagaagaactggaagaaattgaagaagatgccgggcttgggaatggtgggctgggaaggctggcagcttgcttcctggatagcatggccaccctcggcctcgcagcatacggctacgggattagatacgaatacggcatctttaaccaaaagattcgcgacggatggcaagtggaagaagcagatgactggttgcggtacggtaatccttgggaaaagagcagaccagagtttatgctgccagtgcatttctacggaaaagtggagcacactaacaccggaaccaagtggattgatacccaggtggtcctggccctgccttacgatactcctgtgcccggttacatgaacaacactgtgaacacgatgcgcctttggtcagcacgtgcaccgaatgactttaatctcagggatttcaacgtgggagattacattcaggcggtgctggatcgcaacctcgcagaaaacatctcacgggtgctgtacccaaacgacaacttctttgaaggaaaagaactgcgactgaagcaagagtattttgttgttgccgcaaccctgcaggacataatcagacgctttaaggcctccaagttcggctccacgcggggagcaggaacggttttcgacgcatttccagatcaagttgcaatccaactgaatgacactcatcctgcattggcaatacctgaacttatgagaatctttgtggatattgagaagctgccttggtcgaaggcttgggagcttactcagaaaacctttgcatacaccaaccatactgtactgcctgaagcactggaaagatggccagtcgatctcgtggaaaagctcctgcctcgccatctggagataatctatgagattaatcaaaagcaccttgacagaatcgtggcactgttcccaaaggatgtggatagacttcgcagaatgtcccttatcgaggaggaaggttcgaagagaataaacatggcgcacctttgtattgtcggttcgcatgccgtgaacggagtggccaagatccacagcgatatcgtcaaaacgaaagtgttcaaagattttagcgagctggaacccgacaagtttcaaaacaagactaacggaataaccccacgccgttggcttttgctgtgcaatcctggccttgccgagcttatagccgagaaaattggtgaagattacgtcaaggacctctcgcaactcactaagctccactcattcctcggtgatgacgtctttctgagagaactggctaaggtgaagcaagaaaacaaactgaagttctcacagttcctggaaaccgaatacaaggtgaagataaatccttcctccatgtttgatgttcaagtgaagcgaattcatgaatacaaacgccaactgcttaactgcctgcacgtcattaccatgtacaatcgcattaagaaggatccaaagaaactgtttgtcccacgtacggtgatcattggcggtaaagcagccccaggctaccacatggcaaagatgattatcaaacttattacttcggtggcagatgtggtgaacaatgatccgatggtggggtcaaagttgaaggtgatatttctggaaaactaccgggtgtcgctggcagaaaaggtgattccagcgactgatctgtcggagcaaatttcgactgcaggtactgaggcaagcggaacgggaaacatgaagtttatgctgaatggtgcactgaccattggaaccatggatggagcaaatgtggagatggccgaagaggcaggagaggagaatctgttcatattcggtatgcgtatcgacgacgtcgcagctttggataagaaaggctacgaagcaaaagaatactacgaagcactgcctgagctgaagctcgtgatcgatcagatcgacaacgggttcttttccccgaagcaaccagacctgttcaaagacattatcaatatgctcttctaccatgacagattcaaagtgtttgctgactacgaagcatacgtgaaatgtcaagataaagtctcgcagctttacatgaaccctaaggcctggaacactatggtgctgaagaatattgctgccagcggaaagttttcctcggacagaaccatcaaggaatacgcacagaacatttggaacgtggaacctagcgaccttaagatctccctttctaatgaatcgaataaagtgaacggcaac

SEQ ID NO: 132865 - DNA, 2541 bp, Artificial Sequence
  derived and/or modified sequence
atggctaaaccactcactgaccaggaaaaaagacgccagatctctatcagaggaattgtcggcgtggagaacgtggccgaactcaaaaaatcgttcaacaggcatctccacttcacgctggtaaaggatagaaacgtggccaccactcgggattactactttgcgctcgcacacacagtgagagaccacttagttggccggtggataaggactcagcagcactactacgacaaatgtcctaaaagagtgtactacctgtcactggagttctacatgggccgaactctgcaaaataccatgattaacctgggacttcaaaatgcatgcgacgaggcgatctatcaactcggtctcgacattgaggagcttgaggaaattgaggaggatgcgggcctgggtaacggtggtcttggccgcttagcagcatgctttctggatagcatggcaacactcggattggcagcgtacggatacgggatcaggtacgagtacggcatattcaaccagaaaatccgggatggctggcaggttgaggaggccgacgactggctccgttatggtaatccatgggagaagagccggcccgagtttatgcttccagtgcatttctatggaaaagttgaacatacaaacactggcaccaagtggatagatacgcaggtggtcctcgccctcccgtacgacaccccggtccccggctacatgaacaatactgtaaacaccatgcggctctggtccgcccgagctcctaatgattttaatctgagggacttcaatgttggggactacatccaggctgtgcttgaccgaaatttggctgagaatatctctcgtgttctatatccaaatgacaactttttcgagggaaaggagctgcgcttgaagcaggagtacttcgtcgtggcagccaccctgcaggatatcatccgcaggttcaaggctagcaaattcggctccacaaggggggccggcaccgtgtttgatgcctttcctgatcaagtggccatccaactgaatgacacgcaccctgccctggccattcccgagttgatgcggattttcgtggacattgagaaactaccttggtccaaggcctgggagctgacccagaagacattcgcatatacgaaccacacagtgttgccagaagccctggaaaggtggccagtagatctagtggagaagctcctcccccgccacctggagatcatatatgagatcaaccagaagcatctagacaggatagtggccttgttccccaaagatgttgacaggctgcggaggatgtctctcatcgaggaagaaggctccaagcgaattaatatggctcacctgtgcatcgtcggatcacacgctgtaaacggcgtagctaagattcatagtgatatcgttaagaccaaggtttttaaagacttcagtgagctagagccagacaaattccagaacaaaacaaatggtataacgcccaggagatggctgttgctctgcaaccctggtctggcagaactcattgccgagaagataggtgaggattacgttaaggacctatcgcagctcacgaagctgcacagctttctgggtgacgacgtctttcttcgggaattggccaaagtcaaacaggaaaataaactcaagttctcacagtttctggagactgaatataaggtcaaaatcaatccctcctccatgttcgacgtgcaggtgaagcggattcatgaatataagcgacagttgctgaactgcctccatgtgatcaccatgtataacaggattaaaaaagacccaaaaaagctcttcgtgccgcggacggtgatcataggtggtaaggccgcaccagggtaccatatggcaaagatgataattaagctcatcacctctgtggcggacgtggtgaataacgatcccatggtgggctccaagctgaaggtgattttcctggagaattaccgtgtctctcttgcggagaaagtcatccccgccacagatctcagcgaacagatctctacagcaggaactgaggcgtcaggcacggggaatatgaagtttatgctgaatggcgcactgaccattgggacgatggacggtgccaatgtggaaatggccgaggaggctggtgaagaaaacctgtttatcttcggcatgcgcattgacgacgttgcagcgcttgacaagaaaggttatgaggctaaggagtactacgaggccctgcccgaactcaagctggtgatcgatcaaattgacaatggattcttctcccccaaacaaccggatttgttcaaggacattatcaacatgctcttctatcatgatcggtttaaggtgttcgccgattacgaggcctatgtcaagtgtcaggataaggtgagccagctctatatgaacccgaaggcctggaacacaatggtgcttaaaaatattgctgccagcgggaagttctcttctgatcgaactataaaggagtacgcacagaatatatggaatgtcgagccctctgacctcaagatcagcctatccaacgagtctaataaagtaaatgggaat

SEQ ID NO: 132866 - DNA, 2541 bp, Artificial Sequence
  derived and/or modified sequence
atggctaagccactgacagatcaggaaaaaaggcgccagattagcatcagaggaattgttggggtagagaatgttgcggagctgaaaaagagctttaataggcatctgcacttcaccctcgtaaaggataggaatgttgcaactactcgcgattattacttcgccctcgctcatacggtgagagatcatctggttggaaggtggatcagaacccagcagcattattatgataagtgcccaaagcgagtgtattacctgtccctcgagttctacatggggagaactctgcaaaacaccatgattaaccttggcctccagaatgcctgtgacgaagctatctatcaactggggctcgacatcgaggagctcgaagaaatcgaggaagatgcaggcctggggaacggcgggctcggccgcctggccgcctgctttctggactcaatggccactctggggctcgcagcctatgggtatgggattcggtatgaatacggcatattcaaccagaaaatccgggacggctggcaagttgaagaagcggacgattggctcaggtatgggaatccatgggaaaagtcacgccccgaatttatgctgcccgtgcacttttatggcaaggttgagcacaccaatacggggaccaaatggattgatactcaagtggtgctcgccttaccttatgataccccggtgcctggctatatgaacaacaccgtaaatacaatgaggctttggtcggcaagggctcccaatgacttcaatcttcgggatttcaacgtgggggattacatccaggccgtgctggaccggaatctggctgaaaacatcagtagggtgttgtatcctaacgataactttttcgagggcaaggagttgcgactgaagcaggaatactttgttgtcgctgccacattgcaggacataatccgccgatttaaggccagcaaatttggcagcacccgcggggcgggaacagtcttcgatgccttcccagatcaggtcgccattcagctgaacgatacccacccagcccttgcgattcctgagcttatgcggatatttgtcgacatcgagaagctcccttggtccaaagcttgggagttaacgcaaaagacgttcgcttacaccaatcataccgtcctgcctgaggccttggagaggtggcctgtagacctcgtggagaagcttttacctagacacttagagatcatatacgagattaaccagaaacacctggaccgaatcgtcgccctgttcccaaaagacgtggacaggctgcgtcggatgtccctcatagaggaggagggcagtaagagaattaatatggctcatctttgcatagttggcagtcacgctgttaatggagttgccaagatccattctgatattgttaagaccaaggttttcaaggattttagcgagcttgaacctgataagttccagaacaagacaaatggcattacgcccagacgatggttgctcctttgtaaccccggcctggctgaactgatagcggaaaaaataggggaagactatgtcaaggacttaagtcagcttactaagctgcattcattcctcggtgatgacgttttcctgcgtgaattggccaaggtgaaacaggaaaacaagctgaagtttagtcagtttttggaaacggagtacaaggtgaagattaacccttcaagcatgttcgatgtgcaggtcaagagaatccacgagtacaagagacaattgcttaattgcctgcatgtaatcaccatgtacaatcgtatcaaaaaggacccaaagaaactgttcgtgcctcgcacagtgatcatcgggggcaaggctgcaccaggctaccacatggcgaagatgatcatcaagctcattacatctgtggcagatgtggtcaataacgatcccatggtgggctctaagttaaaagtgatctttctagagaattaccgcgtttcactggccgagaaagttatccccgccaccgacctgtccgaacagatttcgacagccggcaccgaggctagtggcacaggaaatatgaaattcatgctaaacggtgcacttactattggcactatggatggcgccaacgtggagatggcggaggaggccggcgaagaaaatctctttatctttggaatgagaatcgacgacgtggccgcactggacaagaaggggtacgaggccaaagagtactacgaggccctgccagaactgaagctggtaattgaccagatagacaatggcttcttttcaccaaagcagcccgacctttttaaagatatcatcaatatgttgttctatcacgatcgcttcaaggtattcgctgactatgaagcatacgtgaagtgccaggataaggtctcacagctgtacatgaacccaaaggcctggaacaccatggtactgaaaaacattgcagccagcgggaaatttagtagcgaccgtacgatcaaagagtatgcccaaaatatttggaatgttgaacctagtgatctgaagatttcactctctaacgagagcaataaagtgaacggcaac

SEQ ID NO: 132867 - DNA, 2541 bp, Artificial Sequence
  derived and/or modified sequence
atggccaagccgctcaccgatcaggagaagaggcggcagattagtatcagaggaatcgtgggtgttgagaacgtagccgaactgaagaagtcctttaacaggcatcttcacttcaccttggtgaaggataggaatgttgctactacacgggactactacttcgcactggctcataccgtgcgggaccatctggttggaaggtggatcaggacgcagcagcactattacgataagtgccctaagagggtgtattatctaagcctagaattttatatgggcagaaccctccaaaatacaatgattaacctcggcttgcaaaatgcttgcgacgaggcaatctatcaactagggctggacatagaggagctggaggagattgaggaggacgccggcctgggcaatggcggcttagggcgcctggccgcttgttttctcgactccatggccacactcggcctcgcagcctacggttacggcatccgctatgagtacggcattttcaatcaaaagattagggacggctggcaagtcgaggaggccgatgattggctgcgctacggaaacccttgggagaagagccgcccagaattcatgctgcctgtccacttctatgggaaggtggagcataccaacaccggtactaaatggatagatacccaggtggtccttgctcttccctacgacacccccgtgcctggctatatgaataatacagtgaacactatgaggctgtggtctgctcgtgcaccaaacgacttcaatctcagggacttcaatgtgggggattacattcaagccgtgcttgacagaaatctagctgagaatatcagcagggtgctttatccaaacgataatttcttcgaaggtaaggaactgcgcctaaaacaggagtatttcgtcgtcgcagctacgcttcaagatatcatccgcagattcaaagctagcaaatttggatctacaagaggggcgggtacagtattcgatgctttccctgatcaggtcgctatacagctgaatgacacccaccctgcccttgctatccctgagctcatgcgaattttcgtggacatcgaaaagctcccctggagcaaggcctgggagttgactcagaagacctttgcctataccaatcatacagtcctgccagaagccctggaaagatggccagtggaccttgtagaaaagctcttgcccagacacctggagataatctacgagatcaatcaaaagcaccttgatcgcattgtggccctgtttcccaaagatgtggaccggctccgccgtatgagccttatagaggaagaaggaagtaaaagaattaatatggcacacctttgtattgttgggtcccacgcggtgaacggggttgctaaaatacattccgatatcgtgaagaccaaagtgttcaaagacttctcagaactggaaccagacaaattccaaaacaagaccaatggaattacccctaggaggtggctgctgctctgtaaccctgggctggctgagttgatcgcagagaaaatcggggaagactacgtgaaggatctatctcagctgaccaagctacatagcttcctgggtgatgacgtttttctgcgagagcttgcaaaggtgaaacaggagaacaagctgaaattcagtcagttcctggagacagagtacaaggtcaagattaacccctcgagcatgttcgatgtccaggtgaaaagaatccacgaatacaaacggcagcttctaaattgcctccacgtgatcaccatgtataataggattaagaaggacccgaagaagttgttcgtgccccggactgtcattataggaggcaaagctgcccctggataccacatggctaaaatgatcatcaagctgataacgagcgtggctgatgttgtgaataacgacccgatggtggggtcaaaactcaaggtcatttttttggagaactatcgtgtcagcctcgcagagaaggtgatcccagccacagatttgtccgaacagatttctaccgccgggactgaagcctccggaacaggcaacatgaagtttatgctgaacggcgcactcacaattggcaccatggatggggcaaacgttgaaatggccgaggaagcaggtgaagagaacctctttatattcggcatgagaatcgacgacgttgccgctcttgataagaaaggctatgaggccaaggagtactacgaagccctcccagagttgaagcttgttatcgaccagatagacaacgggtttttttcaccaaagcaaccagacctcttcaaggatatcattaacatgctgttttaccatgatagatttaaagtgtttgccgattacgaggcatacgtgaaatgtcaggataaagtctcacagctgtacatgaatccaaaagcatggaacaccatggttcttaagaatattgcagcctccggaaagttcagttccgataggaccatcaaagagtatgcacagaatatttggaatgtggagccatccgacctgaaaatctctctgtcaaacgagtcgaataaagttaatggtaat

SEQ ID NO: 132868 - DNA, 2541 bp, Artificial Sequence
  derived and/or modified sequence
atggcaaaacctttgacagatcaagaaaaacgtaggcagatttctatacgtggtatcgtcggtgtcgagaatgtggccgagctgaagaaaagctttaacaggcaccttcactttaccctggtcaaagacaggaacgttgctacaaccagggattattactttgcccttgcacatactgttagagaccacctggtgggaagatggatccgcacccagcaacactattacgacaagtgccctaagagggtgtactatctttcacttgaattttacatgggacgcactcttcaaaacactatgataaacctgggcttgcaaaatgcctgtgatgaagccatttatcagcttgggctggacatcgaagagctcgaagaaatcgaagaggatgcgggtctcggaaatggtggtttggggcgccttgcagcttgctttttggattccatggctacgcttggactggcagcttatggttacggaataaggtacgagtatggcatattcaaccagaagattagggacggctggcaggtggaggaggctgatgattggttgagatacggtaacccttgggagaaaagcagacccgaatttatgcttcctgtgcacttctacggcaaggtggagcacactaacactggaaccaagtggatcgatacacaagtagtcctggcactcccatacgacacccccgtgcctggctatatgaataatacggtcaatacaatgagactgtggtcggcacgcgctccaaatgactttaacttgagagattttaacgtcggagactatattcaagctgtgcttgataggaaccttgctgagaatatcagcagagtattataccccaacgataacttttttgagggcaaggagttgagacttaagcaggagtatttcgttgtggctgctactctgcaagatatcattaggaggtttaaagcctcaaagtttggaagcacaagaggggcgggaacagttttcgatgcattcccagatcaggtggctatccagcttaacgatacccatccagctttggctatccctgagcttatgcgaattttcgttgatatcgaaaaacttccatggagcaaagcatgggagttgacacaaaaaactttcgcgtacacaaatcacacagtacttcccgaagccctggaaagatggcccgtggacttggtcgagaaactcttaccccgacatctcgagattatctacgaaatcaaccagaagcatcttgacagaatcgttgcccttttccccaaagacgtcgatcgattgcgcagaatgagcctcattgaggaagagggcagtaaaagaatcaacatggcccacctttgcattgtcgggtcgcatgctgttaatggcgtggctaagatacactccgacatcgtcaagaccaaagtgtttaaagacttttcggagttggagccggacaaatttcaaaataaaacaaacggtattactcctcgtcgctggctcctgctctgcaaccctggactcgcagaactgatcgctgaaaaaataggtgaggactacgtgaaggacctgtcccaactcacaaagcttcatagctttctgggagacgatgtcttcctacgcgaactcgctaaggtcaaacaggagaacaagcttaagttcagccagtttttggagaccgaatacaaagtgaagattaatccaagctcgatgtttgatgtacaggtcaaaaggatccatgaatacaagagacagctcctaaactgcctgcacgttattaccatgtacaaccgcatcaaaaaggatcccaagaagctgtttgttccaaggacagtcattattgggggcaaagcagcacccggctaccacatggccaaaatgattataaaactcattacctccgtggccgatgtcgttaacaacgaccctatggtcggtagcaagctgaaagttatctttctggagaactatagggtcagccttgctgagaaagtgattcctgctacagatttgtcagagcaaatctccactgccgggaccgaggctagcggcacgggaaacatgaagtttatgcttaatggagcactgaccataggaacaatggatggagctaacgtggagatggctgaagaggccggggaggagaacttgttcatctttggaatgaggatcgatgacgttgccgcactggataaaaaaggttacgaagcgaaagagtactatgaggcactgcctgagctgaaactggtaattgaccaaattgacaacgggtttttttctccaaaacagccggatctctttaaagatattatcaacatgctcttctatcacgataggtttaaggtttttgctgactatgaagcgtatgtcaaatgccaagacaaagtgtctcaattgtatatgaatcccaaagcctggaacactatggtgctgaaaaacattgcagcaagcggcaaatttagttccgacagaaccatcaaggagtacgcccaaaatatttggaacgtcgaaccatcagacctcaagattagtttgagcaacgaaagcaataaggtcaacggcaat

SEQ ID NO: 132869 - DNA, 2541 bp, Artificial Sequence
  derived and/or modified sequence
atggccaaacccctcaccgaccaagagaagcggcgccagattagcataaggggcatcgtcggcgtggaaaacgtcgcagagttaaagaaaagcttcaaccggcaccttcactttacactggtcaaggacaggaacgtggcgaccactcgtgattactactttgccctggctcatacagtccgggatcatctggtaggtaggtggatcaggacacagcagcattactatgataaatgtccgaaaagggtttactacttatcactggaattttatatggggcggacactccagaatactatgatcaacctgggtctccagaatgcatgtgatgaggccatataccagctgggcctggacattgaggagctggaagagatagaagaagacgccgggctgggcaatggcgggctgggtcgactggccgcgtgtttcctcgatagtatggccacactgggactcgcagcctacggatacggcattcgctacgaatatggcatattcaaccagaaaatccgggacggctggcaggttgaggaggccgatgattggctacgatatggtaatccatgggagaagtcccggccggagttcatgcttcccgtgcacttctatgggaaggtggaacacacaaatacaggcactaagtggatcgatacgcaggtcgtgctggcgttaccctacgatacccccgtgcccggctatatgaataatactgtcaataccatgcggctttggagcgccagagcccccaacgattttaatctacgtgatttcaatgtgggagactacattcaggccgtgctggaccggaatctggccgaaaacatttcccgggtcctgtaccccaacgacaacttttttgagggaaaagaactccgactgaaacaggagtacttcgtggtggctgccaccctgcaagatataattaggagatttaaagcctctaaattcggttcaacacgaggcgcagggaccgtgttcgacgccttcccagaccaggtcgctatacagctcaacgatacccatcctgctctggccatcccagagcttatgagaatctttgtggatatcgagaaactgccatggtcaaaggcctgggaactgacacagaagaccttcgcctatactaatcacactgtgctccctgaagccctagaacgatggccggttgaccttgttgaaaagttgctccccagacacctcgagatcatctatgagataaatcagaagcacctcgatcgaattgtggctctgtttcccaaagatgtggaccgtctcagacgcatgtccctgatagaggaggagggctctaagaggattaatatggcacatctttgcatcgtgggtagtcacgccgtgaatggagtggccaaaatccactctgatatcgtgaaaaccaaagtcttcaaggacttttctgaactggaacctgataagttccaaaacaagacaaacggtatcacccctaggcggtggttgcttttatgcaatcccgggctcgctgagctgatagccgaaaagattggcgaggactatgtaaaggatctgtcccagctgaccaaactgcatagcttcctaggagacgacgttttcctccgcgagctggccaaagtgaaacaggaaaataagctgaagttttcccagttcctggagaccgagtataaagttaagataaatccttcgtctatgttcgacgtccaagtgaaaaggattcatgagtacaagcgccaactgctgaattgcctgcacgttatcaccatgtacaatcggatcaaaaaggacccaaagaaactgtttgtgcctcggaccgttatcattggcggcaaagcagccccaggttatcacatggccaagatgataattaagctgatcacaagcgtagcagatgtagtcaacaatgaccctatggtcggttctaagttgaaagtgatcttccttgaaaattatagagtctccctcgccgaaaaagttatcccagctactgatttatctgaacagatctcaaccgcaggcacagaggcctccggtaccggtaacatgaagttcatgctgaatggtgccttgacaatcggtacaatggacggagccaatgtcgagatggcagaagaagctggtgaagagaatttgttcatcttcgggatgcgaattgacgatgtagccgcattggataagaaaggatacgaagccaaagaatattatgaggcgctcccagagctgaagctggtgatagatcagatagataatggatttttctcacccaagcagccagacctgtttaaggatattattaacatgctgttctaccatgaccggttcaaagttttcgcggactacgaggcttatgttaaatgccaagacaaggtgagtcagctgtacatgaatcctaaagcgtggaataccatggtgctgaagaacatcgccgcttctggcaagttcagctctgatagaaccataaaggaatacgcccagaatatttggaatgtcgaaccttcggacctaaaaatctcgttgagcaatgaatccaataaggtgaacggaaat

SEQ ID NO: 132870 - DNA, 2541 bp, Artificial Sequence
  derived and/or modified sequence
atggctaagcccctgactgatcaggagaagagaaggcaaatttcaattagaggaatcgtgggcgtggagaacgtggctgagctcaagaaatccttcaataggcaccttcacttcactctggttaaggatcgcaatgtggcgactactagagactactatttcgccctcgcccacaccgtccgcgatcatttggtgggaagatggatccggacacagcagcactattacgataagtgccccaagagggtctactacctgagtctcgagttctatatgggccgaacgctccagaacaccatgattaacctcggtctgcaaaatgcctgcgatgaagcaatctatcaacttggattggacattgaagagctggaggagatcgaggaagacgctggccttggcaacgggggcctcggccggctcgccgcttgctttcttgacagtatggcaacactcgggctggcagcctatggttacggaatccgatacgagtacggaatctttaatcagaagattagagacggatggcaggtagaagaggctgacgactggctgaggtacggcaacccgtgggaaaaaagtcggcccgagttcatgctgcccgttcatttttacggaaaggttgagcacaccaacacaggcaccaagtggattgacacacaggtggttctggctctgccttatgatactcccgtgcccgggtatatgaacaacacagtcaatactatgcgactgtggagtgcacgcgctcccaacgactttaatctgagggattttaatgtcggcgactacatccaagcagtgttggacaggaacctcgctgaaaacattagcagggtgctgtatccaaacgataatttttttgagggcaaggagctgcggttgaagcaggagtacttcgtggtggccgcgacactgcaggacataatcaggcgcttcaaagcttccaaattcggcagcactaggggcgctggaaccgtgttcgatgccttccccgaccaggtggccattcagctcaacgacacccacccggcccttgctataccagagctgatgagaatattcgtggacattgaaaagctgccgtggagcaaggcttgggaactgacacagaaaactttcgcttacaccaatcatacagtccttccagaagcactggaacgctggccagtagatcttgtggaaaagctgctccccagacatcttgaaataatttatgagatcaaccaaaagcatttggacaggatagtcgctctgtttccgaaggacgtggaccgcctccgcagaatgtcactgattgaggaagagggctctaagagaatcaatatggctcatttgtgtattgtagggtcccatgcagtgaatggcgtggctaagatccattccgatatcgtcaaaacaaaggttttcaaggatttctccgagcttgagcctgacaagtttcagaataagaccaacggaataactccccggagatggcttcttctttgcaatcctgggctcgcggaactgattgcagaaaaaattggcgaggactacgtcaaagacctgtctcagttgaccaagctgcatagctttctgggcgatgacgttttccttagagagctcgcaaaagtgaagcaagaaaacaaactgaaatttagtcaattcctcgagactgagtataaagtgaagatcaacccttctagcatgttcgacgtgcaggtgaagcggattcacgaatacaagcggcagcttctgaattgcctccacgtgatcactatgtacaatcgaataaaaaaagaccccaaaaagctgtttgtcccacggactgttattattggaggaaaggcagctccgggctaccatatggccaagatgattattaagttgatcacttcagtggccgatgtagttaacaacgacccgatggttggaagcaagctgaaagtgattttcctcgagaattatagggtttctttggctgagaaggtgataccggccactgacctcagcgagcagatctctaccgctggaacagaggcttctggcacgggtaacatgaaatttatgctgaatggagcgctcaccatcggtaccatggacggcgcaaacgtggagatggcagaggaggctggggaagaaaacctgtttatctttggaatgcgcattgacgatgtggcagcactggacaagaagggttacgaagcaaaggagtactatgaggccctgcctgaactgaaacttgttatcgaccagatcgacaacggtttcttctcccctaagcaacccgacttgtttaaggatatcatcaacatgctgttttatcatgatcgattcaaggtcttcgctgactatgaggcttacgtgaaatgccaggacaaggtgagtcagttgtatatgaatcctaaagcttggaacaccatggtcctcaaaaacatcgccgcatctggcaagttttcctctgatcgaacgattaaggagtacgcacagaacatctggaacgtggagccctcagaccttaaaatcagcctctccaacgagagtaacaaggttaatggcaat

SEQ ID NO: 132871 - DNA, 2541 bp, Artificial Sequence
  derived and/or modified sequence
atggccaagccgctgacggatcaggagaagcgccgacagatctctattcgaggcatcgtaggtgtggagaacgtcgccgagctcaagaagtcgttcaaccgccatctccactttacgctcgtcaaggaccgaaacgtggcgactacgcgcgattactacttcgccttggcacatactgtgagggaccacttggtcggtcgctggatccggacccagcagcactattacgacaagtgtccgaagagggtatactacctgtcgctggaattctacatgggccgtaccctgcagaacaccatgatcaacctcggtctccagaacgcctgtgacgaagcaatctaccaattgggactcgatatcgaagaacttgaggagatcgaggaggacgctggactggggaatggtggtctgggccgtctcgctgcctgttttttggacagcatggcaacgctaggcctcgctgcctacggctacggcatccgctatgagtacggtatttttaaccagaagatccgtgacgggtggcaggttgaagaggccgatgattggttgcgctatggaaacccttgggagaagtcgcgccctgagtttatgttgccggtccacttctatggcaaggtggaacataccaatactggtaccaaatggattgatactcaagtcgtgctggccctcccgtatgatacccccgtgcctggttatatgaataacacggtcaataccatgcggctctggtccgcccgggcgcccaacgattttaacctgcgcgatttcaatgtcggtgactacatccaggcggtgctggaccgtaaccttgccgagaacatctcccgggtcttatatcccaacgacaatttcttcgagggcaaggaattgcgtctaaagcaagagtacttcgtagtggcagccactctccaggacattatccggaggttcaaggcctccaagtttggctcaactcgcggtgctggtaccgttttcgacgcgttccctgaccaggtcgccatccagctgaatgatacacaccccgccctggctatccctgagcttatgcgcatcttcgtcgacatcgaaaagctgccgtggagcaaggcgtgggaactcacccagaagaccttcgcctacactaaccatacggtgctgcccgaggcgttggagcgctggcccgtcgacctggtcgagaaacttctcccacgtcatctcgagattatctacgaaatcaatcaaaagcacctggatagaatcgtggcactattccctaaagacgtagatcgtctgcgacgcatgtctctcatcgaggaggagggctccaagcgtatcaatatggctcacctctgcattgtaggatcccacgccgtgaacggggtcgcaaagattcatagtgacatcgtcaagactaaagtattcaaggacttctccgagctggagcccgacaaattccagaacaagacgaacggtataacgccccgccgctggctgcttttatgcaaccccggcctagccgagctgatcgccgaaaagattggagaagattatgtgaaggacctgagccaattgaccaaactccattccttccttggagacgatgtttttctcagggagttggccaaagtcaagcaggagaacaagttaaagttcagccaattcttggaaaccgagtacaaggtcaaaattaacccttcttctatgttcgatgtccaggttaaacgtatacacgagtacaagaggcagctcttgaactgcctccacgtcatcacaatgtacaataggatcaagaaagacccaaagaagctctttgtgccccgtaccgttatcatcgggggcaaggccgcccccggttaccacatggccaagatgatcatcaagctgatcacctccgtggcggatgtggtcaacaacgaccccatggttggatctaagctgaaggttattttcttggaaaactaccgcgtttccctcgcagagaaggtgatccctgccaccgacctgtccgagcaaatctcgactgctggcactgaagcctctggcacaggtaatatgaagttcatgttaaacggtgcccttaccatcgggaccatggatggagccaacgttgagatggctgaggaggccggcgaggagaaccttttcatctttggcatgcgaatcgatgacgtcgccgcgctggacaagaagggatatgaggctaaggagtactacgaggcactgccggaattaaagctggtgatcgatcaaatcgataatggattcttcagtcctaagcagcccgacctctttaaggacatcataaacatgctgttctatcatgaccggtttaaggtctttgctgattacgaagcttacgtgaaatgccaggataaggtcagccaactctacatgaaccctaaggcgtggaacacgatggtgctgaaaaacattgctgcctccggcaaattttcctctgatcgcaccatcaaggagtacgctcagaacatctggaacgtcgagcctagcgatctcaagatcagtctttcaaacgaaagtaacaaggtgaatggaaac

SEQ ID NO: 132872 - DNA, 2541 bp, Artificial Sequence
  derived and/or modified sequence
atggcaaagccactaacagaccaggaaaaaaggcggcaaatttcaattcgtggaattgtcggtgttgaaaacgttgccgaactcaagaaatctttcaaccgtcatctacactttacgttggtgaaggataggaatgtcgctacaacccgcgattattacttcgctctggcgcataccgtgagggatcacctcgtcggtagatggatcagaacacaacaacactactatgataagtgtcccaagcgtgtatattatctctctctcgaattttatatgggacgtactcttcaaaatacgatgatcaacctcggactccaaaacgcttgtgacgaagcaatttatcagttagggcttgacatagaagaattggaagaaattgaagaggacgctggactaggaaatggtggacttggccgtcttgctgcttgcttccttgattccatggccactctgggattggccgcctatggatatggcatccgctatgagtatggaattttcaaccagaagatacgggatggatggcaagttgaagaggctgacgactggctgaggtatggtaacccttgggaaaagtcgaggccagagtttatgctaccagtccacttttacggaaaagtagaacacactaatactggtaccaaatggatagacactcaggttgtactcgctctcccatacgacacgccagtccctggatatatgaacaacactgttaacacaatgagactttggtcagcccgtgctcctaatgattttaatctacgtgattttaatgttggagattacattcaagcggtcctggatagaaatttggccgaaaatatatcacgggtgttgtatccaaacgacaatttcttcgaaggaaaggaattgagattgaagcaagagtactttgtcgtggcagcaacactacaagatattattagacgattcaaagcgagtaaattcggttccacacgaggagcaggaacagtctttgatgcgttcccagatcaagtcgcaatccaacttaatgatacacacccagctttggctattccagagctcatgcgtattttcgtggacattgagaaattaccttggtccaaggcatgggagttgacccagaagacgtttgcctatactaaccatacagttctcccagaggcacttgaacgttggccagttgatttggtagaaaaacttttaccacggcacttggaaattatttacgaaattaaccagaaacatctagaccgtattgtagctttgttcccaaaggacgtggaccgtttgcgtcgaatgtccttgatagaagaagagggatctaaacgaattaacatggcgcatctatgcattgttggctcccatgcagttaacggagtggctaagatccattccgatatagtcaagactaaagttttcaaggatttttcggaacttgaaccggacaagttccaaaataagaccaacggaataacaccacgtagatggttgttgttgtgtaacccaggtctcgctgagttaatcgcagagaaaattggagaagattacgttaaagatctttcgcagctgactaaacttcactccttccttggagatgatgtgtttctcagggaactagcaaaggttaagcaggaaaacaagctcaaatttagtcagtttcttgaaaccgaatataaggtcaagattaatccaagcagcatgtttgatgtccaagtaaagcgcatccacgagtataaaaggcaattactcaattgtttgcacgtcatcacgatgtataatcgtataaagaaggaccctaaaaaattgtttgtgccaaggacagtgatcatcggaggaaaagcagcacctggatatcatatggctaaaatgattatcaaacttatcacctccgttgcggatgtagtaaataatgatcctatggtgggatcaaaactaaaagttatatttttggaaaattatagagtttctttagctgaaaaggttatacccgcgactgatttgagtgagcaaatttcaacagcgggtacggaagcaagtggtacaggaaatatgaaatttatgcttaatggtgcgttaactatcggaacaatggatggagctaatgtggaaatggcagaagaagcaggtgaggagaatctgtttattttcggaatgcgaattgatgatgtcgctgctctcgataaaaaaggatatgaagcaaaggaatactatgaagccttaccagaactcaagctcgttattgatcaaatcgacaacggtttcttctctccaaaacaacctgatctgtttaaagatataatcaatatgcttttttaccatgatagattcaaggtgttcgcagattatgaagcctatgttaagtgccaagataaggtatctcaactgtacatgaacccaaaagcttggaatacaatggttctaaaaaatattgcagcctcaggaaagttctcatctgatcgcactattaaggagtacgctcagaacatttggaatgttgagccgagtgatctgaaaatctcattgtcgaatgaatcaaataaagtcaacggcaat

SEQ ID NO: 132873 - DNA, 2541 bp, Artificial Sequence
  derived and/or modified sequence
atggcaaagccgctcaccgaccaggagaagagacgccaaatcagcattcgcggtatcgtgggagtggagaacgtcgcggaactgaagaaatccttcaatagacacctccactttacgctcgtgaaggatcggaacgtggcgactacgcgggattactactttgcgctcgcccacacggtgagagatcacctcgtcggtcgctggattcgcacccaacagcactactacgacaaatgcccaaagcgcgtctactacctgagcttggaattctacatgggacggactcttcaaaacactatgatcaacctgggcctgcagaacgcgtgcgacgaggccatctatcaattgggacttgatatagaggagctggaggaaatcgaagaggacgcaggactggggaacggggggctgggtcgtctcgcagcctgtttcctcgatagcatggccactctgggtttggctgcatacggctacgggatcagatacgaatacggaatattcaatcagaagattcgcgacggatggcaggtcgaagaagcagacgactggctgcggtacggaaacccgtgggagaaatcccgccccgagttcatgctgccagtacatttctacggcaaggtggaacacactaataccggaactaagtggatcgatacccaggtcgtgctggccttgccttacgatacccctgtgccgggatacatgaacaataccgtgaacaccatgcgcctgtggtccgcccgcgccccaaatgacttcaacctccgcgacttcaatgtcggcgattacatccaggcggtgttggacagaaatctggcagagaacataagtcgggtcctgtacccgaacgacaacttcttcgaaggaaaggagctgaggctgaaacaagagtacttcgtcgtggcagctacccttcaagatatcatcaggcgctttaaggcgagcaagttcgggtcgaccaggggcgctgggaccgtgttcgatgctttcccagaccaagtcgcgatccagttgaatgacacccacccagccctggcgattccggagctgatgaggatttttgtggacattgaaaaactgccctggtcaaaggcatgggaactgactcagaaaactttcgcgtacaccaaccataccgtcctccctgaggcgcttgaaagatggcctgtggaccttgtggagaagctgctgccaagacacctcgagatcatttatgaaatcaaccagaagcacctcgatcgcatcgtagccctctttcctaaggacgtcgaccggctgagaaggatgtcactgatcgaagaagaaggatccaaacggatcaatatggcccatctgtgtatcgttggctcccacgcggtgaacggcgtggcaaagatccatagcgatatcgtgaaaaccaaggtgttcaaggatttctcggagctcgaaccggataagtttcagaataagaccaatggcatcacgccgcggcgctggcttctgctctgcaatccgggactcgctgagctgatcgcagaaaagatcggtgaggactacgtgaaggatctctcgcagctcactaaacttcatagcttcctgggagacgacgtttttctcagagagctggctaaggtgaagcaggaaaacaagctcaagttttcgcagtttctcgagactgaatacaaagtgaaaatcaacccctcctctatgttcgacgtgcaggtgaagcggatccacgagtacaaacggcagctcttgaactgcctgcatgtcatcactatgtataaccgcattaagaaggaccctaagaaactcttcgtgccccgaactgtgatcatcggcggaaaggcagccccgggctatcatatggccaagatgatcatcaagctgatcacctcggttgccgatgttgtcaacaatgatcctatggtgggctcgaaactcaaagtcatcttccttgagaactaccgagtgtccctcgccgagaaggtgatccctgcaactgacctctcggagcaaatctcgaccgctggaaccgaggcgtcaggcaccggaaatatgaagttcatgctgaatggggctcttaccattggaactatggacggagccaacgtggaaatggcggaagaagccggtgaagagaacctgttcatcttcgggatgcggatagatgatgtggccgcacttgacaaaaagggatacgaagccaaagaatactacgaagccctgccagaactcaagctcgtaatcgaccaaatcgataacggtttcttttcccctaagcaaccggacctgttcaaggacatcatcaatatgctgttctaccacgacaggttcaaagtgtttgcagattacgaagcctacgtgaaatgtcaggacaaagtttcccagctttacatgaacccgaaggcgtggaataccatggtgctcaagaacatcgccgcttccggaaaattctcgtcggataggactatcaaggaatacgcccagaacatttggaacgtggaaccaagcgacttgaagataagcctcagcaatgagagcaataaggtgaacggcaac

SEQ ID NO: 132874 - DNA, 2541 bp, Artificial Sequence
  derived and/or modified sequence
atggcaaaaccgctgacagaccaggaaaaacgaagacagatcagcattaggggtatcgtaggtgtagagaacgtggcagagctcaagaaaagctttaacaggcacttgcacttcacgctcgtcaaagatcgcaacgtcgccaccacaagagactattactttgcgctggctcacactgtccgcgaccacctagtgggtagatggatcaggacacagcagcattactacgacaagtgtcccaaaagggtgtattacttgtccctggaattctacatgggtcgaaccctccagaacaccatgatcaacctgggcctgcaaaatgcatgtgatgaagctatttaccagttggggctggatatcgaggagctcgaggaaatcgaggaagacgcaggcctggggaatgggggtttagggcgactggcagcatgctttttagatagcatggccaccctgggtttagctgcttatggatacgggattaggtacgagtacggaatatttaatcagaagatccgcgacggatggcaggttgaggaagctgacgattggctgcgctacggaaatccttgggagaagagtaggcctgaattcatgttacccgtccacttctatggaaaggtcgagcacacaaacactgggaccaaatggatagacacacaggttgttctcgctctgccctatgatacaccagtgcctggctacatgaacaacactgtgaacaccatgcgcttgtggtccgctcgggcccccaatgatttcaatctacgtgattttaatgtcggcgattatatccaggcagtcctggaccggaacctcgccgagaatatatccagggtgctctatcctaacgataacttcttcgagggtaaggagcttcgcctcaagcaagagtacttcgtcgtggctgccaccttgcaggatatcatccggaggttcaaagcctctaagtttggctccactcgtggcgcgggtacagtatttgacgccttcccagaccaggtggcgattcagctgaatgatactcaccccgcattggccataccagagcttatgcgtatatttgtggatattgagaagttgccttggagcaaggcttgggagctaacccaaaaaacctttgcctatacaaatcacacagtcctccccgaggcactagaaagatggcctgttgaccttgtcgaaaagctcctgccacggcatctggagatcatttacgaaatcaaccagaaacatcttgaccggattgtcgccctgtttcccaaggacgtggaccggctccgtaggatgtcactgattgaagaggaaggatccaaacggataaatatggcacacctgtgcattgtcggctcccacgccgtgaatggagtagctaaaattcacagcgatatcgtaaagacaaaggtttttaaagacttcagcgaactggaaccagataagttccagaacaagacaaacggtatcacccctcgccggtggctgctgctgtgcaacccaggactggcagagttgattgcagagaaaattggggaagattatgtgaaagatctgtcccagctcaccaagctacactcatttcttggggacgacgtgttcctgagagaactcgccaaggttaaacaggaaaataagctaaagttttcccagtttttggagaccgaatacaaagtcaagatcaacccatcttctatgttcgacgttcaggtcaagcgcatacacgagtataagcgacaactcctcaattgcttgcacgtgatcacgatgtacaaccggatcaagaaggaccccaaaaagctgttcgtcccaagaactgtaattatcggcggaaaagccgctcctggctaccacatggcgaagatgatcattaagcttatcacatcagtggccgacgtggtaaataacgaccccatggtggggagcaagctcaaggtaatattcttggagaactaccgggtctccttggccgagaaggtgatcccggccaccgacctaagcgagcagattagcacagctggcaccgaggcatcagggactggaaatatgaagttcatgctaaacggagctctcaccatcggcacaatggacggagccaatgtggaaatggctgaagaggcaggcgaagaaaacttattcatattcggcatgagaattgatgacgtagctgctctcgataagaaggggtatgaagctaaggagtattacgaagcgcttcccgagttgaaattagtgatcgaccagattgataacggcttcttctcgccaaaacaaccagatctattcaaagacatcatcaatatgctgttctaccatgaccgctttaaagtgttcgctgactatgaggcatacgtgaagtgccaggataaggtgtctcagctttacatgaatcccaaagcctggaatacaatggtccttaagaatattgcggcatcaggaaagttcagctcagatagaactataaaagaatatgcccagaatatttggaatgtggaacctagcgatttgaagatcagtctgagtaacgaaagtaataaggtgaacggtaat

SEQ ID NO: 132875 - DNA, 2541 bp, Artificial Sequence
  derived and/or modified sequence
atggcaaagcctctcacggaccaggagaaacggaggcaaatctcaattagaggcatcgttggagtggaaaatgtggctgaactgaagaaatccttcaataggcatctgcatttcacgctcgtgaaggatcgcaacgtcgcaactacgcgggattactatttcgcgctggcgcacaccgttcgggaccacctggtgggccgctggatcagaacccagcagcattactacgataagtgcccaaaacgcgtgtactacctctccctggagttctacatgggacgcactctgcaaaatactatgatcaatctgggactccaaaacgcctgcgacgaggccatctaccaactgggacttgacattgaggaacttgaggaaatcgaggaggacgcaggactcggcaacggcggcctgggaaggctcgcagcctgcttcctcgattcgatggctacgctcggactggctgcctacggatacggcatccgctacgagtacggaatcttcaatcagaaaatcagagacgggtggcaggtggaagaggcagacgactggctccggtacggcaacccgtgggagaagagccgcccagaattcatgctgcccgtccatttctacggcaaggtggaacacaccaataccggaactaaatggatcgatactcaggttgtcctggcgctgccatacgacaccccggttcctgggtacatgaataacaccgtgaatactatgagactctggtccgcccgcgccccaaatgacttcaacctccgggacttcaacgtcggggactacatccaagcggtcctggaccggaacctggctgagaacatctcaagagtgctgtacccaaacgataacttctttgaggggaaggaactgcgcctgaagcaggaatacttcgtggtggcggcgaccctgcaagacatcatcaggcggtttaaggcttcaaagttcggctcgacgcggggcgcggggaccgtgttcgatgcattcccagatcaagtggcaatccaactcaacgatacccacccggcgctcgcgatccccgagctcatgagaatcttcgtcgacatcgagaaactcccctggtccaaggcctgggagcttactcaaaagactttcgcatacactaatcacactgtgctgccggaagcgttggaacggtggccggtcgacctggttgagaagttgttgcctagacatctcgagatcatctacgagatcaaccaaaagcatttggatcgcatcgtggcactcttcccgaaggatgtcgacagacttcggcggatgtcgctcatcgaagaggagggctccaagcgcatcaacatggcccatctttgtattgttggatcgcacgccgtgaatggcgtggctaagattcactcggacatcgtgaaaaccaaggtgttcaaggacttcagcgaactcgaaccagacaagttccaaaacaaaactaatggaatcaccccgcgacgctggctcctgctctgcaatccaggactcgccgaactgattgcagaaaagatcggtgaagattacgtcaaggacctgtcgcaactcaccaaactccacagcttcctgggggatgacgtgttcttgcgggagttggctaaggtcaagcaggaaaacaagctgaagttttcccagttcctcgagactgaatacaaagtgaaaatcaacccgtcgagcatgtttgacgtacaggtgaagcgcatccacgaatacaagcggcagctgctgaactgcctgcatgtgatcaccatgtacaacagaatcaagaaagatcctaagaagctgttcgtccctcggacggtcataatcggagggaaggcggcccctggataccacatggcaaagatgatcatcaagctcatcacctcggttgccgacgtggtgaataatgatccgatggtcgggtccaaactcaaggtgatcttcctcgagaactaccgagtgtctctggccgagaaggtgatcccagcgaccgatttgtcggaacaaatatcgacggctggaaccgaggcttcaggtaccggcaatatgaagttcatgctgaatggggcactgaccatcggcactatggatggagcgaatgtcgagatggcggaagaagcgggtgaagaaaacctgttcatcttcggaatgaggattgacgacgtggcagctctcgacaagaagggatacgaagcaaaagaatactacgaggccctgccggaactcaaacttgtgatcgaccaaattgacaacggcttcttttcacctaaacaaccggacctgttcaaggacatcattaacatgctgttctaccatgacagattcaaagtgttcgctgactacgaagcctacgtgaagtgtcaggacaaggtgtcacaattgtacatgaacccaaaagcctggaatactatggtgctgaaaaacatcgccgcaagcggaaaattcagctccgaccgaaccataaaagagtacgcacagaacatttggaatgtggagccctccgatctgaaaatcagcctttcaaacgagtctaacaaggtgaatggaaac

SEQ ID NO: 132876 - DNA, 2541 bp, Artificial Sequence
  derived and/or modified sequence
atggcgaagcccttgactgaccaggagaagcggaggcagatctccataaggggcatagtgggggtggaaaatgttgcagagcttaagaaaagctttaatagacacctgcacttcaccctggttaaggataggaacgtggccaccacccgtgactactatttcgcgctggcacacaccgttagggatcacctggtggggaggtggatcaggacacagcaacattactacgacaaatgccctaaacgagtatactatctgagcctggagttctacatgggacgcacattgcaaaacacgatgatcaacttgggactgcagaacgcatgtgatgaagcaatttatcagcttggcctggacattgaggagttggaagagattgaggaggacgctggcctgggaaatggaggtctcgggagactggcagcttgctttctggactctatggctactttgggtttggcagcatatggctatggcattaggtacgagtacgggatttttaaccaaaagatacgggatggatggcaggtcgaggaggctgacgactggctccggtatgggaacccctgggaaaagagccgccctgaattcatgctgcctgtgcatttttacggaaaggtggagcatacaaacaccgggaccaagtggatcgatacccaggttgtcctcgccttgccatacgatacccctgttcctggatacatgaacaataccgtcaacaccatgcggctgtggagcgctcgggcccccaacgattttaacctgagggattttaacgtgggggattacattcaagccgttctcgatagaaatctagccgagaacatttcaagggtgctctatcccaacgacaacttcttcgaaggaaaagaactgaggctgaagcaggagtactttgtcgtcgcagctacacttcaggacattattcgccggtttaaagctagcaaattcggatccaccaggggagcaggcacagtgtttgacgccttccccgaccaggttgcgatccaattaaacgatacacatcctgctctggctatccctgaactcatgagaatatttgttgatatcgagaaactgccttggtcaaaggcttgggagctcacacagaaaaccttcgcttacaccaaccataccgtactcccagaggctttggaacgatggcctgtggacctcgtggagaagctccttcccaggcaccttgaaatcatatacgagatcaatcagaaacatcttgatcggattgtcgcactcttccccaaggacgtcgataggctccgcagaatgtcactgatcgaggaagagggatccaaaaggattaacatggcacacctgtgcattgtggggagccacgccgtgaacggtgtggcaaagattcatagcgacatcgttaaaaccaaagttttcaaagacttcagcgagctggaaccagacaaattccagaataaaacgaacgggataacccctcgcagatggctgttactctgtaaccctggcctggcagagcttatcgccgaaaagatcggagaggattatgtcaaggacctttctcagttgaccaagcttcactcctttctcggtgacgatgtgtttctcagggagttggcgaaggtaaaacaggaaaataagctgaaattttcacagttcctcgagactgagtacaaggttaagatcaacccctctagtatgtttgatgtccaagtgaaacgaattcacgaatacaaaagacaattgctgaactgtcttcatgttatcacaatgtacaaccggataaagaaggacccaaagaagctgtttgtccccaggactgtgatcatcggcggtaaagcggctcctgggtatcatatggccaaaatgatcatcaaattaattacgtccgtggccgacgtcgtcaataacgaccctatggtagggagcaagctgaaagtgattttcttggagaactatagagtctcacttgcagagaaggttatacccgctaccgatctcagcgagcagatttcaaccgccggaaccgaggcgtcaggtacaggtaatatgaagtttatgctgaacggtgcactgactataggaaccatggatggagcaaacgtggaaatggcagaagaagctggcgaggagaatctattcatatttggcatgaggatagacgacgtcgccgcccttgacaagaaaggctacgaagccaaagaatactatgaagctcttcctgaactcaaactcgtgattgatcagatcgacaacggattcttttctccgaaacagccggatctttttaaggatataataaacatgctgttctatcacgaccgctttaaggttttcgctgactacgaggcttatgtaaaatgccaagacaaagtcagtcagctgtacatgaaccccaaagcttggaacaccatggtcctgaagaatatagccgccagcgggaaatttagttcagacaggaccatcaaggagtatgctcaaaacatctggaacgtggagccaagcgatttgaagatctctttgagtaacgagagcaataaagttaacgggaac

SEQ ID NO: 132877 - DNA, 2541 bp, Artificial Sequence
  derived and/or modified sequence
atggccaagcctctgaccgatcaagaaaagagaaggcagatcagtatcaggggcattgtgggcgtcgagaatgtcgctgagttgaagaaatctttcaataggcacctgcacttcaccctggtgaaggatagaaatgtcgccactacacgagactattatttcgccctggcgcacactgttagggaccacctcgtggggcgctggattagaacacagcagcattactacgacaagtgcccgaaacgcgtgtattatcttagcctcgagttctacatgggccgaacacttcaaaatacgatgatcaatttgggcctccaaaacgcatgcgatgaagccatctaccagcttggcctggacatcgaggaactggaagaaatcgaagaggatgctgggctgggcaacggaggactgggtcgactggccgcttgcttcctggactctatggcgaccttgggcttggccgcttacgggtatggaatccggtacgaatacggaatattcaaccagaagattagagacggatggcaggtggaggaggctgatgattggttgagatatggtaacccctgggaaaaaagccggccagaattcatgttgcctgtccatttctacggaaaggtggagcacactaataccggtacaaagtggatcgatacccaggtcgtgctcgctctgccgtatgatacgccagtgccgggctacatgaacaacacagtcaatactatgaggctgtggagcgcaagggcccccaatgactttaatctccgagattttaatgtgggagattacatacaggctgtcctggaccgcaatctggcggaaaacattagcagagtgctgtacccgaacgacaacttcttcgaggggaaggaactgaggctcaaacaggagtacttcgtggtcgccgccacactgcaagatatcatccgccgcttcaaggcatctaaattcggatctacgagaggcgccggcacagtcttcgacgcctttcccgatcaagtggctattcagctcaacgatacccatccagccctggccatccccgaactgatgcgaattttcgtggatattgagaaactgccgtggagtaaagcttgggaactgacacagaagacatttgcatacacaaaccacaccgtgctcccagaggcactcgaacggtggcctgtggatctggtcgaaaagcttctgccccgacacttggagattatctacgaaatcaaccagaagcacctcgacagaatagtggccctcttcccaaaggatgtggacaggctccggcgcatgagtctgatcgaagaggaagggagtaaaagaatcaacatggcccatctttgtattgtcggatcccatgccgtcaacggggttgcaaagattcactccgatatcgttaagacaaaagtgttcaaagacttttcagaacttgaacccgataaatttcagaataaaaccaacggtatcacgccccgcaggtggctcctgctgtgtaaccctggcctggccgagctgatcgccgagaagattggtgaagattacgtgaaggatctttctcagcttaccaaactccattcattcctgggcgatgacgttttcctgcgcgaacttgcaaaagtcaaacaggagaataaactcaagttttctcagttcttggaaaccgaatataaggtcaagattaatccatcatccatgtttgacgtgcaagtcaaaagaatccatgaatataagagacagctgctgaactgtcttcacgtaataactatgtataacaggatcaagaaagacccaaagaagttgttcgtgcctcgaacggtcattataggaggtaaggctgcacccggctaccacatggcaaagatgatcatcaaactgatcacttctgtagccgacgttgtgaacaacgatccaatggtggggagcaagttgaaggttatctttctggaaaattacagggtgagtctcgccgagaaggtgatacctgcaaccgatctgagcgagcagatttcaaccgccggaactgaagcctctgggaccgggaacatgaaatttatgctcaatggggctctgacaatcgggaccatggacggcgccaacgtcgaaatggccgaggaagccggcgaggaaaacttgtttattttcggaatgcgcattgacgacgtagcagcacttgacaagaaaggttacgaggccaaggaatactatgaagctctgcctgaactgaaacttgtcatcgaccagattgacaatggattcttctccccaaagcagccggacctgttcaaggacatcattaatatgctgttctaccacgaccgcttcaaggtgttcgccgattatgaagcatacgttaagtgtcaggataaggtgtcacaattgtacatgaacccaaaagcctggaacacaatggtgctgaagaatatcgccgccagcggtaagtttagcagcgacaggaccataaaggagtacgcgcagaacatttggaacgtcgagccaagcgacctgaaaatttccctttccaacgaatcaaacaaagttaacggcaac

SEQ ID NO: 132878 - DNA, 2541 bp, Artificial Sequence
  derived and/or modified sequence
atggccaaacctctcacggatcaggaaaaacggcgccagatatccatccgagggatcgtaggagttgaaaacgtcgcagaactcaaaaaatccttcaataggcatctccactttactcttgtcaaagatagaaacgtagccacgactagggattactacttcgccctcgcacacacagtaagggatcatttggtcgggaggtggatccggacacagcagcattattatgataagtgtcccaaacgcgtctactacttaagtctcgaattctatatgggacgaactctccagaacacaatgatcaacctcggactccagaacgcatgcgacgaggcaatctaccaactggggctcgatattgaggaactagaggaaatagaagaagatgctggactgggaaacggggggctggggagactggccgcatgtttcttagactcaatggctactctcgggcttgccgcctatgggtatgggatcagatatgaatatgggatattcaaccagaaaatccgggatggatggcaggtggaggaagcagatgattggctaaggtatgggaacccttgggagaaaagtaggcctgaatttatgctgcccgtgcatttttacggaaaagtggaacatacaaacactgggactaaatggatcgatacacaagttgtcctcgccctaccctatgatactcctgtgcccggatatatgaataacacagtgaatactatgagattgtggtctgctcgggctcctaacgacttcaacttacgagatttcaacgtgggagattatattcaggctgtgctcgacaggaaccttgcggaaaatatttcaagagtattatatccaaacgataacttcttcgaagggaaagagctacgcttaaaacaggaatatttcgtggtggcagctactctgcaggatataattagacggttcaaagctagtaaatttggatccactaggggggccggaactgtgttcgatgccttccctgatcaggttgctatccaattaaacgatacacatcccgccctggcgattcccgaactcatgcggattttcgtggatatcgaaaagctgccctggtcaaaagcatgggagttaactcagaagacatttgcctatactaaccacacagtactccccgaagccctcgaacgatggccagttgatctggtagaaaaactgctcccccggcatcttgaaataatatatgaaatcaatcaaaaacatctggatcggatcgtagctctgtttcctaaagatgtcgatcggcttaggaggatgagtcttatcgaggaagagggatccaaacgcataaatatggcacacctgtgcatcgtgggatcacacgcagtcaacggagtggcaaaaatacattctgatatagtcaaaacaaaggtattcaaagatttctcagaactggaaccagataagtttcagaacaaaacaaatggaattacaccgcgccggtggcttctcctctgcaatcccggactggctgaactgatagccgaaaagataggggaagattatgtgaaagatctctctcagcttacaaaactgcattcattcctgggagatgatgtgtttttacgcgaactagctaaggtcaaacaggaaaataaactcaaattctctcagttcctcgaaactgaatataaagtgaaaatcaatccttccagtatgtttgatgtgcaggttaaacggatccacgaatataaaaggcagctccttaactgcctgcacgtgatcactatgtacaacaggattaagaaagatcctaagaaactgttcgtgccccgaactgtaataataggagggaaagccgctccagggtatcacatggccaaaatgatcatcaaacttattacgtcagtggcagatgtcgttaacaacgatcctatggtcgggtctaagctcaaagtgatatttctcgaaaactaccgggtcagtcttgctgaaaaagtaatacccgccacagatttatcagagcagatctccacagctggaactgaagcctccgggactggaaatatgaaattcatgctaaatggggcactaacaatagggactatggacggagctaacgtggagatggccgaagaggccggagaggaaaacctctttatttttggaatgcggattgatgatgtcgccgctcttgataaaaaaggatatgaggctaaagaatattacgaagcattgccagaactgaaactagtcatcgaccaaatcgataacggattcttctctccgaaacagcccgatctatttaaagatatcataaacatgctgttctaccatgataggttcaaagtattcgcagattatgaagcctatgtcaaatgccaggataaagtgtctcagttgtatatgaaccctaaagcttggaatactatggtcctcaaaaatattgccgcctcagggaaattttcttcagataggacaatcaaggaatatgcccagaacatctggaatgttgaacctagtgatttaaaaatctctctgtctaatgaatctaacaaagtaaacgggaac

SEQ ID NO: 132879 - DNA, 2541 bp, Artificial Sequence
  derived and/or modified sequence
atggctaagcctctgaccgatcaggaaaagagacgtcagatctcgatcaggggaatcgtcggtgtggagaacgtcgctgagctgaaaaagtccttcaaccgccacctccattttactcttgtcaaagatagaaacgtggcgactacccgggattactacttcgcactcgcccacaccgtcagggaccacctggtgggacgctggatccggactcagcaacactactacgacaagtgtccgaaacgcgtgtactacctgagcctggagttttacatgggacggactctgcagaatactatgatcaacctgggactgcaaaacgcctgtgatgaagcgatctaccagctcggacttgatatagaggaacttgaggagattgaggaggacgcgggattgggaaatggagggctgggaagattggccgcgtgctttctcgactccatggcgactctcggtcttgcagcgtacggatacggtatccggtacgagtacgggatctttaaccagaagatcagagacggctggcaggtggaagaagctgatgactggctgcgatatggaaatccgtgggagaaaagtcgcccggagtttatgctcccggttcacttctacggaaaagtggaacataccaataccgggaccaagtggattgacacgcaagtggtgcttgccctgccctacgacacgccagtcccaggctatatgaataacactgtgaataccatgcgactgtggtcggccagggcgccgaacgacttcaacctgcgggatttcaacgtgggtgattacatccaggcagtgcttgatagaaacctggcagaaaacatctcccgcgtgctctacccgaacgacaatttcttcgagggtaaagagctgagactgaagcaggaatacttcgtggtggctgcaaccctccaagacatcattcggcggttcaaggccagcaaattcggctcgacgcgcggggccggcactgtgttcgacgctttccctgaccaggtggcgatacagctgaatgacacccacccagctctggcgatcccggaattgatgcgcatattcgtagacatcgaaaagctgccatggagcaaggcttgggaactgacccaaaagaccttcgcctataccaaccataccgtgctcccagaagctctcgagcggtggccagtggatctcgttgaaaaactcttgccaaggcacctggaaatcatctacgaaatcaaccagaagcatctggacagaattgtggccctgtttcccaaagacgtcgaccgcctccgtagaatgagcttgatcgaggaggagggttccaagagaatcaatatggcccatctctgcatcgtgggaagccatgccgtgaacggagtggctaagatccactcagacatcgtgaaaactaaggtgttcaaggacttctcagaactggaaccggacaagttccaaaacaagacgaatggaatcactcctaggcggtggctcctcctgtgcaaccccggcctggctgaactgatcgcagaaaagatcggagaagattacgtgaaagacctgtcgcagttgaccaaacttcactcgtttttgggagatgacgtgtttctgcgcgaactggccaaggtgaagcaagaaaacaaactgaagttctcacaattcctcgaaaccgagtacaaggtcaagataaatccgagctccatgtttgacgtccaggtgaagcgaatccacgaatacaagaggcaactgctgaactgccttcacgtcataactatgtataaccggatcaaaaaggatcccaagaagctgttcgtccctcgcaccgtcatcatcggcggaaaggcggcacctggctaccatatggccaaaatgatcatcaagctgatcacttccgtggctgacgtcgtcaataatgatccaatggtaggatcgaaacttaaagttatcttcctcgagaattaccgcgtctccttggccgaaaaggtgatcccggccaccgatctctccgaacagatctccactgccggtactgaagcgtcaggaacggggaacatgaagttcatgttgaacggagccctgactataggaaccatggatggtgcaaacgtggaaatggcagaggaagccggggaagaaaatctgttcatctttggaatgcggattgatgacgttgcggccttggacaaaaagggttacgaggccaaggaatactacgaagctctgccagagctcaagctggtgattgaccagattgataacggcttcttcagtccgaaacagccggatctcttcaaagacattatcaacatgctgttctatcatgaccgctttaaagtgttcgcggattacgaggcgtacgtgaagtgccaagacaaagtgagccagctgtacatgaacccaaaggcctggaatacgatggtccttaagaatatcgcagcgtcggggaagttctcgtcggacaggactattaaggagtacgcgcaaaacatctggaacgtggagccttcggatttgaagatcagcctgtccaacgaatcgaataaggtcaacggaaac

SEQ ID NO: 132880 - DNA, 2541 bp, Artificial Sequence
  derived and/or modified sequence
atggctaaacctctgactgaccaggagaagcgccggcagatcagcattcgtgggatcgtcggtgttgaaaatgtggcagagttgaagaagagcttcaacagacacctgcactttacgctggtcaaggacaggaacgtggctactacccgcgactattactttgcgctcgctcatacggtgcgcgaccacctagtgggacgctggatccgcacgcaacagcactactacgacaaatgcccgaagcgcgtgtactacctgtcgctggagttttacatgggacgcaccctccagaacaccatgattaacctggggctgcagaacgcctgcgacgaggcaatctatcagctggggctggacatcgaggagttggaggaaattgaagaagacgcgggcctcggtaacggtggtctgggccgcctggctgcgtgttttctggatagcatggccactctgggattggcggcttacgggtacggtattaggtacgaatacggtatatttaatcaaaaaatcagggacggatggcaagttgaagaggcggatgactggttgcgctatggcaatccatgggaaaagagccgaccagaattcatgctgcctgtccacttctatggcaaagtggaacacaccaatacaggtactaaatggattgatacccaggtcgtcctggccttgccatacgatacgccagtgccgggttatatgaataacacggtgaacacgatgcgcctgtggtccgcgagagcgcctaatgacttcaatctgcgagactttaacgtcggtgattacattcaagcggtcctggatcgcaatctggcagaaaatatttcccgggtcctgtacccgaacgataacttctttgagggaaaggaactgcgcttgaaacaggaatacttcgtggtcgctgcaactctccaagatatcattcgtcgtttcaaggccagtaaattcgggtcgacccgcggcgcaggtaccgtgttcgacgcgttcccagaccaggtggcgatccagctgaacgatacccaccctgcgctcgccatacctgaacttatgcgtatttttgtggacatcgaaaaacttccttggtctaaagcatgggaactgacccagaagaccttcgcgtacaccaatcacacggttttgcctgaggcgctggagcggtggccagttgatttggtggagaagttactgccacgtcatctggaaattatctacgaaattaatcagaagcaccttgacagaatcgtggcgttgttccccaaagacgtggatcgcctgcgccggatgagcctgatagaagaggaaggtagcaagcggattaacatggcgcatctttgtatcgtaggttcacacgcagttaacggggtggctaagatacatagcgacattgttaagaccaaggtttttaaggattttagcgagctggaacctgataaatttcagaataagaccaacggcatcaccccgcggcgctggctactgctgtgtaacccgggcttagctgaattaattgcggagaagattggcgaggactacgtcaaagacctaagccagctgaccaaattgcactccttcctgggcgacgacgtgttcttgcgcgagcttgctaaagttaagcaggaaaacaaactgaaattctctcagtttttagaaaccgagtataaggtcaagataaacccgtcttctatgtttgacgttcaggtaaagcgcatccacgaatataagcgccagctgctgaattgcctgcacgtaatcacaatgtataatcgcataaaaaaggatccaaaaaagttgtttgtgccgcgtactgtgattatcggtggtaaagcggcaccagggtatcacatggcaaagatgattattaagcttatcacctccgtggcggatgtggtgaataatgatccaatggttgggtctaaacttaaagtcatcttcctggaaaattaccgcgtaagcctggccgagaaggttattccagctaccgacttgagcgagcaaatttccactgcgggtaccgaggcgagcggcaccggcaacatgaaatttatgctgaacggcgcgctgactattggcactatggatggtgcgaacgtcgaaatggctgaggaggctggtgaagaaaatttgttcatcttcggtatgcgaatagacgacgtggctgccctggacaagaagggttatgaggcaaaggaatactatgaggcattgcctgagctcaaactggtcattgaccagattgataacggtttcttctctccgaagcaacctgacctgtttaaagacatcattaatatgctgttctaccacgaccggtttaaggttttcgctgactatgaagcgtacgtcaaatgccaagacaaagtgtcccagctgtatatgaacccaaaggcatggaacaccatggtactgaagaacattgccgcgtcaggtaaattctcctcagaccggactatcaaagagtacgcgcagaacatctggaatgtcgagccgtccgatctgaaaatcagcctcagcaacgaatcaaataaagtaaatgggaat

SEQ ID NO: 132881 - DNA, 2541 bp, Artificial Sequence
  derived and/or modified sequence
atggcgaaacctctgaccgaccaagaaaagagacgccaaattagcattcgaggcatcgtgggcgtcgagaatgttgcggagctgaaaaagtcattcaatagacacctgcattttaccctagtcaaggatcgaaatgtggctacgacccgagactactactttgcattggcccacaccgtgagagaccacctcgtaggaagatggatcaggacacagcagcactattatgacaaatgtccaaaacgggtttattatttaagcctcgagttctatatgggtcgtaccctgcagaataccatgataaatctcggcctccagaatgcatgcgacgaagctatttatcagttgggcctggatatcgaggagctcgaggagatcgaagaagatgccggcctaggaaatggggggctgggcaggctggctgcttgctttctagattctatggccaccctcggactagcagcttatgggtatggaatccgttatgagtacggcattttcaatcagaaaatccgggacggatggcaggtggaagaagccgacgactggctgcgatacggcaacccctgggagaagtcacgaccagagtttatgttgccggtgcatttttacggaaaagtggaacatacaaatacaggtacaaagtggatcgacacacaggtggtgcttgccttaccttatgacactcccgttcccggatacatgaacaacactgttaatactatgaggttatggtccgcgcgggccccgaacgacttcaacctgagggacttcaatgttggagactatattcaggcggttttggatcggaacctcgctgagaacatctctagagtgctctaccctaatgataattttttcgagggtaaggaattgaggctaaaacaggaatattttgtcgtcgccgccacactacaggacattatccgacgtttcaaagcctctaaattcggttccaccagaggagccgggacggtgttcgacgcctttcccgatcaagtggcaatacaactgaacgacacacatcctgccctcgctatcccagagctcatgcggatttttgtagatatcgagaaactcccgtggtctaaagcctgggagctaacccagaagacctttgcttacacaaaccatacagtcctgcctgaggcactggagcgatggcctgttgatctggtggaaaaactgcttcctcgacaccttgaaataatatacgagattaatcagaagcatctggacagaattgtggcactctttccaaaagacgtagatcggttaaggcgcatgtccctgatcgaggaggagggatcaaagagaatcaatatggcccacctgtgcatagttggctctcatgcagttaacggagtggccaagatccactcagatatcgtgaagactaaagtgttcaaagatttcagcgaactcgaacccgataagttccagaataaaacaaatggcatcactccacgccgatggctcctgctgtgtaaccccgggctggctgaattgatcgccgagaaaataggggaagattatgtgaaggatttgtcgcagttaacaaagctacattctttcctaggggacgatgtcttcctccgagaactggccaaagtcaagcaggagaataagctgaagtttagccagttcctggaaacggagtacaaagtaaaaattaatcctagttcaatgttcgacgtgcaggttaaacgaatccacgagtataagcgacaactgctcaattgtctgcatgtgatcacaatgtataatcgaattaaaaaggaccccaagaagctgtttgtacctcggaccgtcatcatcggcggcaaagctgctcccggctatcatatggccaagatgattatcaaactaattacttcagtggccgacgttgtcaacaacgatccaatggtcgggtcgaagctgaaggtgattttcctggagaactaccgggtctcactggcagaaaaggtgatacctgcgactgatctgtccgagcagatctccactgcggggactgaagcaagcggcacgggtaatatgaaatttatgctgaacggcgctttgaccattggcactatggatggcgccaatgtggagatggccgaggaggcaggagaggagaacctgtttatcttcggcatgcggattgatgatgtagcagccctggacaaaaaaggttacgaagcaaaagagtattatgaggctctccctgagctgaaacttgtcatcgaccagatcgacaatgggttcttctcacccaaacagcccgacttgttcaaggacatcattaatatgcttttttatcatgacaggtttaaggtgttcgccgattacgaagcttatgtaaaatgtcaagataaagtgagccaactgtacatgaacccaaaagcctggaatacaatggtgctgaaaaacatcgccgcatccggcaagttcagctcagatagaacaatcaaggaatatgctcagaacatttggaacgttgaaccaagtgacctcaagatctcgctcagcaatgagtcaaacaaggtcaacgggaat

SEQ ID NO: 132882 - DNA, 2541 bp, Artificial Sequence
  derived and/or modified sequence
atggccaagccactgacggaccaggagaagagacgccagatcagcattcggggaatcgtgggagtcgaaaacgtggctgaactgaagaaatcgttcaaccggcatctccacttcaccctcgttaaagaccgcaatgtcgctaccactcgtgattactacttcgctctggcacataccgtgagggatcatctcgtcggccggtggatccgcactcaacaacactactacgacaagtgcccgaagcgcgtgtattacctgtcgctcgaattctacatgggaaggaccttgcagaataccatgatcaacctgggactccaaaacgcttgcgacgaagcgatctaccagctgggacttgatattgaagagcttgaggagatcgaagaggatgcaggcctcggaaacggtggacttggccgcctggccgcttgcttcttggattcaatggcaacgctcggactcgccgcatacgggtacggaattcggtatgaatacggaatcttcaatcagaagatcagggacggatggcaagtggaggaagcagatgactggcttcgctacggaaacccttgggagaaatcgcgcccggaattcatgctgccagttcacttctacggaaaagttgaacacactaacactggcactaaatggatcgatacccaagtggtgcttgccctcccgtacgacaccccggtcccaggatacatgaacaataccgttaacacgatgaggctgtggagcgccagagcccctaatgactttaatctgcgggacttcaatgtgggagactacatccaagccgtccttgacagaaacctggccgagaatatcagcagggtgctgtacccgaacgataactttttcgagggaaaggaactgaggcttaaacaggaatacttcgtggtcgccgccaccctgcaggacataatccggcggtttaaggcctccaagttcggctcgacccgcggagcgggcaccgtgtttgatgcattcccagaccaagtcgcaatccagctcaacgacacccatccagcgctggccatccccgagctgatgaggatctttgtggatatcgagaaactcccgtggtcgaaggcttgggaactgactcaaaaaacctttgcctacactaaccacactgtcctcccggaggcgcttgagcgctggccggtcgacctggtcgagaagttgctgccgcggcatctcgagatcatctacgaaatcaaccaaaagcatctggaccggatcgtggctctgttcccgaaagatgtcgatcggctgcgccggatgtcactcatcgaagaggaaggatccaaacggatcaatatggcacacctttgtatcgtgggatcacacgcggtcaacggagtggccaagatccactcagacatcgtgaaaaccaaagtgtttaaggatttctccgagctggaaccagataagtttcagaacaaaactaatggaatcaccccgcgccggtggctgctgctgtgcaaccctggcctcgccgaactgatcgcggagaagatcggtgaggactacgtgaaagacctttcccaactcacgaagctgcactccttcctgggcgacgatgtctttctccgagaactcgctaaggtgaaacaagagaacaagctgaaattctcgcaattcctcgagacggagtacaaggtgaaaatcaacccctcctctatgtttgacgtccaggtcaagagaatccacgagtacaagcgccagctgctgaactgcctccatgtgatcactatgtacaacagaattaagaaagatccgaagaaattgttcgtcccgcgcaccgtgatcatcggcggaaaggcagcaccgggataccacatggcgaagatgatcatcaagctgatcacttccgtagcggacgtggtcaataacgatcccatggtgggctcaaagctgaaagtcatcttcctggaaaactatcgggtgagcctggctgaaaaggtgatccccgcaactgatctgagcgaacagatctctaccgcagggacggaagcatcgggcactggtaacatgaaattcatgcttaacggagccttgaccatcgggactatggacggagctaatgtggagatggccgaagaagccggcgaagaaaatcttttcatcttcggtatgcgcatcgacgacgtggccgcactggataagaaggggtacgaagcaaaagagtactacgaagctctgcctgagctcaaactcgtgatcgaccagattgacaatgggttcttctcaccaaagcaacctgacctcttcaaggacatcatcaatatgctgttctaccacgaccgcttcaaagtgttcgcagactatgaagcatacgtgaagtgtcaagataaggtgtcccagctgtacatgaaccctaaagcgtggaacactatggtgcttaagaatatcgctgcgtccggtaaattctcgagcgaccgcacgatcaaggaatacgcgcagaacatctggaatgtcgagccgtcggaccttaagatctccctttccaacgaatcaaacaaggtcaacggcaac

SEQ ID NO: 132883 - DNA, 2541 bp, Artificial Sequence
  derived and/or modified sequence
atggccaagcctttgacggatcaggaaaagagacgccagataagcattagaggaatcgtcggagtcgaaaatgttgcagagctcaagaagtcctttaaccggcacctgcactttactcttgtgaaagataggaatgtagccactacgagagattactactttgcgctggcccacactgtgcgagatcaccttgtcggtcggtggattcgtacccagcagcattactacgataagtgtcccaaacgcgtatactacctgagtctggagttttacatggggagaacgcttcaaaataccatgatcaacctgggtttgcaaaacgcatgtgatgaagcaatataccaactggggctcgacattgaggagcttgaagaaatcgaagaagatgcaggactgggcaatgggggacttggacgtctcgcggcatgcttcctggattcaatggcaactcttggtcttgcagcatacggttacggcattcgatacgagtacggtatattcaaccagaagatcagggatggctggcaagtcgaagaagccgacgactggctgcgatacggaaacccctgggagaagtcgcgacccgagtttatgctgccagtccatttctacggaaaggtggaacacactaatactggaacgaaatggattgatacccaagtggtcctggctctgccatacgatacccctgttcctgggtacatgaataacaccgtcaacaccatgaggttgtggtcagcaagggcccctaacgactttaaccttcgggacttcaacgtcggtgattacattcaagcagtcctcgatcgcaatctggccgaaaacatttcaagggtgctgtaccccaacgacaactttttcgaaggcaaggaactgcggctgaagcaggagtactttgtggtggcagcaacccttcaagacatcatccgcagattcaaggcgtctaagtttggaagcactagaggagcaggtaccgtctttgacgcattccccgatcaggtggctattcaattgaacgatactcatcctgcactggcaattcctgaactgatgaggatctttgtggatatagagaaattgccttggtccaaagcatgggaacttacgcagaaaacttttgcatacacgaaccatactgttcttcctgaggctctcgagagatggcccgttgacctcgttgaaaagttgttgccgcgtcatctggaaatcatatacgagattaatcagaaacatctggatcgcattgtcgctttgtttccaaaggatgtcgaccgcctcaggaggatgtcgctgattgaggaagagggctcaaaacgtatcaatatggcccatctttgtattgtaggttcccacgccgtgaacggagtggcaaagatccattccgatatcgtgaaaaccaaggtctttaaagatttcagcgagcttgaacctgataagtttcagaacaagaccaatggaattaccccgcgccgttggcttctgctgtgcaacccagggctggcagagcttattgccgagaagattggtgaagattacgtcaaagacctgtctcagcttaccaaacttcattcatttttgggcgatgacgtgtttcttcgagaacttgctaaagtgaagcaagaaaacaaactcaagttctctcaattcctcgaaactgagtataaagtcaagatcaatccaagctccatgttcgacgtgcaggtgaagcgaatacatgagtacaagagacaactgctcaactgtctccatgtgattactatgtacaaccggatcaaaaaggatcctaagaaactcttcgttcctagaactgtgattatcggtggaaaggccgcgcccgggtaccatatggcgaagatgatcataaaactgatcacctcagtcgcagacgttgtgaataatgatccaatggtggggtcgaaactcaaggtgatttttcttgagaactatagagtcagccttgcagaaaaggtcataccagcaaccgacctttcggaacaaatttcgactgcagggaccgaggcgtcaggaaccggcaacatgaaattcatgcttaatggagccttgaccattggtaccatggatggggcaaacgtggaaatggcagaagaagccggagaggaaaacctctttatctttgggatgcggattgacgatgtcgcagcacttgataagaaaggttacgaagcaaaagagtattacgaggctctgccagagctgaagctggtcattgatcaaatagataatgggtttttctcgccgaagcagccagacctgtttaaggatatcatcaacatgctcttttaccacgatcgtttcaaagtgtttgcagactacgaagcgtacgttaagtgccaggataaggtgtcgcagctttacatgaatccaaaggcatggaacaccatggtccttaagaatatcgccgcatccggtaagttctcatcagatagaaccattaaggaatacgcgcaaaacatctggaacgtggaaccgtcggatctgaagatttcactgtcgaacgaatcaaacaaggtgaacggtaac

SEQ ID NO: 132884 - DNA, 2541 bp, Artificial Sequence
  derived and/or modified sequence
atggccaagcctctgaccgaccaagaaaagagacggcagatcagcatccgcggcatcgtgggagtggaaaatgtggccgaactgaagaagtcgttcaatcgtcatctccacttcactctggtgaaggatagaaatgtggcgactactcgcgattactactttgccctggcccacaccgtgagagatcacctcgtgggacgctggatcagaacccagcagcattactacgataagtgcccaaagagagtgtactacctgtcactcgagttctatatggggcgcaccctccagaatactatgatcaacctgggactgcagaacgcctgcgatgaggctatttaccaactgggtcttgacatcgaggaacttgaagaaatcgaagaggacgccggtctgggaaatggcggactcggccgcctcgctgcctgtttcctggacagcatggctaccctgggcctggctgcctacggctacgggatcaggtacgagtacggcatcttcaatcaaaaaattcgcgatggatggcaagtggaggaagccgatgactggcttcgctacgggaacccgtgggaaaaatccaggccggaatttatgctccccgtgcatttctacggaaaagtggagcatactaacaccggaactaagtggatcgacacccaagtcgtgctcgctcttccgtatgacactccggtccccggctacatgaacaacactgtcaacacgatgcggctctggtcagcgcgggcaccaaacgatttcaacctgagggacttcaacgtcggggattatatccaggcagtgctggaccggaacctcgccgaaaatatctctcgagtgctgtacccgaacgacaacttcttcgaaggaaaagagctgcgcctcaaacaggaatacttcgtcgtggccgccacccttcaggatatcatcaggcggtttaaagcatcaaagttcgggtcaactagaggcgccggaactgtgttcgacgccttcccggaccaagtcgccattcagctcaacgacacccaccccgctctcgcgatcccggagctgatgcgaatcttcgtggacattgagaaactgccgtggtccaaagcctgggagctgacgcaaaaaaccttcgcgtacactaatcacaccgtcttgccggaggcccttgagcgctggccagtggacttggtggagaagctgctcccacgccacctggaaatcatctacgaaatcaatcagaagcatctggatagaattgtggcgctgttccctaaagatgtggaccgcctgcgcagaatgtccctgatcgaggaggaaggatctaagcggatcaacatggcccatctgtgcatcgttggttcgcacgcagtcaatggtgtggcaaagattcactccgacatcgtcaagactaaggtgtttaaggacttcagcgaattggaaccggacaaatttcaaaataagacgaacggaatcaccccacggaggtggctgttgctgtgtaaccctggattggcagaactgatcgcagagaagatcggagaggattacgtaaaggatctctcgcagttgacgaaactccactcatttctgggggacgatgttttcctgcgggaactggcgaaggtgaaacaggaaaataaactcaagttttcgcaattcctggaaaccgagtacaaagttaagatcaatccttcgagcatgttcgatgtccaggtgaagagaatccacgaatacaagcgccagctcctcaactgccttcacgtcatcaccatgtacaaccgcatcaagaaggacccaaagaagctgtttgtgccccgcactgtcatcatcggaggaaaggcagccccagggtaccatatggcgaagatgatcattaagctgatcaccagtgtcgcagatgtggtgaataacgacccgatggtgggcagcaagttgaaggtgatcttcctggagaactaccgggtgtcgctcgcggaaaaggtgattccagctaccgatctcagcgagcaaatctccaccgcaggcaccgaagcgtccggaactggaaacatgaagttcatgctgaatggtgccctcaccattggaactatggatggagctaacgtggagatggcagaagaggcgggcgaagaaaacctgtttatcttcggcatgcggatcgacgacgtcgcggcactcgacaagaaaggatacgaggcgaaggagtactacgaggcgctgccggaattgaaactggtcatcgatcagatcgacaatggattcttttcacctaagcagccggacttgttcaaagacattatcaacatgctgttctaccatgatcggttcaaggtctttgcggactacgaagcctacgtgaagtgccaggacaaggtttcgcaactttacatgaatccgaaggcctggaacacgatggtcctgaaaaacatcgctgcctccggtaaattcagcagcgaccggactattaaggagtatgctcagaacatatggaatgtggaaccttcggacctgaagatctccttgtcgaacgaatccaataaggtgaacggaaac

SEQ ID NO: 132885 - DNA, 2541 bp, Artificial Sequence
  derived and/or modified sequence
atggcgaagccactgactgatcaggaaaaacgccggcagatctccatccgcggtatcgtgggggtggaaaatgtcgcagaactgaagaaatcattcaatcggcatcttcacttcaccttggtgaaggatcggaacgtggctaccacccgcgactactactttgcgcttgcacatactgtccgggaccaccttgtgggaagatggattagaactcaacagcattactacgataagtgcccaaagcgcgtctactacctgtcgctggaattctatatgggaagaacgctgcagaacactatgatcaacctgggtctgcaaaacgcctgcgatgaagccatctatcagcttggattggacatagaagagctcgaagagatcgaggaggacgccggactgggcaatggcggacttggtcggttggcggcctgcttcctggacagcatggccactctgggactggccgcttacgggtacggtatccggtacgaatatgggatcttcaaccagaaaatacgcgacggatggcaggtggaagaggctgatgactggctgcgatacggtaacccgtgggagaagtcacggccggaattcatgttgccggtccacttttacgggaaagtggaacataccaacaccggcaccaagtggatcgacactcaagtggtcctggcgctcccgtacgatacgcccgtgcctggatacatgaacaatactgtgaataccatgaggctgtggtccgctagagcaccgaacgactttaacctcagggatttcaacgtgggagactacatccaggctgtgctggatcggaacctcgcggagaacatttcgcgcgtgttgtaccccaacgacaactttttcgagggtaaagagctccggctgaagcaggagtacttcgtggtcgccgccaccctccaagacatcattagacgcttcaaggcctcaaagttcggatccacccggggagctggaacggtgttcgacgcctttccggaccaagtggccatccagctcaatgacacccaccccgccttggcaatcccggaactgatgcgcatcttcgtggatatcgaaaagctgccctggtcgaaggcgtgggaacttactcaaaagaccttcgcgtacaccaaccacacggtgttgccggaggccctggaacgatggccggtggaccttgtcgagaagctgctgccgagacaccttgagatcatttacgagatcaatcaaaagcacctcgacaggatcgtggcgctcttcccgaaggatgtggatcggctgagacggatgtcgctgattgaagaggaaggttccaagaggatcaacatggcacatctttgcatcgtgggaagccatgccgtgaacggtgtggcgaagatccactcagacattgtgaaaactaaggtgttcaaggatttttccgaattggagccggacaagtttcaaaacaagacgaacggcatcacgccccggcgatggttgctgctgtgtaacccaggactggctgaacttatcgctgaaaagatcggagaggattacgtcaaggatctgtcgcaattgaccaagctccactcctttttgggagatgatgtgttcctgcgcgaactcgcaaaagtcaagcaggaaaacaaactcaagttctcccagttccttgaaactgagtacaaggtgaagatcaacccttcgtccatgttcgatgtccaagttaaacgcattcacgaatacaaaagacagctgctgaactgtctccatgtgattaccatgtacaaccggatcaaaaaggatccaaagaagctcttcgtgccgcgcactgtgatcatcggcggcaaggccgcaccaggataccacatggcgaaaatgattatcaaattgattaccagcgtggcggatgtcgtgaacaatgacccaatggtcgggagcaagctcaaggtgatcttcttggagaactaccgcgtgtcgcttgctgaaaaagttatccctgcaaccgacctgagcgaacagattagcaccgccggcaccgaagcctcaggaactggcaacatgaagttcatgctgaacggtgccctcactatcggcactatggacggggcaaatgtggagatggccgaagaagcaggagaggaaaatctctttatctttggaatgaggattgatgacgtcgcagctctggataagaaggggtacgaggccaaggaatactacgaggctctgccggaattgaaactcgtgatcgatcagatcgacaacggattcttttccccgaaacagccagacctgtttaaggacattatcaacatgctgttctaccatgaccggttcaaggtgtttgctgattacgaggcttacgtgaagtgccaagacaaagtctcccagctgtacatgaatccaaaggcttggaatacgatggtccttaagaatattgccgcgtcgggaaagtttagcagcgatcgcaccatcaaggaatacgcccagaacatctggaatgtggagccgtccgacctcaaaatctcgctgagcaacgaatcaaacaaggttaacggaaac

SEQ ID NO: 132886 - DNA, 2541 bp, Artificial Sequence
  derived and/or modified sequence
atggccaaaccactgaccgatcaggaaaagcgcaggcaaatttcgattaggggaattgtgggagtggaaaatgtggcagagctgaagaagtcattcaatagacacctgcatttcactctggtgaaggataggaacgtcgcaacgactagagactactacttcgcattggcgcatactgtccgcgatcatctcgtcggacggtggatacggacccagcaacattactacgataaatgccccaagagagtctactacttgtcactggagttctatatggggcgaacgcttcagaacactatgataaacttgggacttcaaaatgcatgtgacgaagccatttaccaacttggactcgacattgaagagttggaagagattgaggaagatgcaggtcttggaaatggtggactgggtaggcttgctgcctgtttccttgattcgatggccactctgggtctggcagcttacggttacggcattcgatacgaatatggcatctttaaccaaaagatccgtgatggttggcaggtggaagaagccgatgactggctgaggtacgggaatccttgggagaaaagccgtccggaattcatgcttcctgtccatttctacggtaaggtggagcacaccaacactgggaccaagtggattgatactcaagtggtgctcgcactgccttatgacactcctgtgccaggatacatgaacaacaccgtgaacaccatgcgtctttggtccgcccgggcacccaatgacttcaacctccgggatttcaatgtgggagactacattcaggcagtgttggatcgcaaccttgcagaaaacatttcccgggtgctgtaccctaatgataacttttttgaaggaaaagaactccgccttaagcaagagtatttcgtggtggcagcaacgctccaggacatcatacgaaggtttaaagcatcgaagtttggtagcactcgcggagctggaactgtgttcgatgcatttccagatcaggtggcaatccaattgaacgacacccacccggcacttgcgatcccagaactgatgagaattttcgtggatatagagaagttgccttggtcgaaggcatgggaattgacccaaaaaacttttgcgtacaccaatcatactgtgcttcctgaggcacttgagagatggcctgtcgacctggtggagaaactcctgccgagacatctcgagattatctatgagatcaaccaaaagcatctggatagaatcgtggctctgttcccaaaggatgtcgatcggctccggcgcatgtcactgattgaggaggaaggcagcaagcgaattaacatggcacatctgtgtattgttggatctcacgcagtgaatggggtcgcgaaaatacattcggatatcgtgaaaactaaggtgtttaaagacttctcagaactggaaccagataagtttcagaacaagacgaatggaatcactccacgcaggtggctgctgctctgtaatcctggccttgcagaactgatcgcagagaagattggagaagattacgtgaaagacctttcacagctcaccaaacttcactcatttcttggcgatgatgtctttcttagggaacttgccaaggtgaagcaggaaaacaagctcaagttttcccagtttctcgaaaccgagtataaggtgaagattaatccgtcctccatgttcgatgtgcaagtcaagcgcatacatgaatacaaaagacaactgcttaactgccttcacgtgataaccatgtacaatcggatcaagaaggaccccaagaagctctttgtgcctagaactgtcattattgggggtaaagccgcacctggctaccatatggccaagatgatcattaagctgatcacttcggtcgcggatgtggtgaataatgatcctatggtgggcagcaagctgaaagtgatcttccttgaaaactaccgcgtgtccctcgcagaaaaggtgattcctgcaaccgatctgtccgaacaaatatcaactgccggtactgaagcctcgggtaccgggaacatgaagtttatgctgaacggagcactgaccatcggtacgatggacggtgcgaacgtcgaaatggctgaagaggcaggagaagagaacctgtttatctttggaatgaggatcgacgatgtggccgcacttgacaaaaaggggtacgaagccaaggagtactacgaggcactccctgaactgaaactggtcattgatcagattgacaacggatttttctcgcctaaacagcctgatcttttcaaggacatcatcaacatgctgttttatcacgatcgattcaaggtctttgcagattatgaggcatacgtgaagtgccaggataaagtgtcacaactctacatgaaccctaaggcttggaatactatggtgcttaagaacattgcagcatccggtaaattctcgtccgatcgtactattaaggagtacgcacaaaacatctggaatgtggagccctcagatttgaagatatcgctttcgaatgagagcaacaaagttaatggaaac

SEQ ID NO: 132887 - DNA, 2541 bp, Artificial Sequence
  derived and/or modified sequence
atggctaaaccactgaccgatcaggaaaagagaagacagattagtattcgaggaatcgtgggagtcgagaacgtcgccgagctcaagaagagctttaatcgccatctgcatttcaccctggtgaaggacaggaacgtggccacaacccgggactattattttgctctggcccacaccgtcagggatcaccttgtaggcagatggatacggacacagcaacactattatgataagtgtccaaagcgagtatattacctgtctttagaattctatatgggacggactctgcaaaataccatgattaaccttggcctgcagaatgcctgcgatgaggcaatataccagctgggtctggacatcgaagagctggaagaaattgaggaagacgctggtctggggaacggcgggctgggtcgattagccgcatgtttcctggactctatggctactctgggactagctgcttatggctacggcatcaggtacgaatacggcatttttaaccaaaagatcagggacggttggcaggtggaggaagctgacgattggctgagatacggcaacccttgggaaaaaagccggcctgaatttatgctgcctgtgcacttctacggaaaggtggagcacacaaatacaggaaccaagtggattgacacccaagtggtcctcgccctgccctacgacacccccgtgcccggctacatgaacaacacagtgaacaccatgcggctgtggtctgctcgcgccccaaacgattttaatttacgggacttcaatgtgggcgattacatacaggcagtcctggaccggaatctcgccgagaacatttctagagtgctatacccaaacgacaatttcttcgagggtaaggagctccgtctgaagcaagagtacttcgtggtggctgctacactccaagacatcatccgtcggttcaaggctagtaaattcgggagtacacgaggcgccggaaccgtgttcgacgcttttcctgaccaggtggctatccaactgaacgatacacatcctgctctcgccattccagagctgatgcgcattttcgtggacatagaaaagttaccatggtcaaaagcatgggagctgactcagaagacctttgcctataccaaccacaccgttctgccagaggccctggagcgatggcccgtagatctggtggaaaagttgctaccaagacacctcgaaataatatacgagatcaatcaaaagcacctagacagaattgttgccctcttcccgaaagacgtggaccggctgaggcgaatgtccctgattgaagaggaggggagtaagaggataaatatggctcatttatgtatagtgggatctcacgccgtcaatggcgtcgctaagattcatagcgatatcgttaaaaccaaagtgtttaaggatttctctgagctggaaccagacaagttccagaataaaaccaacggaatcacaccaaggcggtggttacttctatgcaaccctggcctcgcagagctaattgcagagaagattggagaggactatgtgaaggacctcagccagctgaccaagctacatagctttctgggggacgatgtgttcctgagagagcttgccaaagtgaagcaggagaacaagctgaaattctcacagttcctggagactgagtacaaggtcaagatcaatccatccagtatgttcgatgtacaggtcaagaggattcatgagtataagcggcaactgttgaactgcttacacgtgattaccatgtataacaggatcaaaaaagacccaaaaaagctgttcgtgcctcggaccgtgattataggaggcaaggccgcccctggctatcacatggccaagatgatcataaagctcatcacaagcgtggctgacgtcgttaataacgatccaatggtcggatcaaagttaaaggtgatctttctcgagaattatagggtgagcctggccgaaaaagtcatacccgctacagacctgtcagagcagatctccacagccgggactgaagccagtggtaccggaaatatgaagttcatgctgaacggagctctcactatcggcactatggatggtgcaaacgtggaaatggccgaagaagcaggggaagagaacttatttatatttggcatgcgaattgatgacgtcgccgcactggataaaaagggatacgaagctaaggaatattacgaggcactacctgagttaaagctggtcatagaccaaattgacaatggctttttcagtcccaaacagccagatttatttaaggacattatcaatatgctgttctaccacgacaggtttaaggttttcgccgactatgaagcctacgtaaagtgccaggataaggtatcccaactatatatgaaccctaaagcatggaacaccatggtcctaaaaaatatcgctgcatcaggtaagttctcctccgatcgcaccataaaggagtatgcccagaatatctggaacgtggagccaagcgacctgaagatctccctctccaacgagtcaaacaaggttaacggtaat

SEQ ID NO: 132888 - DNA, 2541 bp, Artificial Sequence
  derived and/or modified sequence
atggctaagcccctgaccgaccaagagaaaagacgtcagatatctatccgggggatagttggagtcgaaaatgtggcagagctcaagaaatcgtttaacagacacctgcactttacgctggtgaaagatcggaacgtcgcaactactcgcgactactacttcgccctggcacataccgtgcgcgaccatctcgtgggtcggtggattcgaacccagcaacattactacgataaatgtccaaagcgcgtttactacctgtcactggagttttacatgggtaggacgctgcaaaacactatgattaatctgggcctgcaaaacgcttgcgatgaagcgatttaccaattgggcttggatatagaagaactggaagaaatcgaagaagatgcagggcttggtaatggtgggctggggagactggcagcatgtttcctggattccatggcgacgctcgggcttgcagcgtacggatacggcatccgttacgagtacggaatctttaatcagaagattagagacggttggcaagtcgaagaggccgatgattggcttagatacggaaatccatgggaaaagtcaaggccagagttcatgctcccagtgcatttctacggaaaggtcgagcacaccaacactggcactaagtggatcgacacgcaagtggtgttggcgctgccctacgatactccagtccccgggtacatgaacaacaccgtgaacaccatgagactgtggagcgcacgagcgcccaatgacttcaatcttagagactttaacgtgggtgattacatacaagcagtgctggatagaaacctcgcggaaaacatctcccgagtcctctaccccaacgataacttttttgaaggaaaggaactgcggttgaagcaggagtactttgtggtggcagccaccttgcaggacattatccgccgctttaaggcgtcgaagttcgggtctacccgaggagcaggtactgtgtttgacgccttcccagatcaggtggccattcaactgaacgacacccatccagcacttgcaatcccggaactcatgagaatctttgtcgacattgagaagttgccttggtcgaaggcatgggaattgacccaaaagacctttgcatacaccaaccatactgtccttcctgaagcactggaaagatggcctgtggatctggttgaaaagctccttccccggcatcttgagatcatttacgagataaaccagaaacatctggatcggattgtggccctttttcctaaagatgtggatcggctcagaagaatgtccctcatcgaagaagaaggatcaaagcgaattaacatggcccatctttgcattgtcggcagccacgcagtgaatggagtcgcaaagatacattcagacatcgtgaaaacgaaggtgtttaaggatttctcagagcttgagccagacaagttccaaaacaagaccaacggaattacgcccagacgatggctgctgctttgtaaccctggactcgcagaactcatcgcagagaagataggcgaagattacgtcaaagacctttcgcagctgactaagctccattcgtttcttggtgacgatgttttccttcgggaactggccaaggtgaagcaagaaaacaagctgaagttttcgcagtttctcgagactgagtacaaagtcaagatcaacccatcgtccatgtttgatgtccaagtgaaaaggattcatgagtacaagagacagcttctgaattgtctccatgtcattacgatgtacaatcgtattaagaaagatccaaagaagctgttcgtcccacgcaccgtgatcataggaggaaaggccgcacctgggtaccacatggcaaagatgatcatcaagctcataacttccgtcgcagatgttgtgaataacgatcctatggtgggcagcaaattgaaggtgatcttcctcgaaaactaccgggtgtcacttgcagaaaaggtgattccggctactgatctctcggagcagattagcactgcaggtacggaagcgagcggcaccggcaacatgaagtttatgctgaatggagcactgaccattgggacgatggacggagccaatgttgaaatggccgaagaagcaggtgaggagaacctgttcatattcggtatgagaatagatgatgtcgcagcgcttgacaaaaagggttatgaggcgaaggaatactacgaagctctgcctgaactgaaacttgtcatcgatcagatcgataatggtttctttagccctaagcaaccagacttgtttaaagacattatcaatatgctcttttaccatgaccgatttaaggtctttgcagactacgaggcgtacgtaaagtgtcaggacaaggtgtcacagttgtacatgaacccaaaagcatggaacactatggtgctgaaaaacattgcagcctcgggcaaattctcctcggacaggactattaaggagtacgcacagaatatctggaatgtcgaaccatcggacctcaaaatctccctgtccaacgagagcaataaggtgaatggtaat

SEQ ID NO: 132889 - DNA, 2541 bp, Artificial Sequence
  derived and/or modified sequence
atggcaaagccattgacggaccaggaaaaaaggcgacaaataagcattagggggattgttggcgtggaaaatgtggcagagctgaagaagtccttcaatcggcatcttcactttactctggtgaaggatcgcaacgtggcaaccacgagagattactactttgcactggcacatactgtccgggaccatttggtggggagatggattcgaacccaacagcactactacgacaagtgccctaaaagggtctactatctctcgctggagttctatatgggaagaactcttcaaaacacgatgatcaacctggggctgcaaaacgcatgtgatgaggccatttaccagctcggactcgacattgaagaacttgaagaaatcgaggaagatgcagggctcggtaatggggggctgggaaggctggcagcctgctttcttgatagcatggcgaccctgggacttgcggcatacgggtacgggattcggtacgaatacgggatcttcaaccagaaaatccgtgacggatggcaggtggaagaagccgacgattggctccggtacggaaacccttgggagaagagcagacccgaattcatgctccctgtgcacttttacggaaaagtcgaacataccaacaccggaactaagtggattgatacccaggtggtgcttgctctcccctacgacactccagtgccaggttatatgaataacacggtgaacaccatgagactctggtcggcacgcgcaccaaatgatttcaacctgcgtgactttaacgtgggtgattacatccaggccgtgcttgaccgaaacctcgcagagaacatatcacgggtcctgtatccaaacgataacttttttgaaggtaaggaactccgactcaaacaagaatacttcgtggtcgcagcaacgctccaggatatcatccggagattcaaggcatcgaagtttggtagcactcgcggcgccggtactgtgtttgacgccttccctgatcaagtggctatacagctcaacgatacccatcccgcccttgcaatccccgaactcatgagaatctttgtcgatatcgaaaagctgccttggtcaaaggcgtgggagcttacgcagaaaaccttcgcctacacgaatcacaccgtgcttccagaagccttggaacgctggcctgtcgatctcgtggagaaactgctgccccggcatcttgagatcatctacgagattaatcaaaagcatctggacagaattgtggccctgtttcccaaagatgttgatcggcttcgacgcatgtctctgatcgaagaagaaggatcgaagaggattaacatggcacacctgtgtatcgtgggctcgcatgccgtgaacggcgtggctaagattcactcagatattgttaaaaccaaggtgtttaaagatttttcggaacttgagccagacaagtttcagaataagaccaatggcattactccaagacggtggctgcttctttgcaaccccggtctggccgaacttatagcggagaaaattggcgaagattacgtcaaggatcttagccaacttactaagctccactcttttcttggcgatgatgtgtttctgagggaacttgcaaaggtgaagcaagagaacaaacttaagttcagccagtttctcgaaactgagtacaaagtgaagattaacccgagctcgatgttcgacgtgcaagtgaaaagaattcatgagtacaaacgccaacttctgaactgcctccacgtgattactatgtacaacagaatcaaaaaggacccaaagaaactcttcgtgcctcggactgttatcataggaggtaaggccgcccctggataccatatggccaagatgatcatcaagttgattaccagcgtggcagatgtcgtgaacaacgatccgatggttgggtccaagctcaaggtgatcttcttggagaattaccgcgtctcgcttgcagagaaggtgattccagccaccgacctgtcagaacaaatttcgaccgctggcactgaagcgtccggcactggtaacatgaaattcatgctcaacggtgccctgaccatcggaactatggatggagcgaacgtcgaaatggcagaggaagcgggggaggagaatctgtttatctttggcatgcgtatagatgacgtcgctgcgctggataagaaaggttacgaagcaaaagaatactacgaggcactgccagagcttaagctggtgatagatcagattgataatgggttcttttcgcctaagcagcctgacctgtttaaagacataatcaacatgctcttttaccatgaccggtttaaagtgtttgccgattacgaagcctatgtgaagtgtcaagacaaagtgtcccaactgtacatgaatcccaaggcatggaatactatggtgcttaagaacattgcggcatcaggaaagttttcctcggaccgcacgattaaagagtacgctcagaacatttggaacgtggaaccaagcgatctgaagatttccctctcaaacgaatccaacaaggtcaacgggaat

SEQ ID NO: 132890 - DNA, 2541 bp, Artificial Sequence
  derived and/or modified sequence
atggccaaacccctcacagatcaggaaaaaagacgacagatctctattcggggaatcgtcggagtagaaaatgtcgcggaactcaaaaaaagtttcaacagacatctgcatttcacacttgtgaaggatcgcaatgtggctactactagggattactattttgccctggcccacacagtccgggatcatctcgtgggacgctggatccgcacacagcagcactattacgacaaatgcccaaaacgggtgtattacctctccctcgagttttatatggggcgaacactccaaaatactatgattaatctagggttgcagaacgcctgcgatgaagcaatataccagctcggattagatatagaagaattggaagagattgaagaagacgctgggttgggaaacgggggactaggacgcctcgcagcatgcttcctcgattccatggcaacactcggattagccgcctacgggtatggaatacgatatgaatacggaatttttaatcagaagattcgtgatgggtggcaggttgaagaggctgatgattggctccgatacggaaatccatgggaaaaatctagaccagagtttatgctgcccgtacacttttatgggaaagtggaacacactaatacaggaactaaatggatcgatacacaagttgtgctcgcccttccatatgacacacccgtccccggatacatgaacaatacagtcaatacaatgcggctttggtctgcacgggcaccaaatgattttaacctcagggatttcaacgtgggagattatatacaagcagtcctcgatcgcaatctcgcagaaaatataagtcgggtcctttatcctaatgataactttttcgagggaaaagaactccgattgaagcaagaatatttcgtcgtcgcagccacattacaggatattattcgaagattcaaagcctctaaatttggatctacacgaggagccggaacagtattcgatgcgttcccagaccaggtagccatccagctgaatgatactcaccccgctctagcgatccccgaactgatgcggattttcgtcgatattgaaaagctcccatggtccaaagcttgggaactgacacagaaaacattcgcctatactaatcatacagttcttccagaagccctcgagaggtggcctgtggatctggtggaaaaactcctccctagacacctcgaaatcatatacgaaattaaccagaaacatctggatagaatcgttgcgttattcccaaaagatgtcgatagactgagacggatgtctctcatagaagaagaagggtctaaaagaataaatatggctcacctgtgcatcgtgggatcccacgctgtgaacggagtagccaaaatacattccgatatagtgaaaacaaaagtatttaaagatttttctgaattagagcccgataaattccagaacaaaactaacggaataactcctagacgatggctcctgctgtgcaaccccgggctggcagaattaatagccgaaaaaattggggaggattatgtaaaggatctctcacagttaacaaaacttcactctttcctgggggacgatgtattccttagagaactggccaaggtcaaacaggaaaataaactgaagttttctcagttcctcgaaacagaatataaagttaaaatcaacccttcatctatgtttgacgtgcaggtgaaacgaattcacgagtataaacgccagctgctgaactgcctccatgttataactatgtataatcgaatcaaaaaggatccaaagaaactatttgtccctagaactgtgatcattggagggaaagcagctccagggtaccacatggcaaagatgatcatcaaacttattacttctgtggcagatgtggttaataatgatccaatggtgggatctaaattaaaagtcatctttctagagaactatagggtctcgttagcagaaaaggtgatacctgctactgatctcagtgaacagataagtactgctgggacagaggcatccgggacagggaacatgaagttcatgcttaatggagcccttacaatcggaacaatggatggggcgaacgtggaaatggcagaagaagctggagaagaaaatctttttatatttgggatgagaatagacgacgttgctgccctggataaaaaaggatatgaagctaaggaatactacgaagcccttcctgaactcaaactggtgatcgatcagatcgataatgggttttttagtcccaaacagcccgacctgttcaaggacatcatcaacatgctgttttatcatgataggtttaaagtgttcgctgactacgaagcttatgtgaaatgtcaggataaagtgtctcagctgtacatgaaccccaaagcctggaatacaatggttctaaaaaatatcgccgcatctgggaagttctcctcagatagaacaatcaaagaatatgcccagaatatttggaacgtggaaccttccgacctcaagatctcactctccaatgaatctaacaaagttaatggaaac

SEQ ID NO: 132891 - DNA, 2541 bp, Artificial Sequence
  derived and/or modified sequence
atggccaagccgctgaccgatcaggaaaagcgcagacagatttccatcagaggtattgtgggcgtcgaaaacgtggcagaactcaagaagtcgtttaacagacatctccatttcacgctcgtgaaggatcggaatgtggcaaccactagagactactactttgcacttgcacatacggtgagagatcacctggttggtaggtggattcgaactcaacaacattactacgacaagtgtccaaaacgcgtgtactatctctcacttgaattctacatgggcaggactctccagaacactatgattaaccttggactgcagaacgcatgcgacgaggcaatctaccagctggggctggacattgaagaactggaggagattgaagaagatgcggggctcggaaacggaggactggggagacttgccgcatgcttccttgattccatggcaaccctgggactcgcggcttacggatacggtatccgttacgaatacggtatctttaatcaaaagatccgcgatggctggcaagtcgaagaagcagacgactggcttagatacggaaatccatgggagaagtctaggccggagtttatgctgcctgtgcatttctacggaaaggttgaacacactaatactggaaccaagtggattgatacccaggtggtgcttgccctcccttacgatactccagtgccaggttacatgaacaatacggtgaacactatgagactgtggtccgcaagagctccaaacgatttcaaccttcgcgatttcaacgtcggagattacattcaggctgtccttgatagaaaccttgcagagaacattagccgagtgctgtacccgaacgacaatttcttcgaggggaaggaactgcgccttaaacaagaatactttgtggtagcggcaacccttcaagatatcatcagaagattcaaagcgagcaagtttggaagcacccggggagccggcactgtgtttgatgctttcccagatcaggtcgcaattcagcttaatgatacccatcctgcacttgcgattccagaacttatgcggattttcgtggacattgaaaagctgccttggtcgaaggcatgggagttgacccaaaagacttttgcctacactaaccataccgtcctgcctgaagcactggagcggtggccagtggatcttgtcgaaaagttgctgccaaggcacttggaaatcatttacgaaatcaaccaaaagcatcttgaccggattgtggcattgttcccaaaagatgtcgatagactgaggaggatgtctctcatagaggaggaaggaagcaaaagaattaacatggcccacctgtgcatcgtgggctcccatgcagtcaatggtgtcgccaagattcattcagatattgtgaaaactaaggttttcaaagatttttcggagctcgagccagataagtttcagaacaaaaccaacggaatcacccctcggaggtggctgctcctctgtaaccctggactggcggaactgatcgcggaaaagatcggcgaggattacgtcaaggatctttcacagcttaccaagctgcattcctttcttggagacgatgtgttcctgagagaactggcaaaagtgaagcaggagaataaacttaagttctcacagttcctggagactgaatacaaggtcaagataaacccttcgtcaatgttcgatgtccaagttaaacgcatccacgagtacaagagacagcttcttaactgtctgcacgtcattaccatgtacaaccgaatcaagaaggatcccaagaagctgtttgtgcctcgcaccgtgatcatcgggggaaaggcagcgccaggatatcacatggcaaagatgatcataaaactgatcacgagcgtggcagatgtcgtgaacaacgaccccatggtgggatccaaacttaaggtcatctttctggagaattaccgtgtgtcccttgcagaaaaagtgattcctgccacggacctttcagaacagatttccaccgcaggaaccgaagcatcaggtactggaaatatgaagtttatgcttaatggagccctgactatcggcaccatggatggtgcaaacgtggaaatggcggaggaagcaggggaagaaaacctgttcatttttggaatgcgcatcgatgatgttgcagcactggacaagaaaggttacgaagcaaaggaatactatgaagcactgcccgagctgaagctcgtgattgatcaaatagataacggctttttctccccgaaacagccagatctgttcaaagacatcatcaatatgcttttctaccatgatcgattcaaggtgtttgcagactacgaggcatacgtgaagtgccaggacaaggtgtcccagctgtacatgaatccaaaggcatggaatactatggtcctgaagaacattgcagctagcgggaagttttcgagcgacaggaccattaaagagtacgcacaaaacatatggaatgtcgaaccaagcgaccttaagatctcgctcagcaatgaatcgaacaaggttaacgggaac

SEQ ID NO: 132892 - DNA, 2541 bp, Artificial Sequence
  derived and/or modified sequence
atggctaagccgctcaccgatcaagaaaaaaggagacaaatctcgattagagggatcgtcggagtggaaaatgtggcagagctcaagaaatcctttaaccggcaccttcatttcactctggtgaaggatcggaatgtcgcaaccactagagattactactttgctctcgcacacaccgtgcgtgatcaccttgtgggccgatggattagaactcagcagcactattacgataagtgtccaaagcgagtgtactacctttccctggagttttacatgggccggactttgcaaaataccatgatcaatcttgggcttcaaaacgcatgcgatgaagccatttaccagctgggactggacatcgaagaactggaggaaatcgaggaagatgcgggactgggtaacggcggccttggacgcctcgcagcgtgttttctggattcaatggcaacgctgggacttgcagcatacggctacggaatccgctacgaatacggaattttcaaccaaaagatccgcgatggctggcaggtcgaagaagccgatgattggttgcgctacgggaacccttgggagaagtcgcgcccggaattcatgcttcccgtgcacttttacggaaaggtcgaacatactaacactggtactaaatggatagatacccaggttgtgcttgcgctgccttacgatacgcctgtgccaggttacatgaacaataccgtcaacaccatgagactctggtcagcacgcgcgcctaacgactttaatctcagggatttcaatgttggagattacatacaggcagtgttggaccgcaatcttgcagagaatatctcccgggtgctttaccccaatgacaatttctttgaaggtaaggaactgagactcaaacaagagtactttgtggtggcagccacccttcaagacatcattagaaggtttaaggcatccaagtttggttcgaccagaggggcaggcaccgtgtttgatgcctttccagatcaagttgcgattcaactgaacgatactcaccccgccttggcgataccagaactgatgcgcattttcgtcgatattgaaaagctcccttggtcgaaggcatgggagctcacgcaaaagacctttgcatacaccaaccacaccgtgctgcccgaagcacttgaaagatggcctgtggaccttgtggaaaagctgctgccaagacatctcgagattatctacgagattaatcaaaagcatttggatcgaattgtggccctttttcctaaagatgtcgatcgtctgcgccgaatgtcgctgattgaagaagaaggcagcaagcgcatcaatatggcacatttgtgtattgtgggatcacacgcagtgaacggagtggcaaagatccattccgatatcgtgaaaaccaaggtgtttaaggatttttctgaattggaacctgataagtttcagaataagaccaatggaattactccacgaagatggctgcttctttgtaatccagggctcgcagaactgattgcagagaagatcggcgaggattacgtgaaggacctgagccagcttactaagctgcatagctttctcggggacgatgtgttcttgagagagcttgcaaaagtgaagcaggagaacaaactgaaattctcccaatttctggagacggaatacaaggtgaagatcaacccttccagcatgtttgatgtgcaggtgaagcggattcacgagtacaagcgacagctgctgaattgtttgcacgtcatcaccatgtacaacagaataaagaaagacccaaagaagttgttcgttccacgcaccgtgatcataggcggaaaggcagcaccaggttaccacatggcaaaaatgatcattaaacttattacctcggtggccgatgtcgtgaacaatgatcctatggtcggttcgaagctcaaggtgatttttctggagaattaccgggtcagcttggcagaaaaggtcatacctgcgaccgatctttccgaacagatctcgactgcaggaactgaggcgagcgggaccggtaatatgaagtttatgctgaatggagcgcttactattggtaccatggatggcgccaacgtcgaaatggctgaagaagcaggtgaagagaaccttttcatattcggcatgaggatcgacgatgtggcagcacttgacaaaaagggatacgaagcaaaagagtactacgaggccctcccagaactcaagctggtgatcgaccagatcgacaacggattctttagccctaagcaacctgatctgttcaaggacattatcaatatgctcttttaccatgacaggtttaaggtctttgcagattatgaagcatacgtcaagtgccaggacaaggtgtcgcagctgtacatgaacccaaaggcatggaatactatggtcttgaagaatatcgcagcgagcgggaagttttcgtccgatagaactatcaaggagtacgctcaaaacatttggaatgtcgaaccttcggacttgaaaatctcgctttctaacgagagcaacaaggtgaacgggaac

SEQ ID NO: 132893 - DNA, 2541 bp, Artificial Sequence
  derived and/or modified sequence
atggcaaagccgctgactgatcaggagaagcgtcgacaaatcagtatccgcggcatcgtgggagtcgaaaacgttgcggaactcaagaaatcgtttaatagacacctgcacttcaccctcgtcaaagatcgcaatgtggcgaccacccgcgactactacttcgccctcgctcacaccgtgcgcgaccatttggtcggacggtggatcagaacccaacagcattactacgacaagtgtccaaagcgggtgtactacctgtcactggagttctacatgggacgcaccttgcagaataccatgatcaacctgggactgcagaacgcctgcgacgaggcgatctaccaacttggtttggatatcgaagaattggaagagatcgaagaagatgccggactcggaaatggaggcttgggaagactggccgcctgtttccttgattcaatggcgaccttgggactggcagcctacggctacggcatcagatacgagtacggaatcttcaaccagaaaattcgcgacggttggcaggtggaagaggctgacgattggctcagatacggtaacccgtgggagaagtcccggcccgagttcatgctcccagtgcacttctatggtaaggtcgaacacaccaacaccggcactaagtggatcgatactcaggtggtgctggcccttccttacgacaccccggtcccgggatacatgaacaacactgtcaacactatgagactctggtcagcgcgcgccccaaacgacttcaatctgcgcgactttaacgtgggagactacattcaagccgtgttggaccgcaatctggccgagaacatcagccgcgtcctctacccaaacgacaacttcttcgagggcaaggaactcagattgaagcaggaatacttcgtcgtggcagcaaccctgcaggacataattcgccgctttaaggcctcaaagttcgggtccacccgcggagcgggaactgtgttcgatgccttcccggaccaggtggccatacagctcaacgatactcatcccgcgctcgccattccagaactgatgcggatcttcgtggacatcgaaaagctgccgtggtcgaaggcctgggaactgacgcagaagaccttcgcatacaccaaccacaccgtgctgcctgaggcactggagaggtggccagtggacctcgtggaaaagctccttccgcggcatctggaaattatctacgaaatcaaccaaaagcacctcgatcggatcgtagcgcttttcccgaaggatgtggatcggctgcgcagaatgtctctgattgaggaggagggaagcaaacggatcaatatggcacatctctgcattgtaggatcgcatgctgtgaacggtgtggctaagatccattcagatatcgtcaaaactaaggtgtttaaggacttctcagagctggaacctgataagtttcagaataaaactaacggtatcactccgcgccggtggctcctgctgtgcaacccaggcctggctgaattgatagctgaaaaaatcggagaggactacgtgaaagacctgagccaactgacgaaacttcatagctttctcggcgacgatgtcttcttgagggaactcgcaaaggtgaagcaggagaacaagctgaaattctctcagttcctcgagactgagtacaaggtgaaaatcaacccgtcctcaatgttcgatgtgcaggtgaaacggattcacgagtacaaacggcaactgctgaactgcctgcacgtgatcaccatgtacaacagaatcaagaaggatccaaagaagctcttcgtgccgcgcaccgtgatcattggtggaaaggcagcccctggctaccatatggccaaaatgattatcaagttgatcacgagcgttgctgatgtggtgaacaacgacccgatggttgggagcaaactcaaggtgatcttcctcgagaactatcgggtgtcgctggctgagaaagttatccccgcgactgatctctcggaacagatctccactgcgggaactgaggcatccggcactggaaacatgaagtttatgcttaatggcgccttgaccatcgggactatggacggtgcaaatgtcgagatggccgaagaggcgggcgaagagaacttgttcattttcggtatgcgcatcgatgatgttgccgcactggacaagaagggatacgaggccaaagagtactacgaagcgctgccagagctcaaattggtcatcgatcagatcgacaacggattcttttcgccgaagcagcccgacctctttaaggacatcatcaatatgctgttttaccacgaccggtttaaggtgttcgctgactacgaagcgtacgttaagtgccaagacaaggtcagtcaactgtacatgaacccgaaggcttggaacaccatggtgctgaaaaacatcgcggcttcaggcaaattctcgtccgatcgcactatcaaggaatacgcacaaaacatctggaacgtcgaaccatccgacctgaagatttccttgtccaacgagtccaataaagtgaacggaaat

SEQ ID NO: 132894 - DNA, 2541 bp, Artificial Sequence
  derived and/or modified sequence
atggctaaaccgcttacagatcaggaaaaaagacgccagatatctatccggggtatcgtcggggtggaaaacgtcgcggaactaaagaaaagcttcaaccgacatctgcacttcactttggtcaaagatcgcaacgtggctacaaccagggactactacttcgcgctggctcacaccgttcgtgatcatctggttgggagatggatccgcacccagcagcattattacgataagtgtccaaagcgcgtgtactacttaagcctggagttttatatgggccgcactctgcagaataccatgataaatctaggcctccagaatgcttgtgatgaagcgatctatcagcttggtcttgacatcgaagagcttgaagagatcgaagaggatgccggcttggggaatggcggactcggtaggctggctgcttgctttcttgatagtatggccacactaggactcgcagcatatgggtatggaatacgatatgagtacggaatcttcaaccaaaagatcagagacgggtggcaggtcgaggaggcggacgattggctgcggtacggcaacccctgggagaagtctcgccccgaattcatgttacctgtacacttctatggtaaagttgagcacaccaatacaggtacgaaatggatcgatacacaggttgtattggcgctcccatacgacaccccggtaccgggatatatgaacaataccgttaataccatgcgcttatggtcagcccgtgccccaaatgactttaatcttagggatttcaatgtgggagactatatccaggctgtgctagatcgcaacctggccgagaatatctctcgggtcctttaccctaatgacaatttcttcgaaggaaaggagcttaggttaaagcaggagtactttgtggtagccgccacactccaggatatcatccgccgattcaaggctagtaaattcggctcgacacgcggagctggtaccgtcttcgacgcctttccagaccaagtcgcgatccagctgaatgacacccatccagcactcgccataccggaattaatgcggatctttgttgacatcgaaaaactcccctggtctaaagcgtgggagcttacacagaaaacgttcgcgtacacaaaccatacagtcctccccgaggctctggaacgctggccggttgaccttgtggagaaactcctccctcgtcacttggagattatctatgagatcaaccagaagcacctcgaccgtattgtggccctcttcccgaaagacgttgaccgattgcgaaggatgagcttgatcgaggaggaagggtcgaagcggatcaacatggctcatctatgcattgtgggatcgcatgctgttaacggcgttgccaaaattcactctgacattgtcaagactaaagtctttaaggatttctctgagctagagccagacaaatttcagaacaaaaccaacggcatcaccccacggcgctggttgctactctgcaaccctggacttgctgagctcatcgcagaaaaaatcggggaagattacgtcaaagatctgagtcaactaaccaagctacattccttcctaggcgatgacgttttcctccgcgagctggccaaggtgaagcaggagaacaagctgaaattttcacagtttttggagacggagtataaggtcaaaattaatcccagcagtatgttcgatgtgcaggttaagcggatccacgagtacaagagacagctgctgaattgcctccacgtaataaccatgtacaatagaattaagaaggaccccaaaaaattgtttgttccacgcaccgtaattattggaggaaaagcagcacctggttatcatatggctaaaatgatcatcaaattaattacgagcgtggctgacgtcgtgaataacgacccgatggttggtagtaagctgaaggtgatctttctggaaaactaccgcgtgagcttagcagaaaaggtcatccctgccactgacctcagtgagcagatctccaccgccggtactgaggcctctggtaccggaaacatgaagttcatgttgaacggggccctaacaatcggaactatggacggtgcgaatgtagagatggctgaggaggctggtgaagagaacctatttatcttcgggatgcgaattgacgacgttgccgctttggataaaaagggttatgaagctaaagagtattatgaggcgctaccagaactcaagcttgtcatcgaccagatcgataacggattcttttctcccaagcagcctgacttattcaaggatatcattaatatgctgttctatcatgatcgcttcaaggtcttcgccgattatgaagcctatgtcaagtgtcaggacaaggtctcccagctttacatgaatcccaaggcatggaatactatggttctcaagaacatcgccgcctccggtaaattctcttccgataggacaatcaaggagtacgcccagaatatttggaacgtcgagccgagcgatctgaagatctctctgagtaacgagtcgaataaagtaaatggaaat

SEQ ID NO: 132895 - DNA, 2541 bp, Artificial Sequence
  derived and/or modified sequence
atggctaagccactgaccgatcaagaaaagagacgccagatcagcatcagaggtatcgtgggtgttgaaaacgtcgcagagcttaagaagagctttaatcgccatctccatttcactcttgtcaaggatagaaacgtcgctactactagagattattacttcgcactggcccatacggttagggatcatctggtgggccgctggatacgcacacagcagcattattacgacaagtgccccaagcgcgtatactacctgagtctcgagttctacatgggtaggacgctgcaaaacactatgataaaccttggtttgcaaaatgcctgtgacgaagcgatctaccagctgggtttggatatcgaggagctcgaggaaatagaggaagatgctggcctcggaaacggtggtttgggacgcctcgcagcttgcttcctcgattctatggccacgctcggtttggccgcttacggctacggcatcagatacgagtacggaatattcaaccagaagattcgcgacggatggcaggtagaggaggccgatgattggttgagatatggcaacccctgggaaaaaagtcgccctgagtttatgctgccggtgcacttctacggcaaggtcgagcatactaatacgggaactaagtggatcgacacccaggtggtcctggcattgccatacgacacccccgttccaggctatatgaacaacactgtcaacaccatgagactgtggtccgcgcgcgcccccaacgactttaatttgagagatttcaatgtgggtgactatatccaggccgtgctggaccgcaacctggctgaaaatatctccagagtgctgtaccccaacgacaacttctttgaaggcaaggaattgaggcttaaacaggagtacttcgtggtcgcggcgacactgcaggatattattagaaggttcaaggcgagcaagtttggtagcacccgcggcgcaggaacagtgttcgacgccttcccagaccaagtggctatccagctgaacgacacacaccctgcattggccatccctgagctgatgaggatctttgtcgacatcgagaaactgccgtggtccaaggcctgggaacttacgcaaaagaccttcgcttatacgaaccacacggtcctgccagaagcgcttgaacgctggcctgtggacttggtcgaaaagctgctgccccgccatcttgaaatcatctatgaaataaaccagaaacacctggatcgcatagtggctttgttccccaaggacgtggacagactgcgccgcatgtctctgatcgaagaagagggtagtaagagaatcaatatggcccacctctgcatagtaggcagccatgctgtgaacggtgtcgccaagatccactcagatatagtaaagactaaggtgttcaaagacttttccgaactggagccagacaagttccaaaataagacaaacggaattacaccacgcaggtggctgctgctttgtaatcctggccttgcagagcttatcgcagagaagattggagaggattacgtgaaggacctctctcagctgacgaagcttcactctttcttgggagacgatgtcttcctccgcgagttggcaaaggttaaacaagaaaacaagctgaagttctcacagtttctcgaaactgagtataaggtgaagatcaatccttcatcaatgtttgacgtccaggttaagcgcatccacgagtataagcgccagttgctgaactgcttgcatgtgatcacaatgtacaaccgcatcaaaaaagatcctaagaaattgtttgtgcccaggaccgttatcatcggaggtaaagcggcgcctggctaccatatggcgaagatgattattaagctgatcacgagcgtcgccgatgtcgtaaacaacgaccctatggttggatccaagctcaaagtcatcttccttgaaaactatagagtcagtctggcagagaaggtcatccctgctaccgatctgtcagagcagatttcaactgctggtactgaagcaagtggcacaggcaatatgaaattcatgctgaacggcgctctcactatcggaactatggatggagcaaacgtcgaaatggccgaggaggctggagaagagaacctgttcatctttggaatgcgcatagatgatgtcgccgccctggacaaaaagggttacgaggcaaaggagtattatgaggcactgcctgagcttaagttggtgattgaccaaatagacaacggtttcttctctcctaagcagcctgacctttttaaagacatcatcaatatgttgttctatcacgacagattcaaggtcttcgcagactacgaggcctatgtgaagtgccaggacaaggtcagccagctgtatatgaatccgaaggcctggaacacaatggtcctgaagaacattgccgcctccggtaaattttctagcgaccgcactatcaaggaatacgctcagaacatttggaacgtagaacctagcgacctgaagatcagcctgtcaaacgaatccaacaaagtgaatggcaac

SEQ ID NO: 132896 - DNA, 2541 bp, Artificial Sequence
  derived and/or modified sequence
atggctaagccactgactgatcaggagaagcgccgccaaatatccattcgcggcatcgtcggggtggagaacgtagctgagctgaagaagtcttttaaccgacacctgcattttaccctcgttaaagaccgcaacgtagccactacccgtgactattactttgcgctggcacatactgtgcgggaccatcttgttggacggtggattcggacccaacagcactactacgataagtgccctaagcgggtctattatctgtctctggaattctatatgggtcgcacactccagaataccatgatcaatctcggactgcagaatgcctgcgatgaagctatctatcagctggggctggatattgaggagttggaggaaattgaagaggatgctggcctggggaatggcggcctgggccgcctcgccgcatgcttcctcgactccatggcgacattgggactcgctgcctatgggtatggcatccgctatgagtacggaattttcaatcagaagatccgcgatggctggcaggtggaagaggcagacgactggttaaggtatggcaacccgtgggaaaaatccagacctgaatttatgctgcctgtccacttctacggtaaggtcgaacataccaataccggtaccaagtggatcgacacacaggtggtccttgcattaccgtacgatacacctgtaccagggtatatgaataacaccgtgaacaccatgcgcttatggtccgcgcgagcccccaatgacttcaacttgcgcgatttcaatgtcggggattacattcaggctgtgctggatagaaatctggccgaaaacatctccagggttctgtatccgaatgacaatttcttcgagggcaaagaactgcggctgaaacaggagtacttcgtggtggcagctaccctgcaagacattatacgccgtttcaaggcctctaaattcggatctaccagaggggccggcacagtctttgacgcgtttccagatcaggtggcaatccagttaaatgatacacatcccgctctggccataccggagctaatgcggattttcgttgatatcgaaaaactgccttggtccaaggcctgggaactgactcagaagaccttcgcatacactaaccacacggtgctgcccgaggcattagagcggtggcctgtagatctggtagagaaactgcttccgcggcatctggaaataatctacgagatcaaccagaagcatttggacaggatcgtggcactgttcccaaaggatgtggatcgcctgcgtcggatgtccctcatcgaggaggagggatctaagcgcatcaacatggcccatctatgcattgtgggttcccacgctgtgaacggggtagccaaaatccatagcgacatcgtgaagacgaaggtattcaaggatttttctgagctggagccagacaaatttcaaaacaaaaccaatggtattacgccaagacggtggctattgctgtgtaatccaggtctggccgagctcattgctgagaagatcggcgaagactacgtaaaggatctgagtcagcttaccaagcttcactctttcctcggggatgatgtctttttgcgggagctggctaaagtgaagcaagagaataaactcaagttctctcagttcctggagactgagtacaaggtgaagattaacccctcctccatgtttgatgttcaggtcaagcgaatacacgaatacaaacggcagcttttgaactgcctgcatgtcattactatgtacaaccgcatcaaaaaagaccctaaaaagctgttcgtccctagaactgtaatcatcggcggcaaggctgcacccgggtaccacatggctaagatgataatcaaacttattacctctgtagctgatgttgttaacaatgatcctatggttgggtcaaagctaaaagtgattttcctcgagaattatagagtgtctctggccgagaaggtgatccccgccacggatctgtcagagcaaatctctactgccggcaccgaggcaagtggtaccggtaatatgaaattcatgctgaatggagctcttaccatcggcacaatggatggcgccaacgtggaaatggctgaagaggccggagaagagaatctgtttatttttggcatgcgcatagacgatgttgcagcattggataaaaaaggctacgaagctaaagaatactatgaggcgctacccgagctgaagctcgtgatcgatcagatcgacaacggcttcttttcacctaagcaacctgatctgtttaaggacatcatcaacatgctattctaccacgatcgtttcaaggtgttcgccgactatgaagcttatgtgaaatgtcaggacaaagtctcgcagctgtacatgaaccctaaagcctggaacactatggtgctgaaaaatatagcagccagtggcaaattctcaagcgatagaactattaaagaatatgcacagaacatttggaatgttgagccttccgacttgaagatcagcctgtcaaatgagtccaacaaagtgaatggtaat

SEQ ID NO: 132897 - DNA, 2541 bp, Artificial Sequence
  derived and/or modified sequence
atggcgaaaccgttaacggatcaagaaaaacgtcgtcaaatatcgatacgtggtatagtaggtgttgaaaatgtagcggaactaaaaaaatcgtttaatcgtcatctacattttacgctagtaaaagatcgaaatgttgcgacgacgcgtgattattattttgcgttagcgcatacggtacgagatcatctagtaggtcgatggatacgtacgcaacaacattattatgataaatgtccgaaacgtgtatattatctatcgctagaattttatatgggtcgtacgctacaaaatacgatgataaatttaggtttacaaaatgcgtgtgatgaagcgatatatcaattaggtctagatatagaagaactagaagaaatagaagaagatgcgggtctaggtaatggtggtctaggtcgtctagcggcgtgttttttagattcgatggcgacgctaggtctagcggcgtatggttatggtatacgttatgaatatggtatatttaatcaaaaaatacgtgatggttggcaagtagaagaagcggatgattggttacgttatggtaatccgtgggaaaaatcgcgtccggaatttatgttaccggtacatttttatggtaaagtagaacatacgaatacgggtacgaaatggatagatacgcaagtagtactagcgttaccgtatgatacgccggtaccgggttatatgaataatacggtaaatacgatgcgtttatggtcggcgcgtgcgccgaatgattttaatctacgtgattttaatgtaggtgattatatacaagcggtactagatcgaaatttagcggaaaatatatcgcgtgtattatatccgaatgataatttttttgaaggtaaagaactacgtctaaaacaagaatattttgttgtagcggcgacgctacaagatataatacgtcgttttaaagcgtcgaaatttggttcgacgcgaggtgcgggtacggtttttgatgcgtttccggatcaagtagcgatacaactaaatgatacgcatccggcgttagcgataccggaactaatgcgaatatttgtagatatagaaaaactaccgtggtcgaaagcgtgggaattaacgcaaaaaacgtttgcgtatacgaatcatacggttctaccggaagcgttagaacgatggccggttgatttagtagaaaaattattaccgcgtcatttagaaataatatatgaaataaatcaaaaacatttagatcgaatagttgcgctatttccgaaagatgtagatcgtctacgtcgtatgtcgctaatagaagaagaaggttcgaaacgtataaatatggcgcatttatgtatagttggttcgcatgcggtaaatggtgtagcgaaaatacattcggatatagtaaaaacgaaagtttttaaagatttttcggaactagaaccggataaatttcaaaataaaacgaatggtataacgccgcgacgttggttattattatgtaatccgggtctagcggaattaatagcggaaaaaataggtgaagattatgttaaagatttatcgcaattaacgaaactacattcgtttctaggtgatgatgtatttctacgtgaattagcgaaagttaaacaagaaaataaactaaaattttcgcaatttttagaaacggaatataaagttaaaataaatccgtcgtcgatgtttgatgttcaagttaaacgaatacatgaatataaacgacaactactaaattgtttacatgtaataacgatgtataatcgaataaaaaaagatccgaaaaaactatttgtaccgcgtacggtaataataggtggtaaagcggcgccgggttatcatatggcgaaaatgataataaaattaataacgtcggtagcggatgtagttaataatgatccgatggttggttcgaaactaaaagtaatatttctagaaaattatcgagtttcgctagcggaaaaagtaataccggcgacggatctatcggaacaaatatcgacggcgggtacggaagcgtcgggtacgggtaatatgaaatttatgttaaatggtgcgctaacgataggtacgatggatggtgcgaatgttgaaatggcggaagaagcgggtgaagaaaatttatttatatttggtatgcgaatagatgatgtagcggcgctagataaaaaaggttatgaagcgaaagaatattatgaagcgttaccggaattaaaattagtaatagatcaaatagataatggttttttttcgccgaaacaaccggatttatttaaagatataataaatatgctattttatcatgatcgatttaaagtatttgcggattatgaagcgtatgttaaatgtcaagataaagtttcgcaactatatatgaatccgaaagcgtggaatacgatggttctaaaaaatatagcggcgtcgggtaaattttcgtcggatcgtacgataaaagaatatgcgcaaaatatatggaatgtagaaccgtcggatttaaaaatatcgctatcgaatgaatcgaataaagtaaatggtaat

SEQ ID NO: 132898 - DNA, 2541 bp, Artificial Sequence
  derived and/or modified sequence
atggcaaagcccctgaccgaccaggaaaagaggcgacagatcagcattagaggaattgtcggagtggagaacgtggcagagctgaagaagtcgttcaacaggcacctgcatttcacccttgttaaagaccgcaacgtcgccaccacccgcgattactatttcgcactcgcacatactgtgagggatcatctggtcggccggtggattagaactcaacagcactattacgacaaatgtccaaagcgcgtctactaccttagcctcgaattctacatggggcgtacgctgcagaacacgatgattaatcttggacttcaaaacgcatgtgatgaagcaatttaccagctgggactggacatcgaagaactggaggagattgaagaggacgccggactgggtaatggcggacttggaaggttggccgcatgttttctggattcgatggcgacgctcggacttgcggcatacggttatggaatccggtacgagtacggaatctttaatcagaaaatccgagacggctggcaggtcgaagaggctgacgattggctgcgctacggaaacccatgggagaaaagcagaccagaattcatgctgccagtgcatttctacggaaaggtggagcataccaacactggcaccaagtggatcgatacccaagtggtgctcgcgctcccatatgacactccagtgcccggttacatgaacaatactgtgaacacgatgcggctttggtcggcacgggcaccaaatgatttcaacttgcgggacttcaatgtcggggattacatccaagcagttcttgatcggaacctggcagaaaacattagcagagtgctttacccgaacgataacttttttgaaggtaaggaactgagacttaagcaggagtactttgttgtggcagcaactctgcaagacataatccgtcggtttaaggcctcgaaatttggctcaaccagaggggcaggcaccgtctttgacgccttccctgaccaagtcgcaatccagctcaacgatacccatccagcacttgccataccagaactgatgagaatctttgtggatattgagaagctcccatggtccaaggcttgggaacttacgcaaaaaacgtttgcctacactaaccatactgtgctgcctgaggcattggaaaggtggccggtagatctggtggagaagctgttgccccggcatctcgagatcatttacgagattaaccaaaagcacctggacaggattgtggcacttttccctaaggacgtggatcgcctgagaagaatgagcctgatagaggaagaaggttccaagcgcattaacatggcacacctgtgtatcgtgggaagccatgcagtcaatggagtggctaagattcattcggatattgttaagaccaaggtctttaaggatttcagcgaactggaaccagataagtttcaaaacaagactaacggaatcactcctagacgatggctcctcctctgtaaccctggcctcgcagagttgattgcagagaaaattggggaggactacgtgaaagacctgtcgcagctcacgaagctccactcgtttcttggggatgacgtgtttcttagagaacttgccaaggtcaagcaagagaataaactcaagttctcacaatttcttgaaaccgaatacaaggtgaagattaaccccagctccatgtttgatgtgcaggtgaagaggattcatgagtacaagaggcaactcttgaactgcctccatgtcataaccatgtacaaccgcataaagaaggatcccaagaagctgtttgtgcctcggaccgtgattatcggaggaaaggcggcacctggttaccacatggcaaaaatgatcataaaactgatcacttccgtggcagatgtcgtgaacaacgacccgatggtggggagcaaacttaaagtgatctttctggagaattaccgggtgtccctcgcagaaaaggtcatccccgcaactgatctgtccgagcagatatccactgcagggactgaagcgtcgggtaccggcaacatgaaattcatgctcaatggcgcacttaccattggaactatggatggcgctaatgtcgagatggccgaggaagcaggtgaagaaaacctgtttatctttggtatgcggatcgatgacgtggctgcgcttgataagaaggggtacgaggcaaaggagtattacgaggcactgccagagctcaagttggtcattgaccaaattgataatggtttcttctcccctaagcagccagaccttttcaaggatatcattaacatgcttttctaccatgatcgcttcaaggtgtttgctgattacgaagcgtacgtgaagtgtcaagacaaggtgtctcagctctatatgaatcctaaggcctggaatactatggtgctgaaaaacatcgcagcatccggaaaattctccagcgatcgaaccataaaggagtacgcacaaaacatctggaacgtggaacccagcgacctgaagatttccctctcgaacgagtctaacaaagtcaacggcaac

SEQ ID NO: 132899 - DNA, 2541 bp, Artificial Sequence
  derived and/or modified sequence
atggcaaaaccacttactgatcaagagaaacgcagacaaatttcgattcgggggatcgtgggcgtggagaatgtcgcagagctcaagaagtcgttcaatcgccacctccattttactctggtgaaggatcgcaacgtggccacgaccagagactattacttcgcactcgcacacactgtccgcgaccatctcgtcggaagatggatccgaacccaacaacactactacgataagtgtccgaaacgggtgtactaccttagcctggagttctacatgggacgcactctccagaataccatgattaaccttggcctgcagaacgcctgcgatgaagctatctaccaactcggacttgacatcgaggagttggaagagattgaggaggacgccggacttggtaacggtggcttgggacgactggccgcatgtttcctcgatagcatggcaaccttggggctcgctgcatacggctacgggattaggtacgagtacggaatcttcaatcagaaaatccgcgatggttggcaggtcgaagaagctgatgattggcttcgctacggcaacccgtgggagaagtccaggcctgagtttatgctgcccgtgcacttttacggaaaggtggaacacacgaacaccggtactaagtggatcgatacccaggtcgtccttgcacttccttacgatacccctgtgcctggttacatgaacaatactgtgaacacgatgcgtctttggtccgctagagcacctaacgatttcaacctgcgagacttcaatgtcggggactacatccaagctgtcctcgatagaaatctggcagaaaacatttcacgggtgctttacccaaacgataacttcttcgagggaaaggaactgagacttaagcaagaatacttcgtggtggcagccaccttgcaggacattatcaggcgtttcaaagcgagcaagttcggtagcaccagaggagcaggcactgtctttgacgcattccctgaccaagttgcaatccagcttaacgacactcatcccgccctggcgatcccagaacttatgcgcatttttgtggatattgagaagttgccctggagcaaagcatgggaactcacccaaaagacctttgcatatactaaccataccgtccttccagaggccttggaacgttggcctgtggatctggtggaaaagctccttccgaggcacttggagattatctacgagatcaaccagaaacacctggaccgcattgtcgcactgtttcctaaagacgtggatagactgcgccgaatgtcgctcattgaagaggaaggttcgaaacgtattaacatggctcacctgtgtattgtcggatcgcatgccgtgaatggagtggccaagatccattcggatattgtcaagaccaaggtgttcaaagattttagcgaactggaaccagataagtttcagaataagaccaatggcattacgccgagacgttggcttcttctgtgtaaccctgggctggcagaactgattgccgaaaagataggagaggattacgtcaaagatctgtcccaattgaccaaactgcatagctttctgggagatgatgtctttcttcgcgaactggctaaggtcaagcaagaaaacaaacttaagttcagccaatttcttgaaacggagtacaaggtcaagatcaatccttcatcgatgttcgacgtgcaggttaaaagaattcatgaatacaaacgacaactgctgaactgtctgcatgtgatcacgatgtacaatagaatcaaaaaggatcctaaaaagctgttcgtcccccggaccgtcataataggcggcaaagcagcaccaggataccacatggcaaagatgatcatcaagctgatcacttcagtggcagatgtggtgaataacgacccgatggtgggatccaagctgaaggtcatctttctggaaaactatcgcgtgtcacttgcagaaaaggtaatcccagcaaccgacttgtccgagcagattagcaccgcaggtaccgaggcatccggaactggcaacatgaagtttatgctgaacggagctctgaccattgggaccatggacggtgcgaacgtggagatggcagaagaggcaggtgaggaaaacctctttatcttcggcatgcggatcgatgacgtcgcagcactcgataagaaaggctatgaggcgaaagagtactacgaggcactgcctgaactcaagctggtcatcgatcaaatagataacggcttcttttctcccaagcagcctgatctgtttaaggacatcattaacatgcttttctaccatgatagatttaaggtgttcgcagattacgaagcgtacgtgaagtgtcaagacaaagtctcgcagctttacatgaatccaaaggcctggaacactatggtgctcaagaatatcgcggcgtctggcaagtttagctcggaccgaactattaaggaatacgcacaaaacatttggaacgtggaaccatccgatttgaagatatcgctttctaacgaatcaaacaaggtcaacggcaat

SEQ ID NO: 132900 - DNA, 2541 bp, Artificial Sequence
  derived and/or modified sequence
atggccaaacctcttactgatcaagagaagaggcgacaaattagcatccgcggtatcgtgggtgtcgagaatgtggcagagctcaagaagtccttcaaccgtcaccttcattttacgctggtgaaagaccggaatgtcgcaactacccgggattactactttgcattggcccataccgtcagagatcatcttgtcggtaggtggatccgcactcaacaacactactacgataagtgcccaaagcgagtgtactacctgtcacttgagttttacatgggccgcaccctgcaaaacaccatgataaacctggggcttcagaatgcctgtgatgaagcaatctatcagcttggtctggatatcgaggaactcgaagagattgaagaagatgccggtctgggcaacggtggacttgggcggctcgcagcgtgttttcttgattcgatggccacgctgggcctggccgcgtacggttacgggatccgttacgagtacggcatattcaaccagaaaattcgggacggatggcaggtggaagaggccgatgattggctgcgctatggtaacccttgggaaaagagccggcctgagtttatgcttccggtgcacttttacggaaaggtggaacacactaacactggaactaagtggatagatacgcaagtggtgcttgctttgccatacgatactccggtgccaggatacatgaacaataccgttaatactatgcgtctgtggagcgcacgcgcgccaaacgacttcaatctgcgtgatttcaacgtgggggattacatccaggcagtccttgaccgaaatctggcagagaacatctccagagtgctgtacccaaatgataacttcttcgagggaaaagaacttagactcaagcaggaatactttgtggtggcagcgacgctgcaagacattattcgtcgctttaaggcatccaagttcggttccaccagaggggccggaaccgtttttgatgcgtttccagaccaagtggcgatccagctgaatgatacccatccggcattggcaattcctgaactgatgagaatctttgtggacatcgaaaaactcccttggtccaaagcatgggaacttacccaaaagacttttgcatacactaatcacaccgtcctgccggaagcccttgagagatggcccgtggatctggtcgaaaagctgcttccgaggcatctggagataatctacgaaatcaaccaaaagcatctcgacaggatcgtggccctgtttcccaaggatgttgacaggttgcgaagaatgtcgctcattgaagaggaaggatcgaaaagaattaacatggctcatctctgtattgtgggatcccatgcggtgaatggggtggcaaaaatccactcggacattgtcaaaaccaaagtctttaaggatttttccgaactcgaacccgataagtttcagaacaagactaatgggataactcccaggcgctggctgctgttgtgtaatccaggcctcgctgagcttatcgccgagaaaataggtgaggactacgttaaggatctgtcccaattgaccaagctccactcgttcctgggagatgacgtctttctccgcgagctcgcaaaggtgaagcaggaaaacaagttgaagtttagccaattccttgaaactgaatacaaagtcaagatcaatccatcgtccatgtttgatgtgcaggtgaagcggattcacgaatacaagagacagctcctgaactgccttcatgtgatcacgatgtacaatcgcatcaaaaaggatcctaaaaagctgttcgtccctagaactgtgataattggaggaaaagccgcaccaggctaccacatggcaaagatgatcattaagctcatcacttcggtggcagatgtggtcaataacgaccctatggtgggaagcaaacttaaagtcatttttcttgaaaactaccgggtgagcctggcagaaaaagtgatccctgcaaccgatctttcggaacaaatctcaactgcaggtactgaggcatcgggtactgggaatatgaagtttatgctgaacggagcacttaccattggaactatggatggtgccaatgtggaaatggctgaagaagcaggtgaagaaaacctcttcatttttggaatgagaatagatgatgtggccgcccttgataagaagggatacgaagcgaaggaatactacgaggcacttccagagctcaagctggtgatcgatcaaatcgataacggattctttagcccgaaacagccagatctgtttaaggacattatcaacatgcttttctaccatgatcggttcaaggtgtttgccgattacgaagcctacgtcaagtgccaggataaggtcagccagctttacatgaatccaaaagcatggaacactatggtgctgaagaacatcgcggcatccggcaaattctcgtcggatcgcactataaaggagtacgcacagaacatctggaacgttgaaccaagcgacttgaagatttcgctgtcgaacgagtccaacaaggtgaacggtaat

SEQ ID NO: 132901 - RNA, 2687 nt, Artificial Sequence
  derived and/or modified sequence
gggaaauaagagagaaaagaagaguaagaagaaauauaagagccaccauggcgaaaccgcuuacugaucaggagaagcgccgacaaaucucgaucagagguaucguagguguggaaaacgucgccgagcuuaagaaaucguucaaccgccacuugcauuucacguuggugaaggaccgcaacguggcgaccacgcgggauuacuacuuugcauuggcccacacagugcgggaucaucuggucgggagguggaucagaacacaacagcacuacuacgauaagugcccgaaaagaguguauuaucuuucgcuugaguucuacaugggaagaacacuccagaauacgaugaucaaucuugggcuucagaacgcaugcgacgaagccaucuaccaguugggauuggacaucgaagagcuugaagagauugaggaggacgccggacucgggaaugguggacuggggcgacuugcggcguguuucuuggacuccauggcgacccugggccuggcggcauauggauauggaaucagauaugaguaugggaucuuuaaccagaaaauucgggauggauggcaggucgaagaagcugacgauuggcugagauacgggaauccuugggaaaaaucccgacccgaguucaugcucccgguacauuucuacgggaagguagagcauacaaacaccggcaccaaguggaucgauacccaagucguauuggcguugccguaugacacuccgguccccggguauaugaacaacacugucaauacaaugcgguuguggucggccagagcgcccaacgacuuuaaucuccgcgacuucaaugugggagauuacauucaagccgugcuggacaggaaccucgccgagaacauuucgcgggugcucuacccaaaugacaacuucuucgaggggaaagagcugcggcuuaaacaggaauacuucgucgucgcggcgacgcuucaagauaucauucgacgguuuaaggcauccaaguucgguucgacaagaggugcgggaacgguguuugaugccuuucccgaucaggucgccauccagcuuaacgauacccacccugcccucgcaaucccugaacucaugaggaucuuuguggauauugagaaacuucccuggucaaaggcgugggaacugacucaaaagacguucgcauacacaaaccacacaguacuccccgaggcgcuggaacgcuggccaguagaccugguggagaaacugcugccaaggcaccucgaaaucaucuacgagaucaaucagaaacacuuggaucggauuguagcucuuuuccccaaggacguggaucgcuugaggcgcaugucccucaucgaggaagaagggucaaagaggaucaauauggcucaucucugcaucguaggcucacacgcggugaacgggguagccaagauccacucggacauugucaaaacgaaagucuuuaaagauuuuagcgaacuugagcccgauaaguuucagaacaagacgaaugggauuacgccucggagaugguugcuucuguguaauccgggguuggcugagcuuaucgcggagaaaaucggcgaggacuacgugaaagaucugucgcaauugacgaaacuccauucguuucugggugacgauguauuccuucgcgagcucgcaaaaguaaagcaggagaauaagcugaaguucucccaguuuuuggagacagaguauaaggugaagaucaauccgucaagcauguuugacguacaaguaaagcggauucacgaguauaagcggcaacuucuuaauugccugcacgucaucacaauguauaaucgcaucaaaaaggacccgaagaaauuguucgugccuagaacagucaucauugguggaaaggcugcacccggauaccauauggccaaaaugaucaucaagcugauuacgagcguggccgacguggugaauaacgacccgauggucggaucaaaauugaagguaaucuuuuuggaaaacuauagagucucgcuugcggaaaaggugauucccgcaacggaccugucggaacagaucucaaccgcuggcacagaggccucgggaacgggaaacaugaaguucauguugaauggcgcucucacaauuggaaccauggauggagcaaauguagaaauggcagaggaggcuggagaagaaaacuuguuuaucuuugguaugcgcaucgacgauguagcggcauuggacaaaaaggguuacgaagcgaaggaguacuacgaggcccuuccggaguugaaacucgucaucgaucagauugacaauggcuuuuucucgcccaagcagcccgaccucuucaaggacaucaucaauaugcuguucuaccacgauagguucaagguguucgccgauuacgaggcguaugucaaaugucaggauaaaguaagccagcucuauaugaaccccaaagccuggaauacaauggugcuuaagaauauugcggcguccgggaaauucagcagcgaccgcacgauuaaggaguacgcacagaauaucuggaacgucgagcccagcgaccucaaaaucuccuugucaaacgaauccaacaaggugaacggaaacugauaagcugccuucugcggggcuugccuucuggccaugcccuucuucucucccuugcaccuguaccucuuggucuuugaauaaagccugaguaggaag

SEQ ID NO: 132902 - protein, 1482 aa, Artificial Sequence
  derived and/or modified sequence
MRKDRLLHLCLVLLLILLSASDSNSTEPQYMVLVPSLLHTEAPKKGCVLLSHLNETVTVSASLESGRENRSLFTDLVAEKDLFHCVSFTLPRISASSEVAFLSIQIKGPTQDFRKRNTVLVLNTQSLVFVQTDKPMYKPGQTVRFRVVSVDENFRPRNELIPLIYLENPRRNRIAQWQSLKLEAGINQLSFPLSSEPIQGSYRVVVQTESGGRIQHPFTVEEFVLPKFEVKVQVPKIISIMDEKVNITVCGEYTYGKPVPGLATVSLCRKLSRVLNCDKQEVCEEFSQQLNSNGCITQQVHTKMLQITNTGFEMKLRVEARIREEGTDLEVTANRISEITNIVSKLKFVKVDSHFRQGIPFFAQVLLVDGKGVPIPNKLFFISVNDANYYSNATTNEQGLAQFSINTTSISVNKLFVRVFTVHPNLCFHYSWVAEDHQGAQHTANRVFSLSGSYIHLEPVAGTLPCGHTETITAHYTLNRQAMGELSELSFHYLIMAKGVIVRSGTHTLPVESGDMKGSFALSFPVESDVAPIARMFIFAILPDGEVVGDSEKFEIENCLANKVDLSFSPAQSPPASHAHLQVAAAPQSLCALRAVDQSVLLMKPEAELSVSSVYNLLTVKDLTNFPDNVDQQEEEQGHCPRPFFIHNGAIYVPLSSNEADIYSFLKGMGLKVFTNSKIRKPKSCSVIPSVSAGAVGQGYYGAGLGVVERPYVPQLGTYNVIPLNNEQSSGPVPETVRSYFPETWIWELVAVNSSGVAEVGVTVPDTITEWKAGAFCLSEDAGLGISSTASLRAFQPFFVELTMPYSVIRGEVFTLKATVLNYLPKCIRVSVQLKASPAFLASQNTKGEESYCICGNERQTLSWTVTPKTLGNVNFSVSAEAMQSLELCGNEVVEVPEIKRKDTVIKTLLVEAEGIEQEKTFSSMTCASGANVSEQLSLKLPSNVVKESARASFSVLGDILGSAMQNIQNLLQMPYGCGEQNMVLFAPNIYVLNYLNETQQLTQEIKAKAVGYLITGYQRQLNYKHQDGSYSTFGERYGRNQGNTWLTAFVLKTFAQARSYIFIDEAHITQSLTWLSQMQKDNGCFRSSGSLLNNAIKGGVEDEATLSAYVTIALLEIPLPVTNPIVRNALFCLESAWNVAKEGTHGSHVYTKALLAYAFSLLGKQNQNREILNSLDKEAVKEDNLVHWERPQRPKAPVGHLYQTQAPSAEVEMTSYVLLAYLTAQPAPTSGDLTSATNIVKWIMKQQNAQGGFSSTQDTVVALHALSRYGAATFTRTEKTAQVTVQDSQTFSTNFQVDNNNLLLLQQISLPELPGEYVITVTGERCVYLQTSMKYNILPEKEDSPFALKVQTVPQTCDGHKAHTSFQISLTISYTGNRPASNMVIVDVKMVSGFIPLKPTVKMLERSSSVSRTEVSNNHVLIYVEQVTNQTLSFSFMVLQDIPVGDLKPAIVKVYDYYETDESVVAEYIAPCSTDTEHGNV

SEQ ID NO: 132903 - protein, 1268 aa, Artificial Sequence
  derived and/or modified sequence
MSESYRRTTFPVRFRVVSVDENFRPRNELIPLIYLENPRRNRIAQWQSLKLEAGINQLSFPLSSEPIQGSYRVVVQTESGGRIQHPFTVEEFVLPKFEVKVQVPKIISIMDEKVNITVCGEYTYGKPVPGLATVSLCRKLSRVLNCDKQEVCEEFSQQLNSNGCITQQVHTKMLQITNTGFEMKLRVEARIREEGTDLEVTANRISEITNIVSKLKFVKVDSHFRQGIPFFAQVLLVDGKGVPIPNKLFFISVNDANYYSNATTNEQGLAQFSINTTSISVNKLFVRVFTVHPNLCFHYSWVAEDHQGAQHTANRVFSLSGSYIHLEPVAGTLPCGHTETITAHYTLNRQAMGELSELSFHYLIMAKGVIVRSGTHTLPVESGDMKGSFALSFPVESDVAPIARMFIFAILPDGEVVGDSEKFEIENCLANKVDLSFSPAQSPPASHAHLQVAAAPQSLCALRAVDQSVLLMKPEAELSVSSVYNLLTVKDLTNFPDNVDQQEEEQGHCPRPFFIHNGAIYVPLSSNEADIYSFLKGMGLKVFTNSKIRKPKSCSVIPSVSAGAVGQGYYGAGLGVVERPYVPQLGTYNVIPLNNEQSSGPVPETVRSYFPETWIWELVAVNSSGVAEVGVTVPDTITEWKAGAFCLSEDAGLGISSTASLRAFQPFFVELTMPYSVIRGEVFTLKATVLNYLPKCIRAEGIEQEKTFSSMTCASGANVSEQLSLKLPSNVVKESARASFSVLGDILGSAMQNIQNLLQMPYGCGEQNMVLFAPNIYVLNYLNETQQLTQEIKAKAVGYLITGYQRQLNYKHQDGSYSTFGERYGRNQGNTWLTAFVLKTFAQARSYIFIDEAHITQSLTWLSQMQKDNGCFRSSGSLLNNAIKGGVEDEATLSAYVTIALLEIPLPVTNPIVRNALFCLESAWNVAKEGTHGSHVYTKALLAYAFSLLGKQNQNREILNSLDKEAVKEDNLVHWERPQRPKAPVGHLYQTQAPSAEVEMTSYVLLAYLTAQPAPTSGDLTSATNIVKWIMKQQNAQGGFSSTQDTVVALHALSRYGAATFTRTEKTAQVTVQDSQTFSTNFQVDNNNLLLLQQISLPELPGEYVITVTGERCVYLQTSMKYNILPEKEDSPFALKVQTVPQTCDGHKAHTSFQISLTISYTGNRPASNMVIVDVKMVSGFIPLKPTVKMLERSSSVSRTEVSNNHVLIYVEQVTNQTLSFSFMVLQDIPVGDLKPAIVKVYDYYETDESVVAEYIAPCSTDTEHGNV

SEQ ID NO: 132904 - DNA, 4449 bp, Artificial Sequence
  derived and/or modified sequence
atgcgtaaggaccggctgctacatctctgcctggtgctactgcttattctcctcagcgcctctgattcaaattcaacggaaccacagtatatggtgctggtgcccagcttattacataccgaagctccaaagaagggctgcgtgttgctgtctcacttaaatgagactgtgacagtgtccgcctctctcgaatcagggcgtgagaaccgttcacttttcactgacttagtggcagaaaaagacctcttccactgcgtcagtttcactctgccccggataagtgcgtcctctgaggtcgctttcctctcaattcaaattaagggtcccactcaggactttaggaagaggaatactgtcttagtcctgaacacacagagccttgtgttcgttcagacagataagccaatgtacaagcctggccaaacagtgagatttcgggtggtaagcgtcgacgagaactttcgcccgcgcaatgagcttatcccattgatctacctggagaatccaaggaggaacaggatcgcacagtggcagtccctgaaactggaggcgggtatcaatcaactcagttttcctttgtcaagcgaacccatccaggggagctacagggtggtggtccagacagagagcggagggcgtatccagcacccctttactgtggaggaatttgttctccctaaatttgaggttaaggtccaggtccctaagatcatctccatcatggacgagaaagttaatataaccgtgtgcggtgagtacacttacggaaagccagtgcccggcctagctaccgtgtccctgtgccggaaactgtctcgagtgttgaattgcgataagcaggaagtatgtgaggaattcagccagcagttgaactccaatggatgcattacacagcaggtacatacaaagatgctccagataaccaataccggcttcgagatgaaattgcgggtggaggcacgaatcagagaggagggtaccgatctggaagtcactgcgaaccgcattagcgagatcactaacattgtgagtaaactgaaattcgtgaaggtggacagccacttcaggcaaggcattccctttttcgcccaggtgctgctggtagatggcaagggcgtgcccatcccaaataagctattcttcattagcgtgaacgacgcaaactactattcaaatgcgaccaccaacgagcagggcttagcccagttctccattaacaccaccagcatttccgtgaacaagctgtttgtgcgcgttttcacagtgcatccaaacctgtgctttcactatagctgggttgctgaagaccaccagggcgcacaacatactgccaatagagtgttctcactttcaggtagctacatccaccttgaacctgttgcaggaacactgccttgtggacacacggaaactattaccgcccactacaccttaaacaggcaagccatgggggagttatcagagttatcttttcactatctgataatggcaaagggagtgatagttagatctggcacccatacactgccggtcgagtctggtgatatgaaaggctctttcgctttgtcttttcctgttgagagtgacgtggcccctatcgcaagaatgttcatttttgcaatactgccagacggcgaggtggtgggcgattctgagaaatttgagattgaaaactgcctcgccaacaaagtcgatctctcattctcacccgcccagtctcctcccgcatcacatgcccatctacaggtggcagccgcgccgcaatcactctgtgcgctgcgggctgtggaccaatccgtcctgttgatgaagcccgaagccgaactgtcagtaagtagcgtctacaacttgctcactgtgaaagacctcactaattttcccgataatgtagaccagcaggaagaagaacagggtcactgccctcgcccgttctttatccacaatggcgctatctatgtgcccttgagctcgaatgaggctgacatatacagttttttgaaaggcatgggcctaaaagttttcaccaatagtaaaatccgaaagccaaaaagttgtagcgtcattccaagcgtctccgccggcgctgtcggacaggggtactatggtgccggactgggcgtggtggagcgcccctatgtaccccagcttgggacatataatgtaatcccactgaataacgagcaatcaagtgggcctgtccctgagacagtccgttcgtatttccctgagacttggatctgggagttggtggctgtgaatagcagtggcgtggctgaggtaggcgtgactgtccccgacacgattaccgagtggaaagccggcgcattctgtctgagcgaggatgctggcctgggcatatcaagcactgctagtctaagagcctttcagccttttttcgtcgagctcacaatgccctattccgtgatacggggcgaagttttcactctgaaggcaacagtcctaaattatctgccaaaatgcatacgagtcagcgtgcagctgaaggcctcccccgctttcctggcctcgcagaacaccaagggcgaggagtcttattgtatttgtgggaacgagagacagaccctgtcatggaccgttacaccaaagaccctgggaaacgtgaatttctccgtcagtgccgaggctatgcagtccctagagttgtgtgggaatgaagtggtagaggtccctgaaatcaagcgaaaagatactgtgatcaagacgctcttggtggaagcagaaggaatcgagcaggagaaaaccttttcgagtatgacatgtgcgtcaggcgctaatgtgtccgagcaactgtctctgaagctgccaagtaatgtggtgaaagagagcgcccgggccagctttagcgtgctgggagatatcctagggtcagccatgcaaaatatacagaacctgctacaaatgccgtacggctgtggggagcagaacatggtcctgttcgctccaaatatctatgttctgaactatttgaacgaaacacaacagctcacccaagagatcaaggccaaggccgtcgggtatctgattaccggctaccagaggcagctgaactataagcaccaggatggtagttatagcaccttcggcgaaagatacggcagaaatcagggaaatacatggctcacagccttcgtgctgaagacctttgctcaggcaagaagctacattttcattgatgaggctcacatcactcagtctctgacatggctctcacagatgcaaaaagataatgggtgctttaggagctccgggtcccttctgaataacgctataaaagggggtgttgaagacgaggcaaccttgtcagcatatgtcacaatagcactcctagaaataccattgccagtaacgaatccaatcgtgcggaatgccttattttgtctggaatctgcttggaatgttgctaaggaggggacccatgggagccacgtttatactaaagctctcttggcgtatgcattcagcctgctggggaagcaaaatcagaacagggaaatcctgaactccttggacaaggaagcagtaaaggaggataatttggtgcactgggaacggccccagcgcccgaaggcacccgtgggacacctctaccaaacccaggcgccctcggctgaagttgagatgacaagctatgtgctgctggcttatttaacagcccagccagccccaacctccggggatttgacctcggcaaccaatatcgtgaagtggattatgaaacaacagaacgcccagggagggttttccagtacccaggatactgtcgtggcgctccacgccctctcccgctatggggctgctacttttacgaggacagaaaaaactgcacaggtaaccgtccaggattcacagacattctctactaacttccaggtcgacaacaacaacctccttctcctgcagcaaatttctttgcccgaactacctggagagtatgtcatcaccgtaaccggggagcgatgcgtgtatctacaaacatctatgaaatacaatattctccccgaaaaagaagattcaccattcgcactgaaagtccagactgtacctcaaacttgtgacggacataaagctcacacgagcttccagatttcactgacaatcagttatactggcaaccgccccgcttctaacatggtcattgtggatgtgaaaatggtgtccggctttatcccactgaagcccactgtcaagatgcttgaaaggtcttcttcagtctcaaggactgaagtgagcaataaccacgtcctcatctacgtcgagcaggtgactaatcagaccctttctttctcttttatggtcctccaggatatacctgtcggtgatctcaaacccgccattgtgaaggtttatgactattacgaaactgacgagtctgtggtagccgagtacatcgcgccctgcagcacagacaccgagcatggaaatgtatag

SEQ ID NO: 132905 - DNA, 4449 bp, Artificial Sequence
  derived and/or modified sequence
atgaggaaggaccggctgctgcacctgtgcctggtgctgctgctgatcctgctgagcgccagtgacagcaacagcacagagccccagtacatggtgctggtgcccagcctgctgcacacagaggcccccaagaagggctgtgtgctgctgagccacctgaatgagaccgtgacagtgtctgccagcctggagagcggccgggagaacagaagcctcttcacagacctggtggccgagaaggacctcttccactgtgtgtccttcaccctgccccgcatcagcgccagcagcgaggtggccttcctgagcatccagatcaagggccccacccaggacttcaggaagaggaacacagtgctggtgctgaacacccagagcctggtgtttgtgcagacagacaagcccatgtacaagccaggccagacagtgcgcttccgggtggtgtctgtggatgagaacttccggcccagaaatgagctgatccccctcatctacctggagaaccccaggaggaaccgcatcgcccagtggcagagcctgaagctggaggccggcatcaaccagctgtccttccccctgagcagcgagcccatccagggcagctacagagtggtggtgcagacagagagcggcggccgcatccagcaccccttcaccgtggaggagtttgtgctgcccaagtttgaggtgaaggtgcaggtgcccaagatcatcagcatcatggatgagaaggtgaacatcaccgtgtgtggggagtacacctacggcaagcctgtgcccggcctggccaccgtgtccctgtgcaggaagctgagccgggtgctgaactgtgacaagcaggaggtgtgtgaggagttcagccagcagctgaacagcaatggctgcatcacccagcaggtgcacaccaagatgctgcagatcaccaacacaggctttgagatgaagctgcgggtggaggcccgcatccgggaggagggcacagacctggaggtgacagccaaccgcatcagcgagatcaccaacatcgtgtccaagctgaagtttgtgaaggtggacagccacttccggcagggcatccccttctttgcccaggtgctgctggtggatggaaaaggagtgcccatccccaacaagctgttcttcatctctgtgaatgatgccaactactacagcaatgccaccaccaatgagcagggcctggcccagttcagcatcaacaccaccagcatctctgtgaacaagctgtttgtgcgggtcttcaccgtgcaccccaacctgtgcttccactacagctgggtggccgaggaccaccagggcgcccagcacacagccaacagagtcttcagcctgagcggcagctacatccacctggagcctgtggccggcaccctgccctgtggccacacagagaccatcacagcccactacaccctgaaccggcaggccatgggagagctgtctgagctgtccttccactacctgatcatggccaagggcgtgattgtgcgcagcggcacccacaccctgcctgtggagagcggggacatgaagggcagctttgccctgtccttccctgtggagagtgatgtggcccccatcgccaggatgttcatctttgccatcctgcctgatggagaggtggtgggggacagcgagaagtttgaaattgagaactgcctggccaacaaggtggacctgtccttcagccctgcccagagccccccagccagccacgcccacctgcaggtggccgccgccccccagagcctgtgtgccctgcgggctgtggaccagagcgtgctgctgatgaagccagaggccgagctgtctgtgtcctctgtgtacaacctgctgactgtgaaggacctgaccaacttcccagacaacgtggaccagcaggaggaggagcagggccactgcccccggcccttcttcatccacaacggggccatctacgtgcccctgagcagcaatgaggccgacatctacagcttcctgaagggcatgggcctgaaggtgttcaccaacagcaagatcaggaagcccaagagctgcagcgtcatccccagcgtgtctgctggagctgtgggccagggctactatggagctggcctgggcgtggtggagcggccctacgtgccccagctgggcacctacaacgtcatccccctgaacaatgagcagagcagcggccctgtgcctgagaccgtgcgcagctacttccctgagacctggatctgggagctggtggccgtgaacagcagtggagtggccgaggtgggcgtgacagtgcctgacaccatcacagagtggaaggccggggccttctgcctgtctgaagatgctggcctgggcatcagcagcacagccagcctgcgggccttccagcccttctttgtggagctgaccatgccctacagcgtcatccggggggaggtgttcaccctgaaggccaccgtgctgaactacctgcccaagtgcatccgggtgtctgtgcagctgaaggccagccctgccttcctggccagccagaacaccaagggggaggagagctactgcatctgtggaaatgaaaggcagaccctgtcctggacagtgacccccaagaccctgggcaatgtgaacttctctgtgtctgctgaggccatgcagagcctggagctgtgtggaaatgaggtggtggaggtgcctgagatcaagaggaaggacaccgtcatcaagaccctgctggtggaggccgagggcatcgagcaggagaagaccttcagctccatgacctgtgccagcggggccaacgtgtctgagcagctgagcctgaagctgcccagcaatgtggtgaaggagagcgcccgggccagcttctctgtgctgggggacatcctgggcagcgccatgcagaacatccagaacctgctgcagatgccctacggctgtggggagcagaacatggtgctgtttgcccccaacatctacgtgctgaactacctgaatgagacccagcagctgacccaggagatcaaggccaaggctgtgggctacctgatcaccggctaccagaggcagctgaactacaagcaccaggacggcagctacagcaccttcggggagagatatggcaggaaccagggcaacacctggctgacagcctttgtgctgaagacctttgcccaggcccggagctacatcttcattgatgaggcccacatcacccagagcctgacctggctgagccagatgcagaaggacaatggctgcttccgcagcagcggcagcctgctgaacaatgccatcaagggcggcgtggaggatgaggccaccctgagcgcctacgtgaccatcgccctgctggagatccccctgcctgtgaccaaccccatcgtgagaaatgccctcttctgcctggagagcgcctggaatgtggccaaggagggcacccacggcagccacgtgtacaccaaggccctgctggcctatgccttcagcctgctgggcaagcagaaccagaaccgggagatcctgaacagcctggacaaggaggccgtgaaggaggacaacctggtgcactgggagcggccccagaggcccaaggcccctgtgggccacctgtaccagacccaggcccccagcgctgaggtggagatgaccagctatgtgctgctggcctacctgacagcccagcctgcccccaccagcggggacctgaccagcgccaccaacatcgtgaagtggatcatgaagcagcagaatgcccagggcggcttcagcagcacccaggacacagtggtggccctgcacgccctgagccgctacggggccgccaccttcaccaggacagagaagacagcccaggtgacagtgcaggacagccagaccttcagcaccaacttccaggtggacaacaacaacctgctgctgctgcagcagatcagcctgcctgagctgcctggagaatatgtgatcaccgtgactggagagcgctgtgtgtacctgcagacctccatgaagtacaacatcctgcctgagaaggaggacagcccctttgccctgaaggtgcagacagtgccccagacctgtgatggccacaaggcccacaccagcttccagatcagcctgaccatctcctacacaggcaacagacctgccagcaacatggtgattgtggatgtgaagatggtgtctggcttcatccccctgaagcccaccgtgaagatgctggagaggagcagctctgtgtccaggacagaggtgagcaacaaccacgtgctgatctacgtggagcaggtgaccaaccagaccctgtccttctccttcatggtgctgcaggacatccctgtgggggacctgaagccagccatcgtgaaggtgtatgactactatgaaacagatgagagcgtggtggccgagtacatcgccccctgcagcacagacacagaacatggaaatgtgtag

SEQ ID NO: 132906 - DNA, 4449 bp, Artificial Sequence
  derived and/or modified sequence
atgcggaaggaccggctgctgcacctgtgcctggtgctgctgctgatcttgctgtccgctagcgatagtaattcaacagaaccccagtacatggtgctggttcctagcctgctgcacaccgaagcgccaaagaaaggctgtgtactactatctcatctgaacgaaacagtcactgtttctgcatcactcgagtccgggagggagaataggtccctgttcaccgaccttgtcgctgagaaagacttatttcactgcgtgtcgttcacactgccaagaatttctgcatcctctgaggtggcctttctttctattcagatcaaaggcccaacacaggacttcagaaagagaaacaccgtgctggtgctgaatactcaaagcctcgtcttcgtgcagactgataaacccatgtacaagccagggcagactgtacgatttcgtgtggtaagtgtcgacgagaacttccggcccaggaacgaactgattcccctaatctatctggaaaaccctcgcagaaaccgcattgctcagtggcaaagcctcaaactggaggcgggcataaatcaactgagtttccccctcagcagcgaaccaatccagggctcataccgcgtggtggtgcagactgagagtgggggcaggatccaacacccatttactgtggaggaattcgtcctgccaaaatttgaggtcaaggttcaggttcccaagataatctccattatggatgaaaaggtcaatatcaccgtgtgtggtgaatatacatacggaaagcctgtgcccggactggctacagtatctctgtgcaggaaactgtccagagtcctgaactgtgacaaacaggaggtgtgtgaggaattctctcaacagttgaactccaacggttgtatcacacagcaggttcataccaagatgctgcaaattacaaataccgggtttgagatgaagcttcgagtcgaagccaggatcagggaagaaggcacggatctggaggtgactgctaaccgcatttccgagattaccaatatcgtctctaagctgaagtttgtgaaagtggattctcacttccggcagggcatccccttcttcgctcaggtgctgcttgtggacggaaaaggcgtccctatccctaacaagctgttcttcatttccgtgaacgatgcaaattactatagtaacgcaaccactaacgagcagggattggcccagttcagcatcaatacaacttcaatcagtgtgaataagctctttgtgcgcgtatttaccgtacaccctaacctatgttttcactactcttgggtcgcggaagatcaccagggagctcagcacaccgccaaccgagtcttttccttgtctggaagttatatccacctggaaccagtggcaggaactctgccctgcggtcatacagagacaataactgcacattatacactcaatagacaggccatgggagagctgagcgagctgtcatttcactacctgatcatggctaaaggcgtgatcgtacgcagcggcacccataccttgcctgttgaatcaggagatatgaagggtagttttgcactctccttcccagtggagagcgacgtcgctccgattgcaagaatgtttatcttcgcaattctcccagacggagaggttgtgggggactctgagaaatttgaaatagagaattgtctggccaacaaggtggacctctctttctcacccgcccagtcaccgcctgcaagccatgcccacctgcaggtggccgctgcgccacagagtctgtgcgcattgcgcgccgtcgatcagagcgtactgcttatgaagcccgaagctgaactgtctgtaagctccgtttataacctcctgacagtgaaagatcttacaaacttcccagacaatgttgaccagcaggaagaggagcagggtcactgccccagacccttctttatccacaacggagccatatatgtgccactgtcaagcaacgaggcagatatttatagctttctgaaggggatgggcctaaaagtgttcacaaattcaaaaatccgtaaacctaaatcttgtagcgtcatccccagcgtgtcagcaggcgccgttggtcaggggtactatggcgctggcctcggtgtggtagagaggccttacgtacctcagctcggtacgtacaatgtgattcctctcaacaatgaacagtcatctggtccagtccccgagaccgttcgatcctattttcccgagacatggatatgggagctcgttgccgtgaactcctctggcgttgccgaagttggggttaccgttccagacacaattactgaatggaaggccggagctttctgtcttagtgaagacgcagggctgggcataagcagtaccgccagtctgcgggccttccagccttttttcgtagagctgaccatgccttacagtgtcatacggggcgaggtctttactcttaaggctacagtgctcaattacctgccaaagtgcataagagtcagtgtgcagctgaaggccagccccgcctttctcgcctcccagaacacgaagggtgaggaatcttactgcatttgcggcaacgagcggcagaccctttcatggacggtcacccctaaaacactcggaaacgttaacttttccgtttccgccgaggctatgcagtccctggagctgtgtggcaacgaagtggttgaggtaccagaaattaagcgtaaggataccgtcattaagaccctgctggtcgaagccgaggggattgaacaagaaaagaccttcagttctatgacctgcgccagcggagccaatgtgagcgaacaactgagtctgaagctgccatctaacgtggtcaaggaaagtgccagagcctccttctccgtgctcggcgatatcctggggagtgctatgcaaaatattcagaacctgctgcaaatgccttatggttgtggggagcagaacatggttctgtttgcgccaaacatttatgtgctgaactacctgaacgagacccagcagctgacgcaggagatcaaggcaaaggcagtgggatacctcatcaccgggtaccaacggcagcttaattataaacaccaggatgggtcctacagcacattcggagagcgctacggcaggaatcaaggtaacacctggctaacagcttttgtactcaaaacctttgcccaggcgcggtcatacatttttatagacgaggctcacattacacagtccctgacctggctctcacagatgcagaaagataacggatgctttaggagcagcggaagtctcctcaacaacgcgatcaaaggcggcgtggaggatgaagctactctttctgcttacgtcacgatcgcactactggagatccccctcccagtcacaaatcctatcgtccgcaatgcccttttttgtctggagagcgcttggaatgtggctaaggaagggactcacggcagtcatgtctataccaaggcgttgctggcttatgcctttagtctgctgggcaagcagaaccagaaccgcgagattctcaactctcttgataaggaagcggtgaaagaggacaacttggtgcactgggaacgaccccagagacctaaagcacctgtgggtcatctttaccagactcaagcaccgtccgctgaggtggagatgacttcttacgtacttctggcttatctcactgcccaaccagctccaacctctggcgaccttacctcagccaccaacattgtaaagtggatcatgaagcaacagaatgcccagggcgggttctctagcacacaggacacagtcgtcgccttgcatgctttatcacgctacggggcagcaaccttcacacgcacagaaaagaccgcccaggttaccgtgcaagacagccagacattcagtacaaatttccaggtcgataataacaatcttttgctgctacagcagattagcctgcctgagctgccaggagaatacgtaatcacggtcaccggtgagagatgtgtctacctccagacgagtatgaagtacaacatcttacctgaaaaggaggacagtcccttcgcgctaaaggtccagacagtacctcagacctgcgatggacacaaagcacacacgagtttccagattagcttaacaatctcctataccggtaaccgccccgcatcaaatatggtcatcgtcgatgtgaagatggtcagcgggttcattcccctgaagcctaccgtgaagatgctggagagaagtagctctgtaagcagaacggaggtaagtaataatcatgtgttaatctacgtagaacaggttacaaaccagacactgagcttctcttttatggtgctacaggatatccctgtcggagacctcaaacctgccatagtgaaggtgtatgattactacgagaccgatgagtcagtggtggcagagtacatagccccttgttccaccgacactgagcacgggaatgtgtag

SEQ ID NO: 132907 - DNA, 4610 bp, Artificial Sequence
  derived and/or modified sequence
ggacacaaccctgagatttatccctcacaatgcggaaagacagacttcttcatttatgtcttgtgctacttcttatcctgctttctgccagtgactcaaactctacagaaccgcagtatatggtgctggtcccctccctgctccacactgaggcccctaagaagggctgtgtccttctgagccacctgaatgagacagtgactgtaagtgcttccttggagtctggcagggaaaacaggagcctcttcactgacctggtggcggagaaggacttattccactgtgtctccttcactctcccaaggatctcagcctcttcagaggtggcattccttagcatccagataaaggggcctacgcaagatttcaggaagaggaacacagttctggtactgaacacccaaagtctggtctttgtccagacagacaaacccatgtataaaccaggacagacagtaagattccgtgttgtctccgtggatgaaaattttcgccctcgaaatgaactgattccactgatataccttgagaacccaagaagaaatcgaattgcacaatggcagagtctcaagctagaagctggcatcaatcagttgtcctttcccctctcatcagagcccattcagggctcctacagggtggtggtacagacagaatcaggtggaaggatacagcaccccttcaccgtggaggaatttgtgcttcccaagtttgaggtcaaagttcaggtgccaaagataatcagtatcatggatgaaaaagtgaacataacagtctgtggagaatacacttatgggaagcctgtcccaggacttgcaactgtgagcctgtgtagaaaattatctcgtgttcttaattgtgacaagcaggaggtctgtgaggaattcagtcaacagcttaacagcaatggctgcatcacccaacaagtacacaccaaaatgctccagattacaaatacgggctttgaaatgaagcttagagtggaagccaggatcagagaagaggggacagacctggaagtcactgcaaacaggatcagtgaaatcacaaacattgtatccaaactcaaattcgtgaaagtggattcacactttagacaaggaatccccttttttgcacaggtgcttctggtggatggaaaaggtgtgcccatccccaataaactcttcttcatctctgtgaatgacgccaattattactccaatgcaaccaccaatgagcagggtcttgcacagttttcaatcaatactaccagtatctcggttaataaactttttgtccgggttttcactgtgcatcccaacttgtgttttcactattcatgggtagcagaagaccaccagggtgctcagcacactgcaaatcgtgttttctccttaagtggaagttacattcacctggagcctgtggctggtaccctgccctgtggccacacggagactatcacggcacactatacactgaatagacaggccatgggagagttatcggagctcagtttccattacctgatcatggctaagggagtcatcgtcagatctggaacccacactctgcctgtggagtcaggagacatgaaaggcagttttgccttatccttccctgtggagtcagacgttgcccccattgcacgaatgttcatctttgccattttaccagatggagaagttgttggagactctgaaaaatttgagattgaaaactgtctagccaacaaggtggatttgagcttcagcccagcacaaagtcccccagcctcacatgcccacctgcaagtagcagctgctccgcagtccctctgtgcccttcgtgctgtggaccaaagtgtgctgctcatgaagcctgaggctgagctctctgtgtcctcagtatataatctgctaactgtgaaggatctcaccaattttcctgacaatgtggaccagcaggaggaagaacaaggacactgtccccgtcctttcttcattcataatggagccatctatgttcccttatcaagtaatgaagcagatatttatagcttcctcaaggggatgggattgaaggtgttcactaactcaaaaatccgaaaaccaaagtcgtgttcagtcatcccttccgtgtctgcaggagcagtaggtcaaggatactatggagcaggtctaggagtagtagagagaccatatgttcctcaattaggcacatataatgtgatacccttaaataatgaacaaagttcagggccagtccctgaaacggtgcgaagctattttcctgagacttggatctgggagttggtggcagtgaactcatcaggtgtggctgaggtaggagtaacagtccctgacaccatcaccgagtggaaggcaggggccttctgcctgtccgaagatgctggacttggtatctcttccactgcctctctccgagccttccagcccttctttgtggagctcacaatgccttactctgtgattcgtggagaggtcttcacactcaaggccacggtcctaaactaccttcccaaatgcatccgggtcagtgtgcagctgaaagcctctccagccttcctagcttcccaaaatacaaagggagaagaatcctattgtatctgtggaaatgagagacaaaccttgtcttggacagtgactcctaaaactctggggaatgtgaacttctcagtgagtgcagaggcaatgcagtccttagaactctgtggaaatgaggttgttgaggtccctgagattaaaagaaaagacacagtcatcaaaaccctgttggtggaggctgaaggtattgagcaagaaaagactttcagttctatgacctgtgcctcaggtgctaatgtgtctgagcagttgtccttgaagctcccatcaaatgtggtcaaagaatctgccagagcttctttctcagttctgggtgacatattaggttctgctatgcaaaatatacaaaatctcctccagatgccatatggctgtggagaacagaacatggtcctatttgctcctaacatctatgtcttgaactatctgaatgaaacccagcagctgacgcaggagatcaaggccaaggccgttggctatctcatcactggttaccagagacagctgaactacaaacaccaagatggctcctacagcacctttggggaacgatatggcaggaaccagggcaacacttggctcacagcttttgtactgaagactttcgcccaggctcgatcctacatcttcattgatgaagcacacattacccaatctctcacgtggctctcccagatgcagaaggacaatggctgtttcaggagctctgggtcactgctcaacaatgccataaagggaggtgtagaagatgaagcgaccctctccgcctatgttactattgcccttctggaaattcctctcccagtcactaaccctattgttcgcaatgccctgttctgcctggagtcagcctggaatgtagcaaaggaggggacccatgggagccatgtctacaccaaggcattgctggcctatgctttttccctactgggaaagcaaaatcagaatagagaaatactgaactcacttgataaggaagctgtgaaagaagacaacctcgtccattgggagcgccctcagagacccaaggcaccagtggggcatctttaccaaacccaggctccctctgctgaggtggagatgacatcctatgtgctcctcgcttatctcacggcccagccagcccccacctcaggggacctgacctctgcaactaacattgtgaagtggatcatgaagcagcagaacgcccaaggtggtttctcctccacccaggacacagtggtggctctccatgccctgtccaggtatggagcagccactttcaccagaactgagaaaactgcacaggtcaccgttcaggattcacagaccttttctacaaatttccaagtagacaacaacaacctcctattactgcagcagatctcattgccagagctccctggagaatatgtcataacagtaactggggaaagatgtgtgtatcttcagacatccatgaaatacaatattcttccagagaaagaggactccccatttgctttaaaagtgcagactgtgccccaaacttgcgatggacacaaagcccacaccagctttcagatctcactgaccatcagttacacaggaaaccgtcctgcttccaatatggtgattgttgatgtaaagatggtatctggttttattcccctgaaaccaacagtaaaaatgcttgaaagatctagctctgtgagccggacagaagtgagcaacaaccatgtcctcatttatgtggaacaggtgacaaatcagacgctaagtttttccttcatggttctgcaagacatcccagtaggagacttgaagccagcaattgttaaagtctatgattactatgagacagatgagtctgtggttgctgagtatatcgccccctgcagcacagatacagagcatggaaatgtttgaggaccatacaggctgtatattttggtggattctctgtcctatacatttacttagaaggaatggagttatttgtctctataaaatagacactaaaaatatttgctgaataaatatgtacttctggtcaaacta

SEQ ID NO: 132908 - DNA, 4449 bp, Artificial Sequence
  derived and/or modified sequence
atgagaaaggaccgactgttgcacctttgcttggtcctgttactcatcctcctgtccgcatccgattctaattcaacagaaccccagtatatggtgttagtcccgtccctgctacacacggaagcaccgaagaaaggatgcgttcttctttcccatcttaacgagacagttaccgtatctgctagcctcgagtccggtagggagaatagaagtctcttcaccgatctcgtggccgagaaggatctgttccattgtgtatcattcactctgcccagaatctctgcttcgagcgaggtggctttcctgtccatacagattaaaggacctactcaagatttccggaagaggaatacagtgctggtgctcaatacacagtcgctggtgttcgtgcagacagataaacccatgtataaaccaggtcagacagtgcggttccgcgtcgtgtcagtagacgaaaattttcggcctagaaacgagctgatcccccttatttatctagagaatcccagacggaacagaatcgcccagtggcagtccttgaagctcgaggccggaatcaaccagcttagtttcccattgtcttctgaaccaatacaggggtcttacagagtggtggttcagacggagtctggcggtcgcatccaacacccttttaccgtggaggagttcgtcctgccaaaatttgaggtcaaggtccaggtaccaaaaattatctcaattatggatgagaaggtgaacatcaccgtgtgcggtgagtacacatacgggaaaccggttccaggtctagcgactgtgagtctgtgccgtaaactttctagagtgctgaattgtgacaagcaagaggtgtgtgaggagttctcccaacagctcaatagtaatggatgtatcacccaacaggttcacaccaaaatgctgcagataaccaatacaggttttgaaatgaaactgcgcgtggaggcacgcattcgtgaagaaggcacggacctcgaggtgacggcaaatcgaatttcagaaattacaaacatagtgagcaaacttaaattcgtgaaggtggatagccacttcagacaagggattccgttcttcgcacaagtgttgttggtcgacgggaaaggagtgcctatacccaacaagcttttctttatttctgtcaacgatgctaactactacagcaatgcaacaactaacgaacagggcctcgctcaattctccattaacacaacgtccatctccgtcaacaagctgtttgtcagggtcttcaccgtccatccgaatttgtgtttccactatagttgggtggcggaagaccaccagggcgctcagcacaccgcaaatagagtattctccctcagtggatcatacatccatcttgagccagtcgccggtaccctgccctgcggccatactgagactattactgctcactacactctgaatcgacaggccatgggcgagctatctgagctcagctttcattacctgatcatggctaagggggtgattgtcaggtccggcacacataccttgcccgttgaaagcggagatatgaagggaagctttgcgctttctttcccagtcgagagcgatgtcgcaccaatcgcgagaatgtttatttttgccatcctccctgacggagaggtagtcggtgactcagagaagtttgagattgaaaactgccttgccaacaaagtggatctcagcttctctccggcacaatccccaccagcaagccacgcacacctgcaggttgctgccgcaccacagtccctttgcgccctgagggcagtggaccagtcagtgttgctgatgaaacccgaagcggaattgtccgtttccagcgtgtataatctgctaacagttaaagatttaaccaattttcccgataatgtcgatcagcaggaggaggaacagggccattgtcctagacccttctttattcataatggagccatttacgtgcctttgagctccaatgaagcagatatttacagctttctgaagggtatgggactgaaggtgttcaccaatagcaaaatccgcaagcccaaaagctgtagtgtgattccatctgtcagcgctggggcagtcggccaggggtactacggagcaggtctgggtgtggtcgaacgaccatacgtgcctcagctaggcacctataatgtgattccccttaataacgaacagagctcaggtcccgtcccagagaccgtgcgcagctattttcccgaaacctggatctgggaactcgtcgctgtcaacagtagcggcgtggcagaagtcggagtgactgtccccgatactattacggagtggaaagcgggagcgttctgtttgtccgaagacgccggactgggcatcagcagcaccgcctctcttcgagcattccagcctttcttcgtggagctgacaatgccttacagtgtgatccgaggagaggtgttcactctgaaggccacggtcttgaattacctgcctaagtgcattagagtcagcgttcagctgaaggctagccctgcatttttggcctcccagaacaccaagggggaggagtcctattgtatctgtggaaatgagaggcagactctctcctggaccgtgacgcctaaaacactgggcaatgtgaactttagcgtgtccgcggaggccatgcagagtctagaactgtgcgggaacgaggtggtcgaggtgccggagattaaaagaaaggacacagttatcaagacactgttagtcgaggccgagggcatcgagcaggagaagaccttctcctcaatgacttgcgcatccggcgcaaatgtctccgagcagttgagcctcaagttgccctcgaacgtggtgaaggaatccgctagagcctcattcagtgtgcttggggatattctgggcagcgccatgcaaaatatacagaaccttcttcagatgccttacggttgcggagagcagaacatggtgctgttcgcgcctaatatatacgtattaaattatttaaatgagacccaacagttgacccaggagatcaaagccaaggccgtaggctatctgataaccggctaccagcggcaactcaattacaagcaccaggatggctcatattcaacattcggcgagcgatatggacgcaaccaagggaatacatggctcacagcatttgtattgaagacttttgctcaagcacgctcttacatatttatcgacgaggcacacataacacagagtctgacttggctatctcagatgcagaaagataacggatgtttccgaagctccggctcactgttaaacaatgctattaaaggaggtgtggaagacgaagccacgctgtccgcttatgtgacaatagcccttctcgaaattcccctgcccgtaactaatcctatagtgaggaacgccctgttctgcctggagtccgcttggaatgttgccaaggaggggacccacggcagccatgtctacaccaaagcactgctggcatacgcattctccttgctagggaaacagaatcaaaatagggaaatcttgaattcactggacaaagaggctgtcaaggaggacaatctggtgcactgggagaggccccagcggcctaaggcccctgtgggccatctgtaccagacccaggcacccagtgccgaggttgaaatgacatcctatgtgttgttggcctacctgaccgcccagccagccccaacgagtggtgatctgacgtcagccactaacatcgtgaagtggattatgaagcagcagaatgctcagggcggtttcagctcgacacaggacacggtggttgcgctgcacgcactgagccggtacggtgctgctaccttcacccgtacagaaaagaccgcccaagttactgtgcaggactcgcagaccttcagtacaaacttccaggtggataacaataacctgttgctgctccagcagattagcctgcccgaattaccaggggaatacgttatcacagttaccggggagcgatgcgtctatctgcaaacctccatgaagtacaatatcctgccggaaaaagaagactccccattcgcacttaaagtgcaaaccgtgccgcagacctgcgatggccataaggcccatacatctttccaaattagcctgactatttcctacacaggcaatcggcctgcgtcaaatatggtgatcgtggacgtgaaaatggtctctggtttcatcccgcttaagccaactgtgaagatgttagaaagatcctcctctgtcagccgaaccgaagttagcaacaatcacgtccttatttacgtcgaacaggtcaccaatcagacgctgtcattcagctttatggtgctgcaagatatcccagttggagacctgaagccagccatagtcaaggtgtatgattactacgagaccgacgagtcagtggtcgccgagtatattgctccatgtagcacagatacagagcacggcaatgtttag

SEQ ID NO: 132909 - DNA, 4449 bp, Artificial Sequence
  derived and/or modified sequence
atgagaaaggacagactgctgcacctgtgcctggtgctgctgctgatcctgctgagcgccagcgacagcaacagcaccgagccccagtacatggtgctggtgcccagcctgctgcacaccgaggcccccaagaagggctgcgtgctgctgagccacctgaacgagaccgtgaccgtgagcgccagcctggagagcggcagagagaacagaagcctgttcaccgacctggtggccgagaaggacctgttccactgcgtgagcttcaccctgcccagaatcagcgccagcagcgaggtggccttcctgagcatccagatcaagggccccacccaggacttcagaaagagaaacaccgtgctggtgctgaacacccagagcctggtgttcgtgcagaccgacaagcccatgtacaagcccggccagaccgtgagattcagagtggtgagcgtggacgagaacttcagacccagaaacgagctgatccccctgatctacctggagaaccccagaagaaacagaatcgcccagtggcagagcctgaagctggaggccggcatcaaccagctgagcttccccctgagcagcgagcccatccagggcagctacagagtggtggtgcagaccgagagcggcggcagaatccagcaccccttcaccgtggaggagttcgtgctgcccaagttcgaggtgaaggtgcaggtgcccaagatcatcagcatcatggacgagaaggtgaacatcaccgtgtgcggcgagtacacctacggcaagcccgtgcccggcctggccaccgtgagcctgtgcagaaagctgagcagagtgctgaactgcgacaagcaggaggtgtgcgaggagttcagccagcagctgaacagcaacggctgcatcacccagcaggtgcacaccaagatgctgcagatcaccaacaccggcttcgagatgaagctgagagtggaggccagaatcagagaggagggcaccgacctggaggtgaccgccaacagaatcagcgagatcaccaacatcgtgagcaagctgaagttcgtgaaggtggacagccacttcagacagggcatccccttcttcgcccaggtgctgctggtggacggcaagggcgtgcccatccccaacaagctgttcttcatcagcgtgaacgacgccaactactacagcaacgccaccaccaacgagcagggcctggcccagttcagcatcaacaccaccagcatcagcgtgaacaagctgttcgtgagagtgttcaccgtgcaccccaacctgtgcttccactacagctgggtggccgaggaccaccagggcgcccagcacaccgccaacagagtgttcagcctgagcggcagctacatccacctggagcccgtggccggcaccctgccctgcggccacaccgagaccatcaccgcccactacaccctgaacagacaggccatgggcgagctgagcgagctgagcttccactacctgatcatggccaagggcgtgatcgtgagaagcggcacccacaccctgcccgtggagagcggcgacatgaagggcagcttcgccctgagcttccccgtggagagcgacgtggcccccatcgccagaatgttcatcttcgccatcctgcccgacggcgaggtggtgggcgacagcgagaagttcgagatcgagaactgcctggccaacaaggtggacctgagcttcagccccgcccagagcccccccgccagccacgcccacctgcaggtggccgccgccccccagagcctgtgcgccctgagagccgtggaccagagcgtgctgctgatgaagcccgaggccgagctgagcgtgagcagcgtgtacaacctgctgaccgtgaaggacctgaccaacttccccgacaacgtggaccagcaggaggaggagcagggccactgccccagacccttcttcatccacaacggcgccatctacgtgcccctgagcagcaacgaggccgacatctacagcttcctgaagggcatgggcctgaaggtgttcaccaacagcaagatcagaaagcccaagagctgcagcgtgatccccagcgtgagcgccggcgccgtgggccagggctactacggcgccggcctgggcgtggtggagagaccctacgtgccccagctgggcacctacaacgtgatccccctgaacaacgagcagagcagcggccccgtgcccgagaccgtgagaagctacttccccgagacctggatctgggagctggtggccgtgaacagcagcggcgtggccgaggtgggcgtgaccgtgcccgacaccatcaccgagtggaaggccggcgccttctgcctgagcgaggacgccggcctgggcatcagcagcaccgccagcctgagagccttccagcccttcttcgtggagctgaccatgccctacagcgtgatcagaggcgaggtgttcaccctgaaggccaccgtgctgaactacctgcccaagtgcatcagagtgagcgtgcagctgaaggccagccccgccttcctggccagccagaacaccaagggcgaggagagctactgcatctgcggcaacgagagacagaccctgagctggaccgtgacccccaagaccctgggcaacgtgaacttcagcgtgagcgccgaggccatgcagagcctggagctgtgcggcaacgaggtggtggaggtgcccgagatcaagagaaaggacaccgtgatcaagaccctgctggtggaggccgagggcatcgagcaggagaagaccttcagcagcatgacctgcgccagcggcgccaacgtgagcgagcagctgagcctgaagctgcccagcaacgtggtgaaggagagcgccagagccagcttcagcgtgctgggcgacatcctgggcagcgccatgcagaacatccagaacctgctgcagatgccctacggctgcggcgagcagaacatggtgctgttcgcccccaacatctacgtgctgaactacctgaacgagacccagcagctgacccaggagatcaaggccaaggccgtgggctacctgatcaccggctaccagagacagctgaactacaagcaccaggacggcagctacagcaccttcggcgagagatacggcagaaaccagggcaacacctggctgaccgccttcgtgctgaagaccttcgcccaggccagaagctacatcttcatcgacgaggcccacatcacccagagcctgacctggctgagccagatgcagaaggacaacggctgcttcagaagcagcggcagcctgctgaacaacgccatcaagggcggcgtggaggacgaggccaccctgagcgcctacgtgaccatcgccctgctggagatccccctgcccgtgaccaaccccatcgtgagaaacgccctgttctgcctggagagcgcctggaacgtggccaaggagggcacccacggcagccacgtgtacaccaaggccctgctggcctacgccttcagcctgctgggcaagcagaaccagaacagagagatcctgaacagcctggacaaggaggccgtgaaggaggacaacctggtgcactgggagagaccccagagacccaaggcccccgtgggccacctgtaccagacccaggcccccagcgccgaggtggagatgaccagctacgtgctgctggcctacctgaccgcccagcccgcccccaccagcggcgacctgaccagcgccaccaacatcgtgaagtggatcatgaagcagcagaacgcccagggcggcttcagcagcacccaggacaccgtggtggccctgcacgccctgagcagatacggcgccgccaccttcaccagaaccgagaagaccgcccaggtgaccgtgcaggacagccagaccttcagcaccaacttccaggtggacaacaacaacctgctgctgctgcagcagatcagcctgcccgagctgcccggcgagtacgtgatcaccgtgaccggcgagagatgcgtgtacctgcagaccagcatgaagtacaacatcctgcccgagaaggaggacagccccttcgccctgaaggtgcagaccgtgccccagacctgcgacggccacaaggcccacaccagcttccagatcagcctgaccatcagctacaccggcaacagacccgccagcaacatggtgatcgtggacgtgaagatggtgagcggcttcatccccctgaagcccaccgtgaagatgctggagagaagcagcagcgtgagcagaaccgaggtgagcaacaaccacgtgctgatctacgtggagcaggtgaccaaccagaccctgagcttcagcttcatggtgctgcaggacatccccgtgggcgacctgaagcccgccatcgtgaaggtgtacgactactacgagaccgacgagagcgtggtggccgagtacatcgccccctgcagcaccgacaccgagcacggcaacgtgtag

SEQ ID NO: 132910 - protein, 212 aa, Artificial Sequence
  derived and/or modified sequence
MAYAYLFKYIIIGDTGVGKSCLLLQFTDKRFQPVHDLTIGVEFGARMITIDGKQIKLQIWDTAGQESFRSITRSYYRGAAGALLVYDITRRDTFNHLTTWLEDARQHSNSNMVIMLIGNKSDLESRREVKKEEGEAFAREHGLIFMETSAKTASNVEEAFINTAKEIYEKIQEGVFDINNEANGIKIGPQHAATNATHAGNQGGQQAGGGCC

SEQ ID NO: 132911 - DNA, 639 bp, Artificial Sequence
  derived and/or modified sequence
atggcatacgcttatttattcaaatacataataattggggatactggtgtcggtaaaagctgtctcctgcttcagttcaccgacaagcgtttccagcccgtgcacgacctgactatcggtgtcgaatttggcgccagaatgatcacgatcgacgggaaacagattaagcttcaaatctgggacacagctgggcaggagtctttccggagcatcactaggagctactaccgaggtgctgccggagctcttctggtttacgatattacgcggcgggatacatttaatcatctgacaacctggctcgaggatgcgcgccagcacagtaattcaaatatggtcatcatgctgataggcaacaagagcgacctggaaagtcgccgggaagtgaagaaggaggagggggaagcctttgcccgagaacacggactgatctttatggagacgtcggccaagaccgccagcaatgtagaagaggctttcatcaacacagctaaggaaatctatgagaagattcaagagggagtcttcgatatcaataacgaagccaacggaatcaagattggaccccagcatgccgcgactaatgctacccatgccggcaaccaggggggacagcaggccggtgggggatgctgttag

SEQ ID NO: 132912 - DNA, 639 bp, Artificial Sequence
  derived and/or modified sequence
atggcctatgcctacctgttcaagtacatcatcatcggggacacaggagtgggcaagagctgcctgctgctgcagttcacagacaagcgcttccagcctgtgcatgacctgaccatcggcgtggagtttggagccaggatgatcaccattgatggcaagcagatcaagctgcagatctgggacacagctggccaggagagcttccgcagcatcaccaggagctactacagaggagctgctggggccctgctggtgtatgacatcacccggcgggacaccttcaaccacctgaccacctggctggaggatgcccggcagcacagcaacagcaacatggtgatcatgctgattggcaacaagagtgacctggagagccggcgggaggtgaagaaggaggagggggaggcctttgcccgggagcacggcctcatcttcatggagaccagcgccaagacagccagcaatgtggaggaggccttcatcaacacagccaaggagatctatgagaagatccaggagggcgtgtttgacatcaacaatgaggccaacggcatcaagattggcccccagcacgccgccaccaatgccacccatgctggcaaccagggcggccagcaggccggcggcggctgctgctag

SEQ ID NO: 132913 - DNA, 639 bp, Artificial Sequence
  derived and/or modified sequence
atggcctacgcctacctgttcaagtacatcatcatcggcgacaccggtgtgggaaaaagttgcctactcctacagtttacagacaaacgctttcagcctgtgcacgatctgaccatcggcgtggagttcggtgctagaatgataaccatcgacggcaagcagattaagcttcagatttgggatactgccgggcaggagtccttcagatccataacacggtcgtactatcgcggggctgcaggcgcccttctggtctacgacatcactcgacgtgacacctttaaccatctcacaacctggttagaagatgccagacagcacagcaattctaacatggttatcatgttaatagggaataaatctgatcttgagagccgaagagaagttaaaaaggaagaaggtgaagcgttcgcccgcgagcacggcctgatcttcatggaaacatcagccaagaccgcatccaatgtggaggaagcttttataaacactgccaaagaaatctacgagaaaattcaggagggtgtgttcgatatcaataatgaagctaatggtattaaaattgggccacagcatgccgctaccaatgccacgcacgcagggaaccaaggagggcagcaggcaggtggtgggtgctgttag

SEQ ID NO: 132914 - DNA, 639 bp, Artificial Sequence
  derived and/or modified sequence
atggcctatgcgtacctgtttaaatacattatcattggagatactggtgttggaaaatcctgtctgttgttacagttcactgacaaaaggtttcagcctgtgcacgacctcaccattggcgtggagtttggcgctcggatgatcaccatcgacgggaaacagattaagttgcagatttgggatacagctggtcaagagtcattcaggtctatcaccagaagctattaccgcggtgccgctggggcactgctcgtgtacgatattactcggcgagacacatttaaccacctcactacttggctggaagatgcaaggcagcactccaatagcaacatggttattatgctgatcggcaacaaaagcgacctggagtcacggagggaagtcaaaaaggaggagggggaggcgtttgccagggagcacggactgatatttatggagacctcagctaagactgcctcaaacgtggaagaagccttcataaacactgcgaaagagatctacgaaaagatccaggagggcgttttcgatataaacaacgaggccaacggaataaagataggacctcagcacgccgctactaacgccacccatgccggtaaccaggggggacaacaggccggaggtggttgttgctag

SEQ ID NO: 132915 - DNA, 3848 bp, Artificial Sequence
  derived and/or modified sequence
tggcggggcgcggccagcgtgcagggctgggccagcgtgcggggctcctcccctttcctccggcggcgccggcggccgcagaacttccgggtcggcgcggaggcggggcggaggcgccgcggcggctgttattgttcggctgggctcggtcgggcgctgtctccctcggctctgcgggtgtcagttcgtccggcttcctcacagcccctcactcccggcggctgacagcagcagcggcggcggcgggcggcgcctggcgtttcgaggctgagcggcaccggggttggggcgcggaggaggagcagcagcgggaggaggagccgtgtgccctggcactgagcggccgcggccatggcgtacgcctatctcttcaagtacatcataatcggcgacacaggtgttggtaaatcatgcttattgctacagtttacagacaagaggtttcagccagtgcatgaccttactattggtgtagagttcggtgctcgaatgataactattgatgggaaacagataaaacttcagatatgggatacggcagggcaagaatcctttcgttccatcacaaggtcgtattacagaggtgcagcaggagctttactagtttacgatattacacggagagatacattcaaccacttgacaacctggttagaagatgcccgccagcattccaattccaacatggtcattatgcttattggaaataaaagtgatttagaatctagaagagaagtaaaaaaagaagaaggtgaagcttttgcacgagaacatggactcatcttcatggaaacgtctgctaagactgcttccaatgtagaagaggcatttattaatacagcaaaagaaatttatgaaaaaattcaagaaggagtctttgacattaataatgaggcaaatggcattaaaattggccctcagcatgctgctaccaatgcaacacatgcaggcaatcagggaggacagcaggctgggggcggctgctgttgagtctgtttttactgtctagctgcccaacggggcctactcacttattctttcaccccctctcctcctgctcagctgagacatgaaactatttgaaatggctttatgtcacagaagactttaatccgtcaaattcttgtataactttgaataaatggttaatgttcacttaaaagacagattttggagattgtattcatatctatttgcatttgatttctaggtcaattgatgtgattatttttgttaaatgttgtcttgtgcccttaactacgaactgaattgtattaaacactacaaagtcatcttgagtattttaaatcggtttgtgtagttaggtttcccaacatctgtggttacctaatgtttaatattatagaactgtcctcagaaactttgtcaattttcacggctataaggaaacagaaggactcttttaattctgtatttatcatttactttctgtatatatagtttaataacctgcttgggtgtaatttgccaagcttgaattctttaatgcatttgcataaattctatactgtttagagcttaaagctacagaagcattgttaggaattgcttggacactgaattttaaactttttgacattgttaacaagcatgttcatcttttcttgtcactagtccaagaaaaatatgcttaatgtatattacaaaggctttgtatatgttaacctgttttaatgccaaaagtttgctttgtccacaatttccttaagacctcttcagaaagggatttgtttgccttaatgaatactgttgggaaaaaacacagtataatgagtgaaaagggcagaagcaagaaatttctacatcttagcgactccaagaagaatgagtatccacatttagatggcacattatgaggactttaatctttccttaaacacaataatgttttcttttttcttttattcacatgatttctaagtatatttttcatgcaggacagtttttcaaccttgatgtacagtgactgtgtaaaatttttctttcagtggcaacctctataatctttaaaatatggtgagcatcttgtctgttttgaaggggatatgacaataaatctatcagatggaaaatcctgttacaaagtagaaaagctttagtaatttactcagtgtggtggttttatcctttttttctttttctcccttggtctataatgaaattgttacagcagtgcaaaataaaatcctatgtataaaagtgttctttttttttattatgaccacctcttttttaatgtatttttagtccacttacagcttttacatgggtttaagcatgttttttaaaagggtcagaatggttaacactcaaccctttttaaaaattttgctaaaatgcgacaaatctcaccatactgaaattatttttgttgatggtgtaagcagtgtaagcaagtgttttctcctgaactagcacaaaagcacttatgcctgaaagaaagcataaagaagttctaactctgaaactaactactttcatttcgctcatggccttcaactttctacaggtcttccctgaagattcagcagtactctctcaaaggtttgacagtactcttgtgggaaatcaccaaatgctgtcatagttttgttttaactgtctccttgagggcagagggaagggtgagagaaaatctgttttcatgggtatttgtagtacagcctttttttctttcaagtggctgtatcaaattcactggtcttactaatcactgtctttaccagtgagtacaaaaagttaaggcaactaggacaggtactgctctataccaagaagagaatgattctttggaaattgttatttttaagcttctgttaatttttccagaagtttagtgcgtttcttttccatactttctcccctaattcttttatttgaagaagagaacttaatggcaaataaacaacaaaccaggacatgcattttaataccctaaggaaaaatggaaccctcaaatataactcctcccacaaccaccctaatgtgcctcagtctggggcagcaggtggacttctcaatagttcttttccacattctctacaaatcacatctaccgttaaggaatatgttatgaatcctttctgttaattgagaaagcaatgttattgtctgtgatttccagtctttgctcattttattatccctgtcaaataatgtaatattggtacctgcagttgaatttgtaatattgtaattgaatttttagttgatcttcgatcagtttttatagcatctatggacatagaaaatcagtcactgaaaaaaataaacacagctttcaatgtctcactcaacatgtaacattcaaaattgtgatcttcataaagacattgttaccattcgtcttgcaaatttaagacaactgaatgaaaagccaattttttgaaagaatgtggcatataattagatatacaactgaaacaggatatacaactgcatacaatttgtttttaatgatattttaaaatagcctgttagcaggaaaatagtccctatttatctgctaatggtcaaaaagagttaggatataaatcgtaccaaaatgtttccaatcactcagaaaaactgattcatgtctggctttgcaacaccttaaacatttattctgtcatagatagtaaagccccatctcagtttatttagtcctgaggttggcagcatggggtttgactatatgagctaaaagatacacaaagagataacgctgtttcataataaacaggaattgactatacaaataggtaaaccagcatatctacctgtatttctcagagtttagatgtgtgctttatgtttacattaaaataaagcctaacgccacagta

SEQ ID NO: 132916 - DNA, 1612 bp, Artificial Sequence
  derived and/or modified sequence
cggccatggcgtacgcctatctcttcaagtacatcataatcggcgacacaggtgttggtaaatcatgcttattgctacagtttacagacaagaggtttcagccagtgcatgaccttactattggtgtagagttcggtgctcgaatgataactattgatgggaaacagataaaacttcagatatgggatacggcagggcaagaatcctttcgttccatcacaaggtcgtattacagaggtgcagcaggagctttactagtttacgatattacacggagagatacattcaaccacttgacaacctggttagaagatgcccgccagcattccaattccaacatggtcattatgcttattggaaataaaagtgatttagaatctagaagagaagtaaaaaaagaagaaggtgaagcttttgcacgagaacatggactcatcttcatggaaacgtctgctaagactgcttccaatgtagaagaggcatttattaatacagcaaaagaaatttatgaaaaaattcaagaaggagtctttgacattaataatgaggcaaatggcattaaaattggccctcagcatgctgctaccaatgcaacacatgcaggcaatcagggaggacagcaggctgggggcggctgctgttgagtctgtttttactgtctagctgcccaacggggcctactcacttattctttcaccccctctcctcctgctcagctgagacatgaaactatttgaaatggctttatgtcacagaagactttaatccgtcaaattcttgtataactttgaataaatggttaatgttcacttaaaagacagattttggagattgtattcatatctatttgcatttgatttctaggtcaattgatgtgattatttttgttaaatgttgtcttgtgcccttaactacgaactgaattgtattaaacactacaaagtcatcttgagtattttaaatcggtttgtgtagttaggtttcccaacatctgtggttacctaatgtttaatattatagaactgtcctcagaaactttgtcaattttcacggctataaggaaacagaaggactcttttaattctgtatttatcatttactttctgtatatatagtttaataacctgcttgggtgtaatttgccaagcttgaattctttaatgcatttgcataaattctatactgtttagagcttaaagctacagaagcattgttaggaattgcttggacactgaattttaaactttttgacattgttaacaagcatgttcatcttttcttgtcactagtccaagaaaaatatgcttaatgtatattacaaaggctttgtatatgttaacctgttttaatgccaaaagtttgctttgtccacaatttccttaagacctcttcagaaagggatttgtttgccttaatgaatactgttgggaaaaaacacagtataatgagtgaaaagggcagaagcaagaaatttctacatcttagcgactccaagaagaatgagtatccacatttagatggcacattatgaggactttaatctttccttaaacacaataatgttttcttttttcttttattcacatgatttctaagtatatttttcatgcag

SEQ ID NO: 132917 - DNA, 639 bp, Artificial Sequence
  derived and/or modified sequence
atggcctacgcctacctgttcaagtacatcatcatcggcgacaccggcgtgggcaagagctgcctgctgctgcagttcaccgacaagagattccagcccgtgcacgacctgaccatcggcgtggagttcggcgccagaatgatcaccatcgacggcaagcagatcaagctgcagatctgggacaccgccggccaggagagcttcagaagcatcaccagaagctactacagaggcgccgccggcgccctgctggtgtacgacatcaccagaagagacaccttcaaccacctgaccacctggctggaggacgccagacagcacagcaacagcaacatggtgatcatgctgatcggcaacaagagcgacctggagagcagaagagaggtgaagaaggaggagggcgaggccttcgccagagagcacggcctgatcttcatggagaccagcgccaagaccgccagcaacgtggaggaggccttcatcaacaccgccaaggagatctacgagaagatccaggagggcgtgttcgacatcaacaacgaggccaacggcatcaagatcggcccccagcacgccgccaccaacgccacccacgccggcaaccagggcggccagcaggccggcggcggctgctgctag

SEQ ID NO: 132918 - protein, 208 aa, Artificial Sequence
  derived and/or modified sequence
MSTGGDFGNPLRKFKLVFLGEQSVGKTSLITRFMYDSFDNTYQATIGIDFLSKTMYLEDRTIRLQLWDTAGQERFRSLIPSYIRDSAAAVVVYDITNVNSFQQTTKWIDDVRTERGSDVIIMLVGNKTDLADKRQVSIEEGERKAKELNVMFIETSAKAGYNVKQLFRRVAAALPGMESTQDRSREDMIDIKLEKPQEQPVSEGGCSC

SEQ ID NO: 132919 - protein, 175 aa, Artificial Sequence
  derived and/or modified sequence
MYDSFDNTYQATIGIDFLSKTMYLEDRTIRLQLWDTAGQERFRSLIPSYIRDSAAAVVVYDITNVNSFQQTTKWIDDVRTERGSDVIIMLVGNKTDLADKRQVSIEEGERKAKELNVMFIETSAKAGYNVKQLFRRVAAALPGMESTQDRSREDMIDIKLEKPQEQPVSEGGCSC

SEQ ID NO: 132920 - protein, 142 aa, Artificial Sequence
  derived and/or modified sequence
MSTGGDFGNPLRKFKLVFLGEQSVGKTSLITRFMYDSFDNTYQATIGIDFLSKTMYLEDRTIRLQLWDTAGQERFRSLIPSYIRDSAAAVVVYDITNVNSFQQTTKWIDDVRTERGSDVIIMLVGNKTDLADKRQVSIEEGE

SEQ ID NO: 132921 - protein, 201 aa, Artificial Sequence
  derived and/or modified sequence
  misc_feature (1)..(1): Xaa can be any naturally occurring amino acid
XVFPRGLALRSADVVEVGKTSLITRFMYDSFDNTYQATIGIDFLSKTMYLEDRTIRLQLWDTAGQERFRSLIPSYIRDSAAAVVVYDITNVNSFQQTTKWIDDVRTERGSDVIIMLVGNKTDLADKRQVSIEEGERKAKELNVMFIETSAKAGYNVKQLFRRVAAALPGMESTQDRSREDMIDIKLEKPQEQPVSEGGCSC

SEQ ID NO: 132922 - protein, 47 aa, Artificial Sequence
  derived and/or modified sequence
MSTGGDFGNPLRKFKLVFLGEQSVGKTSLITRFMYDSFDNTYQATIG

SEQ ID NO: 132923 - DNA, 627 bp, Artificial Sequence
  derived and/or modified sequence
atgtccacaggtggggatttcgggaaccccctgcggaagttcaaactggtttttctgggcgagcagagtgtgggtaagacgtcactgattacaagattcatgtacgattccttcgacaacacctaccaggctaccatcggcatcgatttcctgagcaagacaatgtatctggaagaccgtactatcagactacagctgtgggataccgcagggcaagaaaggtttcgatcactgatcccgagctatatcagggattcagccgccgcggtggtggtttatgatattactaacgtgaactcatttcagcaaacaactaagtggattgatgacgtgcgaactgagagaggcagtgacgtaattataatgctggtaggtaacaagacagacctggctgataaacggcaggtgtctattgaagagggagagcgaaaagcaaaagagctgaacgtgatgttcattgagacctcagctaaggctgggtataacgtaaaacaattattcaggcgtgtggcagcggcgcttcctggaatggagagtactcaagatagatcaagagaagacatgattgatataaaattggagaaaccccaggaacagcctgtgtcggagggaggctgcagttgttag

SEQ ID NO: 132924 - DNA, 627 bp, Artificial Sequence
  derived and/or modified sequence
atgtctactgggggagacttcggaaaccctctccgaaaatttaagctggtgttcctgggcgaacagtctgtcgggaagacttctcttatcacccgcttcatgtacgattccttcgacaatacttaccaggccactattggcatcgattttctctcaaagactatgtacctggaggatagaacaataaggctgcaactttgggatactgccggccaggaacgattccggtccctgatcccaagttatataagagactccgccgccgccgtggtcgtttatgacatcaccaatgtcaattccttccagcagacaaccaagtggattgacgacgtcaggaccgaaaggggctccgatgtgatcatcatgctcgtggggaacaagactgatttagcagacaaaagacaggtctccatcgaggagggtgagagaaaagccaaagaactgaacgttatgtttatcgaaacatccgcgaaagccggctacaatgtaaagcaactttttagacgggtggcagcggcattacccggcatggaatcgacacaagatagaagccgggaagacatgatagatatcaaactcgagaagccgcaggaacagcctgttagcgagggaggctgctcttgctag

SEQ ID NO: 132925 - DNA, 429 bp, Artificial Sequence
  derived and/or modified sequence
atgtctactggaggagattttggcaaccctttacgtaaatttaagctggtattcctcggcgagcagtctgttggcaagacctctcttatcacgcggtttatgtatgactcattcgacaatacttatcaggctacaataggaatcgatttcctctcaaaaaccatgtatctggaagacagaactatccgccttcagctctgggatactgccggtcaggaaaggttcagatctcttatacccagctacatacgggactccgccgccgcggttgtggtctacgatatcacaaatgtcaacagcttccagcagaccaccaagtggatagacgatgtccgaacagagcgtgggagcgatgtaattattatgttggtgggcaacaaaaccgatctcgctgataagcgtcaggtcagcatagaagagggtgaatag

SEQ ID NO: 132926 - DNA, 606 bp, Artificial Sequence
  derived and/or modified sequence
tgagtgtttccaagagggcttgcacttcgctccgctgacgtggtggaggttggcaagacaagtctgattactaggttcatgtacgactcgttcgataacacgtatcaagctaccatcgggattgacttcctgagcaagacgatgtatcttgaggacaggaccattcggcttcagttgtgggacaccgctggccaggaacgcttcagatcactcatccctagctacattcgcgatagtgcggctgccgtcgtggtttacgatatcactaatgttaacagtttccaacagactaccaagtggatcgatgatgttagaacagaacggggttctgatgtcatcattatgctggtcgggaataagacggatctagctgacaaaaggcaggttagtatcgaggaaggtgaaaggaaggccaaggagctgaatgtgatgtttatcgagacctctgctaaagccggttataatgtgaagcagctcttccgacgggtggccgctgccttgcccgggatggagagtacccaagatcgcagcagagaggacatgatcgatatcaagctggagaaacctcaagagcagccagtgtcggagggcggatgtagctgttag

SEQ ID NO: 132927 - DNA, 627 bp, Artificial Sequence
  derived and/or modified sequence
atgagcactggaggagactttggaaaccccctgaggaagttcaagctggtgttcctgggggagcagagcgtgggcaagaccagcctcatcacccgcttcatgtatgacagctttgacaacacctaccaggccaccatcggcatcgacttcctgagcaagaccatgtacctggaggacaggaccatccggctgcagctgtgggacacagctggccaggagcgcttccgcagcctcatccccagctacatccgggacagcgctgctgctgtggtggtgtatgacatcaccaacgtgaacagcttccagcagaccaccaagtggattgatgatgtgaggacagagcggggcagtgatgtgatcatcatgctggtgggcaacaagacagacctggccgacaagaggcaggtgtccattgaggagggggagaggaaggccaaggagctgaatgtgatgtttattgagaccagcgccaaggccggctacaacgtgaagcagctgttccggcgggtggccgccgccctgcccggcatggagagcacccaggacaggagccgggaggacatgattgacatcaagctggagaagccccaggagcagcctgtgtctgagggcggctgcagctgctag

SEQ ID NO: 132928 - DNA, 429 bp, Artificial Sequence
  derived and/or modified sequence
atgagcactggaggagactttggaaaccccctgaggaagttcaagctggtgttcctgggggagcagagcgtgggcaagaccagcctcatcacccgcttcatgtatgacagctttgacaacacctaccaggccaccatcggcatcgacttcctgagcaagaccatgtacctggaggacaggaccatccggctgcagctgtgggacacagctggccaggagcgcttccgcagcctcatccccagctacatccgggacagcgctgctgctgtggtggtgtatgacatcaccaacgtgaacagcttccagcagaccaccaagtggattgatgatgtgaggacagagcggggcagtgatgtgatcatcatgctggtgggcaacaagacagacctggccgacaagaggcaggtgtccattgaggagggggagtag

SEQ ID NO: 132929 - DNA, 606 bp, Artificial Sequence
  derived and/or modified sequence
tgagtgttcccccggggcctggccctgcggtctgcagatgtggtggaggtgggcaagaccagcctcatcacccgcttcatgtatgacagctttgacaacacctaccaggccaccatcggcatcgacttcctgagcaagaccatgtacctggaggacaggaccatccggctgcagctgtgggacacagctggccaggagcgcttccgcagcctcatccccagctacatccgggacagcgctgctgctgtggtggtgtatgacatcaccaacgtgaacagcttccagcagaccaccaagtggattgatgatgtgaggacagagcggggcagtgatgtgatcatcatgctggtgggcaacaagacagacctggccgacaagaggcaggtgtccattgaggagggggagaggaaggccaaggagctgaatgtgatgttcatcgagaccagcgccaaggccggctacaacgtgaagcagctgttcagaagagtggccgccgccctgcccggcatggagagcacccaggacaggagccgggaggacatgattgacatcaagctggagaagccccaggagcagcctgtgtctgagggcggctgcagctgctag

SEQ ID NO: 132930 - DNA, 627 bp, Artificial Sequence
  derived and/or modified sequence
atgagcaccggcggcgacttcggcaaccccctgcggaagttcaagctcgtgtttcttggcgagcagagcgtgggaaagacctctctgattactcgctttatgtacgatagtttcgataatacctaccaagctaccattggcatcgactttctatccaagaccatgtacctggaggaccggaccatcaggctgcaactgtgggataccgccggccaggagagatttcggagcctgatcccaagttacatccgcgattccgccgccgccgttgtcgtctatgacataacgaacgtgaattcctttcagcagacaactaagtggatcgatgatgtgcgcacagagcgggggtccgacgttattatcatgctcgtaggaaacaagacggatctggcagataagcgccaagtgagtatcgaggaaggtgagaggaaggccaaggagctcaacgtcatgtttatcgagacaagtgccaaggccggatataacgttaagcagctgttcaggcgggtagctgctgcactcccagggatggaatctacccaggaccgtagccgggaggacatgattgacatcaagttggagaagccccaggagcagcccgtatctgaaggtgggtgtagctgctag

SEQ ID NO: 132931 - DNA, 627 bp, Artificial Sequence
  derived and/or modified sequence
atgagcaccggcggcgacttcggcaaccccctgcggaagttcaagcttgtgttcctgggggagcagagtgtgggaaagacatcactgatcaccagatttatgtacgactcgttcgataatacataccaggctactatcggaattgacttcctgtctaaaactatgtacctcgaggatcggaccatccgactgcagctctgggatactgccggccaggagcgtttcaggagtctgatccctagctacatccgggactccgcggccgcagtggtagtttacgacataaccaacgtgaatagctttcaacagactactaagtggattgacgatgtgagaacagagcgcgggagcgacgtcatcattatgcttgtgggcaataagactgaccttgcggacaaacgccaggtgtctatcgaagagggagagcgcaaggccaaagagctgaacgtgatgtttatagaaacatccgccaaagcgggctataatgtgaagcagctcttcagacgggtggctgccgctctgccaggaatggaaagtacccaggaccgcagccgggaagatatgattgacattaaactcgaaaagccccaggaacagccagtctccgagggaggttgcagttgttag

SEQ ID NO: 132932 - DNA, 429 bp, Artificial Sequence
  derived and/or modified sequence
atgagcaccggcggcgacttcggcaaccccctgcggaagttcaagttggtctttctgggtgagcagagcgtgggtaagaccagtcttattaccagattcatgtatgattcattcgacaacacctatcaggctaccatcggcatagattttttgtctaaaacaatgtacttagaagatagaacgatccggctgcagctgtgggacactgctggtcaggaaaggtttcgatccctgattcctagttatatacgggacagcgctgcagctgtcgttgtatatgacattactaacgtgaactccttccagcagaccaccaagtggatagacgacgtgaggaccgaacggggaagcgatgtgatcatcatgctggtgggaaataaaaccgaccttgctgacaaaagacaagtgagtatagaagaaggtgagtag

SEQ ID NO: 132933 - DNA, 606 bp, Artificial Sequence
  derived and/or modified sequence
tgagtgttcccccggggcctggccctgcggagcgccgacgtggtggaagtgggcaagacttcactcatcactcggtttatgtacgatagttttgacaacacctaccaggccacaattggaatcgactttctgtctaagacaatgtatctggaggatcgcactattagactgcaactgtgggacacggccgggcaggagcgatttcgcagcttaattccaagctatattagggacagcgccgccgccgtagtagtgtacgacataaccaacgtcaatagtttccagcagacgacgaaatggatagacgatgtgagaacagaacgtggatcagatgtaatcattatgctggttggcaataagacggacctggctgataaaagacaagtgtccatagaagaaggggaacgcaaggccaaagagctgaatgttatgtttatcgagacttccgccaaggcaggctataatgtgaaacagttgttcagaagagtggctgcagctttgcccggtatggaaagcacccaggaccggtcccgcgaagacatgattgacatcaagttggagaaaccacaggagcaacctgtctcggagggcgggtgttcatgttag

SEQ ID NO: 132934 - DNA, 627 bp, Artificial Sequence
  derived and/or modified sequence
atgtcaacgggcggtgattttgggaaccctctgcggaaatttaaactggtgtttctgggggaacagtctgtggggaaaacgtcccttattacgagatttatgtatgattccttcgataacacataccaagccaccatcggaattgattttttgagtaaaacaatgtatcttgaagacaggaccattaggctgcagttgtgggatacagcgggtcaggaacggttcagaagcctgatcccaagctacatcagagatagtgctgctgcggtcgtagtatatgatattacgaacgtcaatagcttccagcagacaaccaagtggatagacgatgtgcgtactgagagaggcagcgacgtcattatcatgctggtggggaacaaaaccgacttggccgacaagaggcaggtcagcatcgaggagggggaacgaaaggccaaagagctgaacgtgatgtttatcgaaactagcgccaaagccggttacaacgtcaagcagttgttccggcgagtggctgccgctctgcccggaatggagagtacacaggataggtcgcgagaggatatgatagacatcaagttggaaaagcctcaggagcagcctgtgtctgaggggggatgtagctgttag

SEQ ID NO: 132935 - DNA, 627 bp, Artificial Sequence
  derived and/or modified sequence
atgagcactggcggagactttgggaatccactgaggaagttcaagctggtgttcctcggcgagcaatcagttgggaagacctcattaatcacccggttcatgtatgatagtttcgacaacacgtatcaggccacaataggcatcgactttctctctaaaacgatgtacctggaagatcgcaccatccgtttgcagctctgggacacagcgggacaagagcggttccgaagccttatcccttcctatatcagagattccgcagcagctgtggtggtgtatgatatcactaatgttaatagttttcagcaaacaaccaaatggatcgatgatgtgaggaccgagagaggcagtgacgtcatcataatgcttgtggggaataagacagacctggcggataagaggcaggtctccattgaggagggggagaggaaagccaaggagcttaatgtcatgtttattgaaacaagcgctaaggccggatataatgtgaagcaactcttccgacgggtcgcggctgctctgccgggtatggaaagcacacaggatagaagcagggaggacatgatagacattaagctcgaaaagccccaagagcagcccgtatccgagggaggctgcagctgttag

SEQ ID NO: 132936 - DNA, 429 bp, Artificial Sequence
  derived and/or modified sequence
atgtctaccggtggtgatttcggcaatccattgcggaagtttaagcttgtcttcctcggcgagcagagtgtcggcaaaacttccctgatcaccaggtttatgtacgacagttttgataacacttatcaggccaccatcggtattgacttcttgtcaaagaccatgtacctggaagacagaacaattcgcctgcaactctgggacaccgcaggtcaggaacgctttcgatccttaatcccctcctacataagggatagcgctgcggctgttgtggtttacgatattaccaatgttaattcctttcagcagaccacgaaatggatcgatgatgtcaggacggaacgaggctcagatgtgatcataatgcttgtgggaaataagactgacctggctgacaaacgacaggtcagcattgaggaaggagaatag

SEQ ID NO: 132937 - DNA, 606 bp, Artificial Sequence
  derived and/or modified sequence
taagtttttcctcgcggactggccctcaggtcagcagacgttgtcgaggtggggaaaaccagtctgataactcgattcatgtacgattcttttgataatacatatcaggccactataggaattgacttcctcagtaagaccatgtatctcgaggacaggaccattaggctacaactgtgggatactgccggtcaggaaagatttcgaagccttattccatcttatattagagactccgctgcagctgtggtcgtatatgacattactaacgtgaactcattccagcagacaaccaagtggattgacgatgttcggacagagcggggtagcgacgtgatcataatgctcgtgggaaacaaaacagatctggccgacaagcgccaggtgtcgatagaagagggagagcgtaaagcaaaggagctgaatgtgatgttcatcgaaacatccgctaaagctggatataatgtgaagcagctgtttcgcagggtggccgcagctttgccaggtatggaaagtacccaagaccggagccgcgaagatatgattgatatcaagctggaaaagcctcaagaacaacctgtgtccgaggggggttgcagctgctag

SEQ ID NO: 132938 - DNA, 828 bp, Artificial Sequence
  derived and/or modified sequence
ggccggcggggccgcaggctcgcgcccgggctcgccccgcgccgctccagaggctcgcgcactcagcaggttgggctgcggcggcggcggcagctgtggaagctcaggcgctgcgcgtgagaggtcccagatacgtctgcggttccggctccgccaccctcagcttctcttccccagccgcgggcctcgctcggtgctaggctactctgccgggaggcggcggcggctgccagtctgtggagagtcctgctgccctccagccgggctcctccaccgggccttgcaggggccgagagagctcggtgcccgcccttccgctcgcctttttcgtcagctggctggagcagcatcggtccgggaggtctctaggctgaggcggcggccgctcctctagttccacaatgtccacgggcggagacttcgggaatccgctgaggaaattcaagctggtgttcctgggggagcaaagcgttggaaagacatctttgatcaccagattcatgtatgacagttttgacaacacctatcaggcaacaattggcattgactttttatcaaaaactatgtacttggaggatcgaacaatcaggcttcagctgtgggatactgcgggtcaggaacgtttccgtagcctcattcccagttacatccgtgattctgctgcagctgtagtagtttacgatatcacaaatgttaactcattccagcaaactacaaagtggattgatgatgtcagaacagaaagaggaagtgatgttatcatcatgctagtaggaaataaaacagatcttgctgacaagaggcaagtgtcaattgaggagggagaga

SEQ ID NO: 132939 - DNA, 627 bp, Artificial Sequence
  derived and/or modified sequence
atgagcaccggcggcgacttcggcaaccccctgagaaagttcaagctggtgttcctgggcgagcagagcgtgggcaagaccagcctgatcaccagattcatgtacgacagcttcgacaacacctaccaggccaccatcggcatcgacttcctgagcaagaccatgtacctggaggacagaaccatcagactgcagctgtgggacaccgccggccaggagagattcagaagcctgatccccagctacatcagagacagcgccgccgccgtggtggtgtacgacatcaccaacgtgaacagcttccagcagaccaccaagtggatcgacgacgtgagaaccgagagaggcagcgacgtgatcatcatgctggtgggcaacaagaccgacctggccgacaagagacaggtgagcatcgaggagggcgagagaaaggccaaggagctgaacgtgatgttcatcgagaccagcgccaaggccggctacaacgtgaagcagctgttcagaagagtggccgccgccctgcccggcatggagagcacccaggacagaagcagagaggacatgatcgacatcaagctggagaagccccaggagcagcccgtgagcgagggcggctgcagctgctag

SEQ ID NO: 132940 - DNA, 429 bp, Artificial Sequence
  derived and/or modified sequence
atgagcaccggcggcgacttcggcaaccccctgagaaagttcaagctggtgttcctgggcgagcagagcgtgggcaagaccagcctgatcaccagattcatgtacgacagcttcgacaacacctaccaggccaccatcggcatcgacttcctgagcaagaccatgtacctggaggacagaaccatcagactgcagctgtgggacaccgccggccaggagagattcagaagcctgatccccagctacatcagagacagcgccgccgccgtggtggtgtacgacatcaccaacgtgaacagcttccagcagaccaccaagtggatcgacgacgtgagaaccgagagaggcagcgacgtgatcatcatgctggtgggcaacaagaccgacctggccgacaagagacaggtgagcatcgaggagggcgagtag

SEQ ID NO: 132941 - DNA, 606 bp, Artificial Sequence
  derived and/or modified sequence
tgagtgttccccagaggcctggccctgagaagcgccgacgtggtggaggtgggcaagaccagcctgatcaccagattcatgtacgacagcttcgacaacacctaccaggccaccatcggcatcgacttcctgagcaagaccatgtacctggaggacagaaccatcagactgcagctgtgggacaccgccggccaggagagattcagaagcctgatccccagctacatcagagacagcgccgccgccgtggtggtgtacgacatcaccaacgtgaacagcttccagcagaccaccaagtggatcgacgacgtgagaaccgagagaggcagcgacgtgatcatcatgctggtgggcaacaagaccgacctggccgacaagagacaggtgagcatcgaggagggcgagagaaaggccaaggagctgaacgtgatgttcatcgagaccagcgccaaggccggctacaacgtgaagcagctgttcagaagagtggccgccgccctgcccggcatggagagcacccaggacagaagcagagaggacatgatcgacatcaagctggagaagccccaggagcagcccgtgagcgagggcggctgcagctgctag

SEQ ID NO: 132942 - protein, 123 aa, Artificial Sequence
  derived and/or modified sequence
MEPAEQPSELVSAEGRNRKAVLCQRCGSRVLQPGTALFSRRQLFLPSMRKKPALSDGSNPDGDLLQEHWLVEDMFIFENVGFTKDVGNIKFLVCADCEIGPIGWHCLDDKNSFYVALERVSHE

SEQ ID NO: 132943 - DNA, 372 bp, Artificial Sequence
  derived and/or modified sequence
atggagccagctgagcagccaagtgaattagtgtccgccgaaggacgcaatagaaaggcagtactttgccaaaggtgcggaagtagagtccttcagcccggcactgcactcttttctcggaggcaactgtttctcccatccatgaggaagaagcccgccctgtcagatgggtctaaccccgacggtgatctgttacaggagcattggcttgtggaagacatgtttatttttgagaatgtgggattcacaaaagatgttggcaacattaaattcctcgtgtgtgctgattgtgaaattgggcccatcgggtggcactgtctggatgataagaatagcttctacgtcgctctggagagggtgagtcacgagtag

SEQ ID NO: 132944 - DNA, 372 bp, Artificial Sequence
  derived and/or modified sequence
atggagcctgctgagcagcccagcgagctggtgtctgctgagggcaggaacaggaaggctgtgctgtgccagagatgtggcagccgggtgctgcagcctggaacagccctcttcagccggcggcagctgttcctgcccagcatgaggaagaagccagccctgagtgatggcagcaacccagatggagacctgctgcaggagcactggctggtggaggacatgttcatctttgaaaatgtgggcttcaccaaggatgtgggcaacatcaagttcctggtgtgtgccgactgtgaaattggccccatcggctggcactgcctggatgacaagaacagcttctacgtggccctggagcgggtgtcccatgaatag

SEQ ID NO: 132945 - DNA, 372 bp, Artificial Sequence
  derived and/or modified sequence
atggagcccgccgagcagcccagcgagctggtgagcgccgagggccgcaatcggaaggccgtgctatgccagagatgtggcagcagggtgctccagcccgggacggccctgttcagtagacgtcagctattcttaccatcgatgcggaagaagccggcactttcagatggaagcaatcctgatggcgatctactacaggaacactggctcgttgaagacatgttcatatttgagaacgtgggcttcaccaaggatgtggggaacataaaatttctggtgtgcgctgattgcgaaatagggcctatcgggtggcactgcctggacgacaaaaactctttctacgtggccttggaaagagtgagtcacgaatag

SEQ ID NO: 132946 - DNA, 372 bp, Artificial Sequence
  derived and/or modified sequence
atggaaccagcggagcaaccctccgagttggtttcagccgaaggccgtaaccggaaggccgttctttgtcagaggtgcggatctagagtgctgcagccgggtaccgccctcttcagccggaggcagctgtttcttcctagtatgcgtaagaagccagctctgagcgacggctcaaacccagacggggacctacttcaggaacattggctggtcgaggatatgttcatcttcgaaaatgtaggcttcactaaggacgtgggaaatattaaattcctcgtgtgcgctgactgcgagattggcccaattggatggcattgcctggacgataagaactccttctatgtagctctggaacgagtgtctcacgagtag

SEQ ID NO: 132947 - DNA, 2430 bp, Artificial Sequence
  derived and/or modified sequence
cgcagccgtggctgaggagcctgtggcggcagcggcgatggaaccagcggagcagccgagcgagttagtgtcagccgagggccgaaaccggaaggcggtgctgtgccagcgttgcggctcccgggtgctgcagccagggaccgctctcttctctcgccgacagcttttccttccctccatgagaaagaagccagctctgtctgacggcagcaatcctgacggcgatctcctccaggaacactggctggttgaggacatgttcatttttgagaatgtgggcttcaccaaggacgtgggcaacatcaagtttctggtctgcgcagactgtgaaattggaccaattggctggcattgcctagatgacaagaacagtttctatgtggccttggaacgagtttcccatgagtaactgaggggaggggtactcagctccatctccaaagataaacctactccccacaagaactggcctttaatgtggtataactgttccgctgccttcttgtctgtgctaatataaatactgagtaccagcatgtccatttgaacatgcagagggttaatcctgcttcctaaagcctcaagtacatgcctcctgcttagttcactttgtatcacatttcctaagctcccttttcccccagttttgggacactgtgcttacctccaaaaatctcatctcttccctggcattctccctaggctctgttttgcccaggggctcccgctttttcttgctctagaagagcagtattcaaccttttagctatgatgacacataacaaaagatgcttatgtactaatagttgaaatctgcctttttctcattcaagaaggcatacaaatatctgagagtgactttgttgtatggctacccttgtgatctacagtaatttattctttctaaaggtaaagcattttcaaaactcagtatttaaaccactaaccagaaacattactttggatgcatctctaataccatgtttgagcacctctgctctaggttgagaatgacattttattgtgaagatgggtgtggtccctcttcccttgaaatcttgtagtttctttttatattagctcctcactgctacagcctagaaggtgagaagcagattttaaccccatctggcagccattcaaggaaaacccagccctggctgtttactcaggctctcttagaatgagagtggagggtgtaggatatgagggttaggcctttgccacattatacaaaagtttataatttgccacatctggacaagtaactttcttcttttgttcataggcaagacttctttaatggatagtatcatttactgaacctactgggcatggtcctcatggagttttggttcaactggaatctctgtgccaacccaggatacaaacttccatccagatgcatggatacaaatttccatagctccggggctgctctaacagtttgatatcagcagacgtgtttaagccttcaacttgatttccaattattccatcatttctattctgaaatgactcactgtcgtagaaggaagtttattatataaccaaggtttcaggtatcctcctgtcaccacctctactattcaggaggcctaaaattgaaataagtactaaacagaaaccttaccatctgaagtcccttccattgttttctagttgcttcctcattcctttacccccaaactttctaagggctccccgactgcagtgcaaggtggccttgggcacagttttgcaaccaacctactcccctggaaagatggcttccttctccaattagcctgaatgagctttagtaagcaattgagagaactgtgtttttccgacaaacggtcacatgtccatcgttatggcatgtgcagaaaaacagagttatccacacaagtcaggagcaaaacccaagtagatgcctctaggggcacatggcccctcacatcacaagccagaacctaagctaagcattttttaaattgagtttgagactagcctgggcaacatagtgagaccccatctctatttaaaaaatgaacaaaattacctgggcatagtggtgtatacctgtagtccctgctacttgggaggctcaggtgggaggatcacttgagccccaaagatggtggctgcagtaagccaagatcacaccactggcactccagcctgggcaacagagtgagaccctgtctcaaacaaacaacaacagtaacaacaaaaaaatatatagcgacttgaataggaaaccatagtatttcattgttttaatttgcatttattttatttctagtgaaacttttatatacgtatcggtcatttctatttccttttttgagaactgccaaatgttgccctagtagccaaaaatatcaggttgctattctgccttttcagtttgatctgaaagaaataaaggcatttaagcaatggaaa

SEQ ID NO: 132948 - DNA, 372 bp, Artificial Sequence
  derived and/or modified sequence
atggagcccgccgagcagcccagcgagctggtgagcgccgagggcagaaacagaaaggccgtgctgtgccagagatgcggcagcagagtgctgcagcccggcaccgccctgttcagcagaagacagctgttcctgcccagcatgagaaagaagcccgccctgagcgacggcagcaaccccgacggcgacctgctgcaggagcactggctggtggaggacatgttcatcttcgagaacgtgggcttcaccaaggacgtgggcaacatcaagttcctggtgtgcgccgactgcgagatcggccccatcggctggcactgcctggacgacaagaacagcttctacgtggccctggagagagtgagccacgagtag

SEQ ID NO: 132949 - protein, 192 aa, Artificial Sequence
  derived and/or modified sequence
MQAIKCVVVGDGAVGKTCLLISYTTNAFPGEYIPTVFDNYSANVMVDSKPVNLGLWDTAGQEDYDRLRPLSYPQTDVFLICFSLVSPASYENVRAKWFPEVRHHCPSTPIILVGTKLDLRDDKDTIEKLKEKKLAPITYPQGLALAKEIDSVKYLECSALTQRGLKTVFDEAIRAVLCPQPTRQQKRACSLL

SEQ ID NO: 132950 - protein, 185 aa, Artificial Sequence
  derived and/or modified sequence
MQAIKAVGKTCLLISYTTNAFPGEYIPTVFDNYSANVMVDSKPVNLGLWDTAGQEDYDRLRPLSYPQTDVFLICFSLVSPASYENVRAKWFPEVRHHCPSTPIILVGTKLDLRDDKDTIEKLKEKKLAPITYPQGLALAKEIDSVKYLECSALTQRGLKTVFDEAIRAVLCPQPTRQQKRACSLL

SEQ ID NO: 132951 - protein, 148 aa, Artificial Sequence
  derived and/or modified sequence
MVDSKPVNLGLWDTAGQEDYDRLRPLSYPQTDVFLICFSLVSPASYENVRAKWFPEVRHHCPSTPIILVGTKLDLRDDKDTIEKLKEKKLAPITYPQGLALAKEIDSVKYLECSALTQRGLKTVFDEAIRAVLCPQPTRQQKRACSLL

SEQ ID NO: 132952 - protein, 166 aa, Artificial Sequence
  derived and/or modified sequence
MQAIKCVVVGDGAVGKTCLLISYTTNAFPGEYIPTVFDNYSANVMVDSKPVNLGLWDTAGQEDYDRLRPLSYPQTDVFLICFSLVSPASYENVRAKWFPEVRHHCPSTPIILVGTKLDLRDDKDTIEKLKEKKLAPITYPQGLALAKEIDSVKYLECSALTQRGLK

SEQ ID NO: 132953 - DNA, 579 bp, Artificial Sequence
  derived and/or modified sequence
atgcaggccatcaagtgcgtggtggtgggcgacggcgccgtgggcaagacctgcctgctgatcagctacaccaccaacgccttccccggcgagtacatccccaccgtgttcgacaactacagcgccaacgtgatggtggacagcaagcccgtgaacctgggcctgtgggacaccgccggccaggaggactacgacagactgagacccctgagctacccccagaccgacgtgttcctgatctgcttcagcctggtgagccccgccagctacgagaacgtgagagccaagtggttccccgaggtgagacaccactgccccagcacccccatcatcctggtgggcaccaagctggacctgagagacgacaaggacaccatcgagaagctgaaggagaagaagctggcccccatcacctacccccagggcctggccctggccaaggagatcgacagcgtgaagtacctggagtgcagcgccctgacccagagaggcctgaagaccgtgttcgacgaggccatcagagccgtgctgtgcccccagcccaccagacagcagaagagagcctgcagcctgctgtag

SEQ ID NO: 132954 - DNA, 558 bp, Artificial Sequence
  derived and/or modified sequence
atgcaggccatcaaggccgtgggcaagacctgcctgctgatcagctacaccaccaacgccttccccggcgagtacatccccaccgtgttcgacaactacagcgccaacgtgatggtggacagcaagcccgtgaacctgggcctgtgggacaccgccggccaggaggactacgacagactgagacccctgagctacccccagaccgacgtgttcctgatctgcttcagcctggtgagccccgccagctacgagaacgtgagagccaagtggttccccgaggtgagacaccactgccccagcacccccatcatcctggtgggcaccaagctggacctgagagacgacaaggacaccatcgagaagctgaaggagaagaagctggcccccatcacctacccccagggcctggccctggccaaggagatcgacagcgtgaagtacctggagtgcagcgccctgacccagagaggcctgaagaccgtgttcgacgaggccatcagagccgtgctgtgcccccagcccaccagacagcagaagagagcctgcagcctgctgtag

SEQ ID NO: 132955 - DNA, 447 bp, Artificial Sequence
  derived and/or modified sequence
atggtggacagcaagcccgtgaacctgggcctgtgggacaccgccggccaggaggactacgacagactgagacccctgagctacccccagaccgacgtgttcctgatctgcttcagcctggtgagccccgccagctacgagaacgtgagagccaagtggttccccgaggtgagacaccactgccccagcacccccatcatcctggtgggcaccaagctggacctgagagacgacaaggacaccatcgagaagctgaaggagaagaagctggcccccatcacctacccccagggcctggccctggccaaggagatcgacagcgtgaagtacctggagtgcagcgccctgacccagagaggcctgaagaccgtgttcgacgaggccatcagagccgtgctgtgcccccagcccaccagacagcagaagagagcctgcagcctgctgtag

SEQ ID NO: 132956 - DNA, 501 bp, Artificial Sequence
  derived and/or modified sequence
atgcaggccatcaagtgcgtggtggtgggcgacggcgccgtgggcaagacctgcctgctgatcagctacaccaccaacgccttccccggcgagtacatccccaccgtgttcgacaactacagcgccaacgtgatggtggacagcaagcccgtgaacctgggcctgtgggacaccgccggccaggaggactacgacagactgagacccctgagctacccccagaccgacgtgttcctgatctgcttcagcctggtgagccccgccagctacgagaacgtgagagccaagtggttccccgaggtgagacaccactgccccagcacccccatcatcctggtgggcaccaagctggacctgagagacgacaaggacaccatcgagaagctgaaggagaagaagctggcccccatcacctacccccagggcctggccctggccaaggagatcgacagcgtgaagtacctggagtgcagcgccctgacccagagaggcctgaagtag

SEQ ID NO: 132957 - DNA, 579 bp, Artificial Sequence
  derived and/or modified sequence
atgcaggccattaagtgtgtggtggtaggtgatggtgccgtcggcaagacatgcctgctgatctcgtatacaaccaatgcatttccaggcgaatatattcctaccgtgttcgataactattctgccaatgtcatggtggattctaaacccgtgaacctgggcctctgggataccgctggtcaggaggactacgaccgccttcgtcccttatcatatccacagactgacgtcttcctcatttgtttctcacttgtctctccagctagctacgaaaatgtcagagcaaaatggtttccggaagtgcgccaccactgcccatccacccccataatcctagtaggtactaaactcgacctgcgggatgacaaggacaccatagagaagttaaaagagaagaaattagctccaatcacatatccccagggcctggcccttgctaaagagatagacagtgtgaaatatttagagtgcagcgctctgactcaaagaggcctgaaaactgtattcgacgaagccattcgagctgtgctgtgtccccagcccaccaggcagcagaaacgcgcttgttctctcctgtag

SEQ ID NO: 132958 - DNA, 558 bp, Artificial Sequence
  derived and/or modified sequence
atgcaagcaatcaaggccgttggaaagacttgtctgcttatcagttatacgacaaatgcattccccggtgagtacattccaaccgtgtttgacaactactctgccaacgtgatggtcgattccaagcccgtgaacctgggcctgtgggacaccgcggggcaagaggactacgaccgcctgaggccactttcctacccccagacagatgtgttcctcatctgtttttccctggtgtctccagcatcctatgagaacgtgcgtgccaagtggttcccagaagtgcgacatcattgccccagcacgcctattatcctggtaggaacaaagttggacctcagagacgataaagacaccatcgaaaagcttaaggagaaaaagttggctcctattacctatccacagggactggccctggctaaggagatagattccgttaaatatctggagtgcagcgcactgacacagcgcgggctgaagaccgtcttcgatgaagccatcagagctgtattgtgccctcaacctaccagacagcagaagcgcgcatgcagcctcttatag

SEQ ID NO: 132959 - DNA, 447 bp, Artificial Sequence
  derived and/or modified sequence
atggtcgacagtaagcctgtcaatctcggactctgggatacagctgggcaggaagactacgatcgcctgcgccccttgtcctatccacaaaccgacgtttttctcatatgtttctccctggttagtcctgcctcatacgaaaacgtccgcgctaagtggttccccgaagtgcgccaccactgtccatcaacgcctattatcctggtgggaaccaagttggacctgagggacgacaaagatacaatagagaagcttaaagaaaagaagctggctcctattacataccctcaggggcttgcactggccaaagagattgacagtgtgaaatacttggaatgtagtgcattaactcaaaggggcctcaagacagtcttcgatgaagctatccgcgccgtgctttgtccgcagcccactaggcagcagaagagggcgtgcagcttgctgtag

SEQ ID NO: 132960 - DNA, 501 bp, Artificial Sequence
  derived and/or modified sequence
atgcaagcaatcaagtgcgtcgttgtaggtgatggagcagtagggaaaacttgtcttctgatttcctataccactaacgcctttcccggcgaatacattcccacagtgttcgacaattacagtgccaatgttatggtcgacagcaaaccggtgaatttgggtctgtgggacacagctggtcaggaggactatgatcggcttagaccgctctcatacccccaaacagacgtctttctcatctgcttttccctggtctcacctgcgtcgtacgagaatgtgcgtgcaaaatggttcccggaggtgcgccaccattgccctagtacgcctattatactcgtgggaaccaaattggatcttcgtgacgataaggacaccatcgaaaagctgaaagagaaaaagctggcgcccattacatacccccagggtctggcactggctaaagaaattgacagtgttaagtatctagagtgcagcgcactcactcagagaggcttaaagtag

SEQ ID NO: 132961 - DNA, 579 bp, Artificial Sequence
  derived and/or modified sequence
atgcaggccatcaagtgtgtggtggtgggagatggagctgtgggcaagacctgcctgctgatctcctacaccaccaatgccttccctggagagtacatccccaccgtgtttgacaactacagcgccaacgtgatggtggacagcaagcctgtgaacctgggcctgtgggacacagctggccaggaggactatgaccggctgcggcccctgagctacccccagacagatgtgttcctgatctgcttcagcctggtgtccccagccagctatgaaaatgtgcgggccaagtggttccctgaggtgcgccaccactgccccagcacccccatcatcctggtgggcaccaagctggacctgagagatgacaaggacaccatcgagaagctgaaggagaagaagctggcccccatcacctacccccagggcctggccctggccaaggagattgattctgtgaagtacctggagtgcagcgccctgacccagaggggcctgaagacagtgtttgatgaggccatccgggctgtgctgtgcccccagcccacccggcagcagaagagggcctgcagcctgctgtag

SEQ ID NO: 132962 - DNA, 558 bp, Artificial Sequence
  derived and/or modified sequence
atgcaggccatcaaggctgtgggcaagacctgcctgctgatctcctacaccaccaatgccttccctggagagtacatccccaccgtgtttgacaactacagcgccaacgtgatggtggacagcaagcctgtgaacctgggcctgtgggacacagctggccaggaggactatgaccggctgcggcccctgagctacccccagacagatgtgttcctgatctgcttcagcctggtgtccccagccagctatgaaaatgtgcgggccaagtggttccctgaggtgcgccaccactgccccagcacccccatcatcctggtgggcaccaagctggacctgagagatgacaaggacaccatcgagaagctgaaggagaagaagctggcccccatcacctacccccagggcctggccctggccaaggagattgacagcgtgaagtacctggagtgcagcgccctgacccagaggggcctgaagacagtgtttgatgaggccatccgggctgtgctgtgcccccagcccacccggcagcagaagagggcctgcagcctgctgtag

SEQ ID NO: 132963 - DNA, 447 bp, Artificial Sequence
  derived and/or modified sequence
atggtggacagcaagcctgtgaacctgggcctgtgggacacagctggccaggaggactatgaccggctgcggcccctgagctacccccagacagatgtgttcctgatctgcttcagcctggtgtccccagccagctatgaaaatgtgcgggccaagtggttccctgaggtgcgccaccactgccccagcacccccatcatcctggtgggcaccaagctggacctgagagatgacaaggacaccatcgagaagctgaaggagaagaagctggcccccatcacctacccccagggcctggccctggccaaggagattgattctgtgaagtacctggagtgcagcgccctgacccagaggggcctgaagacagtgtttgatgaggccatccgggctgtgctgtgcccccagcccacccggcagcagaagagggcctgcagcctgctgtag

SEQ ID NO: 132964 - DNA, 501 bp, Artificial Sequence
  derived and/or modified sequence
atgcaggccatcaagtgtgtggtggtgggagatggagctgtgggcaagacctgcctgctgatctcctacaccaccaatgccttccctggagagtacatccccaccgtgtttgacaactacagcgccaacgtgatggtggacagcaagcctgtgaacctgggcctgtgggacacagctggccaggaggactatgaccggctgcggcccctgagctacccccagacagatgtgttcctgatctgcttcagcctggtgtccccagccagctatgaaaatgtgcgggccaagtggttccctgaggtgcgccaccactgccccagcacccccatcatcctggtgggcaccaagctggacctgagagatgacaaggacaccatcgagaagctgaaggagaagaagctggcccccatcacctacccccagggcctggccctggccaaggagattgattctgtgaagtacctggagtgcagcgccctgacccagaggggcctgaagtag

SEQ ID NO: 132965 - DNA, 579 bp, Artificial Sequence
  derived and/or modified sequence
atgcaggccatcaagtgcgtggtggtgggcgacggcgccgtgggcaaaacctgtcttctgatctcttacactacgaacgctttccccggagaatatatccccactgtcttcgataactacagtgccaacgtgatggtggacagcaaacccgtcaatttggggctgtgggacactgcgggacaggaagactatgatcggctgaggccgctctcctacccccagaccgatgttttcctgatctgttttagtctggtgagtcctgctagctatgaaaacgtgcgggccaagtggtttccagaggtccggcaccattgtcccagtactcccattatactcgttggcacaaaattggatctacgggatgacaaagacacgatcgaaaaattaaaagagaaaaaattggctcctataacctatccacagggtctggcattggccaaggagattgactcggtgaaataccttgaatgctccgctctgacccagagggggctgaagaccgtgttcgatgaggcaatcagggcagtcttgtgccctcagccgactcggcagcagaaaagggcctgttctttgctatag

SEQ ID NO: 132966 - DNA, 558 bp, Artificial Sequence
  derived and/or modified sequence
atgcaggccatcaaggccgtgggcaagacctgcctgctgatcagctacaccaccaacgcgttccccggggaatacatacctaccgtgttcgataattactctgccaacgtaatggttgattcgaaacctgttaacctcggcctgtgggataccgctgggcaggaggattatgaccggctgcgcccactgagttaccctcagactgacgtgtttctcatctgtttctccctggtgagccctgcgtcatacgaaaatgtgagagccaagtggttccctgaggttaggcatcactgcccctctacccctattattctggtcggcacgaagctggatttgcgcgatgacaaggacaccatagaaaagctcaaagagaagaaattggcgcctattacctacccacagggcctggctctcgctaaagagatcgattctgtgaagtacctggagtgttctgctctgacacaacgaggactaaagactgtcttcgacgaggccatacgcgctgtgctttgccctcaacctacacggcaacagaagagagcttgtagcttactgtag

SEQ ID NO: 132967 - DNA, 447 bp, Artificial Sequence
  derived and/or modified sequence
atggtggacagcaagcccgtgaacctgggcctgtgggacaccgccggtcaagaagactatgataggctgaggcctttgagttacccccaaaccgatgtattcctcatctgttttagcctcgtgagcccagcgtcgtacgagaacgttagggccaaatggttccctgaggtgcggcaccattgccccagtactccaatcatacttgtcggcacaaagctagatttgagggatgataaggacactatcgagaagctaaaagaaaagaaattagcccccattacatacccacagggactggctctggcgaaagaaatagacagtgttaagtacctggagtgctctgctcttactcaacgagggctcaagaccgtgttcgatgaagccattagagctgtgctttgtccccaacctactcggcagcagaagagagcatgttcactgctttag

SEQ ID NO: 132968 - DNA, 501 bp, Artificial Sequence
  derived and/or modified sequence
atgcaggccatcaagtgcgtggtggtgggcgacggcgccgtgggcaaaacatgcctgctgatatcttacactactaacgcatttccaggtgaatatatcccaacggtgttcgataattactctgccaacgtaatggttgactctaaacctgttaatctagggctgtgggacacagccggacaagaggattatgatagactcagacctctcagctatccacagacagacgtgttcctgatctgcttttccctagtgagtcctgcttcatatgagaatgtcagggccaaatggtttccagaggtgagacaccactgtccctccactcccatcatcctggtgggtaccaaactagatctgcgggacgacaaggacaccatcgaaaagctgaaggagaagaagctggctcctattacctacccgcagggcctggcgctggccaaagaaatcgactcagtgaagtacttggagtgcagcgcactcactcagcgtggtctgaagtag

SEQ ID NO: 132969 - DNA, 579 bp, Artificial Sequence
  derived and/or modified sequence
atgcaggccatcaagtgtgtggttgttggcgatggcgctgtcggtaagacctgtctgctcatcagctataccaccaatgccttccccggagagtatattcctaccgtgttcgacaactatagcgctaacgtgatggtcgacagtaaaccagttaatcttgggctatgggacaccgctggccaagaggattatgatcgactgaggcccctgtcatatcctcagactgatgtgttcctgatctgtttctccttggtttccccagcatcttacgagaacgtgagggccaaatggtttccagaagtcaggcaccattgccccagcacccccatcatcctggtcgggaccaagctggacctgagagatgacaaagacactattgagaagctcaaggagaagaagttagccccaattacttatccccagggactggccttagcaaaagagattgactctgtgaagtacctcgaatgctccgctctgacccagaggggcctgaagacggtctttgatgaagccatcagggccgtcctgtgtccccagccaacacgtcagcaaaagagggcgtgttctctgctctag

SEQ ID NO: 132970 - DNA, 558 bp, Artificial Sequence
  derived and/or modified sequence
atgcaagccattaaagccgtcggaaagacctgcctgctgatcagctacacgaccaatgcctttcccggtgagtacataccaacggtgttcgataactacagcgcgaatgtgatggtcgacagtaaacctgttaatcttggactctgggacaccgcagggcaggaggattacgacagattaaggccactgtcttacccccagactgacgtctttcttatttgtttttcgctggtctcaccagcatcatacgagaacgtgcgggcaaagtggttcccagaggtgagacaccactgccctagcacaccgattattctggtggggactaagctcgacctccgcgacgataaagatacaatcgagaaactgaaggaaaaaaagctggctccaatcacttaccctcaggggctcgctttggcaaaagagatagattcagtgaaatacctggaatgcagtgcgctcacacagagagggctgaaaaccgtttttgacgaagcgattcgggcagtgctctgcccccaacccacccgccagcagaagagagcgtgcagcctgctctag

SEQ ID NO: 132971 - DNA, 447 bp, Artificial Sequence
  derived and/or modified sequence
atggtagactccaagccagtcaatcttgggctgtgggataccgcagggcaggaagactatgatagactgagaccgctctcctatccccaaaccgacgtgttcctgatatgtttttcactggtgtccccagcctcttatgaaaacgtcagagccaaatggtttcctgaagtgagacatcactgcccttccacaccaataattcttgtcggtacaaagttagaccttagagatgacaaggacactatcgaaaagctcaaagagaagaaactggctccgataacttacccgcaaggactcgctttggcaaaagaaattgactccgtgaaataccttgagtgttcagctctgacacagcggggactcaagaccgttttcgatgaagctatcagggccgttctgtgtcctcagccgacccggcaacagaagagagcctgtagccttctctag

SEQ ID NO: 132972 - DNA, 501 bp, Artificial Sequence
  derived and/or modified sequence
atgcaagctattaagtgcgtcgtcgttggtgacggagccgtcggaaaaacatgcttactgatcagttacactacaaatgcctttccaggagagtatatacctacagtgtttgacaactatagtgcaaatgtcatggtcgactctaaacctgtcaacctgggactctgggacacagccggacaggaagattatgaccgcctaagaccactgtcgtatccccagaccgatgtgttcttgatttgtttttccctagtgagccctgcatcctacgagaatgtgagggccaaatggttccccgaagtccgccaccactgccctagcacgccgataattctcgtggggacgaagttagatctgcgggatgacaaagatacaatcgaaaagctgaaggaaaagaagcttgctccaattacgtatccccaggggttagcactcgctaaggagatcgattcagtgaaatatctagagtgctcagctcttacccagagaggtctaaagtag

SEQ ID NO: 132973 - DNA, 1482 bp, Artificial Sequence
  derived and/or modified sequence
cctcctgccccaccaccgctgctcctcagcaggcgcctcaccagcctccacaccccttgcgcccgcagaaacgcgcctggccctgagctgtcaccaccgacactctccaggctccggacacgatgcaggccatcaagtgtgtggtggtgggagatggggccgtgggcaagacctgccttctcatcagctacaccaccaacgcctttcccggagagtacatccccaccgtgtttgacaactattcagccaatgtgatggtggacagcaagccagtgaacctggggctgtgggacactgctgggcaggaggactacgaccgtctccggccgctctcctatccacagacggacgtcttcctcatctgcttctccctcgtcagcccagcctcttatgagaacgtccgcgccaagtggttcccagaagtgcggcaccactgccccagcacacccatcatcctggtgggcaccaagctggacctgcgggacgacaaggacaccatcgagaaactgaaggagaagaagctggctcccatcacctacccgcagggcctggcactggccaaggagattgactcggtgaaatacctggagtgctcagctctcacccagagaggcctgaaaaccgtgttcgacgaggccatccgggccgtgctgtgccctcagcccacgcggcagcagaagcgcgcctgcagcctcctctaggggttgcaccccagcgctcccacctagatgggtctgatcctccaggatccccacccaaagcctgatggcaccccggctggccatgctgtcccctccctgtggcgtttcttagcagatggctgcagagcttcgttgatggtcttttctgtactggaggcctcctgaggccaggaacgtgcaaatttgcaggtgctgcatcccaagcccctcatgctcctgccttcctgagggccagaggggagccccaggacccattaagccacccccgtgttcctgccgtcagtgccaactgccgcatgtggaagcatctacccgttcactccagtcccaccccacgcctgactcccctctggaaactgcaggccagatggttgctgccacaacttgtgtaccttcagggatggggctcttactccctcctgaggccagctgctctaatatcgatggtcctgcttgccagagagttcctctacccagcaaaaatgagtgtctcagaagtgtgctcctctggcctcagttctcctcttttggaacaacataaaacaaatttaattttctacgcctctggggatatctgctcagccaatggaaaatctgggttcaaccagcccctgccatttcttaagactttctgctgcactcacaggatcctgagctgcacttacctgtgagagtcttcaaacttttaaaccttgccagtcaggacttttgctattgcaaatagaaaacccaactcaacctgcttaagcagaaaataaatttattgattcaagtttggaga

SEQ ID NO: 132974 - DNA, 842 bp, Artificial Sequence
  derived and/or modified sequence
caggtctcctgctggagcctccacgcagggggcctgtggggatggccagggctcagcccagcacctgagcgcccctcccaccagctgctctgccagaccgcatgctccgccccctgcaaacgaccgtggggagagcagcttgagtaagttccccttccgtttcctcctgccccaccaccgctgctcctcagcaggcgcctcaccagcctccacaccccttgcgcccgcagaaacgcgcctggccctgagctgtcaccaccgacactctccaggctccggacacgatgcaggccatcaaggccgtgggcaagacctgccttctcatcagctacaccaccaacgcctttcccggagagtacatccccaccgtgtttgacaactattcagccaatgtgatggtggacagcaagccagtgaacctggggctgtgggacactgctgggcaggaggactacgaccgtctccggccgctctcctatccacagacggacgtcttcctcatctgcttctccctcgtcagcccagcctcttatgagaacgtccgcgccaagtggttcccagaagtgcggcaccactgccccagcacacccatcatcctggtgggcaccaagctggacctgcgggacgacaaggacaccatcgagaaactgaaggagaagaagctggctcccatcacctacccgcagggcctggcactggccaaggagattgactcggtgaaatacctggagtgctcagctctcacccagagaggcctgaaaaccgtgttcgacgaggccatccgggccgtgctgtgccctcagcccacgcggcagcagaagcgcgcctgcagcctcctctag

SEQ ID NO: 132975 - DNA, 893 bp, Artificial Sequence
  derived and/or modified sequence
cagcacagagggcccccaggtctcctgctggagcctccacgcagggggcctgtggggatggccagggctcagcccagcacctgagcgcccctcccaccagctgctctgccagaccgcatgctccgccccctgcaaacgaccgtggggagagcagcttgaggccgtgggcaagacctgccttctcatcagctacaccaccaacgcctttcccggagagtacatccccaccgtgtttgacaactattcagccaatgtgatggtggacagcaagccagtgaacctggggctgtgggacactgctgggcaggaggactacgaccgtctccggccgctctcctatccacagacggacgtcttcctcatctgcttctccctcgtcagcccagcctcttatgagaacgtccgcgccaagtggttcccagaagtgcggcaccactgccccagcacacccatcatcctggtgggcaccaagctggacctgcgggacgacaaggacaccatcgagaaactgaaggagaagaagctggctcccatcacctacccgcagggcctggcactggccaaggagattgactcggtgaaatacctggagtgctcagctctcacccagagaggcctgaaaaccgtgttcgacgaggccatccgggccgtgctgtgccctcagcccacgcggcagcagaagcgcgcctgcagcctcctctaggggttgcaccccagcgctcccacctagatgggtctgatcctccaggatccccacccaaagcctgatggcaccccggctggccatgctgtcccctccctgtggcgtttcttagcagatggctgcagagcttcgttgatggtcttttctgtactggaggcctcctgaggccaggaacgtgcaaatttgcagg

SEQ ID NO: 132976 - DNA, 705 bp, Artificial Sequence
  derived and/or modified sequence
gagggcccccaggtctcctgctggagcctccacgcagggggcctgtggggatggccagggctcagcccagcacctgagcgcccctcccaccagctgctctgccagaccgcatgctccgccccctgcaaacgaccgtggggagagcagcttgaaaacgcgcctggccctgagctgtcaccaccgacactctccaggctccggacacgatgcaggccatcaagtgtgtggtggtgggagatggggccgtgggcaagacctgccttctcatcagctacaccaccaacgcctttcccggagagtacatccccaccgtgtttgacaactattcagccaatgtgatggtggacagcaagccagtgaacctggggctgtgggacactgctgggcaggaggactacgaccgtctccggccgctctcctatccacagacggacgtcttcctcatctgcttctccctcgtcagcccagcctcttatgagaacgtccgcgccaagtggttcccagaagtgcggcaccactgccccagcacacccatcatcctggtgggcaccaagctggacctgcgggacgacaaggacaccatcgagaaactgaaggagaagaagctggctcccatcacctacccgcagggcctggcactggccaaggagattgactcggtgaaatacctggagtgctcagctctcacccagagaggcctgaaaa

SEQ ID NO: 132977 - protein, 409 aa, Artificial Sequence
  derived and/or modified sequence
MQVTLKTLQQQTFKIDIDPEETVKALKEKIESEKGKDAFPVAGQKLIYAGKILNDDTALKEYKIDEKNFVVVMVTKPKAVSTPAPATTQQSAPASTTAVTSSTTTTVAQAPTPVPALAPTSTPASITPASATASSEPAPASAAKQEKPAEKPAETPVATSPTATDSTSGDSSRSNLFEDATSALVTGQSYENMVTEIMSMGYEREQVIAALRASFNNPDRAVEYLLMGIPGDRESQAVVDPPQAASTGAPQSSAVAAAAATTTATTTTTSSGGHPLEFLRNQPQFQQMRQIIQQNPSLLPALLQQIGRENPQLLQQISQHQEHFIQMLNEPVQEAGGQGGGGGGGSGGIAEAGSGHMNYIQVTPQEKEAIERLKALGFPEGLVIQAYFACEKNENLAANFLLQQNFDED

SEQ ID NO: 132978 - protein, 337 aa, Artificial Sequence
  derived and/or modified sequence
MVTKPKAVSTPAPATTQQSAPASTTAVTSSTTTTVAQAPTPVPALAPTSTPASITPASATASSEPAPASAAKQEKPAEKPAETPVATSPTATDSTSGDSSRSNLFEDATSALVTGQSYENMVTEIMSMGYEREQVIAALRASFNNPDRAVEYLLMGIPGDRESQAVVDPPQAASTGAPQSSAVAAAAATTTATTTTTSSGGHPLEFLRNQPQFQQMRQIIQQNPSLLPALLQQIGRENPQLLQQISQHQEHFIQMLNEPVQEAGGQGGGGGGGSGGIAEAGSGHMNYIQVTPQEKEAIERLKALGFPEGLVIQAYFACEKNENLAANFLLQQNFDED

SEQ ID NO: 132979 - protein, 146 aa, Artificial Sequence
  derived and/or modified sequence
MQVTLKTLQQQTFKIDIDPEETVKALKEKIESEKGKDAFPVAGQKLIYAGKILNDDTALKEYKIDEKNFVVVMVTKPKAVSTPAPATTQQSAPASTTAVTSSTTTTVAQAPTPVPALAPTSTPASITPASATASSEPAPASAAKQE

SEQ ID NO: 132980 - DNA, 441 bp, Artificial Sequence
  derived and/or modified sequence
atgcaggtgaccctgaagaccctgcagcagcagaccttcaagatcgacatcgaccccgaggagaccgtgaaggccctgaaggagaagatcgagagcgagaagggcaaggacgccttccccgtggccggccagaagctgatctacgccggcaagatcctgaacgacgacaccgccctgaaggagtacaagatcgacgagaagaacttcgtggtggtgatggtgaccaagcccaaggccgtgagcacccccgcccccgccaccacccagcagagcgcccccgccagcaccaccgccgtgaccagcagcaccaccaccaccgtggcccaggcccccacccccgtgcccgccctggcccccaccagcacccccgccagcatcacccccgccagcgccaccgccagcagcgagcccgcccccgccagcgccgccaagcaggagtag

SEQ ID NO: 132981 - DNA, 441 bp, Artificial Sequence
  derived and/or modified sequence
atgcaggtcaccctgaagacactgcagcaacagactttcaaaattgatattgaccctgaggaaactgtcaaggcccttaaagaaaagatcgaatcagagaaggggaaggacgccttccccgttgcaggtcagaagcttatctatgccgggaagatcctgaacgatgacaccgccctgaaagagtacaaaattgacgagaagaatttcgttgtggtaatggtgactaagcccaaagctgtgagtaccccagccccggccacaacccaacagtccgctcctgcatcgactacagccgtgacctccagcaccactactaccgttgcccaggccccaacccctgtcccagctctggcgcctacgtccacacctgccagcatcaccccagcaagcgccacagccagtagcgaacctgcccccgcctccgcagcgaaacaggagtag

SEQ ID NO: 132982 - DNA, 441 bp, Artificial Sequence
  derived and/or modified sequence
atgcaggtgaccctgaagaccctgcagcagcagaccttcaagattgatattgatcctgaggagaccgtgaaggccctgaaggagaagattgagagcgagaagggcaaggatgccttccctgtggccggccagaagctgatctatgccggcaagatcctgaatgatgacacagccctgaaggagtacaagattgatgagaagaactttgtggtggtgatggtgaccaagcccaaggctgtgtccaccccagccccagccaccacccagcagagcgccccagccagcaccacagctgtgaccagcagcaccaccaccaccgtggcccaggcccccacccctgtgcctgccctggcccccaccagcaccccagccagcatcaccccagccagcgccacagccagcagcgagcccgccccagccagcgctgccaagcaggagtag

SEQ ID NO: 132983 - DNA, 441 bp, Artificial Sequence
  derived and/or modified sequence
atgcaggtgaccctgaagaccctgcagcagcagaccttcaagatcgacatagatccagaggagaccgtgaaagccctgaaggagaagatcgaatccgaaaaagggaaggatgccttcccggtggcaggccaaaaacttatctacgccgggaagatcctcaatgatgacactgccctgaaggagtataagattgacgaaaaaaatttcgtcgtggtgatggtgacaaagccgaaggctgtcagcacaccggctcccgctaccacacaacaatctgctcccgcttccacaacagctgtgacatcatccacgactacaacagttgctcaggcacccacccccgttcctgccctcgcacctacaagcaccccggcctccattacgccagcctctgccaccgctagttcggagcccgcacctgcttctgctgcgaaacaggagtag

SEQ ID NO: 132984 - DNA, 441 bp, Artificial Sequence
  derived and/or modified sequence
atgcaagtgaccctgaaaacactccaacagcagaccttcaagatagacattgacccagaagaaaccgtaaaagccttgaaggaaaaaatcgaatcagaaaaaggtaaggacgcgtttcctgtcgctggccagaaattgatctacgctggaaaaattttaaacgatgatactgctctgaaagagtacaagattgatgagaaaaatttcgtagtggtgatggtgacaaaacccaaggccgtgtcaacgcccgcacctgcgaccacacagcaaagtgctcctgccagcacgactgccgtgacttcttctactacaacaacggttgcgcaggctcctactcccgtgccagcgcttgcacccacaagcacgcccgctagcattactccggcaagcgcgaccgcatcctccgagcccgctcctgctagcgccgctaagcaggaatag

SEQ ID NO: 132985 - DNA, 1049 bp, Artificial Sequence
  derived and/or modified sequence
tagcggattccctgcttgtctcgccgaccccctcgcgccttctgcagactccgtggctggcgctcggcgcgtgaggaagcacggcggcccgagttcgcggggaaggccgcagtcgcggaggcagcggcgcggtccggggcacgggctgggggagaggccgctccgctgggcgaatgtgacaagcccccacccccaccgccttcctccccagagcgcgaggagcgcgggcgaccccggggccccgccaggccacagaccccgcccagcggccagcacccggcgcaggcccggcagccgagctgcgcggcggcaccatgcaggtcaccctgaagaccctccagcagcagaccttcaagatagacattgaccccgaggagacggtgaaagcactgaaagagaagattgaatctgaaaaggggaaagatgcctttccagtagcaggtcaaaaattaatttatgcaggcaaaatcctcaatgatgatactgctctcaaagaatataaaattgatgagaaaaactttgtggtggttatggtgaccaaacccaaagcagtgtccacaccagcaccagctacaactcagcagtcagctcctgccagcactacagcagttacttcctccaccaccacaactgtggctcaggctccaacccctgtccctgccttggcccccacttccacacctgcatccatcactccagcatcagcgacagcatcttctgaacctgcacctgctagtgcagctaaacaagagaagcctgcagaaaagccagcagagacaccagtggctactagcccaacagcaactgacagtacatcgggtgattcttctcggtcaaacctttttgaagatgcaacgagtgcacttgtgacgggtcagtcttacgagaatatggtaactgagatcatgtcaatgggctatgaacgagagcaagtaattgcagccctgagagccagtttcaacaaccctgacagagcagtggagtatcttttaatgatcatagtgaaaactggaaacaaaaaaaaaaaacagcctcttcttggaaagtga

SEQ ID NO: 132986 - DNA, 716 bp, Artificial Sequence
  derived and/or modified sequence
gccttccgccccgcccccaattctggggcggagtcctcggccgcgccggcgcaaagcgtcgccgcaccccacgcctgcgcgcttcgcccgcccggccccatccccccaggtttttcgcgtgggggagggggcacgtctcggcgagtcacgatgatggcggccaccatcctgtgagcgcgaggagcgcgggcgaccccggggccccgccaggccacagaccccgcccagcggccagcacccggcgcaggcccggcagccgagctgcgcggcggcaccatgcaggtcaccctgaagaccctccagcagcagaccttcaagatagacattgaccccgaggagacggtgaaagcactgaaagagaagattgaatctgaaaaggggaaagatgcctttccagtagcaggtcaaaaattaatttatgcaggcaaaatcctcaatgatgatactgctctcaaagaatataaaattgatgagaaaaactttgtggtggttatggtgaccaaacccaaagcagtgtccacaccagcaccagctacaactcagcagtcagctcctgccagcactacagcagttacttcctccaccaccacaactgtggctcaggctccaacccctgtccctgccttggcccccacttccacacctgcatccatcactccagcatcagcgacagcatcttctgaacctgcacctgctagtgcagctaaacaagagaa

SEQ ID NO: 132987 - protein, 339 aa, Artificial Sequence
  derived and/or modified sequence
MAMQMQLEANADTSVEEESFGPQPISRLEQCGINANDVKKLEEAGFHTVEAVAYAPKKELINIKGISEAKADKILAEAAKLVPMGFTTATEFHQRRSEIIQITTGSKELDKLLQGGIETGSITEMFGEFRTGKTQICHTLAVTCQLPIDRGGGEGKAMYIDTEGTFRPERLLAVAERYGLSGSDVLDNVAYARAFNTDHQTQLLYQASAMMVESRYALLIVDSATALYRTDYSGRGELSARQMHLARFLRMLLRLADEFGVAVVITNQVVAQVDGAAMFAADPKKPIGGNIIAHASTTRLYLRKGRGETRICKIYDSPCLPEAEAMFAINADGVGDAKD

SEQ ID NO: 132988 - protein, 242 aa, Artificial Sequence
  derived and/or modified sequence
MAMQMQLEANADTSVEEESFGPQPISRLEQCGINANDVKKLEEAGFHTVEAVAYAPKKELINIKGISEAKADKILLLSHRYGLSGSDVLDNVAYARAFNTDHQTQLLYQASAMMVESRYALLIVDSATALYRTDYSGRGELSARQMHLARFLRMLLRLADEFGVAVVITNQVVAQVDGAAMFAADPKKPIGGNIIAHASTTRLYLRKGRGETRICKIYDSPCLPEAEAMFAINADGVGDAKD

SEQ ID NO: 132989 - DNA, 1020 bp, Artificial Sequence
  derived and/or modified sequence
atggccatgcagatgcagctggaggccaacgccgacaccagcgtggaggaggagagcttcggcccccagcccatcagcagactggagcagtgcggcatcaacgccaacgacgtgaagaagctggaggaggccggcttccacaccgtggaggccgtggcctacgcccccaagaaggagctgatcaacatcaagggcatcagcgaggccaaggccgacaagatcctggccgaggccgccaagctggtgcccatgggcttcaccaccgccaccgagttccaccagagaagaagcgagatcatccagatcaccaccggcagcaaggagctggacaagctgctgcagggcggcatcgagaccggcagcatcaccgagatgttcggcgagttcagaaccggcaagacccagatctgccacaccctggccgtgacctgccagctgcccatcgacagaggcggcggcgagggcaaggccatgtacatcgacaccgagggcaccttcagacccgagagactgctggccgtggccgagagatacggcctgagcggcagcgacgtgctggacaacgtggcctacgccagagccttcaacaccgaccaccagacccagctgctgtaccaggccagcgccatgatggtggagagcagatacgccctgctgatcgtggacagcgccaccgccctgtacagaaccgactacagcggcagaggcgagctgagcgccagacagatgcacctggccagattcctgagaatgctgctgagactggccgacgagttcggcgtggccgtggtgatcaccaaccaggtggtggcccaggtggacggcgccgccatgttcgccgccgaccccaagaagcccatcggcggcaacatcatcgcccacgccagcaccaccagactgtacctgagaaagggcagaggcgagaccagaatctgcaagatctacgacagcccctgcctgcccgaggccgaggccatgttcgccatcaacgccgacggcgtgggcgacgccaaggactag

SEQ ID NO: 132990 - DNA, 1020 bp, Artificial Sequence
  derived and/or modified sequence
atggcaatgcagatgcagctggaagccaatgccgacaccagcgtggaagaagagtccttcggcccacaaccgatatctagactcgagcagtgtggaattaacgctaatgatgtgaagaagctggaggaagccggatttcatacagtagaggctgtggcttacgcccctaagaaggagttgattaatatcaaaggcattagcgaggccaaggccgataagatcctcgcggaagccgcgaagttagtccccatgggcttcaccaccgccactgagttccaccagagacgaagtgagataattcagatcactacaggctctaaagagctggacaaattgctccaaggcggaatagaaaccggaagtattacagagatgttcggagaattccgaaccgggaaaacacaaatttgccacactctggcagtgacctgccagctgcccatcgatcggggcggaggcgaagggaaggccatgtatattgacacagaaggaacctttcgccctgagagactcctggctgtggccgaacgatacgggctttctggttctgatgttcttgacaatgtggcctacgccagggccttcaatacagaccatcaaacacagttgctataccaggctagcgccatgatggtagaaagcagatatgctctcctgattgtcgatagcgccacggcactttataggactgattacagcggtcggggcgaattgtctgctcgccagatgcatcttgcccgattcctcaggatgctgctgagactggctgatgaatttggtgttgctgtggtgatcaccaaccaagtcgtggcacaggtcgatggagccgcgatgtttgcagctgatcccaagaaaccgatcggagggaatatcatagctcacgcctccacaactcggctctacttgagaaagggacggggggaaacccgcatatgtaagatctacgacagcccatgcctccctgaagcggaagcaatgtttgctattaacgcagatggggtgggagatgcaaaagactag

SEQ ID NO: 132991 - DNA, 1020 bp, Artificial Sequence
  derived and/or modified sequence
atggccatgcagatgcagctggaggccaatgctgacacctctgtggaggaggagagctttggcccccagcccatcagccggctggagcagtgtggcatcaatgccaatgatgtgaagaagctggaggaggccggcttccacacagtggaggccgtggcctatgcccccaagaaggagctgatcaacatcaagggcatcagcgaggccaaggctgacaagatcctggccgaggccgccaagctggtgcccatgggcttcaccacagccacagagttccaccagaggagaagtgagatcatccagatcaccaccggcagcaaggagctggacaagctgctgcagggcggcattgaaacaggcagcatcacagagatgtttggagagttcagaacaggcaagacccagatctgccacaccctggccgtgacctgccagctgcccatcgacagaggaggaggagagggcaaggccatgtacatcgacacagagggcaccttccggcctgagcggctgctggccgtggccgagagatatggcctgagcggcagtgatgtgctggacaacgtggcctatgcccgggccttcaacacagaccaccagacccagctgctgtaccaggccagcgccatgatggtggagagccgctatgccctgctgattgtggacagcgccacagccctgtacagaacagactacagcggccgcggggagctgagcgcccggcagatgcacctggcccgcttcctgaggatgctgctgcggctggctgatgaatttggagtggccgtggtgatcaccaaccaggtggtggcccaggtggatggagctgccatgtttgctgctgaccccaagaagcccatcggcggcaacatcatcgcccacgccagcaccacccggctgtacctgaggaagggccgcggggagacccgcatctgcaagatctatgacagcccctgcctgcctgaggccgaggccatgtttgccatcaatgctgatggagtgggagatgccaaggactag

SEQ ID NO: 132992 - DNA, 1020 bp, Artificial Sequence
  derived and/or modified sequence
atggccatgcagatgcagctggaggccaacgccgacaccagcgtggaggaagaatcctttgggcctcagcccatctcccggcttgagcagtgcggcatcaacgcaaatgacgttaagaagttagaagaagccggattccacaccgttgaggccgttgcatacgctccaaagaaagaactgatcaacattaaaggtatttctgaagcgaaggcagataaaattctggcggaggcagccaagttggtccccatgggctttactaccgccacggagttccaccagcgccgcagcgaaatcatccagatcaccaccgggtcaaaggagctggacaaattactgcagggcggaattgagacaggcagtatcactgagatgttcggtgagtttaggaccgggaaaacccagatctgtcatacactcgctgttacttgccagctgcctatagaccggggagggggtgagggcaaagctatgtacatcgataccgagggcacttttagaccagaacggttactggctgtagcggagagatacgggcttagcggaagtgatgtgctcgacaacgtggcctatgccagggccttcaatactgatcaccaaactcagctgctgtaccaggcctccgctatgatggtagagagcagatatgcactgctcatcgttgactcagcaaccgccctgtataggacagactactctggccggggcgagttgagtgcaaggcagatgcacctagccaggttcctgcgcatgctcctaagactggcggatgagtttggagtggccgtggttatcaccaatcaggtagtggcacaagtggacggggctgctatgtttgcagcagaccccaaaaaaccaattggcggaaatattatcgctcacgcgtctaccaccagattgtacctgcggaaggggcggggagaaaccaggatatgtaagatttatgattcaccctgcttgccagaggcagaggcaatgtttgccataaacgcagacggagtgggggatgctaaagactag

SEQ ID NO: 132993 - DNA, 1020 bp, Artificial Sequence
  derived and/or modified sequence
atggccatgcagatgcagcttgaggcaaatgccgatacctcagtggaggaggaaagcttcggccctcagccaatctctcgcctggaacagtgtggtatcaacgctaacgatgtgaagaagctagaggaggcgggatttcacactgtggaagctgtggcctacgctcctaagaaagaattaatcaacatcaaagggatcagcgaggccaaggccgacaaaattctggcagaagcagctaagttagttccaatgggatttacaacggcaactgagttccaccagagacgcagtgagataatccagataaccacaggctctaaagaactggataaactgctccagggaggaatcgaaactggcagcattacggagatgtttggtgaatttagaaccgggaagacccagatctgccacactctcgcggtgacttgccagttacccattgaccgtggcggaggggagggtaaggctatgtacattgacacagaagggacattccggccagagcgtctgttagctgtggccgaacggtacggcttgtccggttctgacgtgctcgacaatgtagcgtacgcacgtgcctttaataccgaccatcagacccaactgctgtatcaagctagtgccatgatggttgagtctagatacgccttgctcatagtcgattcagctactgcactgtatcggaccgactacagcggaagaggggagctgtcggccaggcagatgcacctggccaggtttttgcgaatgttgttacggttagccgacgaattcggagtggcagttgtgataacgaatcaggtggttgcccaagttgatggggctgcaatgttcgctgccgatcctaagaaacccatcggaggaaacattattgcccacgcctcgactacgaggctctatcttagaaagggcagaggcgagacccgcatttgcaaaatatatgactcaccctgtctccccgaagcagaggccatgtttgcaataaacgccgacggggttggagatgctaaggactag

SEQ ID NO: 132994 - DNA, 2266 bp, Artificial Sequence
  derived and/or modified sequence
gagggtttggcgggaattctgaaagccgctggcggaccgcgcgcagcggccagagaccgagccctaaggagagtgcggcgcttcccgaggcgtgcagctgggaactgcaactcatctgggttgtgcgcagaaggctggggcaagcgagtagagaagtggagcgtaagccaggggcgttgggggccgtgcgggtcgggcgcgtgccacgcccgcggggtgaagtcggagcgcggggcctgctggagagaggagcgctgcggaccgagtaatggcaatgcagatgcagcttgaagcaaatgcagatacttcagtggaagaagaaagctttggcccacaacccatttcacggttagagcagtgtggcataaatgccaacgatgtgaagaaattggaagaagctggattccatactgtggaggctgttgcctatgcgccaaagaaggagctaataaatattaagggaattagtgaagccaaagctgataaaattctggctgaggcagctaaattagttccaatgggtttcaccactgcaactgaattccaccaaaggcggtcagagatcatacagattactactggctccaaagagcttgacaaactacttcaaggtggaattgagactggatctatcacagaaatgtttggagaattccgaactgggaagacccagatctgtcatacgctagctgtcacctgccagcttcccattgaccggggtggaggtgaaggaaaggccatgtacattgacactgagggtacctttaggccagaacggctgctggcagtggctgagaggtatggtctctctggcagtgatgtcctggataatgtagcatatgctcgagcgttcaacacagaccaccagacccagctcctttatcaagcatcagccatgatggtagaatctaggtatgcactgcttattgtagacagtgccaccgccctttacagaacagactactcgggtcgaggtgagctttcagccaggcagatgcacttggccaggtttctgcggatgcttctgcgactcgctgatgagtttggtgtagcagtggtaatcactaatcaggtggtagctcaagtggatggagcagcgatgtttgctgctgatcccaaaaaacctattggaggaaatatcatcgcccatgcatcaacaaccagattgtatctgaggaaaggaagaggggaaaccagaatctgcaaaatctacgactctccctgtcttcctgaagctgaagctatgttcgccattaatgcagatggagtgggagatgccaaagactgaatcattgggtttttcctctgttaaaaaccttaagtgctgcagcctaatgagagtgcactgctccctggggttctctacaggcctcttcctgttgtgactgccaggataaagcttccgggaaaacagctattatatcagcttttctgatggtataaacaggagacaggtcagtagtcacaaactgatctaaaatgtttattccttctgtagtgtattaatctctgtgtgttttctttggttttggaggaggggtatgaagtatctttgacatggtgccttaggaatgacttgggtttaacaagctgtctactggacaatcttatgtttccaagagaactaaagctggagagacctgacccttctctcacttctaaattaatggtaaaataaaatgcctcagctatgtagcaaagggaatgggtctgcacagattctttttttctgtcagtaaaactctcaagcaggtttttaagttgtctgtctgaatgatcttgtgtaaggttttggttatggagtcttgtgccaaacctactaggccattagcccttcaccatctacctgcttggtctttcattgctaagactaactcaagataatcctagagtcttaaagcatttcaggccagtgtggtgtcttgcgcctgtactcccagcactttgggaggccgaggcaggtggatcgcttgagcccaggagttttaagtccagcttggccaaggtggtgaaatcccatctctacaaaaaatgcagaacttaatctggacacactgttacacgtgcctgtagtcccagctactcgatagcctgaggtgggagaatcacttaagcctggaaggtggaagttgcagtgagtcgagattgcactgctgcattccagccagggtgacagagtgagaccatgtttcaaacaagaaacatttcagagggtaagtaaacagatttgattgtgaggcttctaataaagtagttattagtagtg

SEQ ID NO: 132995 - DNA, 1545 bp, Artificial Sequence
  derived and/or modified sequence
gctggcggaccgcgcgcagcggccagagaccgagccctaaggagagtgcggcgcttcccgaggcgtgcagctgggaactgcaactcatctgggttgtgcgcagaaggctggggcaagcgagtagagaagtggagcgtaagccaggggcgttgggggccgtgcgggtcgggcgcgtgccacgcccgcggggtgaagtcggagcgcggggcctgctggagagaggagcgctgcggaccgagtaatggcaatgcagatgcagcttgaagcaaatgcagatacttcagtggaagaagaaagctttggcccacaacccatttcacggttagagcagtgtggcataaatgccaacgatgtgaagaaattggaagaagctggattccatactgtggaggctgttgcctatgcgccaaagaaggagctaataaatattaagggaattagtgaagccaaagctgataaaattctggctgaggcagctaaattagttccaatgggtttcaccactgcaactgaattccaccaaaggcggtcagagatcatacagattactactggctccaaagagcttgacaaactacttcaaggtggaattgagactggatctatcacagaaatgtttggagaattccgaactgggaagacccagatctgtcatacgctagctgtcacctgccaggtatggtctctctggcagtgatgtcctggataatgtagcatatgctcgagcgttcaacacagaccaccagacccagctcctttatcaagcatcagccatgatggtagaatctaggtatgcactgcttattgtagacagtgccaccgccctttacagaacagactactcgggtcgaggtgagctttcagccaggcagatgcacttggccaggtttctgcggatgcttctgcgactcgctgatgagtttggtgtagcagtggtaatcactaatcaggtggtagctcaagtggatggagcagcgatgtttgctgctgatcccaaaaaacctattggaggaaatatcatcgcccatgcatcaacaaccagattgtatctgaggaaaggaagaggggaaaccagaatctgcaaaatctacgactctccctgtcttcctgaagctgaagctatgttcgccattaatgcagatggagtgggagatgccaaagactgaatcattgggtttttcctctgttaaaaaccttaagtgctgcagcctaatgagagtgcactgctccctggggttctctacaggcctcttcctgttgtgactgccaggataaagcttccgggaaaacagctattatatcagcttttctgatggtataaacaggagacaggtcagtagtcacaaactgatctaaaatgtttattccttctgtagtgtattaatctctgtgtgttttctttggttttggaggaggggtatgaagtatctttgacatggtgccttaggaatgacttgggtttaacaagctgtctactggacaatcttatgtttccaagagaactaaagctggagagacctgacccttctctcacttctaaattaa

SEQ ID NO: 132996 - DNA, 658 bp, Artificial Sequence
  derived and/or modified sequence
taatggcaatgcagatgcagcttgaagcaaatgcagatacttcagtggaagaagaaagctttggcccacaacccatttcacggttagagcagtgtggcataaatgccaacgatgtgaagaaattggaagaagctggattccatactgtggaggctgttgcctatgcgccaaagaaggagctaataaatattaagggaattagtgaagccaaagctgataaaattctggtggaattgagactggatctatcacagaaatgtttggagaattccgaactgggaagacccagatctgtcatacgctagctgtcacctgccagcttcccattgaccggggtggaggtgaaggaaaggccatgtacattgacactgagggtacctttaggccagaacggctgctggcagtggctgagaggtatggtctctctggcagtgatgtcctggataatgtagcatatgctcgagcgttcaacacagaccaccagacccagctcctttatcaagcatcagccatgatggtagaatctaggtatgcactgcttattgtagacagtgccaccgccctttacagaacagactactcgggtcgaggtgagctttcagccaggcagatgcacttggccaggtttctgcggatgcttctgcgactcgctgatgag

SEQ ID NO: 132997 - protein, 135 aa, Artificial Sequence
  derived and/or modified sequence
MRGKTFRFEMQRDLVSFPLSPAVRVKLVSAGFQTAEELLEVKPSELSKEVGISKAEALETLQIIRRECLTNKPRYAGTSESHKKCTALELLEQEHTQGFIITFCSALDDILGGGVPLMKTTEICGAPGVGKTQLW

SEQ ID NO: 132998 - DNA, 408 bp, Artificial Sequence
  derived and/or modified sequence
atgcgaggaaagactttcagattcgagatgcaaagagacctggtatcattcccgttaagcccggccgtcagagtcaaactggtatccgctggcttccagacagcagaagagttactcgaggttaagccttccgagctaagcaaggaagtgggcatctccaaagctgaggctctggaaaccctccagataatcagacgagaatgtcttactaacaaaccccggtatgctggcacttccgaatctcacaagaagtgcacggctcttgagctgctggaacaggaacacacacagggctttatcatcactttttgctctgccctcgatgatatcttgggcggcggggtaccactcatgaagacaacagaaatctgtggtgcacccggtgtgggcaagacgcaactctggtag

SEQ ID NO: 132999 - DNA, 408 bp, Artificial Sequence
  derived and/or modified sequence
atgaggggcaagaccttccgctttgagatgcagagggacctggtgtccttccccctgagccctgctgtgcgggtgaagctggtgtctgctggcttccagacagctgaggagctgctggaggtgaagcccagcgagctgagcaaggaggtgggcatcagcaaggccgaggccctggagaccctgcagatcatcagaagagaatgtctgaccaacaagcccaggtatgccggcaccagcgagagccacaagaagtgcacagccctggagctgctggagcaggagcacacccagggcttcatcatcaccttctgcagcgccctggatgacatcctgggcggcggcgtgcccctgatgaagaccacagagatctgtggggcccctggggtgggcaagacccagctgtggtag

SEQ ID NO: 133000 - DNA, 408 bp, Artificial Sequence
  derived and/or modified sequence
atgcggggcaagaccttccggttcgagatgcagcgggacctggtgtctttccctttgtcacccgcagtgagggttaaattagtgtctgcagggttccagaccgctgaggagctcttggaagtgaaaccaagcgagttgagtaaggaagtcggtatttccaaggctgaggcacttgagacccttcagatcatacggagagaatgcttgaccaataagcccaggtacgccggaactagcgagtctcacaagaagtgtactgctctggagctgctcgaacaagagcatactcagggcttcattattacattttgcagcgctctcgatgatatactcggcggtggcgtgcccctcatgaaaaccacggaaatatgtggcgccccaggtgtgggcaaaacccagttatggtag

SEQ ID NO: 133001 - DNA, 408 bp, Artificial Sequence
  derived and/or modified sequence
atgagaggcaagacgttccgctttgaaatgcaacgagatctcgtatcttttccactctcccccgctgtcagagtcaaacttgtttctgccggttttcagacggccgaagagctcctcgaggttaaaccgtctgagctgagcaaggaagttggaatcagcaaggccgaggccctggaaacgctgcaaattatccgcagggagtgtttgacaaataagcccaggtacgccggaacaagcgaatcccacaaaaaatgcacagccctggagctcctggagcaggagcacacgcagggctttatcatcacattctgcagtgcactggacgacatcctgggcggtggggttcccttaatgaaaactaccgagatctgcggcgctcccggagtaggtaaaacccagctctggtag

SEQ ID NO: 133002 - DNA, 565 bp, Artificial Sequence
  derived and/or modified sequence
agcaggtgagcctgcgatgcgcgggaagacgttccgctttgaaatgcagcgggatttggtgagtttcccgctgtctccagcggtgcgggtgaagctggtgtctgcggggttccagactgctgaggaactcctagaggtgaaaccctccgagcttagcaaagaagttgggatatctaaagcagaagccttagaaactctgcaaattatcagaagagaatgtctcacaaataaaccaagatatgctggtacatctgagtcacacaagaagtgtacagcactggaacttcttgagcaggagcatacccagggcttcataatcaccttctgttcagcactagatgatattcttgggggtggagtgcccttaatgaaaacaacagaaatttgtggtgcaccaggtgttggaaaaacacaattatggtaaaataaagtgttctccttttaagggtgggtttaataacatattatgaaagtagtattttgtactatcgtcaggaaaccaaataagatatatatgtgctcttaattttaagtgtgtatgtgcattaaacaaaaattagcttac

SEQ ID NO: 133003 - DNA, 408 bp, Artificial Sequence
  derived and/or modified sequence
atgagaggcaagaccttcagattcgagatgcagagagacctggtgagcttccccctgagccccgccgtgagagtgaagctggtgagcgccggcttccagaccgccgaggagctgctggaggtgaagcccagcgagctgagcaaggaggtgggcatcagcaaggccgaggccctggagaccctgcagatcatcagaagagagtgcctgaccaacaagcccagatacgccggcaccagcgagagccacaagaagtgcaccgccctggagctgctggagcaggagcacacccagggcttcatcatcaccttctgcagcgccctggacgacatcctgggcggcggcgtgcccctgatgaagaccaccgagatctgcggcgcccccggcgtgggcaagacccagctgtggtag

SEQ ID NO: 133004 - protein, 350 aa, Artificial Sequence
  derived and/or modified sequence
MGSKKLKRVGLSQELCDRLSRHQILTCQDFLCLSPLELMKVTGLSYRGVHELLCMVSRACAPKMQTAYGIKAQRSADFSPAFLSTTLSALDEALHGGVACGSLTEITGPPGCGKTQFCIMMSILATLPTNMGGLEGAVVYIDTESAFSAERLVEIAESRFPRYFNTEEKLLLTSSKVHLYRELTCDEVLQRIESLEEEIISKGIKLVILDSVASVVRKEFDAQLQGNLKERNKFLAREASSLKYLAEEFSIPVILTNQITTHLSGALASQADLVSPADDLSLSEGTSGSSCVIAALGNTWSHSVNTRLILQYLDSERRQILIAKSPLAPFTSFVYTIKEEGLVLQAYAQC

SEQ ID NO: 133005 - protein, 366 aa, Artificial Sequence
  derived and/or modified sequence
MGSKKLKRVGLSQELCDRLSRHQILTCQDFLCLSPLELMKVTGLSYRGVHELLCMVSRACAPKMQTAYGIKAQRSADFSPAFLSTTLSALDEALHGGVACGSLTEITGPPGCGKTQFCIMMSILATLPTNMGGLEGAVVYIDTESAFSAERLVEIAESRFPRYFNTEEKLLLTSSKVHLYRELTCDEVLQRIESLEEEIISKGIKLVILDSVASVVRKEFDAQLQGNLKERNKFLAREASSLKYLAEEFSIPVILTNQITTHLSGALASQADLVSPADDLSLSEGTSGSSCVIAALGNTWSHSVNTRLILQYLDSERRQILIAKSPLAPFTSFVYTIKEEGLVLQEFWHICISGFSIQNRLKENES

SEQ ID NO: 133006 - protein, 75 aa, Artificial Sequence
  derived and/or modified sequence
MGSKKLKRVGLSQELCDRLSRHQILTCQDFLCLSPLELMKVTGLSYRGVHELLCMVSRACAPKMQTAYGIKAQRS

SEQ ID NO: 133007 - DNA, 1053 bp, Artificial Sequence
  derived and/or modified sequence
atgggcagcaagaagctgaagagagtgggcctgagccaggagctgtgcgacagactgagcagacaccagatcctgacctgccaggacttcctgtgcctgagccccctggagctgatgaaggtgaccggcctgagctacagaggcgtgcacgagctgctgtgcatggtgagcagagcctgcgcccccaagatgcagaccgcctacggcatcaaggcccagagaagcgccgacttcagccccgccttcctgagcaccaccctgagcgccctggacgaggccctgcacggcggcgtggcctgcggcagcctgaccgagatcaccggcccccccggctgcggcaagacccagttctgcatcatgatgagcatcctggccaccctgcccaccaacatgggcggcctggagggcgccgtggtgtacatcgacaccgagagcgccttcagcgccgagagactggtggagatcgccgagagcagattccccagatacttcaacaccgaggagaagctgctgctgaccagcagcaaggtgcacctgtacagagagctgacctgcgacgaggtgctgcagagaatcgagagcctggaggaggagatcatcagcaagggcatcaagctggtgatcctggacagcgtggccagcgtggtgagaaaggagttcgacgcccagctgcagggcaacctgaaggagagaaacaagttcctggccagagaggccagcagcctgaagtacctggccgaggagttcagcatccccgtgatcctgaccaaccagatcaccacccacctgagcggcgccctggccagccaggccgacctggtgagccccgccgacgacctgagcctgagcgagggcaccagcggcagcagctgcgtgatcgccgccctgggcaacacctggagccacagcgtgaacaccagactgatcctgcagtacctggacagcgagagaagacagatcctgatcgccaagagccccctggcccccttcaccagcttcgtgtacaccatcaaggaggagggcctggtgctgcaggcctacgcccagtgctag

SEQ ID NO: 133008 - DNA, 1053 bp, Artificial Sequence
  derived and/or modified sequence
atgggttctaagaagcttaaaagagtgggcctctcacaggaactttgcgaccggctttcacggcaccagatccttacctgccaagacttcttatgcctaagccctttggagctaatgaaggtaacagggctgtcctaccgcggcgtccacgagttgctgtgcatggtgagcagagcatgtgcccccaagatgcagaccgcgtatggcattaaagcccaaaggtcagccgatttctcacccgctttcttgagcactacactgagcgccctagatgaggcgttgcacggcggcgtcgcttgcggtagcctgaccgaaatcaccggaccacccggatgtggaaagacccaattctgtattatgatgtctatcctggcgacactccccaccaacatgggcggcctggagggggctgtggtgtatatcgataccgaaagcgccttttcggcagaacgcctggtggagatagccgaatcccgctttccccggtactttaataccgaggagaagctgctactgacctccagtaaagtccatttatacagggagctcacttgtgatgaagtgctccagcgcattgagtcccttgaggaggaaataatcagcaagggcattaagttggtgatcctggatagcgtggcaagtgtggttcgaaaggagtttgacgcccagctacagggaaacctgaaggaaaggaataagtttctcgcgagggaggccagtagcctaaaatacctggcggaagagttcagcattcctgtaatcctcaccaaccagataacgactcacctgtccggggcattggccagccaggcggacttagtctcacctgctgatgatctatccttgagcgaagggacttctgggtcttcttgcgtcattgctgctttgggcaacacttggtctcacagcgtgaacactcgcttaatcctgcagtatctcgactctgagcgccgccagattctgatagcaaaaagccccctagcccccttcacttcatttgtgtacacaataaaagaagaaggcctggtattacaagcttacgcacagtgttag

SEQ ID NO: 133009 - DNA, 1053 bp, Artificial Sequence
  derived and/or modified sequence
atgggcagcaagaagctgaagagggtgggcctgagccaggagctgtgtgaccggctgagccgccaccagatcctgacctgccaggacttcctgtgcctgagccccctggagctgatgaaggtgacaggcctgagctaccggggcgtgcatgagctgctgtgcatggtgtcccgggcctgtgcccccaagatgcagacagcctacggcatcaaggcccagaggtctgctgacttcagccctgccttcctgagcaccaccctgagcgccctggatgaggccctgcatggaggagtggcctgtggcagcctgacagagatcactggacctcctggctgtgggaagacccagttctgcatcatgatgagcatcctggccaccctgcccaccaacatgggcggcctggagggcgctgtggtgtacatcgacacagaaagtgccttctctgctgagcggctggtggagattgctgagagccgcttcccccgctacttcaacacagaggagaagctgctgctgaccagcagcaaggtgcacctgtaccgggagctgacctgtgatgaggtgctgcagagaattgagagcctggaggaggagatcatcagcaagggcatcaagctggtgatcctggacagcgtggcctctgtggtgaggaaggagtttgatgcccagctgcagggcaacctgaaggagaggaacaagttcctggcccgggaggccagcagcctgaagtacctggccgaggagttcagcatccctgtgatcctgaccaaccagatcaccacccacctgagcggggccctggccagccaggccgacctggtgtccccagcagatgacctgagcctgtctgagggcaccagcggcagcagctgtgtgattgctgccctgggcaacacctggagccacagcgtgaacaccaggctcatcctgcagtacctggacagcgagcggcggcagatcctgattgccaagagccccctggcccccttcaccagctttgtgtacaccatcaaggaggagggcctggtgctgcaggcctatgcccagtgctag

SEQ ID NO: 133010 - DNA, 1053 bp, Artificial Sequence
  derived and/or modified sequence
atgggcagcaagaagctgaagcgggtgggcctgagccaggagctgtgcgatcgtttgtcccggcatcagattctgacttgtcaagacttcctttgcttaagccccctcgaattgatgaaggttaccggcttgtcataccgaggggtccacgagctgctctgcatggtgagcagggcctgtgcacccaagatgcagactgcctatggtattaaggcccagagatcagccgactttagcccagcattcctttctacaactctgagcgctcttgacgaagctcttcatggaggggtcgcctgtggatccttgacagagatcacggggcctcctggttgtggaaaaacccagttctgcatcatgatgagtatactcgccaccctgcccactaacatgggagggctggagggcgctgtggtgtatatagacacagagtccgcattcagcgccgagcgactggtggagattgctgaaagtcgatttcctaggtattttaatactgaagagaagctgctcctaacgtcttcaaaggtgcatttatatagagagcttacatgtgatgaggtgctccagcgcattgagtccttggaggaggaaattatctcgaagggtattaagctggttatcctggactcagtggccagtgtggtgaggaaggagtttgacgcacagctacaggggaatctaaaggaacggaataagtttctggcccgggaagccagcagcttgaagtacctcgctgaagaattctccattcctgtcatcctgaccaatcaaattaccacacacctgtcaggtgccttggccagtcaggcggacttggtctcccccgcagacgatctttcactttccgaggggactagcggatcctcttgcgtgattgctgctttaggaaatacctggtctcactcggtcaatacaagactgattctccagtaccttgatagcgaaaggcgccagatccttatcgccaaatccccactggcccccttcacttccttcgtgtatacgataaaggaggagggcctcgtgcttcaggcctatgctcagtgctag

SEQ ID NO: 133011 - DNA, 1053 bp, Artificial Sequence
  derived and/or modified sequence
atggggagcaagaaactgaagcgggtgggtctgagccaagaactgtgtgatagactgagccgacaccagattcttacgtgtcaggactttctttgcctgtccccgctcgaacttatgaaggtgaccggtctttcttaccgcggagtgcatgagttgctttgcatggtgagcagggcctgcgctccgaaaatgcagactgcttacggaatcaaggcccagcgaagtgccgatttctcaccggctttcctgtcgacaaccctgtctgccctcgatgaggcacttcatgggggtgttgcatgtggtagcctgactgaaattaccggaccccctggctgtggaaagacgcagttttgcatcatgatgagtatcctagccactttacctaccaatatggggggactcgagggagctgtcgtttatatcgatacggaatcggccttctctgccgaacgactagtggaaatagctgagtcaaggttccctcggtactttaacactgaggagaagctgcttctgacttcttcaaaggtccacctgtacagagaacttacttgtgatgaggtgttgcagaggatcgagtccctcgaggaagaaatcatcagcaaaggaataaagctcgtaatcctggattccgtggcttcagttgtgcgaaaggaattcgacgcacagctgcagggtaacttaaaggaacggaacaagttcttagcgagggaagctagttcgctgaagtaccttgccgaggagttcagtattccagtgatcctcactaaccaaattacaacacacttgagcggggctttggcctcacaagccgatctggtatcccctgccgatgatctgtctctgtctgagggtacaagcggctctagctgtgtgattgctgcgctggggaacacatggtcacattctgtgaacacaaggcttattctacagtatctggattcagaacgaagacagattctgattgcaaagagtccgctggccccttttacctctttcgtttatacaattaaggaagagggactggtgctgcaggcatacgcacagtgctag

SEQ ID NO: 133012 - DNA, 1050 bp, Artificial Sequence
  derived and/or modified sequence
atgggtagcaagaaactaaaacgagtgggtttatcacaagagctgtgtgaccgtctgagtagacatcagatccttacctgtcaggactttttatgtctttccccactggagcttatgaaggtgactggtctgagttatcgaggtgtccatgaacttctatgtatggtcagcagggcctgtgccccaaagatgcaaacggcttatgggataaaagcacaaaggtctgctgatttctcaccagcattcttatctactaccctttctgctttggacgaagccctgcatggtggtgtggcttgtggatccctcacagagattacaggtccaccaggttgtggaaaaactcagttttgtataatgatgagcattttggctacattacccaccaacatgggaggattagaaggagctgtggtgtacattgacacagagtctgcatttagtgctgaaagactggttgaaatagcagaatcccgttttcccagatattttaacactgaagaaaagttacttttgacaagtagtaaagttcatctttatcgggaactcacctgtgatgaagttctacaaaggattgaatctttggaagaagaaattatctcaaaaggaattaaacttgtgattcttgactctgttgcttctgtggtcagaaaggagtttgatgcacaacttcaaggcaatctcaaagaaagaaacaagttcttggcaagagaggcatcctccttgaagtatttggctgaggagttttcaatcccagttatcttgacgaatcagattacaacccatctgagtggagccctggcttctcaggcagacctggtgtctccagctgatgatttgtccctgtctgaaggcacttctggatccagctgtgtgatagccgcactaggaaatacctggagtcacagtgtgaatacccggctgatcctccagtaccttgattcagagagaagacagattcttattgccaagtcccctctggctcccttcacctcatttgtctacaccatcaaggaggaaggcctggttcttcaagcttatgctcagtgc

SEQ ID NO: 133013 - protein, 328 aa, Artificial Sequence
  derived and/or modified sequence
MGVLRVGLCPGLTEEMIQLLRSHRIKTVVDLVSADLEEVAQKCGLSYKALVALRRVLLAQFSAFPVNGADLYEELKTSTAILSTGIGRIRLSGNARWLMPKVTEIVGGPGSGKTQVCLCMAANVAHGLQQNVLYVDSNGGLTASRLLQLLQAKTQDEEEQAEALRRIQVVHAFDIFQMLDVLQELRGTVAQQVTGSSGTVKVVVVDSVTAVVSPLLGGQQREGLALMMQLARELKTLARDLGMAVVVTNHITRDRDSGRLKPALGRSWSFVPSTRILLDTIEGAGASGGRRMACLAKSSRQPTGFQEMVDIGTWGTSEQSATLQGDQT

SEQ ID NO: 133014 - protein, 328 aa, Artificial Sequence
  derived and/or modified sequence
MGVLRVGLCPGLTEEMIQLLRSHRIKTVVDLVSADLEEVAQKCGLSYKALVALRRVLLAQFSAFPVNGADLYEELKTSTAILSTGIGSLDKLLDAGLYTGEVTEIVGGPGSGKTQVCLCMAANVAHGLQQNVLYVDSNGGLTASRLLQLLQAKTQDEEEQAEALRRIQVVHAFDIFQMLDVLQELRGTVAQQVTGSSGTVKVVVVDSVTAVVSPLLGGQQREGLALMMQLARELKTLARDLGMAVVVTNHITRDRDSGRLKPALGRSWSFVPSTRILLDTIEGAGASGGRRMACLAKSSRQPTGFQEMVDIGTWGTSEQSATLQGDQT

SEQ ID NO: 133015 - protein, 118 aa, Artificial Sequence
  derived and/or modified sequence
MGVLRVGLCPGLTEEMIQLLRSHRIKTVVDLVSADLEEVAQKCGLSYKALVALRRVLLAQFSAFPVNGADLYEELKTSTAILSTGIGRHGGRTQVGTWEDCSCLRSPQGDRGVGSGML

SEQ ID NO: 133016 - protein, 283 aa, Artificial Sequence
  derived and/or modified sequence
MGVLRVGLCPGLTEEMIQLLRSHRIKTVVDLVSADLEEVAQKCGLSYKALVALRRVLLAQFSAFPVNGADLYEELKTSTAILSTGIGSLDKLLDAGLYTGEVTEIVGGPGSGKTQAEALRRIQVVHAFDIFQMLDVLQELRGTVAQQVTGSSGTVKVVVVDSVTAVVSPLLGGQQREGLALMMQLARELKTLARDLGMAVVVTNHITRDRDSGRLKPALGRSWSFVPSTRILLDTIEGAGASGGRRMACLAKSSRQPTGFQEMVDIGTWGTSEQSATLQGDQT

SEQ ID NO: 133017 - protein, 215 aa, Artificial Sequence
  derived and/or modified sequence
MVMAALPFSEDLKMPDTCVLPHCPGKENKDVVDLVSADLEEVAQKCGLSYKALVALRRVLLAQFSAFPVNGADLYEELKTSTAILSTGIGSLDKLLDAGLYTGEVTEIVGGPGSGKTQVCLCMAANVAHGLQQNVLYVDSNGGLTASRLLQLLQAKTQDEEEQAEALRRIQVVHAFDIFQMLDVLQELRGTVAQQDGIPEHLNHIPHCLHVHLPC

SEQ ID NO: 133018 - protein, 236 aa, Artificial Sequence
  derived and/or modified sequence
MGVLRVGLCPGLTEEMIQLLRSHRIKTVVDLVSADLEEVAQKCGLSYKALVALRRVLLAQFSAFPVNGADLYEELKTSTAILSTGIGSLDKLLDAGLYTGEVTEIVGGPGSGKTQVCLCMAANVAHGLQQNVLYVDSNGGLTASRLLQLLQAKTQDEEEQAEALRRIQVVHAFDIFQMLDVLQELRGTVAQQVTGSSGTVKVVVVDSVTAVVSPLLGGQQREGLALMMQLARELKT

SEQ ID NO: 133019 - DNA, 987 bp, Artificial Sequence
  derived and/or modified sequence
atgggcgtgctgagagtgggcctgtgccccggcctgaccgaggagatgatccagctgctgagaagccacagaatcaagaccgtggtggacctggtgagcgccgacctggaggaggtggcccagaagtgcggcctgagctacaaggccctggtggccctgagaagagtgctgctggcccagttcagcgccttccccgtgaacggcgccgacctgtacgaggagctgaagaccagcaccgccatcctgagcaccggcatcggcagaatcagactgagcggcaacgccagatggctgatgcccaaggtgaccgagatcgtgggcggccccggcagcggcaagacccaggtgtgcctgtgcatggccgccaacgtggcccacggcctgcagcagaacgtgctgtacgtggacagcaacggcggcctgaccgccagcagactgctgcagctgctgcaggccaagacccaggacgaggaggagcaggccgaggccctgagaagaatccaggtggtgcacgccttcgacatcttccagatgctggacgtgctgcaggagctgagaggcaccgtggcccagcaggtgaccggcagcagcggcaccgtgaaggtggtggtggtggacagcgtgaccgccgtggtgagccccctgctgggcggccagcagagagagggcctggccctgatgatgcagctggccagagagctgaagaccctggccagagacctgggcatggccgtggtggtgaccaaccacatcaccagagacagagacagcggcagactgaagcccgccctgggcagaagctggagcttcgtgcccagcaccagaatcctgctggacaccatcgagggcgccggcgccagcggcggcagaagaatggcctgcctggccaagagcagcagacagcccaccggcttccaggagatggtggacatcggcacctggggcaccagcgagcagagcgccaccctgcagggcgaccagacctag

SEQ ID NO: 133020 - DNA, 987 bp, Artificial Sequence
  derived and/or modified sequence
atgggcgtgctgagagtgggcctgtgccccggcctgaccgaggagatgatccagctgctgagaagccacagaatcaagaccgtggtggacctggtgagcgccgacctggaggaggtggcccagaagtgcggcctgagctacaaggccctggtggccctgagaagagtgctgctggcccagttcagcgccttccccgtgaacggcgccgacctgtacgaggagctgaagaccagcaccgccatcctgagcaccggcatcggcagcctggacaagctgctggacgccggcctgtacaccggcgaggtgaccgagatcgtgggcggccccggcagcggcaagacccaggtgtgcctgtgcatggccgccaacgtggcccacggcctgcagcagaacgtgctgtacgtggacagcaacggcggcctgaccgccagcagactgctgcagctgctgcaggccaagacccaggacgaggaggagcaggccgaggccctgagaagaatccaggtggtgcacgccttcgacatcttccagatgctggacgtgctgcaggagctgagaggcaccgtggcccagcaggtgaccggcagcagcggcaccgtgaaggtggtggtggtggacagcgtgaccgccgtggtgagccccctgctgggcggccagcagagagagggcctggccctgatgatgcagctggccagagagctgaagaccctggccagagacctgggcatggccgtggtggtgaccaaccacatcaccagagacagagacagcggcagactgaagcccgccctgggcagaagctggagcttcgtgcccagcaccagaatcctgctggacaccatcgagggcgccggcgccagcggcggcagaagaatggcctgcctggccaagagcagcagacagcccaccggcttccaggagatggtggacatcggcacctggggcaccagcgagcagagcgccaccctgcagggcgaccagacctag

SEQ ID NO: 133021 - DNA, 357 bp, Artificial Sequence
  derived and/or modified sequence
atgggcgtgctgagagtgggcctgtgccccggcctgaccgaggagatgatccagctgctgagaagccacagaatcaagaccgtggtggacctggtgagcgccgacctggaggaggtggcccagaagtgcggcctgagctacaaggccctggtggccctgagaagagtgctgctggcccagttcagcgccttccccgtgaacggcgccgacctgtacgaggagctgaagaccagcaccgccatcctgagcaccggcatcggcagacacggcggcagaacccaggtgggcacctgggaggactgcagctgcctgagaagcccccagggcgacagaggcgtgggcagcggcatgctgtag

SEQ ID NO: 133022 - DNA, 852 bp, Artificial Sequence
  derived and/or modified sequence
atgggcgtgctgagagtgggcctgtgccccggcctgaccgaggagatgatccagctgctgagaagccacagaatcaagaccgtggtggacctggtgagcgccgacctggaggaggtggcccagaagtgcggcctgagctacaaggccctggtggccctgagaagagtgctgctggcccagttcagcgccttccccgtgaacggcgccgacctgtacgaggagctgaagaccagcaccgccatcctgagcaccggcatcggcagcctggacaagctgctggacgccggcctgtacaccggcgaggtgaccgagatcgtgggcggccccggcagcggcaagacccaggccgaggccctgagaagaatccaggtggtgcacgccttcgacatcttccagatgctggacgtgctgcaggagctgagaggcaccgtggcccagcaggtgaccggcagcagcggcaccgtgaaggtggtggtggtggacagcgtgaccgccgtggtgagccccctgctgggcggccagcagagagagggcctggccctgatgatgcagctggccagagagctgaagaccctggccagagacctgggcatggccgtggtggtgaccaaccacatcaccagagacagagacagcggcagactgaagcccgccctgggcagaagctggagcttcgtgcccagcaccagaatcctgctggacaccatcgagggcgccggcgccagcggcggcagaagaatggcctgcctggccaagagcagcagacagcccaccggcttccaggagatggtggacatcggcacctggggcaccagcgagcagagcgccaccctgcagggcgaccagacctag

SEQ ID NO: 133023 - DNA, 648 bp, Artificial Sequence
  derived and/or modified sequence
atggtgatggccgccctgcccttcagcgaggacctgaagatgcccgacacctgcgtgctgccccactgccccggcaaggagaacaaggacgtggtggacctggtgagcgccgacctggaggaggtggcccagaagtgcggcctgagctacaaggccctggtggccctgagaagagtgctgctggcccagttcagcgccttccccgtgaacggcgccgacctgtacgaggagctgaagaccagcaccgccatcctgagcaccggcatcggcagcctggacaagctgctggacgccggcctgtacaccggcgaggtgaccgagatcgtgggcggccccggcagcggcaagacccaggtgtgcctgtgcatggccgccaacgtggcccacggcctgcagcagaacgtgctgtacgtggacagcaacggcggcctgaccgccagcagactgctgcagctgctgcaggccaagacccaggacgaggaggagcaggccgaggccctgagaagaatccaggtggtgcacgccttcgacatcttccagatgctggacgtgctgcaggagctgagaggcaccgtggcccagcaggacggcatccccgagcacctgaaccacatcccccactgcctgcacgtgcacctgccctgctag

SEQ ID NO: 133024 - DNA, 711 bp, Artificial Sequence
  derived and/or modified sequence
atgggcgtgctgagagtgggcctgtgccccggcctgaccgaggagatgatccagctgctgagaagccacagaatcaagaccgtggtggacctggtgagcgccgacctggaggaggtggcccagaagtgcggcctgagctacaaggccctggtggccctgagaagagtgctgctggcccagttcagcgccttccccgtgaacggcgccgacctgtacgaggagctgaagaccagcaccgccatcctgagcaccggcatcggcagcctggacaagctgctggacgccggcctgtacaccggcgaggtgaccgagatcgtgggcggccccggcagcggcaagacccaggtgtgcctgtgcatggccgccaacgtggcccacggcctgcagcagaacgtgctgtacgtggacagcaacggcggcctgaccgccagcagactgctgcagctgctgcaggccaagacccaggacgaggaggagcaggccgaggccctgagaagaatccaggtggtgcacgccttcgacatcttccagatgctggacgtgctgcaggagctgagaggcaccgtggcccagcaggtgaccggcagcagcggcaccgtgaaggtggtggtggtggacagcgtgaccgccgtggtgagccccctgctgggcggccagcagagagagggcctggccctgatgatgcagctggccagagagctgaagacctag

SEQ ID NO: 133025 - DNA, 987 bp, Artificial Sequence
  derived and/or modified sequence
atgggcgtcctcagggtcggactgtgccccggtcttaccgaggagatgatccagctgctgcgcagtcatcggatcaagacagttgtggatcttgtcagtgccgacctcgaagaagtcgctcaaaaatgcggactttcttacaaagccctggtggcattgagaagggtgctgcttgcacaattctccgcttttccggtaaatggcgccgacctctatgaggagctcaaaacttctacggcgatattatctactggtattggccggattcgcctgtcaggcaatgccagatggctgatgccgaaggttaccgaaattgtggggggaccagggtctggaaagactcaggtatgtctgtgcatggccgccaatgtcgcccatggtcttcagcagaacgtcctatacgttgactctaacggcggcttaacggcaagccggctgctccagctgctgcaggctaagacacaggatgaggaggaacaggccgaggcactccgccgcattcaagtcgtccacgcattcgatattttccagatgctcgacgtacttcaggagctgcggggaaccgtagcacagcaggtgaccgggtcctctggcaccgtaaaggttgtcgtggtcgatagcgtcacggctgtagttagccccctgctggggggccaacagagggaaggcctcgccctaatgatgcagttagctcgcgagcttaagactctcgccagggacctgggcatggcagtcgttgtgacaaaccatattactcgtgaccgcgacagcgggcggttaaagccagcactggggcgttcatggtcctttgtcccttctactcgaatcctccttgacactatcgaaggggccggtgcttctggtggacgccgcatggcctgtcttgcaaagagctcacgacagcctaccggcttccaggaaatggtcgacattggcacttgggggacaagtgaacaatccgccacacttcaaggcgaccagacttag

SEQ ID NO: 133026 - DNA, 987 bp, Artificial Sequence
  derived and/or modified sequence
atgggagtcttgcgggtgggcctctgtcccggcctcacagaagaaatgatacagttacttcgctctcatagaattaagaccgtggtggatctggtcagcgcagatctggaagaggttgctcagaaatgcggactgtcctacaaagcgctcgtggcccttagacgtgttctcctggcccaattctcggcattccccgtgaatggcgctgatctgtatgaagaactgaaaaccagcactgcgatcctttccacgggaatcggcagtctggacaaattactcgatgctggcctgtacacgggtgaagtgacggagatagttggaggacccggatctggcaaaacgcaagtctgcctctgtatggctgcgaacgttgctcacggcctgcagcagaacgtgttgtacgtagattcgaatggggggctgactgcctctcgacttctgcagctgctgcaggccaaaacccaagacgaagaagagcaggcagaagctctgaggaggattcaagtagtgcatgcctttgacatttttcaaatgttagacgtactccaggaactgcggggaacagtggcccagcaagttaccggcagttctgggactgtcaaggtggtggtcgttgatagcgttaccgcggttgtttcccccttattggggggacaacaaagagagggcctggcactcatgatgcaactggctagagaactgaagaccctcgcccgtgaccttggaatggctgtggtagtgaccaaccacattactagggacagagactctgggcggctcaaacccgctctggggcgatcctggtctttcgtgccatcaacccgcatcttactggacaccatcgagggcgcgggcgctagcggaggaaggcggatggcctgcctggctaagagcagccgtcagccaaccggctttcaggagatggtcgacatagggacctggggaacaagcgagcagtccgccacgttacaaggggatcagacgtag

SEQ ID NO: 133027 - DNA, 357 bp, Artificial Sequence
  derived and/or modified sequence
atgggcgtgctgagagtcgggctgtgtcccggcctgactgaagagatgatacagctgctgagaagtcaccgcataaaaactgtggtggacctggtgagcgcggacctcgaagaggttgcacagaagtgtggacttagttataaggccttagtagcccttcggagagtgctgctggcccagttttcagccttcccagtgaatggcgccgacctttatgaggagttaaagacaagcaccgcgatcctttccacaggtatcggccggcacgggggacggactcaggtgggtacctgggaagattgtagctgtctccgctcaccccagggagacaggggtgtcggatccggcatgctctag

SEQ ID NO: 133028 - DNA, 852 bp, Artificial Sequence
  derived and/or modified sequence
atgggagttctcagagtcggcctatgtccaggcctgaccgaagaaatgattcagcttctccgcagccacaggatcaagacagtggttgacctggtatctgccgacctggaagaggtggcccagaaatgcggcctctcatacaaggcgctcgttgctctgcgtcgagtcctgctggcccagttttcagcctttcctgtgaatggagccgatctgtatgaggagctcaaaacgagcaccgctattctttcaacaggaatcggatcgttagataagctgctggacgccggactatacaccggggaggtcactgagattgtgggcggacctggttccggaaagacacaggctgaggcattacgacgaattcaggtggtgcacgcgtttgacattttccagatgctggatgtcctccaggagcttcgcggcactgtggcacaacaggtgaccggcagctcaggaacagtgaaagttgtggttgtagacagcgtcacagcagtcgttagccctctcttgggtgggcagcagcgcgaaggtctcgcactgatgatgcaacttgcccgggaactcaaaacactggcccgcgatctgggtatggctgtggtcgtcactaaccatatcacccgggatagggatagcggaagactgaagcccgccctgggccggtcttggtcattcgttccgtcaacacgcatcttattggatacaatagagggcgcaggagcatcgggtggccggagaatggcatgtctcgcaaaaagcagtaggcagccaactggtttccaagagatggtggacattgggacatgggggacttccgaacagtcagccactctccagggggaccagacctag

SEQ ID NO: 133029 - DNA, 648 bp, Artificial Sequence
  derived and/or modified sequence
atggtgatggcagccttgccctttagtgaggacctcaaaatgccagatacatgtgtgctgccccactgtcctggcaaggagaacaaggatgtggttgacttggtatcggctgatcttgaagaggtggctcagaaatgtgggttgtcttataaggctctagtggctctgcgcagagttcttctggcgcaattctcagcgttccccgtcaacggggctgacctgtacgaagaacttaagacctctaccgccatcctatcaactggaattgggagtttggacaaattgctggatgctggactgtacactggggaagtgactgagattgtcgggggccctgggtcaggaaaaacccaggtgtgtctttgtatggcggccaacgtggcacacggcttgcagcagaatgtactgtatgtcgactcgaacggcggcctgaccgctagcaggttgttacagcttctgcaggctaaaacacaagatgaggaagagcaggcggaggcacttcgaaggattcaagttgtccacgcgttcgatatctttcaaatgcttgatgtgctgcaggagttgcgtgggaccgtcgcccagcaagacggtattccggagcaccttaatcacatcccacactgcctccacgtccacttaccttgctag

SEQ ID NO: 133030 - DNA, 711 bp, Artificial Sequence
  derived and/or modified sequence
atgggggtgctgcgtgtaggcctgtgtccaggtctcaccgaggagatgatccagctgctgcggtcgcacaggattaaaacagtggttgacctggtcagtgcagatttggaggaagttgcccagaagtgcggactgtcatataaggctctggtggccctccgccgcgtattgctcgcccagtttagtgcgtttcccgtcaatggcgcagacctctacgaggaactgaaaacatcaaccgccatcctctctacaggcatagggagcctggacaaactgttggacgcggggctttacacaggagaggtcaccgaaattgttggagggccagggagtgggaagacgcaggtctgcctttgtatggcggccaacgtggctcatgggctgcagcagaacgtcctctacgtggactctaacggaggcctaaccgccagccggctgctgcagttactacaagccaagactcaagatgaggaggagcaagctgaagctctcagaaggattcaggtggtgcacgcttttgacatttttcaaatgctggacgtgttacaggagctgcgtggtactgtggcacagcaagtgactgggtcttccgggactgtgaaagtggtcgttgttgacagcgtaacagccgtcgtgtctcccttgctgggcgggcagcagagagagggtcttgctttgatgatgcagctagcaagagaactgaagacttag

SEQ ID NO: 133031 - DNA, 987 bp, Artificial Sequence
  derived and/or modified sequence
atgggcgtgctgcgggtgggcctgtgccccggcctgacagaggagatgatccagctgctgcggagccaccgcatcaagacagtggtggacctggtgtctgctgacctggaggaggtggcccagaagtgtggcctgagctacaaggccctggtggccctgcggcgggtgctgctggcccagttcagcgccttccctgtgaatggagctgacctgtatgaggagctgaagaccagcacagccatcctgagcacaggcatcggccgcatccggctgtctggaaatgcccgctggctgatgcccaaggtgacagaaattgtgggcggccctggcagcggcaagacccaggtgtgcctgtgcatggccgccaacgtggcccacggcctgcagcagaatgtgctgtatgtggacagcaatggaggcctgacagccagccggctgctgcagctgctgcaggccaagacccaggatgaggaggagcaggccgaggccctgcggcgcatccaggtggtgcacgcctttgacatcttccagatgctggatgtgctgcaggagctgcggggcaccgtggcccagcaggtgacaggcagcagcggcaccgtgaaggtggtggtggtggacagcgtgacagctgtggtgagccccctgctgggcggccagcagcgggagggcctggccctgatgatgcagctggcccgggagctgaagaccctggcccgggacctgggcatggctgtggtggtgaccaaccacatcacccgggaccgggacagcggccgcctgaagccagccctgggccgctcctggagctttgtgcccagcacccgcatcctgctggacaccattgaaggagctggggccagcggcggccgcaggatggcctgcctggccaagagcagccggcagcccaccggcttccaggagatggtggacatcggcacctggggcaccagcgagcagagcgccaccctgcagggcgaccagacctag

SEQ ID NO: 133032 - DNA, 987 bp, Artificial Sequence
  derived and/or modified sequence
atgggcgtgctgcgggtgggcctgtgccccggcctgacagaggagatgatccagctgctgcggagccaccgcatcaagacagtggtggacctggtgtctgctgacctggaggaggtggcccagaagtgtggcctgagctacaaggccctggtggccctgcggcgggtgctgctggcccagttcagcgccttccctgtgaatggagctgacctgtatgaggagctgaagaccagcacagccatcctgagcacaggcatcggcagcctggacaagctgctggatgctggcctgtacacaggagaggtgacagaaattgtgggcggccctggcagcggcaagacccaggtgtgcctgtgcatggccgccaacgtggcccacggcctgcagcagaatgtgctgtatgtggacagcaatggaggcctgacagccagccggctgctgcagctgctgcaggccaagacccaggatgaggaggagcaggccgaggccctgcggcgcatccaggtggtgcacgcctttgacatcttccagatgctggatgtgctgcaggagctgcggggcaccgtggcccagcaggtgacaggcagcagcggcaccgtgaaggtggtggtggtggacagcgtgacagctgtggtgagccccctgctgggcggccagcagcgggagggcctggccctgatgatgcagctggcccgggagctgaagaccctggcccgggacctgggcatggctgtggtggtgaccaaccacatcacccgggaccgggacagcggccgcctgaagccagccctgggccgctcctggagctttgtgcccagcacccgcatcctgctggacaccattgaaggagctggggccagcggcggccgcaggatggcctgcctggccaagagcagccggcagcccaccggcttccaggagatggtggacatcggcacctggggcaccagcgagcagagcgccaccctgcagggcgaccagacctag

SEQ ID NO: 133033 - DNA, 357 bp, Artificial Sequence
  derived and/or modified sequence
atgggcgtgctgcgggtgggcctgtgccccggcctgacagaggagatgatccagctgctgcggagccaccgcatcaagacagtggtggacctggtgtctgctgacctggaggaggtggcccagaagtgtggcctgagctacaaggccctggtggccctgcggcgggtgctgctggcccagttcagcgccttccctgtgaatggagctgacctgtatgaggagctgaagaccagcacagccatcctgagcacaggcatcggcagacatggaggccgcacccaggtgggcacctgggaggactgcagctgcctgcggagcccccagggcgaccggggcgtgggcagcggcatgctgtag

SEQ ID NO: 133034 - DNA, 852 bp, Artificial Sequence
  derived and/or modified sequence
atgggcgtgctgcgggtgggcctgtgccccggcctgacagaggagatgatccagctgctgcggagccaccgcatcaagacagtggtggacctggtgtctgctgacctggaggaggtggcccagaagtgtggcctgagctacaaggccctggtggccctgcggcgggtgctgctggcccagttcagcgccttccctgtgaatggagctgacctgtatgaggagctgaagaccagcacagccatcctgagcacaggcatcggcagcctggacaagctgctggatgctggcctgtacacaggagaggtgacagaaattgtgggcggccctggcagcggcaagacccaggccgaggccctgcggcgcatccaggtggtgcacgcctttgacatcttccagatgctggatgtgctgcaggagctgcggggcaccgtggcccagcaggtgacaggcagcagcggcaccgtgaaggtggtggtggtggacagcgtgacagctgtggtgagccccctgctgggcggccagcagcgggagggcctggccctgatgatgcagctggcccgggagctgaagaccctggcccgggacctgggcatggctgtggtggtgaccaaccacatcacccgggaccgggacagcggccgcctgaagccagccctgggccgctcctggagctttgtgcccagcacccgcatcctgctggacaccatcgagggcgctggggccagcggcggccgcaggatggcctgcctggccaagagcagccggcagcccaccggcttccaggagatggtggacatcggcacctggggcaccagcgagcagagcgccaccctgcagggcgaccagacctag

SEQ ID NO: 133035 - DNA, 648 bp, Artificial Sequence
  derived and/or modified sequence
atggtgatggccgccctgcccttcagcgaggacctgaagatgccagacacctgtgtgctgccccactgccctgggaaggagaacaaggatgtggtggacctggtgtctgctgacctggaggaggtggcccagaagtgtggcctgagctacaaggccctggtggccctgcggcgggtgctgctggcccagttcagcgccttccctgtgaatggagctgacctgtatgaggagctgaagaccagcacagccatcctgagcactggaattggcagcctggacaagctgctggatgctggcctgtacaccggggaggtgacagagatcgtgggcggccctggcagcggcaagacccaggtgtgcctgtgcatggccgccaacgtggcccacggcctgcagcagaatgtgctgtatgtggacagcaatggaggcctgacagccagccggctgctgcagctgctgcaggccaagacccaggatgaggaggagcaggccgaggccctgcggcgcatccaggtggtgcacgcctttgacatcttccagatgctggatgtgctgcaggagctgcggggcaccgtggcccagcaggacggcatccctgagcacctgaaccacatcccccactgcctgcacgtgcacctgccctgctag

SEQ ID NO: 133036 - DNA, 711 bp, Artificial Sequence
  derived and/or modified sequence
atgggcgtgctgcgggtgggcctgtgccccggcctgacagaggagatgatccagctgctgcggagccaccgcatcaagacagtggtggacctggtgtctgctgacctggaggaggtggcccagaagtgtggcctgagctacaaggccctggtggccctgcggcgggtgctgctggcccagttcagcgccttccctgtgaatggagctgacctgtatgaggagctgaagaccagcacagccatcctgagcacaggcatcggcagcctggacaagctgctggatgctggcctgtacacaggagaggtgacagaaattgtgggcggccctggcagcggcaagacccaggtgtgcctgtgcatggccgccaacgtggcccacggcctgcagcagaatgtgctgtatgtggacagcaatggaggcctgacagccagccggctgctgcagctgctgcaggccaagacccaggatgaggaggagcaggccgaggccctgcggcgcatccaggtggtgcacgcctttgacatcttccagatgctggatgtgctgcaggagctgcggggcaccgtggcccagcaggtgacaggcagcagcggcaccgtgaaggtggtggtggtggacagcgtgacagctgtggtgagccccctgctgggcggccagcagcgggagggcctggccctgatgatgcagctggcccgggagctgaagacctag

SEQ ID NO: 133037 - DNA, 987 bp, Artificial Sequence
  derived and/or modified sequence
atgggcgtgctgcgggtgggcctgtgccccggcctgaccgaggagatgatccagctgctgcgttcgcacaggatcaagactgtggtggacctggtaagcgctgatctcgaggaagtggctcagaaatgcggcctgtcctataaggccttggtagctctccgacgcgtgctgcttgcccaattctccgcctttcctgttaatggtgctgacctttatgaggagttaaagacatccacggctatcctgtcgactggcatcgggagaatccgcctgtcagggaacgcccgttggctgatgccaaaggtgacggagatcgtaggagggccaggctcagggaagactcaggtgtgtctttgcatggctgcaaatgtggcccacggactgcagcaaaacgtactctacgtcgattccaacggaggcctcaccgcgagtcgcctcctgcagctgctgcaggctaaaactcaggatgaggaagagcaggctgaggccctgcgcaggatacaagttgtacacgcattcgacattttccagatgttagatgtcctccaagagctaagaggaactgtggcacagcaagtgaccggcagctccgggaccgtgaaggtggttgttgtagactctgtgacagcagttgtttcccctctgctcggcggtcagcaacgcgagggattagccttgatgatgcagctcgcccgagagctcaagacacttgctcgggatctgggcatggctgtcgtggtcaccaatcacatcacaagggatagagatagcgggcgactgaaaccggcactgggcaggtcgtggagcttcgtgccttcaactaggatcttactagacacaatcgagggcgcgggtgcctcgggcggccggagaatggcctgcctggcaaagtctagtcgccagcctaccggctttcaggaaatggtggacattgggacgtggggaactagcgagcagtcagctacgctgcagggagatcaaacatag

SEQ ID NO: 133038 - DNA, 987 bp, Artificial Sequence
  derived and/or modified sequence
atgggcgtgctgcgggtgggcctgtgccccggcctgaccgaggagatgatccagctgctgcggtcacaccgcatcaaaactgtggtggatttggtgagtgccgatcttgaagaagtggcgcaaaaatgcgggctgtcctataaagctctcgttgctctcagacgagttctgctcgcccagtttagcgctttccccgttaacggagccgacctgtacgaggagctgaaaacttccacggctattttatccaccggcatcgggagcttggacaaactcctagatgctggcctttataccggtgaggtaaccgaaatcgtgggcggccctggctctggaaagacacaggtgtgcttgtgcatggccgccaatgttgcacatgggctccaacagaatgtgttgtacgtggacagcaacggtggccttacagcctcacgtctcctccagctgctccaagcaaaaacacaggacgaggaagaacaggcagaggcactgaggaggattcaagttgttcatgcttttgatatcttccagatgctggatgtgttgcaggagcttcgcggaacagtggcccagcaggttaccggtagttctggcactgtgaaggtggttgtggtggacagtgtcactgcagtggtgagtccactgctgggaggccagcagagggagggccttgccttaatgatgcaactggctcgcgagctgaaaacactggctcgggacttgggaatggccgtcgtagtgactaaccacatcactcgagatcgggatagcggcaggctgaaacccgccctgggcagatcctggagcttcgtgcccagcacccggatattgctggacacaatagagggtgccggcgccagtggaggcagaaggatggcctgcctcgctaagtcctctcggcaaccgacagggttccaggagatggtggacatagggacatggggaacaagcgagcagagtgcaactcttcaaggcgaccaaacgtag

SEQ ID NO: 133039 - DNA, 357 bp, Artificial Sequence
  derived and/or modified sequence
atgggcgtgctgcgggtgggcctgtgccccggcctgaccgaggagatgattcagctgctgcgctctcaccgtattaaaacagtggttgatctggtgtcggcggatttggaggaggtcgcccagaagtgcggcttgagttataaggcactggtggcactgagaagggtcctcttagcacagtttagtgcgtttcccgtgaacggggccgacctgtacgaagaacttaaaaccagcactgctatcctgtctaccggaattggacgacatggtggtcgcacacaggtgggaacttgggaggattgcagttgtcttcgaagccctcagggcgacagaggtgtgggttccgggatgctgtag

SEQ ID NO: 133040 - DNA, 852 bp, Artificial Sequence
  derived and/or modified sequence
atgggcgtgctgcgggtgggcctgtgccccggcctgaccgaggagatgattcagctactgcgatctcatcgcatcaagactgttgtggaccttgtgagtgccgatttagaagaggtcgctcagaagtgcgggctgagttacaaggcactggtcgctcttcggagagtgcttctggcccagttcagtgccttccccgtcaatggtgccgacttatacgaagagttgaagacatccacggccattttgtctactggtatagggagtctggataagctcctggatgctggactatatacaggtgaggtgacagagatcgttgggggaccaggcagcgggaagacacaagccgaggctctgagaagaatacaggttgtccacgcattcgacatctttcagatgctcgacgttctgcaagagctgcggggaaccgtggcccagcaggtcactggctcttcgggcaccgtaaaagttgtagtggttgatagcgtaacagctgtggtgtccccgttgctggggggacagcagagggaaggacttgcccttatgatgcagcttgcccgagaattgaaaacactcgcacgggacttgggaatggctgtcgtggtaaccaatcacatcacgagggatcgggatagcggacgactcaagcctgctcttggccgaagttggtcattcgtgcccagtacaagaatattattggacaccatcgagggtgccggagcaagcggggggcgaagaatggcatgccttgctaagtcttcccggcagcctactggcttccaggaaatggtagacatcgggacatggggcacaagcgaacaatcagccacactccaaggggatcagacctag

SEQ ID NO: 133041 - DNA, 648 bp, Artificial Sequence
  derived and/or modified sequence
atggtgatggccgccctgcccttcagcgaggacctgaagatgcccgacacctgcgtgttaccccactgcccaggaaaggaaaataaggatgtggtggatctggtatccgcagacctagaggaggtcgcccagaagtgcggcttaagctacaaagctctcgttgcactgcgtcgcgtcctgctcgctcagttttcggctttcccagtaaacggcgcagatctgtacgaagagttgaaaacaagtaccgctatcttgtctacgggtattggctccctcgataaactgctcgacgccggtctgtacactggggaagtaaccgagatcgttggcgggccaggatccggcaagacgcaggtctgcctttgcatggcagcgaacgttgctcacggcctgcagcaaaacgtgctttatgtggactcaaacgggggactgactgcttcgcgactgctgcagttgctgcaagctaagacccaagacgaagaggagcaggcagaggctctacggcgcatacaggttgtgcacgcatttgacatatttcagatgctcgatgtgttgcaggagctgagaggcaccgtggcccaacaagacgggattcctgagcacctgaatcacattccccactgccttcacgtgcatctaccctgctag

SEQ ID NO: 133042 - DNA, 711 bp, Artificial Sequence
  derived and/or modified sequence
atgggcgtgctgcgggtgggcctgtgccccggcctgaccgaggagatgattcagctactgagaagccacaggatcaagacggtcgtcgatttagtaagcgccgacctggaagaagtggcccaaaagtgcggcctgtcatacaaagcactggtggccctccgaagggttctcctggcccaattctcagcgtttcctgtgaatggcgccgatctgtatgaggagcttaagactagcacagccatcctgtcaacaggcattggtagtttagataagctcctggatgccggcctctacacgggagaggtgacagaaatcgtagggggacctgggtcaggcaagacccaggtatgcttgtgtatggcggctaatgttgcacatggcctacagcaaaacgtgctttatgtagattccaacggaggtctcacagcttctcggctgctccagttgctgcaggcaaagactcaagatgaagaggagcaggccgaggccctgcgccgaatccaggtggtacatgcatttgacatcttccagatgctcgacgtcctgcaagagctgcgtgggaccgtcgctcagcaagttacaggcagttctggcactgtcaaggtggtggttgttgacagcgtgacagcggtagttagccccttattgggcgggcagcagagagagggtcttgccttaatgatgcaattggcccgcgagttaaagacttag

SEQ ID NO: 133043 - DNA, 987 bp, Artificial Sequence
  derived and/or modified sequence
atgggcgtcctgcgcgtcgggttgtgccccggtcttactgaggaaatgatccagctgttacggagccacagaatcaagacagtcgtcgaccttgtcagtgccgatctggaagaggtggcgcaaaaatgcggtctgtcctataaggctcttgttgccctgaggcgcgtactgctcgcacagttttccgcgttccctgtcaatggggctgacctctacgaggaactaaaaacctctactgcaattctctcaacaggcatcggtcggatcagactcagtggcaatgccagatggctgatgccaaaggttacagagattgtggggggacccggttccggtaaaacgcaggtgtgtctgtgcatggccgcaaacgtggctcatggcttgcagcagaatgttctgtatgtggactcgaatggagggctcaccgcgtcacggttattgcagcttctgcaggcgaaaacccaggatgaagaagagcaggccgaagctctaagacgcatccaggttgtgcacgcgttcgacatatttcagatgttagacgtgcttcaggaacttcgtgggaccgtcgctcagcaggtgaccggctcctccggcaccgtgaaggtggtggttgtcgactccgtaaccgcagtggtcagtccactgctgggaggacagcagcgagaagggctagcgttgatgatgcagttggcccgagaacttaaaaccctagcacgtgacctgggcatggctgtagtagtgacaaatcatataacaagggaccgggactctggtcgcctcaagccagcactgggcaggtcctggtcttttgtcccaagcacacggatcttgttggacaccattgaaggggcaggggcatctggaggtcgcaggatggcttgtctcgctaagagctcccggcagccgaccggcttccaggaaatggtggacattggcacatggggaacttccgagcaaagcgccactctgcagggggaccaaacctag

SEQ ID NO: 133044 - DNA, 987 bp, Artificial Sequence
  derived and/or modified sequence
atgggggttttgcgcgtggggctgtgtcccggtctcacggaggaaatgatacagctcttgcgcagccatcgaatcaaaacagtagtggacctggtgagcgccgacctggaagaggtggctcagaagtgcggcctgagctacaaggcactggtggccctgaggagggtgttgctcgcacaatttagcgctttccctgtgaatggcgctgacctgtacgaagaacttaaaacctccactgccatcctcagtacgggaataggctcactcgacaaactgcttgacgccggtctctacaccggcgaagtgacggaaattgtgggcggacccggtagcggcaagacccaggtatgtttatgcatggccgcaaacgttgcacacggcttgcagcagaatgtactgtatgtggatagcaacggcggtcttacagcttctagactgctgcaacttcttcaggcaaaaacacaggatgaagaagagcaggcggaagcactgaggagaattcaggtggtgcatgctttcgatatattccagatgctggatgtgcttcaggaattacgaggcaccgtggctcagcaggtgaccggctcttccggcacggtgaaagtggtcgttgtggacagcgtgactgccgtggtctctcccctgcttggtggacagcagcgagaaggactcgctctgatgatgcagctggcaagggaactcaaaactctcgcacgagacctgggcatggctgtagtggtcacaaatcacattactagggacagagatagcggcaggctcaagcccgcactaggacgttcgtggtcatttgtcccaagtacaaggatcctgttagataccatcgagggcgcaggcgctagcggaggacggcgaatggcatgcctcgccaagagctccaggcaacctacaggatttcaggaaatggtggacataggaacgtgggggacatcagaacagtcagcgacattgcaaggtgatcaaacttag

SEQ ID NO: 133045 - DNA, 357 bp, Artificial Sequence
  derived and/or modified sequence
atgggagtcttgagggtgggactgtgccctggccttaccgaggagatgattcaactcctgcggagccacagaattaaaaccgtggtcgatctcgtctctgccgacctggaggaggtggcccagaaatgcgggctgtcatataaagcacttgtggcactaaggcgcgtgctgttggctcaattttccgcgtttccagttaatggggctgacctctacgaggaattaaaaacgtcaacagccattctgagcaccggaattggacgtcatggcggtcgtactcaggtgggtacgtgggaagattgtagttgcctccgtagtccccagggcgataggggcgtgggaagcggtatgctttag

SEQ ID NO: 133046 - DNA, 852 bp, Artificial Sequence
  derived and/or modified sequence
atgggcgtgctgagagttggcctgtgtcccggtttgaccgaggaaatgatccagctactgagatcccaccggatcaagacggtggtggatctagtttctgccgatctggaagaggtcgctcagaagtgcggattatcatataaagccctggtagctctgcgccgtgtgctcctggcacagttctctgccttcccagtgaacggggcagacttgtacgaggaactaaagacatccacagcaatcctcagcaccggcataggttcacttgacaagttactggacgcgggtctgtacaccggagaggttacggagatcgtgggaggaccgggatcggggaagacacaagccgaagcattgcggagaattcaggtcgtacatgcatttgatatctttcaaatgttggatgttctgcaggaactgagaggtactgtagcccaacaggttacaggaagctctggtacagtgaaagtggtggtagtagactcggtcactgctgtggtgtccccactgttagggggacagcagagggagggcctggccctgatgatgcaactggctcgagagctgaaaacacttgcaagggacttgggcatggcagtggttgtgactaatcacattactcgcgacagagacagcgggcgactgaagcctgcccttggcagatcgtggagctttgtgccaagtactcgaattctgctcgacaccatcgaaggcgcaggggctagcggtggacgacgaatggcctgcctggctaaatcttcgcgccaaccaactggcttccaggaaatggttgacatagggacttggggcacatctgagcagtccgcgactttacaaggcgaccagacttag

SEQ ID NO: 133047 - DNA, 648 bp, Artificial Sequence
  derived and/or modified sequence
atggtgatggcggcactccccttcagcgaggacctgaagatgccagatacatgcgtactgccccactgccctgggaaggaaaacaaggatgtggtcgacctggttagtgcggatctagaagaggttgctcaaaagtgcggactgagctacaaagcactggtggccctgcggagagtcctgctcgcccagttttccgccttcccagttaacggggctgacctctatgaagaactgaaaaccagcactgccatattgtcaactggcataggctcacttgacaagctcttggacgcaggactttataccggcgaggtgactgagatagttggagggcctgggtcaggaaaaacacaggtgtgtctttgtatggccgcaaatgtagcacatggcctgcaacagaacgtgctgtatgtagatagtaacggaggcctgacagctagcagactgttacagctcctgcaggccaagacccaagacgaggaggaacaggctgaagcactgcggagaattcaggttgtgcacgccttcgacatcttccagatgttggacgtactgcaggagctgcggggaactgttgcccagcaagacggcattcccgagcatctgaaccatattccacactgtctgcatgttcatctgccatgctag

SEQ ID NO: 133048 - DNA, 711 bp, Artificial Sequence
  derived and/or modified sequence
atgggcgttctgagggtgggtctttgcccaggtcttactgaggaaatgattcagctcctgcggtcccaccgaattaaaactgttgtggaccttgtgagcgccgacctagaggaggtggctcaaaaatgcgggctatcctacaaagcgctggtagctctgcggagagtgctgctagcacagttcagtgcttttccggtgaacggagcggatctgtatgaagaactcaagacctcaacagccattttgtctacagggatcggctcactggataaattactcgacgcaggcctttacaccggggaggtgaccgagatcgtcggaggtccagggagcggaaagacccaggtctgcttgtgtatggctgctaacgtggcccatgggctgcagcaaaacgtcttgtacgtcgacagcaatggcggtttgactgcctccaggctgctacaactgctccaggcgaagacacaggacgaagaagaacaagctgaggcattacgaagaatccaggtggtccacgctttcgatattttccaaatgctcgatgtcttgcaggagctgcggggaaccgtggctcaacaggttacaggaagctccggcaccgttaaggttgtcgtcgtggattctgtgacggccgtggtgtcacccttactcggcggacaacagcgagagggacttgcccttatgatgcagctagctcgagagctgaaaacatag

SEQ ID NO: 133049 - DNA, 2399 bp, Artificial Sequence
  derived and/or modified sequence
ctggaacccggaagcggcagcgcggcgcgacccggcgggcgggctctgggcgcgggaatcccggcggatcccgggcgggcggatgacccccagccctacccttggtgccgcctcctcctctctcctttctcctccggcagccagcgcgcctgtgtcctctctaggaaggggtaggggaggggcgtctggagaggaccccccgcgaatgcccacgtgacgtgcagtccccctggggctgttccggcctgcggggaacatgggcgtgctcagggtcggactgtgccctggccttaccgaggagatgatccagcttctcaggagccacaggatcaagacagtggtggacctggtttctgcagacctggaagaggtagctcagaaatgtggcttgtcttacaaggccctggttgccctgaggcgggtgctgctggctcagttctcggctttccccgtgaatggcgctgatctctacgaggaactgaagacctccactgccatcctgtccactggcattggcagaataagactgtcaggaaatgcacggtggctcatgcctaaagtgactgaaattgtaggaggcccaggtagcggcaaaactcaggtatgtctctgtatggcagcaaatgtggcccatggcctgcagcaaaacgtcctatatgtagattccaatggagggctgacagcttcccgcctcctccagctgcttcaggctaaaacccaggatgaggaggaacaggcagaagctctccggaggatccaggtggtgcatgcatttgacatcttccagatgctggatgtgctgcaggagctccgaggcactgtggcccagcaggtgactggttcttcaggaactgtgaaggtggtggttgtggactcggtcactgcggtggtttccccacttctgggaggtcagcagagggaaggcttggccttgatgatgcagctggcccgagagctgaagaccctggcccgggaccttggcatggcagtggtggtgaccaaccacataactcgagacagggacagcgggaggctcaaacctgccctcggacgctcctggagctttgtgcccagcactcggattctcctggacaccatcgagggagcaggagcatcaggcggccggcgcatggcgtgtctggccaaatcttcccgacagccaacaggtttccaggagatggtagacattgggacctgggggacctcagagcagagtgccacattacagggtgatcagacatgacctgtgctgttgtttgggaaacagggaagcattggggacccctcccaacttttcttcccagtaacgcctgctgtttactgccacctggcactggtgactacagacgttctcaggctggccagaagagacatcttgggttccttggcctcactctctgtaagcatataaaccacaggcgaaagaggatgctgcattgcgaggacccagaaattcatactggtgccacgtttccttcccttatttctaacgtgtatgtttctggtggaaaccaagttcaccctggctgggagcatctctgatgaggcatgctggcgactggatggataatcctgtgcatcaccattgtgtcctgtgctccctcctagcgcagtggccaagccgggaaagcctctaacttgcctttgctgctgctgccttttttttcttttgtctctgcctttccatttgttagatgggggcccactcttccttagctctgtctctgagttactgggtggaaataagcttataaatgaaatactcttcttcatctctgttttgctcttaaaaatataaaaaggcaattccccgagccctagagccacctgatttccccttagaaggctgtttttcagtttcccccagtgaggcccaaagaacagtttattcctcctttcctcttgctgatttggtttcagacctgcctgcatcaccatgactaggtgagaacgtgtgggctcgctgcagttccagggatataatttaacagaaagggagggtatgacctgctcctggtgaatccagccactcatttaatatgcatggtgccctgtggggcccctccacagtacagcataaccagaggtgctgaaccatggccttgcccataaacagacagaggagaatttgcacagtaaatagagccagctgggaaaattgatgctgacgtaaataatacatggcaaatctagtcctttatgcagaaattcattgctggtggctccaagatgcaatataattacacctctcttcctgccagctgtaccacagctagtgccctagtgtatgaaataatccctctgtctttcaccagcactgtggccatccgtctgagagccatgaccctggctgggaggggacgaagacaccagggaatggaaaataaaaggaaaagtac

SEQ ID NO: 133050 - DNA, 2404 bp, Artificial Sequence
  derived and/or modified sequence
ctggaacccggaagcggcagcgcggcgcgacccggcgggcgggctctgggcgcgggaatcccggcggatcccgggcgggcggatgacccccagccctacccttggtgccgcctcctcctctctcctttctcctccggcagccagcgcgcctgtgtcctctctaggaaggggtaggggaggggcgtctggagaggaccccccgcgaatgcccacgtgacgtgcagtccccctggggctgttccggcctgcggggaacatgggcgtgctcagggtcggactgtgccctggccttaccgaggagatgatccagcttctcaggagccacaggatcaagacagtggtggacctggtttctgcagacctggaagaggtagctcagaaatgtggcttgtcttacaaggccctggttgccctgaggcgggtgctgctggctcagttctcggctttccccgtgaatggcgctgatctctacgaggaactgaagacctccactgccatcctgtccactggcattggcagtcttgataaactgcttgatgctggtctctatactggagaagtgactgaaattgtaggaggcccaggtagcggcaaaactcaggtatgtctctgtatggcagcaaatgtggcccatggcctgcagcaaaacgtcctatatgtagattccaatggagggctgacagcttcccgcctcctccagctgcttcaggctaaaacccaggatgaggaggaacaggcagaagctctccggaggatccaggtggtgcatgcatttgacatcttccagatgctggatgtgctgcaggagctccgaggcactgtggcccagcaggtgactggttcttcaggaactgtgaaggtggtggttgtggactcggtcactgcggtggtttccccacttctgggaggtcagcagagggaaggcttggccttgatgatgcagctggcccgagagctgaagaccctggcccgggaccttggcatggcagtggtggtgaccaaccacataactcgagacagggacagcgggaggctcaaacctgccctcggacgctcctggagctttgtgcccagcactcggattctcctggacaccatcgagggagcaggagcatcaggcggccggcgcatggcgtgtctggccaaatcttcccgacagccaacaggtttccaggagatggtagacattgggacctgggggacctcagagcagagtgccacattacagggtgatcagacatgacctgtgctgttgtttgggaaacagggaagcattggggacccctcccaacttttcttcccagtaacgcctgctgtttactgccacctggcactggtgactacagacgttctcaggctggccagaagagacatcttgggttccttggcctcactctctgtaagcatataaaccacaggcgaaagaggatgctgcattgcgaggacccagaaattcatactggtgccacgtttccttcccttatttctaacgtgtatgtttctggtggaaaccaagttcaccctggctgggagcatctctgatgaggcatgctggcgactggatggataatcctgtgcatcaccattgtgtcctgtgctccctcctagcgcagtggccaagccgggaaagcctctaacttgcctttgctgctgctgccttttttttcttttgtctctgcctttccatttgttagatgggggcccactcttccttagctctgtctctgagttactgggtggaaataagcttataaatgaaatactcttcttcatctctgttttgctcttaaaaatataaaaaggcaattccccgagccctagagccacctgatttccccttagaaggctgtttttcagtttcccccagtgaggcccaaagaacagtttattcctcctttcctcttgctgatttggtttcagacctgcctgcatcaccatgactaggtgagaacgtgtgggctcgctgcagttccagggatataatttaacagaaagggagggtatgacctgctcctggtgaatccagccactcatttaatatgcatggtgccctgtggggcccctccacagtacagcataaccagaggtgctgaaccatggccttgcccataaacagacagaggagaatttgcacagtaaatagagccagctgggaaaattgatgctgacgtaaataatacatggcaaatctagtcctttatgcagaaattcattgctggtggctccaagatgcaatataattacacctctcttcctgccagctgtaccacagctagtgccctagtgtatgaaataatccctctgtctttcaccagcactgtggccatccgtctgagagccatgaccctggctgggaggggacgaagacaccagggaatggaaaataaaaggaaaagtacagaaa

SEQ ID NO: 133051 - DNA, 613 bp, Artificial Sequence
  derived and/or modified sequence
ctggaacccggaagcggcagcgcggcgcgacccggcgggcgggctctgggcgcgggaatcccggcggatcccgggcgggcggatgacccccagccctacccttggtgccgcctcctcctctctcctttctcctccggcagccagcgcgcctgtgtcctctctaggaaggggtaggggaggggcgtctggagaggaccccccgcgaatgcccacgtgacgtgcagtccccctggggctgttccggcctgcggggaacatgggcgtgctcagggtcggactgtgccctggccttaccgaggagatgatccagcttctcaggagccacaggatcaagacagtggtggacctggtttctgcagacctggaagaggtagctcagaaatgtggcttgtcttacaaggccctggttgccctgaggcgggtgctgctggctcagttctcggctttccccgtgaatggcgctgatctctacgaggaactgaagacctccactgccatcctgtccactggcattggcagacatggagggcgcactcaagtgggaacctgggaggactgcagctgcctcaggtccccgcagggagatcgtggagtggggtcaggaatgctctga

SEQ ID NO: 133052 - DNA, 2264 bp, Artificial Sequence
  derived and/or modified sequence
ctggaacccggaagcggcagcgcggcgcgacccggcgggcgggctctgggcgcgggaatcccggcggatcccgggcgggcggatgacccccagccctacccttggtgccgcctcctcctctctcctttctcctccggcagccagcgcgcctgtgtcctctctaggaaggggtaggggaggggcgtctggagaggaccccccgcgaatgcccacgtgacgtgcagtccccctggggctgttccggcctgcggggaacatgggcgtgctcagggtcggactgtgccctggccttaccgaggagatgatccagcttctcaggagccacaggatcaagacagtggtggacctggtttctgcagacctggaagaggtagctcagaaatgtggcttgtcttacaaggccctggttgccctgaggcgggtgctgctggctcagttctcggctttccccgtgaatggcgctgatctctacgaggaactgaagacctccactgccatcctgtccactggcattggcagtcttgataaactgcttgatgctggtctctatactggagaagtgactgaaattgtaggaggcccaggtagcggcaaaactcaggcagaagctctccggaggatccaggtggtgcatgcatttgacatcttccagatgctggatgtgctgcaggagctccgaggcactgtggcccagcaggtgactggttcttcaggaactgtgaaggtggtggttgtggactcggtcactgcggtggtttccccacttctgggaggtcagcagagggaaggcttggccttgatgatgcagctggcccgagagctgaagaccctggcccgggaccttggcatggcagtggtggtgaccaaccacataactcgagacagggacagcgggaggctcaaacctgccctcggacgctcctggagctttgtgcccagcactcggattctcctggacaccatcgagggagcaggagcatcaggcggccggcgcatggcgtgtctggccaaatcttcccgacagccaacaggtttccaggagatggtagacattgggacctgggggacctcagagcagagtgccacattacagggtgatcagacatgacctgtgctgttgtttgggaaacagggaagcattggggacccctcccaacttttcttcccagtaacgcctgctgtttactgccacctggcactggtgactacagacgttctcaggctggccagaagagacatcttgggttccttggcctcactctctgtaagcatataaaccacaggcgaaagaggatgctgcattgcgaggacccagaaattcatactggtgccacgtttccttcccttatttctaacgtgtatgtttctggtggaaaccaagttcaccctggctgggagcatctctgatgaggcatgctggcgactggatggataatcctgtgcatcaccattgtgtcctgtgctccctcctagcgcagtggccaagccgggaaagcctctaacttgcctttgctgctgctgccttttttttcttttgtctctgcctttccatttgttagatgggggcccactcttccttagctctgtctctgagttactgggtggaaataagcttataaatgaaatactcttcttcatctctgttttgctcttaaaaatataaaaaggcaattccccgagccctagagccacctgatttccccttagaaggctgtttttcagtttcccccagtgaggcccaaagaacagtttattcctcctttcctcttgctgatttggtttcagacctgcctgcatcaccatgactaggtgagaacgtgtgggctcgctgcagttccagggatataatttaacagaaagggagggtatgacctgctcctggtgaatccagccactcatttaatatgcatggtgccctgtggggcccctccacagtacagcataaccagaggtgctgaaccatggccttgcccataaacagacagaggagaatttgcacagtaaatagagccagctgggaaaattgatgctgacgtaaataatacatggcaaatctagtcctttatgcagaaattcattgctggtggctccaagatgcaatataattacacctctcttcctgccagctgtaccacagctagtgccctagtgtatgaaataatccctctgtctttcaccagcactgtggccatccgtctgagagccatgaccctggctgggaggggacgaagacaccagggaatggaaaataaaaggaaaagtac

SEQ ID NO: 133053 - DNA, 986 bp, Artificial Sequence
  derived and/or modified sequence
gatttgaggctactgctgccaggctagctatgtggctggccagaccaagggccagtgtgactgtgaagcagcatcatgagaggggtaaaaccaaggaacagactgcatgagcccttgggccccttccagctctaatactccatggtgatggcagccctgcccttctctgaagatctcaaaatgcctgacacctgtgtccttccgcactgccctgggaaggagaataaggatgtggtggacctggtttctgcagacctggaagaggtagctcagaaatgtggcttgtcttacaaggccctggttgccctgaggcgggtgctgctggctcagttctcggctttccccgtgaatggcgctgatctctacgaggaactgaagacctccactgccatcctgtccactggcattggcagtcttgataaactgcttgatgctggtctctatactggagaagtgactgaaattgtaggaggcccaggtagcggcaaaactcaggtatgtctctgtatggcagcaaatgtggcccatggcctgcagcaaaacgtcctatatgtagattccaatggagggctgacagcttcccgcctcctccagctgcttcaggctaaaacccaggatgaggaggaacaggcagaagctctccggaggatccaggtggtgcatgcatttgacatcttccagatgctggatgtgctgcaggagctccgaggcactgtggcccagcaggatggaattcccgagcacctaaatcacatacctcattgtttacatgttcatcttccctgctgaacagtaaagccccctgagtggaaggatcatgtcatatttatgtctgcattccccactagtttctaggggttaagaatctgagactaggagcggtggctcacgcctaaaatcccaatgctttggaaggccaaggcaggaggatcacttgagcccaggagttcaggaccagcctgggcagcatagcaagaccctgtctt

SEQ ID NO: 133054 - DNA, 847 bp, Artificial Sequence
  derived and/or modified sequence
cggtgtgtgtgttgcggcagaagccagcgcgcctgtgtcctctctaggaaggggtaggggaggggcgtctggagaggaccccccgcgaatgcccacgtgacgtgcagtccccctggggctgttccggcctgcggggaacatgggcgtgctcagggtcggactgtgccctggccttaccgaggagatgatccagcttctcaggagccacaggatcaagacagtggtggacctggtttctgcagacctggaagaggtagctcagaaatgtggcttgtcttacaaggccctggttgccctgaggcgggtgctgctggctcagttctcggctttccccgtgaatggcgctgatctctacgaggaactgaagacctccactgccatcctgtccactggcattggcagtcttgataaactgcttgatgctggtctctatactggagaagtgactgaaattgtaggaggcccaggtagcggcaaaactcaggtatgtctctgtatggcagcaaatgtggcccatggcctgcagcaaaacgtcctatatgtagattccaatggagggctgacagcttcccgcctcctccagctgcttcaggctaaaacccaggatgaggaggaacaggcagaagctctccggaggatccaggtggtgcatgcatttgacatcttccagatgctggatgtgctgcaggagctccgaggcactgtggcccagcaggtgactggttcttcaggaactgtgaaggtggtggttgtggactcggtcactgcggtggtttccccacttctgggaggtcagcagagggaaggcttggccttgatgatgcagctggcccgagagctgaagacc

SEQ ID NO: 133055 - protein, 648 aa, Artificial Sequence [sequence omitted]

SEQ ID NO: 133056 - protein, 668 aa, Artificial Sequence
  derived and/or modified sequence
MEHIQGAWKTISNGFGFKDAVFDGSSCISPTIVQQFGYQRRASDDGKLTDPSKTSNTIRVFLPNKQRTVVNVRNGMSLHDCLMKALKVRGLQPECCAVFRLLHEHKGKKARLDWNTDAASLIGEELQVDFLDHVPLTTHNFARKTFLKLAFCDICQKFLLNGFRCQTCGYKFHEHCSTKVPTMCVDWSNIRQLLLFPNSTIGDSGVPALPSLTMRRMRESVSRMPVSSQHRYSTPHAFTFNTSSPSSEGSLSQRQRSTSTPNVHMVSTTLPVDSRMIENNNLSASPRAWSRRFCLRGRDAIRSHSESASPSALSSSPNNLSPTGWSQPKTPVPAQRERAPVSGTQEKNKIRPRGQRDSSYYWEIEASEVMLSTRIGSGSFGTVYKGKWHGDVAVKILKVVDPTPEQFQAFRNEVAVLRKTRHVNILLFMGYMTKDNLAIVTQWCEGSSLYKHLHVQETKFQMFQLIDIARQTAQGMDYLHAKNIIHRDMKSNNIFLHEGLTVKIGDFGLATVKSRWSGSQQVEQPTGSVLWMAPEVIRMQDNNPFSFQSDVYSYGIVLYELMTGELPYSHINNRDQIIFMVGRGYASPDLSKLYKNCPKAMKRLVADCVKKVKEERPLFPQILSSIELLQHSLPKINRSASEPSLHRAAHTEDINACTLTTSPRLPVF

SEQ ID NO: 133057 - DNA, 1947 bp, Artificial Sequence
  derived and/or modified sequence
atggagcacatccagggcgcctggaagaccatcagcaacggcttcggcttcaaggacgccgtgttcgacggcagcagctgcatcagccccaccatcgtgcagcagttcggctaccagagaagagccagcgacgacggcaagctgaccgaccccagcaagaccagcaacaccatcagagtgttcctgcccaacaagcagagaaccgtggtgaacgtgagaaacggcatgagcctgcacgactgcctgatgaaggccctgaaggtgagaggcctgcagcccgagtgctgcgccgtgttcagactgctgcacgagcacaagggcaagaaggccagactggactggaacaccgacgccgccagcctgatcggcgaggagctgcaggtggacttcctggaccacgtgcccctgaccacccacaacttcgccagaaagaccttcctgaagctggccttctgcgacatctgccagaagttcctgctgaacggcttcagatgccagacctgcggctacaagttccacgagcactgcagcaccaaggtgcccaccatgtgcgtggactggagcaacatcagacagctgctgctgttccccaacagcaccatcggcgacagcggcgtgcccgccctgcccagcctgaccatgagaagaatgagagagagcgtgagcagaatgcccgtgagcagccagcacagatacagcaccccccacgccttcaccttcaacaccagcagccccagcagcgagggcagcctgagccagagacagagaagcaccagcacccccaacgtgcacatggtgagcaccaccctgcccgtggacagcagaatgatcgaggacgccatcagaagccacagcgagagcgccagccccagcgccctgagcagcagccccaacaacctgagccccaccggctggagccagcccaagacccccgtgcccgcccagagagagagagcccccgtgagcggcacccaggagaagaacaagatcagacccagaggccagagagacagcagctactactgggagatcgaggccagcgaggtgatgctgagcaccagaatcggcagcggcagcttcggcaccgtgtacaagggcaagtggcacggcgacgtggccgtgaagatcctgaaggtggtggaccccacccccgagcagttccaggccttcagaaacgaggtggccgtgctgagaaagaccagacacgtgaacatcctgctgttcatgggctacatgaccaaggacaacctggccatcgtgacccagtggtgcgagggcagcagcctgtacaagcacctgcacgtgcaggagaccaagttccagatgttccagctgatcgacatcgccagacagaccgcccagggcatggactacctgcacgccaagaacatcatccacagagacatgaagagcaacaacatcttcctgcacgagggcctgaccgtgaagatcggcgacttcggcctggccaccgtgaagagcagatggagcggcagccagcaggtggagcagcccaccggcagcgtgctgtggatggcccccgaggtgatcagaatgcaggacaacaaccccttcagcttccagagcgacgtgtacagctacggcatcgtgctgtacgagctgatgaccggcgagctgccctacagccacatcaacaacagagaccagatcatcttcatggtgggcagaggctacgccagccccgacctgagcaagctgtacaagaactgccccaaggccatgaagagactggtggccgactgcgtgaagaaggtgaaggaggagagacccctgttcccccagatcctgagcagcatcgagctgctgcagcacagcctgcccaagatcaacagaagcgccagcgagcccagcctgcacagagccgcccacaccgaggacatcaacgcctgcaccctgaccaccagccccagactgcccgtgttctag

SEQ ID NO: 133058 - DNA, 2007 bp, Artificial Sequence
  derived and/or modified sequence
atggagcacatccagggcgcctggaagaccatcagcaacggcttcggcttcaaggacgccgtgttcgacggcagcagctgcatcagccccaccatcgtgcagcagttcggctaccagagaagagccagcgacgacggcaagctgaccgaccccagcaagaccagcaacaccatcagagtgttcctgcccaacaagcagagaaccgtggtgaacgtgagaaacggcatgagcctgcacgactgcctgatgaaggccctgaaggtgagaggcctgcagcccgagtgctgcgccgtgttcagactgctgcacgagcacaagggcaagaaggccagactggactggaacaccgacgccgccagcctgatcggcgaggagctgcaggtggacttcctggaccacgtgcccctgaccacccacaacttcgccagaaagaccttcctgaagctggccttctgcgacatctgccagaagttcctgctgaacggcttcagatgccagacctgcggctacaagttccacgagcactgcagcaccaaggtgcccaccatgtgcgtggactggagcaacatcagacagctgctgctgttccccaacagcaccatcggcgacagcggcgtgcccgccctgcccagcctgaccatgagaagaatgagagagagcgtgagcagaatgcccgtgagcagccagcacagatacagcaccccccacgccttcaccttcaacaccagcagccccagcagcgagggcagcctgagccagagacagagaagcaccagcacccccaacgtgcacatggtgagcaccaccctgcccgtggacagcagaatgatcgagaacaacaacctgagcgccagccccagagcctggagcagaagattctgcctgagaggcagagacgccatcagaagccacagcgagagcgccagccccagcgccctgagcagcagccccaacaacctgagccccaccggctggagccagcccaagacccccgtgcccgcccagagagagagagcccccgtgagcggcacccaggagaagaacaagatcagacccagaggccagagagacagcagctactactgggagatcgaggccagcgaggtgatgctgagcaccagaatcggcagcggcagcttcggcaccgtgtacaagggcaagtggcacggcgacgtggccgtgaagatcctgaaggtggtggaccccacccccgagcagttccaggccttcagaaacgaggtggccgtgctgagaaagaccagacacgtgaacatcctgctgttcatgggctacatgaccaaggacaacctggccatcgtgacccagtggtgcgagggcagcagcctgtacaagcacctgcacgtgcaggagaccaagttccagatgttccagctgatcgacatcgccagacagaccgcccagggcatggactacctgcacgccaagaacatcatccacagagacatgaagagcaacaacatcttcctgcacgagggcctgaccgtgaagatcggcgacttcggcctggccaccgtgaagagcagatggagcggcagccagcaggtggagcagcccaccggcagcgtgctgtggatggcccccgaggtgatcagaatgcaggacaacaaccccttcagcttccagagcgacgtgtacagctacggcatcgtgctgtacgagctgatgaccggcgagctgccctacagccacatcaacaacagagaccagatcatcttcatggtgggcagaggctacgccagccccgacctgagcaagctgtacaagaactgccccaaggccatgaagagactggtggccgactgcgtgaagaaggtgaaggaggagagacccctgttcccccagatcctgagcagcatcgagctgctgcagcacagcctgcccaagatcaacagaagcgccagcgagcccagcctgcacagagccgcccacaccgaggacatcaacgcctgcaccctgaccaccagccccagactgcccgtgttctag

SEQ ID NO: 133059 - DNA, 1947 bp, Artificial Sequence
  derived and/or modified sequence
atggagcacatccagggtgcttggaaaacgatttcaaatggcttcggattcaaggacgctgtctttgatggcagcagttgcatcagccccactatagtccagcagttcggctaccaaagacgcgcttctgacgacgggaaactaacagacccatctaagactagtaataccatccgagtgttcctgcccaacaagcaacgcaccgtggtgaatgtgcggaatggcatgagcctgcacgattgcctcatgaaggccttaaaggttaggggcctccagcctgagtgctgcgccgtgttccgcctccttcatgagcataaaggcaagaaagcgcgcctggactggaatacagacgccgcctctctcattggggaagagttgcaggtggatttcttggatcacgtgcctctgacgacacataactttgcacggaaaacatttttaaagcttgccttttgcgatatctgccagaagtttctgctcaacgggttccggtgccagacatgtgggtacaaatttcacgagcattgcagcaccaaggtgcccaccatgtgtgttgactggagcaacatccgacagcttctgcttttccccaattcaacaataggagatagtggcgtccccgctctgccctcccttacgatgagaaggatgcgagaatctgtctctagaatgccagtaagctctcagcaccgttatagcacaccacacgcctttactttcaatacctcgtctcccagcagcgaaggaagtctgtctcagcggcaaaggtccacctccacccctaatgtgcatatggtatctaccacccttccagtcgacagtcggatgatcgaggatgccatccggagtcattcagaatccgcctcaccctctgcgctctcaagcagccccaataacctctctcccaccggatggagccaaccgaagaccccagtgcccgctcaacgggagagggcacctgtgtccggaacacaagagaagaacaaaattcgtcctcgagggcagagagatagtagttactattgggagattgaagcatcagaagttatgctgagcacccggatcggcagcggctccttcggcactgtctataaagggaagtggcatggcgacgtggccgtcaagattttgaaagttgttgacccaaccccagagcagtttcaggccttccggaatgaagtcgccgtactcaggaagacacggcacgttaatatactcctgttcatgggctacatgacaaaagacaatctcgccatagtcacccagtggtgtgaaggtagctccctctataaacatctccatgtacaggagaccaaattccagatgttccaactgatcgatatcgcaagacagaccgcccaaggaatggactacctgcacgcaaagaacatcatccaccgggatatgaagtctaataacatcttccttcacgagggcttaacagtcaagatcggcgactttggcctggcaaccgttaaatccaggtggtctggctctcagcaggttgagcaacccactgggagcgttctgtggatggccccagaagtgatccgtatgcaagacaataatccatttagtttccagtcggatgtgtattcttatggcattgtcctgtacgagttgatgactggggagttaccgtactcccacatcaacaaccgcgaccagattattttcatggttggccgcggctatgcctcccctgatttgagcaaattgtacaagaactgcccaaaggctatgaagagattggtcgccgactgcgtaaagaaagtgaaggaagagagacctctgttccctcagattctgagcagcatcgaattgttgcagcactcactccccaagataaaccgctcggcctcagagccttctcttcaccgtgctgcccatactgaggacatcaatgcctgcacactcacaaccagccctaggctgcctgtgttttag

SEQ ID NO: 133060 - DNA, 2007 bp, Artificial Sequence
  derived and/or modified sequence
atggagcatatacagggcgcatggaaaactatttctaacgggttcggcttcaaagacgccgttttcgatggctcttcttgtattagcccaaccatcgtgcagcaattcggataccaacggagagcctcagacgatggtaaacttaccgacccttctaaaacctcaaacactattagagtgttcctgcccaacaagcagagaaccgtggtgaacgtgcggaacgggatgtcccttcacgattgtctgatgaaagccctgaaagttcgcgggctccagcccgagtgctgcgcagtgttcagacttctccatgagcataaggggaagaaggctcgcttggactggaataccgacgcagccagcttgatcggggaagagctccaggtcgattttctcgaccacgtgccgttgacaacccacaactttgcccggaaaaccttccttaaactggcattctgcgacatctgccagaagttcctgctgaatgggttcagatgccagacctgcggatataagttccacgaacattgctccaccaaagtgcccacaatgtgtgtggattggtcaaacattagacagctgcttctctttccgaattccaccattggagacagtggggtccccgcgctgccatctctaacaatgaggcggatgagagaatcagtgagcagaatgcctgtttcatcccaacataggtattcgactccgcatgccttcacatttaacactagcagcccgagttctgaagggtctctatctcagaggcagaggagtacaagcaccccgaatgtacacatggtcagcaccacgctgcctgtggatagtaggatgatagagaataacaatctatctgctagcccacgggcgtggagcagacggttttgcctccgtggtcgggacgctataaggtcccacagcgaaagcgcatcaccatctgccttgtcaagcagcccaaacaacctttctcctaccggctggtcacaacccaagactcccgtccctgcccagagagagagagcccccgttagcggaacacaagagaaaaataagattaggccacggggacaacgggactcatcctactactgggagatagaagcaagcgaggttatgctgtctacgcgaatcggcagcggcagctttggcactgtttataaaggaaaatggcatggtgatgtggcggtcaagattctcaaggtcgtcgacccgaccccggagcagtttcaggcttttcggaacgaagtcgccgtgctcaggaagacacgacacgttaatatcctcctgtttatgggatatatgaccaaggacaatttggcaatagttacccagtggtgcgaaggaagctctttatacaaacatctgcacgtgcaggagactaagtttcaaatgtttcagctgatagacatcgctaggcagaccgcccaggggatggactacctccatgctaaaaacatcatccaccgcgacatgaagtccaacaatatcttcctgcacgagggcctaacagtgaagatcggggatttcgggctggccacagtcaagtctaggtggagtggtagtcagcaagtggaacaacctactggctccgtgctttggatggctccagaagtcatccgaatgcaggacaacaacccattttcattccagtctgatgtttacagttatgggattgtgctctacgagcttatgactggtgagcttccttacagccacatcaacaatcgcgatcagatcatcttcatggtaggacggggatacgcaagcccggatctctccaagctatacaaaaattgcccaaaagctatgaagcgcctggttgctgattgtgtcaaaaaggttaaggaagagcggccattattccctcaaatcttgtcatccatagagcttctgcaacacagtctaccgaaaattaacagaagcgccagcgagcctagccttcatcgcgctgcccatacagaagacattaacgcctgtactctcaccaccagcccccggctaccggtgttttag

SEQ ID NO: 133061 - DNA, 1947 bp, Artificial Sequence
  derived and/or modified sequence
atggagcacatccagggcgcctggaagaccatcagcaatggatttggcttcaaggatgctgtgtttgatggcagcagctgcatcagccccaccatcgtgcagcagtttggctaccagaggcgggccagtgatgatggcaagctgacagaccccagcaagaccagcaacaccatccgggtcttcctgcccaacaagcagaggacagtggtgaatgtgagaaatggcatgagcctgcatgactgcctgatgaaggccctgaaggtgcggggcctgcagcctgagtgctgtgctgtgttccggctgctgcacgagcacaagggcaagaaggcccggctggactggaacacagatgctgccagcctcatcggggaggagctgcaggtggacttcctggaccacgtgcccctgaccacccacaactttgccaggaagaccttcctgaagctggccttctgtgacatctgccagaagttcctgctgaatggcttccgctgccagacctgtggctacaagttccacgagcactgcagcaccaaggtgcccaccatgtgtgtggactggagcaacatccggcagctgctgctcttccccaacagcaccatcggggacagcggcgtgcctgccctgcccagcctgaccatgaggaggatgagggagagcgtgtccaggatgcctgtgagcagccagcaccgctacagcaccccccacgccttcaccttcaacaccagcagccccagcagcgagggcagcctgagccagaggcagaggagcaccagcacccccaacgtgcacatggtgtccaccaccctgcctgtggacagcaggatgattgaagatgccatccgcagccacagcgagagcgccagccccagcgccctgagcagcagccccaacaacctgagccccaccggctggagccagcccaagacccctgtgcctgcccagcgggagcgggcccctgtgtctggcacccaggagaagaacaagatccggccccggggccagagggacagcagctactactgggagattgaggccagcgaggtgatgctgagcaccagaattggcagcggcagctttggcaccgtgtacaagggcaagtggcatggagatgtggccgtgaagatcctgaaggtggtggaccccaccccagagcagttccaggccttcagaaatgaggtggccgtgctgaggaagaccaggcatgtgaacatcctgctcttcatgggctacatgaccaaggacaacctggccatcgtgacccagtggtgtgagggcagcagcctgtacaagcacctgcacgtgcaggagaccaagttccagatgttccagctgattgacatcgcccggcagacagcccagggcatggactacctgcacgccaagaacatcatccaccgggacatgaagagcaacaacatcttcctgcacgagggcctgactgtgaagatcggggactttggcctggccaccgtgaagagccgctggagcggcagccagcaggtggagcagcccaccggctctgtgctgtggatggcccctgaggtgatccgcatgcaggacaacaaccccttctccttccagagtgatgtgtacagctatggcatcgtgctgtatgagctgatgactggagagctgccctacagccacatcaacaacagagaccagatcatcttcatggtgggccggggctacgccagcccagacctgagcaagctgtacaagaactgccccaaggccatgaagaggctggtggccgactgtgtgaagaaggtgaaggaggagcggcccctcttcccccagatcctgagcagcattgagctgctgcagcacagcctgcccaagatcaacagaagtgccagcgagcccagcctgcaccgggccgcccacacagaggacatcaatgcctgcaccctgaccaccagcccccggctgcccgtcttctag

SEQ ID NO: 133062 - DNA, 2007 bp, Artificial Sequence
  derived and/or modified sequence
atggagcacatccagggcgcctggaagaccatcagcaatggatttggcttcaaggatgctgtgtttgatggcagcagctgcatcagccccaccatcgtgcagcagtttggctaccagaggcgggccagtgatgatggcaagctgacagaccccagcaagaccagcaacaccatccgggtcttcctgcccaacaagcagaggacagtggtgaatgtgagaaatggcatgagcctgcatgactgcctgatgaaggccctgaaggtgcggggcctgcagcctgagtgctgtgctgtgttccggctgctgcacgagcacaagggcaagaaggcccggctggactggaacacagatgctgccagcctcatcggggaggagctgcaggtggacttcctggaccacgtgcccctgaccacccacaactttgccaggaagaccttcctgaagctggccttctgtgacatctgccagaagttcctgctgaatggcttccgctgccagacctgtggctacaagttccacgagcactgcagcaccaaggtgcccaccatgtgtgtggactggagcaacatccggcagctgctgctcttccccaacagcaccatcggggacagcggcgtgcctgccctgcccagcctgaccatgaggaggatgagggagagcgtgtccaggatgcctgtgagcagccagcaccgctacagcaccccccacgccttcaccttcaacaccagcagccccagcagcgagggcagcctgagccagaggcagaggagcaccagcacccccaacgtgcacatggtgtccaccaccctgcctgtggacagcaggatgattgagaacaacaacctgagcgccagcccccgggcctggagccgccgcttctgcctgcggggcagagatgccatccgcagccacagcgagagcgccagccccagcgccctgagcagcagccccaacaacctgagccccaccggctggagccagcccaagacccctgtgcctgcccagcgggagcgggcccctgtgtctggcacccaggagaagaacaagatccggccccggggccagagggacagcagctactactgggagattgaggccagcgaggtgatgctgagcaccagaattggcagcggcagctttggcaccgtgtacaagggcaagtggcatggagatgtggccgtgaagatcctgaaggtggtggaccccaccccagagcagttccaggccttcagaaatgaggtggccgtgctgaggaagaccaggcatgtgaacatcctgctcttcatgggctacatgaccaaggacaacctggccatcgtgacccagtggtgtgagggcagcagcctgtacaagcacctgcacgtgcaggagaccaagttccagatgttccagctgattgacatcgcccggcagacagcccagggcatggactacctgcacgccaagaacatcatccaccgggacatgaagagcaacaacatcttcctgcacgagggcctgactgtgaagatcggggactttggcctggccaccgtgaagagccgctggagcggcagccagcaggtggagcagcccaccggctctgtgctgtggatggcccctgaggtgatccgcatgcaggacaacaaccccttctccttccagagtgatgtgtacagctatggcatcgtgctgtatgagctgatgactggagagctgccctacagccacatcaacaacagagaccagatcatcttcatggtgggccggggctacgccagcccagacctgagcaagctgtacaagaactgccccaaggccatgaagaggctggtggccgactgtgtgaagaaggtgaaggaggagcggcccctcttcccccagatcctgagcagcattgagctgctgcagcacagcctgcccaagatcaacagaagtgccagcgagcccagcctgcaccgggccgcccacacagaggacatcaatgcctgcaccctgaccaccagcccccggctgcccgtcttctag

SEQ ID NO: 133063 - DNA, 1947 bp, Artificial Sequence
  derived and/or modified sequence
atggagcacatccagggcgcctggaagaccatcagcaacggcttcggcttcaaagatgcagttttcgatggaagtagctgcataagccctactatcgtgcagcagtttgggtaccagcggagggcctctgacgacggtaagctgacagacccctctaagacttccaacaccattagagtgtttctgccaaataagcagaggactgtcgttaatgtcaggaatgggatgtcactccatgattgccttatgaaggctctcaaagtcaggggactccagcctgagtgttgtgcggtattcagacttctccatgaacacaaagggaaaaaagccagacttgattggaatactgacgccgctagcttgatcggtgaggagcttcaggtggatttcctggatcatgtgccactcaccacgcacaactttgcccgaaagacattcctcaaactggcgttttgcgacatttgtcaaaaattcttgcttaatggattcaggtgccagacttgtgggtacaagtttcatgaacactgctccaccaaagttcccactatgtgtgttgactggtccaatatacgtcagctgctgctcttccccaactctaccataggggactctggggttccagctctcccctctttgacgatgaggcgaatgagggagtcagtttcaaggatgccggtgtcatcccaacacaggtatagcacgccccatgccttcaccttcaacacgagctccccatcctctgaaggatctctctctcaacgacagaggtccaccagtacacctaacgtgcacatggtgagcaccactctgcccgtggacagccgcatgatagaggacgccatcaggagtcattctgagagtgctagtccctccgccctcagttcaagccctaataatttgtcccctactggctggtctcagccaaaaacccccgttccagcccagagggagagggcccccgtgtccgggacccaggaaaagaacaagatccgccctcgcgggcaaagagattcctcttattactgggaaatcgaagcatctgaggtgatgttaagcacacggattgggagcggcagcttcggaaccgtttacaaagggaaatggcacggagacgtggctgttaagatccttaaagtggtggacccaaccccagaacaatttcaggctttcaggaatgaggtggctgttctcaggaaaactcgccacgtcaacatccttctctttatgggctatatgaccaaagacaacctggcaatcgtgacacagtggtgtgaaggtagttctctgtataagcacctgcatgtccaggaaactaaattccagatgttccaactcattgatatcgcaagacagactgcccaggggatggactatttgcatgcaaaaaatatcatccaccgagacatgaagtccaacaatatcttcctgcacgagggcctaaccgtgaagatcggtgatttcggcctggctaccgtgaagtcccgctggtctgggtctcaacaggtggagcaaccgacaggatcagtgctgtggatggctcccgaagtaatcaggatgcaagacaataatcctttctcgttccaatcagacgtgtacagttacgggatcgtgctgtatgaactcatgactggcgaactgccctattctcacatcaacaaccgcgatcaaatcatcttcatggtgggccgggggtatgcttcgcccgacctgtcaaagctgtacaagaactgtcctaaagcgatgaagagactggtcgctgactgcgtgaaaaaggtgaaggaagaacgcccactgtttcctcagattctgtcttcaatcgagcttttacagcactcccttcccaaaatcaacaggtctgcgagtgaaccaagtctgcatagagccgcccataccgaagatattaacgcctgtacactcaccaccagcccaaggctgcctgtgttctag

SEQ ID NO: 133064 - DNA, 2007 bp, Artificial Sequence
  derived and/or modified sequence
atggagcacatccagggcgcctggaagaccatcagcaacggcttcgggttcaaggatgctgtctttgacggttcttcctgtatctcgccaacaatcgtgcagcaatttggctaccaaagacgggcctccgatgatgggaaattaaccgatccctcaaaaacatccaataccattcgggtgttcctgcctaacaagcagaggacagtcgtaaacgtacgcaacgggatgagcttgcacgactgcttaatgaaggcgcttaaggtccgcggactgcagcctgaatgttgcgctgtgttcaggctgttacatgagcataagggaaaaaaggcgcgcctggactggaacactgacgccgcttctctgatcggagaggaactgcaggttgattttctggatcacgtcccactcactacacacaattttgccaggaagacctttttgaagctggcgttttgtgatatctgccagaagtttctgttgaatggattcaggtgccagacttgtggctataagtttcatgagcactgctccaccaaggttccaaccatgtgcgtggactggtctaatattaggcagctcttactgtttcccaatagcaccataggcgactctggtgtgccagccttgccgagtctcactatgaggaggatgcgtgaatctgtttcccgaatgccagtatccagtcaacaccgatactccacaccccatgcttttacctttaatacctcatccccctcttcggaagggtctctttctcagaggcaacggtctacttccacacctaacgttcacatggtctcaactaccctgccagtggattcccggatgattgaaaacaataacctgagtgcttcacccagggcttggtctcgacgattttgcctgcgaggcagagatgcaataaggagccacagtgagagcgcatcacccagcgcactatcatcatcacccaacaatctctcgcccacaggctggtctcaaccgaaaacgcccgtgcctgcccagcgtgagagagctccagtaagcggcacacaggagaagaataaaattagaccacgcggccagcgcgatagttcatattattgggagatagaagcttctgaggtgatgcttagcacccgtattggcagtggctcgtttggtaccgtatataagggcaaatggcacggtgatgttgcggtgaagatcctcaaggtggtcgaccctacgcccgaacagtttcaggccttcagaaatgaggttgcagtgctcaggaaaacacgtcacgtaaatattttgctcttcatggggtacatgactaaagataatctcgccatcgtgacccagtggtgtgaagggagctcactctacaagcacttgcacgttcaagaaaccaagttccaaatgttccagctaatcgacattgcacgacagactgcgcaggggatggattatctccacgccaagaatattattcaccgtgatatgaagagcaacaacatttttctccacgaaggcctcacggtgaaaataggcgactttgggcttgcgacggtgaagagccggtggagcggtagccaacaggttgagcagccgactgggagcgtcctgtggatggccccagaagtcatccggatgcaggacaataaccctttctcatttcagtccgacgtttactcatacggcattgtgctgtatgaacttatgactggcgagttgccttatagccacattaataatcgggatcagatcatatttatggttggccgaggctacgcgtcacccgacttgtcaaagttgtataagaactgccctaaagcaatgaaacggttggtcgccgactgcgtcaagaaagttaaggaggagaggccactcttccctcaaatcctctcaagtattgagctgctgcagcactcactgcccaaaattaaccgcagcgctagcgagccgtccctgcatagagccgcgcatacagaggatattaatgcctgcactctgactacctcgccgagactgccggtcttctag

SEQ ID NO: 133065 - DNA, 1947 bp, Artificial Sequence
  derived and/or modified sequence
atggaacatatccagggtgcatggaagaccataagtaatggatttggattcaaggatgccgtgtttgatggatccagctgtatttctcctaccatagtgcagcagttcgggtatcagcgcagggcgagtgacgacgggaagctgacagacccttcaaagacaagcaacaccatcagagtgttccttccaaacaagcagcggacagttgttaacgttcgcaacggcatgagtttgcacgactgtctcatgaaggccctaaaggttagaggactccagccggagtgttgtgctgtattcagactgctccatgagcacaaagggaagaaggcgcgtctggactggaacaccgacgccgcttcccttataggtgaagagcttcaggttgattttctggaccatgtccccctgaccacccataattttgccaggaaaacttttcttaaactggctttttgtgatatctgccagaagttccttctgaatgggtttaggtgccaaacctgcggctacaagttccatgagcactgttctaccaaagtccctacaatgtgtgttgactggagcaatatacgacagctactgctatttccaaatagtaccattggggactcaggcgtacccgctttacccagtctgacaatgcgtcggatgagagaaagcgtctcaagaatgcctgtcagcagtcagcatcgctactctacaccacacgccttcaccttcaatacgtcctctccatcttcagaaggctcgcttagtcagcgccagcgctccacaagtactcccaacgtacatatggtttcgacaacgctgccggtagacagccgtatgatagaagatgctattaggagccattcagaatccgcgtccccatccgccctgtcaagctccccgaacaatctgagtcccaccgggtggagccagcctaaaacacctgtgcctgcacagcgggaaagagcacctgtgtccggcacccaggagaagaataagatccgtcctagaggccagagagacagctcttactattgggagattgaagcctcagaggtgatgctgtcgaccagaatcggaagtggctcctttgggacggtgtacaaaggcaagtggcatggcgatgttgctgtgaagatccttaaggtggtggaccccacaccagaacagttccaggcgtttaggaacgaggttgctgttctaaggaaaacacggcatgtcaatattctattgttcatgggctatatgaccaaagacaaccttgccatcgtgactcagtggtgtgagggaagctcgctatacaagcacctgcatgtccaggaaacaaaattccaaatgttccagctgatcgatatagcccgacaaactgcacaggggatggactacctgcatgccaaaaacattatccacagagatatgaagtctaacaacatttttctgcacgaaggtctgacagtcaagataggcgacttcgggctggccacggtaaagtctagatggtctgggtcacagcaggtagaacagcctaccggatctgtgctttggatggcccctgaagttataagaatgcaggataacaatccattctcctttcagagtgatgtgtatagctatggtatagtcctctatgagctgatgacaggagaactcccatacagtcacatcaataaccgggaccagattattttcatggttggacggggatatgcctcccccgaccttagtaaactgtacaaaaattgtcccaaggccatgaaaagactggttgctgactgtgtcaagaaagtgaaagaagaacgaccgctgttccctcagattttgtcaagtatcgagcttctgcaacacagcctgccgaagattaacagaagtgcttccgagccctcactgcatcgggctgcccataccgaagatatcaatgcctgtactttgaccacgagtcctagactgcctgtgttttag

SEQ ID NO: 133066 - DNA, 2007 bp, Artificial Sequence
  derived and/or modified sequence
atggagcacattcagggggcatggaaaacaatcagcaacggattcggtttcaaggacgctgtatttgacggctcgtcttgcatcagccctacgattgtgcaacagttcggctatcagcgcagggcaagcgatgatgggaagctgactgacccctctaagacatctaacacaataagagtctttcttcctaataagcaacgtactgtcgtgaacgtgcggaatggtatgtccttacatgattgccttatgaaggccctaaaggtcagaggacttcagcctgagtgctgtgccgtgtttcgcctgctccatgagcataaaggtaagaaggccaggctagattggaacactgacgcagcgtctcttattggcgaggaacttcaggttgattttctcgaccacgtgcctcttaccacacacaatttcgccaggaagaccttcttaaaattggcgttctgtgacatctgtcagaaatttctcctgaacggattcagatgccagacgtgcggttataagttccacgagcactgctctacaaaggtcccaaccatgtgtgtcgactggagcaacatacgccagctcctcttatttcccaattccacaataggagacagtggcgtgcccgctctgccaagtcttacaatgcgtcggatgcgggagtccgtgagccgcatgccagttagtagtcagcaccggtactccactccacatgccttcactttcaatacctcctccccgagctccgaaggctctttgagtcaacgccaacggagcacctccacaccaaacgtgcacatggtgtcgacaactctccccgttgacagcagaatgatcgagaacaacaatttaagcgcctctccaagggcatggtcccgaagattttgcctccggggacgggatgctatcagatctcactctgaaagcgccagtccttctgcattgagttcgagccctaataatttgtctcccactgggtggtctcaaccaaagacccccgttcctgcccagagggaaagagctcccgtatctggcactcaggagaaaaacaaaattcgaccgagaggacagcgtgactcatcatattattgggaaattgaagccagtgaggtgatgctctctacaaggatcggaagtggcagctttgggactgtttataagggcaagtggcacggcgacgttgccgtcaagatactcaaagttgtagaccccacacctgagcagttccaggcttttaggaatgaggtcgcagtactgaggaaaacacgtcatgtgaatatattactcttcatgggctatatgaccaaggataatcttgcaatcgtgacacaatggtgcgaggggtcctctctctataagcacctgcatgtacaggagaccaagttccaaatgttccagctgattgacatcgctcggcagacagcgcaaggaatggactacctccatgccaaaaacatcattcaccgagacatgaaaagcaacaacattttccttcacgaaggtttaacagtgaagatcggcgattttgggctggcaacagtaaagtctcgttggtctggctcgcagcaagtcgagcaaccaaccggcagcgtgctctggatggccccagaggtcataaggatgcaggacaataaccctttttcttttcagtccgatgtctattcttacggcattgtcctgtatgagctcatgactggcgagcttccctactcacacattaacaatagagaccagatcatttttatggtcggtaggggttatgccagtcccgatctgtcaaagctatacaagaactgccccaaggcaatgaagagactggtggccgactgtgttaaaaaggtcaaagaggagcggccattgttccctcagatactgtcatctattgagcttctacaacacagcctgccaaaaattaatagatccgcttcagaaccttctctacaccgcgctgctcatacggaagatataaacgcatgcaccttgacaacctctcctcggttgccggtgttctag

SEQ ID NO: 133067 - DNA, 3300 bp, Artificial Sequence
  derived and/or modified sequence
agtcgactgccagtagggctcgcgcagaatcggagagccggtggcgtcgcaggtcgggaggacgagcaccgagtcgagggctcgctcgtctgggccgcccgagagtcttaatcgcgggcgcttgggccgccatcttagatggcgggagtaagaggaaaacgattgtgaggcgggaacggctttctgctgccttttttgggccccgaaaagggtcagctggccgggctttggggcgcgtgccctgaggcgcggagcgcgtttgctacgatgcgggggctgctcggggctccgtcccctgggctggggacgcgccgaatgtgaccgcctcccgctccctcacccgccgcggggaggaggagcgggcgagaagctgccgccgaacgacaggacgttggggcggcctggctccctcaggtttaagaattgtttaagctgcatcaatggagcacatacagggagcttggaagacgatcagcaatggttttggattcaaagatgccgtgtttgatggctccagctgcatctctcctacaatagttcagcagtttggctatcagcgccgggcatcagatgatggcaaactcacagatccttctaagacaagcaacactatccgtgttttcttgccgaacaagcaaagaacagtggtcaatgtgcgaaatggaatgagcttgcatgactgccttatgaaagcactcaaggtgaggggcctgcaaccagagtgctgtgcagtgttcagacttctccacgaacacaaaggtaaaaaagcacgcttagattggaatactgatgctgcgtctttgattggagaagaacttcaagtagatttcctggatcatgttcccctcacaacacacaactttgctcggaagacgttcctgaagcttgccttctgtgacatctgtcagaaattcctgctcaatggatttcgatgtcagacttgtggctacaaatttcatgagcactgtagcaccaaagtacctactatgtgtgtggactggagtaacatcagacaactcttattgtttccaaattccactattggtgatagtggagtcccagcactaccttctttgactatgcgtcgtatgcgagagtctgtttccaggatgcctgttagttctcagcacagatattctacacctcacgccttcacctttaacacctccagtccctcatctgaaggttccctctcccagaggcagaggtcgacatccacacctaatgtccacatggtcagcaccaccctgcctgtggacagcaggatgattgaggatgcaattcgaagtcacagcgaatcagcctcaccttcagccctgtccagtagccccaacaatctgagcccaacaggctggtcacagccgaaaacccccgtgccagcacaaagagagcgggcaccagtatctgggacccaggagaaaaacaaaattaggcctcgtggacagagagattcaagctattattgggaaatagaagccagtgaagtgatgctgtccactcggattgggtcaggctcttttggaactgtttataagggtaaatggcacggagatgttgcagtaaagatcctaaaggttgtcgacccaaccccagagcaattccaggccttcaggaatgaggtggctgttctgcgcaaaacacggcatgtgaacattctgcttttcatggggtacatgacaaaggacaacctggcaattgtgacccagtggtgcgagggcagcagcctctacaaacacctgcatgtccaggagaccaagtttcagatgttccagctaattgacattgcccggcagacggctcagggaatggactatttgcatgcaaagaacatcatccatagagacatgaaatccaacaatatatttctccatgaaggcttaacagtgaaaattggagattttggtttggcaacagtaaagtcacgctggagtggttctcagcaggttgaacaacctactggctctgtcctctggatggccccagaggtgatccgaatgcaggataacaacccattcagtttccagtcggatgtctactcctatggcatcgtattgtatgaactgatgacgggggagcttccttattctcacatcaacaaccgagatcagatcatcttcatggtgggccgaggatatgcctccccagatcttagtaagctatataagaactgccccaaagcaatgaagaggctggtagctgactgtgtgaagaaagtaaaggaagagaggcctctttttccccagatcctgtcttccattgagctgctccaacactctctaccgaagatcaaccggagcgcttccgagccatccttgcatcgggcagcccacactgaggatatcaatgcttgcacgctgaccacgtccccgaggctgcctgtcttctagttgactttgcacctgtcttcaggctgccaggggaggaggagaagccagcaggcaccacttttctgctccctttctccagaggcagaacacatgttttcagagaagctgctgctaaggaccttctagactgctcacagggccttaacttcatgttgccttcttttctatccctttgggccctgggagaaggaagccatttgcagtgctggtgtgtcctgctccctccccacattccccatgctcaaggcccagccttctgtagatgcgcaagtggatgttgatggtagtacaaaaagcaggggcccagccccagctgttggctacatgagtatttagaggaagtaaggtagcaggcagtccagccctgatgtggagacacatgggattttggaaatcagcttctggaggaatgcatgtcacaggcgggactttcttcagagagtggtgcagcgccagacattttgcacataaggcaccaaacagcccaggactgccgagactctggccgcccgaaggagcctgctttggtactatggaacttttcttaggggacacgtcctcctttcacagcttctaaggtgtccagtgcattgggatggttttccaggcaaggcactcggccaatccgcatctcagccctctcagggagcagtcttccatcatgctgaattttgtcttccaggagctgcccctatggggcggggccgcagggccagccttgtttctctaacaaacaaacaaacaaacagccttgtttctctagtcacatcatgtgtatacaaggaagccaggaatacaggttttcttgatgatttgggttttaattttgtttttattgcacctgacaaaatacagttatctgatggtccctcaattatgttattttaataaaataaattaaatttaggtgtaa

SEQ ID NO: 133068 - DNA, 3085 bp, Artificial Sequence
  derived and/or modified sequence
ggctcgctcgtctgggccgcccgagagtcttaatcgcgggcgcttgggccgccatcttagatggcgggagtaagaggaaaacgattgtgaggcgggaacggctttctgctgccttttttgggccccgaaaagggtcagctggccgggctttggggcgcgtgccctgaggcgcggagcgcgtttgctacgatgcgggggctgctcggggctccgtcccctgggctggggacgcgccgaatgtgaccgcctcccgctccctcacccgccgcggggaggaggagcgggcgagaagctgccgccgaacgacaggacgttggggcggcctggctccctcaggtttaagaattgtttaagctgcatcaatggagcacatacagggagcttggaagacgatcagcaatggttttggattcaaagatgccgtgtttgatggctccagctgcatctctcctacaatagttcagcagtttggctatcagcgccgggcatcagatgatggcaaactcacagatccttctaagacaagcaacactatccgtgttttcttgccgaacaagcaaagaacagtggtcaatgtgcgaaatggaatgagcttgcatgactgccttatgaaagcactcaaggtgaggggcctgcaaccagagtgctgtgcagtgttcagacttctccacgaacacaaaggtaaaaaagcacgcttagattggaatactgatgctgcgtctttgattggagaagaacttcaagtagatttcctggatcatgttcccctcacaacacacaactttgctcggaagacgttcctgaagcttgccttctgtgacatctgtcagaaattcctgctcaatggatttcgatgtcagacttgtggctacaaatttcatgagcactgtagcaccaaagtacctactatgtgtgtggactggagtaacatcagacaactcttattgtttccaaattccactattggtgatagtggagtcccagcactaccttctttgactatgcgtcgtatgcgagagtctgtttccaggatgcctgttagttctcagcacagatattctacacctcacgccttcacctttaacacctccagtccctcatctgaaggttccctctcccagaggcagaggtcgacatccacacctaatgtccacatggtcagcaccaccctgcctgtggacagcaggatgattgagaataacaacctgagtgcttctcccagggcgtggtccagacgattttgtttgaggggaagagatgcaattcgaagtcacagcgaatcagcctcaccttcagccctgtccagtagccccaacaatctgagcccaacaggctggtcacagccgaaaacccccgtgccagcacaaagagagcgggcaccagtatctgggacccaggagaaaaacaaaattaggcctcgtggacagagagattcaagctattattgggaaatagaagccagtgaagtgatgctgtccactcggattgggtcaggctcttttggaactgtttataagggtaaatggcacggagatgttgcagtaaagatcctaaaggttgtcgacccaaccccagagcaattccaggccttcaggaatgaggtggctgttctgcgcaaaacacggcatgtgaacattctgcttttcatggggtacatgacaaaggacaacctggcaattgtgacccagtggtgcgagggcagcagcctctacaaacacctgcatgtccaggagaccaagtttcagatgttccagctaattgacattgcccggcagacggctcagggaatggactatttgcatgcaaagaacatcatccatagagacatgaaatccaacaatatatttctccatgaaggcttaacagtgaaaattggagattttggtttggcaacagtaaagtcacgctggagtggttctcagcaggttgaacaacctactggctctgtcctctggatggccccagaggtgatccgaatgcaggataacaacccattcagtttccagtcggatgtctactcctatggcatcgtattgtatgaactgatgacgggggagcttccttattctcacatcaacaaccgagatcagatcatcttcatggtgggccgaggatatgcctccccagatcttagtaagctatataagaactgccccaaagcaatgaagaggctggtagctgactgtgtgaagaaagtaaaggaagagaggcctctttttccccagatcctgtcttccattgagctgctccaacactctctaccgaagatcaaccggagcgcttccgagccatccttgcatcgggcagcccacactgaggatatcaatgcttgcacgctgaccacgtccccgaggctgcctgtcttctagttgactttgcacctgtcttcaggctgccaggggaggaggagaagccagcaggcaccacttttctgctccctttctccagaggcagaacacatgttttcagagaagctgctgctaaggaccttctagactgctcacagggccttaacttcatgttgccttcttttctatccctttgggccctgggagaaggaagccatttgcagtgctggtgtgtcctgctccctccccacattccccatgctcaaggcccagccttctgtagatgcgcaagtggatgttgatggtagtacaaaaagcaggggcccagccccagctgttggctacatgagtatttagaggaagtaaggtagcaggcagtccagccctgatgtggagacacatgggattttggaaatcagcttctggaggaatgcatgtcacaggcgggactttcttcagagagtggtgcagcgccagacattttgcacataaggcaccaaacagcccaggactgccgagactctggccgcccgaaggagcctgctttggtactatggaacttttcttaggggacacgtcctcctttcacagcttctaaggtgtccagtgcattgggatggttttccaggcaaggcactcggccaatccgcatctcagccctctcagggagcagtcttccatcatgctgaattttgtcttccaggagctgcccctatggggcggggccgcagggccag

SEQ ID NO: 133069 - DNA, 621 bp, Artificial Sequence
  derived and/or modified sequence
atggccgccaacaagagcaagggccagagcagcctggccctgcacaaggtgatcatggtgggcagcggcggcgtgggcaagagcgccctgaccctgcagttcatgtacgacgagttcgtggaggactacgagcccaccaaggccgacagctacagaaagaaggtggtgctggacggcgaggaggtgcagatcgacatcctggacaccgccggccaggaggactacgccgccatcagagacaactacttcagaagcggcgagggcttcctgctggtgttcagcatcaccgagcacgagagcttcaccgccaccgccgagttcagagagcagatcctgagagtgaaggccgaggaggacaagatccccctgctggtggtgggcaacaagagcgacctggaggagagaagacaggtgcccgtggaggaggccagaagcaaggccgaggagtggggcgtgcagtacgtggagaccagcgccaagaccagagccaacgtggacaaggtgttcttcgacctgatgagagagatcagaaccaagaagatgagcgagaacaaggacaagaacggcaagaagagcagcaagaacaagaagagcttcaaggagagatgctgcctgctgtag

SEQ ID NO: 133070 - DNA, 684 bp, Artificial Sequence
  derived and/or modified sequence
atggccgccaacaagagcaagggccagagcagcctggccctgcacaaggtgatcatggtgggcagcggcggcgtgggcaagagcgccctgaccctgcagttcatgaacgtgagcaagagcctggcctacgacaagaagaagtacaccgccaacaagaaggtggagggcatcctggagttcgtggaggactacgagcccaccaaggccgacagctacagaaagaaggtggtgctggacggcgaggaggtgcagatcgacatcctggacaccgccggccaggaggactacgccgccatcagagacaactacttcagaagcggcgagggcttcctgctggtgttcagcatcaccgagcacgagagcttcaccgccaccgccgagttcagagagcagatcctgagagtgaaggccgaggaggacaagatccccctgctggtggtgggcaacaagagcgacctggaggagagaagacaggtgcccgtggaggaggccagaagcaaggccgaggagtggggcgtgcagtacgtggagaccagcgccaagaccagagccaacgtggacaaggtgttcttcgacctgatgagagagatcagaaccaagaagatgagcgagaacaaggacaagaacggcaagaagagcagcaagaacaagaagagcttcaaggagagatgctgcctgctgtag

SEQ ID NO: 133071 - DNA, 504 bp, Artificial Sequence
  derived and/or modified sequence
atggccgccaacaagagcaagggccagagcagcctggccctgcacaaggtgatcatggtgggcagcggcggcgtgggcaagagcgccctgaccctgcagttcatgtacgacgagttcgtggaggactacgagcccaccaaggccgacagctacagaaagaaggtggtgctggacggcgaggaggtgcagatcgacatcctggacaccgccggccaggaggactacgccgccatcagagacaactacttcagaagcggcgagggcttcctgctggtgttcagcatcaccgagcacgagagcttcaccgccaccgccgagttcagagagcagatcctgagagtgaaggccgaggaggacaagatccccctgctggtggtgggcaacaagagcgacctggaggagagaagacaggtgcccgtggaggaggccagaagcaaggccgaggagtggggcgtgcagtacgtggagaccagcgccaagaccagagccaacgtggacaagtag

SEQ ID NO: 133072 - DNA, 621 bp, Artificial Sequence
  derived and/or modified sequence
atggcagcaaataagtcaaagggccagagcagcctggctcttcacaaggtgatcatggtggggagcggaggagtgggaaaaagcgcccttacgcttcaattcatgtacgacgagtttgtagaggattacgagccgacaaaggccgattcatatcgtaaaaaggtggtcctggacggcgaagaggtgcagatcgatatccttgatactgccggccaagaagactatgctgctattcgcgataattatttcagatccggcgagggatttctgctagtattcagtattacggaacatgagagtttcacagcgaccgctgagttccgcgaacagattctcagagtgaaagccgaagaggacaaaattcctctactggtggtcggcaacaagtccgacttagaagaacgtaggcaagtgcctgttgaagaggccagatctaaagccgaagagtggggagttcagtacgtggagacttcagctaagacccgcgccaacgttgacaaagtgttctttgacctcatgcgcgaaattagaaccaagaaaatgtcagagaacaaagacaagaacggcaagaagagtagcaagaacaagaagtcattcaaggagcggtgttgcttattgtag

SEQ ID NO: 133073 - DNA, 684 bp, Artificial Sequence
  derived and/or modified sequence
atggctgcaaacaagtccaagggacagtctagtcttgcactgcacaaagtcatcatggtaggtagtggtggtgttggaaagtctgcactcactcttcagtttatgaacgtgtctaaatctttagcctacgacaagaagaaatatactgcaaataagaaggtggaaggcatcctggaattcgtggaagactacgaacccaccaaagccgactcttaccggaagaaggttgtgctggatggggaagaggtccagatagacatcctcgacactgccggccaggaggattacgccgcgattcgtgataattactttcgtagcggggaagggttccttctggtgttcagcattactgaacatgaatctttcactgccacagctgaatttcgcgagcaaatcctgagagtaaaggctgaagaagacaaaataccattgcttgtagtaggaaataagagcgaccttgaggagcgtaggcaggtgcctgtcgaggaggcaaggtctaaagcagaagagtggggcgtgcaatacgtggaaacatccgctaagacccgcgccaacgtggacaaggtcttcttcgaccttatgagagaaataaggacgaagaaaatgtccgagaataaggacaaaaacggaaagaaatcttcaaagaacaagaaaagcttcaaggagcgctgttgcttgctctag

SEQ ID NO: 133074 - DNA, 504 bp, Artificial Sequence
  derived and/or modified sequence
atggctgcaaacaaatctaaagggcagtcatcattggccttgcataaagtgatcatggtcggtagtggtggcgtagggaagtcagccctcactctgcagttcatgtatgacgaattcgtggaggattacgagcccacaaaggcggacagctatagaaaaaaggtggttctcgatggagaggaggtgcaaattgacatcctggatactgccggacaagaggactacgccgcaatcagggataactactttcgctccggcgaaggatttttacttgttttcagtatcacagagcatgaaagttttaccgcgacggctgagtttcgggagcaaatcctgcgagtgaaggcagaagaggacaaaatccccctgctggtggtggggaataaaagcgacctggaggagcgacggcaagtgcctgtcgaagaagcccgctccaaggctgaagagtggggcgttcagtacgtggagacatctgcgaagacgagggcaaacgtggacaaatag

SEQ ID NO: 133075 - DNA, 621 bp, Artificial Sequence
  derived and/or modified sequence
atggcagccaacaagagtaagggccagtcctctcttgcgctccacaaagtcattatggtcgggagcgggggcgtaggcaaaagtgccctgactctgcaatttatgtacgacgagttcgtagaggattatgaaccaacaaaggccgatagctataggaaaaaagtggtgctggatggggaggaagtgcagatcgacattctcgataccgccggccaggaggattacgctgccattagagacaactacttccggagtggggaaggctttcttctggtgttctccatcaccgaacatgagtcctttaccgccaccgctgagtttagggaacagatcttgcgcgtgaaagccgaggaggataagattccgcttctggtggtgggtaataagtccgatttggaggaaaggagacaagtgcctgttgaagaggcccgcagcaaggccgaggaatggggcgtgcagtatgtggaaactagtgcgaagaccagagccaatgtggataaagtgttcttcgacctgatgagagagattcgcacaaagaagatgagcgaaaataaggataagaatggaaaaaagagcagcaagaacaaaaaatcttttaaggagcgatgctgcttattatag

SEQ ID NO: 133076 - DNA, 621 bp, Artificial Sequence
  derived and/or modified sequence
atggccgccaacaagagcaagggccagagcagcctggccctgcacaaggtgatcatggtgggcagcggcggcgtgggcaagagcgccctgaccctgcagttcatgtatgatgaatttgtggaggactatgagcccaccaaggctgacagctacaggaagaaggtggtgctggatggagaggaggtgcagattgacatcctggacacagctggccaggaggactatgctgccatccgggacaactacttccgctctggagagggcttcctgctggtgttcagcatcacagagcacgagagcttcaccgccacagctgagttccgggagcagatcctgcgggtgaaggccgaggaggacaagatccccctgctggtggtgggcaacaagagtgacctggaggagcggcggcaggtgcctgtggaggaggcccggagcaaggccgaggagtggggcgtgcagtatgtggagaccagcgccaagacccgggccaacgtggacaaggtgttctttgacctgatgagggagatccgcaccaagaagatgtctgagaacaaggacaagaatggcaagaagagcagcaagaacaagaagagcttcaaggagcgctgctgcctgctgtag

SEQ ID NO: 133077 - DNA, 684 bp, Artificial Sequence
  derived and/or modified sequence
atggccgccaacaagagcaagggccagagcagcctggccctgcacaaggtgatcatggtgggcagcggcggcgtgggcaagagcgccctgaccctgcagttcatgaatgtgtccaagagcctggcctatgacaagaagaagtacacagccaacaagaaggtggagggcatcctggagtttgtggaggactatgagcccaccaaggctgacagctacaggaagaaggtggtgctggatggagaggaggtgcagattgacatcctggacacagctggccaggaggactatgctgccatccgggacaactacttccgcagcggggagggcttcctgctggtgttcagcatcacagaacatgagagcttcaccgccacagctgagttccgggagcagatcctgcgggtgaaggccgaggaggacaagatccccctgctggtggtgggcaacaagagtgacctggaggagcggcggcaggtgcctgtggaggaggcccggagcaaggccgaggagtggggcgtgcagtatgtggagaccagcgccaagacccgggccaacgtggacaaggtgttctttgacctgatgagggagatccgcaccaagaagatgtctgagaacaaggacaagaatggcaagaagagcagcaagaacaagaagagcttcaaggagcgctgctgcctgctgtag

SEQ ID NO: 133078 - DNA, 504 bp, Artificial Sequence
  derived and/or modified sequence
atggccgccaacaagagcaagggccagagcagcctggccctgcacaaggtgatcatggtgggcagcggcggcgtgggcaagagcgccctgaccctgcagttcatgtatgatgaatttgtggaggactatgagcccaccaaggctgacagctacaggaagaaggtggtgctggatggagaggaggtgcagattgacatcctggacacagctggccaggaggactatgctgccatccgggacaactacttccgctctggagagggcttcctgctggtgttcagcatcacagagcacgagagcttcaccgccacagctgagttccgggagcagatcctgcgggtgaaggccgaggaggacaagatccccctgctggtggtgggcaacaagagtgacctggaggagcggcggcaggtgcctgtggaggaggcccggagcaaggccgaggagtggggcgtgcagtatgtggagaccagcgccaagacccgggccaacgtggacaagtag

SEQ ID NO: 133079 - DNA, 621 bp, Artificial Sequence
  derived and/or modified sequence
atggccgccaacaagagcaagggccagagcagcctggccctgcacaaggtgattatggtaggctccgggggagtgggcaagtcagccctgactttgcagtttatgtacgatgaattcgtggaggactacgaacccacgaaggctgactcgtatagaaaaaaggtcgtgttggatggagaagaagtccaaatcgacattctcgataccgctggccaggaggattacgctgcaattagggacaattattttcgctcgggagagggttttctgctggtgttctcaatcaccgagcatgaaagctttacagctacagctgagtttagagagcagatcctgcgagtgaaggctgaggaggacaaaataccactgttagtcgtggggaacaagtccgacctggaagagaggcggcaagtgcctgttgaggaggctcgatctaaagctgaggagtggggtgtccagtatgtggagacatccgctaaaactagagctaatgtggacaaagtgtttttcgacctgatgagagagatccggaccaagaagatgtctgaaaataaagataaaaatggcaagaaaagttcgaaaaataaaaaatcattcaaagaaagatgttgtctcctgtag

SEQ ID NO: 133080 - DNA, 684 bp, Artificial Sequence
  derived and/or modified sequence
atggccgccaacaagagcaagggccagagcagcctggccctgcacaaggttatcatggtaggctcagggggcgtgggcaaatctgccctgacgttgcagttcatgaatgtgtctaagtcactggcctatgacaaaaaaaaatacacagccaataagaaggtggaaggaattctggaatttgtggaggactacgagccaaccaaggccgattcctatcgcaaaaaggtggtcttggatggcgaggaggtccagattgacatcctcgatacagcaggccaggaggactacgccgccattagggataactacttcaggtcaggggagggtttcttgctggtattctccataacagagcacgaatcatttactgccaccgccgagttccgagagcagattctgagggtcaaggcggaggaagataagatcccacttttggtcgtcggaaacaaatccgacctcgaagagaggcgacaagtgcccgtggaggaagcgaggtctaaagccgaggagtggggcgtgcaatacgtcgagacttctgcaaaaacacgcgcaaacgtagataaagtgttcttcgacttgatgcgtgagatcagaacgaagaaaatgagtgagaacaaggacaaaaacggaaagaagagctcgaagaataaaaagtcatttaaggaacgatgctgcttactttag

SEQ ID NO: 133081 - DNA, 504 bp, Artificial Sequence
  derived and/or modified sequence
atggccgccaacaagagcaagggccagagcagcctggccctgcacaaagtcatcatggttggatcaggcggcgtcggcaagagtgcattaacactccagttcatgtacgacgaattcgtggaggattatgaacccaccaaggcagactcatataggaaaaaggtagtgctcgacggtgaggaagtgcagatcgacatcctggacactgccggtcaggaggactatgctgctatccgagacaactattttagatcaggagagggattcctgctcgtcttctccataactgaacacgagagctttactgcaactgccgagtttcgcgaacagatacttagggtgaaggcggaggaggacaagataccccttttggtcgtgggaaacaaaagcgacctggaggagcggcggcaggttccggtggaggaagcaagatctaaggcagaagagtggggagttcaatacgtcgaaacctctgcgaagactcgagctaatgtggacaagtag

SEQ ID NO: 133082 - DNA, 621 bp, Artificial Sequence
  derived and/or modified sequence
atggccgccaacaagagcaagggccagagcagcctggccctgcacaaagttattatggttggctccggcggggttggcaaaagcgcattgacgctgcaatttatgtatgacgagtttgtagaagactatgaaccgaccaaggctgatagctaccgtaaaaaggtggtgctggacggagaggaagttcagattgacattctggacacggccgggcaggaggattacgctgccatccgcgacaattactttcgttccggcgaaggctttctcttggttttcagcataactgagcacgaatcattcactgccacagctgaattccgagagcagattctgcgggttaaagccgaagaggataagatccctcttcttgtcgttggtaacaagtccgacttggaagaacgacgccaagttccagtggaggaggcacgttcaaaagcagaggagtggggtgttcagtatgttgagaccagcgccaaaacccgcgcaaatgtagacaaggtgtttttcgatctgatgcgggaaatccgcactaagaaaatgtcggagaataaagataaaaatggaaagaaaagtagcaaaaataagaagtcttttaaagagcgttgctgtctactctag

SEQ ID NO: 133083 - DNA, 621 bp, Artificial Sequence
  derived and/or modified sequence
atggcagccaacaaatctaagggtcagagctccctggcgttgcataaggtcattatggttggctctgggggagtgggtaaatctgccttaaccttgcaatttatgtatgatgagttcgtggaggactacgagcctaccaaagcggattcatatcgcaagaaggtcgtgttagacggagaggaggtgcagatcgatatactggataccgcaggccaggaggactatgctgccattcgtgataactattttaggagtggcgagggctttctgctggtgttctctatcactgagcacgagagttttacagccaccgccgaatttcgtgagcaaattctgcgggtgaaggccgaggaggacaaaatcccccttcttgtcgtcggaaataaatcagatctggaagagcggaggcaggttcctgtggaagaagctcgcagcaaggctgaagagtggggggtccaatatgtcgagacgtctgctaaaacaagggcaaacgtagacaaggttttctttgacctgatgcgcgagataagaaccaagaaaatgtcagagaacaaggacaagaacggtaagaaaagcagtaagaacaagaaaagcttcaaagaaaggtgttgtcttctgtag

SEQ ID NO: 133084 - DNA, 684 bp, Artificial Sequence
  derived and/or modified sequence
atggccgcaaacaagtcgaagggtcagagttctctcgcgctacacaaggtgatcatggttggttctggcggtgtggggaagtcggccctcacacttcaattcatgaacgtcagcaagagtttagcctacgacaagaagaagtacacggctaataagaaggttgagggaatcctagagttcgtggaagattacgaacccactaaggccgacagctatagaaaaaaggtggttctggacggcgaagaggtccaaattgatattctagacactgctggccaggaggattacgctgccattcgggacaattacttcagatccggagagggttttctgctggttttcagtattaccgaacacgaatctttcactgctaccgctgagttccgagaacagatcttgagggtaaaggccgaggaagacaaaatccctttactcgtcgttgggaataaaagcgatctcgaggagaggcggcaggtcccagtggaagaggcacgctctaaggctgaagagtggggtgtgcagtacgtggagacatcggctaaaacgcgcgcaaacgtagacaaggtgttttttgacttgatgagagagataaggacaaagaagatgagcgaaaacaaggacaagaatggcaaaaagagctcaaagaacaagaagtcttttaaggagagatgctgtttactctag

SEQ ID NO: 133085 - DNA, 504 bp, Artificial Sequence
  derived and/or modified sequence
atggctgcaaataaatccaaggggcagagctcccttgcgctccacaaggtgataatggttggaagcggcggtgttgggaaatccgctctgacccttcagtttatgtacgatgagtttgtcgaagattatgagccaacgaaagccgactcctacagaaaaaaggtggtacttgacggcgaagaagttcagattgatattctcgacacggcgggacaggaggattatgccgctatccgtgacaactatttcaggagcggggaaggctttctcttggtattctccattaccgaacacgaatcctttaccgccacagccgaatttcgggaacagattctgagggtcaaggcagaggaggataaaattccccttcttgtcgtcgggaacaagagtgatctcgaagagcggagacaggtaccagtcgaggaggcaagaagcaaagcggaggaatggggggtccagtacgtagaaacatcagccaagacaagagccaacgtggataagtag

SEQ ID NO: 133086 - DNA, 621 bp, Artificial Sequence
  derived and/or modified sequence
atggcagctaacaagtccaaaggccaatccagcctggcgcttcacaaggtgataatggtcgggagcggtggagtaggaaagtctgccttgacactgcagtttatgtatgatgagttcgttgaggactacgaacccactaaagcagattcctaccgcaagaaagtggttctggacggagaggaggtgcagatcgacatactggatactgcaggtcaggaagattatgcagctataagagataactatttcagaagcggcgagggcttcctgcttgtcttctcgataacagagcacgagtcatttactgcaactgccgagtttagagagcagatcctgagggttaaagcggaagaagataaaattcctcttctggtcgtgggtaataaaagtgacctggaggaaaggcgccaggtccctgttgaggaagctcggagcaaggccgaagaatggggcgtgcagtatgttgagacctctgctaaaacacgggctaacgtagataaggtgttcttcgaccttatgcgggaaattcgaaccaagaaaatgtcagaaaacaaagataagaacggaaagaagtcatctaagaataagaagtctttcaaagagcgctgctgcctgctatag

SEQ ID NO: 133087 - protein, 201 aa, Artificial Sequence
  derived and/or modified sequence
MAAAKDTHEDHDTSTENTDESNHDPQFEPIVSLPEQEIKTLEEDEEELFKMRAKLFRFASENDLPEWKERGTGDVKLLKHKEKGAIRLLMRRDKTLKICANHYITPMMELKPNAGSDRAWVWNTHADFADECPKPELLAIRFLNAENAQKFKTKFEECRKEIEEREKKAGSGKNDHAEKVAEKLEALSVKEETKEDAEEKQ

SEQ ID NO: 133088 - DNA, 606 bp, Artificial Sequence
  derived and/or modified sequence
atggccgccgccaaggacacccacgaggaccacgacaccagcaccgagaacaccgacgagagcaaccacgacccccagttcgagcccatcgtgagcctgcccgagcaggagatcaagaccctggaggaggacgaggaggagctgttcaagatgagagccaagctgttcagattcgccagcgagaacgacctgcccgagtggaaggagagaggcaccggcgacgtgaagctgctgaagcacaaggagaagggcgccatcagactgctgatgagaagagacaagaccctgaagatctgcgccaaccactacatcacccccatgatggagctgaagcccaacgccggcagcgacagagcctgggtgtggaacacccacgccgacttcgccgacgagtgccccaagcccgagctgctggccatcagattcctgaacgccgagaacgcccagaagttcaagaccaagttcgaggagtgcagaaaggagatcgaggagagagagaagaaggccggcagcggcaagaacgaccacgccgagaaggtggccgagaagctggaggccctgagcgtgaaggaggagaccaaggaggacgccgaggagaagcagtag

SEQ ID NO: 133089 - DNA, 837 bp, Artificial Sequence
  derived and/or modified sequence
gccggcgccagacgcggagggaaggagctacgagtagccgccgagaggccgcggagccagcgacgaccgacccagccgagccgccgccgccgccgcgcccccatggcggccgccaaggacactcatgaggaccatgatacttccactgagaatacagacgagtccaaccatgaccctcagtttgagccaatagtttctcttcctgagcaagaaattaaaacactggaagaagatgaagaggaactttttaaaatgcgggcaaaactgttccgatttgcctctgagaacgatctcccagaatggaaggagcgaggcactggtgacgtcaagctcctgaagcacaaggagaaaggggccatccgcctcctcatgcggagggacaagaccctgaagatctgtgccaaccactacatcacgccgatgatggagctgaagcccaacgcaggtagcgaccgtgcctgggtctggaacacccacgctgacttcgccgacgagtgccccaagccagagctgctggccatccgcttcctgaatgctgagaatgcacagaaattcaaaacaaagtttgaagaatgcaggaaagagatcgaagagagagaaaagaaagcaggatcaggcaaaaatgatcatgccgaaaaagtggcggaaaagctagaagctctctcggtgaaggaggagaccaaggaggatgctgaggagaagcaataaatcgtcttattttattttcttttcctctctttcctttcctttttttaaaaaattttaccctgcccctctttttcggtttgtttttattctttcatttttacaagggacgttatataaagaactgaactc

SEQ ID NO: 133090 - DNA, 606 bp, Artificial Sequence
  derived and/or modified sequence
atggctgccgccaaagacactcacgaagatcacgacacttcaacagaaaataccgatgaaagtaaccacgacccacaatttgaaccaatcgtgagccttcctgaacaggaaatcaagacattagaagaggacgaggaagagctatttaagatgagagccaagctgttcagattcgcctctgaaaatgatctccccgaatggaaagaacgcggaacaggagatgtgaagctgctcaaacataaagagaaaggcgcaatccgccttctgatgagaagagacaaaacactcaagatctgtgctaaccactatattactcccatgatggaattaaaacctaacgccggcagcgatcgggcttgggtgtggaacacccatgcggatttcgctgacgaatgtcccaagcccgagttgctcgcaattcgctttctaaacgctgagaacgcgcagaaatttaagacaaaattcgaggaatgtcgcaaagaaatcgaagagcgcgagaagaaggctgggagcggaaagaacgaccacgccgagaaagttgccgagaaactagaggcactttcagtgaaagaagaaactaaagaggatgccgaagagaaacagtag

SEQ ID NO: 133091 - DNA, 606 bp, Artificial Sequence
  derived and/or modified sequence
atggctgctgccaaggacacccatgaagatcatgacaccagcacagagaacacagatgagagcaaccacgacccccagtttgagcccatcgtgtccctgcctgagcaggagatcaagaccctggaggaggatgaggaggagctgttcaagatgagggccaagctgttccgctttgcctctgaaaatgacctgcctgagtggaaggagcggggcactggagatgtgaagctgctgaagcacaaggagaagggggccatccggctgctgatgagaagagacaagaccctgaagatctgtgccaaccactacatcacccccatgatggagctgaagcccaatgccggcagtgaccgggcctgggtgtggaacacccacgccgactttgctgatgaatgtcccaagccagagctgctggccatccgcttcctgaatgcagaaaatgcccagaagttcaagaccaagtttgaagaatgtaggaaggagattgaggagcgggagaagaaggccggcagcggcaagaatgaccatgctgagaaggtggccgagaagctggaggccctgtctgtgaaggaggagaccaaggaggatgctgaggagaagcagtag

SEQ ID NO: 133092 - DNA, 606 bp, Artificial Sequence
  derived and/or modified sequence
atggccgccgccaaggacacccacgaggaccacgacaccagcaccgagaatacggacgagtccaaccacgatccacagtttgagcctattgtgagtctgcccgagcaggagatcaaaactcttgaagaagatgaggaagagctgtttaaaatgagggccaagctcttccgtttcgcctctgagaacgatttgcccgagtggaaggagagaggcacaggagatgtgaagctcctcaagcacaaggagaaaggcgccattcgcctgctcatgcgccgtgataagaccctgaagatttgcgccaaccactatatcactcctatgatggaactaaaaccaaacgcaggttccgatagggcctgggtgtggaatactcacgctgacttcgctgacgagtgccccaaaccggaattgcttgctatccggtttctcaatgcggagaacgcacaaaaatttaagacaaaatttgaagaatgtagaaaagaaatcgaggagagagaaaagaaggcaggatctggaaagaacgatcatgcagagaaggtcgccgaaaagttggaggcgctttccgtgaaggaggaaaccaaggaggatgcagaagaaaagcagtag

SEQ ID NO: 133093 - DNA, 606 bp, Artificial Sequence
  derived and/or modified sequence
atggccgctgccaaagatacacatgaagaccacgatacttccactgagaacactgacgaatcaaaccatgacccccagttcgagcccatagtttcactccctgagcaggagatcaagaccctggaggaggacgaggaagaactgttcaagatgcgcgctaagttatttcgtttcgccagtgagaatgatttgccagagtggaaggagagaggtactggcgatgtgaagttgctgaagcataaagagaagggggctatcaggctcctcatgcggagggacaagacactcaagatctgcgctaatcattacattacccccatgatggagctgaaaccaaacgccggttccgatcgggcatgggtgtggaacacccatgccgacttcgctgacgagtgccccaagccagagcttctcgctatccgtttcctgaacgcggaaaacgctcaaaagtttaaaaccaagtttgaggagtgtcgaaaagagatcgaggagcgcgagaagaaagcaggctctgggaaaaacgatcacgcagagaaggtggccgaaaagctggaggccctcagcgtgaaagaggaaacaaaggaggatgctgaggaaaaacagtag

SEQ ID NO: 133094 - protein, 183 aa, Artificial Sequence
  derived and/or modified sequence
MREYKVVVLGSGGVGKSALTVQFVTGSFIEKYDPTIEDFYRKEIEVDSSPSVLEILDTAGTEQFASMRDLYIKNGQGFILVYSLVNQQSFQDIKPMRDQIIRVKRYERVPMILVGNKVDLEGEREVSYGEGKALAEEWSCPFMETSAKNKASVDELFAEIVRQMNYAAQPNGDEGCCSACVIL

SEQ ID NO: 133095 - DNA, 552 bp, Artificial Sequence
  derived and/or modified sequence
atgagagagtacaaggtggtggtgctgggcagcggcggcgtgggcaagagcgccctgaccgtgcagttcgtgaccggcagcttcatcgagaagtacgaccccaccatcgaggacttctacagaaaggagatcgaggtggacagcagccccagcgtgctggagatcctggacaccgccggcaccgagcagttcgccagcatgagagacctgtacatcaagaacggccagggcttcatcctggtgtacagcctggtgaaccagcagagcttccaggacatcaagcccatgagagaccagatcatcagagtgaagagatacgagagagtgcccatgatcctggtgggcaacaaggtggacctggagggcgagagagaggtgagctacggcgagggcaaggccctggccgaggagtggagctgccccttcatggagaccagcgccaagaacaaggccagcgtggacgagctgttcgccgagatcgtgagacagatgaactacgccgcccagcccaacggcgacgagggctgctgcagcgcctgcgtgatcctgtag

SEQ ID NO: 133096 - DNA, 552 bp, Artificial Sequence
  derived and/or modified sequence
atgcgtgaatataaagtggtcgtgctcggctctggtggggttggcaagtcagctctgaccgtccagtttgtgactggaagttttatcgaaaagtatgaccccaccatcgaggatttttacagaaaagaaatcgaggtggactcatcaccgagcgtcctggagattctagacacagcgggcaccgagcagttcgcttcaatgcgcgatctatacattaagaacgggcaaggttttatcttggtgtactcattagttaaccaacagtcctttcaggacatcaagcccatgcgggaccaaattatacgggtcaaacgatacgaacgcgtaccaatgatccttgtcggtaataaagtcgacctcgaaggcgagagagaagtctcttacggtgagggaaaagccctcgccgaagagtggtcctgtcctttcatggagaccagcgcaaagaataaagcatccgtggacgaactgtttgccgagatcgtgaggcaaatgaattacgcggcacagccaaacggcgacgaaggatgctgctccgcgtgcgtcatattgtag

SEQ ID NO: 133097 - DNA, 552 bp, Artificial Sequence
  derived and/or modified sequence
atgagggagtacaaggtggtggtgctgggcagcggaggagtgggcaagagcgccctgactgtgcagtttgtgacaggcagcttcatcgagaagtatgaccccaccatcgaggacttctacaggaaggagattgaggtggacagcagccccagcgtgctggagatcctggacacagctggaacagagcagtttgcctccatgagggacctgtacatcaagaatggccagggcttcatcctggtgtacagcctggtgaaccagcagagcttccaggacatcaagcccatgagggaccagatcatccgggtgaagagatatgaaagagtgcccatgatcctggtgggcaacaaggtggacctggagggggagcgggaggtgtcctatggagagggcaaggccctggccgaggagtggagctgccccttcatggagaccagcgccaagaacaaggcctctgtggatgagctgtttgctgagatcgtgcggcagatgaactatgctgcccagcccaatggagatgagggctgctgcagcgcctgcgtcatcctgtag

SEQ ID NO: 133098 - DNA, 552 bp, Artificial Sequence
  derived and/or modified sequence
atgcgggagtacaaggtggtggtgctgggcagcggcggcgtgggcaaaagtgcacttacggtgcagttcgtgacgggttctttcatagaaaaatatgatcccaccatcgaggatttctatcggaaagaaattgaagtcgacagctcccctagcgtgctggagatcttagacaccgccgggactgaacagtttgcttcgatgcgcgacctgtacattaagaacgggcagggatttattctggtatattcactcgtcaatcaacaatcctttcaggacattaaacctatgagagatcaaatcattagggttaagcgatacgagagagtgcctatgatattggtgggaaacaaggtggatttagaaggagagagagaggtgtcctacggcgaaggaaaggcactggctgaagagtggtcctgtcctttcatggaaacttccgccaagaataaggcatctgtagacgagctcttcgctgagatagtgcgtcagatgaactatgccgcccaacctaatggtgatgagggctgctgctcagcatgtgtgattctgtag

SEQ ID NO: 133099 - DNA, 552 bp, Artificial Sequence
  derived and/or modified sequence
atgcgcgagtacaaagtcgtggtgctggggtctggcggagttgggaaatccgccctgacagtacaattcgtgacgggatcctttattgagaagtacgatcccactattgaagacttttacaggaaggaaatagaagttgactccagcccaagcgtactcgaaatcctcgacacagccggaacggagcagttcgctagcatgagggacctttatattaagaacggtcagggattcatcctggtttacagcctggtgaatcaacagagtttccaggacattaagcctatgcgggatcagataatccgcgtcaagcggtacgagagagtccccatgattctcgttgggaataaggtagaccttgagggggaacgagaagtgagttacggagaaggcaaggcgctagcagaggaatggtcctgcccatttatggagaccagcgctaagaacaaggctagcgtggatgagctctttgctgagatagtgcgccagatgaattacgcggcacagcccaatggtgatgagggatgttgctccgcatgcgtgatcctgtag

SEQ ID NO: 133100 - DNA, 6237 bp, Artificial Sequence
  derived and/or modified sequence
gagagagcgcgatgggccgcggcggtgggcgcacgttccgcggggactcatgccacgcgcgtcccggcccgacgcgcaattagcagccacctccgcagcccgccgccaccgcctccctgccctcccgggctgccgcagctaggagctccagccgtcgcctcgcgcaggctgcgggcattgtcctctcggttcgccgcccgggctgctgctgccgccgcggactgctgcggggcccggacccgcaccccagggatacgctgccgccgccgccggccggcccggcgcccggcctccgttcggtggtttccgccctgcgttctctgggttgctctctcctgggtttttcctgcgtagctgaggaaggggaagagaagtccagccgccaagcccagccttccccggcgcgcagccccgacggggccgcggcaggcgcggcgagagcgctgacggagccatgagagagtacaaagtggtggtgctgggctcgggcggcgtgggcaagtccgcgctcaccgtgcagttcgtgacgggctccttcatcgagaagtacgacccgaccatcgaagacttttaccgcaaggagattgaggtggactcgtcgccgtcggtgctggagatcctggatacggcgggcaccgagcagttcgcgtccatgcgggacctgtacatcaagaacggccagggcttcatcctggtctacagcctcgtcaaccagcagagcttccaggacatcaagcccatgcgggaccagatcatccgcgtgaagcggtacgagcgcgtgcccatgatcctggtgggcaacaaggtggacctggagggtgagcgcgaggtctcgtacggggagggcaaggccctggctgaggagtggagctgccccttcatggagacgtcggccaaaaacaaagcctcggtagacgagctatttgccgagatcgtgcggcagatgaactacgcggcgcagcccaacggcgatgagggctgctgctcggcctgcgtgatcctctgaggcggccaccgcgcgccggccgcgctctgcgcacaaaagccaaacgcatccgactctctaaatgtgatttatttcttgctttgagattggagaccactttgcattggccagggtgtcttgggagcccggctggcctccgcggccggcgtcccctgcctccaccctgtgcccgagggggtgtccggtcctgcccatccgatactctggtggaaatgtggctctttgcagcatgtacgtttctccctgattttggttgatgcatatttccccgtttaagtagccgttagggcgcagtatcggcagcttgacacccaccaagcaaaagtttcagcctggaaaaaaaatgggggggaagggtggatgaaaaggagggagagaaggtggaaatggtttttttttttttttttctattttctttctttttttttttttttttttttggtcaacagccgtttttctagttccaagttttaaatacatggaaggaagtccgggagaaccatatgaaggagcaggaggagaggaagaaactttttttccttcttttccaggagtagctggaaattaagatcgggttccttttctgccagcttggaagggcaaccccatgactgattgcgattctgaggatgtctatgcaaagttggattcttgttacagtgtatccaatctgaagtattgcacatctgaactgggactgttaacactgatgccaatacagtgtggggtgccagaaagtgtctgctgatatttgtggaaaaaaaatctattttgtttacctactgtatcaaaggggagtctgggggagaatggtagtattttttttttttatcagctgtgaaaaaaatgttacagatctgcacattttcgtgtgtactatggtgtgtgtgtgtatgtgtgtggtgtgtgtgtgttttaagtttagccttttgtttttgttttttggttggcagtaaccgattttaatgactagcttttaaaaatacagtacaaagactttgtaaatgtgattcagggcccccagcacccctgtgtctgcagagtgccttcaaaactcagctgttccagccggtgccaacctgtgaacttcccaccatatcccagaatctgctattccccaaaccacttcccagtttcctttcagtaatctttctgaaggagccaggacaatagggcctgttgtttagtgaatttctttattattttcagcctttaaaatgtaatttccatctcttgcaatgaatttgtttcccttttttttgcttcattttgtttaaattttcaggtatttagctcccctttcatattatttttaaattttttaattacctgttgtagggtgttcctccagaagcaaagagcaaaattttactgttgtgatgtaccaattctaactaattgtaatttttaatttcatgcgtttaatcattgtctcttcattttaagacttttaatacaaatgtcatttttaaagaaacaaacccaaaactattgtttgtgtttctgtgtttcatattcagtgatttaatacagtatcatggctgaggtggatggggcaggtgcatgatactcttcagagctatttgtgaaattttaaagacagaagtgtctcagtgacaagttggatgacactactcccaactttttaaatttggagaaaaccatcaaggtcgaggaagccctgggtatggccattaccatctgattagaagatgaacaggtattttgaatctgatctgacatggaacagtttacctcattgtaggtagggaacaagagaacccatctattaaaattgccttagatctgggaaagtaaccatccttctggcaaagtaggatggcacttttaagtttttcttccttttttccctctgtttatattgcacatcaagtcaaaaacatgtttgggaaagatggttttcaattctgaagttatacctagtgatgttttttgcagtacatttgaatggattgtagacactgcctcaacccttttgaggttttgatttggaaatagatttaaaagaaaacaggctaagataatatccttgttctcatttacaccctgcagtttggaccacatttgacctcataagtttttccttttaacagtaggaggcagtgtgagctttttattttttatttttcttaaggtggtcttagtaatataacatgttcatacatatcaagagagtacttggtataccttaggtctatgaagtgtagctgaaatctgaagagtcttgacaaagggatttacacccttgacaaaaccaaaagaaattaacaggccacaggtttctttaaagctgtgttaacatatcttgccttaaaatgtgtgtgtgtgtttttgctttgcttttttttttttgcccaagaggcatctcagtactccagcaatggaggaagaatagagaattttgcctggcaatggtcctactgccattttttttttcccactctgatctcacttaagtttgatatcaaacacaattgggaggcaatagtatcaatatcctaaatgtagaaattaaaagatactgtataattttatgcctttgcaaagattcgttcttgtatttgaataaattcagttgctaaagtagatccaaagtgttaaaaatgctgaagtcatgtcaagtactgtctggagggtttttttaagaaaaggcatttggcatttaactgtctcttgttttatttttaagtttttggaaaccttttgacataaaatgctgccaagtatctaagaaatgtatatactgacagaagatatttgaaagtggaaaattggaaatgaaatatgttgctgggtgcgttaatcacctccgcccaggatttagtcacttgcaggacctctttatagtctaggatggcagagcagaagattttaatatgcttttattaagtgatgtaaaataaatgctttttggattatcaatgaaagcaattttatgtgtgcctgaagcaagaaaatagcgtttttggttttatctcatattttcttggcaaaattgagagaaattaggaacactgctatttttttcttaaaaatgtttttaagaatatgttcgtttctttgactattaagaaccccttgtggtattagtgtgtgaagagataagggcatttgtttcaatgaaaaagttagtgttaaaggaagtgagtcagggagggcggagtttgttgtaaggcaatcacctgtcaaaacagaaattgggtgggaaaggagtctttatcttggggagcaaaagctgacttttaaacttgacccctgctgtttttaaacagcttttccttttggtctctgacagtcaatccaggttttatgttatttcaaaagggttatttttgtcctccttttttaatagcttcaggaaagttaaaggtatcatcttaggtctaacactctagtctttgagagttacggttctttcgtagaacaatttccatgttgttaactgttgtagacttaattgaatcacattttgggaccagatgtatttggggatagaattctttaaatgtatgggacttcatgcttcctgattatgtaatatttcctgtggttgggaatcctagaatgcctgatctattttatctgttcaggtagttttgttattgtaccctcttttgggtcatattctagtatttctcacagggggtatgagaaacagaaagctatatgtagcagctggtcttgagaagtagaagcatcttaactgtcataagagcatagattttttgtttttcacaacagctggaataagttcctgcattataagtataaagggaaccgagatttaatttggagatcatcactgttaaaacgataccagacatttgtcacagtgtcttatttggggaaagtttgctaatatacattttgtctgtgaaaatatagtaaattttaaaatactaatataatgtggtattcttgattacagtattttatgcagactattaggaatgattcagtgcatttaactgaacacagagctagttctaggtgagtgagatctttatctattaactggattttgaaggtttgagaaggctatggggatcatctggttgaaaggttctcaaacttgaccatatatcaaaatcacctggagcttaaaacatgtactgctgggaccctcctccagtttcttacccagtgggtctcgggtagggtctcaattttcatttctaacaagtttccaagtgattgtgttattgctgttccagggaccacactttgaaaaccagtgatctagactgaactccaaatgagtactatactgacagccacctagatattgagagacacagacttcagactcatgtcacacattttggagtgctgtctactacagttagagaataatctctattgaaatctaagctaaagaggacatataccatttatactaagactaactgttgtgtgtgaaatagaataaacattgcaggtagtttttgatcattttcacattattacaggaacattttgactatggttttcaatgttaattcagaagttgactttaaatgaaaatgtggttagaatagaggcaaagcctaagtgatcagaatcaacattccccttctccccaacctaggggaaaaaaaatttgaaaagtatgtcttcaataaaaggggacactttatttgtcttctcttcaacattaaaaaacaaagattttaagttttcatggcaagggttctaaaaatcattgtgccagagaatttaaatcttcatatcatggtaagcacatgcgtatgtctgtgactcagtttcttagccagacttccaggtgttagttaattccttctcatttagttctactgtaatccattctgggaaaatgcataccacaaaactgtgtatcttgcagcttctttcgttatgcatcttaattccctcagaaggtcccagaactttatgttaaagatctgggtttttaaagacaatttgggggccttctaaagaaacaatagtagatctaattacaagtagtggattgcttacttcaaatttctcttttacaatttagaaagtttagtaccagtttatagactgagggagtagtagctactatttagatgctgagaataatattatcatgcttgggtggggaagaaaggcccttactcaaatctccattttcatttttaatgcttcctggacttcagttattttcttgcttttgcctcaagaataataaatatttttggttaaaa

SEQ ID NO: 133101 - protein, 660 aa, Artificial Sequence
  derived and/or modified sequence
MDVLVSECSARLLQQEEEIKSLTAEIDRLKNCGCLGASPNLEQLQEENLKLKYRLNILRKSLQAERNKPTKNMINIISRLQEVFGHAIKAAYPDLENPPLLVTPSQQAKFGDYQCNSAMGISQMLKTKEQKVNPREIAENITKHLPDNECIEKVEIAGPGFINVHLRKDFVSEQLTSLLVNGVQLPALGENKKVIVDFSSPNIAKEMHVGHLRSTIIGESISRLFEFAGYDVLRLNHVGDWGTQFGMLIAHLQDKFPDYLTVSPPIGDLQVFYKESKKRFDTEEEFKKRAYQCVVLLQGKNPDITKAWKLICDVSRQELNKIYDALDVSLIERGESFYQDRMNDIVKEFEDRGFVQVDDGRKIVFVPGCSIPLTIVKSDGGYTYDTSDLAAIKQRLFEEKADMIIYVVDNGQSVHFQTIFAAAQMIGWYDPKVTRVFHAGFGVVLGEDKKKFKTRSGETVRLMDLLGEGLKRSMDKLKEKERDKVLTAEELNAAQTSVAYGCIKYADLSHNRLNDYIFSFDKMLDDRGNTAAYLLYAFTRIRSIARLANIDEEMLQKAARETKILLDHEKEWKLGRCILRFPEILQKILDDLFLHTLCDYIYELATAFTEFYDSCYCVEKDRQTGKILKVNMWRMLLCEAVAAVMAKGFDILGIKPVQRM

SEQ ID NO: 133102 - protein, 454 aa, Artificial Sequence [sequence omitted]

SEQ ID NO: 133103 - DNA, 1365 bp, Artificial Sequence
  derived and/or modified sequence
atgcacgtcggccatctgcggagtaccatcataggggagtctatctctaggcttttcgagtttgccggctatgacgtgctccggctcaaccacgttggcgactggggcacacaattcggaatgttgatcgctcacttgcaggataagttcccagactatctgacagtgtccccacccattggagatctccaggtgttttataaagagagcaagaagagattcgatacagaggaagagtttaaaaaacgcgcttatcagtgtgtggttttactccagggcaagaaccccgacataaccaaagcatggaaattgatctgcgatgtttcaaggcaggagctgaataaaatatatgatgccctggacgtctccctgatcgagcgtggagaatctttctatcaagatcggatgaatgatattgttaaagaatttgaagatcgaggattcgtgcaggtggacgatggccggaagattgtcttcgttcctggatgttcgatacctctcacaattgtgaagtctgatggcggctatacctacgatacgtccgatctagccgccattaagcagaggctgttcgaggagaaggccgacatgattatctacgtggtggacaacggccagtcagtacactttcaaaccattttcgctgccgctcagatgatcggctggtatgatcctaaagtgacccgcgtctttcacgcaggcttcggcgtggtgcttggcgaagacaagaaaaaattcaagacccgctccggagagaccgtgaggctgatggatcttctgggagaaggtctcaagcgttccatggacaagttgaaggagaaagagagagataaagtgttgaccgcagaagagctcaacgctgctcagacgtccgttgcttatgggtgcatcaagtatgccgatctgtctcataaccgtctgaacgactacattttcagcttcgacaaaatgctggatgatagaggaaataccgcggcctacctgctgtacgcttttaccaggataagatcaatagccaggctggctaacatcgatgaggagatgctgcagaaagcagcgagagaaactaagatcctgcttgaccatgagaaggaatggaagctggggagatgcatcctgcggtttcccgaaatcctgcagaagatattagatgacctctttcttcacaccctctgcgattatatctacgagctggcgacagcattcaccgaattttacgatagctgctactgtgtagaaaaggatagacagaccggtaagatcctcaaggtgaatatgtggcggatgctcttatgtgaggccgtggccgccgttatggcaaaagggtttgatatcctaggcataaagccagtgcagcgcatgtag

SEQ ID NO: 133104 - DNA, 1983 bp, Artificial Sequence
  derived and/or modified sequence
atggatgtgctggtgtcagaatgcagtgcccggctgcttcagcaggaggaagaaataaagtcgctaactgccgaaattgatcgccttaagaactgtggatgcctgggggccagcccaaatctggagcagctgcaggaggagaatctgaaattaaagtatagactgaatattttgcggaagagcctgcaggctgagcgcaacaagccgactaaaaatatgataaatatcatcagtcgtctccaggaggtatttggccacgcaatcaaggctgcatatcccgacttggaaaaccctccactgctagtgacaccttctcaacaggcaaaattcggcgactaccagtgtaactccgccatggggatatcccagatgctcaagaccaaagaacagaaggtgaacccccgggagatcgccgagaacatcacaaaacacctcccggataacgaatgcatcgaaaaagtggagatcgcaggtccaggctttattaacgtgcacctgcggaaggatttcgtgagcgagcaactgactagcctgctggtcaatggtgttcagctgccagccctgggtgaaaacaaaaaagtgatcgtagacttttcaagccccaacatcgctaaggagatgcacgttggccatctgaggagcacaataattggagagtcgatttcccggctgttcgagttcgctggctatgacgtgttaagattaaatcacgtgggggattgggggacacaatttgggatgctgattgcccacctacaggacaaatttccggattatctgacggtaagccctccgattggtgatcttcaagtattttacaaagagagcaaaaagaggttcgacactgaagaagagttcaagaaaagggcatatcagtgtgttgtgctgctgcagggcaagaaccccgatatcacaaaagcctggaagttaatatgcgatgtctcgaggcaggagctcaacaagatctatgatgcactggacgtctctctaatcgaacgaggggagtctttctatcaggatcgtatgaacgatattgtcaaagaatttgaggatagggggttcgtccaggtggatgatgggagaaaaatagtgttcgtgccgggctgctctataccattgactattgtcaagagcgatgggggatatacatacgatacgtcagacctcgccgcaataaaacagagactgtttgaagaaaaagcggacatgattatatatgtcgtagacaatggtcagtctgttcatttccagaccatcttcgccgccgcacagatgatcgggtggtatgatcctaaagtcacacgtgtcttccatgcaggtttcggagtagtgctgggcgaggataagaaaaaatttaaaacacggtcaggtgagactgttcggcttatggacttattgggtgagggtttaaagaggtctatggataagctcaaggaaaaagagcgggataaggtgctaaccgcagaagaacttaacgcagcacaaactagcgtcgcttatggatgcataaagtatgcagatctctcccacaataggttgaacgactacatattttcgttcgataaaatgcttgacgaccgcggcaataccgctgcttatcttctctatgcctttacacgtattcgaagcattgcgcgcttggcaaatatcgacgaagagatgcttcagaaagccgcgcgagagactaagatcctgcttgaccacgagaaggaatggaagctgggacgatgcatcctgcgattcccagagatactccagaagattttggacgacttgttcctgcatactctctgcgactatatctatgagctggccaccgccttcacggagttttacgactcctgttactgtgttgagaaagaccggcagactggtaagatccttaaagttaatatgtggagaatgctactgtgcgaggcggttgcagccgtcatggcaaagggatttgacatccttggaataaaacctgtgcaacgcatgtag

SEQ ID NO: 133105 - DNA, 1365 bp, Artificial Sequence
  derived and/or modified sequence
atgcacgtgggccacctgcggagcaccatcattggagagagcatcagccggctgtttgaatttgctggctatgatgtgctgcggctgaaccacgtgggggactggggcacccagtttggcatgctgattgcccacctgcaggacaagttcccagactacctgactgtgagcccccccatcggggacctgcaggtgttctacaaggagagcaagaagagatttgacacagaggaggagttcaagaagagggcctaccagtgtgtggtgctgctgcagggcaagaacccagacatcaccaaggcctggaagctgatctgtgatgtgtcccggcaggagctgaacaagatctatgatgccctggatgtgtccctgattgagcggggggagagcttctaccaggacaggatgaatgacatcgtgaaggagtttgaggaccggggctttgtgcaggtggatgatggcaggaagatcgtgtttgtgcccggctgcagcatccccctgaccatcgtgaagagtgatggcggctacacctatgacaccagtgacctggccgccatcaagcagaggctgtttgaggagaaggctgacatgatcatctacgtggtggacaatggccagagcgtgcacttccagaccatctttgctgctgcccagatgattggctggtatgaccccaaggtgaccagggtcttccacgccggctttggagtggtgctgggggaggacaagaagaagttcaagaccaggtctggagaaacagtgcggctgatggacctgctgggggagggcctgaagaggtccatggacaagctgaaggagaaggagcgggacaaggtgctgacagctgaggagctgaatgctgcccagacctctgtggcctacggctgcatcaagtatgctgacctgagccacaaccggctgaatgactacatcttctcctttgacaagatgctggatgaccggggcaacacagctgcctacctgctgtatgccttcacccgcatccgcagcatcgcccggctggccaacattgatgaggagatgctgcagaaggccgcccgggagaccaagatcctgctggaccacgagaaggagtggaagctgggccgctgcatcctgcgcttccctgagatcctgcagaagatcctggatgacctcttcctgcacaccctgtgtgactacatctatgagctggccacagccttcacagagttctatgacagctgctactgtgtggagaaggaccggcagacaggcaagatcctgaaggtgaacatgtggaggatgctgctgtgtgaggccgtggccgctgtgatggccaagggctttgacatcctgggcatcaagcctgtgcagaggatgtag

SEQ ID NO: 133106 - DNA, 1983 bp, Artificial Sequence
  derived and/or modified sequence
atggatgtgctggtgtctgaatgttctgcccggctgctgcagcaggaggaggagatcaagagcctgacagctgagattgaccggctgaagaactgtggctgcctgggcgccagccccaacctggagcagctgcaggaggagaacctgaagctgaagtaccgcctgaacatcctgaggaagagcctgcaggccgagaggaacaagcccaccaagaacatgatcaacatcatcagccggctgcaggaggtgtttggccacgccatcaaggccgcctacccagacctggagaacccccccctgctggtgacccccagccagcaggccaagtttggagactaccagtgcaacagcgccatgggcatcagccagatgctgaagaccaaggagcagaaggtgaacccccgggagattgctgagaacatcaccaagcacctgcctgacaatgaatgtattgagaaggtggagattgctggccctggcttcatcaacgtgcacctgaggaaggactttgtgtctgagcagctgaccagcctgctggtgaatggagtgcagctgcctgccctgggggagaacaagaaggtgattgtggacttcagcagccccaacatcgccaaggagatgcacgtgggccacctgcggagcaccatcattggagagagcatcagccggctgtttgaatttgctggctatgatgtgctgcggctgaaccacgtgggggactggggcacccagtttggcatgctgattgcccacctgcaggacaagttcccagactacctgactgtgagcccccccatcggggacctgcaggtgttctacaaggagagcaagaagagatttgacacagaggaggagttcaagaagagggcctaccagtgtgtggtgctgctgcagggcaagaacccagacatcaccaaggcctggaagctgatctgtgatgtgtcccggcaggagctgaacaagatctatgatgccctggatgtgtccctgattgagcggggggagagcttctaccaggacaggatgaatgacatcgtgaaggagtttgaggaccggggctttgtgcaggtggatgatggcaggaagatcgtgtttgtgcccggctgcagcatccccctgaccatcgtgaagagtgatggcggctacacctatgacaccagtgacctggccgccatcaagcagaggctgtttgaggagaaggctgacatgatcatctacgtggtggacaatggccagagcgtgcacttccagaccatctttgctgctgcccagatgattggctggtatgaccccaaggtgaccagggtcttccacgccggctttggagtggtgctgggggaggacaagaagaagttcaagaccaggtctggagaaacagtgcggctgatggacctgctgggggagggcctgaagaggtccatggacaagctgaaggagaaggagcgggacaaggtgctgacagctgaggagctgaatgctgcccagacctctgtggcctacggctgcatcaagtatgctgacctgagccacaaccggctgaatgactacatcttctcctttgacaagatgctggatgaccggggcaacacagctgcctacctgctgtatgccttcacccgcatccgcagcatcgcccggctggccaacattgatgaggagatgctgcagaaggccgcccgggagaccaagatcctgctggaccacgagaaggagtggaagctgggccgctgcatcctgcgcttccctgagatcctgcagaagatcctggatgacctcttcctgcacaccctgtgtgactacatctatgagctggccacagccttcacagagttctatgacagctgctactgtgtggagaaggaccggcagacaggcaagatcctgaaggtgaacatgtggaggatgctgctgtgtgaggccgtggccgctgtgatggccaagggctttgacatcctgggcatcaagcctgtgcagaggatgtag

SEQ ID NO: 133107 - DNA, 1365 bp, Artificial Sequence
  derived and/or modified sequence
atgcacgtgggccacctgcggagcaccatcatcggcgagagcatctctcgcctgttcgagtttgcaggctatgatgtgttgcggcttaaccatgtcggcgactggggaacccagtttggcatgctaatcgcccatctgcaggacaagttccctgattacttaacagtctcccctccaattggggacctgcaggtattctacaaggagtctaagaaacggttcgacacagaggaggagtttaaaaagagggcttaccagtgtgttgtgcttctgcaaggaaagaatcctgatattactaaggcatggaaactgatctgcgacgtttcacgtcaggaattgaataagatttacgatgccctcgatgtgagcctgattgagagaggggaatccttttaccaggatcgaatgaatgacatcgtgaaagagttcgaggacaggggctttgtccaggtggacgatgggaggaaaattgtctttgtacctggctgctctattcccctcaccatcgtaaagtccgacggagggtacacatatgacacatctgatctcgccgctatcaagcagcggctatttgaggagaaagctgacatgataatctatgtggttgacaacggccagtcagtacactttcagacaatctttgcagccgcccagatgattgggtggtatgacccaaaagtcacacgcgtatttcacgctggcttcggggtagtccttggtgaagataaaaagaaattcaagactaggagcggggagacagtgcgtctaatggatttgttgggtgagggccttaagcggagcatggacaagctaaaggagaaggagcgcgataaggtcctgaccgctgaagaactcaacgcggctcagacaagtgtcgcttatgggtgcatcaagtacgctgatttgtcacacaataggttgaatgattacattttctccttcgacaagatgctcgatgataggggtaataccgctgcctatctcctttatgcctttacccgaattcggagtatcgcacgactagccaatatagatgaggaaatgctgcaaaaagcagcaagggaaacaaaaatactgctagatcacgagaaagaatggaaactaggacggtgcatcctgaggtttccagaaatactgcagaaaatcctggatgacctgttcctgcacaccctctgtgattatatttatgaactggcaaccgccttcaccgagttctacgattcatgctactgtgtagagaaagatcgacaaaccgggaagattctgaaggtgaatatgtggagaatgttgttatgtgaggcagtcgccgccgtcatggcaaaggggttcgacatcctgggtattaagcctgtccagagaatgtag

SEQ ID NO: 133108 - DNA, 1983 bp, Artificial Sequence
  derived and/or modified sequence
atggacgtgctggtgagcgagtgcagcgcccggctgctgcagcaggaagaagagatcaaaagcttgaccgctgagattgacagactgaagaattgtggctgtctcggggcttcccccaatcttgagcagctccaggaagaaaacctgaagctgaaatacagactcaatattctacggaagtcactgcaagcggagaggaataaaccgactaaaaacatgattaacatcatctcaaggttgcaagaagtgttcggacacgcgataaaagccgcctacccggatctggaaaacccaccgttgctggtgactccctcccagcaagccaagtttggcgactatcaatgtaactcagcgatggggatttctcagatgcttaaaacgaaagaacaaaaagtcaaccctagagagattgctgaaaatatcaccaaacaccttcctgataacgaatgtatcgagaaggttgaaatcgctgggccgggcttcattaatgttcacctccggaaggactttgtgagtgagcagctgaccagcttgctggtgaacggagtgcagctccccgccctcggggaaaacaagaaggtcatcgtggatttcagcagccccaacatcgctaaagagatgcacgttggccacctgaggtccaccatcatcggggagagcatctccaggctcttcgaattcgcgggctatgacgtcttgaggctaaaccacgttggggactggggaacccagttcggaatgttgatagcccatctccaggacaaattcccagattatttaactgtgagtcctccgatcggggacctccaagtgttttacaaagaatctaagaagcgcttcgacacagaggaggagttcaagaagagagcctaccagtgtgtggtgctgttgcagggcaaaaaccccgatatcactaaagcctggaagctgatctgcgacgtgtccagacaggagctcaacaagatatatgacgccctcgacgtctctctgatcgaaaggggagagagcttttaccaggataggatgaacgacattgttaaggagttcgaggatcgcggcttcgtgcaggtggatgatggaaggaagattgtctttgtccccggctgttcaatcccgcttacaattgtgaagagcgatggagggtatacctacgacacctcagatctggccgccattaaacaaaggctgttcgaagagaaggctgacatgatcatttatgtggttgacaatggccagtccgtccatttccagactattttcgcagccgctcaaatgatcggctggtatgatcctaaagtgacgcgcgtcttccatgctggattcggggtcgtgttgggcgaagacaaaaaaaagtttaaaacccgttccggagagactgtacgacttatggatctgctgggagagggcctcaaaagatccatggataaactgaaagaaaaagagcgtgacaaagttttgaccgctgaagaacttaacgctgcacagacatccgtggcttacggatgcattaaatacgctgatctgtcgcacaataggctaaatgactatatcttttccttcgacaagatgctcgacgatagaggcaacactgctgcttacctcctctatgcctttacccggatccgttctattgcacggctggcaaatatcgacgaagaaatgctgcaaaaagcagcccgagagaccaagatcctcctcgatcacgagaaagagtggaagctgggaaggtgcattctccgattccctgagatcctccagaagattctcgacgatcttttcctgcatacactgtgcgactacatttacgaactcgccacagcctttacagaattctatgactcctgctactgcgtggagaaggatcgtcagacagggaagatattgaaggtcaatatgtggaggatgctgctgtgcgaggccgtggcggctgtcatggctaagggctttgatatcctgggcattaaaccggtccagaggatgtag

SEQ ID NO: 133109 - DNA, 1365 bp, Artificial Sequence
  derived and/or modified sequence
atgcacgtaggccacctccgcagtacgatcataggggagagtatctccaggctgttcgaattcgcgggttatgacgtattaaggctcaaccatgtcggagattggggaacacagttcggtatgcttatcgctcatctgcaagacaagtttcctgattacctgactgtgagtccgccaattggagatctgcaggtgttctataaagagagcaagaagcggttcgataccgaggaggagttcaaaaaaagagcctaccagtgcgtggtgctcctgcagggcaagaatccagacatcacgaaagcctggaaactgatctgtgatgtgtcaaggcaagagctcaataagatctatgatgctctagatgtctctttgatcgagcgaggggagagcttttatcaggatcggatgaatgacattgttaaggagttcgaggacaggggcttcgtgcaggttgacgatggcagaaagatcgtttttgtgccgggatgtagcatccctctcacaatcgtcaagtctgacggtggatacacatatgatacaagcgacctagccgcaatcaaacagcggctgttcgaagaaaaagcagacatgatcatttacgtggtcgataacggtcaatcggttcatttccagacaatcttcgctgccgcacagatgattggctggtacgatccaaaagttactagagtgttccacgcaggctttggggtcgtgctcggtgaagacaagaaaaagttcaagacaaggtctggagaaacagtgcggctgatggatctgcttggcgaaggcctcaaacgaagtatggataaactgaaggagaaagaacgagacaaggtcctgactgcggaggagcttaatgcagcacaaacctctgtggcgtatggctgtattaaatatgccgatcttagccataaccgattgaatgactatattttttcattcgataagatgctggacgacaggggcaacactgccgcttatttgctgtacgccttcaccagaatccgaagcattgcgagacttgccaatatcgatgaagagatgcttcagaaggccgctcgcgaaaccaagattcttcttgaccatgagaaggaatggaaactcggacggtgcattctgcgctttcctgaaatccttcagaagatcctcgatgatctgttcctacatactctatgtgactacatttacgagctcgcaaccgcttttactgagttctacgactcttgctactgcgtcgaaaaagatcgccagactggtaagatcctgaaagtgaacatgtggaggatgttgttatgcgaagccgtggctgccgtcatggccaaaggttttgacatattgggcatcaagcccgtgcagcggatgtag

SEQ ID NO: 133110 - DNA, 1983 bp, Artificial Sequence
  derived and/or modified sequence
atggacgtcctcgtaagcgaatgctcagccagactgctacagcaagaagaagaaattaaatctctgaccgctgaaatcgaccgcctcaaaaactgcggttgtcttggggctagtcctaatctagagcaattgcaggaggaaaacctcaaattgaagtacagactgaacatattacgcaagtctctgcaggccgaaagaaataagccaacaaaaaacatgatcaatatcataagcaggctgcaggaggtctttggacacgcaattaaggccgcatatcctgacctcgaaaacccaccgctactggttaccccttctcagcaggccaagttcggggactaccaatgtaattcagctatgggcatctcacaaatgctgaagaccaaggagcagaaagtcaacccgagggaaatcgccgagaacatcacaaagcatctccccgacaacgagtgtatcgagaaggtggagattgcgggtcctgggtttattaacgtgcacctgcgaaaagatttcgtgagcgagcagctgacaagtctgttggtcaacggggtgcagctgccagccttgggagagaacaaaaaggtaattgtcgatttttctagcccaaatatcgccaaagagatgcacgtggggcacctgagatctacgattatcggagaatccatctcaagactctttgaatttgcagggtacgacgtcctgcgcctgaaccatgtcggggattggggcactcaattcggaatgctgatcgcacatttacaggataaatttccagactatctgacggtctcaccaccaataggagatttgcaagtgttttacaaagagagtaagaaaagattcgacacggaggaggaatttaaaaagcgcgcttaccagtgcgtcgtgctgctgcagggaaagaaccccgatattacaaaagcttggaagcttatatgcgatgtgagtaggcaggaattgaacaaaatttacgacgctctggacgtgtctctaatcgaacgcggtgaatctttttatcaggaccggatgaacgatattgttaaggagttcgaggacagaggatttgtccaggtcgacgatggcaggaaaatcgtgttcgtgcccggatgcagcatacccctgacaatcgtgaagtcagatggcggttatacatatgacacatcggacttagccgctatcaagcagaggctttttgaggagaaggccgacatgataatctacgtcgtggacaatggacagtcagttcactttcagactatctttgcagccgctcaaatgatcggctggtacgaccccaaggtgacccgtgtgttccacgccggattcggagttgtcctgggtgaggataagaagaaattcaaaaccagaagcggtgaaaccgtgcggctcatggaccttttgggcgaggggctaaaacgatccatggacaagctgaaggagaaggagagagacaaggtgctgaccgctgaagaactgaatgccgcacagacttccgtggcctatggctgcatcaagtatgcggatctgtctcataaccgactcaatgactacatttttagttttgacaaaatgctagacgaccgcggaaacaccgctgcttatctgctctatgcctttaccaggattagatctattgctcggctagcgaatatcgatgaagaaatgcttcagaaagcagcaagggagaccaaaatcctactggaccacgagaaagagtggaagctgggtagatgtattctcagatttcccgagatcctgcagaagattcttgacgatctgtttctgcatactctctgcgattatatctatgaactcgcaacagcctttactgagttttacgacagctgctactgcgtcgagaaagacagacagaccggcaagatccttaaggtgaatatgtggcgcatgttactgtgtgaagcagtcgccgctgtaatggccaaaggctttgatatcctcgggatcaagcccgtgcagcggatgtag

SEQ ID NO: 133111 - DNA, 2146 bp, Artificial Sequence
  derived and/or modified sequence
gaggctgaccgtttccgcttccgtccacttggcgagtgagacgctgatgggaggatggacgtactggtgtctgagtgctccgcgcggctgctgcagcaggaagaagagattaaatctctgactgctgaaattgaccggttgaaaaactgtggctgtttaggagcttctccaaatttggagcagttacaagaagaaaatttaaaattaaagtatcgactgaatattcttcgaaagagtcttcaggcagaaaggaacaaaccaactaaaaatatgattaacattattagccgcctacaagaggtctttggtcatgcaattaaggctgcatatccagatttggaaaatcctcctctgctagtgacaccaagtcagcaggccaagtttggggactatcagtgtaatagtgctatgggtatttctcagatgctcaaaaccaaggaacagaaagttaatccaagagaaattgctgaaaacattaccaaacacctcccagacaatgaatgtattgaaaaagttgaaattgctggtcctggttttattaatgtccacttaagaaaggattttgtatcagaacaattgaccagtcttctagtgaatggagttcaactacctgctctgggagagaataaaaaggttatagttgacttttcctcccctaatatagctaaagagatgcatgtaggccacctgaggtcaactatcataggagagagtataagccgcctctttgaatttgcagggtatgacgtgctcaggttaaatcatgtaggagactgggggacccagtttggcatgctcatcgctcacctgcaagacaaatttccagattatctaacagtttcacctcctattggggatcttcaggtcttttataaggaatctaagaagaggtttgatactgaggaggaatttaagaagcgagcatatcagtgtgtagttctgctccagggtaaaaacccagatattacaaaagcttggaagcttatctgtgatgtctcccgccaagagttaaataaaatctatgatgcattggacgtctctttaatagagagaggggaatccttctatcaagataggatgaatgatattgtaaaggaatttgaagatagaggatttgtgcaggtggatgatggcagaaagattgtatttgtcccagggtgttccataccattaaccatagtaaaatcagatggaggttatacctatgatacatctgacctggctgctattaaacaaagactatttgaggaaaaagcagatatgattatctatgttgtggacaatggacaatctgtgcacttccagacaatatttgctgctgctcaaatgattggttggtatgaccctaaagtaactcgagtcttccatgctggatttggtgtggtgctaggggaagacaagaaaaagtttaaaacacgttcgggtgaaacagtgcgcctcatggatcttctgggagaaggactaaaacgatccatggacaagttgaaggaaaaagaaagagacaaggtcttaactgcagaggaattgaatgctgctcagacatccgttgcgtatggctgcatcaaatatgctgacctttcccataaccggttgaatgactacatcttctcctttgacaaaatgctagatgacagaggaaatacagctgcttacttgttgtatgccttcactagaatcaggtctattgcacgtctggccaatattgatgaagaaatgctccaaaaagctgctcgagaaaccaagattcttttggatcatgagaaggaatggaaactaggccggtgcattttacggttccctgagattctgcaaaagattttagatgacttatttctccacactctctgtgattatatatatgagctggcaactgctttcacagagttctatgatagctgctactgtgtggagaaagatagacagactggaaaaatattgaaggtgaacatgtggcgtatgctgctatgtgaagcagtagctgctgtcatggccaaggggtttgatatcctgggaataaaacctgtccaaaggatgtaatccttcataggtttgaacactgtgtgtttttaccaaagtggccattggcactgtttgcttttttacaatcatgtggacacaagcataagtaaagaaaatttgtcaacca

SEQ ID NO: 133112 - DNA, 1990 bp, Artificial Sequence
  derived and/or modified sequence
atgggaggatggacgtactggtgtctgagtgctccgcgcggctgctgcagcaggaagaagagattaaatctctgactgctgaaattgaccggttgaaaaactgtggctgtttaggagcttctccaaatttggagcagttacaagaagaaaatttaaaattaaagtatcgactgaatattcttcgaaagagtcttcaggcagaaaggaacaaaccaactaaaaatatgattaacattattagccgcctacaagaggtctttggtcatgcaattaaggctgcatatccagatttggaaaatcctcctctgctagtgacaccaagtcagcaggccaagtttggggactatcagtgtaatagtgctatgggtatttctcaggttttattaatgtccacttaagaaaggattttgtatcagaacaattgaccagtcttctagtgaatggagttcaactacctgctctgggagagaataaaaaggttatagttgacttttcctcccctaatatagctaaagagatgcatgtaggccacctgaggtcaactatcataggagagagtataagccgcctctttgaatttgcagggtatgacgtgctcaggttaaatcatgtaggagactgggggacccagtttggcatgctcatcgctcacctgcaagacaaatttccagattatctaacagtttcacctcctattggggatcttcaggtcttttataaggaatctaagaagaggtttgatactgaggaggaatttaagaagcgagcatatcagtgtgtagttctgctccagggtaaaaacccagatattacaaaagcttggaagcttatctgtgatgtctcccgccaagagttaaataaaatctatgatgcattggacgtctctttaatagagagaggggaatccttctatcaagataggatgaatgatattgtaaaggaatttgaagatagaggatttgtgcaggtggatgatggcagaaagattgtatttgtcccagggtgttccataccattaaccatagtaaaatcagatggaggttatacctatgatacatctgacctggctgctattaaacaaagactatttgaggaaaaagcagatatgattatctatgttgtggacaatggacaatctgtgcacttccagacaatatttgctgctgctcaaatgattggttggtatgaccctaaagtaactcgagtcttccatgctggatttggtgtggtgctaggggaagacaagaaaaagtttaaaacacgttcgggtgaaacagtgcgcctcatggatcttctgggagaaggactaaaacgatccatggacaagttgaaggaaaaagaaagagacaaggtcttaactgcagaggaattgaatgctgctcagacatccgttgcgtatggctgcatcaaatatgctgacctttcccataaccggttgaatgactacatcttctcctttgacaaaatgctagatgacagaggaaatacagctgcttacttgttgtatgccttcactagaatcaggtctattgcacgtctggccaatattgatgaagaaatgctccaaaaagctgctcgagaaaccaagattcttttggatcatgagaaggaatggaaactaggccggtgcattttacggttccctgagattctgcaaaagattttagatgacttatttctccacactctctgtgattatatatatgagctggcaactgctttcacagagttctatgatagctgctactgtgtggagaaagatagacagactggaaaaatattgaaggtgaacatgtggcgtatgctgctatgtgaagcagtagctgctgtcatggccaaggggtttgatatcctgggaataaaacctgtccaaaggatgtaatccttcataggtttgaacactgtgtgtttttaccaaagtggccattggcactgtttgcttttttacaatcatgtggacacaagcataagtaaagaaaatttgtcaacc

SEQ ID NO: 133113 - DNA, 1365 bp, Artificial Sequence
  derived and/or modified sequence
atgcacgtgggccacctgagaagcaccatcatcggcgagagcatcagcagactgttcgagttcgccggctacgacgtgctgagactgaaccacgtgggcgactggggcacccagttcggcatgctgatcgcccacctgcaggacaagttccccgactacctgaccgtgagcccccccatcggcgacctgcaggtgttctacaaggagagcaagaagagattcgacaccgaggaggagttcaagaagagagcctaccagtgcgtggtgctgctgcagggcaagaaccccgacatcaccaaggcctggaagctgatctgcgacgtgagcagacaggagctgaacaagatctacgacgccctggacgtgagcctgatcgagagaggcgagagcttctaccaggacagaatgaacgacatcgtgaaggagttcgaggacagaggcttcgtgcaggtggacgacggcagaaagatcgtgttcgtgcccggctgcagcatccccctgaccatcgtgaagagcgacggcggctacacctacgacaccagcgacctggccgccatcaagcagagactgttcgaggagaaggccgacatgatcatctacgtggtggacaacggccagagcgtgcacttccagaccatcttcgccgccgcccagatgatcggctggtacgaccccaaggtgaccagagtgttccacgccggcttcggcgtggtgctgggcgaggacaagaagaagttcaagaccagaagcggcgagaccgtgagactgatggacctgctgggcgagggcctgaagagaagcatggacaagctgaaggagaaggagagagacaaggtgctgaccgccgaggagctgaacgccgcccagaccagcgtggcctacggctgcatcaagtacgccgacctgagccacaacagactgaacgactacatcttcagcttcgacaagatgctggacgacagaggcaacaccgccgcctacctgctgtacgccttcaccagaatcagaagcatcgccagactggccaacatcgacgaggagatgctgcagaaggccgccagagagaccaagatcctgctggaccacgagaaggagtggaagctgggcagatgcatcctgagattccccgagatcctgcagaagatcctggacgacctgttcctgcacaccctgtgcgactacatctacgagctggccaccgccttcaccgagttctacgacagctgctactgcgtggagaaggacagacagaccggcaagatcctgaaggtgaacatgtggagaatgctgctgtgcgaggccgtggccgccgtgatggccaagggcttcgacatcctgggcatcaagcccgtgcagagaatgtag

SEQ ID NO: 133114 - DNA, 1983 bp, Artificial Sequence
  derived and/or modified sequence
atggacgtgctggtgagcgagtgcagcgccagactgctgcagcaggaggaggagatcaagagcctgaccgccgagatcgacagactgaagaactgcggctgcctgggcgccagccccaacctggagcagctgcaggaggagaacctgaagctgaagtacagactgaacatcctgagaaagagcctgcaggccgagagaaacaagcccaccaagaacatgatcaacatcatcagcagactgcaggaggtgttcggccacgccatcaaggccgcctaccccgacctggagaacccccccctgctggtgacccccagccagcaggccaagttcggcgactaccagtgcaacagcgccatgggcatcagccagatgctgaagaccaaggagcagaaggtgaaccccagagagatcgccgagaacatcaccaagcacctgcccgacaacgagtgcatcgagaaggtggagatcgccggccccggcttcatcaacgtgcacctgagaaaggacttcgtgagcgagcagctgaccagcctgctggtgaacggcgtgcagctgcccgccctgggcgagaacaagaaggtgatcgtggacttcagcagccccaacatcgccaaggagatgcacgtgggccacctgagaagcaccatcatcggcgagagcatcagcagactgttcgagttcgccggctacgacgtgctgagactgaaccacgtgggcgactggggcacccagttcggcatgctgatcgcccacctgcaggacaagttccccgactacctgaccgtgagcccccccatcggcgacctgcaggtgttctacaaggagagcaagaagagattcgacaccgaggaggagttcaagaagagagcctaccagtgcgtggtgctgctgcagggcaagaaccccgacatcaccaaggcctggaagctgatctgcgacgtgagcagacaggagctgaacaagatctacgacgccctggacgtgagcctgatcgagagaggcgagagcttctaccaggacagaatgaacgacatcgtgaaggagttcgaggacagaggcttcgtgcaggtggacgacggcagaaagatcgtgttcgtgcccggctgcagcatccccctgaccatcgtgaagagcgacggcggctacacctacgacaccagcgacctggccgccatcaagcagagactgttcgaggagaaggccgacatgatcatctacgtggtggacaacggccagagcgtgcacttccagaccatcttcgccgccgcccagatgatcggctggtacgaccccaaggtgaccagagtgttccacgccggcttcggcgtggtgctgggcgaggacaagaagaagttcaagaccagaagcggcgagaccgtgagactgatggacctgctgggcgagggcctgaagagaagcatggacaagctgaaggagaaggagagagacaaggtgctgaccgccgaggagctgaacgccgcccagaccagcgtggcctacggctgcatcaagtacgccgacctgagccacaacagactgaacgactacatcttcagcttcgacaagatgctggacgacagaggcaacaccgccgcctacctgctgtacgccttcaccagaatcagaagcatcgccagactggccaacatcgacgaggagatgctgcagaaggccgccagagagaccaagatcctgctggaccacgagaaggagtggaagctgggcagatgcatcctgagattccccgagatcctgcagaagatcctggacgacctgttcctgcacaccctgtgcgactacatctacgagctggccaccgccttcaccgagttctacgacagctgctactgcgtggagaaggacagacagaccggcaagatcctgaaggtgaacatgtggagaatgctgctgtgcgaggccgtggccgccgtgatggccaagggcttcgacatcctgggcatcaagcccgtgcagagaatgtag

SEQ ID NO: 133115 - protein, 228 aa, Artificial Sequence
  derived and/or modified sequence
MQPRRQRLPAPWSGPRGPRPTAPLLALLLLLAPVAAPAGSGDPDDPGQPQDAGVPRRLLQQAARAALHFFNFRSGSPSALRVLAEVQEGRAWINPKEGCKVHVVFSTERYNPESLLQEGEGRLGKCSARVFFKNQKPRPTINVTCTRLIEKKKRQQEDYLLYKQMKQLKNPLEIVSIPDNHGHIDPSLRLIWDLAFLGSSYVMWEMTTQVSHYYLAQLTSVRQWVRKT

SEQ ID NO: 133116 - DNA, 687 bp, Artificial Sequence
  derived and/or modified sequence
atgcagccacgcaggcaacggctgcccgccccctggtctggacctcgaggtcctcggcccaccgcccccttgttggccctcctcctcctattagctcccgtggccgcgcccgccggatctggagacccagacgacccaggccaaccgcaggatgccggggtcccccgacggttactccagcaggctgcaagagccgctctgcacttctttaatttccggtctggcagcccatctgctttaagagtgctcgccgaggtccaggaagggagggcttggattaatccgaaggaaggctgcaaagttcacgtggtcttttctaccgagcggtacaatccagagtccctgttacaggaaggagagggacgcctcggtaagtgttcagcgagggtgttctttaaaaaccagaagccccgtcccaccattaatgtgacttgcacaagactcatagagaagaagaagcgtcagcaggaagactacttgctgtacaagcagatgaagcaacttaagaatcctctcgagatcgtctcaattcctgacaaccacggacatattgacccctcactgcgcctcatttgggatctcgcgtttctcggctctagttacgtcatgtgggagatgacaacccaagtgagccactactacttggcccagttaacatcagtgaggcagtgggtgcgtaagacttag

SEQ ID NO: 133117 - DNA, 687 bp, Artificial Sequence
  derived and/or modified sequence
atgcagccccggcggcagaggctgcctgccccctggagcggcccccggggcccccggcccacagcccccctgctggccctgctgctgctgctggcccctgtggccgccccagctggcagcggggaccctgatgaccccggccagccccaggatgctggggtgccccggcggctgctgcagcaggccgcccgggccgccctgcacttcttcaacttccgcagcggcagccccagcgccctgcgggtgctggccgaggtgcaggagggccgggcctggatcaaccccaaggagggctgcaaggtgcacgtggtgttcagcacagagcgctacaaccctgagagcctgctgcaggagggggagggccgcctgggcaaatgttctgcccgggtcttcttcaagaaccagaagccccggcccaccatcaacgtgacctgcacccggctgattgagaagaagaagaggcagcaggaggactacctgctgtacaagcagatgaagcagctgaagaaccccctggagatcgtgtccatcccagacaaccacggccacatcgaccccagcctgcggctcatctgggacctggccttcctgggcagcagctatgtgatgtgggagatgaccacccaggtgagccactactacctggcccagctgacctctgtgcggcagtgggtgaggaagacctag

SEQ ID NO: 133118 - DNA, 687 bp, Artificial Sequence
  derived and/or modified sequence
atgcagccccggcggcagcggctgcccgccccctggagcggcccccgcggaccaagacctaccgcgcccctgctcgccttgctcctgctgctcgctccagttgctgccccagccggatcaggggatccagacgaccccggacagcctcaggatgctggcgtacctaggcgcttgttacaacaggctgctcgcgctgctctgcacttcttcaatttcagaagcggttccccaagcgccctccgagttctggcagaagtgcaggaggggagagcatggatcaatcccaaggaagggtgtaaggtccatgtggtttttagtaccgaaagatataaccccgaaagcctgctacaggagggcgaaggcaggctcggaaaatgttctgccagagtcttttttaaaaatcagaagccacgaccaacaattaacgtaacctgcacaagacttattgagaagaagaagcggcagcaggaggattacctcctgtataagcagatgaagcagttgaagaatccgctggaaatcgtgagcatccccgataaccacggccacatcgatcctagcttgcgccttatttgggatctggcctttctcggctcgtcttacgtaatgtgggagatgaccacccaggtctctcactattatctggcccagctaacatcagtgagacagtgggtgcgaaagacatag

SEQ ID NO: 133119 - DNA, 687 bp, Artificial Sequence
  derived and/or modified sequence
atgcaaccacggagacagaggctgcccgctccctggagtggaccaagagggcctaggcctaccgccccacttctagccctgcttctgctgctggccccagtcgcagcaccggcaggatccggcgaccctgacgatcccggacaaccccaagatgccggagtccctcggagacttcttcagcaggccgctcgtgccgcactgcattttttcaatttcaggagtggatcaccctcggcgttgcgagtgttggctgaagtacaagaaggcagagcttggatcaaccccaaggaggggtgtaaagtgcacgtagtcttcagcacagaacggtacaatccggaatctcttctgcaggaaggggaaggcaggttgggcaagtgtagcgccagggtcttctttaaaaatcagaaacctaggccaacaataaacgtcacgtgcactcgcttgatcgaaaagaaaaagagacaacaggaggactacttgctttacaagcagatgaagcaattaaagaaccctttagagatcgtatcaattcccgataatcatgggcatatcgaccccagtctccgcttgatttgggatctggctttcctgggaagttcatacgtcatgtgggaaatgaccacgcaggtctctcactactacctggcgcagctgaccagcgtgaggcagtgggtgaggaagacctag

SEQ ID NO: 133120 - DNA, 839 bp, Artificial Sequence
  derived and/or modified sequence
gggtgccgagccaactttcctgcgtccatgcagccccgccggcaacggctgcctgctccctggtccgggcccaggggcccgcgccccaccgccccgctgctcgcgctgctgctgttgctcgccccggtggcggcgcccgcggggtccggggaccccgacgaccctgggcagcctcaggatgctggggtcccgcgcaggctcctgcagcaggcggcgcgcgcggcgcttcacttcttcaacttccggtccggctcgcccagcgcgctacgagtgctggccgaggtgcaggagggccgcgcgtggattaatccaaaagagggatgtaaagttcacgtggtcttcagcacagagcgctacaacccagagtctttacttcaggaaggtgagggacgtttggggaaatgttctgctcgagtgtttttcaagaatcagaaacccagaccaaccatcaatgtaacttgtacacggctcatcgagaaaaagaaaagacaacaagaggattacctgctttacaagcaaatgaagcaactgaaaaaccccttggaaatagtcagcatacctgataatcatggacatattgatccctctctgagactcatctgggatttggctttccttggaagctcttacgtgatgtgggaaatgacaacacaggtgtcacactactacttggcacagctcactagtgtgaggcagtgggtaagaaaaacctgaaaattaacttgtgccacaagagttacaatcaaagtggtctccttagactgaattcatgcgaacttctaatttcatatcaagagttgtaatcacatttatttcaataaatatgtgagttcctgcaa

SEQ ID NO: 133121 - DNA, 687 bp, Artificial Sequence
  derived and/or modified sequence
atgcagcccagaagacagagactgcccgccccctggagcggccccagaggccccagacccaccgcccccctgctggccctgctgctgctgctggcccccgtggccgcccccgccggcagcggcgaccccgacgaccccggccagccccaggacgccggcgtgcccagaagactgctgcagcaggccgccagagccgccctgcacttcttcaacttcagaagcggcagccccagcgccctgagagtgctggccgaggtgcaggagggcagagcctggatcaaccccaaggagggctgcaaggtgcacgtggtgttcagcaccgagagatacaaccccgagagcctgctgcaggagggcgagggcagactgggcaagtgcagcgccagagtgttcttcaagaaccagaagcccagacccaccatcaacgtgacctgcaccagactgatcgagaagaagaagagacagcaggaggactacctgctgtacaagcagatgaagcagctgaagaaccccctggagatcgtgagcatccccgacaaccacggccacatcgaccccagcctgagactgatctgggacctggccttcctgggcagcagctacgtgatgtgggagatgaccacccaggtgagccactactacctggcccagctgaccagcgtgagacagtgggtgagaaagacctag

SEQ ID NO: 133122 - protein, 163 aa, Artificial Sequence
  derived and/or modified sequence
MRRLLIPLALWLGAVGVGVAELTEAQRRGLQVALEEFHKHPPVQWAFQETSVESAVDTPFPAGIFVRLEFKLQQTSCRKRDWKKPECKVRPNGRKRKCLACIKLGSEDKVLGRLVHCPIETQVLREAEEHQETQCLRVQRAGEDPHSFYFPGQFAFSKALPRS

SEQ ID NO: 133123 - DNA, 492 bp, Artificial Sequence
  derived and/or modified sequence
atgagaagactgctgatccccctggccctgtggctgggcgccgtgggcgtgggcgtggccgagctgaccgaggcccagagaagaggcctgcaggtggccctggaggagttccacaagcacccccccgtgcagtgggccttccaggagaccagcgtggagagcgccgtggacacccccttccccgccggcatcttcgtgagactggagttcaagctgcagcagaccagctgcagaaagagagactggaagaagcccgagtgcaaggtgagacccaacggcagaaagagaaagtgcctggcctgcatcaagctgggcagcgaggacaaggtgctgggcagactggtgcactgccccatcgagacccaggtgctgagagaggccgaggagcaccaggagacccagtgcctgagagtgcagagagccggcgaggacccccacagcttctacttccccggccagttcgccttcagcaaggccctgcccagaagctag

SEQ ID NO: 133124 - DNA, 492 bp, Artificial Sequence
  derived and/or modified sequence
atgaggcgccttcttattcccctggccttatggctgggggcagtgggcgtgggggtggccgaactgaccgaggcacagcggaggggcctgcaggtggccctggaagaattccacaaacacccccccgtccagtgggcattccaagagacgagcgtagagagtgctgtggacaccccctttcccgccggcatctttgtacgattagagtttaagcttcagcaaacatcttgcaggaagagagactggaagaagcctgagtgtaaggtgcggccaaacggacgcaagagaaaatgtttagcttgcattaagttgggcagcgaagataaagtgctggggcgcctcgtccactgtccaatagaaacacaggtactccgtgaggcagaagaacatcaggagacacagtgtttgcgcgtgcaacgtgccggcgaggatccccactcattttattttccaggtcaatttgccttcagtaaagctctgcccaggagttag

SEQ ID NO: 133125 - DNA, 492 bp, Artificial Sequence
  derived and/or modified sequence
atgaggcggctgctgatccccctggccctgtggctgggcgctgtgggcgtgggcgtggccgagctgacagaggcccagaggcggggcctgcaggtggccctggaggagttccacaagcacccccctgtgcagtgggccttccaggagacctctgtggagagcgctgtggacacccccttccctgctggcatctttgtgcggctggagttcaagctgcagcagaccagctgcaggaagagggactggaagaagccagagtgcaaggtgcggcccaacggcaggaagaggaagtgcctggcctgcatcaagctgggcagcgaggacaaggtgctgggccgcctggtgcactgccccatcgagacccaggtgctgcgggaggccgaggagcaccaggagacccagtgcctgcgggtgcagagagctggggaggacccccacagcttctacttccctggccagtttgccttcagcaaggccctgcccaggagctag

SEQ ID NO: 133126 - DNA, 492 bp, Artificial Sequence
  derived and/or modified sequence
atgcggcggctgctgatccccctggccctgtggctgggcgccgtgggggtgggggtggcggagctgacggaagcacagagaagaggactacaggtggctttggaggaattccataagcacccccctgtacagtgggccttccaggaaacgtctgtcgaatcagccgtagatacgccctttcctgccgggatcttcgttcgtcttgaatttaagctacaacagacgtcgtgtagaaaacgcgattggaagaagccggagtgtaaagttaggcccaatggacgcaaaagaaagtgcctcgcgtgcattaagcttggcagcgaggacaaagtgctgggtcgactggtacactgcccaatcgaaacacaggtgttacgggaggccgaagagcaccaggaaacacaatgcctcagggtccagagagccggggaggacccacacagtttctacttcccagggcaatttgctttctccaaggccttgccacgcagctag

SEQ ID NO: 133127 - DNA, 492 bp, Artificial Sequence
  derived and/or modified sequence
atgcggagactgctgattccactggcactgtggcttggggctgtgggcgttggggtcgcggaacttactgaggctcaacgccgaggactgcaagttgcactggaggagttccacaagcatccgcctgtgcagtgggcttttcaagaaacctccgtggaaagtgccgtggataccccatttccagctgggatctttgtgcgtttagagttcaaactccagcagactagctgtagaaaaagagactggaaaaaacccgagtgcaaggtgaggccgaatggcaggaagcggaaatgcttagcatgtattaaactcggaagcgaggataaggtcttagggcgactggtgcactgcccaatcgaaacacaggtgcttcgggaggccgaagagcaccaggaaacccaatgtctcagggtgcagagggctggggaggacccgcacagtttttacttcccaggtcagttcgcattttctaaagcactccctaggtcctag

SEQ ID NO: 133128 - DNA, 492 bp, Artificial Sequence
  derived and/or modified sequence
atgagacggttgttaattcctctcgcactctggctgggagccgtgggagtgggagtggcggagctgacagaagctcagcgcagagggttgcaggtcgccctggaggaatttcataagcacccccctgtgcagtgggcattccaggaaactagcgtcgaaagtgccgtggataccccgtttccagccggtatcttcgtacgactggagttcaagctgcagcagacctcctgtaggaagcgtgactggaagaagcctgaatgtaaggttcgcccaaatggccggaaaagaaaatgcctggcttgcattaaattgggtagcgaggataaggtccttggccgtcttgtgcactgtcctatagaaacacaggtgctgcgcgaggcagaagagcaccaggagacacaatgcctgcgcgtccagcgtgccggtgaagaccctcattccttctacttccccggccagtttgccttctcaaaggcacttccccggagctag

SEQ ID NO: 133129 - DNA, 492 bp, Artificial Sequence
  derived and/or modified sequence
atgcggcggttactgatacccttggcgttgtggttaggcgctgtgggtgttggagtagccgaactgacagaggcccagcgcagaggcctccaggtcgccttggaagaattccataagcacccccctgttcagtgggctttccaggaaacatccgttgaatctgcagttgatacccctttccccgctggaatttttgtgcgccttgagtttaagcttcagcaaacatcctgccgcaaacgggattggaaaaaaccagagtgcaaggtgagacctaacgggcgtaaacgcaagtgtcttgcgtgcattaaactgggtagcgaggacaaagtcctggggaggctggtgcactgccctattgaaacccaggtgcttcgcgaggcagaggagcatcaggaaactcagtgtcttcgcgtccagcgagcgggcgaggatcctcacagcttttactttccgggccaattcgccttcagtaaagcgcttcctcgaagctag

SEQ ID NO: 133130 - DNA, 492 bp, Artificial Sequence
  derived and/or modified sequence
atgcggcggctgctgatccccctggccctgtggctgggcgccgtgggggtgggcgtcgccgagctgacggaggcgcagagacggggtctccaggtagcacttgaggagtttcataagcatccacccgttcagtgggcattccaggagactagcgtggaaagcgcagtcgataccccatttccagcgggcattttcgtccgcctcgagttcaagctgcagcaaacttcatgtcgcaagagagactggaaaaaacccgagtgtaaggtgcgtccgaacggacgcaagagaaaatgcctggcatgcattaagctggggtcagaggacaaggtgctcgggcgcctggtccattgcccaattgaaacccaagttttgcgggaggccgaggagcaccaggaaacacagtgccttagggtgcaacgcgccggagaagatcctcactctttctacttccctgggcaattcgccttcagtaaggcactgccaaggagctag

SEQ ID NO: 133131 - DNA, 492 bp, Artificial Sequence
  derived and/or modified sequence
atgcggcggctgctgatccccctggccctgtggctgggcgccgtgggtgtgggcgtggccgagctaacagaggcccagagacggggcctgcaggtggccctagaagaatttcacaaacacccacccgttcaatgggcctttcaggagacatcagtcgagtctgccgtcgatacaccatttccagccggcatctttgttcgacttgagttcaagctgcagcagacctcgtgccggaagcgtgactggaagaaaccggaatgtaaagttcgtcccaatggccggaagaggaagtgcctggcctgtattaagctgggaagtgaagataaagtgctgggcaggttagtgcactgcccaattgagactcaagtcctccgcgaggccgaagagcatcaagagacacagtgtttgcgcgtccagcgggctggagaggatccccactcgttctacttccctggacagttcgccttttcaaaggcactcccccggagctag

SEQ ID NO: 133132 - DNA, 492 bp, Artificial Sequence
  derived and/or modified sequence
atgcggaggctgctgattccactggcactgtggctaggcgctgtgggcgtcggcgtggccgaactaacagaggcccagcgtagaggactgcaggtcgccctggaggaattccacaaacaccccccagttcagtgggcctttcaggagacatcagttgagtctgccgtggacacgccctttcctgccggaatcttcgttaggttggaattcaagctgcagcaaactagctgccgaaagagagattggaaaaagcccgagtgtaaagtcagacccaatgggaggaagagaaaatgtctggcgtgcataaaattaggcagtgaggacaaagtgctgggccgactcgtccactgcccaattgaaacccaggtactaagagaggcagaggagcaccaggagactcagtgtctgcgggtgcagcgagccggagaggacccacattccttttacttcccaggacagttcgcattctcaaaagcgctgccacgttcttag

SEQ ID NO: 133133 - DNA, 492 bp, Artificial Sequence
  derived and/or modified sequence
atgaggcggctccttatcccattagccctatggctgggtgctgtgggtgtcggcgtagccgaactgacagaggctcagaggcggggactgcaggttgccctcgaagagttccataagcaccctcctgtccagtgggcgttccaagagactagtgtggagtcagccgtcgataccccttttcccgcaggaatcttcgtaagattggagtttaagctccagcagacttcttgcaggaaacgcgactggaagaagcccgagtgtaaggtacggccaaacggtcgtaagagaaaatgcctcgcctgtatcaagcttgggtctgaggataaggtgctcggcagactggtgcattgtccaatcgaaacacaagtgctgcgcgaggctgaggagcaccaagagacacagtgcctacgagtgcagagagccggagaggatcctcatagcttctactttccaggacaattcgcattctccaaggccctcccgaggagttag

SEQ ID NO: 133134 - DNA, 740 bp, Artificial Sequence
  derived and/or modified sequence
gccgccccgcgagaagaagagcgggaagaggcggacagcgaggccaagatttcagctgcgggacggtcaggggagacctccaggcgcagggaaggacggccagggtgacacggaagcatgcgacggctgctgatccctctggccctgtggctgggtgcggtgggcgtgggcgtcgccgagctcacggaagcccagcgccggggcctgcaggtggccctggaggaatttcacaagcacccgcccgtgcagtgggccttccaggagaccagtgtggagagcgccgtggacacgcccttcccagctggaatatttgtgaggctggaatttaagctgcagcagacaagctgccggaagagggactggaagaaacccgagtgcaaagtcaggcccaatgggaggaaacggaaatgcctggcctgcatcaaactgggctctgaggacaaagttctgggccggttggtccactgccccatagagacccaagttctgcgggaggctgaggagcaccaggagacccagtgcctcagggtgcagcgggctggtgaggacccccacagcttctacttccctggacagttcgccttctccaaggccctgccccgcagctaagccagcactgagatgcgtggtgcctccaggaccgctgcgggtggtaaccagtggaagaccccagcccccagggagaggaacccgttctatccccagccatgataataaagctgctctcccagctgcctctc

SEQ ID NO: 133135 - DNA, 1618 bp, Artificial Sequence
  derived and/or modified sequence
cggacagcgaggccaagatttcagctgcgggacggtcaggggagacctccaggcgcagggaaggacgtgaggaggggaagcgggctggggcggcagccgggcggaggggcagctgcgcaggcggaatgaggaacgcctttgctctaaggcgaccaccctggcagctcttcactgaggggcctcggtttccacatctgtcgctctccggtcccaagaccaccaggaccgacggggctctccgggagggtcagcccctccggtggccccagtcatgcatcaggggacggatcagaagggctaggaagaggggtcgtggggaaggccccagaaaaaagaggaaggagggaagattttgcctgaagcgggaaagccaagggctgggcggcgcgagacccccattcctagcgactggggctggctggtggcccgcggcagcccccgcgccgggaggattaggcctcccgccgctcccacccgtccggaccctcccacgtgtttaggtcctcccaaaagtattcggcctccggcccctgccccttcccccggctggcctggacctcggggacgtggggggaaccccgtgggagcagggggattctggacggggagggagtagcggttggggagaaggctgagcggggaaaggagagaggggctccggggacggcagggaggagagtgggtcgtgccggagacccagggagagacacaatgggcaagattaggggtgtagggtgggagtgcgaactgactgattcctagcgtgggcagggaactttgctaaaactgcaggccccagggaacagcgcgggcagggtgggagggaacggagagggccaggcggaccctaaggtcaatttggagaaagggccatttccaggctccttcacctgtgcccagcgttctacaggcctggaccccgcccccgctccccaccctccccccagagcagggcgcgggaggaggcggctcgggctggctcggagagctgaggggcgcacacccgcttcgcagggccagggtgacacggaagcatgcgacggctgctgatccctctggccctgtggctgggtgcggtgggcgtgggcgtcgccgagctcacggaagcccagcgccggggcctgcaggtggccctggaggaatttcacaagcacccgcccgtgcagtgggccttccaggagaccagtgtggagagcgccgtggacacgcccttcccagctggaatatttgtgaggctggaatttaagctgcagcagacaagctgccggaagagggactggaagaaacccgagtgcaaagtcaggcccaatgggaggaaacggaaatgcctggcctgcatcaaactgggctctgaggacaaagttctgggccggttggtccactgccccatagagacccaagttctgcgggaggctgaggagcaccaggagacccagtgcctcagggtgcagcgggctggtgaggacccccacagcttctacttccctggacagttcgccttctccaaggccctgccccgcagctaagccagcactgagatgcgtggtgcctccaggaccgctgcgggtggtaaccagtggaagaccccagcccccagggagaggaacccgttctatcc

SEQ ID NO: 133136 - DNA, 563 bp, Artificial Sequence
  derived and/or modified sequence
agaagagcgggaagaggcggacagcgaggccaagatttcagctgcgggacgggccagggtgacacggaagcatgcgacggctgctgatccctctggccctgtggctgggtgcggtgggcgtgggcgtcgccgagctcacggaagcccagcgccggggcctgcaggtggccctggaggaatttcacaagcacccgcccgtgcagtgggccttccaggagaccagtgtggagagcgccgtggacacgcccttcccagctggaatatttgtgaggctggaatttaagctgcagcagacaagctgccggaagagggactggaagaaacccgagtgcaaagtcaggcccaatgggaggaaacggaaatgcctggcctgcatcaaactgggctctgaggacaaagttctgggccggttggtccactgccccatagagacccaagttctgcgggaggctgaggagcaccaggagacccagtgcctcagggtgcagcgggctggtgaggacccccacagcttctacttccctggacagttcgccttctccaaggccctgccccgcagctaa

SEQ ID NO: 133137 - protein, 1047 aa, Artificial Sequence
  derived and/or modified sequence
MMAAEAGSEEGGPVTAGAGGGGAAAGSSAYPAVCRVKIPAALPVAAAPYPGLVETGVAGTLGGGAALGSEFLGAGSVAGALGGAGLTGGGTAAGVAGAAAGVAGAAVAGPSGDMALTKLPTSLLAETLGPGGGFPPLPPPPYLPPLGAGLGTVDEGDSLDGPEYEEEEVAIPLTAPPTNQWYHGKLDRTIAEERLRQAGKSGSYLIRESDRRPGSFVLSFLSQMNVVNHFRIIAMCGDYYIGGRRFSSLSDLIGYYSHVSCLLKGEKLLYPVAPPEPVEDRRRVRAILPYTKVPDTDEISFLKGDMFIVHNELEDGWMWVTNLRTDEQGLIVEDLVEEVGREEDPHEGKIWFHGKISKQEAYNLLMTVGQVCSFLVRPSDNTPGDYSLYFRTNENIQRFKICPTPNNQFMMGGRYYNSIGDIIDHYRKEQIVEGYYLKEPVPMQDQEQVLNDTVDGKEIYNTIRRKTKDAFYKNIVKKGYLLKKGKGKRWKNLYFILEGSDAQLIYFESEKRATKPKGLIDLSVCSVYVVHDSLFGRPNCFQIVVQHFSEEHYIFYFAGETPEQAEDWMKGLQAFCNLRKSSPGTSNKRLRQVSSLVLHIEEAHKLPVKHFTNPYCNIYLNSVQVAKTHAREGQNPVWSEEFVFDDLPPDINRFEITLSNKTKKSKDPDILFMRCQLSRLQKGHATDEWFLLSSHIPLKGIEPGSLRVRARYSMEKIMPEEEYSEFKELILQKELHVVYALSHVCGQDRTLLASILLRIFLHEKLESLLLCTLNDREISMEDEATTLFRATTLASTLMEQYMKATATQFVHHALKDSILKIMESKQSCELSPSKLEKNEDVNTNLTHLLNILSELVEKIFMASEILPPTLRYIYGCLQKSVQHKWPTNTTMRTRVVSGFVFLRLICPAILNPRMFNIISDSPSPIAARTLILVAKSVQNLANLVEFGAKEPYMEGVNPFIKSNKHRMIMFLDELGNVPELPDTTEHSRTDLSRDLAALHEICVAHSDELRTLSNERGAQQHVLKKLLAITELLQQKQNQYTKTNDVR

SEQ ID NO: 133138 - protein, 881 aa, Artificial Sequence
  derived and/or modified sequence
MCLVKSWFLSIRSRWYHGKLDRTIAEERLRQAGKSGSYLIRESDRRPGSFVLSFLSQMNVVNHFRIIAMCGDYYIGGRRFSSLSDLIGYYSHVSCLLKGEKLLYPVAPPEPVEDRRRVRAILPYTKVPDTDEISFLKGDMFIVHNELEDGWMWVTNLRTDEQGLIVEDLVEEVGREEDPHEGKIWFHGKISKQEAYNLLMTVGQVCSFLVRPSDNTPGDYSLYFRTNENIQRFKICPTPNNQFMMGGRYYNSIGDIIDHYRKEQIVEGYYLKEPVPMQDQEQVLNDTVDGKEIYNTIRRKTKDAFYKNIVKKGYLLKKGKGKRWKNLYFILEGSDAQLIYFESEKRATKPKGLIDLSVCSVYVVHDSLFGRPNCFQIVVQHFSEEHYIFYFAGETPEQAEDWMKGLQAFCNLRKSSPGTSNKRLRQVSSLVLHIEEAHKLPVKHFTNPYCNIYLNSVQVAKTHAREGQNPVWSEEFVFDDLPPDINRFEITLSNKTKKSKDPDILFMRCQLSRLQKGHATDEWFLLSSHIPLKGIEPGSLRVRARYSMEKIMPEEEYSEFKELILQKELHVVYALSHVCGQDRTLLASILLRIFLHEKLESLLLCTLNDREISMEDEATTLFRATTLASTLMEQYMKATATQFVHHALKDSILKIMESKQSCELSPSKLEKNEDVNTNLTHLLNILSELVEKIFMASEILPPTLRYIYGCLQKSVQHKWPTNTTMRTRVVSGFVFLRLICPAILNPRMFNIISDSPSPIAARTLILVAKSVQNLANLVEFGAKEPYMEGVNPFIKSNKHRMIMFLDELGNVPELPDTTEHSRTDLSRDLAALHEICVAHSDELRTLSNERGAQQHVLKKLLAITELLQQKQNQYTKTNDVR

SEQ ID NO: 133139 - protein, 880 aa, Artificial Sequence
  derived and/or modified sequence
MRTGYSSVPSKLRWYHGKLDRTIAEERLRQAGKSGSYLIRESDRRPGSFVLSFLSQMNVVNHFRIIAMCGDYYIGGRRFSSLSDLIGYYSHVSCLLKGEKLLYPVAPPEPVEDRRRVRAILPYTKVPDTDEISFLKGDMFIVHNELEDGWMWVTNLRTDEQGLIVEDLVEEVGREEDPHEGKIWFHGKISKQEAYNLLMTVGQVCSFLVRPSDNTPGDYSLYFRTNENIQRFKICPTPNNQFMMGGRYYNSIGDIIDHYRKEQIVEGYYLKEPVPMQDQEQVLNDTVDGKEIYNTIRRKTKDAFYKNIVKKGYLLKKGKGKRWKNLYFILEGSDAQLIYFESEKRATKPKGLIDLSVCSVYVVHDSLFGRPNCFQIVVQHFSEEHYIFYFAGETPEQAEDWMKGLQAFCNLRKSSPGTSNKRLRQVSSLVLHIEEAHKLPVKHFTNPYCNIYLNSVQVAKTHAREGQNPVWSEEFVFDDLPPDINRFEITLSNKTKKSKDPDILFMRCQLSRLQKGHATDEWFLLSSHIPLKGIEPGSLRVRARYSMEKIMPEEEYSEFKELILQKELHVVYALSHVCGQDRTLLASILLRIFLHEKLESLLLCTLNDREISMEDEATTLFRATTLASTLMEQYMKATATQFVHHALKDSILKIMESKQSCELSPSKLEKNEDVNTNLTHLLNILSELVEKIFMASEILPPTLRYIYGCLQKSVQHKWPTNTTMRTRVVSGFVFLRLICPAILNPRMFNIISDSPSPIAARTLILVAKSVQNLANLVEFGAKEPYMEGVNPFIKSNKHRMIMFLDELGNVPELPDTTEHSRTDLSRDLAALHEICVAHSDELRTLSNERGAQQHVLKKLLAITELLQQKQNQYTKTNDVR

SEQ ID NO: 133140 - DNA, 3144 bp, Artificial Sequence
  derived and/or modified sequence
atgatggccgccgaggccggcagcgaggagggcggccccgtgaccgccggcgccggcggcggcggcgccgccgccggcagcagcgcctaccccgccgtgtgcagagtgaagatccccgccgccctgcccgtggccgccgccccctaccccggcctggtggagaccggcgtggccggcaccctgggcggcggcgccgccctgggcagcgagttcctgggcgccggcagcgtggccggcgccctgggcggcgccggcctgaccggcggcggcaccgccgccggcgtggccggcgccgccgccggcgtggccggcgccgccgtggccggccccagcggcgacatggccctgaccaagctgcccaccagcctgctggccgagaccctgggccccggcggcggcttcccccccctgcccccccccccctacctgccccccctgggcgccggcctgggcaccgtggacgagggcgacagcctggacggccccgagtacgaggaggaggaggtggccatccccctgaccgccccccccaccaaccagtggtaccacggcaagctggacagaaccatcgccgaggagagactgagacaggccggcaagagcggcagctacctgatcagagagagcgacagaagacccggcagcttcgtgctgagcttcctgagccagatgaacgtggtgaaccacttcagaatcatcgccatgtgcggcgactactacatcggcggcagaagattcagcagcctgagcgacctgatcggctactacagccacgtgagctgcctgctgaagggcgagaagctgctgtaccccgtggccccccccgagcccgtggaggacagaagaagagtgagagccatcctgccctacaccaaggtgcccgacaccgacgagatcagcttcctgaagggcgacatgttcatcgtgcacaacgagctggaggacggctggatgtgggtgaccaacctgagaaccgacgagcagggcctgatcgtggaggacctggtggaggaggtgggcagagaggaggacccccacgagggcaagatctggttccacggcaagatcagcaagcaggaggcctacaacctgctgatgaccgtgggccaggtgtgcagcttcctggtgagacccagcgacaacacccccggcgactacagcctgtacttcagaaccaacgagaacatccagagattcaagatctgccccacccccaacaaccagttcatgatgggcggcagatactacaacagcatcggcgacatcatcgaccactacagaaaggagcagatcgtggagggctactacctgaaggagcccgtgcccatgcaggaccaggagcaggtgctgaacgacaccgtggacggcaaggagatctacaacaccatcagaagaaagaccaaggacgccttctacaagaacatcgtgaagaagggctacctgctgaagaagggcaagggcaagagatggaagaacctgtacttcatcctggagggcagcgacgcccagctgatctacttcgagagcgagaagagagccaccaagcccaagggcctgatcgacctgagcgtgtgcagcgtgtacgtggtgcacgacagcctgttcggcagacccaactgcttccagatcgtggtgcagcacttcagcgaggagcactacatcttctacttcgccggcgagacccccgagcaggccgaggactggatgaagggcctgcaggccttctgcaacctgagaaagagcagccccggcaccagcaacaagagactgagacaggtgagcagcctggtgctgcacatcgaggaggcccacaagctgcccgtgaagcacttcaccaacccctactgcaacatctacctgaacagcgtgcaggtggccaagacccacgccagagagggccagaaccccgtgtggagcgaggagttcgtgttcgacgacctgccccccgacatcaacagattcgagatcaccctgagcaacaagaccaagaagagcaaggaccccgacatcctgttcatgagatgccagctgagcagactgcagaagggccacgccaccgacgagtggttcctgctgagcagccacatccccctgaagggcatcgagcccggcagcctgagagtgagagccagatacagcatggagaagatcatgcccgaggaggagtacagcgagttcaaggagctgatcctgcagaaggagctgcacgtggtgtacgccctgagccacgtgtgcggccaggacagaaccctgctggccagcatcctgctgagaatcttcctgcacgagaagctggagagcctgctgctgtgcaccctgaacgacagagagatcagcatggaggacgaggccaccaccctgttcagagccaccaccctggccagcaccctgatggagcagtacatgaaggccaccgccacccagttcgtgcaccacgccctgaaggacagcatcctgaagatcatggagagcaagcagagctgcgagctgagccccagcaagctggagaagaacgaggacgtgaacaccaacctgacccacctgctgaacatcctgagcgagctggtggagaagatcttcatggccagcgagatcctgccccccaccctgagatacatctacggctgcctgcagaagagcgtgcagcacaagtggcccaccaacaccaccatgagaaccagagtggtgagcggcttcgtgttcctgagactgatctgccccgccatcctgaaccccagaatgttcaacatcatcagcgacagccccagccccatcgccgccagaaccctgatcctggtggccaagagcgtgcagaacctggccaacctggtggagttcggcgccaaggagccctacatggagggcgtgaaccccttcatcaagagcaacaagcacagaatgatcatgttcctggacgagctgggcaacgtgcccgagctgcccgacaccaccgagcacagcagaaccgacctgagcagagacctggccgccctgcacgagatctgcgtggcccacagcgacgagctgagaaccctgagcaacgagagaggcgcccagcagcacgtgctgaagaagctgctggccatcaccgagctgctgcagcagaagcagaaccagtacaccaagaccaacgacgtgagatag

SEQ ID NO: 133141 - DNA, 2646 bp, Artificial Sequence
  derived and/or modified sequence
atgtgcctggtgaagagctggttcctgagcatcagaagcagatggtaccacggcaagctggacagaaccatcgccgaggagagactgagacaggccggcaagagcggcagctacctgatcagagagagcgacagaagacccggcagcttcgtgctgagcttcctgagccagatgaacgtggtgaaccacttcagaatcatcgccatgtgcggcgactactacatcggcggcagaagattcagcagcctgagcgacctgatcggctactacagccacgtgagctgcctgctgaagggcgagaagctgctgtaccccgtggccccccccgagcccgtggaggacagaagaagagtgagagccatcctgccctacaccaaggtgcccgacaccgacgagatcagcttcctgaagggcgacatgttcatcgtgcacaacgagctggaggacggctggatgtgggtgaccaacctgagaaccgacgagcagggcctgatcgtggaggacctggtggaggaggtgggcagagaggaggacccccacgagggcaagatctggttccacggcaagatcagcaagcaggaggcctacaacctgctgatgaccgtgggccaggtgtgcagcttcctggtgagacccagcgacaacacccccggcgactacagcctgtacttcagaaccaacgagaacatccagagattcaagatctgccccacccccaacaaccagttcatgatgggcggcagatactacaacagcatcggcgacatcatcgaccactacagaaaggagcagatcgtggagggctactacctgaaggagcccgtgcccatgcaggaccaggagcaggtgctgaacgacaccgtggacggcaaggagatctacaacaccatcagaagaaagaccaaggacgccttctacaagaacatcgtgaagaagggctacctgctgaagaagggcaagggcaagagatggaagaacctgtacttcatcctggagggcagcgacgcccagctgatctacttcgagagcgagaagagagccaccaagcccaagggcctgatcgacctgagcgtgtgcagcgtgtacgtggtgcacgacagcctgttcggcagacccaactgcttccagatcgtggtgcagcacttcagcgaggagcactacatcttctacttcgccggcgagacccccgagcaggccgaggactggatgaagggcctgcaggccttctgcaacctgagaaagagcagccccggcaccagcaacaagagactgagacaggtgagcagcctggtgctgcacatcgaggaggcccacaagctgcccgtgaagcacttcaccaacccctactgcaacatctacctgaacagcgtgcaggtggccaagacccacgccagagagggccagaaccccgtgtggagcgaggagttcgtgttcgacgacctgccccccgacatcaacagattcgagatcaccctgagcaacaagaccaagaagagcaaggaccccgacatcctgttcatgagatgccagctgagcagactgcagaagggccacgccaccgacgagtggttcctgctgagcagccacatccccctgaagggcatcgagcccggcagcctgagagtgagagccagatacagcatggagaagatcatgcccgaggaggagtacagcgagttcaaggagctgatcctgcagaaggagctgcacgtggtgtacgccctgagccacgtgtgcggccaggacagaaccctgctggccagcatcctgctgagaatcttcctgcacgagaagctggagagcctgctgctgtgcaccctgaacgacagagagatcagcatggaggacgaggccaccaccctgttcagagccaccaccctggccagcaccctgatggagcagtacatgaaggccaccgccacccagttcgtgcaccacgccctgaaggacagcatcctgaagatcatggagagcaagcagagctgcgagctgagccccagcaagctggagaagaacgaggacgtgaacaccaacctgacccacctgctgaacatcctgagcgagctggtggagaagatcttcatggccagcgagatcctgccccccaccctgagatacatctacggctgcctgcagaagagcgtgcagcacaagtggcccaccaacaccaccatgagaaccagagtggtgagcggcttcgtgttcctgagactgatctgccccgccatcctgaaccccagaatgttcaacatcatcagcgacagccccagccccatcgccgccagaaccctgatcctggtggccaagagcgtgcagaacctggccaacctggtggagttcggcgccaaggagccctacatggagggcgtgaaccccttcatcaagagcaacaagcacagaatgatcatgttcctggacgagctgggcaacgtgcccgagctgcccgacaccaccgagcacagcagaaccgacctgagcagagacctggccgccctgcacgagatctgcgtggcccacagcgacgagctgagaaccctgagcaacgagagaggcgcccagcagcacgtgctgaagaagctgctggccatcaccgagctgctgcagcagaagcagaaccagtacaccaagaccaacgacgtgagatag

SEQ ID NO: 133142 - DNA, 2643 bp, Artificial Sequence
  derived and/or modified sequence
atgagaaccggctacagcagcgtgcccagcaagctgagatggtaccacggcaagctggacagaaccatcgccgaggagagactgagacaggccggcaagagcggcagctacctgatcagagagagcgacagaagacccggcagcttcgtgctgagcttcctgagccagatgaacgtggtgaaccacttcagaatcatcgccatgtgcggcgactactacatcggcggcagaagattcagcagcctgagcgacctgatcggctactacagccacgtgagctgcctgctgaagggcgagaagctgctgtaccccgtggccccccccgagcccgtggaggacagaagaagagtgagagccatcctgccctacaccaaggtgcccgacaccgacgagatcagcttcctgaagggcgacatgttcatcgtgcacaacgagctggaggacggctggatgtgggtgaccaacctgagaaccgacgagcagggcctgatcgtggaggacctggtggaggaggtgggcagagaggaggacccccacgagggcaagatctggttccacggcaagatcagcaagcaggaggcctacaacctgctgatgaccgtgggccaggtgtgcagcttcctggtgagacccagcgacaacacccccggcgactacagcctgtacttcagaaccaacgagaacatccagagattcaagatctgccccacccccaacaaccagttcatgatgggcggcagatactacaacagcatcggcgacatcatcgaccactacagaaaggagcagatcgtggagggctactacctgaaggagcccgtgcccatgcaggaccaggagcaggtgctgaacgacaccgtggacggcaaggagatctacaacaccatcagaagaaagaccaaggacgccttctacaagaacatcgtgaagaagggctacctgctgaagaagggcaagggcaagagatggaagaacctgtacttcatcctggagggcagcgacgcccagctgatctacttcgagagcgagaagagagccaccaagcccaagggcctgatcgacctgagcgtgtgcagcgtgtacgtggtgcacgacagcctgttcggcagacccaactgcttccagatcgtggtgcagcacttcagcgaggagcactacatcttctacttcgccggcgagacccccgagcaggccgaggactggatgaagggcctgcaggccttctgcaacctgagaaagagcagccccggcaccagcaacaagagactgagacaggtgagcagcctggtgctgcacatcgaggaggcccacaagctgcccgtgaagcacttcaccaacccctactgcaacatctacctgaacagcgtgcaggtggccaagacccacgccagagagggccagaaccccgtgtggagcgaggagttcgtgttcgacgacctgccccccgacatcaacagattcgagatcaccctgagcaacaagaccaagaagagcaaggaccccgacatcctgttcatgagatgccagctgagcagactgcagaagggccacgccaccgacgagtggttcctgctgagcagccacatccccctgaagggcatcgagcccggcagcctgagagtgagagccagatacagcatggagaagatcatgcccgaggaggagtacagcgagttcaaggagctgatcctgcagaaggagctgcacgtggtgtacgccctgagccacgtgtgcggccaggacagaaccctgctggccagcatcctgctgagaatcttcctgcacgagaagctggagagcctgctgctgtgcaccctgaacgacagagagatcagcatggaggacgaggccaccaccctgttcagagccaccaccctggccagcaccctgatggagcagtacatgaaggccaccgccacccagttcgtgcaccacgccctgaaggacagcatcctgaagatcatggagagcaagcagagctgcgagctgagccccagcaagctggagaagaacgaggacgtgaacaccaacctgacccacctgctgaacatcctgagcgagctggtggagaagatcttcatggccagcgagatcctgccccccaccctgagatacatctacggctgcctgcagaagagcgtgcagcacaagtggcccaccaacaccaccatgagaaccagagtggtgagcggcttcgtgttcctgagactgatctgccccgccatcctgaaccccagaatgttcaacatcatcagcgacagccccagccccatcgccgccagaaccctgatcctggtggccaagagcgtgcagaacctggccaacctggtggagttcggcgccaaggagccctacatggagggcgtgaaccccttcatcaagagcaacaagcacagaatgatcatgttcctggacgagctgggcaacgtgcccgagctgcccgacaccaccgagcacagcagaaccgacctgagcagagacctggccgccctgcacgagatctgcgtggcccacagcgacgagctgagaaccctgagcaacgagagaggcgcccagcagcacgtgctgaagaagctgctggccatcaccgagctgctgcagcagaagcagaaccagtacaccaagaccaacgacgtgagatag

SEQ ID NO: 133143 - DNA, 3144 bp, Artificial Sequence
  derived and/or modified sequence
atgatggcggccgaagctggttcagaggagggggggccggtgaccgctggtgcaggaggaggcggcgcagccgctggcagttctgcctaccctgccgtgtgccgggttaaaatcccggccgctctgcccgtggccgccgcgccctatccagggctggtggagaccggcgtggctggaaccctggggggtggagccgccctgggcagtgagttccttggcgcagggtcagttgctggtgccctgggcggagctgggctcaccgggggggggaccgccgcgggagtcgccggtgcagctgcgggggtcgctggagcggcagtggccggcccctctggagatatggctctgacaaagctgcctactagtctgctggccgagaccttgggtccaggaggaggattcccccccctacctcctcctccttacctaccaccactgggggccggccttgggacagtggatgaaggggattccctggatggcccggagtacgaggaggaagaggtggctatccccctaacagctcctccaaccaaccagtggtaccatggaaaacttgaccgcactattgccgaggaaaggctgagacaggcagggaagagcggatcttatctaatccgcgaatctgaccgaaggccgggttcctttgtgttgagcttcctatcacagatgaatgtggtaaaccattttcggattattgctatgtgcggcgattattatatcggtggtcgtagattttcttccttgtctgatcttataggatactattcccacgtgtcatgtctgcttaagggagagaagctgctatatcctgtggctccacccgagcctgtcgaggatagaaggagagtccgggctatcctgccctataccaaagtccctgacactgatgagataagttttttgaagggcgatatgttcatagtccataatgagcttgaggatgggtggatgtgggtgaccaacctgaggacagatgaacaagggctgattgtggaggacctggttgaggaggtggggcgtgaggaggaccctcacgaagggaaaatctggttccacggtaagatctcaaaacaggaggcgtacaacctgctgatgactgtaggacaggtctgcagctttctggtcaggccgtcagataatactccaggcgactactcactgtatttcaggacaaatgaaaacatccagcgctttaagatttgccctacccccaataaccagtttatgatgggtggccggtattacaactctatcggagatatcatcgatcattatagaaaagaacaaattgtggagggttactacttgaaggaacccgtgccaatgcaggatcaggaacaagtgttgaatgatacagtggacggcaaggagatctataatacaatccgtaggaagactaaggatgccttctacaagaacattgtcaagaaggggtatttgctgaaaaagggaaaaggtaagaggtggaaaaatttatattttattctggagggcagcgatgctcagctaatctacttcgagtccgagaagagagctaccaagccaaaaggcctcattgacctatcagtctgtagcgtgtacgtggttcacgactctttgttcgggcgccccaactgtttccagatcgtggtgcagcatttcagcgaggagcactacattttttactttgcaggcgaaacccctgaacaggctgaggattggatgaaaggcttgcaagccttctgcaacctgagaaaatcctctcccgggaccagtaataagcgtttgcgacaagtctccagcctggtcctgcatatagaggaagcacacaagctgccggttaagcatttcacaaatccctactgtaatatctacctaaattccgttcaggtggcgaagacccacgccagggagggccagaatccggtatggtcagaggagttcgtgttcgatgaccttccccctgatatcaatcgctttgaaataactctgtcaaacaaaacaaaaaagagcaaagaccctgatatcctttttatgcgctgccaactctcccggttgcagaagggccacgctaccgacgagtggtttctgctgtcaagccacattccccttaaagggatcgagccagggtctctgcgggtgcgcgctcggtattcaatggagaagatcatgcctgaagaagaatattctgaatttaaggagctgatccttcagaaggagctgcacgtggtctacgctctcagccatgtttgtgggcaggaccgcacattactggccagtatactgcttcgtatctttctgcatgagaagctcgagtccttgcttctttgcacactgaacgacagggaaatctccatggaggatgaagccacaaccctgttcagggctacaactctggcgtcaaccctgatggagcagtatatgaaggccacggccacacagttcgtccaccatgctctgaaggatagtatcctgaaaataatggagtcaaaacaaagctgcgagctgagcccgagcaagctggagaagaacgaggacgtgaacactaaccttactcatctgctcaacatattatccgaactcgttgagaagatctttatggcatcagagatcttgccacctaccctcagatatatttacggctgtctccagaagagtgtgcagcataaatggcctactaacactaccatgcgaactcgggtcgtgtctggattcgtgtttttaagacttatatgccccgccatcctgaacccccgaatgtttaacatcatctcagattcacctagcccaatcgccgctcgcacactgatcctggtggcaaaatctgtccagaacctggcaaacttagtggagttcggcgcaaaagaaccgtatatggagggcgtgaacccctttattaagagtaataaacacaggatgattatgttcctggatgagctggggaacgtcccagagctgccagatactactgaacattcccggaccgacttatcaagggacttggcggcgctgcacgagatctgcgttgcacactctgacgagctcagaacactgagcaatgaacgcggcgcccaacaacatgtgcttaaaaagctactagctataaccgaattgctacagcagaagcagaatcagtataccaaaactaacgacgtgaggtag

SEQ ID NO: 133144 - DNA, 2646 bp, Artificial Sequence
  derived and/or modified sequence
atgtgcctggtgaaaagctggttcttgtccatacgatcacgatggtaccacgggaagctggatcggaccattgcggaggagagattgagacaggctggaaaaagcgggtcctacctcattcgggagtctgatcgtcgtcctggcagctttgttctttccttcttgtctcaaatgaacgttgtgaaccatttccgaatcatagccatgtgtggggattactatatcggcggaagaaggtttagttctttgagtgacctgattggatactatagtcacgtgtcctgcctgctgaagggagagaagctgctctacccggttgccccccccgagccagttgaagaccggagacgagtgcgtgcaattctgccttataccaaagtgccagacaccgacgaaattagctttcttaagggcgacatgttcatcgtacacaatgagcttgaggacggctggatgtgggttaccaacctgcgaaccgacgaacagggattaatagttgaggacctggttgaggaggtcggcagggaggaggatcctcatgagggaaaaatttggtttcatggaaagatcagcaaacaggaggcgtataatttgctaatgaccgtgggtcaggtgtgttcatttctggtgagacctagtgacaacacccctggagactactccttatattttcgtacaaatgagaatattcagcgatttaagatatgtccaactcccaacaatcagtttatgatgggaggacggtattacaattctattggcgacattattgaccattaccgcaaggagcagatcgtcgagggctactatctcaaggaacccgtccccatgcaggaccaggaacaggtattgaatgacacggtggatggcaaggagatctataatacgattcggaggaaaaccaaagatgcgttctacaagaatattgtaaagaagggctacttactcaaaaaaggtaagggtaagcggtggaagaatctttactttattctcgagggaagtgatgcccaactcatatattttgagtcagagaagagggccacaaagcctaagggcttgattgacttgagtgtttgcagcgtgtacgtggtgcatgactcattgttcgggcggcctaattgttttcagattgtcgttcagcacttctcagaagaacactacatcttctactttgccggcgaaacacctgaacaggccgaagattggatgaaaggtctgcaagctttttgtaatttaagaaagtcctctcctggcacttcaaacaagaggctgaggcaagtgtcaagcctggttttacacatcgaagaagctcataaactcccagtaaagcattttaccaatccatattgtaatatttacttaaactctgtacaagtcgcaaaaactcacgctagagagggacagaatcccgtgtggtccgaagaattcgtctttgacgacctcccccctgatattaatcggttcgagatcaccctgagtaataaaactaagaaatcgaaggaccccgatatcctgtttatgcggtgtcaactcagcagactccagaaggggcacgcaacagatgagtggtttctcctgtcctcacacatcccactgaaggggattgagccaggatcactcagggtgcgggcaaggtacagcatggagaagattatgcccgaggaggagtattcagagttcaaagagctcatcttgcaaaaagagctccatgttgtgtatgccctctctcacgtctgcggccaggacaggacattgctagcaagcatactgttacgcatcttcctacacgaaaaactagaatctctgcttctgtgtacacttaatgaccgcgagatcagtatggaagatgaggcaactaccctcttccgggccacaactttggcaagcaccttgatggaacaatacatgaaggctaccgcaacacagttcgtccatcacgcacttaaggactctatactgaagataatggaatctaagcaaagctgcgaattgtccccgtcaaaactggagaagaatgaggatgtcaataccaatttgacacatttgctcaacattctcagtgagctggtcgaaaagatttttatggcgagtgagatcctgcctcccaccctgaggtacatttacggctgtctgcagaaaagtgttcagcacaagtggccaaccaatacgaccatgcgtacccgggttgttagtggctttgtctttctgcgtttaatttgcccggcaatcctgaaccctcgaatgttcaatattatatcagattccccctcccccattgcggcccgtacactcattctcgtggccaagtccgtacaaaatctggcgaacttggtcgagtttggggcaaaggaaccttacatggagggcgtgaacccattcattaaatcaaataagcatcgcatgattatgttccttgatgagttggggaacgttcccgagctgcctgacactaccgagcacagcagaacagatctgtctagagacctcgctgccttgcatgagatttgcgtggcacactcagacgaattgcgaactctgtccaacgaacggggggcgcagcagcacgttttgaagaagctgctggcgataacagaactgttgcagcagaagcagaaccagtacactaaaactaatgacgtgcgctag

SEQ ID NO: 133145 - DNA, 2643 bp, Artificial Sequence
  derived and/or modified sequence
atgaggacagggtatagttcagtaccttcaaagttaagatggtaccatggaaagctcgacagaactattgccgaggagcggctccggcaggccgggaagtccgggtcctatttgatccgagagagcgaccggagacccggcagttttgtactatcattcttgtcacagatgaacgtagtgaaccacttcaggatcattgccatgtgcggtgattattacattggaggcagacggttttctagcctctctgacctgattgggtactatagtcatgtgtcatgtctgttgaaaggggagaaattgttgtaccctgttgcccctcccgagcccgttgaggataggcggcgggttcgagcaatcctgccttacacaaaagtacccgatactgacgaaatttccttcctaaaaggggatatgttcatagttcacaacgaattggaggatggatggatgtgggtcacaaatctgcggacagacgaacaagggctaattgtagaggacctggttgaggaggtaggccgcgaagaggaccctcatgagggcaagatttggttccacggaaagatttccaagcaggaagcatacaacctcttaatgaccgtaggtcaggtgtgttctttcctggtgcgtcctagtgacaataccccaggagattattcgttatacttcaggaccaatgagaacattcagaggttcaaaatctgtcccaccccgaataaccagtttatgatgggggggcgatactacaactccattggcgatatcatcgaccattataggaaggagcagattgtggaaggctattatctgaaagagcctgtgccgatgcaagaccaggagcaggtccttaacgatacagtggacgggaaggagatctataacaccattagacgaaagacaaaggacgcattttacaagaatattgtgaagaagggctacttgttgaagaagggtaagggcaaacgctggaagaatttgtactttattcttgagggttccgacgcccagctgatatacttcgaaagtgagaagcgcgctactaagcctaaaggccttattgacctgagcgtgtgctcagtctacgtcgtgcatgacagtctcttcggacggcccaattgtttccagattgttgtgcagcatttctccgaggagcactacatcttctattttgccggcgaaacaccagaacaggccgaggactggatgaaggggctgcaagcattttgtaatttgagaaaaagttcacccggcacaagcaataaaagattacgccaagtcagcagtcttgtgctacacatcgaagaggctcacaagctgcccgtgaagcattttacaaatccttactgcaacatttatctgaacagcgttcaggttgcaaaaactcacgcgcgagaagggcagaatcctgtgtggtccgaggaattcgtgtttgacgacctcccacccgatatcaacagatttgaaattaccctcagtaacaaaaccaaaaaatcaaaggacccagatatcttgtttatgcgttgccaactgtcaaggctgcagaagggtcatgccaccgatgagtggttcctcttatctagccacatacccctgaagggaatcgaacctggtagtctgagggtgcgggcccgctattctatggagaagataatgccagaggaagagtattccgagttcaaagagcttatccttcagaaggagctccacgttgtgtacgccctgtcacatgtgtgtggccaggaccggactttgctagcgtcaatcctgctcaggatctttctgcacgagaagctggaatctctgctgctgtgcaccctgaacgatcgggagatcagcatggaagatgaagccaccaccctctttcgggcaacaacattggcgagcacgcttatggagcagtacatgaaggcgactgccacacagtttgtccaccatgccctgaaggatagcattctcaaaatcatggagtccaaacagagctgcgagctgtcaccatctaagctagagaagaacgaggatgtcaacacaaacctgacacacctcctgaatatcctgtcagagctcgttgaaaaaatctttatggcgtcagaaattttacccccgacgctccggtacatatacggatgtctccaaaagtccgtccagcacaagtggcctactaacacgactatgcgcactagggtggtgtcaggattcgtattcctgagactaatttgccctgctattcttaacccccgcatgtttaacattatcagcgatagcccaagccctatcgcagctcgcaccctgattttagtggcaaagagtgtgcaaaaccttgcaaatctggtggaattcggcgcaaaggagccctatatggaaggcgtgaacccattcataaagtctaacaagcacaggatgattatgtttctcgacgaattgggcaacgtgcctgagctgcccgacaccacagagcacagtcggaccgacttgtcccgcgaccttgccgccttgcatgaaatctgtgtcgcccactctgacgagctgaggacgctctctaatgaacgtggggcccagcagcacgtactgaaaaagctcttggcaattaccgagttgctccaacagaagcagaatcaatatactaaaacaaacgacgtcaggtag

SEQ ID NO: 133146 - DNA, 3144 bp, Artificial Sequence
  derived and/or modified sequence
atgatggctgctgaggccggcagcgaggagggcggccctgtgacagctggggccggcggcggcggcgctgctgctggcagcagcgcctacccagctgtgtgccgggtgaagatcccagctgccctgcctgtggccgccgccccctacccaggcctggtggagactggagtggccggcaccctgggcggcggggccgccctgggcagcgagttcctgggcgccggctctgtggccggggccctgggcggggccggcctgactggaggcggcacagctgctggggtggccggggctgctgctggggtggccggggctgctgtggccggccccagcggggacatggccctgaccaagctgcccaccagcctgctggccgagaccctgggccctgggggcggcttcccccccctgcccccaccaccctacctgccccccctgggcgccggcctgggcaccgtggatgaaggagacagcctggatggcccagaatatgaggaggaggaggtggccatccccctgacagccccacccaccaaccagtggtaccacggcaagctggacaggaccatcgccgaggagcggctgcggcaggccggcaagagcggcagctacctgatccgggagagtgacagaagacctggcagctttgtgctgtccttcctgagccagatgaatgtggtgaaccacttccgcatcatcgccatgtgtggggactactacatcggcggccgccgcttcagcagcctgagtgacctgattggctactacagccacgtgtcctgcctgctgaagggggagaagctgctgtaccctgtggcccctcctgagcctgtggaggacagaagaagagtgcgggccatcctgccctacaccaaggtgcctgacacagatgagatctccttcctgaagggggacatgttcatcgtgcacaatgagctggaggatggctggatgtgggtgaccaacctgaggacagatgagcagggcctgattgtggaggacctggtggaggaggtgggccgggaggaggacccccatgagggcaagatctggttccacggcaagatcagcaagcaggaggcctacaacctgctgatgacagtgggccaggtgtgcagcttcctggtgcggcccagcgacaacacccctggggactacagcctgtacttccgcaccaatgaaaacatccagcgcttcaagatctgccccacccccaacaaccagttcatgatgggcggccgctactacaacagcattggagacatcatcgaccactacaggaaggagcagatcgtggagggctactacctgaaggagcctgtgcccatgcaggaccaggagcaggtgctgaatgacacagtggatggcaaggagatctacaacaccatccggaggaagaccaaggatgccttctacaagaacatcgtgaagaagggctacctgctgaagaagggcaagggcaagcgctggaagaacctgtacttcatcctggagggcagtgatgcccagctgatctactttgaaagtgagaagagggccaccaagcccaagggcctgattgacctgtctgtgtgcagcgtgtatgtggtgcatgacagcctgtttggccggcccaactgcttccagatcgtggtgcagcacttcagcgaggagcactacatcttctactttgctggggagaccccagagcaggccgaggactggatgaagggcctgcaggccttctgcaacctgaggaagagcagccctggcaccagcaacaagaggctgcggcaggtgagcagcctggtgctgcacatcgaggaggcccacaagctgcctgtgaagcacttcaccaacccctactgcaacatctacctgaacagcgtgcaggtggccaagacccacgcccgggagggccagaaccctgtgtggagcgaggagtttgtgtttgatgacctgcccccagacatcaacagatttgagatcaccctgagcaacaagaccaagaagagcaaggaccctgacatcctcttcatgcgctgccagctgagccggctgcagaagggccacgccacagatgagtggttcctgctgagcagccacatccccctgaagggcatcgagcccggcagcctgcgggtgcgggcccgctacagcatggagaagatcatgcctgaggaggagtacagcgagttcaaggagctgatcctgcagaaggagctgcacgtggtgtatgccctgagccacgtgtgtggccaggacaggaccctgctggccagcatcctgctgcgcatcttcctgcacgagaagctggagagcctgctgctgtgcaccctgaatgaccgggagatctccatggaggatgaggccaccaccctcttccgggccaccaccctggccagcaccctgatggagcagtacatgaaggccacagccacccagtttgtgcaccacgccctgaaggacagcatcctgaagatcatggagagcaagcagagctgtgagctgagccccagcaagctggagaagaatgaagatgtgaacaccaacctgacccacctgctgaacatcctgtctgagctggtggagaagatcttcatggccagcgagatcctgccccccaccctgcgctacatctacggctgcctgcagaagtctgtgcagcacaagtggcccaccaacaccaccatgaggaccagggtggtgtctggctttgtgttcctgcggctcatctgcccagccatcctgaaccccaggatgttcaacatcatcagtgacagccccagccccatcgccgcccggaccctcatcctggtggccaagtctgtgcagaacctggccaacctggtggagtttggagccaaggagccctacatggagggcgtgaaccccttcatcaagagcaacaagcacaggatgatcatgttcctggatgagctgggcaatgtgcctgagctgcctgacaccacagagcacagcaggacagacctgagccgggacctggccgccctgcacgagatctgtgtggcccacagtgatgagctgcggaccctgagcaatgaaagaggagcccagcagcacgtgctgaagaagctgctggccatcacagagctgctgcagcagaagcagaaccagtacaccaagaccaatgatgtgaggtag

SEQ ID NO: 133147 - DNA, 2646 bp, Artificial Sequence
  derived and/or modified sequence
atgtgcctggtgaagtcctggttcctgagcatccgcagccgctggtaccacggcaagctggacaggaccatcgccgaggagcggctgcggcaggccggcaagagcggcagctacctgatccgggagagtgacagaagacctggcagctttgtgctgtccttcctgagccagatgaatgtggtgaaccacttccgcatcatcgccatgtgtggggactactacatcggcggccgccgcttcagcagcctgagtgacctgattggctactacagccacgtgtcctgcctgctgaagggggagaagctgctgtaccctgtggcccctcctgagcctgtggaggacagaagaagagtgcgggccatcctgccctacaccaaggtgcctgacacagatgagatctccttcctgaagggggacatgttcatcgtgcacaatgagctggaggatggctggatgtgggtgaccaacctgaggacagatgagcagggcctgattgtggaggacctggtggaggaggtgggccgggaggaggacccccatgagggcaagatctggttccacggcaagatcagcaagcaggaggcctacaacctgctgatgacagtgggccaggtgtgcagcttcctggtgcggcccagcgacaacacccctggggactacagcctgtacttccgcaccaatgaaaacatccagcgcttcaagatctgccccacccccaacaaccagttcatgatgggcggccgctactacaacagcattggagacatcatcgaccactacaggaaggagcagatcgtggagggctactacctgaaggagcctgtgcccatgcaggaccaggagcaggtgctgaatgacacagtggatggcaaggagatctacaacaccatccggaggaagaccaaggatgccttctacaagaacatcgtgaagaagggctacctgctgaagaagggcaagggcaagcgctggaagaacctgtacttcatcctggagggcagtgatgcccagctgatctactttgaaagtgagaagagggccaccaagcccaagggcctgattgacctgtctgtgtgcagcgtgtatgtggtgcatgacagcctgtttggccggcccaactgcttccagatcgtggtgcagcacttcagcgaggagcactacatcttctactttgctggggagaccccagagcaggccgaggactggatgaagggcctgcaggccttctgcaacctgaggaagagcagccctggcaccagcaacaagaggctgcggcaggtgagcagcctggtgctgcacatcgaggaggcccacaagctgcctgtgaagcacttcaccaacccctactgcaacatctacctgaacagcgtgcaggtggccaagacccacgcccgggagggccagaaccctgtgtggagcgaggagtttgtgtttgatgacctgcccccagacatcaacagatttgagatcaccctgagcaacaagaccaagaagagcaaggaccctgacatcctcttcatgcgctgccagctgagccggctgcagaagggccacgccacagatgagtggttcctgctgagcagccacatccccctgaagggcatcgagcccggcagcctgcgggtgcgggcccgctacagcatggagaagatcatgcctgaggaggagtacagcgagttcaaggagctgatcctgcagaaggagctgcacgtggtgtatgccctgagccacgtgtgtggccaggacaggaccctgctggccagcatcctgctgcgcatcttcctgcacgagaagctggagagcctgctgctgtgcaccctgaatgaccgggagatctccatggaggatgaggccaccaccctcttccgggccaccaccctggccagcaccctgatggagcagtacatgaaggccacagccacccagtttgtgcaccacgccctgaaggacagcatcctgaagatcatggagagcaagcagagctgtgagctgagccccagcaagctggagaagaatgaagatgtgaacaccaacctgacccacctgctgaacatcctgtctgagctggtggagaagatcttcatggccagcgagatcctgccccccaccctgcgctacatctacggctgcctgcagaagtctgtgcagcacaagtggcccaccaacaccaccatgaggaccagggtggtgtctggctttgtgttcctgcggctcatctgcccagccatcctgaaccccaggatgttcaacatcatcagtgacagccccagccccatcgccgcccggaccctcatcctggtggccaagtctgtgcagaacctggccaacctggtggagtttggagccaaggagccctacatggagggcgtgaaccccttcatcaagagcaacaagcacaggatgatcatgttcctggatgagctgggcaatgtgcctgagctgcctgacaccacagagcacagcaggacagacctgagccgggacctggccgccctgcacgagatctgtgtggcccacagtgatgagctgcggaccctgagcaatgaaagaggagcccagcagcacgtgctgaagaagctgctggccatcacagagctgctgcagcagaagcagaaccagtacaccaagaccaatgatgtgaggtag

SEQ ID NO: 133148 - DNA, 2643 bp, Artificial Sequence
  derived and/or modified sequence
atgaggacaggctacagctctgtgcccagcaagctgcgctggtaccacggcaagctggacaggaccatcgccgaggagcggctgcggcaggccggcaagagcggcagctacctgatccgggagagtgaccggcggcccggcagctttgtgctgtccttcctgagccagatgaatgtggtgaaccacttccgcatcatcgccatgtgtggggactactacatcggcggccgccgcttcagcagcctgagtgacctgattggctactacagccacgtgtcctgcctgctgaagggggagaagctgctgtaccctgtggcccctcctgagcctgtggaggacagaagaagagtgcgggccatcctgccctacaccaaggtgcctgacacagatgagatctccttcctgaagggggacatgtttattgtgcacaatgagctggaggatggctggatgtgggtgaccaacctgaggacagatgagcagggcctcatcgtggaggacctggtggaggaggtgggccgggaggaggacccccatgagggcaagatctggttccacggcaagatcagcaagcaggaggcctacaacctgctgatgacagtgggccaggtgtgcagcttcctggtgcggcccagcgacaacacccctggggactacagcctgtacttccgcaccaatgaaaacatccagcgcttcaagatctgccccacccccaacaaccagttcatgatgggcggccgctactacaacagcatcggggacatcatcgaccactacaggaaggagcagatcgtggagggctactacctgaaggagcctgtgcccatgcaggaccaggagcaggtgctgaatgacacagtggatggcaaggagatctacaacaccatccggaggaagaccaaggatgccttctacaagaacatcgtgaagaagggctacctgctgaagaagggcaagggcaagcgctggaagaacctgtacttcatcctggagggcagtgatgcccagctgatctactttgagagcgagaagagggccaccaagcccaagggcctgattgacctgtctgtgtgcagcgtgtatgtggtgcatgacagcctgtttggccggcccaactgcttccagatcgtggtgcagcacttcagcgaggagcactacatcttctactttgctggggagaccccagagcaggccgaggactggatgaagggcctgcaggccttctgcaacctgaggaagagcagccctggcaccagcaacaagaggctgcggcaggtgagcagcctggtgctgcacatcgaggaggcccacaagctgcctgtgaagcacttcaccaacccctactgcaacatctacctgaacagcgtgcaggtggccaagacccacgcccgggagggccagaaccctgtgtggagcgaggagtttgtgtttgatgacctgcccccagacatcaacagatttgagatcaccctgagcaacaagaccaagaagagcaaggaccctgacatcctcttcatgcgctgccagctgagccggctgcagaagggccacgccacagatgagtggttcctgctgagcagccacatccccctgaagggcatcgagcccggcagcctgcgggtgcgggcccgctacagcatggagaagatcatgcctgaggaggagtacagcgagttcaaggagctgatcctgcagaaggagctgcacgtggtgtatgccctgagccacgtgtgtggccaggacaggaccctgctggccagcatcctgctgcgcatcttcctgcacgagaagctggagagcctgctgctgtgcaccctgaatgaccgggagatctccatggaggatgaggccaccaccctcttccgggccaccaccctggccagcaccctgatggagcagtacatgaaggccacagccacccagtttgtgcaccacgccctgaaggacagcatcctgaagatcatggagagcaagcagagctgtgagctgagccccagcaagctggagaagaatgaagatgtgaacaccaacctgacccacctgctgaacatcctgtctgagctggtggagaagatcttcatggccagcgagatcctgccccccaccctgcgctacatctacggctgcctgcagaagtctgtgcagcacaagtggcccaccaacaccaccatgaggaccagggtggtgtctggctttgtgttcctgcggctcatctgcccagccatcctgaaccccaggatgttcaacatcatcagtgacagccccagccccatcgccgcccggaccctcatcctggtggccaagtctgtgcagaacctggccaacctggtggagtttggagccaaggagccctacatggagggcgtgaaccccttcatcaagagcaacaagcacaggatgatcatgttcctggatgagctgggcaatgtgcctgagctgcctgacaccacagagcacagcaggacagacctgagccgggacctggccgccctgcacgagatctgtgtggcccacagtgatgagctgcggaccctgagcaatgaaagaggagcccagcagcacgtgctgaagaagctgctggccatcacagagctgctgcagcagaagcagaaccagtacaccaagaccaatgatgtgaggtag

SEQ ID NO: 133149 - DNA, 3144 bp, Artificial Sequence
  derived and/or modified sequence
atgatggccgccgaggccggcagcgaggagggcggccccgtgaccgccggggccggcggcggcggagctgcagccgggtcttcagcgtaccctgccgtttgcagagtcaaaatcccagctgccctgccagtggctgctgcgccctaccctggcctggtggagactggcgtggcgggtaccttgggcgggggagcggccttaggatccgagttcttgggggctgggagcgtcgccggcgcccttggaggagccggtttaaccggaggggggaccgccgccggggtcgccggcgctgcggcaggagtcgctggcgccgccgtagccggccccagcggcgacatggctctgacaaagctgcccaccagtctgctggcagaaacgctgggacctggcgggggatttcctccattgccacctccgccttacttaccgccccttggtgcggggttaggaaccgtcgatgagggcgactctttagatggtccagagtatgaagaggaagaagtggcaatccctctaacagctcccccgaccaaccagtggtaccatggcaagttagaccgaaccatagccgaggagagactaagacaagcagggaaatcaggctcgtacctcatccgagagtcagacaggcgaccggggtccttcgtgctttccttcctctcccagatgaatgtcgtgaaccattttcggatcatcgctatgtgtggggattactatataggcggtcgccggttctccagcttgtctgacctgatagggtactatagtcacgtatcttgtctgctgaagggtgagaagcttctgtatccagtggcacctccagaacccgtggaggacagaagacgggtcagggccattctaccatacaccaaggtcccggataccgacgagatcagcttcctaaagggagatatgtttatcgtgcataacgagttggaggacggctggatgtgggtcacgaatctgcggacagacgagcaggggttaattgtcgaagatttagtggaggaggttggaagagaggaggatccacacgagggaaaaatctggttccatggcaagattagtaagcaagaggcttataatctgttgatgactgttggacaagtgtgcagctttttggtgcgacccagtgataatacccccggtgactattcactctattttcgaactaacgagaatattcagagattcaaaatttgccccactcctaataaccagtttatgatgggcggccggtattacaattcaataggggacattattgatcattatagaaaagagcagattgtggagggttattacctgaaagaacctgtccccatgcaggatcaggagcaggtgctaaatgatacagtcgacggcaaggagatttacaacactatacggcgcaagaccaaagacgccttctacaaaaatatcgtcaaaaaaggctatttgcttaaaaaaggcaagggcaaacggtggaaaaacctgtacttcattctcgagggatccgatgcacagttgatctacttcgagagtgaaaagcgagccacaaagccaaaaggactgatcgacctgtctgtgtgcagtgtgtacgtcgtccacgattccctgttcggtaggcctaactgcttccaaatcgtggtacaacattttagcgaagaacactacatcttttacttcgccggagagacacccgagcaggccgaagactggatgaaggggctgcaggctttttgtaatttacgaaagtcctccccgggcacctcaaacaaacgactacggcaggtgtcgagtctggttctgcacatcgaagaagcccataagctgcctgtaaagcactttactaacccctactgcaacatctacctaaactccgtgcaggtggcgaaaacccacgccagggaggggcaaaatcctgtgtggagcgaggaattcgtcttcgatgacctgcctccggacattaaccgatttgaaatcacactgtccaacaaaacaaaaaaaagtaaggatcctgacatcctcttcatgcgctgtcagttaagtcgcttgcagaaggggcatgccacggatgagtggtttttattgtcatcccacatccctttgaagggaatcgagcccggttcgttacgcgtgcgagccaggtatagcatggagaagattatgcctgaagaggaatactcagaattcaaggaactaatccttcagaaagaactccacgtggtttacgccttaagccatgtgtgtggccaggataggacacttcttgcaagtattctgctgaggatatttctgcatgaaaagcttgagtcactactcctatgtaccctgaacgaccgggagatttctatggaggacgaggctaccacgctcttccgggccactaccttggcgtcaactttgatggaacaatacatgaaggcaaccgctactcaatttgtgcatcacgcccttaaggattccatcttgaagatcatggagagcaagcagtcctgcgaactgtcacccagtaaattggagaaaaatgaggatgttaacactaatcttacccacctcctgaatattctctcggaactggtggagaaaatttttatggcctctgaaatacttccacctaccttgcgatacatctacggctgtttacagaaatccgtgcaacacaaatggcctaccaacacgacaatgcgcactcgggttgtgtctggctttgtgttcttgaggcttatctgcccagctattctaaacccccggatgtttaatatcatctcagactcgccaagccctatcgctgcacgaaccctgatcttagttgcaaagagcgttcagaacctcgccaacctcgttgagttcggagccaaggagccatacatggagggtgtgaaccccttcattaagagcaataagcatagaatgatcatgtttcttgatgaactgggcaatgtgcctgagcttccggacaccaccgaacacagccggaccgatttgagtagagacttagccgcactacatgaaatatgtgttgctcatagcgacgagcttaggacgttgtctaatgaaaggggggctcagcagcatgtgttaaagaaactgctggccattactgagctcctccagcagaagcagaaccagtataccaaaacaaacgacgtgcgatag

SEQ ID NO: 133150 - DNA, 2646 bp, Artificial Sequence
  derived and/or modified sequence
atgtgcctggtgaagagctggttcctgagcatccggagccggtggtaccacggtaagctggataggaccatcgccgaggagcgccttcgacaggccggtaaatcaggctcttatttgattagggaaagcgatagaagaccgggctcgttcgtcctctccttcttatcgcagatgaatgttgttaaccatttccgaattattgcgatgtgtggtgactattacattggtgggcgaaggttctcttccttgtcagacctaatcggctactactctcatgtctcctgtctactgaagggagaaaagttactttatccggtagcccctcctgagcctgtggaggaccgccgacgggtcagagctatcctaccatacacaaaggtccctgacacggacgagattagttttttgaaaggagatatgttcatagtgcataacgagctggaggatggttggatgtgggtgactaacttacgtaccgacgagcaagggctgattgtggaagacctggtcgaagaagtggggagagaggaagaccctcatgagggaaagatttggttccatggcaagatcagcaagcaggaggcctataaccttcttatgaccgtcgggcaagtttgtagctttctggtgaggccatcagacaacactcccggagactattcactttatttccgcacgaacgagaatattcagcgctttaagatctgtcccacccctaacaaccagtttatgatgggaggtcgatactataacagcatcggggacatcattgatcactatcgtaaggaacagatagtagagggctactaccttaaggagcctgtgcctatgcaggatcaggaacaggtgctcaacgacaccgtggacggaaaagagatttataataccatcaggaggaaaactaaagatgccttttacaaaaacattgtgaagaagggctatctacttaagaaaggtaaggggaaacgatggaaaaacttgtacttcatccttgaggggagcgatgcccagttgatttactttgagtcagaaaagagggccactaagccgaaaggtttaatcgatctgtccgtctgtagcgtttacgttgtacacgactcgctctttggacgaccaaactgttttcaaattgtcgttcaacacttctcggaagagcactacatattctactttgccggggagaccccagaacaggccgaggactggatgaaaggacttcaggcgttttgtaatctgaggaagtctagtccggggacgtccaacaaacggctgcggcaggtttcctccctcgtgcttcacattgaggaagctcacaagctcccagttaagcatttcaccaacccttactgtaacatctatctgaatagtgttcaggtcgcgaaaacccatgctcgggagggccagaacccagtatggtcagaggagtttgtcttcgacgacctgccgccagacatcaaccggttcgagattactctatcaaacaagacaaagaagagtaaagaccccgatatcctctttatgagatgccagctgagccgattgcagaagggacacgcaacagatgaatggttcctgttgtccagccatataccacttaaggggatcgagccaggctcactcagagtccgggcccggtacagcatggagaagataatgccagaggaagaatactctgagtttaaggagttaatcctccagaaggaactgcatgttgtatacgctctgtctcatgtttgtggccaagataggaccctgctcgcttcaattctcctgcggatatttcttcatgagaaattggaaagcctgctgctgtgcaccctcaacgatagggagatcagcatggaagacgaggccacaaccctatttagagctaccacgctcgcctccactctaatggagcagtacatgaaagccactgccactcagttcgtgcaccacgcactaaaggacagcatactaaagatcatggaatctaagcaatcctgcgaattgtctccatcaaagctggagaagaatgaggacgtaaataccaacctgacgcatttactaaatattctcagtgagctggtggagaagatcttcatggcatccgaaatattgccacccaccttgaggtatatctatggatgcttacagaaaagcgtacagcacaaatggccaactaatacgacaatgaggacacgtgttgtatcaggatttgttttcctgcggctaatctgccccgccattctgaatcccagaatgttcaacattatcagtgactctccttcccccatcgcagcccgtacattgattctggtagcgaagtcagttcagaacctagcaaacttggtggagttcggggctaaggaaccctacatggagggcgttaacccatttattaaaagcaataagcacagaatgataatgtttctcgatgagcttggaaatgttccagaattgcctgacaccacagaacacagccgaacagacctttctcgcgatctggctgctctgcacgagatttgcgtggctcactccgatgaactgcggaccctgtcaaacgaaaggggggcacagcaacatgtcttaaagaagttactcgccatcactgaactcttgcagcagaaacagaatcagtacaccaagaccaatgacgtccgttag

SEQ ID NO: 133151 - DNA, 2643 bp, Artificial Sequence
  derived and/or modified sequence
atgcggaccggctacagcagcgtgcccagcaagctgcggtggtaccatggtaaacttgaccgaacaatcgccgaagaacgattaaggcaagccgggaagtcaggtagttacctcattcgcgagtccgatagacgcccagggagttttgttttgtctttcttaagtcagatgaacgtggtgaatcactttcgcatcattgcgatgtgtggagattactacataggcggccgacggttttcttcattgtccgacctgatcgggtattactcccatgtgtcctgcctgttaaaaggagagaaacttctgtatcctgttgcgcctccagagcccgtcgaggatcggcgtcgagtgagagcaatcctgccatatacaaaggttccggacaccgacgaaataagctttctgaagggagatatgtttattgtccacaacgagctcgaggacggatggatgtgggtgaccaatctgcgaaccgacgagcagggattgatagtggaagatctggttgaggaagtcggaagagaggaggaccctcacgagggcaaaatttggttccatggcaaaatctctaagcaagaggcatacaatctgctgatgaccgtgggccaggtttgtagctttcttgtgcgtcccagcgacaatacccccggagactatagtctttactttcgcactaatgaaaacatccaaaggttcaagatctgtccaacaccgaacaatcagtttatgatgggtggtcgatactacaactcaataggggacattatagaccactataggaaggaacagattgtggaaggctactatctgaaggagcctgttcccatgcaggatcaggaacaggtgctgaacgataccgttgatggaaaggagatctacaatacaattcggcggaagacaaaggatgccttttataagaacatcgtaaagaaaggctatctgctgaagaaaggcaaaggcaagaggtggaagaatctgtattttatcctagaaggatcagacgcccagctgatctactttgagagcgaaaagagagcaaccaagccaaagggcctcatcgacctgtccgtgtgttcagtatatgtggtgcacgacagcttgttcggccgccccaactgtttccagattgtcgtacagcactttagcgaggagcactacatattctattttgcgggggaaacaccagaacaggccgaggattggatgaagggtctgcaggccttctgcaatctgaggaagtcctcccctggaacctccaataagcgtcttaggcaggtaagctctcttgtcctgcacatagaggaagcccacaagctacctgtgaaacacttcactaatccctactgtaatatttaccttaactctgtccaagtggcaaaaacacacgcccgcgaggggcagaatcccgtctggtctgaggagttcgtgttcgacgaccttccaccagacataaatagatttgagataactctcagtaacaagacgaaaaaatccaaggaccctgacatcttatttatgcggtgtcagctctctcgcctgcagaagggtcacgctacagacgagtggttcctactgtccagccatattcccttgaaggggatcgaaccgggctcactaagggttagggcacgttactccatggaaaagattatgcccgaggaggaatatagtgagttcaaggaacttatcttacaaaaggaactgcacgtggtttatgcactgtcccatgtgtgcggacaggatcgaactttgttggcaagcatccttctgcgcatatttctgcacgaaaagctggagagcctcctgctttgtacattgaatgacagagagatttccatggaggacgaggctaccaccctcttcagggccacaaccctggcttcaacccttatggagcaatacatgaaggccacagccacacaatttgtgcaccacgctcttaaggatagcatcctgaaaatcatggaatcgaagcagtcgtgcgagctcagcccatccaagttagagaagaacgaggacgtcaacactaatcttactcatttgctgaacatcctcagcgagttggtggagaagatttttatggcctcagagattttgcctccaacccttcggtacatttacgggtgcttacagaagtctgtgcagcataagtggccaacaaacaccaccatgagaactcgcgtcgtttccggtttcgtttttcttcggctgatttgccctgccattctgaacccacgaatgttcaacattattagtgacagtccatctcccatcgctgccagaactctcatcctggtagcgaaaagcgtgcagaatctcgcaaacctggtggaatttggcgccaaggagccgtatatggaaggggtcaacccattcataaaatccaacaagcaccgcatgattatgttcctcgatgagctgggcaatgtgcccgaactaccagacaccaccgaacattctagaacagatctttctcgcgaccttgccgccttgcatgagatctgtgtggcccactcggatgaactgaggacgttaagtaacgaaagaggcgcccagcagcatgtgctgaaaaaattactcgccatcacagaactgctgcagcaaaagcagaaccagtacacaaagactaatgacgtgagatag

SEQ ID NO: 133152 - DNA, 3144 bp, Artificial Sequence
  derived and/or modified sequence
atgatggccgcagaggctgggtcagaggaaggaggccctgtcaccgccggagcagggggtgggggagcggctgctggatcctcggcctaccctgccgtatgtcgtgtcaagattccagccgcactgcccgtcgcggctgcgccttatccaggactggtagagaccggggtggccggtactctggggggaggagccgctttgggtagcgagtttctaggcgcagggtcagtggcaggagcccttgggggagctggactgactggaggcggtaccgcagctggggtagcgggagctgcagccggagtggccggagctgcggtagcgggtccgtccggcgatatggccctgaccaagttgccgacatcacttctggctgaaacacttgggccaggtggcggattccctccactcccccctcctccgtatcttcccccactgggggctggactgggcacagtcgacgaaggagattcattggatgggcctgagtatgaggaagaggaggtggcgatcccactgacagccccacctacaaatcagtggtatcacggaaagctcgatagaaccatcgcagaggaaaggctccggcaggccggaaagtccggatcatatctgatacgtgaatctgacagaaggccgggatccttcgtgctgtcctttcttagccagatgaacgtagtgaaccattttagaattattgcgatgtgcggagattattacatcggaggacgaaggtttagttcactgagcgatctgatcggctactattctcacgtcagttgtctgcttaagggtgagaaacttctctacccagtggcaccacccgaaccagttgaggatcggcgacgagtgcgggcaatcttgccctatacaaaggtccccgatacggatgagataagtttccttaagggcgatatgttcatagtccacaacgagctggaggacggctggatgtgggtgaccaaccttagaaccgacgagcagggccttattgtagaggatttggtggaagaggttggacgtgaagaggatccccacgaggggaagatctggtttcacggcaaaattagcaaacaggaggcatataatctactgatgaccgtgggtcaggtatgtagcttcctggttagaccgtccgataacactcccggagactattccctgtacttccgcactaacgaaaacattcaacggtttaagatctgtccaacgccgaataatcagttcatgatgggaggcagatactataattctatcggtgacatcattgatcactacaggaaggagcaaattgtggaggggtactacctcaaagagccagtccctatgcaggaccaggaacaggttttgaacgatacagtcgacgggaaagagatctacaacacaatccggagaaagaccaaggatgccttctataagaacattgtgaagaagggctacctgctgaaaaagggaaagggcaagcggtggaagaatctatactttattctcgaggggagcgatgctcagctgatctattttgagtcagagaaacgtgccaccaagcctaaaggcctaatcgatctatccgtttgctccgtgtacgttgttcatgatagtctgttcgggagaccaaactgttttcagattgtggtgcagcacttttcagaggagcattacatcttctacttcgctggtgagaccccggagcaggcggaggattggatgaaggggctccaagctttttgtaatttgcggaagagctctcctgggacctccaacaaaaggttacggcaagtctccagcctggttctgcatattgaggaggcccacaagctgcctgtcaagcactttaccaatccatattgcaatatttacctcaacagtgttcaagttgcaaagacacacgcacgcgaaggccagaacccagtgtggtcagaggagtttgtgtttgacgacttacccccagatatcaatcggttcgaaattacactgtccaataaaacaaagaagagtaaggatcccgacatcctctttatgcgctgccagctcagcaggctgcagaagggccacgccacggatgaatggtttctgctgtccagtcacattcctcttaaaggcatcgaacccggatctctccgggtcagagcaagatactccatggaaaagatcatgcccgaggaggaatactccgaattcaaggagctgattcttcagaaagagctacacgtggtatatgccctctcacacgtttgtggacaggatcgaactttgcttgcctcgatcttgctgcgcatctttcttcacgagaagctggaaagcctactgctgtgcaccctgaatgatcgcgaaatcagcatggaggacgaggccaccactttattccgcgcaacaactctagcatccactttgatggagcagtacatgaaggccaccgccactcaattcgtgcaccacgccctcaaggactcgattctgaagatcatggagagtaaacagtcctgcgagctctccccctcaaagctcgaaaagaacgaggacgtgaacacgaatctgacccaccttctcaatatcttatccgaactagtggaaaagatctttatggcttccgaaattctgccccctacattgaggtacatttatgggtgcctgcagaagtctgtccaacacaagtggcctactaataccacgatgaggactagagtcgtgagcggattcgtgttcttacggctaatatgtcccgctatcctgaatccgagaatgttcaatatcatatcagatagcccttcccctatcgccgctagaacactgattttggtagccaagtccgtccagaacctggcaaatctggtggagttcggtgcaaaagagccgtacatggaaggggttaaccctttcatcaagtccaacaaacacaggatgataatgttcctggacgaactcggaaacgtgccagaactcccagatacgacagaacattcgcgaactgacctgagcagggatctggctgctctgcatgaaatctgcgtggcgcactccgatgaattgcgaacccttagtaacgagaggggcgcacagcagcacgtgttaaagaaacttctggccataacagaactactgcaacagaagcaaaaccagtacaccaagacaaacgacgtccggtag

SEQ ID NO: 133153 - DNA, 2646 bp, Artificial Sequence
  derived and/or modified sequence
atgtgtcttgtgaagagctggtttctgtcaatcaggtctcgctggtaccatggcaagctagacagaacgatagccgaagaacgacttcggcaagccggtaagtctggctcctacctgattagggaatcggatagacgcccaggttcctttgtactgtcattcctctcacagatgaatgttgtgaatcacttcagaatcatcgcaatgtgcggggattactacatcggcggaagaagattttcttcgctgtccgacttaatcggatattattctcacgtttcctgcctacttaagggtgagaaactgctttaccccgttgcacccccagagcccgtggaagatcggcgacgggttcgcgctatcttaccatacacaaaagttcccgatacggacgagatctcgttcttgaagggggatatgttcattgtgcataacgagttggaagacgggtggatgtgggttacaaatctgaggaccgacgaacaagggctcattgttgaggatctcgttgaggaagtaggacgcgaagaggatccccatgagggcaagatctggttccacggcaagatttcaaagcaggaggcttacaacctactgatgactgtcgggcaagtgtgctcttttctcgttaggccgtccgacaatacacctggagattattcactgtattttcgcaccaacgagaatatccagcgcttcaagatatgtccgacacctaacaaccagtttatgatgggagggagatattacaactcgatcggtgacatcatcgaccactaccgtaaagagcagatagtggagggctattatctgaaggagcctgtgcccatgcaggaccaggagcaagtactgaacgacacagtcgacggtaaggagatttataacaccatccggcgaaaaacaaaagatgccttctataagaacatcgtgaagaagggctatctcctcaagaaaggcaaaggcaagcgctggaaaaacctgtatttcatccttgagggttctgacgcacagctaatttactttgaaagcgagaaacgcgcaactaagccaaaaggacttattgacttgtctgtgtgctccgtgtatgtggtgcatgacagcctcttcggcaggccaaactgttttcaaatcgttgtgcagcatttctctgaggagcactacattttttatttcgcaggagagactccagagcaagccgaggactggatgaaggggctccaggccttttgcaacctcaggaagagctcgcccggaacatctaataagagactacgccaggtcagctcccttgttctccacatcgaagaggcgcacaagctccctgtaaagcatttcacaaacccttattgtaatatctatctgaatagtgtgcaggtggctaaaacgcatgccagagaaggacaaaaccccgtttggtcagaagagttcgtgttcgacgatctccccccagacatcaaccgctttgagatcactttgtcaaacaaaaccaaaaagtccaaggacccagacatcctcttcatgagatgccagctgtcgaggttacagaaaggccatgctactgacgaatggtttctgctatccagccatatcccactcaagggaatcgagccaggatccctgagggttagggccaggtactcgatggagaaaatcatgcctgaagaggagtacagtgaattcaaggagttaatccttcagaaggagttacacgtagtatacgccctctcacatgtgtgcgggcaggaccgcacccttctcgccagcattctgttacgtattttcctacacgaaaaactggaatcccttcttttatgcaccctgaacgaccgcgaaattagcatggaagatgaggctacgacacttttccgggctaccaccctggcatctacccttatggaacagtacatgaaagcaaccgctacccaatttgtgcaccacgccctgaaggatagtattctcaaaattatggagagtaaacagtcctgcgagctttctccatccaaactggagaaaaatgaggacgtcaacacaaatctgacgcacctgctgaatatactgagtgaactcgtcgaaaaaatatttatggccagtgaaattctaccccctaccttaagatacatttacggctgtctgcagaaatctgttcagcataagtggcccactaatacgaccatgcgcacaagagtggtgagcggattcgtttttctgcgtcttatatgtcccgctatacttaacccacgaatgtttaacatcataagtgactccccaagcccaatcgctgcacgtacgcttatactggttgccaaatccgtgcagaaccttgctaatctagtcgagttcggtgccaaagagccgtacatggagggcgtcaatccctttatcaagtcaaacaagcatagaatgataatgtttctggatgagcttggaaacgttccagagcttcctgatacaaccgagcactctcggaccgatctgtcacgcgatctggctgccctccacgagatctgtgtggcacactcagatgagctcagaaccttaagcaacgagcggggtgcacaacagcatgtcctgaaaaagctgctagctatcactgaactgctccaacagaagcagaatcaatatacgaagacaaacgacgtgcgttag

SEQ ID NO: 133154 - DNA, 2643 bp, Artificial Sequence
  derived and/or modified sequence
atgcggaccggatattcaagcgtacccagcaaactgcggtggtaccacgggaagctggacagaaccatcgcagaggagaggctgagacaggccggaaaaagcggatcctacctcattagagaatcagacagacgtcccggttcctttgtactgtcatttttatctcagatgaacgttgttaatcacttccgcataattgctatgtgcggagactattacattggcggacggaggttcagcagcttgtccgatctgattggttattactcccacgttagctgcctgcttaagggggaaaagctcctgtaccctgtggcccctccagagcctgtcgaggataggaggagagttcgcgcaattctcccttatacaaaggtacctgataccgacgagatctcattcctgaagggcgatatgtttatcgtccacaatgaattggaggacgggtggatgtgggtaacaaacttgcgaacagacgagcagggtctaatcgtggaggacctggtagaggaggtaggcagagaggaagaccctcacgaaggtaagatctggtttcacggaaagatttcaaagcaagaagcctacaaccttttgatgacagttggccaggtttgctctttcttagtgcgtccttcagataatacccctggtgactatagtctttacttccgtacgaatgagaatatacagcgtttcaagatctgtcccacccctaataatcaattcatgatgggcggacgctattataactccatcggcgacataattgatcattacagaaaggagcaaattgtcgaaggctactatctgaaagagccagttcctatgcaggaccaggagcaggtcttgaacgacacagtcgacggaaaggagatttacaatacgatcagaagaaaaactaaagatgctttttataaaaatatcgtcaagaaaggatacctcttaaaaaaggggaagggcaagaggtggaagaacctgtatttcattcttgagggaagtgatgcacagctaatctatttcgagtcggaaaagcgggcaacaaagcctaagggactcatcgacctgtccgtgtgctcagtgtacgtggttcacgacagtttgtttggccgtccaaattgcttccagatcgtggttcagcacttcagtgaagagcactacatattttactttgcaggcgaaaccccagaacaggcggaggattggatgaagggtctgcaggctttctgcaatttacggaagagcagccctggcacctccaataaacgcttaagacaggtatcgtccctggtgttacacatcgaagaggcacataaactgccagtaaaacatttcacaaatccttattgcaatatctacctgaactctgtgcaggttgctaagacacatgcacgcgaagggcagaatcctgtttggtccgaggagtttgtttttgacgaccttccacctgacataaaccgctttgagatcacactcagcaataaaactaaaaagtctaaggatcctgacatattattcatgcgctgtcagctgtctagactgcagaagggccacgccaccgacgagtggtttttattgagttcccacatacccctcaagggtatcgagccgggatccctgagggtccgagcacgctattcaatggagaaaattatgcctgaagaagagtacagcgagttcaaagaattgatcctgcagaaagaattgcatgtggtgtacgcattgtcacacgtgtgtgggcaagatcgcaccctgttagcttcaatactgctgagaatattcctgcacgagaaacttgaatccctgcttttatgtacgctgaacgaccgtgaaatctctatggaggatgaggccaccacactgttccgggcaactaccctcgcctccaccctcatggagcagtatatgaaggccaccgctacgcagttcgtgcatcacgccctgaaagactcaattctgaagattatggaatctaaacagagttgtgagctttcaccctccaagctggagaagaacgaggatgtgaacacaaatctgacccacctgctgaacatactctccgagttggtggagaaaatttttatggccagtgagatcttaccacctactctaaggtacatttatgggtgcctgcagaagtccgttcagcacaagtggcccaccaacaccaccatgcgcacccgagtcgtgtctggattcgtgttcctgagactcatctgccctgcaatactcaatcctcgtatgtttaacatcatctcagactccccctcacccatagcggctagaacattgatactcgtcgctaaatctgtccagaatttggcaaacctcgttgagttcggcgcaaaagaaccctacatggagggcgtgaacccttttattaagagtaacaaacatcgtatgatcatgttcctagacgaactgggcaacgttcctgagctccctgataccactgagcactctcgcacagacctgagccgggacctcgccgcattgcatgagatctgcgtagcccattccgacgagctccgaaccctctctaacgagcgaggagcgcagcagcacgtgctgaaaaagctgctggcaatcactgaattactgcaacaaaagcagaaccagtacacgaaaacaaacgacgtcaggtag

SEQ ID NO: 133155 - DNA, 3752 bp, Artificial Sequence
  derived and/or modified sequence
ctgagagctccaggtagtgagcagttcagtcgatttcctcgttaccccgcccccctttctcttgcccccccacccctctcatctgcctggtggaggatgaagcggctgcagtggccccagcctcagcagcggcaccggcggtggctgcggtgtgggtggccggaactggggtggtgaagaagcggtggtggcggctgaaggagcggtagcagcctcagcctctttccctgtgcttcctttcctctttagtgcagcgaggaagttttcgcttctgtacatgtgtttgtgtgcgtgagtgtgggtgtgtgcggtgaggtttgggtggcgtttgtgcaggcgttgggttttttgcccacttggcttcccgtaacccaggcagctggggagcctgggctgtggccctaggagggggcgcggcggcgggctctctccttttgttgttgtttcctcagcctggggagctgaaggggagacgcgtctgggtggggctgctcggagcccgggcctggtggcccctggggctcccgggcgggcagggtagggcagagtagagcgggcttcaacatgatggcggccgaggccggcagtgaggagggcggcccggtaacagccggagctggaggaggcggcgcggcagcgggctccagtgcctatcccgcagtgtgtcgggtgaagatacccgcggccctgcctgtggcagccgccccctatcctgggctggtggagaccggagtggctggaactctgggtggcggagccgctttggggtcagagttcctaggagccgggtctgtggcaggggcactggggggagctggactgacagggggaggtactgctgctggcgtagctggtgctgctgctggcgtggccggtgctgctgttgctggacctagtggagacatggctctcaccaaactgcccacttcgttgcttgctgagactctcgggccaggcggcggttttccccctctgccccctcccccttacctgccccctttgggggcgggcctcgggacagtggacgaaggtgactctctggatggaccagaatacgaggaggaagaggtggccataccgttgaccgctcctccaactaaccagtggtatcacggaaaacttgacagaacgatagcagaagaacgcctcaggcaggcagggaagtctggcagttatcttataagagagagtgatcggaggccagggtcctttgtactttcatttcttagccagatgaatgttgtcaaccattttaggattattgctatgtgtggagattactacattggtggaagacgtttttcttcactgtcagacctaataggttattacagtcatgtttcttgtttgcttaaaggagaaaaattactttacccagttgcaccaccagagccagtagaagatagaaggcgtgtacgagctattctaccttacacaaaagtaccagacactgatgaaataagtttcttaaaaggagatatgttcattgttcataatgaattagaagatggatggatgtgggttacaaatttaagaacagatgaacaaggccttattgttgaagacctagtagaagaggtgggccgggaagaagatccacatgaaggaaaaatatggttccatgggaagatttccaaacaggaagcttataatttactaatgacagttggtcaagtctgcagttttcttgtgaggccctcagataatactcctggcgattattcactttatttccggaccaatgaaaatattcagcgatttaaaatatgtccaacgccaaacaatcagtttatgatgggaggccggtattataacagcattggggacatcatagatcactatcgaaaagaacagattgttgaaggatattatcttaaggaacctgtaccaatgcaggatcaagaacaagtactcaatgacacagtggatggcaaggaaatctataataccatccgtcgtaaaacaaaggatgccttttataaaaacattgttaagaaaggttatcttctgaaaaagggcaaaggaaaacgttggaaaaatttatattttatcttagagggtagtgatgcccaacttatttattttgaaagcgaaaaacgagctaccaaaccaaaaggattaatagatctcagtgtatgttctgtctatgtcgttcatgatagtctctttggcaggccaaactgttttcagatagtagttcagcactttagtgaagaacattacatcttttactttgcaggagaaactccagaacaagcagaggattggatgaaaggtctgcaggcattttgcaatttacggaaaagtagtccagggacatccaataaacgccttcgtcaggtcagcagccttgttttacatattgaagaagcccataaactcccagtaaaacattttactaatccatattgtaacatctacctgaatagtgtccaagtagcaaaaactcatgcaagggaagggcaaaacccagtatggtcagaagagtttgtctttgatgatcttcctcctgacatcaatagatttgaaataactcttagtaataaaacaaagaaaagcaaagatcctgatatcttatttatgcgctgccagttgagccgattacagaaagggcatgccacagatgaatggtttctgctcagctcccatataccattaaaaggtattgaaccagggtccctgcgtgttcgagcacgatactctatggaaaaaatcatgccagaagaagagtacagtgaatttaaagagcttatactgcaaaaggaacttcatgtagtctatgctttatcacatgtatgtggacaagaccgaacactactggccagcatcctactgaggatttttcttcacgaaaagcttgaatcgttgttgttatgcacactaaatgacagagaaataagcatggaagatgaagccactaccctatttcgagccacaacacttgcaagcaccttgatggagcagtatatgaaagccactgctacacagtttgttcatcatgctttgaaagactctattttaaagataatggaaagcaagcagtcttgtgagttaagtccatcaaagttagaaaaaaatgaagatgtgaacactaatttaacacacctattgaacatactttcagagcttgtggagaaaatattcatggcttcagaaatacttccaccgacattgagatatatttatgggtgtttacagaaatctgttcagcataagtggcctacaaataccaccatgagaacaagagttgttagtggttttgtttttcttcgactcatctgtcctgccatcctgaatccacggatgttcaatatcatctcagattctccatctcctattgctgcaagaacactgatattagtggctaaatctgtgcagaacttagcaaatcttgtggaatttggagctaaggagccctacatggaaggtgtcaatccattcatcaaaagcaacaaacatcgtatgatcatgtttttagatgaacttgggaatgtacctgaacttccggacactacagagcattctagaacggacctgtcccgtgatttagcagcattgcatgagatttgcgtggctcattcagatgaacttcgaacgctcagtaatgagcgtggtgcacagcagcacgtattgaaaaagcttctggctataacagaactgcttcaacaaaaacaaaaccagtatacaaaaaccaatgatgtcaggtagcagccttcgccccagtgttctgcatggattcagcatgtccaaca

SEQ ID NO: 133156 - DNA, 3009 bp, Artificial Sequence
  derived and/or modified sequence
gaggaggaagaggtggccataccgttgaccgctcctccaactaaccagtaagttaagactgctgttcaggaatttgggaagctggctccagaaaagaagtggaaatgaaggggttccatgtgccttgtgaagtcatggttcctcagtataagatcgaggtggtatcacggaaaacttgacagaacgatagcagaagaacgcctcaggcaggcagggaagtctggcagttatcttataagagagagtgatcggaggccagggtcctttgtactttcatttcttagccagatgaatgttgtcaaccattttaggattattgctatgtgtggagattactacattggtggaagacgtttttcttcactgtcagacctaataggttattacagtcatgtttcttgtttgcttaaaggagaaaaattactttacccagttgcaccaccagagccagtagaagatagaaggcgtgtacgagctattctaccttacacaaaagtaccagacactgatgaaataagtttcttaaaaggagatatgttcattgttcataatgaattagaagatggatggatgtgggttacaaatttaagaacagatgaacaaggccttattgttgaagacctagtagaagaggtgggccgggaagaagatccacatgaaggaaaaatatggttccatgggaagatttccaaacaggaagcttataatttactaatgacagttggtcaagtctgcagttttcttgtgaggccctcagataatactcctggcgattattcactttatttccggaccaatgaaaatattcagcgatttaaaatatgtccaacgccaaacaatcagtttatgatgggaggccggtattataacagcattggggacatcatagatcactatcgaaaagaacagattgttgaaggatattatcttaaggaacctgtaccaatgcaggatcaagaacaagtactcaatgacacagtggatggcaaggaaatctataataccatccgtcgtaaaacaaaggatgccttttataaaaacattgttaagaaaggttatcttctgaaaaagggcaaaggaaaacgttggaaaaatttatattttatcttagagggtagtgatgcccaacttatttattttgaaagcgaaaaacgagctaccaaaccaaaaggattaatagatctcagtgtatgttctgtctatgtcgttcatgatagtctctttggcaggccaaactgttttcagatagtagttcagcactttagtgaagaacattacatcttttactttgcaggagaaactccagaacaagcagaggattggatgaaaggtctgcaggcattttgcaatttacggaaaagtagtccagggacatccaataaacgccttcgtcaggtcagcagccttgttttacatattgaagaagcccataaactcccagtaaaacattttactaatccatattgtaacatctacctgaatagtgtccaagtagcaaaaactcatgcaagggaagggcaaaacccagtatggtcagaagagtttgtctttgatgatcttcctcctgacatcaatagatttgaaataactcttagtaataaaacaaagaaaagcaaagatcctgatatcttatttatgcgctgccagttgagccgattacagaaagggcatgccacagatgaatggtttctgctcagctcccatataccattaaaaggtattgaaccagggtccctgcgtgttcgagcacgatactctatggaaaaaatcatgccagaagaagagtacagtgaatttaaagagcttatactgcaaaaggaacttcatgtagtctatgctttatcacatgtatgtggacaagaccgaacactactggccagcatcctactgaggatttttcttcacgaaaagcttgaatcgttgttgttatgcacactaaatgacagagaaataagcatggaagatgaagccactaccctatttcgagccacaacacttgcaagcaccttgatggagcagtatatgaaagccactgctacacagtttgttcatcatgctttgaaagactctattttaaagataatggaaagcaagcagtcttgtgagttaagtccatcaaagttagaaaaaaatgaagatgtgaacactaatttaacacacctattgaacatactttcagagcttgtggagaaaatattcatggcttcagaaatacttccaccgacattgagatatatttatgggtgtttacagaaatctgttcagcataagtggcctacaaataccaccatgagaacaagagttgttagtggttttgtttttcttcgactcatctgtcctgccatcctgaatccacggatgttcaatatcatctcagattctccatctcctattgctgcaagaacactgatattagtggctaaatctgtgcagaacttagcaaatcttgtggaatttggagctaaggagccctacatggaaggtgtcaatccattcatcaaaagcaacaaacatcgtatgatcatgtttttagatgaacttgggaatgtacctgaacttccggacactacagagcattctagaacggacctgtcccgtgatttagcagcattgcatgagatttgcgtggctcattcagatgaacttcgaacgctcagtaatgagcgtggtgcacagcagcacgtattgaaaaagcttctggctataacagaactgcttcaacaaaaacaaaaccagtatacaaaaaccaatgatgtcaggtagcagccttcgccccagtgttctgcatggattcagcatgtccaacatggtaattcacttcagtttaatgtctcctttgctcttgccaaaaaatagcacacttttccacattccagtgatgtgtgagctatgcaaacaaaatccaagattctgctggtgaataactatgccagcaaccttgtaagctatctgtgcaggatatttgcactatttccacatggaatcaatctttaacaacctctgagcctt

SEQ ID NO: 133157 - DNA, 3060 bp, Artificial Sequence
  derived and/or modified sequence
gaggaggaagaggtggccataccgttgaccgctcctccaactaaccagtaagttaagactgctgttcaggaatttgggaagctggctccagaaaagaagtggaaatgaaggggcatactacctggcgtcttcctacatttattgctcctctgggaaagtgtaaagtctttaagatggaaagcatgagaaaatgtgtatctaatgagaaccggatatagttctgtcccttccaagttgaggtggtatcacggaaaacttgacagaacgatagcagaagaacgcctcaggcaggcagggaagtctggcagttatcttataagagagagtgatcggaggccagggtcctttgtactttcatttcttagccagatgaatgttgtcaaccattttaggattattgctatgtgtggagattactacattggtggaagacgtttttcttcactgtcagacctaataggttattacagtcatgtttcttgtttgcttaaaggagaaaaattactttacccagttgcaccaccagagccagtagaagatagaaggcgtgtacgagctattctaccttacacaaaagtaccagacactgatgaaataagtttcttaaaaggagatatgttcattgttcataatgaattagaagatggatggatgtgggttacaaatttaagaacagatgaacaaggccttattgttgaagacctagtagaagaggtgggccgggaagaagatccacatgaaggaaaaatatggttccatgggaagatttccaaacaggaagcttataatttactaatgacagttggtcaagtctgcagttttcttgtgaggccctcagataatactcctggcgattattcactttatttccggaccaatgaaaatattcagcgatttaaaatatgtccaacgccaaacaatcagtttatgatgggaggccggtattataacagcattggggacatcatagatcactatcgaaaagaacagattgttgaaggatattatcttaaggaacctgtaccaatgcaggatcaagaacaagtactcaatgacacagtggatggcaaggaaatctataataccatccgtcgtaaaacaaaggatgccttttataaaaacattgttaagaaaggttatcttctgaaaaagggcaaaggaaaacgttggaaaaatttatattttatcttagagggtagtgatgcccaacttatttattttgaaagcgaaaaacgagctaccaaaccaaaaggattaatagatctcagtgtatgttctgtctatgtcgttcatgatagtctctttggcaggccaaactgttttcagatagtagttcagcactttagtgaagaacattacatcttttactttgcaggagaaactccagaacaagcagaggattggatgaaaggtctgcaggcattttgcaatttacggaaaagtagtccagggacatccaataaacgccttcgtcaggtcagcagccttgttttacatattgaagaagcccataaactcccagtaaaacattttactaatccatattgtaacatctacctgaatagtgtccaagtagcaaaaactcatgcaagggaagggcaaaacccagtatggtcagaagagtttgtctttgatgatcttcctcctgacatcaatagatttgaaataactcttagtaataaaacaaagaaaagcaaagatcctgatatcttatttatgcgctgccagttgagccgattacagaaagggcatgccacagatgaatggtttctgctcagctcccatataccattaaaaggtattgaaccagggtccctgcgtgttcgagcacgatactctatggaaaaaatcatgccagaagaagagtacagtgaatttaaagagcttatactgcaaaaggaacttcatgtagtctatgctttatcacatgtatgtggacaagaccgaacactactggccagcatcctactgaggatttttcttcacgaaaagcttgaatcgttgttgttatgcacactaaatgacagagaaataagcatggaagatgaagccactaccctatttcgagccacaacacttgcaagcaccttgatggagcagtatatgaaagccactgctacacagtttgttcatcatgctttgaaagactctattttaaagataatggaaagcaagcagtcttgtgagttaagtccatcaaagttagaaaaaaatgaagatgtgaacactaatttaacacacctattgaacatactttcagagcttgtggagaaaatattcatggcttcagaaatacttccaccgacattgagatatatttatgggtgtttacagaaatctgttcagcataagtggcctacaaataccaccatgagaacaagagttgttagtggttttgtttttcttcgactcatctgtcctgccatcctgaatccacggatgttcaatatcatctcagattctccatctcctattgctgcaagaacactgatattagtggctaaatctgtgcagaacttagcaaatcttgtggaatttggagctaaggagccctacatggaaggtgtcaatccattcatcaaaagcaacaaacatcgtatgatcatgtttttagatgaacttgggaatgtacctgaacttccggacactacagagcattctagaacggacctgtcccgtgatttagcagcattgcatgagatttgcgtggctcattcagatgaacttcgaacgctcagtaatgagcgtggtgcacagcagcacgtattgaaaaagcttctggctataacagaactgcttcaacaaaaacaaaaccagtatacaaaaaccaatgatgtcaggtagcagccttcgccccagtgttctgcatggattcagcatgtccaacatggtaattcacttcagtttaatgtctcctttgctcttgccaaaaaatagcacacttttccacattccagtgatgtgtgagctatgcaaacaaaatccaagattctgctggtgaataactatgccagcaaccttgtaagctatctgtgcaggatatttgcactatttccacat

SEQ ID NO: 133158 - protein, 1273 aa, Artificial Sequence
  derived and/or modified sequence
MQKGIRLNDGHVASLGLLARKDGTRKGYLSKRSSDNTKWQTKWFALLQNLLFYFESDSSSRPSGLYLLEGCVCDRAPSPKPALSAKEPLEKQHYFTVNFSHENQKALELRTEDAKDCDEWVAAIAHASYRTLATEHEALMQKYLHLLQIVETEKTVAKQLRQQIEDGEIEIERLKAEITSLLKDNERIQSTQTVAPNDEDSDIKKIKKVQSFLRGWLCRRKWKTIIQDYIRSPHADSMRKRNQVVFSMLEAEAEYVQQLHILVNNFLRPLRMAASSKKPPITHDDVSSIFLNSETIMFLHQIFYQGLKARISSWPTLVLADLFDILLPMLNIYQEFVRNHQYSLQILAHCKQNRDFDKLLKHYEAKPDCEERTLETFLTYPMFQIPRYILTLHELLAHTPHEHVERNSLDYAKSKLEELSRIMHDEVSETENIRKNLAIERMIIEGCEILLDTSQTFVRQGSLIQVPMSEKGKITRGRLGSLSLKKEGERQCFLFSKHLIICTRGSGGKLHLTKNGVISLIDCTLLEEPESTEEEAKGSGQDIDHLDFKIGVEPKDSPPFTVILVASSRQEKAAWTSDISQCVDNIRCNGLMMNAFEENSKVTVPQMIKRTREGTREAEMSRSDASLYCDDVDIRFSKTMNSCKVLQIRYASVERLLERLTDLRFLSIDFLNTFLHSYRVFTTAIVVLDKLITIYKKPISAIPARWLRSLELLFASGQNNKLLYGEPPKSPRATRKFSSPPPLSITKTSSPSRRRKLSLNIPIITGGKALDLAALSCNSNGYTSMYSAMSPFSKATLDTSKLYVSSSFTNKIPDEGDTTPEKPEDPSALSKQSSEVSMREESDIDQNQSDDGDTETSPTKSPTTPKSVKNKNSSEFPLFSYNNGVVMTSCRELDNNRSALSAASAFAIATAGANEGTPNKEKYRRMSLASAGFPPDQRNGDKEFVIRRAATNRVLNVLRHWVSKHSQDFETNDELKCKVIGFLEEVMHDPELLTQERKAAANIIRTLTQEDPGDNQITLEEITQMAEGVKAEPFENHSALEIAEQLTLLDHLVFKKIPYEEFFGQGWMKLEKNERTPYIMKTTKHFNDISNLIASEIIRNEDINARVSAIEKWVAVADICRCLHNYNAVLEITSSMNRSAIFRLKKTWLKVSKQTKALIDKLQKLVSSEGRFKNLREALKNCDPPCVPYLGMYLTDLAFIEEGTPNYTEDGLVNFSKMRMISHIIREIRQFQQTAYKIEHQAKVTQYLLDQSFVMDEESLYESSLRIEPKLPT

SEQ ID NO: 133159 - protein, 1260 aa, Artificial Sequence
  derived and/or modified sequence
MQKGIRLNDGHVASLGLLARKDGTRKGYLSKRSSDNTKWQTKWFALLQNLLFYFESDSSSRPSGLYLLEGCVCDRAPSPKPALSAKEPLEKQHYFTVNFSHENQKALELRTEDAKDCDEWVAAIAHASYRTLATEHEALMQKYLHLLQIVETEKTVAKQLRQQIEDGEIEIERLKAEITSLLKDNERIQSTQTVAPNDEDSDIKKIKKVQSFLRGWLCRRKWKTIIQDYIRSPHADSMRKRNQVVFSMLEAEAEYVQQLHILVNNFLRPLRMAASSKKPPITHDDVSSIFLNSETIMFLHQIFYQGLKARISSWPTLVLADLFDILLPMLNIYQEFVRNHQYSLQILAHCKQNRDFDKLLKHYEAKPDCEERTLETFLTYPMFQIPRYILTLHELLAHTPHEHVERNSLDYAKSKLEELSRIMHDEVSETENIRKNLAIERMIIEGCEILLDTSQTFVRQGSLIQVPMSEKGKITRGRLGSLSLKKEGERQCFLFSKHLIICTRGSGGKLHLTKNGVISLIDCTLLEEPESTEEEAKGSGQDIDHLDFKIGVEPKDSPPFTVILVASSRQEKAAWTSDISQCVDNIRCNGLMMNAFEENSKVTVPQMIKSDASLYCDDVDIRFSKTMNSCKVLQIRYASVERLLERLTDLRFLSIDFLNTFLHSYRVFTTAIVVLDKLITIYKKPISAIPARWLRSLELLFASGQNNKLLYGEPPKSPRATRKFSSPPPLSITKTSSPSRRRKLSLNIPIITGGKALDLAALSCNSNGYTSMYSAMSPFSKATLDTSKLYVSSSFTNKIPDEGDTTPEKPEDPSALSKQSSEVSMREESDIDQNQSDDGDTETSPTKSPTTPKSVKNKNSSEFPLFSYNNGVVMTSCRELDNNRSALSAASAFAIATAGANEGTPNKEKYRRMSLASAGFPPDQRNGDKEFVIRRAATNRVLNVLRHWVSKHSQDFETNDELKCKVIGFLEEVMHDPELLTQERKAAANIIRTLTQEDPGDNQITLEEITQMAEGVKAEPFENHSALEIAEQLTLLDHLVFKKIPYEEFFGQGWMKLEKNERTPYIMKTTKHFNDISNLIASEIIRNEDINARVSAIEKWVAVADICRCLHNYNAVLEITSSMNRSAIFRLKKTWLKVSKQTKALIDKLQKLVSSEGRFKNLREALKNCDPPCVPYLGMYLTDLAFIEEGTPNYTEDGLVNFSKMRMISHIIREIRQFQQTAYKIEHQAKVTQYLLDQSFVMDEESLYESSLRIEPKLPT

SEQ ID NO: 133160 - DNA, 3822 bp, Artificial Sequence
  derived and/or modified sequence
atgcagaagggcatcagactgaacgacggccacgtggccagcctgggcctgctggccagaaaggacggcaccagaaagggctacctgagcaagagaagcagcgacaacaccaagtggcagaccaagtggttcgccctgctgcagaacctgctgttctacttcgagagcgacagcagcagcagacccagcggcctgtacctgctggagggctgcgtgtgcgacagagcccccagccccaagcccgccctgagcgccaaggagcccctggagaagcagcactacttcaccgtgaacttcagccacgagaaccagaaggccctggagctgagaaccgaggacgccaaggactgcgacgagtgggtggccgccatcgcccacgccagctacagaaccctggccaccgagcacgaggccctgatgcagaagtacctgcacctgctgcagatcgtggagaccgagaagaccgtggccaagcagctgagacagcagatcgaggacggcgagatcgagatcgagagactgaaggccgagatcaccagcctgctgaaggacaacgagagaatccagagcacccagaccgtggcccccaacgacgaggacagcgacatcaagaagatcaagaaggtgcagagcttcctgagaggctggctgtgcagaagaaagtggaagaccatcatccaggactacatcagaagcccccacgccgacagcatgagaaagagaaaccaggtggtgttcagcatgctggaggccgaggccgagtacgtgcagcagctgcacatcctggtgaacaacttcctgagacccctgagaatggccgccagcagcaagaagccccccatcacccacgacgacgtgagcagcatcttcctgaacagcgagaccatcatgttcctgcaccagatcttctaccagggcctgaaggccagaatcagcagctggcccaccctggtgctggccgacctgttcgacatcctgctgcccatgctgaacatctaccaggagttcgtgagaaaccaccagtacagcctgcagatcctggcccactgcaagcagaacagagacttcgacaagctgctgaagcactacgaggccaagcccgactgcgaggagagaaccctggagaccttcctgacctaccccatgttccagatccccagatacatcctgaccctgcacgagctgctggcccacaccccccacgagcacgtggagagaaacagcctggactacgccaagagcaagctggaggagctgagcagaatcatgcacgacgaggtgagcgagaccgagaacatcagaaagaacctggccatcgagagaatgatcatcgagggctgcgagatcctgctggacaccagccagaccttcgtgagacagggcagcctgatccaggtgcccatgagcgagaagggcaagatcaccagaggcagactgggcagcctgagcctgaagaaggagggcgagagacagtgcttcctgttcagcaagcacctgatcatctgcaccagaggcagcggcggcaagctgcacctgaccaagaacggcgtgatcagcctgatcgactgcaccctgctggaggagcccgagagcaccgaggaggaggccaagggcagcggccaggacatcgaccacctggacttcaagatcggcgtggagcccaaggacagcccccccttcaccgtgatcctggtggccagcagcagacaggagaaggccgcctggaccagcgacatcagccagtgcgtggacaacatcagatgcaacggcctgatgatgaacgccttcgaggagaacagcaaggtgaccgtgccccagatgatcaagagaaccagagagggcaccagagaggccgagatgagcagaagcgacgccagcctgtactgcgacgacgtggacatcagattcagcaagaccatgaacagctgcaaggtgctgcagatcagatacgccagcgtggagagactgctggagagactgaccgacctgagattcctgagcatcgacttcctgaacaccttcctgcacagctacagagtgttcaccaccgccatcgtggtgctggacaagctgatcaccatctacaagaagcccatcagcgccatccccgccagatggctgagaagcctggagctgctgttcgccagcggccagaacaacaagctgctgtacggcgagccccccaagagccccagagccaccagaaagttcagcagccccccccccctgagcatcaccaagaccagcagccccagcagaagaagaaagctgagcctgaacatccccatcatcaccggcggcaaggccctggacctggccgccctgagctgcaacagcaacggctacaccagcatgtacagcgccatgagccccttcagcaaggccaccctggacaccagcaagctgtacgtgagcagcagcttcaccaacaagatccccgacgagggcgacaccacccccgagaagcccgaggaccccagcgccctgagcaagcagagcagcgaggtgagcatgagagaggagagcgacatcgaccagaaccagagcgacgacggcgacaccgagaccagccccaccaagagccccaccacccccaagagcgtgaagaacaagaacagcagcgagttccccctgttcagctacaacaacggcgtggtgatgaccagctgcagagagctggacaacaacagaagcgccctgagcgccgccagcgccttcgccatcgccaccgccggcgccaacgagggcacccccaacaaggagaagtacagaagaatgagcctggccagcgccggcttcccccccgaccagagaaacggcgacaaggagttcgtgatcagaagagccgccaccaacagagtgctgaacgtgctgagacactgggtgagcaagcacagccaggacttcgagaccaacgacgagctgaagtgcaaggtgatcggcttcctggaggaggtgatgcacgaccccgagctgctgacccaggagagaaaggccgccgccaacatcatcagaaccctgacccaggaggaccccggcgacaaccagatcaccctggaggagatcacccagatggccgagggcgtgaaggccgagcccttcgagaaccacagcgccctggagatcgccgagcagctgaccctgctggaccacctggtgttcaagaagatcccctacgaggagttcttcggccagggctggatgaagctggagaagaacgagagaaccccctacatcatgaagaccaccaagcacttcaacgacatcagcaacctgatcgccagcgagatcatcagaaacgaggacatcaacgccagagtgagcgccatcgagaagtgggtggccgtggccgacatctgcagatgcctgcacaactacaacgccgtgctggagatcaccagcagcatgaacagaagcgccatcttcagactgaagaagacctggctgaaggtgagcaagcagaccaaggccctgatcgacaagctgcagaagctggtgagcagcgagggcagattcaagaacctgagagaggccctgaagaactgcgaccccccctgcgtgccctacctgggcatgtacctgaccgacctggccttcatcgaggagggcacccccaactacaccgaggacggcctggtgaacttcagcaagatgagaatgatcagccacatcatcagagagatcagacagttccagcagaccgcctacaagatcgagcaccaggccaaggtgacccagtacctgctggaccagagcttcgtgatggacgaggagagcctgtacgagagcagcctgagaatcgagcccaagctgcccacctag

SEQ ID NO: 133161 - DNA, 3783 bp, Artificial Sequence
  derived and/or modified sequence
atgcagaagggcatcagactgaacgacggccacgtggccagcctgggcctgctggccagaaaggacggcaccagaaagggctacctgagcaagagaagcagcgacaacaccaagtggcagaccaagtggttcgccctgctgcagaacctgctgttctacttcgagagcgacagcagcagcagacccagcggcctgtacctgctggagggctgcgtgtgcgacagagcccccagccccaagcccgccctgagcgccaaggagcccctggagaagcagcactacttcaccgtgaacttcagccacgagaaccagaaggccctggagctgagaaccgaggacgccaaggactgcgacgagtgggtggccgccatcgcccacgccagctacagaaccctggccaccgagcacgaggccctgatgcagaagtacctgcacctgctgcagatcgtggagaccgagaagaccgtggccaagcagctgagacagcagatcgaggacggcgagatcgagatcgagagactgaaggccgagatcaccagcctgctgaaggacaacgagagaatccagagcacccagaccgtggcccccaacgacgaggacagcgacatcaagaagatcaagaaggtgcagagcttcctgagaggctggctgtgcagaagaaagtggaagaccatcatccaggactacatcagaagcccccacgccgacagcatgagaaagagaaaccaggtggtgttcagcatgctggaggccgaggccgagtacgtgcagcagctgcacatcctggtgaacaacttcctgagacccctgagaatggccgccagcagcaagaagccccccatcacccacgacgacgtgagcagcatcttcctgaacagcgagaccatcatgttcctgcaccagatcttctaccagggcctgaaggccagaatcagcagctggcccaccctggtgctggccgacctgttcgacatcctgctgcccatgctgaacatctaccaggagttcgtgagaaaccaccagtacagcctgcagatcctggcccactgcaagcagaacagagacttcgacaagctgctgaagcactacgaggccaagcccgactgcgaggagagaaccctggagaccttcctgacctaccccatgttccagatccccagatacatcctgaccctgcacgagctgctggcccacaccccccacgagcacgtggagagaaacagcctggactacgccaagagcaagctggaggagctgagcagaatcatgcacgacgaggtgagcgagaccgagaacatcagaaagaacctggccatcgagagaatgatcatcgagggctgcgagatcctgctggacaccagccagaccttcgtgagacagggcagcctgatccaggtgcccatgagcgagaagggcaagatcaccagaggcagactgggcagcctgagcctgaagaaggagggcgagagacagtgcttcctgttcagcaagcacctgatcatctgcaccagaggcagcggcggcaagctgcacctgaccaagaacggcgtgatcagcctgatcgactgcaccctgctggaggagcccgagagcaccgaggaggaggccaagggcagcggccaggacatcgaccacctggacttcaagatcggcgtggagcccaaggacagcccccccttcaccgtgatcctggtggccagcagcagacaggagaaggccgcctggaccagcgacatcagccagtgcgtggacaacatcagatgcaacggcctgatgatgaacgccttcgaggagaacagcaaggtgaccgtgccccagatgatcaagagcgacgccagcctgtactgcgacgacgtggacatcagattcagcaagaccatgaacagctgcaaggtgctgcagatcagatacgccagcgtggagagactgctggagagactgaccgacctgagattcctgagcatcgacttcctgaacaccttcctgcacagctacagagtgttcaccaccgccatcgtggtgctggacaagctgatcaccatctacaagaagcccatcagcgccatccccgccagatggctgagaagcctggagctgctgttcgccagcggccagaacaacaagctgctgtacggcgagccccccaagagccccagagccaccagaaagttcagcagccccccccccctgagcatcaccaagaccagcagccccagcagaagaagaaagctgagcctgaacatccccatcatcaccggcggcaaggccctggacctggccgccctgagctgcaacagcaacggctacaccagcatgtacagcgccatgagccccttcagcaaggccaccctggacaccagcaagctgtacgtgagcagcagcttcaccaacaagatccccgacgagggcgacaccacccccgagaagcccgaggaccccagcgccctgagcaagcagagcagcgaggtgagcatgagagaggagagcgacatcgaccagaaccagagcgacgacggcgacaccgagaccagccccaccaagagccccaccacccccaagagcgtgaagaacaagaacagcagcgagttccccctgttcagctacaacaacggcgtggtgatgaccagctgcagagagctggacaacaacagaagcgccctgagcgccgccagcgccttcgccatcgccaccgccggcgccaacgagggcacccccaacaaggagaagtacagaagaatgagcctggccagcgccggcttcccccccgaccagagaaacggcgacaaggagttcgtgatcagaagagccgccaccaacagagtgctgaacgtgctgagacactgggtgagcaagcacagccaggacttcgagaccaacgacgagctgaagtgcaaggtgatcggcttcctggaggaggtgatgcacgaccccgagctgctgacccaggagagaaaggccgccgccaacatcatcagaaccctgacccaggaggaccccggcgacaaccagatcaccctggaggagatcacccagatggccgagggcgtgaaggccgagcccttcgagaaccacagcgccctggagatcgccgagcagctgaccctgctggaccacctggtgttcaagaagatcccctacgaggagttcttcggccagggctggatgaagctggagaagaacgagagaaccccctacatcatgaagaccaccaagcacttcaacgacatcagcaacctgatcgccagcgagatcatcagaaacgaggacatcaacgccagagtgagcgccatcgagaagtgggtggccgtggccgacatctgcagatgcctgcacaactacaacgccgtgctggagatcaccagcagcatgaacagaagcgccatcttcagactgaagaagacctggctgaaggtgagcaagcagaccaaggccctgatcgacaagctgcagaagctggtgagcagcgagggcagattcaagaacctgagagaggccctgaagaactgcgaccccccctgcgtgccctacctgggcatgtacctgaccgacctggccttcatcgaggagggcacccccaactacaccgaggacggcctggtgaacttcagcaagatgagaatgatcagccacatcatcagagagatcagacagttccagcagaccgcctacaagatcgagcaccaggccaaggtgacccagtacctgctggaccagagcttcgtgatggacgaggagagcctgtacgagagcagcctgagaatcgagcccaagctgcccacctag

SEQ ID NO: 133162 - DNA, 3822 bp, Artificial Sequence
  derived and/or modified sequence
atgcagaaaggcatcagactgaacgatggtcatgtggcttctttaggcctgctcgcccgcaaagacggaacccgtaaaggatatctcagcaagcggtcctctgataacacaaaatggcagacaaaatggtttgccttgctccaaaatctgctgttttatttcgagagcgatagttcctctaggccaagcggactatatctgcttgagggctgcgtgtgcgatcgggccccctctccgaaaccagctctcagcgccaaggaacccctcgagaaacagcactacttcacagtgaactttagccacgagaaccaaaaagcactggagctgcgaacggaagacgcgaaggactgtgatgaatgggtagcggcaatagcccacgcttcctacagaacgcttgcaaccgaacatgaggccctgatgcagaagtatctgcatttgctgcagattgttgaaactgaaaagactgtagctaagcagctgcggcagcaaatcgaggacggggagatagagatcgaacgcctgaaagccgaaattacatctctgcttaaagataatgaacgcatccagagcacccagactgtggctcctaatgacgaggattcagatataaagaagattaaaaaagtgcagtcttttctccggggatggctctgtaggaggaagtggaaaaccatcatccaggattacattcgttccccccatgccgacagcatgcgaaaacgaaatcaggtcgtcttctcaatgctggaagccgaagccgagtatgtccaacagctgcacattcttgtgaataattttctacgcccactccggatggcagcgagcagcaagaaaccacccataacccacgacgatgtatcgtccatctttcttaattccgagacaattatgtttctccaccagatattttaccaaggcctgaaggctagaatctcctcctggcctacactggttttggctgatctgtttgatatcttgttgcctatgctgaatatctaccaggagtttgtgagaaatcatcaatacagcctccagatcctggctcactgcaaacagaacagagattttgacaaactgctaaagcattacgaggccaagcccgactgcgaagagcggacgctcgaaactttcctgacatacccaatgtttcagatccctagatatatcctgaccctacacgagctcctggctcataccccccatgaacatgtcgagcgaaattcattggactacgccaagtctaagctcgaagagctatccaggattatgcacgacgaggtgtctgagaccgaaaacatccggaaaaacttggcaattgaaaggatgatcatcgaggggtgtgagatattgctcgacacctcccagaccttcgtgcgtcagggatctctcatccaggtaccaatgtctgaaaaaggcaagataacgagggggaggctggggtcactgtcgctgaagaaggagggggagaggcagtgctttctgtttagcaaacatttaatcatctgcaccagaggcagtggaggcaagcttcatttaactaagaacggagtcatctccctgattgactgtacactgctggaagaacccgaatccaccgaggaggaagcgaaggggtcaggtcaggacatcgaccacctcgacttcaagataggagtggagccaaaagacagccccccatttacagtgatcttagtcgcctcttcccgccaggagaaagccgcgtggacttctgatatttcccagtgcgtggataatatccgctgcaatggccttatgatgaacgctttcgaggaaaactcaaaggtgaccgttcctcagatgattaagcggacccgagagggcaccagagaagcggagatgtccaggagtgacgcctcactgtactgcgacgatgttgacatcagattttcaaagacgatgaattcatgcaaagttctccagataagatacgcgagcgtcgagcgccttcttgagaggctgactgatctcagattcctttcaattgacttcctcaacaccttcctgcacagttacagagtttttactacagcaatagtggtacttgacaaactcatcaccatctataaaaagcccatctctgctatccctgctcgttggctgaggagtcttgaactgctgtttgcttcagggcagaacaataaactgttgtatggtgagccacctaaatctcccagggctactcgaaagttctcaagtccccctccactatccatcacaaagacctcttcaccatccaggcgcaggaagcttagcctaaatataccaataataactggcggtaaggccttggaccttgctgcgctcagttgcaattccaacggctatacctcgatgtactcagcgatgagcccttttagcaaggctaccctggacacttcaaaattatatgtctccagcagcttcaccaacaagatccccgacgagggggatacaacccctgagaaaccagaagatcccagcgcactgtcaaagcagtcaagcgaagtctccatgcgcgaggagtctgatatcgatcaaaatcaatctgacgacggcgatactgagacttcacctactaagtccccaaccacccccaagtccgtgaagaataagaattcctcagaattccccctgttctcatacaataacggggtagtcatgacatcatgtcgtgagctagacaacaaccgaagcgcattaagtgccgctagtgcgttcgctatagcaactgctggcgcaaacgaggggactccaaataaggagaagtaccgtcgaatgtcactggcgtcggctggctttccacctgatcagcgaaacggggataaggaatttgtcatcaggagagccgccactaatcgcgtcctgaacgttctacggcattgggtgagtaagcacagtcaagactttgaaactaacgacgagttgaagtgtaaagtcatcgggttcttagaggaggtgatgcacgatcccgagttgctcacacaagagcgaaaggccgcagctaacattattagaactctcacccaggaggaccctggagacaatcagatcactttagaagagatcacgcagatggcggagggagtcaaggccgagccttttgagaatcattccgccctggaaatcgctgaacagcttacattgctggaccacttggtgttcaagaaaatcccatatgaggagttctttgggcagggctggatgaaacttgagaaaaatgagaggacgccctatatcatgaagactacgaagcatttcaacgatatctctaatctgatcgccagtgagattatcagaaacgaagatattaatgcgcgggtgtctgcaatcgagaaatgggtggcagtcgccgatatttgtcgatgccttcataattacaatgcagtgcttgagattacaagtagtatgaaccgatctgcaatctttaggctcaagaaaacttggttgaaagtatcgaaacaaaccaaggcactgattgataagctgcagaaactcgtctcctctgaaggtcgatttaaaaatctgagggaagccctcaagaattgcgacccgccttgcgtgccatacctgggtatgtacctgacagacctggccttcattgaggaggggaccccaaactacaccgaagacggccttgtgaacttctccaagatgcgtatgataagtcatatcattcgggagattagacaattccagcagactgcctacaaaattgagcaccaagctaaagtgacacaatacctgcttgaccaatcgtttgttatggacgaggagtccctatatgagagctccttgaggattgaacccaagctgcctacttag

SEQ ID NO: 133163 - DNA, 3783 bp, Artificial Sequence
  derived and/or modified sequence
atgcagaagggcattcgtcttaacgacgggcacgtcgccagtctggggcttctggcccgtaaagatgggacaaggaaaggctatctgtctaaaagatcatcggataatacaaaatggcaaacaaaatggtttgcactgctacagaacttactattttattttgaatccgacagctctagcagaccgtctgggctgtacctgctagagggctgcgtttgcgacagagcaccttcaccgaaacccgctcttagcgcgaaggaaccgcttgaaaaacagcactatttcactgtcaatttctcgcatgagaatcagaaagccttagaattacgcacagaagatgccaaagactgcgatgagtgggtggcggcaatcgcccacgcatcttatcggactctcgcaactgaacacgaggcccttatgcagaagtacctgcaccttctgcaaatcgtggagacggagaagaccgtagcaaaacagctccggcagcaaatcgaagacggggaaatcgagattgagcgactgaaggccgagatcacaagccttctgaaagataatgaaagaattcagtctacccagacggtggcccctaatgacgaggactccgacattaagaaaattaaaaaagttcagtcttttcttcgtggatggttgtgcagacgcaagtggaaaaccattattcaggattacataaggagtcctcacgcagactccatgcggaagagaaaccaagtggtcttctcgatgttagaggcagaagccgagtacgtgcagcagctgcatattttagtgaacaactttctcagaccgctgcggatggccgcttcaagcaaaaaacccccaatcacccacgacgatgtatcgagcattttcctgaactccgaaacaattatgttcctgcatcagattttctatcagggacttaaggctagaataagcagttggcccacgctggtgttggccgacctcttcgacatcctgctgcctatgcttaacatttatcaggaattcgtccgcaaccaccagtactccttgcagattctcgctcactgtaaacagaatagggatttcgataagctcctgaaacattatgaagccaagccagactgcgaggaacggacgcttgagaccttcttgacttatcctatgttccagataccgaggtacatcttgaccctgcatgagctcctcgctcacacgcctcacgaacacgttgagcggaattctctcgactatgctaaaagtaagttggaggagctctctcgcattatgcacgacgaagtctctgagacggagaacattagaaagaacctggccatcgagcgcatgattatagagggatgcgaaattctccttgacaccagtcagacctttgtccgccaggggagcctgatccaggtccccatgagcgaaaaagggaagataacccgaggccggctaggctctctaagtctcaagaaggagggggaaaggcagtgttttctgttttctaaacaccttattatctgtacaagaggctccggaggtaaactccatcttacaaagaacggagtgatctctttgatagattgtacgctgcttgaggagcctgaaagcaccgaagaggaagcaaagggaagcggccaggatatcgaccacctggatttcaagatcggagtggagcccaaggacagtccaccattcacagtcatcctcgtggcttccagccgacaggaaaaagcggcatggacttccgacatcagccagtgtgtggacaatattagatgtaatggccttatgatgaacgccttcgaagaaaatagcaaagtaactgtaccacaaatgattaagtctgatgcgagtttatactgcgatgatgtcgatattaggttttccaagacaatgaatagttgtaaggtgctacagatccggtacgcatccgtggaacggctgcttgagagattgactgacctgcggttcctgagcatcgacttcttgaacacttttttacattcctacagagtgttcaccactgccattgtagtgctggacaaactaatcactatttacaagaaacccatttctgcgattcctgccagatggcttcggagtctggaactcctgtttgcctccgggcagaacaataagctactctacggcgagcccccaaaaagtcctagagccacccgtaaattctcctctccgcccccgctttctatcactaagacctcaagcccgtcgcggaggcgtaaactctcactcaatattcccatcatcaccgggggcaaagcactcgacctggccgccctatcatgcaacagcaatggctatacctctatgtattccgccatgagcccgttctccaaagcaaccttggatacatccaaactgtacgtgtcttcctctttcactaacaagattccagatgagggggacaccacaccagagaagcccgaagatccatccgcattgtctaagcagagctccgaggtcagtatgagggaggagagcgacattgaccagaaccagtcggatgatggtgatactgaaactagcccaaccaagagccctaccactcctaaatctgtaaaaaacaagaactcatcagagtttcccctgttttcctacaataatggggtagtgatgacctcttgcagagaattggacaataaccgttccgctctgagcgccgctagtgcatttgctatcgccaccgctggagctaacgagggaactcctaataaggagaagtaccgaaggatgtcacttgcttccgctgggttccctccagatcagaggaatggcgacaaggaatttgtgatacgcagggccgcaacaaaccgcgttctgaacgttttgcgacattgggtgtcaaagcacagtcaggactttgaaaccaacgacgagctcaagtgcaaggtaattggatttcttgaagaggtgatgcacgaccccgagcttctgacacaagagcgcaaggctgccgctaatatcattcgaaccttaacccaggaggatcccggcgataaccagattaccctggaggagattactcagatggccgagggcgtcaaagccgagccatttgagaatcattctgctcttgaaattgccgagcagctgaccctgctggatcacctggtcttcaagaagatcccttacgaagaatttttcggtcagggttggatgaaactagaaaagaatgagcgcacaccttatattatgaaaacaacaaaacacttcaatgatatttccaatttaattgcatccgagatcattcggaacgaagacattaatgcgagggtgtcggcgattgaaaagtgggtggccgtggcggatatctgcagatgtctgcacaattacaacgctgtgcttgagattacctcgtccatgaacaggtccgctattttccggttgaaaaaaacctggctgaaagtgtccaagcagacgaaagccttgattgataagctgcagaaattggtgtcctccgaaggtcgctttaagaacctgcgcgaagccctgaagaactgcgatcctccttgtgtcccttatctaggcatgtatttgaccgacctggccttcatcgaggaagggacaccaaattacacggaggacggactcgtcaacttctctaaaatgcggatgatctcccatataatcagagagattcgccaatttcagcaaacagcttataagatcgagcatcaagccaaggtcacacagtacctacttgaccagtcttttgtgatggatgaggaatcgctatatgagagttctttgagaatagaacctaagctccccacttag

SEQ ID NO: 133164 - DNA, 3822 bp, Artificial Sequence
  derived and/or modified sequence
atgcagaagggcatccggctgaatgatggccacgtggccagcctgggcctgctggccaggaaggatggcaccaggaagggctacctgagcaagaggagcagtgacaacaccaagtggcagaccaagtggtttgccctgctgcagaacctgctcttctactttgaaagtgacagcagcagccggcccagcggcctgtacctgctggagggctgtgtgtgtgaccgggcccccagccccaagccagccctgagcgccaaggagcccctggagaagcagcactacttcaccgtgaacttcagccatgagaaccagaaggccctggagctgaggacagaagatgccaaggactgtgatgagtgggtggccgccatcgcccacgccagctaccgcaccctggccacagagcacgaggccctgatgcagaagtacctgcacctgctgcagatcgtggagacagagaagacagtggccaagcagctgcggcagcagattgaagatggagaaattgaaattgagcggctgaaggccgagatcaccagcctgctgaaggacaatgaaagaatccagagcacccagacagtggccccaaatgatgaagattctgacatcaagaagatcaagaaggtgcagagcttcctgcggggctggctgtgcaggaggaagtggaagaccatcatccaggactacatccgcagcccccatgctgacagcatgaggaagaggaaccaggtggtgttctccatgctggaggccgaggccgagtatgtgcagcagctgcacatcctggtgaacaacttcctgcggcccctgaggatggccgccagcagcaagaagccacccatcacccatgatgatgtgagcagcatcttcctgaacagcgagaccatcatgttcctgcaccagatcttctaccagggcctgaaggcccgcatcagctcctggcccaccctggtgctggccgacctgtttgacatcctgctgcccatgctgaacatctaccaggagtttgtgaggaaccaccagtacagcctgcagatcctggcccactgcaagcagaacagagactttgacaagctgctgaagcactatgaggccaagccagactgtgaggagaggaccctggagaccttcctgacctaccccatgttccagatcccccgctacatcctgaccctgcacgagctgctggcccacacccctcatgaacatgtggagaggaacagcctggactatgccaagagcaagctggaggagctgagccgcatcatgcatgatgaggtgtctgaaacagagaacatcaggaagaacctggccattgaaagaatgatcatcgagggctgtgagatcctgctggacaccagccagacctttgtgcggcagggcagcctcatccaggtgcccatgtctgagaagggcaagatcacccggggccgcctgggcagcctgagcctgaagaaggagggggagcggcagtgcttcctgttcagcaagcacctgatcatctgcacccggggcagcggcggcaagctgcacctgaccaagaatggagtcatcagcctgattgactgcaccctgctggaggagcctgagagcacagaggaggaggccaagggcagcggccaggacatcgaccacctggacttcaagattggagtggagcccaaggacagcccccccttcaccgtcatcctggtggccagcagccggcaggagaaggccgcctggaccagtgacatcagccagtgtgtggacaacatccgctgcaatggcctgatgatgaatgcctttgaggagaacagcaaggtgacagtgccccagatgatcaagaggacccgggagggcacccgggaggccgagatgagcagaagtgatgccagcctgtactgtgatgatgtggacatccgcttcagcaagaccatgaacagctgcaaggtgctgcagatccgctatgcctctgtggagcggctgctggagcggctgacagacctgcgcttcctgagcattgacttcctgaacaccttcctgcacagctacagagtcttcaccacagccatcgtggtgctggacaagctgatcaccatctacaagaagcccatcagcgccatcccagcccgctggctgcggagcctggagctgctgtttgccagcggccagaacaacaagctgctgtatggagagccccccaagagcccccgggccaccaggaagttcagcagccccccacccctgagcatcaccaagaccagcagccccagcagaagaaggaagctgagcctgaacatccccatcatcactggaggcaaggccctggacctggccgccctgagctgcaacagcaatggctacacctccatgtacagcgccatgagccccttcagcaaggccaccctggacaccagcaagctgtatgtgagcagcagcttcaccaacaagatcccagatgaaggagacaccaccccagagaagccagaggaccccagcgccctgagcaagcagagcagcgaggtgtccatgagggaggagagtgacatcgaccagaaccagagtgatgatggagacacagagaccagccccaccaagagccccaccacccccaagtctgtgaagaacaagaacagcagcgagttccccctcttctcctacaacaatggagtggtgatgaccagctgccgggagctggacaacaacagaagtgccctgtctgctgccagcgcctttgccatcgccacagctggggccaatgaaggcacccccaacaaggagaagtacagaaggatgagcctggccagcgctggcttccccccagaccagagaaatggagacaaggagtttgtgatcagaagagctgccaccaacagagtgctgaatgtgctgcggcactgggtgtccaagcacagccaggactttgagaccaatgatgagctgaagtgcaaggtgattggcttcctggaggaggtgatgcatgaccctgagctgctgacccaggagaggaaggccgccgccaacatcatccgcaccctgacccaggaggaccccggggacaaccagatcaccctggaggagatcacccagatggccgagggcgtgaaggccgagccctttgagaaccacagcgccctggagattgctgagcagctgaccctgctggaccacctggtgttcaagaagatcccctatgaggagttcttcggccagggctggatgaagctggagaagaatgaaagaacaccctacatcatgaagaccaccaagcacttcaatgacatcagcaacctgattgccagcgagatcatcagaaatgaagacatcaatgcccgggtgtctgccatcgagaagtgggtggccgtggccgacatctgccgctgcctgcacaactacaatgctgtgctggagatcaccagctccatgaacagaagtgccatcttccggctgaagaagacctggctgaaggtgtccaagcagaccaaggccctgattgacaagctgcagaagctggtgagcagcgagggccgcttcaagaacctgcgggaggccctgaagaactgtgaccccccctgtgtgccctacctgggcatgtacctgacagacctggccttcatcgaggagggcacccccaactacacagaagatggcctggtgaacttcagcaagatgaggatgatcagccacatcatccgggagatccggcagttccagcagacagcctacaagattgagcaccaggccaaggtgacccagtacctgctggaccagagctttgtgatggatgaggagagcctgtatgagagcagcctgagaattgagcccaagctgcccacctag

SEQ ID NO: 133165 - DNA, 3783 bp, Artificial Sequence
  derived and/or modified sequence
atgcagaagggcatccggctgaatgatggccacgtggccagcctgggcctgctggccaggaaggatggcaccaggaagggctacctgagcaagaggagcagtgacaacaccaagtggcagaccaagtggtttgccctgctgcagaacctgctcttctactttgaaagtgacagcagcagccggcccagcggcctgtacctgctggagggctgtgtgtgtgaccgggcccccagccccaagccagccctgagcgccaaggagcccctggagaagcagcactacttcaccgtgaacttcagccatgagaaccagaaggccctggagctgaggacagaagatgccaaggactgtgatgagtgggtggccgccatcgcccacgccagctaccgcaccctggccacagagcacgaggccctgatgcagaagtacctgcacctgctgcagatcgtggagacagagaagacagtggccaagcagctgcggcagcagattgaagatggagaaattgaaattgagcggctgaaggccgagatcaccagcctgctgaaggacaatgaaagaatccagagcacccagacagtggccccaaatgatgaagattctgacatcaagaagatcaagaaggtgcagagcttcctgcggggctggctgtgcaggaggaagtggaagaccatcatccaggactacatccgcagcccccatgctgacagcatgaggaagaggaaccaggtggtgttctccatgctggaggccgaggccgagtatgtgcagcagctgcacatcctggtgaacaacttcctgcggcccctgaggatggccgccagcagcaagaagccacccatcacccatgatgatgtgagcagcatcttcctgaacagcgagaccatcatgttcctgcaccagatcttctaccagggcctgaaggcccgcatcagctcctggcccaccctggtgctggccgacctgtttgacatcctgctgcccatgctgaacatctaccaggagtttgtgaggaaccaccagtacagcctgcagatcctggcccactgcaagcagaacagagactttgacaagctgctgaagcactatgaggccaagccagactgtgaggagaggaccctggagaccttcctgacctaccccatgttccagatcccccgctacatcctgaccctgcacgagctgctggcccacacccctcatgaacatgtggagaggaacagcctggactatgccaagagcaagctggaggagctgagccgcatcatgcatgatgaggtgtctgaaacagagaacatcaggaagaacctggccattgaaagaatgatcatcgagggctgtgagatcctgctggacaccagccagacctttgtgcggcagggcagcctcatccaggtgcccatgtctgagaagggcaagatcacccggggccgcctgggcagcctgagcctgaagaaggagggggagcggcagtgcttcctgttcagcaagcacctgatcatctgcacccggggcagcggcggcaagctgcacctgaccaagaatggagtcatcagcctgattgactgcaccctgctggaggagcctgagagcacagaggaggaggccaagggcagcggccaggacatcgaccacctggacttcaagattggagtggagcccaaggacagcccccccttcaccgtcatcctggtggccagcagccggcaggagaaggccgcctggaccagtgacatcagccagtgtgtggacaacatccgctgcaatggcctgatgatgaatgcctttgaggagaacagcaaggtgacagtgccccagatgatcaagagtgatgccagcctgtactgtgatgatgtggacatccgcttcagcaagaccatgaacagctgcaaggtgctgcagatccgctatgcctctgtggagcggctgctggagcggctgacagacctgcgcttcctgagcattgacttcctgaacaccttcctgcacagctacagagtcttcaccacagccatcgtggtgctggacaagctgatcaccatctacaagaagcccatcagcgccatcccagcccgctggctgcggagcctggagctgctgtttgccagcggccagaacaacaagctgctgtatggagagccccccaagagcccccgggccaccaggaagttcagcagccccccacccctgagcatcaccaagaccagcagccccagcagaagaaggaagctgagcctgaacatccccatcatcaccggcggcaaggccctggacctggccgccctgagctgcaacagcaatggctacacctccatgtacagcgccatgagccccttcagcaaggccaccctggacaccagcaagctgtatgtgagcagcagcttcaccaacaagatcccagatgaaggagacaccaccccagagaagccagaggaccccagcgccctgagcaagcagagcagcgaggtgtccatgagggaggagagtgacatcgaccagaaccagagtgatgatggagacacagagaccagccccaccaagagccccaccacccccaagtctgtgaagaacaagaacagcagcgagttccccctcttctcctacaacaacggggtggtgatgaccagctgccgggagctggacaacaacagaagtgccctgtctgctgccagcgcctttgccatcgccacagctggggccaatgaaggcacccccaacaaggagaagtacagaaggatgagcctggccagcgctggcttccccccagaccagagaaatggagacaaggagtttgtgatccggcgggccgccaccaacagagtgctgaatgtgctgcggcactgggtgtccaagcacagccaggactttgagaccaatgatgagctgaagtgcaaggtgattggcttcctggaggaggtgatgcatgaccctgagctgctgacccaggagaggaaggctgctgccaacatcatccgcaccctgacccaggaggaccccggggacaaccagatcaccctggaggagatcacccagatggccgagggcgtgaaggccgagccctttgagaaccacagcgccctggagattgctgagcagctgaccctgctggaccacctggtgttcaagaagatcccctatgaggagttcttcggccagggctggatgaagctggagaagaatgaaagaacaccctacatcatgaagaccaccaagcacttcaatgacatcagcaacctgattgccagcgagatcatcagaaatgaagacatcaatgcccgggtgtctgccatcgagaagtgggtggccgtggccgacatctgccgctgcctgcacaactacaatgctgtgctggagatcaccagctccatgaacagaagtgccatcttccggctgaagaagacctggctgaaggtgtccaagcagaccaaggccctgattgacaagctgcagaagctggtgtcctctgagggccgcttcaagaacctgcgggaggccctgaagaactgtgaccccccctgtgtgccctacctgggcatgtacctgacagacctggccttcatcgaggagggcacccccaactacacagaagatggcctggtgaacttcagcaagatgaggatgatcagccacatcatccgggagatccggcagttccagcagacagcctacaagattgagcaccaggccaaggtgacccagtacctgctggaccagagctttgtgatggatgaggagagcctgtatgagagcagcctgcgcatcgagcccaagctgcccacctag

SEQ ID NO: 133166 - DNA, 3822 bp, Artificial Sequence
  derived and/or modified sequence
atgcagaagggcatccggctgaacgacggccacgtggccagcctggggctgctggccaggaaggatgggaccagaaaggggtacctcagcaagagaagttcagataacaccaagtggcagacaaagtggttcgctctgttgcaaaacctcctgttctatttcgaatctgattcctcaagccgcccctccgggctgtacctgctggaaggctgcgtgtgcgaccgagccccctctcctaagccagctctctccgccaaggagccattggagaagcagcattactttacagtgaacttttcacatgagaatcagaaggctctggagctgcgtacagaagatgctaaggattgtgatgagtgggtagcggctatcgcgcacgcctcgtatcgtactctggcaactgagcatgaggcactgatgcaaaagtacctacacctgttgcagattgtcgaaaccgagaagacagtggctaagcaactcagacagcagatcgaagatggtgagatcgagatcgagagactcaaggcagagataaccagtcttctcaaagataatgagcgaatacagtccacccaaacagtggctccaaacgacgaggactccgacattaaaaaaatcaaaaaagtgcagtccttcctccgcggctggctgtgtcgaagaaagtggaagactataattcaggattatatacgatcccctcatgcagacagcatgcgtaaacgcaatcaggtcgtcttttccatgctcgaagccgaagctgaatacgtgcagcagctgcacattttggtaaacaacttcctccgccctcttcgcatggcagcgtcgagcaagaagcctcccatcacccacgatgacgtgagtagcatcttcctcaactctgagaccatcatgtttctgcatcaaatattctaccagggccttaaagcacggatttcctcatggcccactctcgtgttagcagacttattcgatatcttgctgcctatgctcaatatctaccaggaattcgtccggaaccaccagtactccttgcagatcctggcccattgtaagcagaacagggacttcgacaagttgctgaagcactatgaagcaaaacccgattgcgaggagagaaccttagaaacctttcttacatacccaatgttccagatcccacggtacatactgacccttcacgagctactcgctcatacacctcacgagcacgtcgaacgaaactcacttgactacgcgaagagtaagctggaagagttgagcagaatcatgcacgatgaggtttccgagactgagaatattagaaagaatctcgcaatcgaaagaatgattatcgagggctgtgagatactgctggacaccagtcaaaccttcgttagacagggtagtcttatacaagtgcctatgtccgagaaagggaaaattacccgcggcaggttaggtagtctgagcctgaaaaaggaaggggaacgtcagtgttttctattcagcaaacacttgattatctgtacacgaggcagtggtggtaaactgcatctcactaagaacggggtaatttcacttatagattgcactcttctggaagagcccgagtccactgaggaggaggccaagggttctgggcaggatatcgatcatctagacttcaaaatcggagtggagcccaaggactccccaccattcactgtgatcctggttgccagctctaggcaagaaaaggcagcctggacaagtgacatctcacagtgtgtcgataacattcgctgcaacggcctcatgatgaacgccttcgaagaaaatagtaaggtgaccgtccctcagatgattaaacggaccagagaaggaacacgggaggccgaaatgtcgcgatccgatgcatctctctattgcgacgatgtagacattcgcttcagcaaaactatgaactcctgtaaggtactgcagatccggtatgcgtctgtggaaaggctgctggagagactgactgatctccggtttctctccatcgactttctaaacactttcctacattcttatcgggttttcacaacagccatcgtcgtgctggataagctgatcactatctataagaagcctatctctgcaatcccagctagatggctacgctccttggagctgctcttcgcatccggccagaacaacaaactgttgtacggcgagccccctaaatcacctcgagctacaaggaagttctcttcacccccacctctgtcaattacaaagacatcaagcccgagcagacgacgcaagctgtcactgaatatcccaatcataaccgggggaaaggccctggatctggctgcgttatcatgcaacagcaatgggtacacctctatgtactccgcgatgtcaccattttctaaggcaaccctcgacacctctaaactgtacgtcagcagctccttcacaaataaaattccagatgaaggggatacaactcccgaaaaacccgaggacccctctgcactgtcaaaacagtctagtgaggtgagcatgagagaagaatcagacatagatcaaaatcagagcgatgacggcgacactgaaacctcgcctactaagtctcctaccacacccaagtctgttaagaataaaaactcatccgaattcccccttttcagctacaacaatggcgtggttatgacttcatgcagagagttggataacaaccgctcagcactatctgctgcctcagcctttgcaatcgccactgccggagccaacgaaggcacaccaaacaaagagaagtatcggcgcatgtccctggcttctgcagggtttccacccgatcagaggaacggagataaggagtttgtcatccgccgagccgcaaccaaccgcgtgctaaatgttctcagacattgggtgtcaaaacactcccaagatttcgaaacaaacgacgaacttaagtgtaaagtgataggcttcctggaggaagtcatgcatgatccggaacttctgacacaagagagaaaggccgccgctaatatcatccggaccttgacacaagaggacccgggggacaaccagatcacacttgaagagattacgcaaatggcagagggcgtgaaagccgagccttttgagaaccacagcgcgttagaaattgccgagcagctgacccttctcgaccatctggtttttaaaaagatcccctacgaagagttctttgggcaagggtggatgaagttagaaaaaaacgagcgaacgccctacattatgaagacaactaaacacttcaatgacatcagcaacttaatcgcctcagaaatcatcaggaatgaggatatcaacgctagggtgtctgcaatagagaagtgggttgccgtggcagatatttgccggtgcctgcacaactataacgcggtcctggaaattaccagttccatgaataggtcggcaatttttcgtctgaaaaagacttggctgaaagttagtaagcagacaaaggcactgatcgacaaactacagaaattggtctcatctgagggccgtttcaagaacttaagggaagctctgaagaactgcgacccaccctgcgtcccataccttggaatgtacctcacagacctggcattcatcgaagagggtacccccaattacacagaagatggcctagtgaactttagcaaaatgcggatgatttcacatataatacgcgagattaggcagttccaacagaccgcttataaaatagagcaccaggcaaaggtaactcagtacctgctggatcagtcattcgtgatggatgaggagtccctctacgagtcctcactccgcatcgagccaaaactgcctacttag

SEQ ID NO: 133167 - DNA, 3783 bp, Artificial Sequence
  derived and/or modified sequence
atgcagaagggcatccggctgaacgacggccacgtggccagcctgggactcttggcacggaaagatgggaccaggaagggttatttaagcaagcggagctccgacaacacgaaatggcagaccaagtggttcgccctactgcagaaccttctgttttactttgaatctgactcgtcctcgcggcccagcggcctgtatctgttagagggctgcgtttgtgaccgggccccctccccaaagcccgcactcagcgccaaagaacccctggagaagcagcactattttactgttaacttctcccatgaaaatcagaaagcactcgaactccgtactgaggacgccaaggattgcgacgagtgggtcgctgcaatcgcgcatgcttcctacaggaccctggccaccgagcacgaggcactgatgcaaaagtacctgcacttattacaaatcgtggagacggaaaagactgtggctaagcagctgcgccagcagattgaggacggagagatcgagatcgagcggctcaaggccgaaatcacatcattgctgaaagacaacgaacgcatccaatctacgcagactgtcgcacctaacgatgaagatagcgacattaaaaagatcaagaaagtgcaatcttttctgaggggatggctctgtagacgcaaatggaagacaatcatccaggactatatcaggagcccacacgcagactccatgcgaaaacggaaccaggttgtgttttcaatgctcgaggcggaagccgagtacgtgcaacagcttcacattctggttaataacttcttgcggcctctaaggatggccgccagcagcaaaaaacctccaataacacacgacgatgtctctagtatcttcttgaattcggaaactatcatgtttttgcatcagatattctaccagggtctcaaagcgaggatttcttcttggcctactctggtgttagcggatctgttcgacatcttactgcccatgctgaatatttaccaggagttcgtgagaaaccaccaatactcactgcaaatcctcgcgcactgcaagcagaacagggatttcgacaagctgctgaagcactatgaagcaaagcctgattgcgaggagcgcactttggaaacattcctgacctaccccatgtttcagattccaaggtacattcttacactccacgagcttctggcccacaccccccatgaacacgtcgaacgtaactcgttagattacgctaagtccaaattagaagagctcagcagaatcatgcacgacgaagtctccgaaaccgagaatatcaggaaaaacctagccatagagcgtatgattatcgaaggctgcgaaattttgttggacacttcccagacctttgtccgacagggatcactaatccaggttcccatgtctgaaaaaggcaagataactagggggcggctaggcagcctcagcttaaagaaggaaggggaacgtcaatgcttcctctttagcaagcatttaataatctgtacaaggggaagtggtggtaagctccatctgacgaaaaacggggtgatctcgctgatcgactgcacattgttggaggagcccgagagcaccgaggaggaggcaaaggggtcaggtcaagacatagaccacttagacttcaaaatcggcgtggagccaaaggatagtcctcccttcacagtgatcctcgtggcttccagcagacaggaaaaggccgcctggacctcagacatttcacagtgtgttgataacattcggtgcaatggcctcatgatgaacgcctttgaagaaaattctaaggtaaccgtgccccaaatgataaaaagtgatgctagtttatactgtgacgatgtggatattcgcttcagcaagacaatgaactcatgtaaagtgttgcagattcgctatgcttcagtcgaacgcttactggagcgcctgacagacctgcgattcctcagcatcgatttcctgaatacgtttcttcacagctacagagtcttcacaaccgctatcgtggtgctcgacaagctgataacgatctataagaagccaatttctgctattccggcacgctggctccggtcactggaacttctgtttgcctctgggcagaacaacaaactactttacggggaaccccctaaaagcccccgcgccacaagaaaattttctagtccccctcctctgtctataaccaagactagctcccctagccggaggaggaaattgtcactgaatatccccatcatcacgggaggcaaggcgctcgatctagccgcgctgagttgtaatagtaatgggtataccagtatgtattctgcaatgagcccgttttcaaaggccacactggatacctcaaagctgtacgtgagcagcagttttacaaacaagattccagacgaaggcgatacgactccggagaagcccgaagacccttccgctctctcaaagcagagttccgaggtatccatgcgcgaagagtccgatatcgatcaaaaccagtccgatgatggggataccgaaacatctcccacgaagagtccaacaacgccaaaatctgtgaagaacaaaaattcctctgaattccccctctttagttacaacaatggcgtcgtgatgacgtcttgccgcgagctcgacaacaatcggagcgcgctctctgccgcctcagcattcgccatcgcaaccgccggcgcaaatgaggggaccccaaacaaggaaaagtaccgccgaatgagtcttgcttcagctggctttcctccggaccagagaaatggagacaaagagttcgtcatacggagggccgcgacaaatcgggtgctaaatgttctaagacattgggtttcaaagcatagccaggatttcgagacaaatgacgaacttaaatgcaaggtgataggtttcctcgaagaagtcatgcacgaccccgaactgttgacccaagaaagaaaggcagcagccaatatcatcagaacactcactcaggaggaccccggggataatcaaatcactctcgaggaaataactcaaatggccgagggtgtaaaggccgagccgtttgagaaccacagtgctctcgagatagcggaacaactgacgctcctcgatcacctagtctttaaaaagattccgtacgaggagtttttcggccaaggctggatgaaactcgagaagaacgaaagaactccttatatcatgaagactacgaaacacttcaatgatatctcgaatctcatcgctagtgagattatcaggaatgaagatataaatgcaagagtgtccgccattgagaagtgggtggctgtagctgatatctgccggtgtttacataactataatgccgttctggagatcacttcaagcatgaaccggtctgcaattttcagactaaaaaaaacctggttgaaggtgtctaagcaaactaaggctctcatcgacaaacttcagaaactcgtatcttcagaaggtcggttcaaaaacctgcgcgaagcactcaagaactgtgatccaccctgcgtgccctacttgggcatgtacctgactgatctggcgttcatcgaagaggggacacccaactacacggaggacggactggtgaatttcagcaaaatgcggatgatttctcatattattcgagaaattcgacagtttcagcagacagcatataagatcgagcaccaggctaaggttacgcagtatctcctggaccagtcttttgtaatggatgaagagagcctttatgagtcttctttaaggatcgagcccaagctgcccacatag

SEQ ID NO: 133168 - DNA, 3822 bp, Artificial Sequence
  derived and/or modified sequence
atgcagaaagggatcaggttgaacgatggccacgttgccagccttggtcttctggcgcgtaaggacggcacgcgtaagggctacctgtccaagaggtcctccgacaacaccaaatggcaaacaaaatggtttgccctgttgcagaatctactgttctactttgaaagcgacagttcctcacgtccgtccggtttgtatctccttgaaggatgcgtgtgcgaccgggctcccagccccaagcccgcactctctgccaaagaaccgctggagaagcaacactatttcactgtcaactttagtcatgaaaatcaaaaggccctcgaactgcggacagaggacgctaaggattgtgatgagtgggtagccgcaatcgcccacgcaagttataggacattagccacggaacacgaggccctcatgcagaaatatctccacctactgcagatcgtagagaccgagaaaaccgtcgccaaacagcttaggcagcaaatagaggacggagagattgaaatcgagcgcctgaaagctgagataacatcactgctgaaggataatgaaaggatccagtccacgcagacagttgcaccaaacgacgaagacagcgacattaaaaagattaaaaaagtgcagtccttccttcgtggctggctctgccgcagaaaatggaagacaatcattcaggactatatacggagtccccacgctgatagtatgcgcaaacgcaaccaagttgtgttttccatgctggaagcagaggcagaatatgtgcagcaactgcatatactggtgaataactttctgcgccctctgcgcatggctgcgtctagtaaaaagcctcccatcacccatgatgacgtgagtagtattttccttaactccgagaccattatgtttctgcatcagatcttttatcaagggctcaaggcccgaatttctagttggcctactttggtcctggctgatttgtttgacatcctgcttcctatgttgaatatttaccaggaattcgttcgaaatcatcaatactccctgcaaattctagcccactgcaaacagaacagggatttcgataagctgctgaaacattatgaagcgaagcctgattgtgaagagagaacattggagactttcctaacttatcccatgttccagatccccaggtatattctgacgctgcatgagttattagcccatactccacatgagcatgtggagcgcaatagtctggactacgcaaagagcaagctggaggagctgagccggattatgcacgatgaagtgtcagagaccgagaacatcagaaagaatcttgctattgagcgcatgatcattgaaggctgtgagatactgcttgatacctcacagacattcgttcggcaaggatcactcatacaggtgcccatgagtgagaagggaaagattactcggggaagattaggcagtctgtcgctaaaaaaggaaggggagcgccagtgcttcctcttttccaagcacctgataatttgcacccgtgggagcggcggaaaacttcatctcactaagaacggagtgatttccctgattgactgtacgctgcttgaagagccagagtctactgaagaggaggctaaaggctctggccaggacatcgaccatttggattttaaaattggagtggagcccaaggatagccctcccttcactgtcatcctcgtagcaagctctcgtcaggaaaaggccgcatggacatccgatatctcccagtgcgtggacaatatccgctgcaacgggctcatgatgaatgcgtttgaggagaactccaaagtcaccgtcccccagatgatcaaaaggacccgagaaggcaccagggaggccgaaatgtctagaagtgacgcctccctctactgtgatgatgtcgacatccgattctcgaagacaatgaactcctgcaaggtactccaaatcaggtacgccagcgtagagaggctccttgagaggctgactgacctcaggtttttgtccatcgattttctgaacaccttcctccattcatatcgggtgttcacgacagccatcgttgtcctcgataaactaattacaatttataagaagccaattagcgctatccctgcaagatggctgcggagcttagagttgctgtttgctagcggacagaataataaactgctgtacggcgaaccccctaagagccccagggccacacgaaagttctcttcaccaccaccgctctcaattacaaagacctcttctccctcaaggcggaggaaactcagcctcaacattcctatcattactgggggaaaagccctcgacctggcagcactgtcctgtaactcaaacggctacaccagtatgtatagcgccatgagtccattttcaaaggctacactggacacatccaaactctacgtaagtagctcctttacaaacaagattccagacgaaggcgatactaccccagagaagcctgaagacccttctgcattaagcaaacagtcttctgaagtctctatgagagaagaatcagacattgaccagaatcagtccgatgacggggacaccgagacatcccccacgaaaagccctaccactccaaaaagtgtcaagaacaaaaattccagcgagttccctctcttttcatataataacggagtagtcatgaccagttgcagagagctggataataataggagtgctctgagtgcagcttctgctttcgctattgcgactgctggcgcaaacgagggcactcctaacaaggagaaatatcggcgtatgagtcttgccagcgcagggttccctccagatcagaggaatggagataaagagttcgtgatccggcgagcggcaaccaaccgtgtcctgaatgtactgcggcactgggtttcaaagcatagccaggatttcgaaactaacgatgagctgaaatgtaaggtgatcggttttctcgaagaagtcatgcatgatcctgaacttctgacccaggagcgcaaagcggcagccaacatcatccgcacattgacccaggaagatcccggtgacaaccagattacactcgaggagatcactcagatggccgaaggggtcaaggccgaaccttttgaaaaccactcggccctggagatcgcagaacagctaaccctcctcgatcatctcgtctttaaaaagattccctatgaagagttctttggacagggctggatgaaattagagaagaatgagagaactccatacatcatgaagacaactaagcactttaatgatatttccaatctgatcgcttccgaaattatccgtaatgaagatatcaacgcacgagtgtctgcgattgaaaaatgggtggccgtggctgacatctgtcggtgtctccacaattataacgcggttctggaaatcacatccagcatgaaccggtcggctatcttcaggctgaagaaaacttggctgaaggtcagcaagcaaacaaaggccctcatcgacaaactgcagaaactggtgagcagcgaagggcgattcaagaatctgcgggaagcattgaagaactgtgatcccccatgcgtgccctatctcgggatgtatctcaccgaccttgctttcattgaagagggcacccctaattataccgaagatggcctggtgaactttagcaaaatgcggatgatttctcacatcataagagagattaggcagttccagcagaccgcatataagattgagcaccaggccaaggtaacccagtacctcctggaccaatcctttgtcatggatgaggagagtctgtacgagtctagccttcggatagagcccaaactgcccacctag

SEQ ID NO: 133169 - DNA, 3783 bp, Artificial Sequence
  derived and/or modified sequence
atgcaaaaagggatccgcctgaatgatggccatgtggcaagcctaggactgctcgcacggaaggacggcactagaaaggggtaccttagcaagcgcagctccgataatactaaatggcagactaagtggtttgcgcttctccagaacctgcttttctacttcgagagtgattcctctagcagaccttcaggcctttatttgttggagggatgcgtatgtgaccgggcacctagccctaagccagccctgtccgcaaaggaaccattggagaaacagcactactttaccgtgaacttcagtcacgaaaaccagaaagccctggaattacgaacagaggacgccaaggactgcgacgaatgggtggcagccattgcccatgcaagttacaggactttggccactgagcacgaagcgttgatgcagaaatatcttcacttgctgcagatcgtcgaaaccgagaaaaccgtagcaaagcagctgcgccagcagatcgaggacggtgaaattgagatagagaggttaaaggccgagattacttcgctccttaaagataacgaaaggattcagtcaacacagacagtcgcaccgaatgacgaagattctgacatcaaaaagataaaaaaggtgcagtctttcctcagggggtggctgtgcagacgtaaatggaagacaatcatacaggactacatcaggtctccacatgccgactccatgaggaagagaaaccaggtggtgtttagcatgcttgaagccgaggccgaatatgttcagcaactgcacatcctcgttaataattttctccgacccttgcggatggctgcctccagcaaaaagcctcctattacccacgacgatgtctcctccatttttttgaacagcgaaactatcatgttcttgcaccagattttttaccagggcctcaaagctaggataagcagctggccgacactcgtgttagctgatctgttcgacattctgctccctatgcttaatatttaccaagaattcgtaaggaaccatcagtactctttacagatcttggcgcactgtaagcagaaccgtgatttcgacaagttactcaagcactatgaggctaaaccggattgcgaagaacgaacgctggaaacgttcctgacttaccccatgtttcagattcccaggtacatcctgaccctgcatgagcttctcgcccatactccacatgaacacgtcgagcgcaactccttggactatgctaagtccaagttggaagaactcagcagaataatgcatgatgaggtcagcgaaaccgaaaatattcggaagaatctggccattgaacgcatgataattgaagggtgtgagattcttcttgacactagtcagacgttcgtgagacaggggagcctgatacaggtgcctatgagcgagaagggcaagattacccgcggacggcttggatctctcagtcttaagaaagagggggaacgccagtgttttctgttttcaaaacatctgattatctgcactcgaggatccggtggcaagctgcacctcacaaagaacggcgtgatttccttaattgattgtactttactcgaggaaccagagtcgacagaagaagaggccaagggatccggccaggacatcgaccatctggatttcaaaatcggggttgagccaaaagactcaccacccttcacggttatactagttgcgtcttctcggcaggaaaaggcagcctggacctcggacattagtcaatgcgtggataacattcggtgtaatggcttgatgatgaacgcctttgaagagaactccaaagtaacagttccccagatgatcaagtccgacgcatctctgtactgtgacgatgtggatatccgcttctctaaaacaatgaatagctgtaaggtgctccagattaggtacgcctcagttgagaggctgcttgagaggctgactgacttgagatttctgtcaatcgacttcttgaacacatttctgcactcttaccgggtatttacgaccgcaatcgtggtgcttgataaactcattacaatatacaaaaaacccataagtgccatcccggcaaggtggctgcggtcactggagctattgttcgcttcgggccaaaataataagcttctctacggagaaccccctaaatccccacgtgcaacacggaagttcagctcccccccaccattgagcatcacaaaaacttcctcaccttccaggagacggaagcttagcctgaacatccccattatcactggcggaaaggcgctcgacttagcagcgctgtcctgtaatagcaacggatatacctctatgtattccgccatgtcacccttcagtaaggcaactctggacacctctaagctgtatgtgtcttcatcttttacgaataagatcccagatgagggggatacgacacctgagaagcccgaggacccgagtgccctctctaaacagagtagcgaagtaagcatgcgcgaggagtcagatatcgatcaaaaccagtcagacgacggcgacacagaaaccagccctactaaaagcccaacaacacccaaaagcgtgaaaaataagaactcctccgaatttccactcttctcttacaacaatggagtcgtgatgacaagttgcagggagctggacaacaatcgcagtgcactctccgctgcatcagccttcgctattgccactgcaggcgctaacgagggtacccccaacaaggaaaagtaccgtaggatgtctttggcttctgcaggctttccacccgaccagaggaacggcgacaaagagtttgtgattcgacgagcagccacaaatcgcgttctgaacgtgctacggcactgggtgtcaaagcactcccaggatttcgagaccaacgacgagctgaagtgtaaggtgattggttttttggaagaggttatgcatgaccccgaacttcttacacaggaacgaaaagccgcagctaacatcatacggaccctgacccaggaagatccaggggataatcagattactctggaagagatcacacagatggccgagggcgtgaaggctgaacccttcgaaaatcacagtgcactcgagatcgctgagcagctcacacttctagaccaccttgtgtttaagaagatcccttacgaggaattctttggacaaggctggatgaaacttgagaaaaatgagcgtaccccatatatcatgaaaactactaaacattttaatgacatctctaatcttatcgcaagcgagatcatccgcaatgaggacattaacgcccgtgtgagtgccatcgagaaatgggtcgctgttgctgatatctgccgatgtttgcataattacaacgccgtccttgaaattactagttcgatgaaccggtctgctatattccgcctcaagaagacatggttaaaggtgagcaagcagacaaaggcgttgatcgacaaattacaaaaactggtgtctagcgaggggaggtttaagaacttgcgagaggctttgaagaactgcgatcctccatgtgttccatatttgggaatgtatcttaccgacctggctttcatcgaagaaggaacccctaattacacagaggatggtctggtcaacttctcaaaaatgcggatgatcagtcatattattcgtgaaatcagacagttccagcagacggcatataagatcgaacatcaggccaaggtcacacaatatctgctggaccaaagttttgtgatggatgaggagagtttatatgagagcagtctcagaattgagcccaagttacccacatag

SEQ ID NO: 133170 - DNA, 2850 bp, Artificial Sequence
  derived and/or modified sequence
ggagccctttttggcctacttggggtgagtcaacataaggagtgcaggccaccttagcctttgcttctcaaaagtcatggggcaatgaaggacttggccaaggctgtccagcagtaggccaagttcagggattggctcaggcccctaatggacttcactgcatccaggaatggtaggtgattatcttttccgagaggccacctacccagatcccagttgtggacagcccatcccagccctcagaggctcagaggctctctgagtgccctgccccaaaacaccctaggcaagacattatgccagagcctcagctctagggctgcctggagcagagctcctgaatcacactggctccccagggctccccaggaacctcaccattcctcccccaatccacacctctgctgccagagcaacgcaacgacccagaatacacccgttccctcttctgttccctcctcctgcccccacctcaggcctcactggggcagggtacatcttgcctctctgccctgaacttctgaaacctcaatgatcagattcccagggctctgagaaaacagaagcaaacatcccatccaggatggatttaccccctaaaagtcactgagatcattcccaggggcccagcagacagtgtccttcctttcccagcagcagtgccctgcagaacaaagaggctggttcagagccagctctcagccctatggccttggctgagtcccttaacctttctgagactcagtttcctacctgtgacattcctgcagttatcctgtaggaataagagtgcctacgtcctggggcaacagtgagggttaaaagatcaatcctatcctgtgtgcaacgtggagcagacagcctcgatgagacaagctatggtttgcaatgttctggatgtataacctgtttccagcctggcctgaggtggaaccctgtcatgaggatggtcgctggagctcctgtttgccagtggccagaacaataagctcctgtacggtgaaccccccaagtccccgcgcgccacccgcaagttctcctcgccgccacctctgtccatcaccaagacatcgtcaccgagccgccggcggaagctctccctgaacatccccatcatcactggcggcaaggccctggacctggccgccctcagctgcaactccaatggctacaccagcatgtactcggccatgtcacccttcagcaaggccacgctggacaccagcaagctctatgtgtccagcagcttcaccaacaagattccagatgagggcgatacgacccctgagaagcccgaagacccttcagcgctcagcaagcagagctcagaagtctccatgagagaggagtcagatattgatcaaaaccagagtgatgatggtgatactgaaacatcaccaactaaatctccaacaacacccaaatcagtcaaaaacaaaaattcttcagagttcccactcttttcctataacaatggagtcgtcatgacctcctgtcgtgaactggacaataaccgcagtgccttgtcggccgcctctgcctttgccatagcaaccgccggggccaacgagggcaccccaaacaaggagaagtaccggaggatgtccttagccagtgcagggtttcccccagaccagaggaatggagacaaggagtttgtgatccgcagagcagccaccaatcgtgtcttgaacgtgctccgccactgggtgtccaagcactctcaggactttgagaccaacgatgagctcaaatgcaaggtgatcggcttcctggaagaagtcatgcacgacccggagctcctgacccaggagcggaaggctgcagccaacatcatcaggactctgacccaggaggacccaggtgacaaccagatcacgctggaggagatcacgcagatggctgaaggcgtgaaggctgagccctttgaaaaccactcagccctggagatcgcggagcagctgaccctgctagatcacctcgtcttcaagaagattccttatgaggagttcttcggacaaggatggatgaaactggaaaagaatgaaaggaccccttatatcatgaaaaccactaagcacttcaatgacatcagtaacttgattgcttcagaaatcatccgcaatgaggacatcaacgccagggtgagcgccatcgagaagtgggtggccgtagctgacatatgccgctgcctccacaactacaatgccgtactggagatcacctcgtccatgaaccgcagtgcaatcttccggctcaaaaagacgtggctcaaagtctctaagcagactaaagctttgattgataagctccaaaagcttgtgtcatctgagggcagatttaagaatctcagagaagctctgaaaaattgtgacccaccctgtgtcccttacctggggatgtacctcaccgacctggccttcatcgaggaggggacgcccaattacacggaagacggcctggtcaacttctccaagatgaggatgatatcccatattatccgagagattcgccagtttcaacaaactgcctacaaaatagagcaccaagcaaaggtaacgcaatatttactggaccaatcttttgtaatggatgaagaaagcctctacgagtcttctctccgaatagaaccaaaactccccacctgaagctgagcccagcccagacccagctgctcccggggacatgtgctagatgatactgtacatattcgtttggtttcactggattttcttcttcagtatgtgcttctccaagaatacaaatcgtccttgttcttagattcctgtagaaccggaatatgaatttctgcaccgtttcagacttcgcccacccatccctcccctcgtc

SEQ ID NO: 133171 - DNA, 6294 bp, Artificial Sequence
  derived and/or modified sequence
cagtttgcccggcaccggaggagggtcgggcggcatcttccgggtactggggctctgcggagcggagaagaggttccagcggggaatggtatatctggattcaagaagccgcggctcggcgccagatcctggagtgtagatatttggggggaggggagagctagagggagcgagcgagcgagcgccagagagaggcagcgcgcagcgcgcacggacggggggctgctgcgcggagaagatgtaagcgcgtggggtctcgctggcctctgagcaccatgcagaaggggatccggctgaatgatggccacgtcgcgtccctgggactgctggcgcgcaaggacggcacgcgcaaaggctacctgagcaagcggagttcggacaacacaaaatggcaaaccaagtggttcgcgctgctgcagaacctgctcttctacttcgagagcgactcgagctcgcggccctcggggctttacctgctggagggctgcgtctgcgaccgcgcgccctcccccaagccggcgctgtcggccaaggagccgctggagaaacagcattacttcacggtgaacttcagccatgagaaccagaaagccttggagctgaggacagaggacgcaaaagattgtgacgaatgggtggcagccattgcacatgccagctacaggaccctcgccacagagcatgaggcattaatgcagaaatacctgcacctgctgcagatcgtggagacagagaagaccgtggccaagcagcttcggcagcagatcgaggatggggagatcgagatcgagcggctgaaggcagagatcacatccctgctcaaggacaatgagcgcatccagtccacccagactgtcgcccccaacgatgaagacagcgacatcaagaaaattaagaaggtgcagagcttcctgcggggctggctgtgccggcggaagtggaagaccatcatccaggactacatccggtcaccccatgctgacagcatgcgcaagaggaaccaggtggtgttcagcatgctggaggctgaggctgagtacgtgcagcagctgcacatccttgtcaacaatttcctgcgcccgctgcggatggccgccagctccaagaagcctcccatcacacacgacgacgtcagcagcatcttcctgaacagcgaaaccatcatgtttttacatcagatcttttaccaaggcctgaaggcccgcatctccagctggcccacgctggtcctggctgacctatttgacatcctgctgcccatgctcaacatctaccaagagttcgtccgcaaccaccagtacagcctgcagatcctggcccactgcaagcagaaccgtgacttcgacaagctgctgaagcactacgaggccaagcctgactgcgaggagaggacgctggagaccttcctcacctaccccatgttccagatccccaggtacatcctgaccctccatgagctcctggcccacacgcctcatgagcacgttgagcgcaacagcctggactacgccaagtccaaactggaggagctgtccagaataatgcacgatgaagtaagtgagacggagaacatccggaaaaacctggccatcgagcgcatgatcatcgaaggctgtgagatcctcctggacaccagccagacctttgtgagacaaggttccctcattcaggtgcccatgtctgaaaagggcaagatcaccagggggcgcctggggtctctctccctaaagaaagagggcgagcgacagtgcttcctgttttctaagcatctgattatctgtaccagaggctctggagggaagcttcacttgaccaagaatggagtcatatccctcattgactgcactttattggaggagccagaaagcacggaggaggaagccaaaggatccggccaagacatagatcacttggattttaaaatcggggtggagccaaaggattccccgccctttacagtcatcctagtggcctcgtccagacaggagaaggcagcgtggaccagtgacatcagccagtgtgtggataacatccgatgcaatgggctcatgatgaacgcatttgaagaaaattccaaggtcactgtgccgcagatgatcaagaggaccagggaggggaccagggaagcagaaatgagcaggtccgacgcctccttatattgtgatgatgttgacattcgcttcagcaaaaccatgaactcctgcaaagtgctgcagatccgctacgccagtgtggagcggctgctggagaggctgacggacctgcgcttcctgagcatcgacttcctcaacaccttcctgcactcctaccgcgtcttcaccaccgccatcgtggtcctggacaagctcattaccatctacaagaagcctatcagtgccattcctgccaggtggctgaggtcgctggagctcctgtttgccagtggccagaacaataagctcctgtacggtgaaccccccaagtccccgcgcgccacccgcaagttctcctcgccgccacctctgtccatcaccaagacatcgtcaccgagccgccggcggaagctctccctgaacatccccatcatcactggcggcaaggccctggacctggccgccctcagctgcaactccaatggctacaccagcatgtactcggccatgtcacccttcagcaaggccacgctggacaccagcaagctctatgtgtccagcagcttcaccaacaagattccagatgagggcgatacgacccctgagaagcccgaagacccttcagcgctcagcaagcagagctcagaagtctccatgagagaggagtcagatattgatcaaaaccagagtgatgatggtgatactgaaacatcaccaactaaatctccaacaacacccaaatcagtcaaaaacaaaaattcttcagagttcccactcttttcctataacaatggagtcgtcatgacctcctgtcgtgaactggacaataaccgcagtgccttgtcggccgcctctgcctttgccatagcaaccgccggggccaacgagggcaccccaaacaaggagaagtaccggaggatgtccttagccagtgcagggtttcccccagaccagaggaatggagacaaggagtttgtgatccgcagagcagccaccaatcgtgtcttgaacgtgctccgccactgggtgtccaagcactctcaggactttgagaccaacgatgagctcaaatgcaaggtgatcggcttcctggaagaagtcatgcacgacccggagctcctgacccaggagcggaaggctgcagccaacatcatcaggactctgacccaggaggacccaggtgacaaccagatcacgctggaggagatcacgcagatggctgaaggcgtgaaggctgagccctttgaaaaccactcagccctggagatcgcggagcagctgaccctgctagatcacctcgtcttcaagaagattccttatgaggagttcttcggacaaggatggatgaaactggaaaagaatgaaaggaccccttatatcatgaaaaccactaagcacttcaatgacatcagtaacttgattgcttcagaaatcatccgcaatgaggacatcaacgccagggtgagcgccatcgagaagtgggtggccgtagctgacatatgccgctgcctccacaactacaatgccgtactggagatcacctcgtccatgaaccgcagtgcaatcttccggctcaaaaagacgtggctcaaagtctctaagcagactaaagctttgattgataagctccaaaagcttgtgtcatctgagggcagatttaagaatctcagagaagctctgaaaaattgtgacccaccctgtgtcccttacctggggatgtacctcaccgacctggccttcatcgaggaggggacgcccaattacacggaagacggcctggtcaacttctccaagatgaggatgatatcccatattatccgagagattcgccagtttcaacaaactgcctacaaaatagagcaccaagcaaaggtaacgcaatatttactggaccaatcttttgtaatggatgaagaaagcctctacgagtcttctctccgaatagaaccaaaactccccacctgaagctgagcccagcccagacccagctgctcccggggacatgtgctagatgatactgtacatattcgtttggtttcactggattttcttcttcagtatgtgcttctccaagaatacaaatcgtccttgttcttagattcctgtagaaccggaatatgaatttctgcaccgtttcagacttcgcccacccatccctcccctcgtctcctgcagtgcctgtttcttttaaacagctgtactcttggtccctcttccctagactcctcactcttctcagaggggaaacagcacccttgcatacaagaatcttagactccagtcctgcttccgtccctccccagcccaggctcctgggttgaggtggccacccaggcatcctcccagcatgttccatgtagttgttataactgggtggggggtggggggcggcgggagggggaaaccataccctgaagtccagtcattgacaaatcttcccgctgatggtgatgtcaatttccaaagcagcttctccagccaaaatcgcaggtctcaaaactccccatgtgtctcccagtaacctggacggaagggagtcctctctgctcagaaccacacccctcgtaccaatgctgccatctcgttcaggccccacgtcgctccttgctctaggattaacaccagatagcatgaatagcagtctcaatacaactggatgaggccctagacttcccgaggaaatggagtcacaaacaccaagccacgtcgactcttgccgaccactggcccagcatccactgaaagtcgggaacacaaaaatgtcacttttcctctttaagctgcctaacggtcactacaagcttacattgagatgctctaagtctgtataccttgtgataattagtaccacactgtagaattaggaaatcaataaccaagtgtttttattgcatatactgtagtcctgtctaaatgccttctagcaggaatatagtaatgtagtgcttattctgtgaatattaccatgtattttttacactgtacagtatagaaaacacaggttaactccgaagtggcaggcatgctccactacaacagacagacaacttttgctgtaagcaatacctagtggtatgagaattctatttcaagtcctaaaatatttcaacttacagcttgtttggaaaaaaatttccatttttgtaaaaatatatgtttcctgattacctcttgctaataaatctattctatctcagggtgaacagcgagttttgatgggtttcattcgttcagtcaaggaatatttgatgagcacttgctccttacccagcccagcctgggaccggagatccagagtgtcaaggacaccatacctgctttttaggcaccaacagtttggtggggaagactgtttcagttgcctattgcaccaagaacaagccactccaaaacataatggcttaaaaccatttttgttacctttcacagttctatgggttgactgggtccagctgtcagttcttatttggagtctctcatgaagtttcagtcactcagcaactgggactggagtcatctgaaggctcaactggaccgggtggtgctctagttggtgcaccaagatggcgctgtcacatggctggatgttgatgtctgctgggctgcactggggctgttcatgggagcatccacacgtggcctctctgtgtggcttgggctcctcacagtccggaagctgggttccaagagcgactgttccagcagcctcaggcagaagctacaaggctgcccagatgccatcctgcccagatgtgtcctcactgtcacccaggaagggaagccccggaacaccaccctcagtcacaggcatggggcccactgcaaggcacaacccactccagagctcccaaggccgcctcccctgggacctgcagccagctggctccataactgcttttccgtttcctccaggcattttcatcctagccctactttgtgctgggatctgagggggatagcaagcggagaaagaagggatctagagggagaagattctagatccttcttttgactgccagctgattttgattgccagctttacctgcttcatgagctcagccaagtcacttaacctctcagagcttcactgttctcatctgaaaaatggggatgaaaatggtatctcattacagagtagaattaaatgaattattataattaa

SEQ ID NO: 133172 - DNA, 6246 bp, Artificial Sequence
  derived and/or modified sequence
cggcaccggaggagggtcgggcggcatcttccgggtactggggctctgcggagcggagaagaggttccagcggggaatggtatatctggattcaagaagccgcggctcggcgccagatcctggagtgtagatatttggggggaggggagagctagagggagcgagcgagcgagcgccagagagaggcagcgcgcagcgcgcacggacggggggctgctgcgcggagaagatgtaagcgcgtggggtctcgctggcctctgagcaccatgcagaaggggatccggctgaatgatggccacgtcgcgtccctgggactgctggcgcgcaaggacggcacgcgcaaaggctacctgagcaagcggagttcggacaacacaaaatggcaaaccaagtggttcgcgctgctgcagaacctgctcttctacttcgagagcgactcgagctcgcggccctcggggctttacctgctggagggctgcgtctgcgaccgcgcgccctcccccaagccggcgctgtcggccaaggagccgctggagaaacagcattacttcacggtgaacttcagccatgagaaccagaaagccttggagctgaggacagaggacgcaaaagattgtgacgaatgggtggcagccattgcacatgccagctacaggaccctcgccacagagcatgaggcattaatgcagaaatacctgcacctgctgcagatcgtggagacagagaagaccgtggccaagcagcttcggcagcagatcgaggatggggagatcgagatcgagcggctgaaggcagagatcacatccctgctcaaggacaatgagcgcatccagtccacccagactgtcgcccccaacgatgaagacagcgacatcaagaaaattaagaaggtgcagagcttcctgcggggctggctgtgccggcggaagtggaagaccatcatccaggactacatccggtcaccccatgctgacagcatgcgcaagaggaaccaggtggtgttcagcatgctggaggctgaggctgagtacgtgcagcagctgcacatccttgtcaacaatttcctgcgcccgctgcggatggccgccagctccaagaagcctcccatcacacacgacgacgtcagcagcatcttcctgaacagcgaaaccatcatgtttttacatcagatcttttaccaaggcctgaaggcccgcatctccagctggcccacgctggtcctggctgacctatttgacatcctgctgcccatgctcaacatctaccaagagttcgtccgcaaccaccagtacagcctgcagatcctggcccactgcaagcagaaccgtgacttcgacaagctgctgaagcactacgaggccaagcctgactgcgaggagaggacgctggagaccttcctcacctaccccatgttccagatccccaggtacatcctgaccctccatgagctcctggcccacacgcctcatgagcacgttgagcgcaacagcctggactacgccaagtccaaactggaggagctgtccagaataatgcacgatgaagtaagtgagacggagaacatccggaaaaacctggccatcgagcgcatgatcatcgaaggctgtgagatcctcctggacaccagccagacctttgtgagacaaggttccctcattcaggtgcccatgtctgaaaagggcaagatcaccagggggcgcctggggtctctctccctaaagaaagagggcgagcgacagtgcttcctgttttctaagcatctgattatctgtaccagaggctctggagggaagcttcacttgaccaagaatggagtcatatccctcattgactgcactttattggaggagccagaaagcacggaggaggaagccaaaggatccggccaagacatagatcacttggattttaaaatcggggtggagccaaaggattccccgccctttacagtcatcctagtggcctcgtccagacaggagaaggcagcgtggaccagtgacatcagccagtgtgtggataacatccgatgcaatgggctcatgatgaacgcatttgaagaaaattccaaggtcactgtgccgcagatgatcaagtccgacgcctccttatattgtgatgatgttgacattcgcttcagcaaaaccatgaactcctgcaaagtgctgcagatccgctacgccagtgtggagcggctgctggagaggctgacggacctgcgcttcctgagcatcgacttcctcaacaccttcctgcactcctaccgcgtcttcaccaccgccatcgtggtcctggacaagctcattaccatctacaagaagcctatcagtgccattcctgccaggtggctgaggtcgctggagctcctgtttgccagtggccagaacaataagctcctgtacggtgaaccccccaagtccccgcgcgccacccgcaagttctcctcgccgccacctctgtccatcaccaagacatcgtcaccgagccgccggcggaagctctccctgaacatccccatcatcactggcggcaaggccctggacctggccgccctcagctgcaactccaatggctacaccagcatgtactcggccatgtcacccttcagcaaggccacgctggacaccagcaagctctatgtgtccagcagcttcaccaacaagattccagatgagggcgatacgacccctgagaagcccgaagacccttcagcgctcagcaagcagagctcagaagtctccatgagagaggagtcagatattgatcaaaaccagagtgatgatggtgatactgaaacatcaccaactaaatctccaacaacacccaaatcagtcaaaaacaaaaattcttcagagttcccactcttttcctataacaatggagtcgtcatgacctcctgtcgtgaactggacaataaccgcagtgccttgtcggccgcctctgcctttgccatagcaaccgccggggccaacgagggcaccccaaacaaggagaagtaccggaggatgtccttagccagtgcagggtttcccccagaccagaggaatggagacaaggagtttgtgatccgcagagcagccaccaatcgtgtcttgaacgtgctccgccactgggtgtccaagcactctcaggactttgagaccaacgatgagctcaaatgcaaggtgatcggcttcctggaagaagtcatgcacgacccggagctcctgacccaggagcggaaggctgcagccaacatcatcaggactctgacccaggaggacccaggtgacaaccagatcacgctggaggagatcacgcagatggctgaaggcgtgaaggctgagccctttgaaaaccactcagccctggagatcgcggagcagctgaccctgctagatcacctcgtcttcaagaagattccttatgaggagttcttcggacaaggatggatgaaactggaaaagaatgaaaggaccccttatatcatgaaaaccactaagcacttcaatgacatcagtaacttgattgcttcagaaatcatccgcaatgaggacatcaacgccagggtgagcgccatcgagaagtgggtggccgtagctgacatatgccgctgcctccacaactacaatgccgtactggagatcacctcgtccatgaaccgcagtgcaatcttccggctcaaaaagacgtggctcaaagtctctaagcagactaaagctttgattgataagctccaaaagcttgtgtcatctgagggcagatttaagaatctcagagaagctctgaaaaattgtgacccaccctgtgtcccttacctggggatgtacctcaccgacctggccttcatcgaggaggggacgcccaattacacggaagacggcctggtcaacttctccaagatgaggatgatatcccatattatccgagagattcgccagtttcaacaaactgcctacaaaatagagcaccaagcaaaggtaacgcaatatttactggaccaatcttttgtaatggatgaagaaagcctctacgagtcttctctccgaatagaaccaaaactccccacctgaagctgagcccagcccagacccagctgctcccggggacatgtgctagatgatactgtacatattcgtttggtttcactggattttcttcttcagtatgtgcttctccaagaatacaaatcgtccttgttcttagattcctgtagaaccggaatatgaatttctgcaccgtttcagacttcgcccacccatccctcccctcgtctcctgcagtgcctgtttcttttaaacagctgtactcttggtccctcttccctagactcctcactcttctcagaggggaaacagcacccttgcatacaagaatcttagactccagtcctgcttccgtccctccccagcccaggctcctgggttgaggtggccacccaggcatcctcccagcatgttccatgtagttgttataactgggtggggggtggggggcggcgggagggggaaaccataccctgaagtccagtcattgacaaatcttcccgctgatggtgatgtcaatttccaaagcagcttctccagccaaaatcgcaggtctcaaaactccccatgtgtctcccagtaacctggacggaagggagtcctctctgctcagaaccacacccctcgtaccaatgctgccatctcgttcaggccccacgtcgctccttgctctaggattaacaccagatagcatgaatagcagtctcaatacaactggatgaggccctagacttcccgaggaaatggagtcacaaacaccaagccacgtcgactcttgccgaccactggcccagcatccactgaaagtcgggaacacaaaaatgtcacttttcctctttaagctgcctaacggtcactacaagcttacattgagatgctctaagtctgtataccttgtgataattagtaccacactgtagaattaggaaatcaataaccaagtgtttttattgcatatactgtagtcctgtctaaatgccttctagcaggaatatagtaatgtagtgcttattctgtgaatattaccatgtattttttacactgtacagtatagaaaacacaggttaactccgaagtggcaggcatgctccactacaacagacagacaacttttgctgtaagcaatacctagtggtatgagaattctatttcaagtcctaaaatatttcaacttacagcttgtttggaaaaaaatttccatttttgtaaaaatatatgtttcctgattacctcttgctaataaatctattctatctcagggtgaacagcgagttttgatgggtttcattcgttcagtcaaggaatatttgatgagcacttgctccttacccagcccagcctgggaccggagatccagagtgtcaaggacaccatacctgctttttaggcaccaacagtttggtggggaagactgtttcagttgcctattgcaccaagaacaagccactccaaaacataatggcttaaaaccatttttgttacctttcacagttctatgggttgactgggtccagctgtcagttcttatttggagtctctcatgaagtttcagtcactcagcaactgggactggagtcatctgaaggctcaactggaccgggtggtgctctagttggtgcaccaagatggcgctgtcacatggctggatgttgatgtctgctgggctgcactggggctgttcatgggagcatccacacgtggcctctctgtgtggcttgggctcctcacagtccggaagctgggttccaagagcgactgttccagcagcctcaggcagaagctacaaggctgcccagatgccatcctgcccagatgtgtcctcactgtcacccaggaagggaagccccggaacaccaccctcagtcacaggcatggggcccactgcaaggcacaacccactccagagctcccaaggccgcctcccctgggacctgcagccagctggctccataactgcttttccgtttcctccaggcattttcatcctagccctactttgtgctgggatctgagggggatagcaagcggagaaagaagggatctagagggagaagattctagatccttcttttgactgccagctgattttgattgccagctttacctgcttcatgagctcagccaagtcacttaacctctcagagcttcactgttctcatctgaaaaatggggatgaaaatggtatctcattacagagtagaattaaatgaattattataattaa

SEQ ID NO: 133173 - protein, 1257 aa, Artificial Sequence
  derived and/or modified sequence
MKAADEPAYLTVGTDVSAKYRGAFCEAKIKTVKRLVKVKVLLKQDNTTQLVQDDQVKGPLRVGAIVETRTSDGSFQEAIISKLTDASWYTVVFDDGDERTLRRTSLCLKGERHFAESETLDQLPLTNPEHFGTPVIAKKTNRGRRSSLPVTEDEKEEESSEEEDEDKRRLNDELLGKVVSVVSATERTEWYPALVISPSCNDDITVKKDQCLVRSFIDSKFYSIARKDIKEVDILNLPESELSTKPGLQKASIFLKTRVVPDNWKMDISEILESSSSDDEDGPAEENDEEKEKEAKKTEEEVPEEELDPEERDNFLQQLYKFMEDRGTPINKPPVLGYKDLNLFKLFRLVYHQGGCDNIDSGAVWKQIYMDLGIPILNSAASYNVKTAYRKYLYGFEEYCRSANIQFRTVHHHEPKVKEEKKDLEESMEEALKLDQEMPLTEVKSEPEENIDSNSESEREEIELKSPRGRRRIARDVNSIKKEIEEEKTEDKLKDNDTENKDVDDDYETAEKKENELLLGRKNTPKQKEKKIKKQEDSDKDSDEEEEKSQEREETESKCDSEGEEDEEDMEPCLTGTKVKVKYGRGKTQKIYEASIKSTEIDDGEVLYLVHYYGWNVRYDEWVKADRIIWPLDKGGPKKKQKKKAKNKEDSEKDEKRDEERQKSKRGRPPLKSTLSSNMPYGLSKTANSEGKSDSCSSDSETEDALEKNLINEELSLKDELEKNENLNDDKLDEENPKISAHILKENDRTQMQPLETLKLEVGENEQIVQIFGNKMEKTEEVKKEAEKSPKGKGRRSKTKDLSLEIIKISSFGQNEAGSEPHIEAHSLELSSLDNKNFSSATEDEIDQCVKEKKLKRKILGQSSPEKKIRIENGMEMTNTVSQERTSDCIGSEGMKNLNFEQHFERENEGMPSLIAESNQCIQQLTSERFDSPAEETVNIPLKEDEDAMPLIGPETLVCHEVDLDDLDEKDKTSIEDVAVESSESNSLVSIPPALPPVVQHNFSVASPLTLSQDESRSVKSESDITIEVDSIAEESQEGLCERESANGFETNVASGTCSIIVQERESREKGQKRPSDGNSGLMAKKQKRTPKRTSAAAKNEKNGTGQSSDSEDLPVLDNSSKCTPVKHLNVSKPQKLARSPARISPHIKDGEKDKHREKHPNSSPRTYKWSFQLNELDNMNSTERISFLQEKLQEIRKYYMSLKSEVATIDRRRKRLKKKDREVSHAGASMSSASSDTGMSPSSSSPPQNVLAVECR

SEQ ID NO: 133174 - DNA, 3774 bp, Artificial Sequence
  derived and/or modified sequence
atgaaagcagctgatgaacccgcttacctgaccgtaggtacggacgtgagcgcaaagtaccggggggcattctgcgaggccaagataaagaccgttaagcgattggttaaagtgaaagtgcttctcaaacaggacaacacaactcaactggtgcaggacgatcaagtcaagggccccttacgggtgggtgcaatcgtcgaaaccaggacatctgacggatctttccaagaggcaatcatttcaaagctgacagacgcatcctggtacacagtcgtatttgatgacggcgatgagaggacgctgaggcggactagcctgtgcttaaagggagagcggcattttgcagagtctgaaaccctggaccagctaccgttgacaaaccccgagcatttcggaactcccgtgatcgcgaagaagaccaacaggggaagaaggagttctctgccagtgacggaagacgagaaggaggaagaaagttcagaggaggaggatgaggacaagaggagactgaatgacgaactcctgggtaaagtcgtgtccgtggtgtcggccaccgaacgaacagagtggtaccctgccttggttataagcccaagctgcaatgacgatataaccgtgaaaaaagatcagtgtctggtgcgatcttttattgacagcaaattttatagcattgcacgtaaggatattaaagaggtggacattttaaacctgcctgagtctgagctgtctactaagccaggccttcagaaggcctccatattcctgaagactagggtcgtccctgacaattggaagatggatatcagtgagattctagaatcttcaagttccgatgatgaggacggaccagccgaggaaaatgacgaggaaaaagagaaggaagctaagaaaacggaggaagaggtacccgaggaggaattagaccccgaggaacgcgataacttcctgcagcagctttacaagttcatggaagatcgggggacacctattaacaagccccctgtgctggggtacaaagatctaaacctcttcaagctatttagactggtctatcaccaagggggttgtgataatattgacagtggagctgtttggaaacagatatatatggacctggggattcctatcctgaactctgcagcctcatacaacgtaaaaacagcgtatagaaagtatttgtacgggtttgaagagtattgtcggtctgcgaatatccagttccgcaccgtccatcatcacgagcccaaggttaaggaagaaaaaaaggatttagaggagtccatggaggaggccttgaaactggaccaggagatgccgctgaccgaggttaagtccgagcctgaagagaacatcgacagcaacagtgaaagcgaacgggaagagatcgagctgaagtccccacgcggacgaaggcgaatagctagagatgtgaattctatcaagaaagagatagaggaggagaaaactgaggacaagttgaaagacaacgacacagaaaataaagacgtcgatgacgactacgagacagctgaaaaaaaggagaatgagctcctactcggaaggaagaacactccaaaacagaaagagaaaaagattaagaagcaggaagattcagacaaggatagcgacgaggaagaggaaaaatcccaggagcgcgaggagacagagtcaaaatgtgacagtgagggggaagaggacgaagaggatatggagccatgtctgaccgggacaaaggttaaagtgaaatatggaagagggaaaacacagaagatctacgaagcaagcatcaagtcaaccgaaatagacgacggggaggtactgtatctagtccattactatggttggaatgttagatacgatgagtgggtgaaggccgatcgcatcatttggccgctggataagggagggcctaagaagaagcagaagaagaaggcgaagaataaggaggattctgagaaggacgagaaacgggacgaggaacgccagaagtcgaaaagagggagaccacccctgaaaagcacgttaagtagtaacatgccctacggattgtctaagacagccaatagcgaggggaagagtgactcttgcagctctgattccgagactgaagacgctctggaaaagaatctgatcaacgaggaactttctctgaaggatgagctggaaaaaaacgagaatctgaatgatgacaaactggacgaggagaaccctaagatcagtgcccacatcctgaaagagaacgataggacccaaatgcagccactggaaacgctcaagttagaagtaggtgagaacgaacagatcgttcagatctttgggaataaaatggaaaaaactgaagaagtgaagaaggaggccgagaagtcccctaagggcaaagggagacggtcaaaaaccaaggacctttcgctcgaaatcatcaaaatttcatcttttgggcagaatgaggccggaagcgagcctcacatcgaggctcattcacttgagttgtcatctctggacaataaaaactttagctcagcaacagaggacgaaatagatcagtgtgtgaaagagaaaaagctaaagaggaagatccttggacagagttcaccagaaaagaagatccgaatcgagaacggtatggagatgaccaatactgtgtctcaggagagaacttcagactgtatcggctccgagggtatgaaaaacctcaactttgagcagcatttcgagagggagaatgagggcatgccgagcctgatcgctgaatccaaccagtgtatccagcagctgacctccgaacgattcgacagtccagccgaagagacggtaaacattccactgaaggaggatgaagacgctatgcccctgataggacctgaaactttagtgtgtcatgaggtagatcttgatgatctcgatgagaaggataaaacctccatagaggacgttgccgtggaaagctctgaaagcaactcattagtgagcatcccaccggccctgccccctgtggttcagcacaactttagtgttgctagccccctgacactttcacaggatgaatcacgttccgtgaaaagtgagagcgatataactatcgaagttgactctatagccgaagagtcccaagagggcttatgcgaacgagagagtgctaacggatttgagaccaatgttgcctcagggacctgcagtattatcgttcaggaacgggagtcacgcgaaaaggggcagaaacgcccttcagacggcaacagcgggctaatggccaagaaacagaagagaacaccaaagaggacatccgctgcggccaagaatgagaagaacggcacggggcagagcagtgattctgaggatctgcctgtgctcgacaatagctctaaatgcacacctgtcaaacacctgaatgtgagtaaacctcagaaactggcccgctcacccgcccgaatttccccccacatcaaggacggagagaaggataagcacagagagaagcaccctaacagcagcccaaggacctacaagtggagtttccaattgaacgagctggacaatatgaattctacagagcggatttcattccttcaggagaaacttcaagagattaggaaatattatatgagtctgaagtccgaggtcgctaccattgatcgccggcgcaaaaggctcaagaagaaggacagggaagtaagtcatgcaggggcgtccatgagttcagcgtcctcagacaccggcatgtctccaagttcctcctccccaccacagaatgttctggcagtagaatgtagatag

SEQ ID NO: 133175 - DNA, 3774 bp, Artificial Sequence
  derived and/or modified sequence
atgaaggccgcagatgagcccgcctacctgactgtgggcacagatgtgtctgccaagtacagaggagccttctgtgaggccaagatcaagacagtgaagaggctggtgaaggtgaaggtgctgctgaagcaggacaacaccacccagctggtgcaggatgaccaggtgaagggccccctgcgggtgggcgccatcgtggagaccaggaccagtgatggcagcttccaggaggccatcatcagcaagctgacagatgcctcctggtacacagtggtgtttgatgatggagatgagaggaccctgcggaggaccagcctgtgcctgaagggggagcggcactttgctgagagcgagaccctggaccagctgcccctgaccaaccctgagcacttcggcacccctgtgattgccaagaagaccaacagaggccgccgcagcagcctgcctgtgacagaagatgagaaggaggaggagagcagcgaggaggaggatgaggacaagaggcggctgaatgatgagctgctgggcaaggtggtgtctgtggtgtctgccacagagaggacagagtggtacccagccctggtgatcagccccagctgcaatgatgacatcaccgtgaagaaggaccagtgcctggtgcgctccttcatcgacagcaagttctacagcatcgccaggaaggacatcaaggaggtggacatcctgaacctgcctgagagcgagctgagcaccaagccaggcctgcagaaggccagcatcttcctgaagaccagggtggtgcctgacaactggaagatggacatcagcgagatcctggagagcagcagcagtgatgatgaagatggccctgctgaggagaatgatgaggagaaggagaaggaggccaagaagacagaggaggaggtgcctgaggaggagctggaccctgaggagcgggacaacttcctgcagcagctgtacaagttcatggaggaccggggcacccccatcaacaagccccctgtgctgggctacaaggacctgaacctcttcaagctgttccggctggtgtaccaccagggcggctgtgacaacattgattctggagctgtgtggaagcagatctacatggacctgggcatccccatcctgaacagcgctgccagctacaacgtgaagacagcctacaggaagtacctgtatggctttgaggagtactgccgcagcgccaacatccagttcagaacagtgcaccaccacgagcccaaggtgaaggaggagaagaaggacctggaggagagcatggaggaggccctgaagctggaccaggagatgcccctgacagaggtgaagtctgagccagaagaaaatattgacagcaacagcgagagcgagcgggaggagattgagctgaagagcccccggggcagaagaagaattgccagagatgtgaacagcatcaagaaggagattgaggaggagaagacagaggacaagctgaaggacaatgacacagagaacaaggatgtggatgatgattatgaaacagctgagaagaaggaaaatgagctgctgctgggcaggaagaacacccccaagcagaaggagaagaagatcaagaagcaggaggacagcgacaaggacagtgatgaggaggaggagaagagccaggagcgggaggagacagagagcaaatgtgacagcgagggggaggaggatgaggaggacatggagccctgcctgaccggcaccaaggtgaaggtgaagtatggccggggcaagacccagaagatctatgaggccagcatcaagagcacagaaattgatgatggagaggtgctgtacctggtgcactactacggctggaatgtgcgctatgatgagtgggtgaaggctgaccgcatcatctggcccctggacaagggcggccccaagaagaagcagaagaagaaggccaagaacaaggaggacagcgagaaggatgagaagagagatgaggagcggcagaagagcaagaggggccggccccccctgaagagcaccctgagcagcaacatgccctacggcctgagcaagacagccaacagcgagggcaagagtgacagctgcagcagtgacagcgagacagaagatgccctggagaagaacctgatcaatgaggagctgagcctgaaggatgagctggagaagaatgaaaacctgaatgatgacaagctggatgaggagaaccccaagatcagcgcccacatcctgaaggaaaatgacaggacccagatgcagcccctggagaccctgaagctggaggtgggggagaatgagcagatcgtgcagatcttcggcaacaagatggagaagacagaggaggtgaagaaggaggccgagaagagccccaagggcaaaggaagaagaagcaagaccaaggacctgagcctggagatcatcaagatcagcagctttggccagaatgaagctggcagcgagccccacatcgaggcccacagcctggagctgagcagcctggacaacaagaacttcagcagcgccacagaagatgaaattgaccagtgtgtgaaggagaagaagctgaagaggaagatcctgggccagagcagccctgagaagaagatcagaattgaaaatggcatggagatgaccaacacagtgtcccaggagaggaccagtgactgcatcggcagcgagggcatgaagaacctgaactttgagcagcactttgaaagagaaaatgaaggcatgcccagcctgattgctgagagcaaccagtgcatccagcagctgaccagcgagagatttgacagccctgctgaggagaccgtgaacatccccctgaaggaggatgaagatgccatgcccctcatcggccctgagaccctggtgtgccacgaggtggacctggatgacctggatgagaaggacaagaccagcattgaagatgtggccgtggagagcagcgagagcaacagcctggtgtccatccccccagccctgccccctgtggtgcagcacaacttctctgtggccagccccctgaccctgagccaggatgagagccgctctgtgaagtctgagagtgacatcaccatcgaggtggacagcattgctgaggagagccaggagggcctgtgtgagcgggagagcgccaatggatttgagaccaacgtggccagcggcacctgcagcatcatcgtgcaggagcgggagagccgggagaagggccagaagaggcccagtgatggcaacagcggcctgatggccaagaagcagaagaggacccccaagaggaccagcgctgctgccaagaatgagaagaatggaacaggccagagcagtgacagcgaggacctgcctgtgctggacaacagcagcaagtgcacccctgtgaagcacctgaatgtgtccaagccccagaagctggcccggagccctgcccgcatcagcccccacatcaaggatggagagaaggacaagcaccgggagaagcaccccaacagcagccccaggacctacaagtggagcttccagctgaatgagctggacaacatgaacagcacagagcgcatctccttcctgcaggagaagctgcaggagatcaggaagtactacatgagcctgaagtctgaggtggccaccatcgacagaagaaggaagaggctgaagaagaaggaccgggaggtgtcccatgctggggcctccatgagcagcgccagcagtgacaccggcatgagccccagcagcagcagccccccccagaatgtgctggccgtggagtgcaggtag

SEQ ID NO: 133176 - DNA, 3774 bp, Artificial Sequence
  derived and/or modified sequence
atgaaggccgccgacgagcccgcctacctgaccgtgggcaccgacgtgtccgccaagtatagaggcgctttttgcgaggctaagattaagaccgtgaagaggctggtgaaagtgaaagtcttgcttaaacaggataacacaacccaactagtgcaggacgatcaggtcaagggtcctttgagggtcggtgctatcgtggagacaagaacaagcgacggttccttccaggaagcgatcatatctaagctcacagacgcctcatggtatacggttgtttttgatgatggcgacgaaaggacactgcgtcgcacaagtctgtgcctgaagggggaacggcatttcgctgagtctgagactttggatcagctaccacttactaaccctgagcatttcggaacccctgtaatcgccaagaagactaatcgaggcaggaggtcctccctgcccgtcactgaggacgagaaagaggaagaaagcagcgaagaggaagatgaggacaagagacgtttgaatgatgaactgcttgggaaagtggtttcggttgtgagcgccacggagcgaaccgaatggtatccggctttggtgatttccccctcatgtaacgacgatattacagttaagaaggaccagtgcctggtgaggagcttcatcgatagtaaattttattctatcgcccggaaagacattaaggaggtggacatcctaaacctccctgagtccgagctctctactaaaccgggtctccaaaaggctagcatctttctcaagacccgagtcgtccctgataattggaaaatggatataagcgagattctggaatcatctagttcagatgacgaagatgggccagccgaggagaatgatgaagagaaagaaaaagaagcgaagaaaaccgaggaagaggtgcctgaagaagagctcgatcccgaggaacgagataacttcctccaacaactttacaagttcatggaagatcggggcacacctatcaataaacctccggtcttagggtataaggatctgaacttgtttaagctatttcggctggtataccaccaaggcggttgtgacaatatagatagcggcgccgtctggaagcagatctatatggatctgggaattcccatcctcaactccgccgcttcatacaatgtgaaaactgcgtataggaaatatctgtatggatttgaagaatactgtagaagcgctaacattcagttcagaaccgtgcaccaccacgaacccaaagtcaaagaggagaagaaggacctggaggagtctatggaagaggcactgaagctggaccaagagatgcccctgaccgaagttaaatctgaacccgaggagaacatcgattcgaattccgaaagcgaacgagaggaaattgagttgaagtctccacgaggccgcagacgaatcgcacgcgatgtcaactcaatcaaaaaggaaatcgaggaggaaaagaccgaggacaagctgaaagacaacgatacagagaacaaggacgttgatgacgactacgaaacagcagagaaaaaggaaaatgagttgcttctaggtcggaagaatactcccaagcagaaagaaaagaaaataaagaaacaggaagactctgataaggactctgacgaggaagaagaaaaatcccaagagcgcgaggagacggagtctaagtgcgacagtgaaggagaggaagacgaggaggacatggaaccgtgcctgacaggcacaaaagtaaaagtgaagtacgggcgagggaaaacccagaagatctacgaagcttccatcaaaagcacagaaattgatgatggagaggtactatatcttgtgcactactatggctggaatgtgcggtacgatgagtgggtgaaagctgatcgcattatatggccacttgataaaggcgggccgaagaagaaacaaaaaaaaaaggccaaaaataaggaagacagtgagaaagatgagaaaagggacgaggagaggcagaagtccaagcgcggcaggcctcccctgaagagcaccttgagttccaatatgccgtatggcctgtcaaagacggcgaactctgaggggaaaagtgattcatgtagctccgacagtgagacagaggacgccctcgagaagaatttgatcaacgaggaactgagtcttaaagatgagctcgagaaaaatgagaatctgaacgacgataaactggacgaggaaaatccaaagatctcagcgcacatccttaaagagaacgacagaacccagatgcagcctcttgagactctgaagcttgaagtaggtgagaatgagcagatagtgcagatctttggaaataaaatggagaaaacagaggaggttaaaaaggaagccgaaaagtccccaaaagggaaagggcggcgctccaaaaccaaggacctgagcctggaaattatcaagatatcctcctttggtcagaacgaggccggcagcgaaccccacattgaagcacatagtctcgagttgtcatcactggacaacaagaacttcagtagcgcaaccgaagatgaaatcgaccagtgcgtgaaagagaaaaaactgaagaggaagatactgggccaatcatcacctgagaagaaaattcgtatcgagaatggaatggagatgacaaatacggtctctcaggagcgtaccagcgattgtatcggctctgagggaatgaagaacttgaatttcgagcagcactttgaaagagaaaacgagggtatgccctcgctgatcgccgagagcaaccaatgtatacagcagcttacttctgagcggttcgattcgccagccgaggagacagttaatattccacttaaggaagacgaagacgccatgcctcttatcggacccgagacactcgtctgccacgaggtggacctggatgatctggacgagaaagataagacaagcatcgaagacgttgcggtggagtcttctgagagcaacagcctagtgtctattccaccggctctaccaccagtcgtgcagcataatttcagtgttgcatcccctttaaccctgagccaggatgagagcaggtcggtcaaaagcgaatccgacattacaatagaagttgattccatcgccgaggagtcccaggaagggctgtgtgaacgcgagtccgcaaacggttttgagacaaatgtcgcatctggcacgtgctccatcatcgtgcaagaaagagaatccagagagaaaggccagaaaaggcccagtgacggcaatagtgggctaatggctaaaaaacaaaaacgcacccccaagaggacttccgcggccgccaaaaatgagaaaaatggaactggacagtcaagtgattcagaggatttacccgtgttggacaactccagtaaatgcacaccagtgaagcacttaaatgtatcaaaaccacagaagctggctaggagccctgcccgaatctcgccacatattaaagacggtgaaaaggacaagcatcgcgagaaacaccctaattctagtccccgcacttataagtggtctttccagctcaacgaactagacaacatgaattccacggagaggattagtttcttgcaggagaagctccaggaaattaggaagtactacatgtcactcaaatcagaggtcgccacgatcgataggcggcgcaaacgccttaagaagaaggatagggaggtgtctcatgccggggcaagcatgagttcggcatctagcgacaccggcatgagtccttctagcagtagtccacctcagaatgtgctggccgttgagtgccggtag

SEQ ID NO: 133177 - DNA, 3774 bp, Artificial Sequence
  derived and/or modified sequence
atgaaagccgctgacgagccagcatacctgaccgtgggcaccgatgtttccgctaagtaccggggagccttctgtgaagcaaagattaaaaccgtgaaacgcttagttaaagtgaaagtgctactcaaacaagacaatacgactcagttggttcaggatgatcaggtgaagggaccattgagggttggggcaatcgtggaaacaagaacctcggatggatccttccaggaagctattatcagcaagctgaccgatgcatcctggtacactgtagtgttcgacgacggggatgagaggaccttacgcaggaccagtctttgcctgaagggggaacgacatttcgccgaatccgagaccctggaccagcttccacttactaacccggagcactttggcacccctgtgatcgcaaagaaaaccaacaggggacggaggagctcactcccggttaccgaagatgaaaaggaagaagagagcagtgaggaggaggacgaggacaaaaggagattgaatgacgagcttctcggaaaggtggtcagcgtcgtaagtgccaccgagcgcaccgagtggtaccctgctctagtgatttcccctagctgcaacgacgatataaccgtaaaaaaagaccagtgtttggttaggtcctttatagactctaagttttactcaatcgcccgtaaggacatcaaggaggttgatatcctgaaccttcccgagtccgaattgtcaaccaaacctggcctacagaaggcctccatattcctaaagactagggtggtccctgataactggaaaatggacatttccgaaatcctagaatcctcaagctcagacgatgaggatggcccagctgaagagaatgacgaagagaaggaaaaggaagccaagaaaacagaggaagaggttcccgaagaggaactggacccggaagagcgggacaattttctgcagcaactgtacaagtttatggaggacagaggaacacctatcaacaaaccacctgtgctgggctacaaagacctgaacctgttcaaacttttcaggttagtctaccaccagggaggctgcgacaacattgacagcggtgctgtgtggaaacagatttacatggaccttgggattcctatcctaaactcagccgcttcttacaatgtcaagactgcgtaccgaaagtatctgtatggcttcgaagaatactgcagatccgcaaatatccaatttagaactgtccatcatcacgaacctaaagtcaaagaggaaaaaaaggaccttgaggaatcaatggaggaggccttaaaacttgatcaggaaatgccactgacagaagtgaagtcagaaccagaggaaaacatcgatagcaatagcgagagcgaacgcgaggaaatcgagctcaagtcccctcgaggccgtcgccgtattgccagagacgtgaactcaattaaaaaagagatagaagaggagaagaccgaagacaagctgaaagataatgacacagagaataaggatgtcgatgacgattatgaaactgccgagaagaaggaaaatgaactgcttctggggagaaaaaatactccaaaacagaaggagaagaagataaagaagcaggaggatagcgacaaagacagcgacgaggaggaagaaaaaagccaggagcgggaagaaaccgaatcaaaatgtgactcagagggggaagaggacgaggaggacatggaaccatgcctaactggcaccaaagtaaaggtgaagtacgggagaggtaaaacccagaaaatctatgaggcttctatcaaatcaacagagatcgacgatggagaggtgctatatctggtgcactactacggctggaacgtgagatacgatgagtgggtaaaggccgatcggataatttggcctcttgataaaggcggacctaagaagaagcagaagaaaaaggcaaaaaacaaagaagactccgagaaggacgaaaagcgcgacgaagagcgccagaaaagtaaaaggggtagacctccacttaagagcacactgtccagtaatatgccttacggattgtccaagacagccaattctgagggcaaatctgattcctgctctagcgattcagagaccgaggatgctttggaaaagaatttaattaatgaggaattgagcctgaaagacgaactcgagaaaaatgagaatctgaacgacgacaaactggatgaggagaatcccaaaatctcagctcacatcctgaaggaaaacgatagaactcagatgcaacccctcgagacactcaaactggaggtgggcgagaacgaacagatcgtgcagattttcggcaataagatggagaaaaccgaggaggtgaaaaaggaggccgaaaaaagcccgaaggggaaggggcgtaggtccaagactaaagaccttagcctcgaaatcatcaaaatcagcagtttcggccagaacgaagccggatcagagcctcatattgaagctcactcactagagctgagtagcctcgataataagaatttttcttccgcaacggaggatgaaatcgaccagtgtgtgaaggagaagaagctcaagaggaaaattctgggtcagagttctccagaaaaaaagattaggattgagaatggcatggagatgaccaatacagtatcccaggagcggacatctgattgtatcgggtcggaaggcatgaagaacctcaactttgagcagcactttgaaagagagaatgagggaatgcccagtctgatcgccgagtctaaccagtgtattcaacagctcacatctgagcggtttgatagcccagcagaggagaccgtcaatattccactgaaagaagacgaggacgcgatgcctctgattggccctgagacgctcgtttgccatgaggtagacctcgacgacctagacgagaaagataagacatccattgaggatgttgccgttgagtctagcgaatctaactctctcgtctcaatacccccagctctgccgccagtggtacagcacaatttttctgtggcgagccctcttactctgagtcaggacgagtccaggtctgtaaagagtgagagcgatatcactattgaggttgactccattgccgaagaaagccaggagggcctttgcgaacgcgaatccgcgaacggattcgaaacgaacgtcgcatcagggacttgttctatcatcgtgcaggagcgtgaatcgcgcgagaagggtcagaagagaccatccgatggcaattcaggcctgatggctaagaaacagaagcgaaccccgaagaggacgagcgctgcagccaaaaacgagaaaaacgggaccggtcaatcatcagacagcgaggaccttccagtgctggataattcttctaaatgcacacctgtcaaacatctcaatgtgagcaagccgcagaaactcgctcgctcacccgcaaggatatcgccacacatcaaagatggagaaaaagacaaacacagagagaaacaccccaactcctcacctagaacttataagtggtcttttcagctgaacgagcttgacaatatgaacagcacggaacgtatcagctttctgcaggagaaactgcaggagatacgaaaatattatatgtccctgaagtcggaagtggctaccattgacagaaggcggaagaggttgaagaagaaggatagagaggtgagccacgcaggggcaagcatgtcatcagcttcatcggataccggaatgagtccctccagttcctctccccctcagaacgtcctggcagttgagtgtcgatag

SEQ ID NO: 133178 - DNA, 5891 bp, Artificial Sequence
  derived and/or modified sequence
taagtggaagatgtcctacctgctgtttttctcaccaatccatgaagtttcacagctacatccaatgaggacggcaggtagcgaggtcctatccgaagctcttcggcgtcatgagcagccaataggagttcgtgtagaagcgagtctgctcaacagcttgttatttggtggattgtggcagtaaatcggggcgagtggggaacccggcgcaggaactgcagccgcggctgggagtggtgctgcccggacgggggcccacggaggtcagaggggaggaggactctggagctgacagcgcgcacttcacccgcagttgttctagcgactgcgaagatagctcgctgagctggaaccccacagatcaccaacaaaaatgaaggcggcagatgagcctgcctacctgacagtgggaaccgatgtcagtgccaagtaccgaggtgccttctgtgaggcaaagattaagactgtgaaaaggctggtgaaagttaaggtactcctgaaacaggataataccacacaattggtacaagatgaccaagtaaagggtcctttaagagttggagctattgttgaaacaaggacatctgatggatcttttcaggaagctattatcagcaagttgacagatgctagttggtataccgtggtgtttgatgatggtgatgagcgaacattgagacgtacctcactttgtctgaaaggagagagacattttgcagagagtgagacacttgaccagcttccattaacaaatccagagcattttggaactccagtaattgcaaagaagacgaacagaggaaggagatcttctcttcctgttactgaagatgaaaaggaagaagaaagcagtgaagaggaagatgaagacaagcgccgtctcaatgatgaattactaggaaaagttgtaagtgtggtgtctgcaacggagaggactgaatggtatcctgctttggtaatatctcccagctgtaatgatgacatcacagtgaaaaaggatcagtgtttagttcgatcatttattgattctaaattttactctatagcaagaaaggacattaaggaagtagacattctcaatctaccggaatctgagctctccactaaaccagggcttcagaaagcaagcatcttcttaaaaactagagttgttcctgataattggaaaatggatataagtgaaatccttgagtcatccagtagtgatgatgaagatggcccagctgaagaaaatgatgaagagaaggaaaaggaggccaaaaagacagaagaagaggtgcctgaggaagaacttgatcctgaagagagggacaacttcctccagcagctttataagtttatggaagacagaggtactccaatcaacaaaccacctgttttgggctataaagatctcaatctcttcaaactcttcagactggtttatcatcagggtggatgtgacaatattgatagtggtgctgtatggaagcaaatttatatggaccttggcattcctattttgaattcagctgcttcctacaatgtaaaaactgcttatagaaagtatctctatggttttgaggagtactgccgttcggcaaatattcagttcagaactgttcatcaccatgaaccaaaagtaaaagaggaaaaaaaagacttagaagaatcaatggaagaggctctcaaattagatcaagaaatgcctttaacagaagtgaagagtgaacctgaggaaaatatcgattcaaacagtgaaagtgaaagagaagagatagaattaaaatctccgaggggacgaaggagaattgctcgagatgtaaattctattaaaaaggaaattgaagaagagaaaacagaagacaaattaaaagataatgatacagaaaataaggatgtagatgatgactatgaaactgcagagaaaaaagaaaatgagctactactggggagaaaaaatacaccaaagcaaaaagagaagaaaattaaaaaacaggaggattctgacaaagactcagatgaagaggaagagaaaagccaagagagggaagaaactgaaagcaaatgtgactctgaaggagaggaagatgaggaagacatggaaccctgcctaacaggaaccaaagtgaaagtaaaatatggacgagggaagactcagaaaatttatgaagccagtattaaaagcactgaaattgatgacggagaagttttatatttggtacattactatggatggaatgtcaggtatgatgagtgggtgaaggctgacaggataatctggcctttggacaaaggtggaccaaagaaaaaacagaagaaaaaagctaaaaataaagaagatagtgaaaaggacgaaaagagagatgaggagaggcagaagtcaaaacggggacgacctcctttaaaatcaaccctctcatcaaacatgccgtatggcttatctaagacagcaaacagtgaaggaaaatcagactcttgttcatctgatagtgaaacagaagatgctttagaaaagaatttaataaatgaagaactttctcttaaagatgaactagaaaaaaatgaaaatttgaatgatgataagctagatgaagaaaatccaaagatttctgcacatatattaaaagaaaatgataggactcaaatgcagcctttagaaaccctgaagttagaagttggagagaatgaacaaatagtacagatttttgggaacaaaatggaaaaaacagaagaagttaagaaagaagccgaaaaatctccaaaaggaaagggaagacgaagcaagacaaaagatctttctttagaaattataaagatttcatcatttggccagaatgaagcaggaagtgaacctcatatagaagctcatagtcttgaattgtcttcattagacaataaaaacttttcttctgctacagaagatgaaattgaccaatgtgtgaaagaaaagaagttgaaacggaaaatactaggacaatcatcgccagagaaaaaaataagaattgagaatggaatggaaatgacaaatactgtatctcaagaaaggaccagtgattgtattggatctgagggaatgaaaaacttaaattttgaacagcactttgaaagagaaaatgaaggaatgccatcattgatagcagagtcaaaccaatgcatccaacaactgactagtgaaagatttgatagtccagctgaagaaactgtaaatattccactaaaagaagatgaggatgcaatgcctctgatcgggcctgaaaccttggtttgccatgaagtagatttggatgatttggatgaaaaggataagaccagcattgaggatgtagcagttgaaagctctgagtctaactctcttgtttctattccacctgccctacctcctgtagtccaacataacttttcagtagcttcaccacttactcttagtcaagatgagtctcgaagcgtaaaaagtgagagtgatataacgattgaagttgatagtattgctgaagaatctcaagaaggtctctgtgagagggaatcggcaaatggatttgaaactaatgttgcctctggtacctgtagtataattgtacaagagagagagagcagagagaagggtcagaagaggccaagtgatggaaatagtggattaatggcaaaaaagcaaaagcgtaccccaaagcgaacaagtgctgcagccaaaaatgaaaagaatggaacaggacaaagcagtgatagtgaagatcttcctgtcctagacaattcaagtaaatgtaccccagtaaagcatcttaatgtatctaagccacagaaacttgcacgatctcctgcaagaatatccccgcacatcaaagatggagagaaagataaacacagagaaaaacatccgaattcatcccctaggacatataaatggagctttcagctcaatgaattagataatatgaacagtacagagagaatctcatttctccaagaaaaactacaggaaatcagaaaatattatatgtctttgaagtctgaagttgcaaccatagacaggaggagaaaaagattaaaaaagaaagacagggaagtgtctcatgcgggagcctccatgtcatctgcttcatcagacactggaatgagtccctcatcatcatctcccccacaaaatgtacttgctgtagaatgcaggtgataaacattttctctaccttcccagcagtttgctgccatggacataaatccccaaaccctgaattacaaccacagaaagcactcaactggtttgacattgctaagtatatcctgtatacttttccaggctggattgtatctattcccctctctcttcttttttcttgttgcaaaaaataagctgattaataagtgaaggttaagcagcctgccatatttgtcataatttttcctctttacttttgtttttcgtttgttgtgatatagaacaaagggcacttagcaaatttgaatttgtataataaagctttcaggtgttacagaaatcgtagacaagcaagtgcacatgataaacatcaaaatattacccagctgaatagttactgctgcactttcactaagatgtatttgaacacttggtgagtagggggtttatgttgtgttttttttcattatcgttttttttatttttgtggaagcacttgctatttagaactgccaaagtatatgttcagcagtgtgcccaggattgaaggtgtaaatgggacaaaataaattgtgaaaggaagtgtagttgactgaaaactacagttgtaataagtcttccactttttataggatttttgagcacaaaattatgcaaatattttaatgtttattaatgtttacagtggaattgtgaataagttttcagtggactatcttatcccttgacaaaaatattttgtcttttttctatgtaatttcagagtttttattttgttacaaaaagacaaaaatgaaatatataacaacaatgaagttatttaacaagatttctaaagctgaaatttttgtgtaaaataaggtattatcttgcaacttgttaaatatatttattcagacattggatgttgtatttttatgtattttttaaaatattaataaaatttaaaaaaagaaaattctaggttaattcactctttggatgacaatagctctcagctgtcctttttacaggaggttgcatcctgcagccttgcctgtgttaaagggagtctgtctcagtccatcaaacagtatagaactataaatgggcatctggatcattaaagtatgtccttgtttagaaactttggcagtcctagtatttaaactgttttgaggatcaaatttttggttgcccttaagatactttgtcacagtttttatgtttgctatactgccgaatgaatttatatctcccaaagttgagatgcaacaactaagtaaagcaactatgtatgctttgtctgtgaattgttccacagactgatagattttgtaaataattcttccaaaatcatgtatttaaagcagttttgcatatacattatgtaaaaaggtgattttataaaagcagtttttaaattcatgtttgtacattgaaaggggttttttttttaaacctccttttctgtgtttaatatgctgtagaataataacctagatgctctagactgtatatcaggatctgatttacaagaaaaagtcagagctaaacactagtgatggcatagcattactgaaatcattgtttcttaatttcattttactacattgtgaacttgtgattcagattccattttctcagagaattaaaaacaaaaaaagtactcttgtaaaatgcacttttctgtcttttctttgcaaagcagaagtatctcaatgtaaaataaaaatggagctcagtgggcagtattaataaaggccatgttttaaacata

SEQ ID NO: 133179 - DNA, 3774 bp, Artificial Sequence
  derived and/or modified sequence
atgaaggccgccgacgagcccgcctacctgaccgtgggcaccgacgtgagcgccaagtacagaggcgccttctgcgaggccaagatcaagaccgtgaagagactggtgaaggtgaaggtgctgctgaagcaggacaacaccacccagctggtgcaggacgaccaggtgaagggccccctgagagtgggcgccatcgtggagaccagaaccagcgacggcagcttccaggaggccatcatcagcaagctgaccgacgccagctggtacaccgtggtgttcgacgacggcgacgagagaaccctgagaagaaccagcctgtgcctgaagggcgagagacacttcgccgagagcgagaccctggaccagctgcccctgaccaaccccgagcacttcggcacccccgtgatcgccaagaagaccaacagaggcagaagaagcagcctgcccgtgaccgaggacgagaaggaggaggagagcagcgaggaggaggacgaggacaagagaagactgaacgacgagctgctgggcaaggtggtgagcgtggtgagcgccaccgagagaaccgagtggtaccccgccctggtgatcagccccagctgcaacgacgacatcaccgtgaagaaggaccagtgcctggtgagaagcttcatcgacagcaagttctacagcatcgccagaaaggacatcaaggaggtggacatcctgaacctgcccgagagcgagctgagcaccaagcccggcctgcagaaggccagcatcttcctgaagaccagagtggtgcccgacaactggaagatggacatcagcgagatcctggagagcagcagcagcgacgacgaggacggccccgccgaggagaacgacgaggagaaggagaaggaggccaagaagaccgaggaggaggtgcccgaggaggagctggaccccgaggagagagacaacttcctgcagcagctgtacaagttcatggaggacagaggcacccccatcaacaagccccccgtgctgggctacaaggacctgaacctgttcaagctgttcagactggtgtaccaccagggcggctgcgacaacatcgacagcggcgccgtgtggaagcagatctacatggacctgggcatccccatcctgaacagcgccgccagctacaacgtgaagaccgcctacagaaagtacctgtacggcttcgaggagtactgcagaagcgccaacatccagttcagaaccgtgcaccaccacgagcccaaggtgaaggaggagaagaaggacctggaggagagcatggaggaggccctgaagctggaccaggagatgcccctgaccgaggtgaagagcgagcccgaggagaacatcgacagcaacagcgagagcgagagagaggagatcgagctgaagagccccagaggcagaagaagaatcgccagagacgtgaacagcatcaagaaggagatcgaggaggagaagaccgaggacaagctgaaggacaacgacaccgagaacaaggacgtggacgacgactacgagaccgccgagaagaaggagaacgagctgctgctgggcagaaagaacacccccaagcagaaggagaagaagatcaagaagcaggaggacagcgacaaggacagcgacgaggaggaggagaagagccaggagagagaggagaccgagagcaagtgcgacagcgagggcgaggaggacgaggaggacatggagccctgcctgaccggcaccaaggtgaaggtgaagtacggcagaggcaagacccagaagatctacgaggccagcatcaagagcaccgagatcgacgacggcgaggtgctgtacctggtgcactactacggctggaacgtgagatacgacgagtgggtgaaggccgacagaatcatctggcccctggacaagggcggccccaagaagaagcagaagaagaaggccaagaacaaggaggacagcgagaaggacgagaagagagacgaggagagacagaagagcaagagaggcagaccccccctgaagagcaccctgagcagcaacatgccctacggcctgagcaagaccgccaacagcgagggcaagagcgacagctgcagcagcgacagcgagaccgaggacgccctggagaagaacctgatcaacgaggagctgagcctgaaggacgagctggagaagaacgagaacctgaacgacgacaagctggacgaggagaaccccaagatcagcgcccacatcctgaaggagaacgacagaacccagatgcagcccctggagaccctgaagctggaggtgggcgagaacgagcagatcgtgcagatcttcggcaacaagatggagaagaccgaggaggtgaagaaggaggccgagaagagccccaagggcaagggcagaagaagcaagaccaaggacctgagcctggagatcatcaagatcagcagcttcggccagaacgaggccggcagcgagccccacatcgaggcccacagcctggagctgagcagcctggacaacaagaacttcagcagcgccaccgaggacgagatcgaccagtgcgtgaaggagaagaagctgaagagaaagatcctgggccagagcagccccgagaagaagatcagaatcgagaacggcatggagatgaccaacaccgtgagccaggagagaaccagcgactgcatcggcagcgagggcatgaagaacctgaacttcgagcagcacttcgagagagagaacgagggcatgcccagcctgatcgccgagagcaaccagtgcatccagcagctgaccagcgagagattcgacagccccgccgaggagaccgtgaacatccccctgaaggaggacgaggacgccatgcccctgatcggccccgagaccctggtgtgccacgaggtggacctggacgacctggacgagaaggacaagaccagcatcgaggacgtggccgtggagagcagcgagagcaacagcctggtgagcatcccccccgccctgccccccgtggtgcagcacaacttcagcgtggccagccccctgaccctgagccaggacgagagcagaagcgtgaagagcgagagcgacatcaccatcgaggtggacagcatcgccgaggagagccaggagggcctgtgcgagagagagagcgccaacggcttcgagaccaacgtggccagcggcacctgcagcatcatcgtgcaggagagagagagcagagagaagggccagaagagacccagcgacggcaacagcggcctgatggccaagaagcagaagagaacccccaagagaaccagcgccgccgccaagaacgagaagaacggcaccggccagagcagcgacagcgaggacctgcccgtgctggacaacagcagcaagtgcacccccgtgaagcacctgaacgtgagcaagccccagaagctggccagaagccccgccagaatcagcccccacatcaaggacggcgagaaggacaagcacagagagaagcaccccaacagcagccccagaacctacaagtggagcttccagctgaacgagctggacaacatgaacagcaccgagagaatcagcttcctgcaggagaagctgcaggagatcagaaagtactacatgagcctgaagagcgaggtggccaccatcgacagaagaagaaagagactgaagaagaaggacagagaggtgagccacgccggcgccagcatgagcagcgccagcagcgacaccggcatgagccccagcagcagcagccccccccagaacgtgctggccgtggagtgcagatag

SEQ ID NO: 133180 - protein, 425 aa, Artificial Sequence
  derived and/or modified sequence
MASKEMFEDTVEERVINEEYKIWKKNTPFLYDLVMTHALQWPSLTVQWLPEVTKPEGKDYALHWLVLGTHTSDEQNHLVVARVHIPNDDAQFDASHCDSDKGEFGGFGSVTGKIECEIKINHEGEVNRARYMPQNPHIIATKTPSSDVLVFDYTKHPAKPDPSGECNPDLRLRGHQKEGYGLSWNSNLSGHLLSASDDHTVCLWDINAGPKEGKIVDAKAIFTGHSAVVEDVAWHLLHESLFGSVADDQKLMIWDTRSNTTSKPSHLVDAHTAEVNCLSFNPYSEFILATGSADKTVALWDLRNLKLKLHTFESHKDEIFQVHWSPHNETILASSGTDRRLNVWDLSKIGEEQSAEDAEDGPPELLFIHGGHTAKISDFSWNPNEPWVICSVSEDNIMQIWQMAENIYNDEESDVTTSELEGQGS

SEQ ID NO: 133181 - protein, 416 aa, Artificial Sequence
  derived and/or modified sequence
MASKEMFEDTVEERVINEEYKIWKKNTPFLYDLVMTHALQWPSLTVQWLPEVTKPEGKDYALHWLVLGTHTSDEQNHLVVARVHIPNDDAQFDASHCDSDKGGKIECEIKINHEGEVNRARYMPQNPHIIATKTPSSDVLVFDYTKHPAKPDPSGECNPDLRLRGHQKEGYGLSWNSNLSGHLLSASDDHTVCLWDINAGPKEGKIVDAKAIFTGHSAVVEDVAWHLLHESLFGSVADDQKLMIWDTRSNTTSKPSHLVDAHTAEVNCLSFNPYSEFILATGSADKTVALWDLRNLKLKLHTFESHKDEIFQVHWSPHNETILASSGTDRRLNVWDLSKIGEEQSAEDAEDGPPELLFIHGGHTAKISDFSWNPNEPWVICSVSEDNIMQIWQMAENIYNDEESDVTTSELEGQGS

SEQ ID NO: 133182 - DNA, 1278 bp, Artificial Sequence
  derived and/or modified sequence
atggcttctaaagagatgtttgaggacacagtcgaggaacgcgtcattaacgaagaatataagatttggaaaaaaaacacaccctttttgtatgatctggtcatgacacatgcactgcaatggccctcacttaccgtccagtggctgcctgaagtgacaaaacctgaaggcaaagactacgccctgcattggcttgtgttggggacacatacctctgatgagcagaaccatctcgtggtggctcgggtacatatacctaatgatgacgcacagtttgacgcatcacattgcgatagtgacaagggtgaatttggggggttcggctccgtcaccggaaaaattgagtgtgaaattaagataaaccacgaaggcgaggttaaccgcgccaggtacatgccccagaatccccatatcatcgcaacaaaaacccctagctccgatgtgctagtttttgattacacaaaacaccctgcgaaaccagacccaagtggcgaatgcaaccctgacttgagattgaggggtcatcaaaaagaaggctacggcttatcctggaactctaacctgtccggtcatctgctcagcgcaagcgatgatcataccgtgtgtttatgggacatcaacgctgggcctaaagaagggaagatcgtggacgcaaaggccattttcactggacacagtgcagtggttgaagacgtggcgtggcaccttctacacgagagcctcttcggctcggttgcggacgatcagaaactcatgatatgggacactaggtccaacacaacgagtaaaccgtcccacttggttgatgcgcataccgctgaggtgaactgtctctccttcaatccatattcggagtttatcctggccacaggctccgccgataagaccgttgccttatgggatctccgcaacctgaagctgaaactccatacatttgagtctcataaagacgaaatatttcaggtacactggtctccgcacaacgaaacgattctggctagttctggaacggaccgtcgcctgaacgtctgggatctgtcaaagataggcgaggagcagagtgccgaggacgctgaagacggccctcccgagctgctgtttattcacggcgggcacaccgccaagatttccgatttttcctggaaccccaatgagccttgggtaatatgttcggtgtcggaagacaacatcatgcagatctggcagatggccgaaaacatttataatgacgaagagtcggatgttaccacaagcgaactggagggacaaggctcgtag

SEQ ID NO: 133183 - DNA, 1251 bp, Artificial Sequence
  derived and/or modified sequence
atggcgtctaaggaaatgttcgaggacacagtggaggaacgtgtgatcaatgaggagtacaagatatggaagaagaacaccccgtttctgtacgacttggtgatgacccatgctctccagtggccatcattaactgtgcagtggctccccgaagtgacaaaaccagaagggaaagattatgccctccactggctggttttaggcacacatacgagcgacgagcaaaaccaccttgttgtggctagggtgcatatccctaacgatgatgctcagtttgatgcatctcattgtgactctgacaaaggggggaagatcgagtgtgaaataaaaatcaatcacgaaggtgaggtgaatagggcccgctatatgcctcagaaccctcatattatagcaacaaaaacaccctccagcgacgtgctggtgttcgattacaccaaacaccccgccaagccggacccctccggggaatgtaacccggatctgagattaagaggtcaccaaaaggaaggttacgggttatcctggaactctaatctgagcggacacctgctgagcgcaagcgacgatcacaccgtgtgcctgtgggacattaatgctggtcctaaggagggtaaaattgtggacgccaaagctatctttacgggtcatagcgcagtggtggaggatgttgcctggcacctgctgcatgagagtctctttggatcagtggcagacgatcagaaactgatgatttgggatactcgatcaaataccacgtccaagccctcccacctggtggatgcccatacggccgaagtgaactgtttgtcatttaacccctactccgagtttattctggcgacagggagcgctgacaagactgttgccctgtgggacctaaggaacctcaagctcaagctccatacattcgagtcacataaagacgaaatcttccaggtgcattggagccctcacaacgagaccattctggcctctagtggcacagataggcgtctgaatgtctgggatttatcaaaaattggagaagagcagtccgcggaggatgccgaggatggacctccagaactgctttttattcatggaggccacaccgcaaagatcagcgatttcagctggaaccctaacgagccgtgggtgatctgtagtgtctcagaagacaacatcatgcagatttggcagatggccgagaacatctacaacgatgaagaaagtgatgtaactaccagtgaattagagggtcagggcagctag

SEQ ID NO: 133184 - DNA, 1278 bp, Artificial Sequence
  derived and/or modified sequence
atggccagcaaggagatgtttgaggacacagtggaggagagggtcatcaatgaggagtacaagatctggaagaagaacacccccttcctgtatgacctggtgatgacccacgccctgcagtggcccagcctgactgtgcagtggctgcctgaggtgaccaagccagagggcaaggactatgccctgcactggctggtgctgggcacccacaccagtgatgagcagaaccacctggtggtggcccgggtgcacatccccaatgatgatgcccagtttgatgccagccactgtgacagcgacaagggggagtttggaggctttggatctgtgacaggcaagattgaatgtgagatcaagatcaaccacgagggggaggtgaacagagcccgctacatgccccagaacccccacatcatcgccaccaagacccccagcagtgatgtgctggtgtttgactacaccaagcacccagccaagccagaccccagcggggagtgcaacccagacctgcggctgcggggccaccagaaggagggctacggcctgtcctggaacagcaacctgagcggccacctgctgagcgccagtgatgaccacacagtgtgcctgtgggacatcaatgccggccccaaggagggcaagatcgtggatgccaaggccatcttcaccggccacagcgctgtggtggaggatgtggcctggcacctgctgcacgagagcctgtttggatctgtggctgatgaccagaagctgatgatctgggacaccaggagcaacaccaccagcaagcccagccacctggtggatgcccacacagctgaggtgaactgcctgtccttcaacccctacagcgagttcatcctggccaccggcagcgctgacaagacagtggccctgtgggacctgaggaacctgaagctgaagctgcacacctttgagagccacaaggatgagatcttccaggtgcactggagcccccacaatgagaccatcctggccagcagcggcacagaccggcggctgaatgtgtgggacctgagcaagattggagaggagcagagcgcagaagatgctgaagatggccccccagagctgctcttcatccatggaggccacacagccaagatcagtgacttctcctggaaccccaatgagccctgggtgatctgcagcgtgtctgaggacaacatcatgcagatctggcagatggccgagaacatctacaatgatgaggagagtgatgtgaccaccagcgagctggagggccagggcagctag

SEQ ID NO: 133185 - DNA, 1251 bp, Artificial Sequence
  derived and/or modified sequence
atggccagcaaggagatgtttgaggacacagtggaggagagggtcatcaatgaggagtacaagatctggaagaagaacacccccttcctgtatgacctggtgatgacccacgccctgcagtggcccagcctgactgtgcagtggctgcctgaggtgaccaagccagagggcaaggactatgccctgcactggctggtgctgggcacccacaccagtgatgagcagaaccacctggtggtggcccgggtgcacatccccaatgatgatgcccagtttgatgccagccactgtgacagcgacaagggcggcaagattgaatgtgagatcaagatcaaccatgaaggagaggtgaacagagcccgctacatgccccagaacccccacatcatcgccaccaagacccccagcagtgatgtgctggtgtttgactacaccaagcacccagccaagccagaccccagcggggagtgcaacccagacctgcggctgcggggccaccagaaggagggctacggcctgtcctggaacagcaacctgagcggccacctgctgagcgccagtgatgaccacacagtgtgcctgtgggacatcaatgccggccccaaggagggcaagatcgtggatgccaaggccatcttcaccggccacagcgctgtggtggaggatgtggcctggcacctgctgcacgagagcctgtttggatctgtggctgatgaccagaagctgatgatctgggacaccaggagcaacaccaccagcaagcccagccacctggtggatgcccacacagctgaggtgaactgcctgtccttcaacccctacagcgagttcatcctggccactggatctgctgacaagacagtggccctgtgggacctgaggaacctgaagctgaagctgcacacctttgagagccacaaggatgagatcttccaggtgcactggagcccccacaatgagaccatcctggccagcagcggcacagaccggcggctgaatgtgtgggacctgagcaagatcggggaggagcagagcgcagaagatgctgaagatggccccccagagctgctcttcatccacggcggccacacagccaagatcagtgacttctcctggaaccccaatgagccctgggtgatctgcagcgtgtctgaggacaacatcatgcagatctggcagatggccgagaacatctacaatgatgaggagagtgatgtgaccaccagcgagctggagggccagggcagctag

SEQ ID NO: 133186 - DNA, 1278 bp, Artificial Sequence
  derived and/or modified sequence
atggccagcaaggagatgttcgaggacaccgtggaggagcgggtgattaacgaggagtacaagatctggaagaaaaacactccctttctctatgacctggtgatgacccatgctctgcaatggccctcattgacagttcaatggctccccgaagtcaccaagcctgaagggaaagattacgcgctccattggttagtgctgggaacacacacctccgacgagcagaatcatttggtggtggcccgtgtgcatattcctaatgatgatgcccagttcgatgccagtcattgtgattccgacaagggtgagtttggtgggtttgggtccgtaacagggaagattgagtgcgagatcaagattaaccacgaaggggaggtgaaccgcgctagatatatgccccagaacccacacattatagccacaaaaacccccagtagtgatgttttggtgtttgactatacaaaacacccagccaagccggatcccagtggtgagtgtaacccggacttacgtctgcggggccatcagaaagagggatatggcctttcctggaattccaatctttcagggcacctcctgagtgcatcagacgaccacaccgtttgtctgtgggacattaatgcgggacctaaagagggaaaaattgtggatgccaaggctatcttcaccgggcactcagccgtcgttgaagatgtggcctggcatttactacacgagtccctctttgggagcgtggcagatgatcagaagcttatgatctgggatactcggagcaacactacctctaagcctagtcacctagtcgatgcccacacagcagaagtgaactgtctatcattcaatccttatagcgaatttatccttgcaacaggaagcgccgataagactgttgctctctgggacctacgcaatctgaaactgaagctccatacatttgaatcgcacaaggatgaaatattccaggtccattggtctccccacaatgaaaccatcctagcatcttctggcacggatcggaggttaaacgtgtgggacttgtctaagatcggcgaagaacaatcagcagaggatgcagaggatggacctcctgagttacttttcatacacggaggacacactgccaagatttctgacttctcctggaatcccaatgagccttgggtgatatgttcggtttctgaggataatataatgcaaatttggcagatggctgaaaacatctacaacgatgaggagtccgatgtgacaacatcagaactggagggccagggatcctag

SEQ ID NO: 133187 - DNA, 1251 bp, Artificial Sequence
  derived and/or modified sequence
atggccagcaaggagatgttcgaggacaccgtggaggagcgggtgatcaacgaagagtataagatttggaaaaagaacacacccttcctctacgaccttgttatgacccatgccctccagtggccctccctgaccgtccagtggctacccgaagtcacaaaacccgaggggaaggactacgcgctccactggctggtgctgggtacacatacctccgacgagcagaaccacctcgtcgtggcgcgggtgcacatccccaatgacgatgcacagtttgacgcctcccactgtgattccgacaaaggcgggaagatcgagtgcgaaattaagattaaccacgagggcgaggtcaaccgggcgcgctatatgcctcaaaatccccatatcattgccacaaaaactccttcctcagacgtactggtcttcgactatactaaacacccggctaaaccggacccgtctggagaatgtaaccctgatctccgcctgcggggacatcagaaggagggatatggtctgagttggaacagcaatttgagcgggcatttgctgtctgccagcgatgaccacactgtatgcctctgggatatcaatgccggccccaaagaaggtaagatcgtcgacgcaaaggctattttcactgggcactcggccgtggtcgaggacgtggcatggcaccttttgcatgaatccttatttgggtcggtcgccgacgatcagaagctcatgatctgggacactcggtccaacaccacatcgaagcccagccacttggtcgacgcgcacaccgccgaggtcaattgcttaagtttcaatccgtacagtgaattcattctggccacagggtccgcagacaaaaccgtggctctatgggatcttcgcaaccttaagctaaaactccacacctttgaatcacataaggatgagatttttcaagtccactggtctcctcacaacgagacaatcttagcaagcagcgggacagaccggcgcctgaatgtatgggatctctcaaaaatcggtgaggagcagtcagctgaagacgccgaggacgggccacccgaactcctgtttatacatggagggcatacagccaaaatatccgacttctcatggaaccccaatgagccatgggttatctgctctgtgagcgaagacaatatcatgcaaatttggcagatggccgagaatatttataatgacgaggaaagcgatgtgaccacgagcgagttggagggccagggctcttag

SEQ ID NO: 133188 - DNA, 1278 bp, Artificial Sequence
  derived and/or modified sequence
atggcgtccaaagaaatgtttgaagacactgtcgaggaacgcgtgataaatgaagagtataagatctggaagaagaacactccttttttatatgatctggtgatgacgcatgcactgcaatggccaagcctgactgtgcagtggctacctgaggtgactaagccagagggcaaagactatgctctgcactggctggtgctggggacacacacaagtgatgagcaaaaccatctagtcgttgctcgggtgcacataccaaacgacgacgcacagttcgacgcatcccactgcgactcggacaagggagagttcggcggattcggaagtgttaccggcaaaatcgagtgtgaaatcaagattaaccatgaaggcgaggtcaaccgggcacgctacatgccccagaatccacacatcatagcaactaagacaccttcctcagacgtgctcgtgtttgactacaccaaacatcctgcgaagcctgatccgagcggggagtgtaaccccgatcttcggcttagagggcaccagaaagagggttacggcctgtcatggaacagtaacttgtccgggcacctcctatctgcctcagacgatcataccgtttgtctttgggacataaacgcgggtcccaaggagggcaagatagtcgatgctaaagccatttttactggtcactcagcagtggtcgaggacgtggcctggcatctgcttcacgaatcactattcggcagtgtggctgacgatcagaagctgatgatctgggataccaggtccaatacaacttccaagccctcacatctcgtggatgcgcacactgctgaagtgaattgcttgtcttttaacccttacagtgaattcatcctggcaaccgggtcagccgacaaaactgtggccttgtgggaccttcggaatcttaaactgaagctgcatactttcgagtctcataaagatgaaatctttcaggtccactggagtccccacaacgagaccatactggcctcctcaggcacagataggcggttaaacgtgtgggacctgagcaagattggagaggaacagtccgccgaggacgccgaggatgggccacccgaacttctctttattcatggtgggcacactgctaaaattagtgacttctcctggaatccgaacgagccatgggtgatctgctctgtgtccgaggataatatcatgcagatctggcaaatggcggaaaatatctacaacgatgaggagtccgacgtcacaactagcgagttagaggggcaaggaagctag

SEQ ID NO: 133189 - DNA, 1251 bp, Artificial Sequence
  derived and/or modified sequence
atggccagcaaagagatgtttgaggatactgtggaggagagggtgatcaacgaggaatacaaaatctggaaaaaaaacacgccctttctgtatgacctggtaatgacccacgcactgcagtggccctcactgacggtccagtggctgcccgaggtgaccaagcctgagggcaaagattatgctctccactggctggtcctgggaacacataccagcgacgaacaaaaccacctggtcgtggccagggtgcacataccaaatgacgacgcgcagttcgatgcctcccattgtgatagtgataagggtggcaaaatcgagtgtgagattaagatcaaccacgaaggagaggtgaacagggccagatacatgccccagaacccacatattattgcaacgaagaccccaagttctgatgtcctagtttttgattacaccaagcaccctgcgaaaccggatccctccggcgagtgcaacccagacctgcgtttgcgagggcatcagaaggagggctacggcctatcttggaactcaaacctgtccggccacctgctgtcagcctcagatgatcacacggtttgcctgtgggatatcaatgctggaccaaaagaggggaagatcgtagacgctaaggctatctttacaggccactctgccgtggtggaagacgtggcatggcacctcctccatgagtccctatttggctcggtggccgacgaccagaaactaatgatctgggacactagaagcaacacaacctccaagccatcccatcttgttgacgcccacaccgcggaagtcaactgcctctcgtttaatccctacagcgaatttatactagccactggctcagccgataagacagttgccctgtgggacctgagaaaccttaaactgaagctgcatacctttgagagccacaaagacgagatattccaggtccattggtctccccacaatgaaacaattctagccagttccgggacggacaggcgcctgaacgtttgggacctgtctaaaataggcgaggagcaatctgctgaagatgctgaagacggcccaccggagctgctcttcatccatggcggtcatacagccaaaatcagtgactttagctggaatccaaatgagccttgggtaatctgcagtgtgagtgaggataatattatgcagatttggcaaatggccgagaatatttacaatgatgaagaaagtgatgtcacaaccagcgagctggagggccaggggtcttag

SEQ ID NO: 133190 - DNA, 2333 bp, Artificial Sequence
  derived and/or modified sequence
ggtctcggcgccggagccgttggctcccagacccgcctctccgcctcctctcacttttcccagggcggatgcgcctgcgctcagctgcctgggcgggctgggaggcgcgggttgaaaagtctcgttccaagtttggagagagagagaagagcgcctcagacctcggtacccgcgagcggggaggaggcaggaaagaaggacgcggcgtctggggagcacccaggcagcaagacggggcccgggctttcgacagtggggagtgtgacgcgcttgggaaaggcaggagcgccagcggtcgggctgctcttggctaacgagaggagtccgaggcggcggcgaggggcgaacgacccgacgcaagatggcgagtaaagagatgtttgaagatactgtggaggagcgtgtcatcaatgaagaatataaaatctggaagaagaatacaccgtttctatatgacctggttatgacccatgctcttcagtggcccagtcttaccgttcagtggcttcctgaagtgactaaacctgaaggaaaagattatgcccttcattggctagtgctggggactcatacgtctgatgagcagaatcatctggtggttgctcgagtacatattcccaatgatgatgcacagtttgatgcttcccattgtgacagtgacaagggtgaatttggtggctttggttctgtaacaggaaaaattgaatgtgaaattaaaatcaatcacgaaggagaagtaaaccgtgctcgttacatgccgcagaatcctcacatcattgctacaaaaacaccatcttctgatgtgttggtttttgactatacaaaacaccctgctaaaccagacccaagtggagaatgtaatcctgatctcagattaagaggtcaccagaaggaaggctatggtctctcctggaattcaaatttgagtggacatctcctaagtgcatctgatgaccatactgtttgtctgtgggatataaacgcaggaccaaaagaaggcaaaattgtggatgctaaagccatctttactggccactcagctgttgtagaggatgtggcctggcacctgctgcacgagtcattgtttggatctgttgctgatgatcagaaacttatgatatgggacaccaggtccaataccacctccaagccgagtcacttggtggatgcgcacactgccgaagtcaactgcctctcattcaatccctacagcgaatttattctagccaccggctctgcggataagaccgtagctttatgggatctgcgtaacttaaaattaaaactccataccttcgaatctcataaagatgaaattttccaggtccactggtctccacataatgaaactattctggcttcaagtggtactgaccgccgcctgaatgtgtgggatttaagtaaaattggggaagaacaatcagcagaagatgcagaagatgggcctccagaactcctgtttattcatggaggacacactgctaagatttcagattttagctggaaccccaatgagccttgggtcatttgctcagtgtctgaggataacatcatgcagatatggcaaatggctgaaaatatttacaatgatgaagagtcagatgtcacgacatccgaactggagggacaaggatcttaaacccaaagtacgagaaatgtttctgttgaatgtaatgctacatgaatgcttgatttatcaagcgccaaaaaggcattgtatagtaggaaatgtaagtggggtggcttatggcttctttatcctctgattctagcactttcaagtgagctgttgcgtactgtatcatattgtagctattagggaagagaagaatgttgcttaagaaagaacatcaccattgattttaaatacaagtagcagggtattgcctttgattcaactgttttaagtcctcattttctcaaactaagtgcttgctgttcccaaatatgcaagaataacttttacactttttccttccaacacttcttgattggctttgcagaaataaagttttaaaataaaacttgtgtttttttaaaagcttagtgggggggggcgggggagtctactttttgagtagaaatgggtaaaatggtacctttggactcctacagttaaggtcacatggataatgaaagaatacacagaagctgttaagtttatcatacatatttacttaatctatacagaatcaagtagataaaatcagattcacattagtgaaaaatctctacaaaatgtctttgaaaagcaaaacgagactgcctcttaacaattcgtatcctcatgaaagacgtgggctgtaaaaataaagcagtgtgtttagcacaaa

SEQ ID NO: 133191 - DNA, 1904 bp, Artificial Sequence
  derived and/or modified sequence
cttttcccagggcggatgcgcctgcgctcagctgcctgggcgggctgggaggcgcgggttgaaaagtctcgttccaagtttggagagagagagaagagcgcctcagacctcggtacccgcgagcggggaggaggcaggaaagaaggacgcggcgtctggggagcacccaggcagcaagacggggcccgggctttcgacagtggggagtgtgacgcgcttgggaaaggcaggagcgccagcggtcgggctgctcttggctaacgagaggagtccgaggcggcggcgaggggcgaacgacccgacgcaagatggcgagtaaagagatgtttgaagatactgtggaggagcgtgtcatcaatgaagaatataaaatctggaagaagaatacaccgtttctatatgacctggttatgacccatgctcttcagtggcccagtcttaccgttcagtggcttcctgaagtgactaaacctgaaggaaaagattatgcccttcattggctagtgctggggactcatacgtctgatgagcagaatcatctggtggttgctcgagtacatattcccaatgatgatgcacagtttgatgcttcccattgtgacagtgacaagggtggaaaaattgaatgtgaaattaaaatcaatcacgaaggagaagtaaaccgtgctcgttacatgccgcagaatcctcacatcattgctacaaaaacaccatcttctgatgtgttggtttttgactatacaaaacaccctgctaaaccagacccaagtggagaatgtaatcctgatctcagattaagaggtcaccagaaggaaggctatggtctctcctggaattcaaatttgagtggacatctcctaagtgcatctgatgaccatactgtttgtctgtgggatataaacgcaggaccaaaagaaggcaaaattgtggatgctaaagccatctttactggccactcagctgttgtagaggatgtggcctggcacctgctgcacgagtcattgtttggatctgttgctgatgatcagaaacttatgatatgggacaccaggtccaataccacctccaagccgagtcacttggtggatgcgcacactgccgaagtcaactgcctctcattcaatccctacagcgaatttattctagccaccggctctgcggataagaccgtagctttatgggatctgcgtaacttaaaattaaaactccataccttcgaatctcataaagatgaaattttccaggtccactggtctccacataatgaaactattctggcttcaagtggtactgaccgccgcctgaatgtgtgggatttaagtaaaattggggaagaacaatcagcagaagatgcagaagatgggcctccagaactcctgtttattcatggaggacacactgctaagatttcagattttagctggaaccccaatgagccttgggtcatttgctcagtgtctgaggataacatcatgcagatatggcaaatggctgaaaatatttacaatgatgaagagtcagatgtcacgacatccgaactggagggacaaggatcttaaacccaaagtacgagaaatgtttctgttgaatgtaatgctacatgaatgcttgatttatcaagcgccaaaaaggcattgtatagtaggaaatgtaagtggggtggcttatggcttctttatcctctgattctagcactttcaagtgagctgttgcgtactgtatcatattgtagctattagggaagagaagaatgttgcttaagaaagaacatcaccattgattttaaatacaagtagcagggtattgcctttgattcaactgttttaagtcctcattttctcaaactaagtgcttgctgttcccaaatatgcaagaataacttttacactttttccttccaacac

SEQ ID NO: 133192 - DNA, 1278 bp, Artificial Sequence
  derived and/or modified sequence
atggccagcaaggagatgttcgaggacaccgtggaggagagagtgatcaacgaggagtacaagatctggaagaagaacacccccttcctgtacgacctggtgatgacccacgccctgcagtggcccagcctgaccgtgcagtggctgcccgaggtgaccaagcccgagggcaaggactacgccctgcactggctggtgctgggcacccacaccagcgacgagcagaaccacctggtggtggccagagtgcacatccccaacgacgacgcccagttcgacgccagccactgcgacagcgacaagggcgagttcggcggcttcggcagcgtgaccggcaagatcgagtgcgagatcaagatcaaccacgagggcgaggtgaacagagccagatacatgccccagaacccccacatcatcgccaccaagacccccagcagcgacgtgctggtgttcgactacaccaagcaccccgccaagcccgaccccagcggcgagtgcaaccccgacctgagactgagaggccaccagaaggagggctacggcctgagctggaacagcaacctgagcggccacctgctgagcgccagcgacgaccacaccgtgtgcctgtgggacatcaacgccggccccaaggagggcaagatcgtggacgccaaggccatcttcaccggccacagcgccgtggtggaggacgtggcctggcacctgctgcacgagagcctgttcggcagcgtggccgacgaccagaagctgatgatctgggacaccagaagcaacaccaccagcaagcccagccacctggtggacgcccacaccgccgaggtgaactgcctgagcttcaacccctacagcgagttcatcctggccaccggcagcgccgacaagaccgtggccctgtgggacctgagaaacctgaagctgaagctgcacaccttcgagagccacaaggacgagatcttccaggtgcactggagcccccacaacgagaccatcctggccagcagcggcaccgacagaagactgaacgtgtgggacctgagcaagatcggcgaggagcagagcgccgaggacgccgaggacggcccccccgagctgctgttcatccacggcggccacaccgccaagatcagcgacttcagctggaaccccaacgagccctgggtgatctgcagcgtgagcgaggacaacatcatgcagatctggcagatggccgagaacatctacaacgacgaggagagcgacgtgaccaccagcgagctggagggccagggcagctag

SEQ ID NO: 133193 - DNA, 1251 bp, Artificial Sequence
  derived and/or modified sequence
atggccagcaaggagatgttcgaggacaccgtggaggagagagtgatcaacgaggagtacaagatctggaagaagaacacccccttcctgtacgacctggtgatgacccacgccctgcagtggcccagcctgaccgtgcagtggctgcccgaggtgaccaagcccgagggcaaggactacgccctgcactggctggtgctgggcacccacaccagcgacgagcagaaccacctggtggtggccagagtgcacatccccaacgacgacgcccagttcgacgccagccactgcgacagcgacaagggcggcaagatcgagtgcgagatcaagatcaaccacgagggcgaggtgaacagagccagatacatgccccagaacccccacatcatcgccaccaagacccccagcagcgacgtgctggtgttcgactacaccaagcaccccgccaagcccgaccccagcggcgagtgcaaccccgacctgagactgagaggccaccagaaggagggctacggcctgagctggaacagcaacctgagcggccacctgctgagcgccagcgacgaccacaccgtgtgcctgtgggacatcaacgccggccccaaggagggcaagatcgtggacgccaaggccatcttcaccggccacagcgccgtggtggaggacgtggcctggcacctgctgcacgagagcctgttcggcagcgtggccgacgaccagaagctgatgatctgggacaccagaagcaacaccaccagcaagcccagccacctggtggacgcccacaccgccgaggtgaactgcctgagcttcaacccctacagcgagttcatcctggccaccggcagcgccgacaagaccgtggccctgtgggacctgagaaacctgaagctgaagctgcacaccttcgagagccacaaggacgagatcttccaggtgcactggagcccccacaacgagaccatcctggccagcagcggcaccgacagaagactgaacgtgtgggacctgagcaagatcggcgaggagcagagcgccgaggacgccgaggacggcccccccgagctgctgttcatccacggcggccacaccgccaagatcagcgacttcagctggaaccccaacgagccctgggtgatctgcagcgtgagcgaggacaacatcatgcagatctggcagatggccgagaacatctacaacgacgaggagagcgacgtgaccaccagcgagctggagggccagggcagctag

SEQ ID NO: 133194 - protein, 1068 aa, Artificial Sequence
  derived and/or modified sequence
MFEDKPHAEGAAVVAAAGEALQALCQELNLDEGSAAEALDDFTAIRGNYSLEGEVTHWLACSLYVACRKSIIPTVGKGIMEGNCVSLTRILRSAKLSLIQFFSKMKKWMDMSNLPQEFRERIERLERNFEVSTVIFKKYEPIFLDIFQNPYEEPPKLPRSRKQRRIPCSVKDLFNFCWTLFVYTKGNFRMIGDDLVNSYHLLLCCLDLIFANAIMCPNRQDLLNPSFKGLPSDFHTADFTASEEPPCIIAVLCELHDGLLVEAKGIKEHYFKPYISKLFDRKILKGECLLDLSSFTDNSKAVNKEYEEYVLTVGDFDERIFLGADAEEEIGTPRKFTRDTPLGKLTAQANVEYNLQQHFEKKRSFAPSTPLTGRRYLREKEAVITPVASATQSVSRLQSIVAGLKNAPSDQLINIFESCVRNPVENIMKILKGIGETFCQHYTQSTDEQPGSHIDFAVNRLKLAEILYYKILETVMVQETRRLHGMDMSVLLEQDIFHRSLMACCLEIVLFAYSSPRTFPWIIEVLNLQPFYFYKVIEVVIRSEEGLSRDMVKHLNSIEEQILESLAWSHDSALWEALQVSANKVPTCEEVIFPNNFETGNGGNVQGHLPLMPMSPLMHPRVKEVRTDSGSLRRDMQPLSPISVHERYSSPTAGSAKRRLFGEDPPKEMLMDKIITEGTKLKIAPSSSITAENVSILPGQTLLTMATAPVTGTTGHKVTIPLHGVANDAGEITLIPLSMNTNQESKVKSPVSLTAHSLIGASPKQTNLTKAQEVHSTGINRPKRTGSLALFYRKVYHLASVRLRDLCLKLDVSNELRRKIWTCFEFTLVHCPDLMKDRHLDQLLLCAFYIMAKVTKEERTFQEIMKSYRNQPQANSHVYRSVLLKSIPREVVAYNKNINDDFEMIDCDLEDATKTPDCSSGPVKEERGDLIKFYNTIYVGRVKSFALKYDLANQDHMMDAPPLSPFPHIKQQPGSPRRISQQHSIYISPHKNGSGLTPRSALLYKFNGSPSKSLKDINNMIRQGEQRTKKRVIAIDSDAESPAKRVCQENDDVLLKRLQDVVSERANH

SEQ ID NO: 133195 - DNA, 4270 bp, Artificial Sequence
  derived and/or modified sequence
gcaggtggttgtgggtagcgcgcctgggagggagaaagaagtcgggggccgtggcgcgcagcccgcggggcctgaagggatgttcgaggacaagccccacgctgagggggcggcggtggtcgccgcagccggggaggcgctacaggccctgtgccaggagctgaacctggacgaggggagcgcggccgaagccctggacgactttactgccatccgaggcaactacagcctagagggagaagttacacactggttggcatgttcattatatgttgcatgccgcaaaagcattattcccacggttggaaagggtatcatggaaggcaactgtgtttcacttaccagaatactacgttcagctaaattaagtttaatacaattttttagtaaaatgaagaaatggatggacatgtcaaatctaccacaagaatttcgtgaacgtatagaaaggctagagagaaattttgaggtgtctactgtaatattcaaaaaatatgagccaatttttttagatatatttcaaaatccatatgaagaaccaccaaagttaccacgaagccggaagcagaggaggattccttgcagtgttaaggatctgtttaatttctgttggacactttttgtttatactaagggtaattttcggatgattggggatgacttagtaaactcttatcatttacttctatgctgcttggatctgatttttgccaatgcgattatgtgcccaaatagacaagacttgctaaatccatcatttaaaggtttaccatctgattttcatactgctgactttacggcttctgaagagccaccctgcatcattgctgtactgtgtgaactgcatgatggacttctcgtagaagcaaaaggaataaaggagcactactttaagccatatatttcaaaactctttgacaggaagatattaaaaggagaatgcctcctggacctttcaagttttactgataatagcaaagcagtgaataaggagtatgaagagtatgttctaactgttggtgattttgatgagaggatctttttgggagcagacgcagaagaggaaattggaacacctcgaaagttcactcgtgacaccccattagggaaactgacagcacaggctaatgtggagtataaccttcaacagcactttgaaaaaaaaaggtcatttgcaccttctaccccactgaccggacggagatatttacgagaaaaagaagcagtcattactcctgttgcatcagccacccaaagtgtgagccggttacagagtattgtggctggtctgaaaaatgcaccaagtgaccaacttataaatatttttgaatcttgtgtgcgtaatcctgtggaaaacattatgaaaatactaaaaggaataggagagactttctgtcaacactatactcaatcaacagatgaacagccaggatctcacatagactttgctgtaaacagactaaagctggcagaaattttgtattataaaatactagagactgtaatggttcaggaaacacgaagacttcatggaatggacatgtcagttcttttagagcaagatatatttcatcgttccttgatggcttgttgtttggaaattgtgctctttgcctatagctcacctcgtacttttccttggattattgaagttctcaacttgcaaccattttacttttataaggttattgaggtggtgatccgctcagaagaggggctctcaagggacatggtgaaacacctaaacagcattgaagaacagattttggagagtttagcatggagtcacgattctgcactgtgggaggctctccaggtttctgcaaacaaagttcctacctgtgaagaagttatattcccaaataactttgaaacaggaaatggaggaaatgtgcagggacatcttcccctgatgccaatgtctcctctaatgcacccaagagtcaaggaagttcgaactgacagtgggagtcttcgaagagatatgcaaccattgtctccaatttctgtccatgaacgctacagttctcctaccgcagggagtgctaagagaagactctttggagaggaccccccaaaggaaatgcttatggacaagatcataacagaaggaacaaaattgaaaatcgctccttcttcaagcattactgctgaaaatgtatcaattttacctggtcaaactcttctaacaatggccacagccccagtaacaggaacaacaggacataaagttacaattccattacatggtgtcgcaaatgatgctggagagatcacactgatacctctttccatgaatacaaatcaggagtccaaagtcaagagtcctgtatcacttactgctcattcattaattggtgcttctccaaaacagaccaatctgactaaagcacaagaggtacattcaactggaataaacaggccaaagagaactgggtccttagcactattttacagaaaggtctatcatttggcaagtgtacgcttacgtgatctatgtctaaaactggatgtttcaaatgagttacgaaggaagatatggacgtgttttgaattcactttagttcactgtcctgatctaatgaaagacaggcatttggatcagctcctcctttgtgccttttatatcatggcaaaggtaacaaaagaagaaagaacttttcaagaaattatgaaaagttataggaatcagccccaagctaatagtcacgtatatagaagtgttctgctgaaaagtattccaagagaagttgtggcatataataaaaatataaatgatgactttgaaatgatagattgtgacttagaagatgctacaaaaacacctgactgttccagtggaccagtgaaagaggaaagaggtgatcttataaaattttacaatacaatatatgtaggaagagtgaagtcatttgcactgaaatacgacttggcgaatcaggaccatatgatggatgctccaccactctctccttttccacatattaaacaacagccaggctcaccacgccgcatttcccagcagcactccatttatatttccccgcacaagaatgggtcaggccttacaccaagaagcgctctgctgtacaagttcaatggcagcccttctaagagtttgaaagatatcaacaacatgataaggcaaggtgagcagagaaccaagaagcgagtaatagccatcgatagtgatgcagaatcccctgccaaacgcgtctgtcaagaaaatgatgacgttttactgaaacgactacaggatgttgtcagtgaaagagcaaatcattaatgttgttcttgtttctatgataaaagcactttcagattgttctgcagaaagttggagctctgtccttcaaaccttttagccctatagatgataaatatcactgggttataagaaaaaattgcacaaaaattatgtgctttttaaaatatttatccaaaatgtagttgacagagatgtattttgagttggattggaaaggaatattttaagtgccttttaaaaatactaatagtccggccaggcgctgtggctcacgcctgtaatcccaggactttgggaggccaaggcgggcagatcaccggaggtcaggagttcgagaccagcctgaccaacatggagaaaccccatctctactaaaaatacaaaattagccgggtgtggtggcgcatgcctgtaatcccagctacttgggaggctgaggcagaattgcttgaacccaggaagcggaggttgtggtgagccaaggttgcgccactgcactccagcctgggcaacaagagtaaaactccatctcaaaaaatatatatatatatataaatagggaattttttttaatgtttgctccttgagttttcaagatgaaataaggagaaaccccataactttttagctctcttttaaaaataaatgtctccttctgtgttctgtaatatgaggataaataatctacttttgatagcatgctttgagatatttgtattcttaatttaatattgaaggaaggggttggttcccatagtacctggccagagggttatataccatcctgtctctggcccactgtggtaattccacatccaggtaccaccgccattcagagttgtctcaccccttctcgtgccttttctctccttgagctttataaacagatttgtacctgagccccagtgctacactcatccttgctttccagccctaagccatctcagcctgatgtcacaacccaataaatggggcactttcttcttttgtaaactattatca

SEQ ID NO: 133196 - DNA, 3207 bp, Artificial Sequence
  derived and/or modified sequence
atgttcgaggacaagccccacgccgagggcgccgccgtggtggccgccgccggcgaggccctgcaggccctgtgccaggagctgaacctggacgagggcagcgccgccgaggccctggacgacttcaccgccatcagaggcaactacagcctggagggcgaggtgacccactggctggcctgcagcctgtacgtggcctgcagaaagagcatcatccccaccgtgggcaagggcatcatggagggcaactgcgtgagcctgaccagaatcctgagaagcgccaagctgagcctgatccagttcttcagcaagatgaagaagtggatggacatgagcaacctgccccaggagttcagagagagaatcgagagactggagagaaacttcgaggtgagcaccgtgatcttcaagaagtacgagcccatcttcctggacatcttccagaacccctacgaggagccccccaagctgcccagaagcagaaagcagagaagaatcccctgcagcgtgaaggacctgttcaacttctgctggaccctgttcgtgtacaccaagggcaacttcagaatgatcggcgacgacctggtgaacagctaccacctgctgctgtgctgcctggacctgatcttcgccaacgccatcatgtgccccaacagacaggacctgctgaaccccagcttcaagggcctgcccagcgacttccacaccgccgacttcaccgccagcgaggagcccccctgcatcatcgccgtgctgtgcgagctgcacgacggcctgctggtggaggccaagggcatcaaggagcactacttcaagccctacatcagcaagctgttcgacagaaagatcctgaagggcgagtgcctgctggacctgagcagcttcaccgacaacagcaaggccgtgaacaaggagtacgaggagtacgtgctgaccgtgggcgacttcgacgagagaatcttcctgggcgccgacgccgaggaggagatcggcacccccagaaagttcaccagagacacccccctgggcaagctgaccgcccaggccaacgtggagtacaacctgcagcagcacttcgagaagaagagaagcttcgcccccagcacccccctgaccggcagaagatacctgagagagaaggaggccgtgatcacccccgtggccagcgccacccagagcgtgagcagactgcagagcatcgtggccggcctgaagaacgcccccagcgaccagctgatcaacatcttcgagagctgcgtgagaaaccccgtggagaacatcatgaagatcctgaagggcatcggcgagaccttctgccagcactacacccagagcaccgacgagcagcccggcagccacatcgacttcgccgtgaacagactgaagctggccgagatcctgtactacaagatcctggagaccgtgatggtgcaggagaccagaagactgcacggcatggacatgagcgtgctgctggagcaggacatcttccacagaagcctgatggcctgctgcctggagatcgtgctgttcgcctacagcagccccagaaccttcccctggatcatcgaggtgctgaacctgcagcccttctacttctacaaggtgatcgaggtggtgatcagaagcgaggagggcctgagcagagacatggtgaagcacctgaacagcatcgaggagcagatcctggagagcctggcctggagccacgacagcgccctgtgggaggccctgcaggtgagcgccaacaaggtgcccacctgcgaggaggtgatcttccccaacaacttcgagaccggcaacggcggcaacgtgcagggccacctgcccctgatgcccatgagccccctgatgcaccccagagtgaaggaggtgagaaccgacagcggcagcctgagaagagacatgcagcccctgagccccatcagcgtgcacgagagatacagcagccccaccgccggcagcgccaagagaagactgttcggcgaggacccccccaaggagatgctgatggacaagatcatcaccgagggcaccaagctgaagatcgcccccagcagcagcatcaccgccgagaacgtgagcatcctgcccggccagaccctgctgaccatggccaccgcccccgtgaccggcaccaccggccacaaggtgaccatccccctgcacggcgtggccaacgacgccggcgagatcaccctgatccccctgagcatgaacaccaaccaggagagcaaggtgaagagccccgtgagcctgaccgcccacagcctgatcggcgccagccccaagcagaccaacctgaccaaggcccaggaggtgcacagcaccggcatcaacagacccaagagaaccggcagcctggccctgttctacagaaaggtgtaccacctggccagcgtgagactgagagacctgtgcctgaagctggacgtgagcaacgagctgagaagaaagatctggacctgcttcgagttcaccctggtgcactgccccgacctgatgaaggacagacacctggaccagctgctgctgtgcgccttctacatcatggccaaggtgaccaaggaggagagaaccttccaggagatcatgaagagctacagaaaccagccccaggccaacagccacgtgtacagaagcgtgctgctgaagagcatccccagagaggtggtggcctacaacaagaacatcaacgacgacttcgagatgatcgactgcgacctggaggacgccaccaagacccccgactgcagcagcggccccgtgaaggaggagagaggcgacctgatcaagttctacaacaccatctacgtgggcagagtgaagagcttcgccctgaagtacgacctggccaaccaggaccacatgatggacgccccccccctgagccccttcccccacatcaagcagcagcccggcagccccagaagaatcagccagcagcacagcatctacatcagcccccacaagaacggcagcggcctgacccccagaagcgccctgctgtacaagttcaacggcagccccagcaagagcctgaaggacatcaacaacatgatcagacagggcgagcagagaaccaagaagagagtgatcgccatcgacagcgacgccgagagccccgccaagagagtgtgccaggagaacgacgacgtgctgctgaagagactgcaggacgtggtgagcgagagagccaaccactag

SEQ ID NO: 133197 - DNA, 3207 bp, Artificial Sequence
  derived and/or modified sequence
atgtttgaagacaagccgcatgccgaaggcgctgctgtggtagccgccgccggagaagcattgcaagcgctgtgccaggagctgaacttggacgagggcagtgcagccgaggcgctggatgattttaccgccatccgaggcaattatagtttagaaggcgaagtgactcactggctcgcttgttcactgtatgtggcctgccgaaaatctattatcccaaccgtgggtaaaggcattatggagggaaattgcgtgagtctcacaaggatattgaggtctgctaaactgagcctaatacagttcttttctaagatgaaaaagtggatggatatgtctaacctgccacaggagttcagagagcggatagagcgactcgagagaaatttcgaagtgtcgactgtgattttcaagaagtacgaaccaattttcctcgatatctttcagaatccctatgaggagcctccaaagctgcctcgtagcagaaagcagcgtcgcatcccctgtagcgtcaaggacctgttcaatttttgttggacgcttttcgtctacactaaaggaaatttccgcatgatcggggatgacttggttaattcttatcacctgcttctgtgttgcctagatctaatcttcgccaacgcaatcatgtgtcctaatcgccaagacctgctgaatccatccttcaaaggactaccatctgattttcacaccgccgactttacggcatccgaggagcctccatgcatcattgcggtgttgtgcgagcttcatgatgggttattagttgaagccaaaggcataaaggagcactattttaaaccttacatctctaagctatttgaccggaaaatcctgaagggtgaatgcttgctggatctctcctcgtttaccgacaacagtaaagccgtgaacaaagaatatgaagagtatgtgctgaccgtgggagacttcgacgagcggatttttctcggggctgatgcggaggaggaaatcggcacccctcgaaagttcacccgggacaccccactgggcaaattgaccgcacaggcgaacgtggaatataatttacagcagcatttcgagaaaaagcggtcattcgcccccagcacccctctgaccggacgccgctatctgcgcgaaaaagaggcagtcattacccctgtcgcctcagcaactcaatcagtatcccgccttcagtctatcgtggccggactgaaaaacgctccatccgaccaactgatcaacatatttgagtcatgtgtccgaaacccggtcgaaaacatcatgaaaattcttaaggggattggggaaactttctgccagcactatacacaatctactgatgagcaacccggcagccacatagattttgccgtgaaccggttgaagctcgcggagattctgtactataaaattctggagacagtaatggtccaggaaacccgcaggctccatggcatggatatgagcgtgctgctcgaacaggacatttttcaccgtagcctgatggcttgttgccttgaaatagtgttgttcgcatatagctccccacgcacctttccctggattatagaggttctgaatctccaacctttttatttttataaagtgatagaagttgtgatccgatccgaggagggtctatcccgggatatggtcaagcacctcaattccatcgaagagcagatcttggagtcactggcatggagccacgatagcgctctatgggaggccttacaagtaagtgccaacaaggtgcctacctgcgaagaagtaatctttccaaataatttcgagacaggaaacggtggtaatgtgcagggccaccttcctctgatgccaatgagcccactgatgcatcctagagtcaaagaggtaaggaccgattctggtagcctgcggagagacatgcaaccactctcaccaatatccgtccacgagcgctacagctctccaaccgccggttctgcaaaacgccgcctgttcggagaagaccctccgaaggaaatgctaatggacaagatcatcactgagggcaccaaactgaaaatcgccccctctagttcaatcaccgccgaaaatgtcagcattcttccaggccagaccctgctgacaatggcaaccgcacctgtgacaggcaccactgggcacaaagtcacaattccattacatggagtggccaacgatgctggggaaatcaccttgatcccactcagtatgaacactaatcaggaatctaaggtcaagagccccgtatcgctcacagcccactcactgataggggccagccccaagcagactaacctgacaaaggcccaggaagtgcactccacaggcatcaacagacccaagcgtaccggctccctcgccctcttttataggaaggtttaccacctcgcctcggttcgactgcgcgacttgtgtctgaaacttgacgttagtaatgagctccgcagaaagatctggacctgcttcgaattcacgttagtgcactgtccggatctgatgaaggaccggcacctcgatcagctgttactttgcgccttttatataatggcgaaggtgacaaaggaggagcggactttccaggagattatgaaatcctacagaaatcagccccaagccaatagtcacgtctaccgcagtgtgcttctcaagtccatccctcgcgaagtggttgcatacaataagaacataaatgatgacttcgagatgatcgactgtgacctggaggacgccacaaagactccagattgcagctccggtcccgtgaaggaggagaggggggacctgattaagttttacaacacaatatacgtaggacgtgtgaagagcttcgccctgaagtacgatcttgctaaccaggaccacatgatggatgcaccaccactgagtccttttccccatatcaagcagcagcccggttcacccagaaggatcagccagcagcacagtatttatatctccccccataagaatggatccggcctgacgcctcgctccgccctcctttataagtttaacgggagcccgagcaaaagtctaaaagacatcaataacatgattcgtcagggagagcagcgcaccaaaaagagagtgatagcgatcgattccgatgcggaaagccctgcgaaacgggtgtgccaagagaacgacgacgtcctccttaagagattacaggatgtggtgtcagagcgagcaaatcattag

SEQ ID NO: 133198 - DNA, 3207 bp, Artificial Sequence
  derived and/or modified sequence
atgtttgaggacaagccccacgccgagggcgctgctgtggtggccgctgctggggaggccctgcaggccctgtgccaggagctgaacctggatgagggcagcgctgctgaggccctggatgacttcaccgccatccggggcaactacagcctggagggggaggtgacccactggctggcctgcagcctgtatgtggcctgcaggaagagcatcatccccaccgtgggcaagggcatcatggagggcaactgtgtgtccctgacccgcatcctgcggagcgccaagctgagcctcatccagttcttcagcaagatgaagaagtggatggacatgagcaacctgccccaggagttccgggagcgcatcgagcggctggagaggaactttgaggtgtccaccgtcatcttcaagaagtatgagcccatcttcctggacatcttccagaacccctatgaggagccccccaagctgcccaggagcaggaagcagaggcgcatcccctgcagcgtgaaggacctcttcaacttctgctggaccctgtttgtgtacaccaagggcaacttcaggatgattggagatgacctggtgaacagctaccacctgctgctgtgctgcctggacctgatctttgccaatgccatcatgtgccccaaccggcaggacctgctgaaccccagcttcaagggcctgcccagcgacttccacacagctgacttcaccgccagcgaggagcccccctgcatcatcgctgtgctgtgtgagctgcatgatggcctgctggtggaggccaagggcatcaaggagcactacttcaagccctacatcagcaagctgtttgacaggaagatcctgaagggagaatgtctgctggacctgagcagcttcacagacaacagcaaggctgtgaacaaggagtatgaggagtatgtgctgactgtgggggactttgatgagcgcatcttcctgggcgcagatgctgaggaggagatcggcacccccaggaagttcacccgggacacccccctgggcaagctgacagcccaggccaacgtggagtacaacctgcagcagcactttgagaagaagaggagctttgcccccagcacccccctgaccggccgccgctacctgcgggagaaggaggccgtcatcacccctgtggccagcgccacccagagcgtgtcccggctgcagagcatcgtggccggcctgaagaatgcccccagcgaccagctgatcaacatctttgagagctgtgtgagaaatcctgtggagaacatcatgaagatcctgaagggcatcggggagaccttctgccagcactacacccagagcacagatgagcagcccggcagccacatcgactttgctgtgaaccggctgaagctggccgagatcctgtactacaagatcctggagaccgtgatggtgcaggagacccggcggctgcacggcatggacatgtctgtgctgctggagcaggacatcttccacaggagcctgatggcctgctgcctggagatcgtgctgtttgcctacagcagccccaggaccttcccctggatcatcgaggtgctgaacctgcagcccttctacttctacaaggtgattgaggtggtgatccgctctgaggagggcctgagccgggacatggtgaagcacctgaacagcattgaggagcagatcctggagagcctggcctggagccatgacagcgccctgtgggaggccctgcaggtgtctgccaacaaggtgcccacctgtgaggaggtgatcttccccaacaactttgaaacaggaaatggaggaaatgtgcagggccacctgcccctgatgcccatgagccccctgatgcacccccgggtgaaggaggtgaggacagattctggcagcctgcggcgggacatgcagcccctgagccccatctctgtgcatgagcgctacagcagccccacagctggcagcgccaagaggcggctgtttggagaagatcctcccaaggagatgctgatggacaagatcatcacagagggcaccaagctgaagatcgcccccagcagcagcatcacagcagaaaatgtgtccatcctgcccggccagaccctgctgaccatggccacagcccctgtgacaggcaccaccggccacaaggtgaccatccccctgcatggagtggccaatgatgctggggagatcaccctcatccccctgtccatgaacaccaaccaggagagcaaggtgaagagccctgtgtccctgacagcccacagcctgattggagccagccccaagcagaccaacctgaccaaggcccaggaggtgcacagcacaggcatcaaccggcccaagaggacaggcagcctggccctcttctacaggaaggtgtaccacctggcctctgtgcggctgcgggacctgtgcctgaagctggatgtgtccaatgagctgcggaggaagatctggacctgctttgagttcaccctggtgcactgcccagacctgatgaaggacagacacctggaccagctgctgctgtgtgccttctacatcatggccaaggtgaccaaggaggagaggaccttccaggagatcatgaagagctacagaaaccagccccaggccaacagccacgtgtacagatctgtgctgctgaagagcatcccccgggaggtggtggcctacaacaagaacatcaatgatgactttgagatgattgactgtgacctggaggatgccaccaagaccccagactgcagcagcggccctgtgaaggaggagcggggggacctgatcaagttctacaacaccatctacgtgggccgggtgaagagctttgccctgaagtatgacctggccaaccaggaccacatgatggatgccccacccctgagccccttcccccacatcaagcagcagcccggcagcccccggcgcatcagccagcagcacagcatctacatcagcccccacaagaatggcagcggcctgacccccaggtctgccctgctgtacaagttcaacggcagccccagcaagagcctgaaggacatcaacaacatgatccggcagggcgagcagaggaccaagaagagggtgattgccatcgacagtgatgctgagagccctgccaagagggtgtgccaggagaatgatgatgtgctgctgaagaggctgcaggatgtggtgtctgagcgggccaaccactag

SEQ ID NO: 133199 - DNA, 3207 bp, Artificial Sequence
  derived and/or modified sequence
atgttcgaggacaagccccacgccgagggcgccgccgtggtggccgctgccggtgaagcactgcaggccctgtgccaggagcttaatcttgacgaggggtccgccgctgaggctctggatgacttcacagcgatccgcgggaactattcgctagagggtgaggtaacacattggctggcctgtagtctgtatgtcgcctgtcgcaagtctataattccgacagtgggcaaaggaatcatggaggggaattgtgtgagtcttacacggatcctccgcagcgccaagttatcgctgattcagttcttctccaagatgaagaagtggatggatatgtctaatttacctcaggagtttcgcgagcgcatcgaacggctagagagaaatttcgaggtatcgacagtgatatttaagaaatatgaacccatattcttggatatttttcagaatccatacgaggagccacctaagctgcctaggtctaggaagcagcgtcgcatcccttgcagtgttaaggatctgtttaacttttgctggaccctgttcgtttacacgaaaggaaactttcgcatgataggcgacgatttggtgaattcgtatcatctacttttatgttgccttgatctaattttcgcgaatgcaattatgtgtcccaatagacaagatctgctcaaccctagtttcaaggggctgccctctgacttccacaccgcagactttaccgcatcagaagagcccccgtgtattatcgctgtgctgtgcgagctccacgatggacttctggtcgaagctaaggggataaaagagcattacttcaagccttatattagcaaactgttcgatcgtaagatcctaaagggtgagtgtctcctggacctgagctccttcaccgataacagcaaggccgtgaataaggagtatgaggaatacgtgctaactgtcggcgactttgatgagaggatctttcttggggcagatgcggaagaggaaatcggaaccccgcgcaaattcactagagatactcccctagggaagctgaccgcccaagccaatgtcgaatacaacctgcagcagcacttcgaaaagaagcgttccttcgccccctcaacacccctgactggtcggcggtatctgcgggaaaaagaggctgtgattacccctgtggcctctgctacccagtcagtgtcgcgtcttcagtccatcgtggctggactgaaaaatgcacctagcgaccagctcattaacatcttcgaatcgtgcgtgagaaatccagtagaaaacatcatgaaaatactaaagggaatcggagagacgttttgccagcactacacgcagtctaccgatgagcagcccggctctcacatcgatttcgctgtgaatagactgaagctggcagaaatcctgtattacaagattttagagaccgtgatggtacaggaaacccggcgtctccacggcatggatatgagcgtgcttctggaacaggacattttccaccggtcgttgatggcttgttgcctggaaatagttctctttgcatactcttcacctcgaactttcccatggattatcgaagtactgaatctgcagcccttttacttttacaaggttattgaagttgtgattcggtctgaggagggtctgtcacgcgacatggtaaagcacctaaactctatcgaagaacagattttggagtctttggcctggtcacacgactcagcgctgtgggaggctctgcaggtgtccgcgaataaagtgcctacatgcgaggaggtgattttccccaataacttcgagactggaaacgggggtaatgtgcagggccacctgcccctcatgcccatgtctcccctgatgcatcctcgcgtgaaagaggtccgcacagacagcggctccctgcggcgggatatgcagcctctgtcaccaatttcggtccacgagcggtattccagccccaccgccgggtccgcaaaaaggcggctgtttggggaggatccccctaaagagatgcttatggacaagatcatcacagaagggacgaaactgaagatcgcgcccagctcctctatcacggccgagaacgtatctatactcccggggcagacgctgctcacgatggcgaccgctcccgtcaccggtaccacaggccacaaagtgactatccctctccacggcgtcgcgaatgacgctggtgaaataacactgatccccctgtctatgaacaccaaccaagagtcaaaggtcaaatccccagtgtctctgaccgctcacagtctgatcggtgctagtccaaagcaaaccaatctgaccaaagcgcaggaggttcactcgaccgggataaaccgccctaagcgtactggttctctggccctgttctacaggaaggtgtaccatttagccagcgttcggttgagggatctctgtctcaagcttgatgtgtccaacgaacttagacggaaaatctggacatgctttgaatttaccttggtccactgccctgacctcatgaaagatagacacctggaccagcttctcttatgcgccttctatatcatggccaaagtgacaaaagaggagagaactttccaggagattatgaagagctacaggaaccagccacaagccaatagtcacgtctatcggagcgttctactgaaaagcataccacgtgaggtcgttgcctataataagaacatcaatgacgacttcgagatgatagattgtgacctcgaggatgctactaaaacaccagactgctctagcggacctgtgaaggaagagcggggtgacctgatcaaattttataacacaatctacgtcggcagagtgaaaagctttgcactcaaatatgacctggccaatcaggatcacatgatggatgccccacccctgtccccgtttccccacatcaagcagcagcctggctccccccgccgcatcagccagcaacacagcatctatatatccccacacaaaaacggttccggcctgacacctcgttccgctcttttatataagtttaatggatccccctctaagagccttaaagatatcaataatatgatcagacagggcgaacaacggactaagaaacgggttatcgctatagactctgacgccgaatctccggcgaaaagagtatgtcaggagaacgatgatgttttgctgaaacgcctgcaggatgttgttagcgaacgtgctaatcactag

SEQ ID NO: 133200 - DNA, 3207 bp, Artificial Sequence
  derived and/or modified sequence
atgttcgaagacaagccacacgcagagggggcagccgtcgttgcggcagctggggaagctctgcaggctctgtgtcaggagctgaatctagacgagggatctgcagccgaggcactggacgattttactgcaatcaggggaaactattctctcgagggtgaagtcactcattggctcgcttgctcactgtatgtagcatgcagaaagtcgattattcctactgttggaaagggaatcatggaaggaaattgcgtgagtttgactcgaatcttaagaagcgccaaattatctctaatccagtttttcagcaagatgaagaaatggatggatatgtcgaatttgcctcaggaattccgggaacgaattgagcggctggagcggaacttcgaagtgtctaccgtgatctttaagaaatatgaacctattttcctcgacatcttccagaatccctacgaagagccaccaaagctgccgaggtctcggaaacaaagaagaataccttgcagtgtgaaagacctctttaatttctgttggaccctgtttgtctatactaaaggtaactttaggatgatcggcgatgatttagtaaactcatatcatcttttgctgtgctgtctcgatcttatctttgccaacgccataatgtgccctaacaggcaggatttgttaaacccatcctttaaaggactccccagtgacttccacacagccgattttacagctagtgaggaacccccttgtattattgccgtgctatgcgagctccacgatggcctactcgtggaggctaaaggaattaaagagcactactttaagccatatatttccaagcttttcgacagaaagatcctcaagggggagtgcctgctcgacctgtccagtttcaccgataattctaaagcagtgaacaaggagtacgaagaatatgtgctgactgttggagattttgacgaaagaattttcctcggggctgacgccgaggaagaaattggtacacccagaaaattcactagagacaccccactgggtaaactcacggcccaggcaaatgttgaatataatcttcagcagcacttcgaaaaaaagcgcagttttgccccttccaccccattaaccgggcgtcgctatctgagagagaaagaggcggtgattacacctgtcgccagtgccacacagtcagtcagccggttgcagtccattgtggcgggtctgaaaaatgcaccctctgaccagttgattaatatttttgaatcatgcgtaagaaacccagtggagaatatcatgaagatcctcaaggggatcggggagactttctgccagcattatacccagagcacagacgaacagcccggatcccacatcgacttcgcagtgaatcggctgaagctggccgagatattgtactacaaaatcctcgaaaccgtcatggttcaagagaccaggcgactccacggcatggatatgtctgtacttcttgagcaggacattttccaccgaagcctgatggcatgttgccttgaaattgtattattcgcttactcctctccacggactttcccatggatcattgaagtgctgaacttgcagcctttctatttctacaaagtgattgaggtcgtaattcgctctgaggaggggctctcaagggatatggttaagcatctgaactccattgaggagcagatcctcgaatcactggcatggagtcacgactctgccctgtgggaggcccttcaagtcagcgccaacaaggtacctacatgtgaggaagtaatcttccctaataattttgaaactggcaatggcggtaatgtgcaaggccacctaccgctgatgccaatgtctcccttgatgcacccgagagtgaaggaggtccgaactgactcaggttccctgagacgggacatgcaaccactgtctccaatcagcgtgcacgagcggtatagtagccctactgccggaagcgcgaaaaggagactttttggcgaggaccccccaaaggaaatgctcatggacaagatcattactgagggcacaaaactgaaaatagctccctcgtctagtattactgcggaaaatgtgagtattttgccagggcagaccctgctgaccatggccactgcccctgtgactggcactacaggtcacaaggtaacaattccactgcacggcgtggctaatgacgccggtgaaattaccctgatccccttatcgatgaacacaaaccaggagtctaaggtgaaatcccccgtctccctgacagcccattctctcattggcgcaagccccaagcagactaatctgactaaagcccaagaggtgcactccacaggtatcaaccggcctaagagaacgggcagcctcgctctgttctatagaaaagtgtatcatctcgcctctgttcgcctgagggacctgtgtctcaagctcgatgtatctaatgaactacgcagaaaaatctggacctgctttgagttcacgctggtacactgcccggatttgatgaaggacagacatcttgaccagctcctcctgtgcgccttttacatcatggcaaaggttaccaaggaagagcgtacatttcaggaaatcatgaagagctaccgcaaccagccccaggccaatagtcatgtgtacagaagcgtactcctgaaatccatcccaagagaggtggttgcatataacaagaatattaacgacgacttcgaaatgatcgattgtgacctcgaggacgccacgaagactcctgactgcagtagcggcccagtcaaagaggagaggggtgatctgatcaagttttataataccatctacgtcggtagggttaaatccttcgccctgaagtacgacctggctaaccaggaccatatgatggatgctccaccactgtctccgtttccgcacattaagcaacagcctggttccccgagaaggattagtcagcagcacagcatttacatttctccccacaaaaacggcagtgggctcacccctcggagtgcgcttctgtataagtttaacggtagtccgtcgaagtcccttaaggacataaacaatatgatacggcaaggcgagcagcgtaccaagaaaagagttatcgctattgactctgacgctgagtcccccgcaaagcgggtttgtcaggaaaacgacgatgttctgttgaagaggcttcaggatgtggttagcgaacgggctaatcactag

SEQ ID NO: 133201 - DNA, 5684 bp, Artificial Sequence
  derived and/or modified sequence
gggtagcgcgcctgggagggagaaagaagtcgggggccgtggcgcgcagcccgcggggcctgaagggatgttcgaggacaagccccacgctgagggggcggcggtggtcgccgcagccggggaggcgctacaggccctgtgccaggagctgaacctggacgaggggagcgcggccgaagccctggacgactttactgccatccgaggcaactacagcctagagggagaagttacacactggttggcatgttcattatatgttgcatgccgcaaaagcattattcccacggttggaaagggtatcatggaaggcaactgtgtttcacttaccagaatactacgttcagctaaattaagtttaatacaattttttagtaaaatgaagaaatggatggacatgtcaaatctaccacaagaatttcgtgaacgtatagaaaggctagagagaaattttgaggtgtctactgtaatattcaaaaaatatgagccaatttttttagatatatttcaaaatccatatgaagaaccaccaaagttaccacgaagccggaagcagaggaggattccttgcagtgttaaggatctgtttaatttctgttggacactttttgtttatactaagggtaattttcggatgattggggatgacttagtaaactcttatcatttacttctatgctgcttggatctgatttttgccaatgcgattatgtgcccaaatagacaagacttgctaaatccatcatttaaaggtttaccatctgattttcatactgctgactttacggcttctgaagagccaccctgcatcattgctgtactgtgtgaactgcatgatggacttctcgtagaagcaaaaggaataaaggagcactactttaagccatatatttcaaaactctttgacaggaagatattaaaaggagaatgcctcctggacctttcaagttttactgataatagcaaagcagtgaataaggagtatgaagagtatgttctaactgttggtgattttgatgagaggatctttttgggagcagacgcagaagaggaaattggaacacctcgaaagttcactcgtgacaccccattagggaaactgacagcacaggctaatgtggagtataaccttcaacagcactttgaaaaaaaaaggtcatttgcaccttctaccccactgaccggacggagatatttacgagaaaaagaagcagtcattactcctgttgcatcagccacccaaagtgtgagccggttacagagtattgtggctggtctgaaaaatgcaccaagtgaccaacttataaatatttttgaatcttgtgtgcgtaatcctgtggaaaacattatgaaaatactaaaaggaataggagagactttctgtcaacactatactcaatcaacagatgaacagccaggatctcacatagactttgctgtaaacagactaaagctggcagaaattttgtattataaaatactagagactgtaatggttcaggaaacacgaagacttcatggaatggacatgtcagttcttttagagcaagatatatttcatcgttccttgatggcttgttgtttggaaattgtgctctttgcctatagctcacctcgtacttttccttggattattgaagttctcaacttgcaaccattttacttttataaggttattgaggtggtgatccgctcagaagaggggctctcaagggacatggtgaaacacctaaacagcattgaagaacagattttggagagtttagcatggagtcacgattctgcactgtgggaggctctccaggtttctgcaaacaaagttcctacctgtgaagaagttatattcccaaataactttgaaacaggaaatggaggaaatgtgcagggacatcttcccctgatgccaatgtctcctctaatgcacccaagagtcaaggaagttcgaactgacagtgggagtcttcgaagagatatgcaaccattgtctccaatttctgtccatgaacgctacagttctcctaccgcagggagtgctaagagaagactctttggagaggaccccccaaaggaaatgcttatggacaagatcataacagaaggaacaaaattgaaaatcgctccttcttcaagcattactgctgaaaatgtatcaattttacctggtcaaactcttctaacaatggccacagccccagtaacaggaacaacaggacataaagttacaattccattacatggtgtcgcaaatgatgctggagagatcacactgatacctctttccatgaatacaaatcaggagtccaaagtcaagagtcctgtatcacttactgctcattcattaattggtgcttctccaaaacagaccaatctgactaaagcacaagaggtacattcaactggaataaacaggccaaagagaactgggtccttagcactattttacagaaaggtctatcatttggcaagtgtacgcttacgtgatctatgtctaaaactggatgtttcaaatgagttacgaaggaagatatggacgtgttttgaattcactttagttcactgtcctgatctaatgaaagacaggcatttggatcagctcctcctttgtgccttttatatcatggcaaaggtaacaaaagaagaaagaacttttcaagaaattatgaaaagttataggaatcagccccaagctaatagtcacgtatatagaagtgttctgctgaaaagtattccaagagaagttgtggcatataataaaaatataaatgatgactttgaaatgatagattgtgacttagaagatgctacaaaaacacctgactgttccagtggaccagtgaaagaggaaagaggtgatcttataaaattttacaatacaatatatgtaggaagagtgaagtcatttgcactgaaatacgacttggcgaatcaggaccatatgatggatgctccaccactctctccttttccacatattaaacaacagccaggctcaccacgccgcatttcccagcagcactccatttatatttccccgcacaagaatgggtcaggccttacaccaagaagcgctctgctgtacaagttcaatggcagcccttctaagagtttgaaagatatcaacaacatgataaggcaaggtgagcagagaaccaagaagcgagtaatagccatcgatagtgatgcagaatcccctgccaaacgcgtctgtcaagaaaatgatgacgttttactgaaacgactacaggatgttgtcagtgaaagagcaaatcattaatgttgttcttgtttctatgataaaagcactttcagattgttctgcagaaagttggagctctgtccttcaaaccttttagccctatagatgataaatatcactgggttataagaaaaaattgcacaaaaattatgtgctttttaaaatatttatccaaaatgtagttgacagagatgtattttgagttggattggaaaggaatattttaagtgccttttaaaaatactaatagtccggccaggcgctgtggctcacgcctgtaatcccaggactttgggaggccaaggcgggcagatcaccggaggtcaggagttcgagaccagcctgaccaacatggagaaaccccatctctactaaaaatacaaaattagccgggtgtggtggcgcatgcctgtaatcccagctacttgggaggctgaggcagaattgcttgaacccaggaagcggaggttgtggtgagccaaggttgcgccactgcactccagcctgggcaacaagagtaaaactccatctcaaaaaatatatatatatatataaatagggaattttttttaatgtttgctccttgagttttcaagatgaaataaggagaaaccccataactttttagctctcttttaaaaataaatgtctccttctgtgttctgtaatatgaggataaataatctacttttgatagcatgctttgagatatttgtattcttaatttaatattgaaggaaggggttggttcccatagtacctggccagagggttatataccatcctgtctctggcccactgtggtaattccacatccaggtaccaccgccattcagagttgtctcaccccttctcgtgccttttctctccttgagctttataaacagatttgtacctgagccccagtgctacactcatccttgctttccagccctaagccatctcagcctgatgtcacaacccaataaatggggcactttcttcttttgtaaactattatcattttggtttctgtgacattaacttaattatatatgatcgtattaactcatgtagttctcaaaataggcagctgcttctgaagccagtaaaataaaattcagttagttattaaaaactaaattcctattagtaaggtaacaccatgattatgtgtgatatactgtttttgagatcatagttatcagtcattctcaatatctaattgagtccctaagaatattttaaaccttttaaaaatcacataaatatcatctcatgcctcataattctaatatatttaatacatcagtaaaatagctgcttattacttcccacactttgttctcagtattgttagtgcatcatgagtttcctgctagtgtttgaccactgggtactcctgaagatgttttttagtactagggatgcttttcagtattagggatgcttttttcagtactagggatgtactagggagtactgagtactcctgaagatgtttttcagtactagggatgcttttttcagtgttagggatgcttttcagtactagggatgcttttttcagtgctagggatgcttttcagtactagggatgctttccaaaatatcacctctttaacgtttactttttctagtgtgtgtctggaatccaaaggacatgaataagccactcataattaattttgagaagttttatcaaatgtttatgtttctaactgcaaaccttaattttggaaaggcacaatgtttaactcacctatgtttaaccatggctaatttaaaatagtctaagatttggccgtcactaattagtattctcaagaatttcatttttcaattttaagaagaaaagggattttggtcacattttgcttgtaaatgaaaattacatcctcattctttgtgtagtatctacacattgttataagccaaaaaacaaagtctgtctggaatctttgtacatatttgtatgttgctataattgttatttttatcttcattattgtgcaaaatataaatgagcatttgtacattgactgtataagaaaccatgggccaggtcctgtggctcatgcctataatcccaacactttgggaggctgaggcaggaggattgcttcagtccaggagttcaagactaacctgggcaacatagccctcatctctacaaaaaataaaaaaattagttgggtgtgatggcatgtgcctgtagtcccagctactcaggagactgacatgagaggatcacttgagactgggagattctgaggctgcagtgagctgtgattgcaccactacactccatcctaggtgagagggcaagaccctttctcagaaaaggaaaaaaagaaattctggacatgtttttatcagttttcaggacttggtatcaatgtacatagaatggctaataaaaattggaattgagattattgaaaaaaaa

SEQ ID NO: 133202 - protein, 177 aa, Artificial Sequence
  derived and/or modified sequence
MVKLFIGNLPREATEQEIRSLFEQYGKVLECDIIKNYGFVHIEDKTAAEDAIRNLHHYKLHGVNINVEASKNKSKTSTKLHVGNISPTCTNKELRAKFEEYGPVIECDIVKDYAFVHMERAEDAVEAIRGLDNTEFQGEPPSLGRGLNTRLCAENGWISKRRGLVKITAVGWLVMKK

SEQ ID NO: 133203 - protein, 364 aa, Artificial Sequence
  derived and/or modified sequence
MVKLFIGNLPREATEQEIRSLFEQYGKVLECDIIKNYGFVHIEDKTAAEDAIRNLHHYKLHGVNINVEASKNKSKTSTKLHVGNISPTCTNKELRAKFEEYGPVIECDIVKDYAFVHMERAEDAVEAIRGLDNTEFQGKRMHVQLSTSRLRTAPGMGDQSGCYRCGKEGHWSKECPIDRSGRVADLTEQYNEQYGAVRTPYTMSYGDSLYYNNAYGALDAYYKRCRAARSYEAVAAAAASVYNYAEQTLSQLPQVQNTAMASHLTSTSLDPYDRHLLPTSGAAATAAAAAAAAAAVTAASTSYYGRDRSPLRRATAPVPTVGEGYGYGHESELSQASAAARNSLYDMARYEREQYADRARYSAF

SEQ ID NO: 133204 - DNA, 1763 bp, Artificial Sequence
  derived and/or modified sequence
actgctgcggccgccgccattttagcgttttgtcagaagcgtccgcgccgcgaggaggaggccctgctggtttctgtgcgggtgagactccgagcctttccactgcctttcttgtactgtgttaaatcttctctcactcccttgggcttcgggggtgtcctggtaggtccgcagtctccacacccgtcactgagagccgacctcggtcctcggcattgcgcggctcttgtcaggatggtgaagctgttcatcggaaacctgccccgggaggctacagagcaggagattcgctcactcttcgagcagtatgggaaggtgctggaatgtgacatcattaagaattacggctttgtgcacatagaagacaagacggcagctgaggatgccatacgcaacctgcaccattacaagcttcatggggtgaacatcaacgtggaagccagcaagaataagagcaaaacctcaacaaagttgcatgtgggcaacatcagtcccacctgcaccaataaggagcttcgagccaagtttgaggagtatggtccggtcatcgaatgtgacatcgtgaaagattatgccttcgtacacatggagcgggcagaggatgcagtggaggccatcaggggccttgataacacagagtttcaaggcaaacgaatgcacgtgcagttgtccaccagccggcttaggactgcgcccgggatgggagaccagagcggctgctatcggtgcgggaaagaggggcactggtccaaagagtgtccgatagatcgttcaggccgcgtggcagacttgaccgagcaatataatgagcaatacggagcagtgcgtacgccttacaccatgagctatggggattcattgtattacaacaacgcgtacggagcgctcgatgcctactacaagcgctgccgtgctgcccggtcctatgaggcagtggcagctgcagctgcctccgtgtataattacgcagagcagaccctgtcccagctgccacaagtccagaatacagccatggccagtcacctcacctccacctctctcgatccctacgatagacacctgttgccgacctcaggagctgctgccacagctgctgctgcagcagcagccgctgctgctgttactgcagcttccacttcatattacgggcgggatcggagccccctgcgtcgcgctacagccccagtccccactgttggagagggctacggttacgggcatgagagtgagttgtcccaagcttcagcagccgcgcggaattctctgtacgacatggcccggtatgagcgggagcagtatgccgatcgggcgcggtactcagccttttaaagcttgaggtgggatgtgtgtgggctgaaattccgagctgcggttgtgcatgagaatacacccttcgtggtaccccatctccgggacgttctcggctctgtgcgttcagtccctcaggaaccgtggaccttaatttaccttgctaagttcagaccttctcttcctttcctttcctttcctctcctgcccattttcctgttcttctgtccttcaatacttctgtagcttcccattcatgttctcttctcccagcaggcctcattgtgtgcagaaactgtggtgggggctgtgctgtctcctccctgcctcctgcctcctgcggctgttggatttgggaatgaccttggtgagagtctcactgctccagggtctctttttggtccaaaggctagacctatagagttggatcactttttttctttccggtgaaataa

SEQ ID NO: 133205 - DNA, 2321 bp, Artificial Sequence
  derived and/or modified sequence
accttgctttttttcgcccaccctgtcccgcgcccgacatggctgctcttggagcctcgagatttccactgggataaccccctttcccttatatctgacagttacattctcgtttcgggaatttctcgggccgtgagacatcgtctggttaatgaatctgaagctcttttccgcggccgcgcatttcagtgttcggcaggagctaggacggtgccccgagagaggcgttcaccactccagtatttcctttatctcccactcctcgctgtctgatccgagtcgcgcgttcattacttccaaaggaaactcaaatgtagctattacaaggcccattttcccggaaatgatggctgctttggttcctacgtgaggaaaagcctgttgataatttcaggcaggcagtcagcaagcctagtagacttttgttttctgttgtcctcctagtggatagaaaagcctagtacccccatttcttcatatgctgtctttcatgcccatttctgttggaaggtatcggttcttaccaaaccctttgtctactaaggacctccctattgcagacgtcttcttattcttacaggttcatggcggctactatagcaggccttagttcactcccacttccatttgattattgtgtggaggtgtgtgtgcaggcgtgtgagagagaaaactggaaatatacattagagtgaaagtcgttgtcttttgtgaacggatgtgggcctgaggtcttttgtcagatgtcttgtttttctctcccaggctcttgtcaggatggtgaagctgttcatcggaaacctgccccgggaggctacagagcaggagattcgctcactcttcgagcagtatgggaaggtgctggaatgtgacatcattaagaattacggctttgtgcacatagaagacaagacggcagctgaggatgccatacgcaacctgcaccattacaagcttcatggggtgaacatcaacgtggaagccagcaagaataagagcaaaacctcaacaaagttgcatgtgggcaacatcagtcccacctgcaccaataaggagcttcgagccaagtttgaggagtatggtccggtcatcgaatgtgacatcgtgaaagattatgccttcgtacacatggagcgggcagaggatgcagtggaggccatcaggggccttgataacacagagtttcaaggcaaacgaatgcacgtgcagttgtccaccagccggcttaggactgcgcccgggatgggagaccagagcggctgctatcggtgcgggaaagaggggcactggtccaaagagtgtccgatagatcgttcaggccgcgtggcagacttgaccgagcaatataatgagcaatacggagcagtgcgtacgccttacaccatgagctatggggattcattgtattacaacaacgcgtacggagcgctcgatgcctactacaagcgctgccgtgctgcccggtcctatgaggcagtggcagctgcagctgcctccgtgtataattacgcagagcagaccctgtcccagctgccacaagtccagaatacagccatggccagtcacctcacctccacctctctcgatccctacgatagacacctgttgccgacctcaggagctgctgccacagctgctgctgcagcagcagccgctgctgctgttactgcagcttccacttcatattacgggcgggatcggagccccctgcgtcgcgctacagccccagtccccactgttggagagggctacggttacgggcatgagagtgagttgtcccaagcttcagcagccgcgcggaattctctgtacgacatggcccggtatgagcgggagcagtatgccgatcgggcgcggtactcagccttttaaagcttgaggtgggatgtgtgtgggctgaaattccgagctgcggttgtgcatgagaatacacccttcgtggtaccccatctccgggacgttctcggctctgtgcgttcagtccctcaggaaccgtggaccttaatttaccttgctaagttcagaccttctcttcctttcctttcctttcctctcctgcccattttcctgttcttctgtccttcaatacttctgtagcttcccattcatgttctcttctcccagcaggcctcattgtgtgcagaaactgtggtgggggctgtgctgtctcctccctgcctcctgcctcctgcggctgttggatttgggaatgaccttggtgagagtctcactgctccagggtctctttttggtccaaaggctagacctatagagttggatcactttttttctttccggtgaaataaatggtttttcaactt

SEQ ID NO: 133206 - DNA, 1694 bp, Artificial Sequence
  derived and/or modified sequence
actttcttgagtggccaatccggttgtaggctcacctcccccttctactcagagcactgctgcggccgccgccattttagcgttttgtcagaagcgtccgcgccgcgaggaggaggccctgctggtttctgtgcgggctcttgtcaggatggtgaagctgttcatcggaaacctgccccgggaggctacagagcaggagattcgctcactcttcgagcagtatgggaaggtgctggaatgtgacatcattaagaattacggctttgtgcacatagaagacaagacggcagctgaggatgccatacgcaacctgcaccattacaagcttcatggggtgaacatcaacgtggaagccagcaagaataagagcaaaacctcaacaaagttgcatgtgggcaacatcagtcccacctgcaccaataaggagcttcgagccaagtttgaggagtatggtccggtcatcgaatgtgacatcgtgaaagattatgccttcgtacacatggagcgggcagaggatgcagtggaggccatcaggggccttgataacacagagtttcaaggcaaacgaatgcacgtgcagttgtccaccagccggcttaggactgcgcccgggatgggagaccagagcggctgctatcggtgcgggaaagaggggcactggtccaaagagtgtccgatagatcgttcaggccgcgtggcagacttgaccgagcaatataatgagcaatacggagcagtgcgtacgccttacaccatgagctatggggattcattgtattacaacaacgcgtacggagcgctcgatgcctactacaagcgctgccgtgctgcccggtcctatgaggcagtggcagctgcagctgcctccgtgtataattacgcagagcagaccctgtcccagctgccacaagtccagaatacagccatggccagtcacctcacctccacctctctcgatccctacgatagacacctgttgccgacctcaggagctgctgccacagctgctgctgcagcagcagccgctgctgctgttactgcagcttccacttcatattacgggcgggatcggagccccctgcgtcgcgctacagccccagtccccactgttggagagggctacggttacgggcatgagagtgagttgtcccaagcttcagcagccgcgcggaattctctgtacgacatggcccggtatgagcgggagcagtatgccgatcgggcgcggtactcagccttttaaagcttgaggtgggatgtgtgtgggctgaaattccgagctgcggttgtgcatgagaatacacccttcgtggtaccccatctccgggacgttctcggctctgtgcgttcagtccctcaggaaccgtggaccttaatttaccttgctaagttcagaccttctcttcctttcctttcctttcctctcctgcccattttcctgttcttctgtccttcaatacttctgtagcttcccattcatgttctcttctcccagcaggcctcattgtgtgcagaaactgtggtgggggctgtgctgtctcctccctgcctcctgcctcctgcggctgttggatttgggaatgaccttggtgagagtctcactgctccagggtctctttttggtccaaaggctagacctatagagttggatcactttttttctttccggtgaaataaatggtttttcaacttag

SEQ ID NO: 133207 - DNA, 1095 bp, Artificial Sequence
  derived and/or modified sequence
atggtgaagctgttcatcggcaacctgcccagagaggccaccgagcaggagatcagaagcctgttcgagcagtacggcaaggtgctggagtgcgacatcatcaagaactacggcttcgtgcacatcgaggacaagaccgccgccgaggacgccatcagaaacctgcaccactacaagctgcacggcgtgaacatcaacgtggaggccagcaagaacaagagcaagaccagcaccaagctgcacgtgggcaacatcagccccacctgcaccaacaaggagctgagagccaagttcgaggagtacggccccgtgatcgagtgcgacatcgtgaaggactacgccttcgtgcacatggagagagccgaggacgccgtggaggccatcagaggcctggacaacaccgagttccagggcaagagaatgcacgtgcagctgagcaccagcagactgagaaccgcccccggcatgggcgaccagagcggctgctacagatgcggcaaggagggccactggagcaaggagtgccccatcgacagaagcggcagagtggccgacctgaccgagcagtacaacgagcagtacggcgccgtgagaaccccctacaccatgagctacggcgacagcctgtactacaacaacgcctacggcgccctggacgcctactacaagagatgcagagccgccagaagctacgaggccgtggccgccgccgccgccagcgtgtacaactacgccgagcagaccctgagccagctgccccaggtgcagaacaccgccatggccagccacctgaccagcaccagcctggacccctacgacagacacctgctgcccaccagcggcgccgccgccaccgccgccgccgccgccgccgccgccgccgccgtgaccgccgccagcaccagctactacggcagagacagaagccccctgagaagagccaccgcccccgtgcccaccgtgggcgagggctacggctacggccacgagagcgagctgagccaggccagcgccgccgccagaaacagcctgtacgacatggccagatacgagagagagcagtacgccgacagagccagatacagcgccttctag

SEQ ID NO: 133208 - DNA, 1095 bp, Artificial Sequence
  derived and/or modified sequence
atggtcaagttgtttataggtaatctccctcgcgaggccaccgaacaagagattcgcagcctgttcgagcaatatggcaaggttttagaatgtgatattattaaaaattacggatttgtgcatatcgaggacaaaaccgctgcagaagacgcgatcagaaacttacaccattataaactccacggagtgaacatcaacgttgaagccagcaaaaataagtccaaaactagtaccaagctacacgtcggcaacatctctcctacatgcacaaataaggaattacgggcgaagtttgaggagtacggtcctgtcatagaatgcgacatcgtgaaggattacgcgttcgtccacatggaaagggctgaggacgcagtggaagctatccgaggcctggataacaccgaattccagggaaagagaatgcatgtgcaactgtctaccagccggctcagaaccgcccctggaatgggggatcaatctggatgctaccgttgcggcaaagagggtcattggagcaaggagtgtccaattgatcggtcgggtagggtcgccgacctcactgagcaatacaatgagcaatacggcgccgtgcgcacaccttatacaatgagctatggcgactctctctactataacaacgcctacggagctctggacgcatattataaaaggtgtcgggcagcgagatcttacgaagctgtggccgctgctgccgcatcagtctacaattatgccgaacagaccctgtcacagctgccacaggtgcaaaacacagctatggcttctcacctgacttccacctcgctggacccgtacgaccggcacttacttccaacttcaggcgccgccgcgacagcggccgcggcggcagccgctgccgcagctgtcaccgccgcaagcacatcatactatggtcgcgatcgaagtcctctgagacgtgcaaccgctcctgtgcccacggtgggcgaaggctatggatacggacacgaatctgaactcagccaggcatcagcggcagctcgcaatagcttatacgatatggctcggtatgaaagagaacagtacgcagacagagcccgctacagtgcattctag

SEQ ID NO: 133209 - DNA, 1095 bp, Artificial Sequence
  derived and/or modified sequence
atggtgaaactgttcatcggcaacttgccccgggaggccactgagcaggaaattcggtcactgttcgagcagtatgggaaagtgttagaatgcgacattatcaagaattatggatttgtgcacatcgaggacaagaccgcggcagaagacgccatccggaacctgcatcactacaaactccacggcgttaacattaacgtggaagcaagtaagaacaagagcaagacttcaactaagcttcatgtcggaaacattagccctacatgcacaaacaaagagttgcgggcaaaattcgaggagtacgggcccgtgatcgaatgcgacatcgtaaaggattatgcattcgtccacatggagagagcagaggatgcggtcgaggctatcagaggcctggacaacaccgagttccagggtaagcggatgcatgtgcagctcagcacctccagactaaggacagcccccggaatgggcgatcagtcagggtgctaccgctgcgggaaggaagggcactggtccaaagagtgcccaattgaccgtagtggacgagtggcagacctgaccgagcagtacaacgaacagtatggtgcggttagaacaccttataccatgtcatatggggattctctctattacaataacgcttatggggcattggacgcatattacaaaaggtgtcgggctgcgcggagctatgaggcagttgccgcagctgcagccagcgtctataattatgccgaacagactctgtctcagctcccacaggtgcagaacaccgcgatggccagtcatctcacttctactagtctcgacccatatgataggcatctgctccctacctccggggctgcagccaccgccgcggccgcagcagcagccgctgcagcagtgactgcagcaagtacttcttattacggacgggatcgctccccgttacgaagggctacagcacctgtgcccacggttggggagggatatgggtatggacacgaatctgagttgagccaagcctctgctgctgctcggaatagcctgtacgatatggccaggtacgagagggagcagtatgctgatagagcccgctattcagcgttttag

SEQ ID NO: 133210 - DNA, 1095 bp, Artificial Sequence
  derived and/or modified sequence
atggtgaagctgttcatcggcaacctgccccgggaggccacagagcaggagatccgcagcctgtttgagcagtatggcaaggtgctggagtgtgacatcatcaagaactacggctttgtgcacatcgaggacaagacagctgctgaagatgccatccggaacctgcaccactacaagctgcatggagtgaacatcaacgtggaggccagcaagaacaagagcaagaccagcaccaagctgcacgtgggcaacatcagccccacctgcaccaacaaggagctgcgggccaagtttgaggagtatggccctgtgattgaatgtgacatcgtgaaggactatgcctttgtgcacatggagcgggcagaagatgctgtggaggccatccggggcctggacaacacagagttccagggcaagaggatgcacgtgcagctgagcaccagccggctgaggacagcccctggcatgggagaccagagcggctgctaccgctgtgggaaggagggccactggagcaaggagtgccccatcgacaggagcggccgggtggccgacctgacagagcagtacaatgagcagtacggggctgtgaggaccccctacaccatgtcctatggagacagcctgtactacaacaatgcctatggagccctggatgcctactacaagcgctgcagagctgcccggagctatgaagctgtggccgctgctgctgcctctgtgtacaactatgcagagcagaccctgagccagctgccccaggtgcagaacacagccatggccagccacctgaccagcaccagcctggacccctatgacagacacctgctgcccaccagcggggctgctgccacagctgctgctgctgctgctgctgctgctgctgtgacagctgccagcaccagctactacggccgggacaggagccccctgcggcgggccacagcccctgtgcccaccgtgggggagggctacggctacggccatgaaagtgagctgagccaggccagcgctgctgccaggaacagcctgtatgacatggcccgctatgaaagagagcagtatgctgaccgggcccgctacagcgccttctag

SEQ ID NO: 133211 - DNA, 1095 bp, Artificial Sequence
  derived and/or modified sequence
atggtgaagctgttcatcggcaacctgccccgggaggccaccgagcaggagatcagaagcctgtttgagcaatatggtaaggtgctcgaatgcgatattatcaagaattatggctttgtgcacatcgaagataaaactgctgcagaggacgctatccgaaacctgcaccattataaactccatggggtgaatatcaatgtggaggcatcgaagaacaagtccaaaacctctacgaagctgcatgtcggtaatatcagcccaacgtgcactaataaggaactgcgcgctaaatttgaggagtatggccccgtgatagagtgcgatattgtgaaggactacgcgttcgtccatatggaaagggcagaggacgcggtggaggcaataagggggcttgataacacagagttccaaggcaaacggatgcatgttcagctgtccactagccggctgaggaccgccccaggtatgggtgaccaatctggatgttacaggtgcgggaaagagggccactggtctaaggagtgtccaatcgatcgctctggccgcgtagcagaccttactgagcagtacaacgagcagtatggcgcggtgcgcacaccctatacaatgtcttatggagatagtctctattacaataatgcttatggggccctggacgcctactacaagcgctgccgggcagccaggtcctatgaggcagttgctgccgccgcagctagcgtgtataattacgccgaacagacattatcgcagctgcctcaggtccagaacacagccatggcatctcacttgacaagcactagcttggatccctacgatcggcatctcctgccaacctccggagcggctgctacagccgcagccgccgctgctgccgctgcagccgtgacagccgcgagcacgtcctactacgggagggatagatcccctctgagacgggccactgcacccgtgcccactgtcggtgaggggtatggttacggtcatgagtcagagctgagccaagcttccgccgcagctcggaatagcctgtatgatatggcccgctacgagcgcgagcagtacgccgatcgcgcacggtatagcgccttctag

SEQ ID NO: 133212 - DNA, 1095 bp, Artificial Sequence
  derived and/or modified sequence
atggtgaagctgttcatcggcaacctgccccgggaggccaccgagcaagagatccgatcactgtttgagcagtacggcaaggtgctggagtgcgatattattaagaactatggcttcgtgcacattgaggacaagacagccgccgaagatgcaataagaaatctgcatcattacaagctccatggcgtgaatatcaacgtagaagcctccaaaaataagtccaaaacgtcaacaaagctgcacgtgggcaatatcagcccgacttgcacgaacaaagaactgcgcgccaaattcgaggagtatgggccggtaatcgaatgtgatatcgtgaaagactatgctttcgtgcacatggagcgggccgaggacgccgtggaggccatccgggggctggataacacggagttccagggtaagaggatgcacgtgcaactctctaccagtcggctgcgaacagcccccggtatgggtgaccagtcagggtgttaccgctgtggaaaagagggacattggtcgaaagagtgcccgatcgataggtctggccgggtggcggacctcacagagcaatacaacgaacaatacggtgccgtgcgaacgccctatacgatgtcttacggggacagcctctattacaacaatgcctatggcgctttggatgcctattacaaaagatgtcgggcggcacgttcctatgaggctgtagccgccgccgcagcatccgtctacaattacgccgagcagactctgagtcaactccctcaagtccagaacacagctatggccagtcatctaactagtacctctctagacccatacgaccgacatctgctgcctacatcaggcgcggctgctacagctgccgcagccgccgcggcagccgcagccgtgaccgccgccagcacaagctattacgggcgggataggagccctctgagacgtgcaacagcgcctgtccctacagtcggcgaggggtatggctatggccacgaaagcgagcttagccaagcctccgccgctgcccgaaattctctttatgacatggcaaggtacgagcgggagcagtacgccgatcgggctagatacagcgctttctag

SEQ ID NO: 133213 - DNA, 1095 bp, Artificial Sequence
  derived and/or modified sequence
atggtcaaattgtttattgggaatttgccgagagaggcaacagaacaggagatccgatctctgttcgagcaatatggaaaggtattagagtgcgacataatcaaaaattatggttttgtgcacattgaagataaaactgcggcagaagacgcaatcaggaacttacaccactacaagctgcatggcgtgaatatcaatgtggaagccagtaagaacaagagtaagacctccaccaagctgcatgtaggtaatatttccccaacctgcacaaataaggagctgagggcaaagttcgaggagtatggaccagtgattgaatgcgatatcgtgaaagactacgcctttgttcacatggagagagcagaggacgctgttgaagctatacggggattagacaacactgagtttcaagggaagcgaatgcacgtacaattatccacaagtagattgaggaccgccccagggatgggcgatcagtccggctgttatcgctgtgggaaagaaggacactggtctaaagagtgcccgatcgataggagcgggagggtggcagacctcactgaacaatacaacgaacagtacggcgctgtacgtacgccatacaccatgtcttacggagattctctgtattataacaatgcctacggtgctttagacgcctattacaagcggtgtagagcggctcggtcttacgaggccgtggccgctgccgcagctagcgtgtataattacgcagaacagacactcagccagctgccgcaggtccagaatactgcaatggctagtcacctgacttctacgtcccttgacccttatgacaggcacctactccccacatcaggggctgccgctacagctgctgctgccgcagctgccgctgcggctgtcaccgcagccagcactagttactacggcagggacaggtcacctctgcgcagagccactgccccagtcccaaccgtaggggaaggctatggatatggacatgaatccgagctgagtcaggcctccgccgcagcccgaaattcattatacgatatggccagatacgagagggagcaatacgccgacagggcaaggtacagtgcattctag

SEQ ID NO: 133214 - DNA, 1095 bp, Artificial Sequence
  derived and/or modified sequence
atggtcaaactcttcattgggaatctaccacgggaagctaccgaacaggagattcgctccttgttcgaacagtatgggaaggtgcttgagtgtgacatcatcaagaattacggctttgtccatatcgaggataaaacagcagcagaagatgccataaggaacttgcatcactataagcttcacggtgtaaacatcaatgtagaagcgagtaaaaacaagtccaaaacttctacaaaactccacgtgggtaacatcagccctacctgcacaaacaaagagcttcgggctaaattcgaagaatacggaccagtcatagaatgcgatattgtcaaggactatgcatttgtgcatatggagcgagctgaggacgcagttgaggctatcaggggtcttgataatacagaattccagggcaaaaggatgcacgtgcaactgtctacctcaaggctcagaaccgcaccaggaatgggcgaccaaagcggctgttatcggtgtgggaaagagggtcactggagcaaggaatgcccaattgatagaagcggcagggtggccgacctcacagaacagtacaatgaacagtacggtgctgtgaggaccccatacactatgtcttacggtgatagtctgtactacaacaacgcatatggggctcttgacgcctattacaaaaggtgcagagcggctcggagctacgaagcagtggccgcagccgcagcgtccgtgtacaactacgccgagcaaacattatctcagttgccgcaagtccagaataccgctatggccagccatttaacatcaacatccctagatccctacgaccgacacctgttgcctactagcggcgctgctgctaccgcagcggcagccgcagcagccgctgctgctgtcacggccgcatctacctcttactacggccgtgatcggagccctctccgaagagccacagctcctgtacccaccgtgggggaggggtatggctatggccacgaatccgaattgtcacaagcaagtgcggctgccagaaattctctctacgacatggcccgttacgagcgagagcaatatgctgatagggcccgatactccgcgttttag

SEQ ID NO: 133215 - DNA, 2034 bp, Artificial Sequence
  derived and/or modified sequence
ttcctgaggaggactgccggtcgttcggacgtcttgcctgtcgctggaggagaggtccgggctctccaggaaggtggctgcggcgacaaaatgaagatattcgtgggcaacgtcgacggggcggatacgactccggaggagctggcagccctctttgcgccctacggcacggtcatgagctgcgccgtcatgaaacagttcgccttcgtgcacatgcgcgagaacgcgggcgcgctgcgcgccatcgaagccctgcacggccacgagctgcggccggggcgcgcgctcgtggtggagatgtcgcgcccaaggcctcttaatacttggaagattttcgtgggcaatgtgtcggctgcatgcacgagccaggaactgcgcagcctcttcgagcgccgcggacgcgtcatcgagtgtgacgtggtgaaaggctcttgtcaggatggtgaagctgttcatcggaaacctgccccgggaggctacagagcaggagattcgctcactcttcgagcagtatgggaaggtgctggaatgtgacatcattaagaattacggctttgtgcacatagaagacaagacggcagctgaggatgccatacgcaacctgcaccattacaagcttcatggggtgaacatcaacgtggaagccagcaagaataagagcaaaacctcaacaaagttgcatgtgggcaacatcagtcccacctgcaccaataaggagcttcgagccaagtttgaggagtatggtccggtcatcgaatgtgacatcgtgaaagattatgccttcgtacacatggagcgggcagaggatgcagtggaggccatcaggggccttgataacacagagtttcaaggcaaacgaatgcacgtgcagttgtccaccagccggcttaggactgcgcccgggatgggagaccagagcggctgctatcggtgcgggaaagaggggcactggtccaaagagtgtccgatagatcgttcaggccgcgtggcagacttgaccgagcaatataatgagcaatacggagcagtgcgtacgccttacaccatgagctatggggattcattgtattacaacaacgcgtacggagcgctcgatgcctactacaagcgctgccgtgctgcccggtcctatgaggcagtggcagctgcagctgcctccgtgtataattacgcagagcagaccctgtcccagctgccacaagtccagaatacagccatggccagtcacctcacctccacctctctcgatccctacgatagacacctgttgccgacctcaggagctgctgccacagctgctgctgcagcagcagccgctgctgctgttactgcagcttccacttcatattacgggcgggatcggagccccctgcgtcgcgctacagccccagtccccactgttggagagggctacggttacgggcatgagagtgagttgtcccaagcttcagcagccgcgcggaattctctgtacgacatggcccggtatgagcgggagcagtatgccgatcgggcgcggtactcagccttttaaagcttgaggtgagaggggtggggtgttccctcttctggttttgccatccctcctgcagcctaaagggctccaattaggctgccctgcttgcttgcttgcttttgcagggttaggggaaggttactaggatggctcacaggctagagagaagtcctaactgcttaactttaaaatacatagagttccttggccctcatggctatttttcagggcttctggtagtgggagtcaatttgattctatttgtgcctagaaaaataaagaatgatgtgctggtgaatcttgggtcacctatgtactatactataattgaaccttacctggggacccacacgttcaggctcaggtgttttgtttcttagagcctttgttaagtttcctacgtgtgcgacattcctaaggtcttcaagtttcctattctgttttgtgctgtgtgaaagttctgatatgacccctgatgataaagtccataactgtagttaactggtcatcactgctca

SEQ ID NO: 133216 - DNA, 1642 bp, Artificial Sequence
  derived and/or modified sequence
agagcactgctgcggccgccgccattttagcgttttgtcagaagcgtccgcgccgcgaggaggaggccctgctggtttctgtgcgggctcttgtcaggatggtgaagctgttcatcggaaacctgccccgggaggctacagagcaggagattcgctcactcttcgagcagtatgggaaggtgctggaatgtgacatcattaagaattacggctttgtgcacatagaagacaagacggcagctgaggatgccatacgcaacctgcaccattacaagcttcatggggtgaacatcaacgtggaagccagcaagaataagagcaaaacctcaacaaagttgcatgtgggcaacatcagtcccacctgcaccaataaggagcttcgagccaagtttgaggagtatggtccggtcatcgaatgtgacatcgtgaaagattatgccttcgtacacatggagcgggcagaggatgcagtggaggccatcaggggccttgataacacagagtttcaaggcaaacgaatgcacgtgcagttgtccaccagccggcttaggactgcgcccgggatgggagaccagagcggctgctatcggtgcgggaaagaggggcactggtccaaagagtgtccgatagatcgttcaggccgcgtggcagacttgaccgagcaatataatgagcaatacggagcagtgcgtacgccttacaccatgagctatggggattcattgtattacaacaacgcgtacggagcgctcgatgcctactacaagcgctgccgtgctgcccggtcctatgaggcagtggcagctgcagctgcctccgtgtataattacgcagagcagaccctgtcccagctgccacaagtccagaatacagccatggccagtcacctcacctccacctctctcgatccctacgatagacacctgttgccgacctcaggagctgctgccacagctgctgctgcagcagcagccgctgctgctgttactgcagcttccacttcatattacgggcgggatcggagccccctgcgtcgcgctacagccccagtccccactgttggagagggctacggttacgggcatgagagtgagttgtcccaagcttcagcagccgcgcggaattctctgtacgacatggcccggtatgagcgggagcagtatgccgatcgggcgcggtactcagccttttaaagcttgaggtgggatgtgtgtgggctgaaattccgagctgcggttgtgcatgagaatacacccttcgtggtaccccatctccgggacgttctcggctctgtgcgttcagtccctcaggaaccgtggaccttaatttaccttgctaagttcagaccttctcttcctttcctttcctttcctctcctgcccattttcctgttcttctgtccttcaatacttctgtagcttcccattcatgttctcttctcccagcaggcctcattgtgtgcagaaactgtggtgggggctgtgctgtctcctccctgcctcctgcctcctgcggctgttggatttgggaatgaccttggtgagagtctcactgctccagggtctctttttggtccaaaggctagacctatagagttggatcactttttttctttccggtgaaataaatggtttttcaactt

SEQ ID NO: 133217 - DNA, 1095 bp, Artificial Sequence
  derived and/or modified sequence
atggtgaaactcttcatcggtaacttaccccgcgaagccacagaacaggagattcggtcactgttcgaacagtacggaaaggtgctagagtgcgatattattaagaattatggctttgttcacattgaagataagaccgcagcagaagacgcaatcagaaacctccatcactataagcttcatggcgtgaacatcaatgtcgaagccagcaagaacaagtccaagacaagcaccaaactccatgttggcaatatctcacccacatgtacaaacaaagagctcagggctaagtttgaagaatacgggcccgtgatcgagtgcgatatcgtaaaagactacgcttttgtgcacatggagcgcgcagaggacgcagtcgaggcaatccggggccttgataatacggaattccagggtaaaaggatgcatgtgcaattatcgacgagtcgtcttcgaacggcaccaggtatgggggaccagtcaggttgctatcgttgcggcaaagaaggtcattggtcgaaggaatgccctatcgataggtccggacgtgttgcagatctgacggaacagtacaatgagcagtacggtgctgtcagaacaccttataccatgtcgtatggggatagcctgtactacaacaacgcctacggggcgctggacgcctactacaagcgatgcagagccgctaggagttacgaggcggttgctgccgccgctgccagtgtatataattatgcagagcagacgctctcccagctacctcaagtccagaatacagctatggctagtcatctcaccagtacatcgctcgacccatatgatcgccacctgctgcctacctccggagcggccgctaccgccgccgccgcagccgctgctgctgctgccgtgacggcggccagcacctcctactacgggagagaccgcagtccactgcggagggcgaccgctccagttccaactgtcggagaagggtacgggtacggccacgagtcagagctttcccaagcaagtgcagctgcacgcaacagtctttatgatatggcgaggtatgagagggaacagtatgctgaccgcgcaaggtactcagccttctag

SEQ ID NO: 133218 - DNA, 1095 bp, Artificial Sequence
  derived and/or modified sequence
atggtcaagcttttcatcggcaacctacccagggaggcaaccgagcaggaaattaggtctctgttcgaacagtacggcaaggtactggaatgtgacatcatcaagaactacggtttcgtgcacatcgaggataagactgctgcggaagatgcaataagaaatttgcatcactataaactgcacggcgtgaatattaacgtggaagcttcaaaaaataagtctaagacctctacaaagctacacgtaggtaacatcagcccgacctgtacaaacaaggaactgagggccaagtttgaggagtacggcccagtgatcgagtgcgacattgttaaggattacgctttcgttcatatggagcgagcagaggacgccgttgaggcaatcaggggcctcgataacacagagtttcagggcaagagaatgcatgtgcaactgagtacaagccgactgcgcactgctccaggcatgggcgatcagagtgggtgttatcgatgcgggaaggaagggcattggtctaaggagtgccccattgacaggtctggtcgggtcgccgacctaactgagcaatataatgagcagtatggggctgtgagaaccccttacacaatgagctacggcgatagcttgtattataataatgcctacggcgcgctggacgcatactataaaaggtgcagggccgccagatcttatgaggctgtagccgccgcggcggcaagcgtgtacaactacgcagagcagacactgagtcaactaccccaggtgcagaacactgccatggcatctcacctgacttctacctctctggacccctatgatcggcatctcttgccaacaagcggggctgcggcaacagccgccgccgccgcggccgctgcagcagccgtgaccgctgcatctacctcatattacggccgagaccgaagtccgcttaggcgggctacagcccccgtcccaaccgtcggcgaaggatacgggtatggacatgaatcggaactgagccaggctagcgcggctgccagaaactctctgtacgatatggcccggtacgagagagagcaatatgctgatagggcacgatattccgctttctag

SEQ ID NO: 133219 - DNA, 1095 bp, Artificial Sequence
  derived and/or modified sequence
atggtaaaactcttcattggtaacctgccgcgcgaggccactgagcaggagattcgtagcttgttcgaacagtacgggaaggtgctcgagtgcgatataattaagaactacggctttgtgcatattgaagacaaaacagcagccgaggacgctatacggaacttacaccactataagctgcacggcgtgaatattaacgttgaagccagcaaaaataaaagtaagacctctaccaagctccatgtgggaaacatatcccccacttgtacaaacaaggaactgcgggccaagttcgaggagtatggaccggtgattgaatgtgatatagtgaaggattacgcctttgtgcatatggaacgagccgaagatgctgttgaagctatccgaggcttggataacacagaatttcaaggaaagcgcatgcacgttcaactgagcaccagtcggttgcgcaccgccccgggtatgggcgaccaaagcggctgctatcgatgcggcaaagagggccattggagcaaggagtgtccaatcgaccgttcagggcgcgtagccgatttgacggagcagtataatgagcagtacggcgccgtaaggaccccctatactatgtcttatggagactctctgtactataacaatgcttacggggccttagacgcatactacaaacgctgccgggccgcgcgtagctacgaggccgtcgcggcagctgcagcctcagtgtacaactatgctgaacagactctgtcccagcttccacaagtgcagaatacagctatggcatctcatctgacttctacgtccctggacccatacgatcgccatttactccccacctccggtgctgccgccaccgccgcagctgccgccgccgccgcagctgcggtaacagccgctagtacgtcctactacggcagggatagatctcctttgagacgggccactgctcctgtaccaactgtgggggagggctacgggtatggacacgaaagcgagctaagccaagcatcggccgccgcccggaacagtctgtatgacatggctcggtatgaacgagagcagtacgccgatcgtgcacgttactccgcgttctag

SEQ ID NO: 133220 - DNA, 1095 bp, Artificial Sequence
  derived and/or modified sequence
atggtgaagctgttcatcggcaacctgccccgggaggccaccgagcaagaaattagaagtctgttcgagcagtatggtaaagtgttagaatgtgatatcatcaaaaactatgggttcgtgcacatcgaggataaaacggcagccgaagatgccattcgtaacctgcaccattataagctccatggggtgaatataaatgtcgaagcctctaaaaacaagagtaaaacttccacaaaactgcacgtcggcaacatctccccaacatgcactaataaagagctccgggcaaagttcgaagagtacggacccgtaattgaatgtgatattgtcaaagactatgcttttgtccacatggaacgtgcggaagacgccgtcgaggccatccgcggtctcgataacacagagttccagggaaaaaggatgcacgtgcaactgagcacttcacgattgaggacagcgcccgggatgggagatcagtctggatgttacagatgtggaaaggaaggtcattggtctaaagaatgccccatcgatcgatctggaagggtcgctgacctgaccgaacagtataacgagcaatatggagccgtcaggaccccctataccatgtcttacggtgacagtctttactacaataatgcatacggagcccttgatgcttattacaagcggtgccgggcagcgcggtcatacgaggctgtggcggccgccgctgcttctgtatataactatgcggaacagacgctgtcccagttaccgcaagtgcagaataccgcgatggccagccacctgacctccacctctttagacccgtacgacaggcacctgcttcctaccagcggggcagccgcaacggccgcggcagctgccgctgccgctgccgctgtgactgctgccagtacctcctactacggccgtgatcgatcacccttgcggagggctactgcccccgttccaactgtgggagaggggtacggctacggccatgagtcggaactctcccaagcttccgctgccgcgcgtaacagcctatatgacatggccagatacgagagggagcagtatgccgatagagcacggtacagcgccttctag

SEQ ID NO: 133221 - DNA, 1095 bp, Artificial Sequence
  derived and/or modified sequence
atggtgaagctgttcatcggcaacctgccccgggaggccaccgagcaggaaattcgatccctatttgaacaatacggaaaggtgctggagtgcgatattatcaaaaactatggattcgtccatatagaagacaaaacagccgccgaggacgcaatcaggaacctgcatcattacaagctccatggagtgaatattaatgtagaagcctccaagaacaaatccaaaacgagcaccaagttacacgtgggtaatatttcaccaacttgcacgaataaagagctgagggcaaaatttgaggaatatggacctgtgatcgaatgtgatatagtgaaagattacgcttttgttcatatggaacgggctgaggatgctgtggaggcaataaggggcctggataacaccgaattccaaggcaagcgaatgcatgtacagctgagcactagcagactacgtacggcacctggaatgggtgatcagagtggatgttacaggtgcggtaaagaggggcactggagtaaggagtgcccaatcgaccgctccggccgtgtggctgacctgaccgagcagtataatgagcagtatggcgccgtcaggactccttataccatgtcctatggcgattcactgtattacaacaatgcatatggcgcactggatgcatattacaagcggtgtagagcagcccgatcctatgaggcagtcgctgcagcagctgcctctgtgtataattacgcggaacaaaccctctcccaactgcctcaggttcaaaacactgctatggcaagtcatttgacatccacgtctcttgatccgtatgatagacacttacttccaacctccggcgctgctgctaccgctgccgcggctgcggcagctgcagcagccgtcacggcagcgagcacttcttattacggccgggaccggagtcctctccgccgtgcaaccgcccccgtccctaccgtgggagaaggttatggctacgggcatgagtccgagctgtcccaggcctctgctgccgcccgcaacagtctgtatgacatggcaagatatgagcgggagcagtacgccgatcgggcacggtactccgccttttag

SEQ ID NO: 133222 - DNA, 1095 bp, Artificial Sequence
  derived and/or modified sequence
atggtgaagctgttcatcggcaacctgccccgggaggccaccgagcaggagattcgcagtttatttgagcagtatggaaaagtgctagagtgcgacatcatcaaaaattacgggttcgtgcacatcgaggacaagaccgccgccgaggacgcgatccgaaatctgcatcattataaactccatggcgtgaacatcaacgttgaggcctccaaaaataagtccaaaacatctacaaaactgcatgttggcaatataagccctacttgcaccaataaagaactgcgagccaagtttgaggaatatggacccgtgattgagtgcgatattgtcaaagactatgcgttcgtgcatatggagcgggctgaagatgccgtggaggctatcaggggcctggacaacaccgaattccaagggaagaggatgcacgtccagttatctacctccagactgcgcacagccccagggatgggcgatcagtccggatgttacagatgtggtaaggaaggtcactggtcaaaggagtgtccaattgacaggagtggaagggtagccgacttaaccgaacagtataatgagcagtatggcgccgtaagaaccccatacacaatgtcctacggggattctctgtattataataatgcttacggtgcactcgacgcttattacaagaggtgtagggctgcccgttcatacgaggccgtggctgcggccgcagcttccgtctacaattacgctgagcaaacgttatctcagttgccccaggtccaaaatacggccatggcgagccacttaacatcgacctctctcgacccgtacgacagacatcttctgccgacctctggcgcggctgccaccgctgccgccgccgcggcagccgctgctgcggtgactgctgcgtctacctcttactacggacgagaccgttcccccctgcgccgggcgaccgcaccagtccctacagtgggtgaagggtacggctacgggcacgagagcgaactcagccaggcaagcgccgctgcccgaaattcactgtatgacatggcccggtatgagagggaacagtacgccgacagggcccggtattcagctttttag

SEQ ID NO: 133223 - DNA, 1095 bp, Artificial Sequence
  derived and/or modified sequence
atggtgaaactcttcattggcaacctcccaagagaagccactgaacaggagatcaggagtcttttcgagcagtatggcaaagtgctggagtgcgacatcattaaaaactacggttttgtgcacatagaagataagaccgctgctgaggatgcaatcaggaacttgcaccattacaagctccatggggtgaatataaacgtggaagcaagtaaaaacaagagtaagacatctacaaagctccacgtggggaatatttcacccacgtgcacaaataaggaattacgggctaagtttgaggagtacggtccagttattgagtgcgacattgtgaaagattatgccttcgtgcacatggagcgcgctgaggacgcggtggaggccattcgcggactagataacacagagtttcagggcaaaaggatgcacgtccaactttctaccagcagactgagaaccgcacccggaatgggggaccagtccgggtgctacaggtgtggcaaggagggccactggtctaaggagtgtcctatcgacaggtcaggaagagtggcggatttaaccgaacagtataacgagcagtatggggcagtacggacaccatacacaatgtcctacggtgactctctttactataataatgcctatggagctctggacgcctactacaaaaggtgccgcgctgctaggtcatacgaggcagtggccgctgccgcagcgtcagtttacaactatgctgagcagaccctgagtcagctcccgcaagtgcagaatacagcgatggctagtcatctgacgagtacgagtctcgatccctacgataggcacctactgccaacctcgggggcagcggcaacagccgcagccgcagccgcagcagctgccgcagtgacagctgccagtacatcgtattatggtcgggacagatctcctcttcggagggccactgcgcctgtgcccaccgtgggtgagggctacggctatggtcacgaatcagaactgagccaggcctctgcagcagctcgtaacagcttgtacgatatggcaaggtatgagcgtgagcagtacgctgatcgggcacggtactctgcgttctag

SEQ ID NO: 133224 - DNA, 1095 bp, Artificial Sequence
  derived and/or modified sequence
atggtcaaattattcatcgggaacctaccgagagaagccactgaacaggagatacggagcctatttgagcagtatggaaaggttcttgagtgtgacattattaagaattatggattcgtgcacatcgaggataagaccgctgcagaggacgcaattcggaatcttcatcattacaaactacacggcgttaacattaatgtcgaagcttccaaaaacaagagcaagacatctaccaaactgcatgtaggcaatataagcccaacgtgtaccaataaagagttgcgtgccaagttcgaggagtatggaccggtgatcgagtgcgacattgttaaggactatgccttcgtgcacatggaacgtgccgaagacgccgtcgaagctatcaggggactggataacaccgaatttcagggcaaacggatgcatgtccaactctctacatcaaggctgagaacggcacccggtatgggtgaccaatccgggtgttatagatgtgggaaggaaggccattggtctaaggaatgtcccattgatcgaagcggcagggtggctgacctgacagagcagtacaacgaacagtatggagcagtcaggaccccgtacactatgtcttacggcgattctctgtactacaacaacgcgtatggggcattagacgcctattataagcgctgtagggctgctcgcagctacgaagctgttgctgctgccgctgcatcagtttataattacgctgaacagacactgagccaactcccccaggtgcagaacaccgccatggcaagccatctcacctccaccagtctcgacccctatgatcggcatctgctgcccacctctggcgcagcagccaccgctgccgcagccgctgccgctgcagccgctgtaacagccgcttccacgtcgtattacggcagagatagatcgcccctgagaagagccacagctcccgtacccactgtgggcgaagggtatggttacggccatgagagtgagctcagtcaggcctcagcagctgctaggaactcgctgtacgacatggcccgttacgagcgcgaacagtacgctgaccgggctagatattctgccttctag

SEQ ID NO: 133225 - DNA, 1095 bp, Artificial Sequence
  derived and/or modified sequence
atggtgaagctgttcatcggcaatctgcctcgagaggcgactgaacaggaaatccggagcctcttcgagcaatacggcaaagtactcgagtgcgacatcattaagaattatgggtttgtacatatcgaagataaaactgccgctgaggacgctatcagaaatttacatcattacaagctgcacggggtgaacattaacgtggaggcctcgaagaataagtctaaaacctccaccaaactgcatgtgggaaacatctctccaacgtgcaccaacaaagaactgagagccaagtttgaagaatacggacctgtcattgaatgcgacatcgtgaaagactatgcttttgtccatatggaaagagcggaggacgccgtagaggctatccgcggactggacaatacagagtttcagggcaaacggatgcacgttcagctctcgacttcgcgtttacgaacggcgccaggtatgggtgatcaaagtggctgctaccgctgtggaaaggaaggtcattggtctaaggaatgccccatcgaccgcagcggcagagttgccgatctcacagagcagtataatgaacagtacggagccgtgcgcaccccgtacaccatgagctatggggatagtctctactacaacaatgcctacggagctctggacgcttattataaacgatgcagggcggcaaggagctacgaggcggttgctgctgccgctgctagtgtctataactatgccgaacagaccctgtcacagctaccccaagtccaaaacaccgccatggctagccacttgacatccacctccctcgatccctacgacaggcacctcctgcccaccagtggggctgccgcaaccgcagctgctgcagccgctgcggctgccgcagttactgctgctagtacatcctactatgggagagatcggtctcctcttcggagagccactgctcccgtgcccactgtcggcgagggatacggctatggccacgagtctgagttgtcgcaggcctccgccgctgcaaggaactcactctatgacatggccaggtatgaaagagaacaatatgcagatcgcgcacgatactccgctttctag

SEQ ID NO: 133226 - DNA, 1550 bp, Artificial Sequence
  derived and/or modified sequence
ggaaggattacactgttccaggttttagggagaaaggtttaccaaaccggtggccttaaatgattttcgctccttgatattatcatcttgaaggaaagctgcagtctctggtcccagcccaccccatggcccctcccagtcccagcaccaccagcagtaataacaacagtagcagcagtagcaactcaggatgggatcagctcagcaaaacgaacctctatatccgaggactgcctccccacaccaccgaccaggacctggtgaagctctgtcaaccatatgggaaaatagtctccacaaaggcaattttggataagacaacgaacaaatgcaaaggttatggttttgtcgactttgacagccctgcagcagctcaaaaagctgtgtctgccctgaaggccagtggggttcaagctcaaatggcaaagcaacaggaacaagatcctaccaacctctacatttctaatttgccactctccatggatgagcaagaactagaaaatatgctcaaaccatttggacaagttatttctacaaggatactacgtgattccagtggtacaagtcgtggtgttggctttgctaggatggaatcaacagaaaaatgtgaagctgttattggtcattttaatggaaaatttattaagacaccaccaggagtttctgcccccacagaacctttattgtgtaagtttgctgatggaggacagaaaaagagacagaacccaaacaaatacatccctaatggaagaccatggcatagagaaggagaggctggaatgacacttacttacgacccaactacagctgctatacagaacggattttatccttcaccatacagtattgctacaaaccgaatgatcactcaaacttctattacaccctatattgcatctcctgtatctgcctaccaggtgcaaagtccttcgtggatgcaacctcaaccatatattctacagcaccctggtgccgtgttaactccctcaatggagcacaccatgtcactacagcccgcatcaatgatcagccctctggcccagcagatgagtcatctgtcactaggcagcaccggaacatacatgcctgcaacgtcagctatgcaaggagcctacttgccacagtatgcacatatgcagacgacagcggttcctgttgaggaggcaagtggtcaacagcaggtggctgtcgagacgtctaatgaccattctccatatacctttcaacctaataagtaactgtgagatgtacagaaaggtgttcttacatgaagaagggtgtgaaggctgaacaatcatggatttttctgatcaattgtgctttaggaaattattgacagttttgcacaggttcttgaaaacgttatttataatgaaatcaactaaaactatttttgctataagttctataaggtgcataaaacccttaaattcatctagtagctgttcccccgaacaggtttattttagtaaaaaaaaaaaaacaaaaaacaaaaacaaaagatttttatcaaatgttatgatgcaaaaaaagaaaaagaaaaaaaaaaa

SEQ ID NO: 133227 - DNA, 1113 bp, Artificial Sequence
  derived and/or modified sequence
atggccccgcccagtccttccaccacctcctcaaataacaactcaagtagctccagtaactccggctgggaccaactcagtaagaccaatttgtatatccgcggtttgccgcctcacacaacggaccaagaccttgtgaagttgtgccagccatacggtaagatcgtctcaacaaaagcaatcctggacaagaccacaaataaatgcaagggatatggattcgttgatttcgattccccagccgcggctcagaaggctgtgagtgctctgaaagctagcggtgtacaggcccagatggccaaacagcaggaacaggatcctacaaatctgtatatttccaatctgccgctgtcaatggatgagcaggaacttgagaacatgctgaaaccgtttggccaagtgatctctactcggatcttgagagactcgtctgggacctctcgcggagtgggttttgccagaatggaatccactgaaaaatgcgaagccgtcattggccacttcaacggcaaatttatcaaaaccccacccggcgtcagtgcaccgacggaaccattgctctgtaagtttgctgatggcggacaaaaaaagcgtcagaaccctaacaaatacattccaaacggacgcccttggcacagggaaggcgaagccggtatgaccttgacttacgatcctaccacagctgcaattcagaatgggttttatcccagtccgtatagcatagccactaacaggatgataacccagactagcattaccccttatatcgcatcacctgtcagcgcctatcaagtgcagagccccagttggatgcagcctcagccctatattctccaacacccgggggcggtcctgacacctagcatggaacatacgatgtccctgcagcccgcatccatgatcagccccttggcccagcagatgagccatctttctttgggttccaccggcacatatatgcctgccactagtgcgatgcagggcgcctacttaccgcagtatgcccacatgcagaccaccgcagtccctgtggaagaggcgtcggggcaacagcaggtggccgttgaaacgagtaatgaccacagtccttacacatttcaacccaacaagtag

SEQ ID NO: 133228 - DNA, 1113 bp, Artificial Sequence
  derived and/or modified sequence
atggcccctccttctccaagcacaacatctagtaataacaattcctcgtcttccagcaattcggggtgggaccaactctctaaaaccaatctgtacattcgcggcctgcctccccacacaactgatcaggacctcgtaaagctctgccagccttacggcaagatcgtgtcaactaaagctattctcgataagacgactaacaagtgcaaggggtatgggtttgtggatttcgatagcccagccgccgcgcagaaggccgtgtctgcactcaaagccagcggagtacaggcacaaatggcaaagcagcaggaacaggacccaaccaacctttatatttccaacctaccattgagtatggatgaacaggagctcgaaaacatgctgaaaccttttgggcaggttatatccactcggattcttcgagacagctcaggaacaagccgcggcgttggattcgcccggatggagtccaccgaaaaatgtgaggctgttattggacatttcaatggtaagtttattaagacccccccaggcgtttcagcacccacagaacctctcctctgcaagtttgcagatggcgggcagaaaaaacgccagaatccgaacaagtacatccccaacggccgcccctggcaccgcgaaggagaagccgggatgacattaacatatgatccaactacagcagccattcagaacggattttacccttcaccatacagcatcgcgactaacagaatgatcactcagacctctatcacaccctacatcgcgagtcccgtcagtgcttatcaagtgcagagcccatcttggatgcaacctcagccttatatcctgcaacatcctggggccgttctgactccctctatggaacatacaatgagtctgcaaccggcttcgatgatttccccgttggcacagcagatgtcacacctatccctgggctccacgggcacgtatatgccagctacttcagccatgcagggggcttatctcccacagtacgcacacatgcaaaccaccgctgtgcccgtcgaggaggcaagcggccagcagcaagtcgcggtcgaaacctcgaatgatcactcaccatatacctttcagcctaataagtag

SEQ ID NO: 133229 - DNA, 1113 bp, Artificial Sequence
  derived and/or modified sequence
atggcaccaccctcgccgagcacaacctcttcgaacaacaatagctcctcttccagcaattctgggtgggaccagttgtctaaaactaacctgtacatccgaggccttcccccgcataccactgaccaagatcttgttaagttatgtcagccttatggcaagatcgtgtcaaccaaagctatcctggataaaaccacaaacaagtgcaagggctacggatttgtggattttgatagccccgccgcagcccagaaagcagtgagtgctctgaaggcttctggtgtccaagcccagatggcaaagcaacaggaacaagatccaacaaatctctatatcagcaatttgcctctctcaatggatgaacaggagctggagaatatgctgaaacctttcggacaggtcatttccactcggattctgcgcgattcatccggcaccagcaggggagtgggcttcgctcgcatggagtctaccgaaaagtgcgaggcagtaataggtcatttcaatgggaagtttattaaaactcctccgggagttagcgcccctacagaaccactcctctgcaagtttgccgacggaggccagaagaaaaggcagaaccctaacaaatacattcccaacggcagaccttggcacagagagggcgaagctggtatgacattgacctatgatcctaccactgcggcaatccaaaacgggttctatccctcaccttacagcattgccacgaataggatgatcactcagacttctatcacaccatacatcgcctctccggtttctgcataccaggtgcagtctcctagctggatgcagccccagccatatatccttcagcatccgggggccgtgctgactccatctatggaacatactatgagcttacagccggccagtatgatctcacctctggcacaacagatgagtcatctctccctcgggagtaccggcacatacatgcctgcgacatcagccatgcaaggtgcctacctgcctcagtacgcacacatgcagaccacagcagtgcccgtggaggaggcctccggccaacagcaagtcgccgtggagaccagcaacgatcatagtccttacacctttcaaccaaacaaatag

SEQ ID NO: 133230 - DNA, 387 bp, Artificial Sequence
  derived and/or modified sequence
atggcaccaccttctcctagtactacgtcatcaaacaacaattcctcttcctcttcaaactcaggctgggaccagttgtcaaaaacgaacctctacatacgtggtctaccccctcataccacagatcaggatctggtgaaactgtgtcaaccttacggcaagatcgtgagtaccaaggccattctcgataagacaacgaataaatgcaaggggtacggatttgtcgactttgattcccccgccgccgcccagaaggccgtgtccgctttgaaagccagtggcgttcaagcacagatggccaaacagcaggaacaagatcccaccaacttgtatatcagtaatctccctctaagcatggatgaacaggaactggagaacatgttatag

SEQ ID NO: 133231 - DNA, 1113 bp, Artificial Sequence
  derived and/or modified sequence
atggccccacccagccccagcaccaccagcagcaacaacaacagcagcagcagcagcaacagcggctgggaccagctgagcaagaccaacctgtacatccggggcctgcccccccacaccacagaccaggacctggtgaagctgtgccagccctacggcaagatcgtgtccaccaaggccatcctggacaagaccaccaacaagtgcaagggctacggctttgtggactttgacagccctgctgctgcccagaaggctgtgtctgccctgaaggccagcggcgtgcaggcccagatggccaagcagcaggagcaggaccccaccaacctgtacatcagcaacctgcccctgtccatggatgagcaggagctggagaacatgctgaagcccttcggccaggtgatcagcacccgcatcctgcgggacagcagcggcaccagcagaggagtgggctttgccaggatggagagcacagagaagtgtgaggccgtgattggccacttcaacgggaagttcatcaagaccccacctggggtgtctgcccccacagagcccctgctgtgcaagtttgctgatggcggccagaagaagaggcagaaccccaacaagtacatccccaacggccggccctggcaccgggagggggaggccggcatgaccctgacctatgaccccaccacagctgccatccagaatggcttctaccccagcccctacagcatcgccaccaacaggatgatcacccagaccagcatcaccccctacatcgccagccctgtgtctgcctaccaggtgcagagccccagctggatgcagccccagccctacatcctgcagcaccctggagctgtgctgacccccagcatggagcacaccatgagcctgcagcctgcctccatgatcagccccctggcccagcagatgagccacctgagcctgggcagcacaggcacctacatgcctgccaccagcgccatgcagggcgcctacctgccccagtatgcccacatgcagaccacagctgtgcctgtggaggaggccagcggccagcagcaggtggccgtggagaccagcaatgaccacagcccctacaccttccagcccaacaagtag

SEQ ID NO: 133232 - DNA, 387 bp, Artificial Sequence
  derived and/or modified sequence
atggccccacccagccccagcaccaccagcagcaacaacaacagcagcagcagcagcaacagcggctgggaccagctgagcaagaccaacctgtacatccggggcctgcccccccacaccacagaccaggacctggtgaagctgtgccagccctacggcaagatcgtgtccaccaaggccatcctggacaagaccaccaacaagtgcaagggctacggctttgtggactttgacagccctgctgctgcccagaaggctgtgtctgccctgaaggccagcggcgtgcaggcccagatggccaagcagcaggagcaggaccccaccaacctgtacatcagcaacctgcccctgtccatggatgagcaggagctggagaacatgctgtag

SEQ ID NO: 133233 - DNA, 1113 bp, Artificial Sequence
  derived and/or modified sequence
atggccccccccagccccagcaccaccagcagcaacaacaacagcagttccagctccaacagtggctgggatcaactatccaagaccaacctgtacatcagaggtcttccaccacacactaccgatcaggacttggtgaagctttgtcagccttatggcaaaatcgtgagtactaaggccatcctagacaagaccactaacaaatgcaagggatatggattcgtcgatttcgacagccccgcagcagcacagaaggctgtgagcgccctaaaagcgagcggtgtccaggcccagatggcaaagcagcaagagcaggatcccacaaatctttatattagcaacttgcctttgtctatggacgagcaggagctggaaaacatgctcaaacccttcgggcaggtcattagtacaaggatcctacgcgattcgtccggcacgagtcgcggtgttgggtttgcccggatggagtccaccgaaaagtgcgaggctgtgatcggccattttaatgggaaattcatcaagacacccccaggcgtgtctgcacctactgagccactgctgtgcaaatttgctgacggcggacagaagaagcgccagaatcccaataaatacatcccgaatggccggccctggcatagagagggcgaagcgggtatgactttaacttacgatcctacaacagccgcaattcagaatggcttctatccgagtccgtactccatcgccaccaaccgaatgatcactcaaacatccattaccccctacatcgcctcacctgtcagcgcctaccaggtacagagtccctcctggatgcaaccacagccatatattctgcagcacccaggagccgtcttgactccatcaatggagcacaccatgtctttgcagcctgcctctatgatcagccctttagcacagcagatgagccatctgtcattaggctcaacagggacatatatgccagccacgtctgcgatgcagggagcctacctcccacaatacgcacacatgcagaccactgccgtccctgtggaagaggcctcaggccagcagcaggtcgcggttgaaactagcaatgaccactctccgtatacattccagccaaataagtag

SEQ ID NO: 133234 - DNA, 1113 bp, Artificial Sequence
  derived and/or modified sequence
atggccccccccagccccagcaccaccagcagcaacaacaacagctcctcctcttccaattctggctgggaccagctgtctaagacaaatctttatattcgtgggctgccaccacacaccactgaccaggatttagtgaagctctgtcagccatacgggaagatcgtgtccactaaggcgatccttgacaagacaaccaataaatgcaaagggtatggcttcgttgacttcgatagcccagctgcagcacaaaaagcagtctcagctttgaaagcctctggggtgcaggcacagatggcgaaacagcaggaacaggaccccacaaatctctatattagtaacctgcccttgtctatggatgagcaggaattagagaacatgctgaaaccctttggacaagtcatcagcacccggatcctcagagacagctctggcactagtaggggcgtgggattcgcaagaatggagagtaccgagaagtgcgaagcagtgattggccacttcaatggtaaattcattaagacacctcctggggtttccgccccgactgagcctctgctgtgtaagtttgcagatgggggccagaagaaacgccaaaaccccaacaagtacattcctaacgggcgcccatggcaccgtgagggggaggccggtatgacactaacttacgatccaactaccgccgcgatacaaaacggattttacccctcaccttacagcatagccacaaataggatgataactcagacgagtattaccccctacattgcatctccagtttccgcataccaggtgcaatctccatcttggatgcagcctcagccatacatactgcagcaccccggcgccgtacttacgccttctatggaacacacgatgtccttgcagcctgcttcaatgatatcccctctcgcacaacagatgtctcatctgtcacttggctcaacgggtacctatatgccagcaaccagcgcgatgcagggagcctacctgccacagtacgctcatatgcagacaacagcggtcccagtggaagaggcatccggccagcagcaggtcgccgttgagacttctaacgaccactcaccttatactttccagcccaataaatag

SEQ ID NO: 133235 - DNA, 1113 bp, Artificial Sequence
  derived and/or modified sequence
atggccccccccagccccagcaccaccagcagcaacaacaacagctcatcctcctctaattccggatgggatcagttgagcaaaaccaatttgtacattcgcggcttgcccccccacaccacagaccaggatctggtaaagctctgccagccttatgggaagatcgtctccaccaaggccatccttgataagactactaacaagtgtaaagggtacggattcgtcgactttgatagcccagccgcagcccagaaggccgtgtctgcgttaaaggccagcggggtgcaggcccagatggccaagcaacaggagcaggatccaacaaacctctacattagtaaccttccattatccatggacgaacaggaactagaaaatatgctgaaacctttcgggcaggttattagcacacgaatactcagagacagtagcggcacaagcaggggagtgggttttgctagaatggagtctaccgagaagtgcgaagccgtaattggacacttcaatggcaagttcattaagactcccccgggcgtttctgcccccacggagccattgctttgcaagttcgccgatgggggacagaaaaagcgacaaaacccaaataagtacatacccaacggccgaccttggcacagagagggtgaagctggcatgactttgacatacgaccctaccactgctgcaatccagaatggattttatccctctccatactctatcgcgactaaccgcatgattactcagacaagcatcactccatatatagcatccccggtgtcagcttaccaagtgcagtctccttcctggatgcagccacaaccatatatccttcaacaccccggcgccgttcttacaccgtctatggaacacacaatgtccctgcagcccgcatccatgatctctcctttggcgcaacagatgtctcacctctcccttgggtccacaggcacctatatgccagcaaccagcgccatgcagggggcgtatctgccccagtacgcccatatgcaaactaccgccgtacctgtggaggaggcatccggccagcagcaagttgctgttgagacatccaacgaccattctccctatactttccagcccaacaaatag

SEQ ID NO: 133236 - DNA, 387 bp, Artificial Sequence
  derived and/or modified sequence
atggccccccccagccccagcaccaccagcagcaacaacaacagcagtagcagctctaacagcggctgggaccaactgagtaagaccaacctctacattaggggcctgccgccccataccaccgatcaggacttggtgaagctttgccaaccctacggaaagattgtgtctacaaaggccatcttagataagactacaaacaagtgcaaagggtacggtttcgtggacttcgactcccccgccgcggcacagaaggcagtcagcgccttgaaggcctcaggcgtgcaagcccagatggccaagcagcaggaacaggaccccactaatctgtacatttctaaccttccgctgtcaatggacgaacaggaactcgaaaatatgctctag

SEQ ID NO: 133237 - DNA, 1113 bp, Artificial Sequence
  derived and/or modified sequence
atggcacctccttcaccaagcacaaccagttccaataacaattctagttccagttctaactcaggctgggatcagctgtctaagactaacctctacatccgcggtcttccaccgcatactaccgatcaggacttagtgaagctctgccagccttacggaaagattgtttccactaaagccatattggacaagacaaccaataagtgtaagggatatggtttcgtagacttcgattcacccgcagccgctcagaaagccgtctctgcactgaaggcaagcggggtgcaagcgcaaatggctaagcagcaggagcaggaccccactaacctgtacatttctaatctgcccttatccatggacgagcaggagttagagaacatgctgaagccctttggacaggtcatctccaccagaatcttgagagatagcagcggtacttccaggggcgtgggtttcgctaggatggagagtaccgaaaaatgcgaagcggtaattgggcattttaatgggaagttcattaaaacgcctcccggagtaagtgcacccacggaaccgctcctctgcaagttcgcagatgggggacagaagaaaagacagaatcccaataagtacatcccaaatggcagaccatggcacagagaaggggaagctggcatgaccttgacatacgatccgacgactgctgctatacagaacggcttttatccgtctccctactctatcgcaacaaatcgcatgatcacccagacatctataaccccgtatatcgcttctcccgtctcagcctatcaggtgcagagtccctcctggatgcagccacagccgtacattctccaacaccctggggcagtgcttaccccgagcatggaacacacaatgtccttgcagccagcctctatgatctccccattggcccagcagatgagtcacctgtccctgggctctactggtacctacatgcccgcaactagcgccatgcagggggcttatctgccacagtacgcccacatgcagactactgctgtacctgtagaggaagcttcaggccaacagcaagttgctgtagagaccagtaatgaccactctccatataccttccaacctaataaatag

SEQ ID NO: 133238 - DNA, 1113 bp, Artificial Sequence
  derived and/or modified sequence
atggcccctccttctccatctaccaccagctcaaacaataattcctctagctccagcaactcaggatgggaccagctgtcaaagactaacctgtatatcagagggctcccaccccacaccaccgatcaggaccttgttaagctctgtcaaccttacggtaagatagtctccaccaaggcaatcctcgacaagacgaccaacaagtgtaagggatacggttttgtggactttgacagtccagctgccgcacaaaaagctgttagcgccctgaaggccagcggagtgcaagcgcagatggccaaacagcaggagcaggaccctaccaacctgtatatctcaaacctcccactcagtatggatgagcaggaactcgagaatatgcttaaaccattcggacaggtgatctctacacgtatcttgcgagattcgtctggaacatctagaggagtgggtttcgcacggatggagtctaccgagaaatgcgaggctgtgataggtcattttaatgggaaatttattaagaccccacctggcgtcagcgctcctaccgaacctctgctttgcaagtttgccgacggcggacagaagaagcgacaaaatcctaacaaatatataccaaacggcaggccctggcaccgagagggcgaggcgggaatgaccttgacctatgaccctaccaccgccgcaatccagaacggcttttatcccagtccctactctatcgctacgaatcgaatgattactcaaaccagtattacaccgtacatagcctcaccagtgtccgcctaccaggtgcaatcgccttcttggatgcagccacagccctatattctgcaacaccccggagcggttctgaccccctcaatggagcacaccatgagtcttcagccagcttctatgatcagcccgcttgctcagcagatgagccatctgagccttggcagtacgggaacctacatgccagcaacttctgctatgcagggagcttatttgccccagtatgcccacatgcagacaacagcggtcccggtggaggaagcttccggacagcagcaagtcgccgtggaaacaagcaacgaccattccccgtacacattccaaccaaacaaatag

SEQ ID NO: 133239 - DNA, 1113 bp, Artificial Sequence
  derived and/or modified sequence
atggcccctccatctccatccaccaccagcagcaataacaatagtagctctagttctaactctggttgggaccaactatccaaaactaatctgtacatccgcggtcttccgccacacaccactgatcaggacttggtcaagctgtgccagccatacggtaaaattgtgtccactaaagcaattttggacaaaactaccaacaagtgcaagggctacggttttgtggactttgacagtccggctgccgcacagaaagccgtctcggccctaaaagcatcaggtgtccaggctcagatggccaagcagcaggagcaggatcccaccaatctctacatctccaacctaccacttagtatggatgaacaggagctcgaaaacatgctcaagccgtttggccaggtaatcagtactcgaatcctgcgagattcttccggaacttcaagaggtgtgggctttgctaggatggagtccacggagaagtgtgaagccgtgataggccatttcaacggtaagttcatcaagactccaccaggtgtctcagctcccacagagcccctgctgtgcaaattcgctgacggcggacaaaaaaagaggcagaatcccaacaagtacatcccaaacggtaggccctggcaccgggaaggggaggccggtatgacacttacttacgaccctaccacggctgctattcaaaacggtttctacccctctccatatagtattgcaaccaataggatgatcactcaaaccagtataacaccttacatcgcatcccctgtttccgcatatcaagtccagtccccttcttggatgcagccccagccttacattctgcagcacccaggcgctgtcctgacacctagtatggagcacaccatgtccctgcaaccggctagcatgatatctccactggctcaacagatgagtcaccttagcctcggcagcaccggtacatacatgccggctacctcagccatgcaaggcgcatacttaccccagtacgcacatatgcaaaccactgctgtccctgtggaggaagccagtgggcagcagcaggtggctgttgagaccagcaatgatcactcaccctacaccttccagcccaataaatag

SEQ ID NO: 133240 - DNA, 387 bp, Artificial Sequence
  derived and/or modified sequence
atggctcccccttctcctagcacaacctcttcgaacaataatagctcatcctcctctaatagcggctgggatcaactgagcaaaacaaatttatatattcgcggactgcctccccataccactgaccaggacctggtcaagctgtgccagccttatggcaaaatagtttctaccaaggccatcctcgacaaaacaacaaacaaatgcaaaggatacggctttgtggacttcgattctcccgctgcagctcagaaggcggtctccgctctaaaggccagcggggttcaggctcagatggctaaacagcaggagcaggaccccacaaacctgtacatatccaacctgcctttatcaatggacgagcaggaactggagaatatgctttag

SEQ ID NO: 133241 - DNA, 1113 bp, Artificial Sequence
  derived and/or modified sequence
atggccccccccagccccagcaccaccagcagcaacaacaacagcagcagcagcagcaacagcggctgggaccagctgagcaagaccaacctgtacatcagaggcctgcccccccacaccaccgaccaggacctggtgaagctgtgccagccctacggcaagatcgtgagcaccaaggccatcctggacaagaccaccaacaagtgcaagggctacggcttcgtggacttcgacagccccgccgccgcccagaaggccgtgagcgccctgaaggccagcggcgtgcaggcccagatggccaagcagcaggagcaggaccccaccaacctgtacatcagcaacctgcccctgagcatggacgagcaggagctggagaacatgctgaagcccttcggccaggtgatcagcaccagaatcctgagagacagcagcggcaccagcagaggcgtgggcttcgccagaatggagagcaccgagaagtgcgaggccgtgatcggccacttcaacggcaagttcatcaagaccccccccggcgtgagcgcccccaccgagcccctgctgtgcaagttcgccgacggcggccagaagaagagacagaaccccaacaagtacatccccaacggcagaccctggcacagagagggcgaggccggcatgaccctgacctacgaccccaccaccgccgccatccagaacggcttctaccccagcccctacagcatcgccaccaacagaatgatcacccagaccagcatcaccccctacatcgccagccccgtgagcgcctaccaggtgcagagccccagctggatgcagccccagccctacatcctgcagcaccccggcgccgtgctgacccccagcatggagcacaccatgagcctgcagcccgccagcatgatcagccccctggcccagcagatgagccacctgagcctgggcagcaccggcacctacatgcccgccaccagcgccatgcagggcgcctacctgccccagtacgcccacatgcagaccaccgccgtgcccgtggaggaggccagcggccagcagcaggtggccgtggagaccagcaacgaccacagcccctacaccttccagcccaacaagtag

SEQ ID NO: 133242 - DNA, 387 bp, Artificial Sequence
  derived and/or modified sequence
atggccccccccagccccagcaccaccagcagcaacaacaacagcagcagcagcagcaacagcggctgggaccagctgagcaagaccaacctgtacatcagaggcctgcccccccacaccaccgaccaggacctggtgaagctgtgccagccctacggcaagatcgtgagcaccaaggccatcctggacaagaccaccaacaagtgcaagggctacggcttcgtggacttcgacagccccgccgccgcccagaaggccgtgagcgccctgaaggccagcggcgtgcaggcccagatggccaagcagcaggagcaggaccccaccaacctgtacatcagcaacctgcccctgagcatggacgagcaggagctggagaacatgctgtag

SEQ ID NO: 133243 - protein, 407 aa, Artificial Sequence
  derived and/or modified sequence
MLLSVTSRPGISTFGYNRNNKKPYVSLAQQMAPPSPSNSTPNSSSGSNGNDQLSKTNLYIRGLQPGTTDQDLVKLCQPYGKIVSTKAILDKTTNKCKGYGFVDFDSPSAAQKAVTALKASGVQAQMAKQQEQDPTNLYISNLPLSMDEQELEGMLKPFGQVISTRILRDTSGTSRGVGFARMESTEKCEAIITHFNGKYIKTPPGVPAPSDPLLCKFADGGPKKRQNQGKFVQNGRAWPRNADMGVMALTYDPTTALQNGFYPAPYNITPNRMLAQSALSPYLSSPVSSYQRVTQTSPLQVPNPSWMHHHSYLMQPSGSVLTPGMDHPISLQPASMMGPLTQQLGHLSLSSTGTYMPTAAAMQGAYISQYTPVPSSSVSVEESSGQQNQVAVDAPSEHGVYSFQFNK

SEQ ID NO: 133244 - DNA, 3147 bp, Artificial Sequence
  derived and/or modified sequence
ccctcgctcccctcctccctccctccccgtctttcttaccccctccctttctctctctctctctctctcgctcgttccctaacattaaagagaaaatgctgctatccgtgacttccaggcccgggatttcgacttttggctacaatagaaacaacaagaagccatatgtgtcattggctcagcagatggcaccacctagcccaagcaacagtacacctaacagcagtagtggaagcaatggaaatgaccagctgagcaaaaccaacctatacatccgaggattgcaaccaggcactactgaccaagatcttgtcaagctgtgtcagccatatggcaagattgtttccactaaggccatactggacaagaccacaaacaaatgtaaaggctatggctttgtagattttgacagcccttcagcagcacagaaagctgtaacagcactgaaggccagcggtgtacaggcacagatggcaaagcaacaggaacaggaccccacaaatttatacatctcaaacctcccactgtcaatggatgagcaggaactggaggggatgctgaagccctttggccaggttatctccacccgtatccttcgagataccagtgggaccagcagaggtgttggctttgcaaggatggagtccacagagaagtgtgaagccatcatcacccactttaatggaaaatatattaagacaccccctggagtaccagccccatccgatcccttgctttgcaaatttgctgatggcgggccaaagaaacgacagaaccaaggaaaatttgtgcaaaatggacgggcttggccaaggaatgcagacatgggcgtcatggccttgacctatgaccccaccacagctcttcagaatgggttttacccagccccctataacatcacccccaacaggatgcttgctcagtctgcactctccccatacctttcctctcctgtgtcttcgtatcagagagtgactcagacatctcctctacaagtacctaacccatcctggatgcaccaccattcatacctcatgcagccttcaggttcagttctgacaccagggatggaccatcccatttctctccagcctgcctccatgatgggaccccttacccagcaactgggccatctctccctcagcagcacaggcacgtatatgccgacggctgcagctatgcaaggagcttacatctcccagtacacccctgtgccttcttccagtgtttcagtcgaggagagcagcggccaacagaaccaagtggcagtggacgcaccctcagagcatggggtctattctttccagttcaacaagtaacagtgggattcccctccccatctttactgaatagaaatgaattcttggagatactcatgctcccagattccagagggttaaccaggaatggagaccatccgtcggccctgctaaggactaacacttagccatcgtttttcacaggcctgggcctggaaaaagaaatctctacgttcctgccctttactattgctgatggagcctgggggaaccatcactttttttgtgtgctacattcaaggagatcaaaaaaacttttcttcttttgcaaagaaagctttttgtttttaactgcaacgtacttttcccctaccttgaagagacatggtggtcgcagcttctcatctatatgaaaaagttttcgatgtattggaattatttgggaatgcttttaaaacaatttgtaattatttctttacaaaccaaaacagaacagaaaggtgtggtgctggaacatcgatgaaggagccctacttactgagcttagttatggacttttttgatgcatgtgtgtatgtgttttaaaaagtatgcaggctctaaaaatgttattttgtaaagctctcagctcatgcaccccatctcctcttcacccatattatgccttctttctcttgtccagattcttctttttctcttttctaaacagctgagcctgcctactttgcccttttacagcttttaattttatggatttttaaaaatgaaatttcatgtggaatttggggttggggggcaggctgggcaaggaacaaggcagaacactaagtaggccatggaagtggctgttctttcccccaccctgccacaccctgggagaaaaaactagactttggcttcagaaagcacagatgtgacccaggcttactaaagagacaactccacagccctgggaacacacccttgagccaaacttggttgaagactaggtcttccctggcaagttccggaagaatggacttactgacttttatcaactcttctcactgccaaggccaacagcatctgaggtatagctttttgggagtacctgctttcttgcctcctggaggatattttctgtcctgggcttcatggcccctctcttccctgttacacattgctgtgctcagagcctttgcagctgcgacctagttgaatccacataggctccttccacacggtggaagatctgctgcttcactcacagaccaggagttctcaatcagaggtggttttgtccctcaggcctttggcaacatctagagacagttttgattgccacgcctggaggtgggatgtgtgtgctactggcatctagtggctgctaaacatcctacactgcataggatagtccccactacccccagccaagaattatctgactccaggggtcaatattgccaagactgggaaacactgatatagacagtgttgtccctgcctcctgggttagggtaaattttcaccccaaccctggacaaacagtgccttttgacactcatgcaactgttggggaaggactggactgggatccttgaattctccccagactttgacttttgataactctgcatatagcaagagtgattcttgaaagagctgtggctccatgctgaatgcacacatgtactcagagggattcaggtgggcattgttctggtgtgtgctgtgcaatggtgggaaaggacaaagctctctaaactgtccagagcaacctgccctgccccggtgtgcttggaccctttgcccagggaaccaggacatcagaaataatgttccttctgtggaaggacaacggggagctagggtagcaaagagcaataaattccaactctttatgaggtca

SEQ ID NO: 133245 - DNA, 1224 bp, Artificial Sequence
  derived and/or modified sequence
atgcttctgtccgtgacctccaggcctggtatcagcacattcggatataataggaacaataaaaaaccctacgtgtccctcgcccagcagatggctccaccctctcccagcaactcaacacctaattcgagttctgggtctaacggtaacgatcagctgtccaaaacgaatctttatattcgcgggctgcagccaggtaccaccgatcaggacctcgtgaaactgtgccagccctatggcaagatcgtgtcgacaaaagccattctcgacaagacaaccaacaaatgcaaggggtacggctttgtcgattttgattccccttccgccgcccagaaggctgtgacagcattgaaagccagtggggtccaggcacagatggcaaagcagcaagagcaagaccccactaacttatacatctcaaacttgcctctctccatggatgaacaggagctggaagggatgctgaaacctttcggacaggtgatcagcacgcgaatactccgcgatacttccggcacttctcgaggagttggttttgcacggatggaaagtactgaaaagtgtgaagcgataatcactcactttaatggaaaatatatcaagacccccccaggggtccccgctccctcggaccctttgttatgcaagttcgcagacggggggcccaaaaaacgacaaaatcagggaaagttcgtgcagaacggccgtgcttggcctcggaatgctgacatgggggtgatggctctgacttacgatccaaccaccgccctgcagaatggcttttatcctgccccgtataacataacccctaacaggatgctcgcccagagcgcactttctccctacctcagcagcccagtgagcagttatcagagggtcactcagacttcacctttacaggtacctaacccatcgtggatgcaccaccactcctatctgatgcagccttcaggcagcgtgctcactccaggaatggatcaccccattagtctccagccagcttcgatgatgggacccttgacccaacagttgggccatctgagcctttcatctactggcacatatatgccgacagctgccgcgatgcaaggtgcctacatttctcagtacacacccgtaccctcttcttccgtgtccgtcgaagaaagcagcggccagcagaatcaggtggccgtcgacgcaccgtccgaacacggggtatatagctttcaattcaacaagtag

SEQ ID NO: 133246 - DNA, 1224 bp, Artificial Sequence
  derived and/or modified sequence
atgctgctgtctgtgaccagcaggcctggcatcagcaccttcggctacaacagaaacaacaagaagccctacgtgtccctggcccagcagatggccccacccagccccagcaacagcacccccaacagcagcagcggcagcaatggaaatgaccagctgagcaagaccaacctgtacatccggggcctgcagcccggcaccacagaccaggacctggtgaagctgtgccagccctacggcaagatcgtgtccaccaaggccatcctggacaagaccaccaacaagtgcaagggctacggctttgtggactttgacagccccagcgctgcccagaaggctgtgacagccctgaaggccagcggcgtgcaggcccagatggccaagcagcaggagcaggaccccaccaacctgtacatcagcaacctgcccctgtccatggatgagcaggagctggagggcatgctgaagcccttcggccaggtgatcagcacccgcatcctgcgggacaccagcggcaccagccggggcgtgggctttgccaggatggagagcacagagaagtgtgaggccatcatcacccacttcaacgggaagtacatcaagaccccacctggggtgcctgcccccagcgaccccctgctgtgcaagtttgctgatggcggccccaagaagaggcagaaccagggcaagtttgtgcagaatggccgggcctggcccagaaatgctgacatgggcgtgatggccctgacctatgaccccaccacagccctgcagaatggcttctacccagccccctacaacatcacccccaacaggatgctggcccagagcgccctgagcccctacctgagcagccctgtgtcctcctaccagagggtgacccagaccagccccctgcaggtgcccaaccccagctggatgcaccaccacagctacctgatgcagcccagcggctctgtgctgaccccaggcatggaccaccccatcagcctgcagcctgcctccatgatgggccccctgacccagcagctgggccacctgagcctgagcagcacaggcacctacatgcccacagctgctgccatgcagggcgcctacatcagccagtacacccctgtgcccagcagctctgtgtctgtggaggagagcagcggccagcagaaccaggtggccgtggatgcccccagcgagcacggcgtgtacagcttccagttcaacaagtag

SEQ ID NO: 133247 - DNA, 1224 bp, Artificial Sequence
  derived and/or modified sequence
atgctgctgagcgtgaccagccggcccggcatcagcaccttcggctacaatcgaaataacaaaaaaccatacgtaagcttagcccagcagatggcccctcctagcccatcaaacagcacaccaaattccagcagtgggtccaacggcaatgatcagcttagcaaaacaaatttatacatcagagggctgcagccgggtaccaccgaccaggatctagttaaactgtgtcagccatacggcaagatagtgagtaccaaggccatactagacaaaactacgaataagtgcaaaggatatggctttgtggacttcgattctccctctgcggcccagaaagccgtgacggccctaaaagcttccggtgtgcaagcccagatggctaagcaacaagagcaggaccctaccaatctatacatctcaaaccttccgttgtctatggacgagcaggaactggaagggatgttaaagcccttcggtcaggttatatcaacacgcatcttgagagatacaagcggtaccagtagaggggtgggattcgctaggatggagtcgacagaaaaatgtgaggctatcattacacacttcaacggaaaatatatcaagactccaccgggggtcccagctccctctgatcccctcctgtgcaaatttgcagacgggggcccaaagaaacgccaaaaccaggggaaattcgtgcagaatgggagggcatggccaaggaacgccgatatgggagtaatggcattgacttatgatcctaccaccgctctacagaacggcttctaccccgcgccatacaacattactcctaatcggatgttagcccaaagcgccctatccccctatttatctagcccggtttcctcatatcagcgtgttacgcagacctcccccctgcaggtgccaaacccaagttggatgcaccatcattcctatctcatgcaaccatctgggagcgttctgacaccaggcatggaccaccccatctccctgcagcctgcatcgatgatgggaccacttacccaacagctgggacacctatcactgagtagcactggcacttatatgcccaccgcggcagcaatgcaaggggcctatatctcacaatacactccggttccttccagctctgtatcggtcgaagagtcctccggacaacagaatcaggttgcagtggatgccccctccgaacacggtgtctattcttttcaattcaacaagtag

SEQ ID NO: 133248 - DNA, 1224 bp, Artificial Sequence
  derived and/or modified sequence
atgctattgtcagtgaccagccgccctggcatctccacctttggatataacaggaataacaaaaagccttatgtctccctagcgcagcagatggcaccccctagtccttccaattctacacccaatagttcctctggaagcaatggaaacgaccaactgtctaagaccaacctatacattaggggccttcagccaggcaccacagatcaggatctggtgaaactctgccagccctatggaaagattgtgagcacaaaggctattctagataagaccactaataagtgtaagggttacggcttcgtggatttcgactccccttcggcagcccagaaggccgtcacagcactgaaggcctctggagtgcaggcacagatggccaagcagcaggaacaggaccccaccaatctgtatatcagcaacctgccactgtccatggacgagcaagagctcgaggggatgctgaagccttttggacaggtgatatccacgaggatcctgcgggatacatctggtactagtagaggagttgggttcgctcggatggagtccaccgagaagtgtgaagcaatcatcacccactttaatggcaaatacatcaagactccacctggggtgcccgctccatcagatcctctgctgtgtaagtttgcagatggaggcccaaagaaaagacagaaccagggaaagttcgtgcagaacgggagggcctggcccagaaacgccgatatgggagtaatggccttgacatatgaccctaccaccgcccttcagaatgggttttacccggcaccttacaacattactcctaatcgcatgctggctcagtccgccctaagcccttacctctcatcccccgtctcatcctaccagcgagtgacccagactagtcccctccaggttcctaacccttcttggatgcaccatcacagttacctaatgcagccaagcggctcagtgcttacacccggaatggaccatcctatctctcttcagcctgcttccatgatggggcctctgacgcagcagcttgggcacctctctctttctagtacgggaacctacatgcctacagccgcagcaatgcagggcgcatacataagtcagtacacaccagtaccttcatcttccgtgagcgtcgaggaaagttcagggcagcaaaaccaggtggccgtagatgcgccaagcgagcacggggtatacagcttccaattcaacaaatag

SEQ ID NO: 133249 - DNA, 1224 bp, Artificial Sequence
  derived and/or modified sequence
atgctgctgagcgtgaccagcagacccggcatcagcaccttcggctacaacagaaacaacaagaagccctacgtgagcctggcccagcagatggccccccccagccccagcaacagcacccccaacagcagcagcggcagcaacggcaacgaccagctgagcaagaccaacctgtacatcagaggcctgcagcccggcaccaccgaccaggacctggtgaagctgtgccagccctacggcaagatcgtgagcaccaaggccatcctggacaagaccaccaacaagtgcaagggctacggcttcgtggacttcgacagccccagcgccgcccagaaggccgtgaccgccctgaaggccagcggcgtgcaggcccagatggccaagcagcaggagcaggaccccaccaacctgtacatcagcaacctgcccctgagcatggacgagcaggagctggagggcatgctgaagcccttcggccaggtgatcagcaccagaatcctgagagacaccagcggcaccagcagaggcgtgggcttcgccagaatggagagcaccgagaagtgcgaggccatcatcacccacttcaacggcaagtacatcaagaccccccccggcgtgcccgcccccagcgaccccctgctgtgcaagttcgccgacggcggccccaagaagagacagaaccagggcaagttcgtgcagaacggcagagcctggcccagaaacgccgacatgggcgtgatggccctgacctacgaccccaccaccgccctgcagaacggcttctaccccgccccctacaacatcacccccaacagaatgctggcccagagcgccctgagcccctacctgagcagccccgtgagcagctaccagagagtgacccagaccagccccctgcaggtgcccaaccccagctggatgcaccaccacagctacctgatgcagcccagcggcagcgtgctgacccccggcatggaccaccccatcagcctgcagcccgccagcatgatgggccccctgacccagcagctgggccacctgagcctgagcagcaccggcacctacatgcccaccgccgccgccatgcagggcgcctacatcagccagtacacccccgtgcccagcagcagcgtgagcgtggaggagagcagcggccagcagaaccaggtggccgtggacgcccccagcgagcacggcgtgtacagcttccagttcaacaagtag

SEQ ID NO: 133250 - protein, 197 aa, Artificial Sequence
  derived and/or modified sequence
MDPPAGFVRAGNPAVAAPQSPLSPEGAHFRAAHHPRSTGSRCPGSLQPSRPLVANWLQSLPEMPVDFTGYWKMLVNENFEEYLRALDVNVALRKIANLLKPDKEIVQDGDHMIIRTLSTFRNYIMDFQVGKEFEEDLTGIDDRKCMTTVSWDGDKLQCVQKGEKEGRGWTQWIEGDELHLEMRVEGVVCKQVFKKVQ

SEQ ID NO: 133251 - DNA, 898 bp, Artificial Sequence
  derived and/or modified sequence
aaacgaactgaacgtctgaaacgaaggtggcgcggcctggacaaacctgacccttcgacatcccccgcccctgcgcccgccctcgctaagcggggaggagcgaccgctacaatggatcctcccgcaggctttgtgcgcgctgggaatccagctgtcgccgccccgcagagccccctgtccccggagggcgctcatttccgggccgcccaccacccgcgtagcaccggcagccgctgtcccggcagtctccagccgtcccgcccgcttgtggccaactggctccagtcactccccgaaatgccagtcgacttcactgggtactggaagatgttggtcaacgagaatttcgaggagtacctgcgcgccctcgacgtcaatgtggccttgcgcaaaatcgccaacttgctgaagccagacaaagagatcgtgcaggacggtgaccatatgatcatccgcacgctgagcacttttaggaactacatcatggacttccaggttgggaaggagtttgaggaggatctgacaggcatagatgaccgcaagtgcatgacaacagtgagctgggacggagacaagctccagtgtgtgcagaagggtgagaaggaggggcgtggctggacccagtggatcgagggtgatgagctgcacctggagatgagagtggaaggtgtggtctgcaagcaagtattcaagaaggtgcagtgaggcccaggcagacaaccttgtcccaaggaatcagcaggatgtgtgggccaggatccccctctttgcacagcatgaggcaaaaatgtccagccacccccaggcatctgttagcagagtctgtctcttggctttgtcacttttccttttcttaaaacaaagccatgccaataaagtgatctgtgttcaaaacgtc

SEQ ID NO: 133252 - DNA, 594 bp, Artificial Sequence
  derived and/or modified sequence
atggacccgcctgccggttttgtgcgcgccggcaatcccgccgtcgcggcaccacagtcacccctttcgccagaaggtgctcacttccgggccgctcaccaccctcggtccacgggatcccgatgtcccggtagcctgcagccctcacggccactggtggccaattggttacagagccttccagagatgcccgttgacttcaccggatactggaagatgttagttaacgaaaactttgaagagtatctgagggctctcgacgtgaatgtcgccctgcggaagatcgcgaatctcctgaagcccgataaggaaattgttcaagacggcgaccacatgataatccgaacgctttctacatttagaaactacatcatggacttccaagtgggaaaggaatttgaagaagatcttacgggaatcgatgatagaaagtgcatgaccactgtctcttgggatggggacaaattacagtgcgttcaaaaaggcgagaaagaagggagaggctggacgcagtggattgaaggtgatgaactacacctggagatgagagtggagggcgttgtttgtaagcaggtgtttaagaaggtccagtag

SEQ ID NO: 133253 - DNA, 594 bp, Artificial Sequence
  derived and/or modified sequence
atggaccccccagctggctttgtgcgggccggcaacccagctgtggccgccccccagagccccctgagccctgagggcgcccacttccgggccgcccaccaccccaggagcacaggcagccgctgccccggcagcctgcagcccagccggcccctggtggccaactggctgcagagcctgcctgagatgcctgtggacttcaccggctactggaagatgctggtgaatgaaaattttgaggagtacctgcgggccctggatgtgaatgtggccctgaggaagatcgccaacctgctgaagccagacaaggagatcgtgcaggatggagaccacatgatcatccgcaccctgagcaccttcaggaactacatcatggacttccaggtgggcaaggagtttgaggaggacctgaccggcattgatgacaggaagtgcatgaccaccgtgtcctgggatggagacaagctgcagtgtgtgcagaagggggagaaggagggccggggctggacccagtggattgaaggagatgagctgcacctggagatgagggtggagggcgtggtgtgcaagcaggtgttcaagaaggtgcagtag

SEQ ID NO: 133254 - DNA, 594 bp, Artificial Sequence
  derived and/or modified sequence
atggacccccccgccggcttcgtgcgggccggcaaccccgccgtggccgcacctcagtcacctcttagtcccgagggcgcacatttccgggcagcacatcacccccgttccactggatctcgctgtcctgggtccctccagccctcccggccattagtagcaaattggttgcagtcactccccgaaatgcctgtcgactttacaggctattggaaaatgttggtgaatgaaaatttcgaggagtacttgcgggctcttgacgtgaatgttgccctgcgcaagattgcgaatctgctgaaaccggataaagagatcgtgcaggatggggaccacatgatcatcaggacactgtcgacattccgtaactacatcatggactttcaagtggggaaagagtttgaggaggacctgacggggatagacgacaggaagtgtatgactacagttagctgggatggcgacaaactacagtgcgtgcaaaaaggggagaaggagggacgcggctggacgcagtggatagaaggagatgaattgcatttggagatgagagtggaaggtgtcgtgtgcaaacaggtgttcaagaaggtgcagtag

SEQ ID NO: 133255 - DNA, 594 bp, Artificial Sequence
  derived and/or modified sequence
atggaccctccagccggatttgtgcgagctggcaaccctgccgttgcggctccccagtcccctttatcccctgaaggcgctcacttccgtgccgctcaccaccctcggtccacgggttcacggtgtccgggaagcctgcagcccagccgcccattagtggctaactggctgcagtcccttcccgaaatgcccgttgattttaccggatattggaagatgctagtgaacgagaatttcgaggaatatctccgggcactggatgttaatgtggctttgagaaaaatagccaatttgctgaaacctgataaagaaatagtgcaagacggcgaccatatgatcatcagaactctttccacctttcgcaattacatcatggattttcaggttggaaaggaattcgaggaagacttaacaggcatagacgacaggaagtgtatgacaaccgtgagctgggatggtgacaagctgcaatgcgtacagaaaggtgaaaaagaaggccgagggtggacccagtggatagagggcgacgaactccacttggagatgagagtagaaggagtcgtctgtaagcaagtatttaaaaaagtgcagtag

SEQ ID NO: 133256 - DNA, 594 bp, Artificial Sequence
  derived and/or modified sequence
atggacccccccgccggcttcgtgagagccggcaaccccgccgtggccgccccccagagccccctgagccccgagggcgcccacttcagagccgcccaccaccccagaagcaccggcagcagatgccccggcagcctgcagcccagcagacccctggtggccaactggctgcagagcctgcccgagatgcccgtggacttcaccggctactggaagatgctggtgaacgagaacttcgaggagtacctgagagccctggacgtgaacgtggccctgagaaagatcgccaacctgctgaagcccgacaaggagatcgtgcaggacggcgaccacatgatcatcagaaccctgagcaccttcagaaactacatcatggacttccaggtgggcaaggagttcgaggaggacctgaccggcatcgacgacagaaagtgcatgaccaccgtgagctgggacggcgacaagctgcagtgcgtgcagaagggcgagaaggagggcagaggctggacccagtggatcgagggcgacgagctgcacctggagatgagagtggagggcgtggtgtgcaagcaggtgttcaagaaggtgcagtag

SEQ ID NO: 133257 - protein, 1247 aa, Artificial Sequence
  derived and/or modified sequence
MMREWVLLMSVLLCGLAGPTHLFQPSLVLDMAKVLLDNYCFPENLLGMQEAIQQAIKSHEILSISDPQTLASVLTAGVQSSLNDPRLVISYEPSTPEPPPQVPALTSLSEEELLAWLQRGLRHEVLEGNVGYLRVDSVPGQEVLSMMGEFLVAHVWGNLMGTSALVLDLRHCTGGQVSGIPYIISYLHPGNTILHVDTIYNRPSNTTTEIWTLPQVLGERYGADKDVVVLTSSQTRGVAEDIAHILKQMRRAIVVGERTGGGALDLRKLRIGESDFFFTVPVSRSLGPLGGGSQTWEGSGVLPCVGTPAEQALEKALAILTLRSALPGVVHCLQEVLKDYYTLVDRVPTLLQHLASMDFSTVVSEEDLVTKLNAGLQAASEDPRLLVRAIGPTETPSWPAPDAAAEDSPGVAPELPEDEAIRQALVDSVFQVSVLPGNVGYLRFDSFADASVLGVLAPYVLRQVWEPLQDTEHLIMDLRHNPGGPSSAVPLLLSYFQGPEAGPVHLFTTYDRRTNITQEHFSHMELPGPRYSTQRGVYLLTSHRTATAAEEFAFLMQSLGWATLVGEITAGNLLHTRTVPLLDTPEGSLALTVPVLTFIDNHGEAWLGGGVVPDAIVLAEEALDKAQEVLEFHQSLGALVEGTGHLLEAHYARPEVVGQTSALLRAKLAQGAYRTAVDLESLASQLTADLQEVSGDHRLLVFHSPGELVVEEAPPPPPAVPSPEELTYLIEALFKTEVLPGQLGYLRFDAMAELETVKAVGPQLVRLVWQQLVDTAALVIDLRYNPGSYSTAIPLLCSYFFEAEPRQHLYSVFDRATSKVTEVWTLPQVAGQRYGSHKDLYILMSHTSGSAAEAFAHTMQDLQRATVIGEPTAGGALSVGIYQVGSSPLYASMPTQMAMSATTGKAWDLAGVEPDITVPMSEALSIAQDIVALRAKVPTVLQTAGKLVADNYASAELGAKMATKLSGLQSRYSRVTSEVALAEILGADLQMLSGDPHLKAAHIPENAKDRIPGIVPMQIPSPEVFEELIKFSFHTNVLEDNIGYLRFDMFGDGELLTQVSRLLVEHIWKKIMHTDAMIIDMRFNIGGPTSSIPILCSYFFDEGPPVLLDKIYSRPDDSVSELWTHAQVVGERYGSKKSMVILTSSVTAGTAEEFTYIMKRLGRALVIGEVTSGGCQPPQTYHVDDTNLYLTIPTARSVGASDGSSWEGVGVTPHVVVPAEEALARAKEMLQHNQLRVKRSPGLQDHL

SEQ ID NO: 133258 - DNA, 3744 bp, Artificial Sequence
  derived and/or modified sequence
atgatgcgcgagtgggtgctgttgatgagcgtcttgctatgcggactggctggcccaacccaccttttccagccgagtttagtgttggatatggccaaagtgctgctcgataattactgctttcccgagaacttactaggaatgcaagaagcgattcaacaggctatcaagtcccacgagatcttatccatctccgatccacagacgcttgcatcagtgctcacggcaggagtgcaatcttctttgaacgacccgcgtctcgtgatatcttatgaaccgtcaactcccgagccaccaccccaggtgccagcacttacaagcttatctgaggaagagctcttggcctggctgcagcgcggtctccggcacgaggtcctggaagggaatgtagggtacctgcgtgtggactctgtcccaggacaggaggtattaagcatgatgggtgagttcctggtggcccacgtctgggggaatctcatgggtaccagcgcattagtccttgacctgcgccattgtaccggtggacaggtgtccggaatcccctatatcatcagctacctgcatccgggaaacaccatactccatgtcgacacaatatacaacagaccatccaatacaactactgaaatatggactcttccacaggtcctgggcgagagatacggcgctgataaagacgttgtggtgctgaccagtagtcagacacgcggagtggccgaggacatcgcccatatcttgaagcagatgagaagagccatcgtggtgggcgagcggacagggggaggtgcgttagacctacgcaagttacgcattggcgagtcagatttcttcttcactgtccctgtgtcccgttctctgggcccattagggggagggagccagacttgggagggaagcggcgttctgccctgcgtgggcacaccagctgaacaggccctggagaaagcgctcgctattctgaccctaagatccgccttgcccggtgtggtgcactgcctgcaggaggttctgaaggactattacaccctcgttgatagagtccccacattactacagcacctggcgagtatggacttcagcactgtggtcagcgaggaggacctggtgactaaactaaatgccggattacaggctgcctccgaagatcctcggctgctggtacgcgctattggcccaaccgagacaccctcgtggccagctccggatgccgcagcggaagattcaccgggtgtcgcccctgagctgcccgaggatgaggcgatcaggcaagccctggtggattcagtgtttcaggtgagtgttttacccggtaatgtgggctacctccgttttgactcattcgcagatgcttctgtactcggcgtattggccccttacgtcttacgacaagtgtgggaacctctccaggacactgagcaccttatcatggatctaagacataatccaggcggtccaagttctgccgtgccgcttctactgtcctatttccagggtcctgaagcagggcctgtacatctgtttaccacatatgacagaagaacaaacatcactcaggagcatttcagccatatggaactaccagggcctcgctatagcactcagcgtggcgtgtacctcctaacctctcatcgtaccgccactgctgctgaagagtttgcatttcttatgcagagtctcggatgggctacgctcgtgggcgagataactgctgggaatctgctacatacgaggactgtgcccctgctcgatactcctgagggttcgttggccttgaccgttccagtcctgactttcatcgacaatcacggcgaggcctggctggggggtggagtagttccagacgctattgttctcgctgaagaggccttggataaagcacaagaggtgctggaatttcaccagagccttggcgctcttgtggaaggcacaggccatcttctggaggctcattatgctcggcctgaggtggtgggacagacttccgcgctactgcgggctaagctcgcccagggagcctataggactgccgtcgatctggaaagcctggcctcgcaactgactgccgacttgcaagaggtaagtggagatcatcgattactcgtgttccactctccaggtgaactagtggtggaggaagctccacccccacctccagccgtgcctagccctgaagaactcacttacctgatcgaggccctgtttaaaacggaggtgctgcctggccagttgggttatctgaggtttgacgcaatggctgagctggaaaccgtgaaggctgtgggccctcagctggttcggttggtctggcagcagctggtggatactgctgccttggtgatagaccttaggtacaatcccggatcctatagcacagcgattccattactttgctcctacttttttgaagcagagccacgccagcacctgtattccgtctttgatcgagcaactagcaaagtcaccgaggtatggactctacctcaggtggcgggacaacggtatggctcccataaagacctgtacatattgatgagccacacttccggtagtgccgctgaggcgtttgctcacaccatgcaggacctgcagagagccactgtgattggcgaaccgacagctggaggtgccctcagcgtcggcatttatcaggttggatcatcccccctctatgcttccatgcccactcagatggctatgtccgccaccactggaaaagcatgggatctggccggtgtggaacccgacatcaccgtgcccatgagcgaggccttgagcatagcccaggacattgtggcattgcgcgctaaagtacccacagtgctacagacggcgggaaagttagtagccgacaactatgcgagtgctgaactaggtgcgaagatggccaccaagctgtctggactccagtcccgttactcaagagtaacttcagaggttgccctcgccgaaatcctgggagctgacttgcaaatgcttagcggtgacccacaccttaaggctgctcacattcctgaaaatgcgaaggatcgtattcccggaatcgtgcccatgcaaattccaagtcccgaggttttcgaggaactgataaaatttagcttccacactaacgtcctcgaggacaatatcggctatttacgattcgacatgtttggagatggggaactcctaacacaagtaagtaggttgcttgtggagcatatatggaaaaaaattatgcacacggatgcaatgatcatagatatgaggttcaatattgggggtcctacctcatctattcctattctgtgcagctacttctttgatgaagggcctccagtgctgcttgacaaaatctactccaggccagatgatagtgtgtctgaactatggactcatgcccaggtggtgggagagagatatggcagtaaaaaatcaatggtgatcctcacctcatctgtaacagccggaaccgccgaggagtttacatacattatgaagcgcctcggcagagccctagtcatcggagaggtaacctctggcggatgtcaacctccacagacatatcatgtagacgacacaaacctgtaccttacgattcctaccgccagaagcgtcggggcttcagacggatcttcatgggaaggggtgggcgtaacgccgcatgtggtcgtgcctgcagaagaggctttagccagagctaaggagatgttgcagcataatcagctgcgagtcaaaagatctcccggactccaggaccacttatag

SEQ ID NO: 133259 - DNA, 3744 bp, Artificial Sequence
  derived and/or modified sequence
atgatgagagagtgggtgctgctgatgagcgtgctgctgtgcggcctggccggccccacccacctgttccagcccagcctggtgctggacatggccaaggtgctgctggacaactactgcttccccgagaacctgctgggcatgcaggaggccatccagcaggccatcaagagccacgagatcctgagcatcagcgacccccagaccctggccagcgtgctgaccgccggcgtgcagagcagcctgaacgaccccagactggtgatcagctacgagcccagcacccccgagccccccccccaggtgcccgccctgaccagcctgagcgaggaggagctgctggcctggctgcagagaggcctgagacacgaggtgctggagggcaacgtgggctacctgagagtggacagcgtgcccggccaggaggtgctgagcatgatgggcgagttcctggtggcccacgtgtggggcaacctgatgggcaccagcgccctggtgctggacctgagacactgcaccggcggccaggtgagcggcatcccctacatcatcagctacctgcaccccggcaacaccatcctgcacgtggacaccatctacaacagacccagcaacaccaccaccgagatctggaccctgccccaggtgctgggcgagagatacggcgccgacaaggacgtggtggtgctgaccagcagccagaccagaggcgtggccgaggacatcgcccacatcctgaagcagatgagaagagccatcgtggtgggcgagagaaccggcggcggcgccctggacctgagaaagctgagaatcggcgagagcgacttcttcttcaccgtgcccgtgagcagaagcctgggccccctgggcggcggcagccagacctgggagggcagcggcgtgctgccctgcgtgggcacccccgccgagcaggccctggagaaggccctggccatcctgaccctgagaagcgccctgcccggcgtggtgcactgcctgcaggaggtgctgaaggactactacaccctggtggacagagtgcccaccctgctgcagcacctggccagcatggacttcagcaccgtggtgagcgaggaggacctggtgaccaagctgaacgccggcctgcaggccgccagcgaggaccccagactgctggtgagagccatcggccccaccgagacccccagctggcccgcccccgacgccgccgccgaggacagccccggcgtggcccccgagctgcccgaggacgaggccatcagacaggccctggtggacagcgtgttccaggtgagcgtgctgcccggcaacgtgggctacctgagattcgacagcttcgccgacgccagcgtgctgggcgtgctggccccctacgtgctgagacaggtgtgggagcccctgcaggacaccgagcacctgatcatggacctgagacacaaccccggcggccccagcagcgccgtgcccctgctgctgagctacttccagggccccgaggccggccccgtgcacctgttcaccacctacgacagaagaaccaacatcacccaggagcacttcagccacatggagctgcccggccccagatacagcacccagagaggcgtgtacctgctgaccagccacagaaccgccaccgccgccgaggagttcgccttcctgatgcagagcctgggctgggccaccctggtgggcgagatcaccgccggcaacctgctgcacaccagaaccgtgcccctgctggacacccccgagggcagcctggccctgaccgtgcccgtgctgaccttcatcgacaaccacggcgaggcctggctgggcggcggcgtggtgcccgacgccatcgtgctggccgaggaggccctggacaaggcccaggaggtgctggagttccaccagagcctgggcgccctggtggagggcaccggccacctgctggaggcccactacgccagacccgaggtggtgggccagaccagcgccctgctgagagccaagctggcccagggcgcctacagaaccgccgtggacctggagagcctggccagccagctgaccgccgacctgcaggaggtgagcggcgaccacagactgctggtgttccacagccccggcgagctggtggtggaggaggcccccccccccccccccgccgtgcccagccccgaggagctgacctacctgatcgaggccctgttcaagaccgaggtgctgcccggccagctgggctacctgagattcgacgccatggccgagctggagaccgtgaaggccgtgggcccccagctggtgagactggtgtggcagcagctggtggacaccgccgccctggtgatcgacctgagatacaaccccggcagctacagcaccgccatccccctgctgtgcagctacttcttcgaggccgagcccagacagcacctgtacagcgtgttcgacagagccaccagcaaggtgaccgaggtgtggaccctgccccaggtggccggccagagatacggcagccacaaggacctgtacatcctgatgagccacaccagcggcagcgccgccgaggccttcgcccacaccatgcaggacctgcagagagccaccgtgatcggcgagcccaccgccggcggcgccctgagcgtgggcatctaccaggtgggcagcagccccctgtacgccagcatgcccacccagatggccatgagcgccaccaccggcaaggcctgggacctggccggcgtggagcccgacatcaccgtgcccatgagcgaggccctgagcatcgcccaggacatcgtggccctgagagccaaggtgcccaccgtgctgcagaccgccggcaagctggtggccgacaactacgccagcgccgagctgggcgccaagatggccaccaagctgagcggcctgcagagcagatacagcagagtgaccagcgaggtggccctggccgagatcctgggcgccgacctgcagatgctgagcggcgacccccacctgaaggccgcccacatccccgagaacgccaaggacagaatccccggcatcgtgcccatgcagatccccagccccgaggtgttcgaggagctgatcaagttcagcttccacaccaacgtgctggaggacaacatcggctacctgagattcgacatgttcggcgacggcgagctgctgacccaggtgagcagactgctggtggagcacatctggaagaagatcatgcacaccgacgccatgatcatcgacatgagattcaacatcggcggccccaccagcagcatccccatcctgtgcagctacttcttcgacgagggcccccccgtgctgctggacaagatctacagcagacccgacgacagcgtgagcgagctgtggacccacgcccaggtggtgggcgagagatacggcagcaagaagagcatggtgatcctgaccagcagcgtgaccgccggcaccgccgaggagttcacctacatcatgaagagactgggcagagccctggtgatcggcgaggtgaccagcggcggctgccagcccccccagacctaccacgtggacgacaccaacctgtacctgaccatccccaccgccagaagcgtgggcgccagcgacggcagcagctgggagggcgtgggcgtgaccccccacgtggtggtgcccgccgaggaggccctggccagagccaaggagatgctgcagcacaaccagctgagagtgaagagaagccccggcctgcaggaccacctgtag

SEQ ID NO: 133260 - DNA, 3744 bp, Artificial Sequence
  derived and/or modified sequence
atgatgcgggagtgggtgctcctcatgagcgttctgctctgcggtctcgccggcccaacccacctttttcaaccaagtctcgtgctggatatggcgaaagtgcttctcgacaactactgtttcccagagaaccttttgggcatgcaagaggccattcagcaagccattaaatctcacgagattctcagtatcagtgatccacagaccctagcgtccgtgttgaccgccggagtacaaagctcacttaatgatccccgactggtaatctcctatgagccaagcacccccgagcccccgcctcaagttccggctctgacctccctttccgaggaagaattgctggcctggctgcaacgaggactccgacatgaggtgctggaagggaacgtcggctacttgcgagttgactctgtgcccggacaagaggttctttccatgatgggagagttcctggtggcacacgtttgggggaatctgatggggaccagtgcactggtgcttgacctacgacattgcacagggggacaggtgagcgggattccatacatcatttcttatctgcaccctgggaatacaatcctgcatgtggatacaatttacaatagacctagtaatacaacaaccgagatttggacgctcccccaagtcctcggggagaggtatggtgcggataaagacgtggtggtgctcacaagctctcaaacgcggggtgtggccgaggatattgcacacatcctcaaacagatgaggcgtgcaatcgttgtaggggaacgcactggaggcggcgctctggacctgaggaagctgaggatcggtgagtccgattttttctttactgtacctgtttcaaggtcactcggccccttgggaggggggagccagacctgggaaggctccggagtcctcccttgcgtaggaacacctgctgagcaggccctggagaaggccctggccattcttacattgaggagtgcactcccaggcgtggtgcactgcctgcaagaagtgctgaaggattattacacgctggtcgacagggtccctactctactgcagcacctggcttccatggacttttccacagttgtgtctgaggaggacttggtcactaagcttaatgccggcctgcaggccgcctcggaggacccgcgattgctcgtccgagccattggacccactgagacccctagttggcctgcccctgacgcggctgcagaagattctccaggagtggctccggagctaccggaggatgaagctatcagacaggcattggtggacagtgtctttcaggtgtccgtcttgcccgggaatgtgggctacctgcgctttgacagctttgctgatgcctcagtgctcggcgtccttgctccgtacgtgcttaggcaggtgtgggaacctctgcaggacactgaacatcttattatggacttgagacacaaccctggcgggcccagttccgccgttcccctattgctctcctactttcaggggccagaagctggaccggtccatctgttcaccacttacgacaggaggacaaacattacccaggaacatttctctcacatggaactgccaggtccgcggtactccacccagaggggggtgtatctgttgacctctcatcgcaccgcaactgcggcggaggaatttgcttttctcatgcagtccctcggatgggctactctcgtcggcgaaatcaccgccgggaatctgttgcacacccggaccgtccccctgctggatactcccgaaggctctctcgctctgaccgttcccgtgctgacttttattgataaccatggagaggcttggctgggaggtggagtggtcccagatgccattgtgctcgccgaagaggccctggataaagcccaggaagtccttgagttccaccagagcctcggcgccttagtcgaagggaccgggcatttgctggaggcgcattatgccaggcccgaggtggtgggacagacgtccgccctactacgggccaagttggcgcagggcgcatacagaactgcagttgacctggaaagtctcgcctcacagctgaccgccgaccttcaggaagttagtggggatcatagattactggttttccattcgcctggtgagctcgtcgttgaagaggcccctcctcccccccccgccgtgcccagtcccgaagagctaacctatttaatcgaggccctctttaaaaccgaggtcctgcctggacagctaggctatttgcgattcgacgctatggccgagttggagactgtcaaggcggttggccctcagctcgtacgcttggtatggcagcagcttgtggatacagccgccctagtaatagacctccgatataacccaggtagctacagtaccgccatcccgctgctctgctcttatttctttgaagcagaaccacgacagcatctctatagcgtgttcgatcgcgcaacatcaaaagtcaccgaggtttggacgttgcctcaagtcgcaggccagagatatggctcccacaaggacttgtacattttgatgtcacatacatccggttcagccgctgaagcgttcgcccacaccatgcaggacctgcagcgtgctaccgtgatcggagagcccaccgccggaggagcactatcagttggcatctatcaggtaggaagcagccccctgtacgcttctatgccaacgcagatggcaatgtccgccactacgggtaaggcatgggatcttgcgggcgtggagcctgatatcacagtgccaatgagcgaagccttgtccatcgcacaagatatcgtagcccttagggcaaaagtccctactgtgctccagaccgccggaaagctagtggccgacaactacgcttctgctgagctcggcgcgaaaatggccaccaaactcagcgggctccagtcgcgttactccagggtaacatccgaggtggcgttggccgagatactgggagcagatctgcagatgctatctggtgatccccaccttaaagcagcgcacatccccgaaaacgctaaggatagaattcctggcattgttcctatgcagattccttcccccgaagttttcgaagagctgatcaagttctctttccacaccaatgtgttggaggacaatattggatacctgaggttcgatatgtttggcgacggggagcttctcacgcaggtctcaaggcttttggttgagcacatatggaagaagattatgcacaccgatgctatgatcattgacatgcgcttcaacattggcggacctacatcctccatccctatactgtgcagttacttctttgatgaggggcctccagtgctgttggataagatctattctcggccggatgattccgtaagcgagctgtggacgcatgctcaggtggtgggtgagcggtatggctccaagaagtcaatggtgatcctgacttcaagcgtcactgcaggcaccgccgaggagtttacatatatcatgaagagacttgggcgtgccctcgtaattggcgaggtgacctctggtgggtgtcagccaccccaaacctaccatgttgacgacactaacctatacctgactattccgaccgcccggtcggtgggagcgtcagacggatcaagttgggaaggggtgggcgtgaccccgcacgtggtagtccctgcagaagaagccttagccagggctaaagagatgttacagcataaccagctccgggtgaaacggtctcccggactccaagaccacctgtag

SEQ ID NO: 133261 - DNA, 3744 bp, Artificial Sequence
  derived and/or modified sequence
atgatgagggagtgggtgctgctgatgtctgtgctgctgtgtggcctggccggccccacccacctgttccagcccagcctggtgctggacatggccaaggtgctgctggacaactactgcttccctgagaacctgctgggcatgcaggaggccatccagcaggccatcaagagccatgagatcctgagcatcagtgacccccagaccctggcctctgtgctgacagctggggtgcagagcagcctgaatgacccccggctggtgatctcctatgagcccagcaccccagagcccccaccccaggtgcctgccctgaccagcctgtctgaggaggagctgctggcctggctgcagaggggcctgcggcatgaggtgctggagggcaatgtgggctacctgcgggtggacagcgtgcccggccaggaggtgctgtccatgatgggagagttcctggtggcccacgtgtggggcaacctgatgggcaccagcgccctggtgctggacctgcggcactgcacaggaggccaggtgtctggcatcccctacatcatctcctacctgcaccctggcaacaccatcctgcacgtggacaccatctacaaccggcccagcaacaccaccacagagatctggaccctgccccaggtgctgggggagagatatggagctgacaaggatgtggtggtgctgaccagcagccagacccggggcgtggccgaggacatcgcccacatcctgaagcagatgaggcgggccatcgtggtgggggagaggactggaggaggagccctggacctgaggaagctgagaattggagagagtgacttcttcttcaccgtgcctgtgagccgcagcctgggccccctgggcggcggcagccagacctgggagggcagcggcgtgctgccctgtgtgggcaccccagctgagcaggccctggagaaggccctggccatcctgaccctgcggagcgccctgcccggggtggtgcactgcctgcaggaggtgctgaaggactactacaccctggtggacagagtgcccaccctgctgcagcacctggcctccatggacttcagcacagtggtgtctgaggaggacctggtgaccaagctgaatgccggcctgcaggccgccagcgaggacccccggctgctggtgcgggccatcggccccacagagacccccagctggccagccccagatgctgctgctgaggacagccctggggtggcccctgagctgcctgaagatgaggccatccggcaggccctggtggacagcgtcttccaggtgtctgtgctgcctggaaatgtgggctacctgcgctttgacagctttgctgatgcctctgtgctgggcgtgctggccccctacgtgctgcggcaggtgtgggagcccctgcaggacacagagcacctgatcatggacctgcggcacaaccctgggggccccagcagcgctgtgcccctgctgctgagctacttccagggccctgaggccggccctgtgcacctgttcaccacctatgacaggaggaccaacatcacccaggagcacttcagccacatggagctgcccggcccccgctacagcacccagaggggcgtgtacctgctgaccagccacaggacagccacagctgctgaggagtttgccttcctgatgcagagcctgggctgggccaccctggtgggggagatcacagctggcaacctgctgcacaccaggacagtgcccctgctggacaccccagagggcagcctggccctgactgtgcctgtgctgaccttcatcgacaaccacggggaggcctggctgggcggcggcgtggtgcctgatgccatcgtgctggccgaggaggccctggacaaggcccaggaggtgctggagttccaccagagcctgggcgccctggtggagggcaccggccacctgctggaggcccactacgcccggcctgaggtggtgggccagaccagcgccctgctgcgggccaagctggcccagggcgcctacagaacagctgtggacctggagagcctggccagccagctgacagctgacctgcaggaggtgtctggggaccaccggctgctggtgttccacagccctggagagctggtggtggaggaggcccctcctcctcctcctgctgtgcccagccctgaggagctgacctacctgattgaggccctcttcaagacagaggtgctgcccggccagctgggctacctgcgctttgatgccatggccgagctggagaccgtgaaggctgtgggcccccagctggtgcggctggtgtggcagcagctggtggacacagctgccctggtgattgacctgcgctacaaccctggcagctacagcacagccatccccctgctgtgcagctacttctttgaagctgagccccggcagcacctgtacagcgtgtttgaccgggccaccagcaaggtgacagaggtgtggaccctgccccaggtggccggccagagatatggcagccacaaggacctgtacatcctgatgagccacaccagcggcagcgctgctgaggcctttgcccacaccatgcaggacctgcagagggccaccgtcatcggggagcccacagctggaggagccctgtctgtgggcatctaccaggtgggcagcagccccctgtatgcctccatgcccacccagatggccatgtctgccaccaccgggaaggcctgggacctggccggcgtggagccagacatcaccgtgcccatgtctgaggccctgagcatcgcccaggacatcgtggccctgcgggccaaggtgcccaccgtgctgcagacagctgggaagctggtggccgacaactatgccagcgctgagctgggcgccaagatggccaccaagctgagcggcctgcagagccgctacagccgggtgaccagcgaggtggccctggccgagatcctgggcgctgacctgcagatgctgagcggggacccccacctgaaggccgcccacatcccagaaaatgccaaggaccgcatccctggcatcgtgcccatgcagatccccagccctgaggtgtttgaggagctgatcaagttctccttccacaccaacgtgctggaggacaacatcggctacctgcgctttgacatgtttggagatggagagctgctgacccaggtgtcccggctgctggtggagcacatctggaagaagatcatgcacacagatgccatgatcatcgacatgaggttcaacattggaggccccaccagcagcatccccatcctgtgcagctacttctttgatgagggcccccctgtgctgctggacaagatctacagcaggccagatgacagcgtgtctgagctgtggacccacgcccaggtggtgggggagagatatggcagcaagaagtccatggtgatcctgaccagctctgtgacagctggaacagctgaggagttcacctacatcatgaagaggctgggccgggccctggtgattggagaggtgaccagcggcggctgccagcccccccagacctaccacgtggatgacaccaacctgtacctgaccatccccacagcccggtctgtgggcgccagtgatggcagctcctgggagggcgtgggcgtgaccccccacgtggtggtgcctgctgaggaggccctggcccgggccaaggagatgctgcagcacaaccagctgcgggtgaagaggagccctggcctgcaggaccacctgtag

SEQ ID NO: 133262 - DNA, 3744 bp, Artificial Sequence
  derived and/or modified sequence
atgatgcgggagtgggtgctgctgatgagcgtgctgctgtgcggcttggcaggccccacccacctttttcaaccgagcctcgttttggatatggctaaggtgctcttagataattactgcttccccgaaaaccttctcggaatgcaagaagctattcagcaagcaattaagagccacgagatactctctatttcagaccctcagactctggcctccgtgctgaccgccggggtgcagtcctcactcaacgatcccaggctagtcatctcttatgaaccaagtactccggaaccaccgccccaggtgcccgcgctgacaagcctgtccgaggaggagttgttagcgtggctccaaagaggcctgcggcacgaagtgttggagggcaatgttggatacctgcgggtggatagtgtgcccggtcaggaagtgctgtctatgatgggtgagtttctggtagcgcatgtgtggggcaatctgatggggactagcgcattggtgctggatctgcggcactgcactggtggacaagtgagcggcatcccctacatcatcagctatctccatccaggcaatacaatcctgcatgtcgacacaatctacaaccgaccctctaacactactactgaaatttggacattgcctcaggtactcggagagaggtacggcgccgacaaggacgtcgttgttctgactagtagccagactcggggagtcgccgaggacattgctcacattctgaaacagatgcgtcgtgcgattgtggtgggagagcgaaccggaggtggtgcgttggatttgcggaagctccgcattggtgagtcggatttcttcttcaccgtgccagtctctaggagtttgggaccccttggcggcggatctcagacatgggaggggtcaggcgtccttccttgcgtcggcactcccgcagagcaggctctggaaaaagccctggcgatcttgactcttaggtccgcactccccggagtggtgcactgcctgcaagaggtgctcaaagattactacacactcgtggaccgggtgcccaccctgctgcaacatttggcatctatggatttctctactgtggtgtcagaggaagatctcgtaaccaagcttaacgcgggacttcaggccgcatcagaggatccacgcttgctggtccgagcaattggaccaacagaaacaccctcttggcctgccccagatgcagccgcggaagattcgccaggggtggcccccgaattgcccgaggacgaggccatccgccaagccctggttgactccgtgtttcaggtgtctgtgctgcccggaaatgtcggatatctacgtttcgattctttcgctgacgcatcagtattgggagtgctcgctccttatgtcctgcgtcaggtttgggagcctctccaggacacggagcacctgattatggacctcaggcataatcccggggggcccagttccgccgttccgctcttgttgtcttactttcaggggcccgaggcagggcccgtccacctatttaccacatatgatcggagaacgaatataactcaggaacattttagccacatggagctgcccggccctcgctactccactcagagaggcgtctatctgctgactagtcatcgtacagcaaccgctgcagaggagtttgcatttctcatgcaaagcctcgggtgggcgactctcgtcggggagattactgctggtaatctgttgcatactcgtactgtacccctcctggatacccccgagggctccctggccttgaccgtacctgttctgacattcatcgataatcatggagaagcttggctcggtggtggcgtcgtgcccgatgcgatagtactcgccgaggaggcactcgataaagcgcaggaggtgctggagtttcatcagtctctcggggccctcgttgagggcacaggacatcttctcgaagcacactacgcccgcccagaggtcgtcggccagacctctgctttgttgagagccaaactcgcccagggggcttatagaaccgcggttgacctggagagccttgctagccagctgacagcagacctgcaggaggtgagcggcgatcataggctcctcgttttccattctcccggagaactggtagtggaggaggcacctcccccaccgcccgccgtaccgtccccggaggagctcacatacttgatcgaggccctgttcaaaacagaagtactccctggccagctggggtatcttaggtttgatgcaatggccgagctggagaccgtcaaggctgtcggtcctcagttggtgaggctggtgtggcagcagttggtggacacagcagcgctggtaatagacctcaggtacaatcctgggtcctacagtaccgcaatccccctgctgtgctcttatttcttcgaggccgaaccacggcagcatctttacagtgttttcgaccgggccacatcgaaagttacagaggtctggaccctgccccaggttgccggccagcgatacgggtcacacaaggacctgtacatcttgatgtcacataccagtggaagtgcagccgaggcctttgcgcacactatgcaggacctccagcgagctactgttattggcgagcccacagcaggcggtgcactaagtgtagggatttatcaggtgggatccagcccactgtacgcctccatgcctacccagatggccatgagcgccacgacggggaaagcctgggacctggcgggtgtggagcccgatatcacagtgccaatgagtgaggccctttccattgctcaggatatagtagctctaagagcgaaagtcccgaccgtactacagaccgccggtaaactcgtggcagataactacgcctctgctgaactgggggccaaaatggctacaaagctcagtggcttgcagtcgcgctattcgagggttacaagtgaggtggcattagcagaaatccttggggcagacctgcaaatgctgtccggggacccacatctcaaggctgcccacattcctgagaacgccaaagatcgaattccggggatagtgccgatgcagattccctctccggaagtctttgaggaacttattaagtttagctttcacacaaatgtgctggaggacaatatcgggtacctcagatttgacatgttcggggacggtgagctcctaactcaggtgagtaggctattggtggagcacatttggaaaaagatcatgcacaccgatgcgatgattattgacatgcgctttaacattggtggacccacgtccagtatcccgatcctgtgcagctactttttcgatgaaggccccccagtgttgctggacaagatttattcgcgtccagatgacagcgtttcagaactttggacccatgctcaggtcgtgggagagcggtatgggagcaagaaaagcatggtgattttaacctcatccgtcactgctggaactgctgaggaattcacctacattatgaaaaggttgggtagggcattggtgattggggaggttacatccgggggatgccagccaccccagacctaccacgtagacgatactaacctctatctcaccatcccaaccgccagaagcgtcggggcatcagacggatccagctgggagggcgtgggagttacaccacacgtcgtagtccccgcagaagaagccttggcacgggccaaagagatgctgcaacacaatcagctgagagtgaagaggagcccaggtctgcaggatcacctgtag

SEQ ID NO: 133263 - DNA, 4276 bp, Artificial Sequence
  derived and/or modified sequence
tgtccaccagctgagaaggacaagggcggaaggcagctgcacagagcagggccacggccttgcacacagtccagggagcttttgtgcaggagccaggcctccccctgggtccccatgatgagagaatgggttctgctcatgtccgtgctgctctgtggcctggctggccccacacacctgttccagccaagcctggtgctggacatggccaaggtcctcttggataactactgcttcccggagaacctgctgggcatgcaggaagccatccagcaggccatcaagagccatgagattctgagcatctcagacccgcagacgctggccagtgtgctgacagccggggtgcagagctccctgaacgatcctcgcctggtcatctcctatgagcccagcacccccgagcctcccccacaagtcccagcactcaccagcctctcagaagaggaactgcttgcctggctgcaaaggggcctccgccatgaggttctggagggtaatgtgggctacctgcgggtggacagcgtcccgggccaggaggtgctgagcatgatgggggagttcctggtggcccacgtgtgggggaatctcatgggcacctccgccttagtgctggatctccggcactgcacaggaggccaggtctctggcattccctacatcatctcctacctgcacccagggaacaccatcctgcacgtggacactatctacaaccgcccctccaacaccaccacggagatctggaccttgccccaggtcctgggagaaaggtacggtgccgacaaggatgtggtggtcctcaccagcagccagaccaggggcgtggccgaggacatcgcgcacatccttaagcagatgcgcagggccatcgtggtgggcgagcggactgggggaggggccctggacctccggaagctgaggataggcgagtctgacttcttcttcacggtgcccgtgtccaggtccctggggccccttggtggaggcagccagacgtgggagggcagcggggtgctgccctgtgtggggactccggccgagcaggccctggagaaagccctggccatcctcactctgcgcagcgcccttccaggggtagtccactgcctccaggaggtcctgaaggactactacacgctggtggaccgtgtgcccaccctgctgcagcacttggccagcatggacttctccacggtggtctccgaggaagatctggtcaccaagctcaatgccggcctgcaggctgcgtctgaggatcccaggctcctggtgcgagccatcgggcccacagaaactccttcttggcccgcgcccgacgctgcagccgaagactcaccaggggtggccccagagttgcctgaggacgaggctatccggcaagcactggtggactctgtgttccaggtgtcggtgctgccaggcaatgtgggctacctgcgcttcgatagttttgctgacgcctccgtcctgggtgtgttggccccatatgtcctgcgccaggtgtgggagccgctacaggacacggagcacctcatcatggacctgcgccacaaccctggagggccatcctctgctgtgcccctgctcctgtcctacttccagggccctgaggccggccccgtgcacctcttcaccacctatgatcgccgcaccaacatcacgcaggagcacttcagccacatggagctcccgggcccacgctacagcacccaacgtggggtgtatctgctcaccagccaccgcaccgccacggccgcggaggagttcgccttccttatgcagtcgctgggctgggccacactggtaggtgagatcaccgcgggcaacctgctgcacacccgcacggtgccgctgctggacacacccgaaggcagcctcgcgctcaccgtgccggtcctcaccttcatcgacaatcacggcgaggcctggctgggtggtggagtggtgcccgatgccatcgtgctggccgaggaggccctggacaaagcccaggaagtgctggagttccaccaaagcctgggggccttggtggagggcacagggcacctgctggaggcccactatgctcggccagaggtcgtggggcagaccagtgccctcctgcgggccaagctggcccagggcgcctaccgcacagctgtggacttggagtctctggcctctcagctcacagcagacctccaggaggtgtctggggaccaccgcttgctagtgttccacagccctggcgagctggtggtagaggaagcacccccaccaccccctgctgtcccctctccagaggagctcacctaccttattgaggccctgttcaagacagaggtgctgcccggccagctgggctacctgcgttttgacgccatggctgaactggagacagtgaaggccgtggggccacagctggtgcggctggtatggcaacagctggtggacacggctgcgctggtgatcgacctgcgctacaaccctggcagctactccacggccatcccgctgctctgctcctacttctttgaggcagagccccgccagcacctgtattctgtctttgacagggccacctcaaaagtcacggaggtgtggaccttgccccaggtcgccggccagcgctacggctcacacaaggacctctacatcctgatgagccacaccagtggctctgcggccgaggcctttgcacacaccatgcaggacctgcagcgggccacggtcattggggagcccacggccggaggcgcactctctgtgggcatctaccaggtgggcagcagccccttatatgcatccatgcccacccagatggccatgagtgccaccacaggcaaggcctgggacctggctggtgtggagcccgacatcactgtgcccatgagcgaagccctttccatagcccaggacatagtggctctgcgtgccaaggtgcccacggtgctgcagacggccgggaagctggtggctgataactatgcctctgccgagctgggggccaagatggccaccaaactgagcggtctgcagagccgctactccagggtgacctcagaagtggccctagccgagatcctgggggctgacctgcagatgctctccggagacccacacctgaaggcagcccatatccctgagaatgccaaggaccgcattcctggaattgtgcccatgcagatcccttcccctgaagtatttgaagagctgatcaagttttccttccacactaacgtgcttgaggacaacattggctacttgaggtttgacatgtttggggacggtgagctgctcacccaggtctccaggctgctggtggagcacatctggaagaagatcatgcacacggatgccatgatcatcgacatgaggttcaacatcggtggccccacatcctccattcccatcttgtgctcctacttctttgatgaaggccctccagttctgctggacaagatctacagccggcctgatgactctgtcagtgaactctggacacacgcccaggttgtaggtgaacgctatggctccaagaagagcatggtcattctgaccagcagtgtgacggccggcaccgcggaggagttcacctatatcatgaagaggctgggccgggccctggtcattggggaggtgaccagtgggggctgccagccaccacagacctaccacgtggatgacaccaacctctacctcactatccccacggcccgttctgtgggggcctcggatggcagctcctgggaaggggtgggggtgacaccccatgtggttgtccctgcagaagaggctctcgccagggccaaggagatgctccagcacaaccagctgagggtgaagcggagcccaggcctgcaggaccacctgtagggaagggccccataggcagagccccagggcagacagaacctctgggacacacaccaagggcactcctgcaggtggcccggcctgaggttcccaggagcagcaaaggggcctgctgagctctggttaggttacagctggaggtgtgtatatatacacacacacacatgtatatacacatatatatgtgtatgtatatatatgtatatatatatggctttccaataaccacctaaattttaacaaaggttccttctaagtggtagaacttggggtggtatttttaccttccttcttcatactttgctctttttcttaaatactcattaatgtgcatatatcattattttcagatgcagctatcattattccaaaatacaaaataaagaagataaaataaattatatacccgagccattaa

SEQ ID NO: 133264 - protein, 331 aa, Artificial Sequence
  derived and/or modified sequence
MARGGRGRRLGLALGLLLALVLAPRVLRAKPTVRKERVVRPDSELGERPPEDNQSFQYDHEAFLGKEDSKTFDQLTPDESKERLGKIVDRIDNDGDGFVTTEELKTWIKRVQKRYIFDNVAKVWKDYDRDKDDKISWEEYKQATYGYYLGNPAEFHDSSDHHTFKKMLPRDERRFKAADLNGDLTATREEFTAFLHPEEFEHMKEIVVLETLEDIDKNGDGFVDQDEYIADMFSHEENGPEPDWVLSEREQFNEFRDLNKDGKLDKDEIRHWILPQDYDHAQAEARHLVYESDKNKDEKLTKEEILENWNMFVGSQATNYGEDLTKNHDEL

SEQ ID NO: 133265 - protein, 28 aa, Artificial Sequence
  derived and/or modified sequence
EILENWNMFVGSQATNYGEDLTKNHDEL

SEQ ID NO: 133266 - DNA, 996 bp, Artificial Sequence
  derived and/or modified sequence
atggctcgcggaggacggggacgacgtctggggcttgcattgggccttctcttagccctggttttggcccccagggttctgcgggctaagcctaccgtccggaaggaacgcgttgtacgcccagacagcgaactgggcgagcgccctccagaggacaaccaatcttttcaatatgaccacgaggcatttctcggcaaagaagacagtaaaactttcgatcagctcacaccagacgaatccaaggagagactcggaaaaattgtggaccggatcgataacgacggcgatggcttcgtgaccacagaagagctgaaaacttggatcaaacgggtgcagaaacgctacatttttgataatgtggccaaggtatggaaggactacgaccgcgacaaggatgacaaaatcagctgggaagaatacaaacaggcaacatacggatactatctcgggaatcctgccgagtttcatgactcctcagatcatcacactttcaagaagatgttaccgcgggacgagagacggtttaaggctgctgatcttaacggcgatctgacagccacacgggaggaattcaccgcttttctgcacccagaagaattcgaacacatgaaagagatcgtggttctggaaactctggaggatatcgacaaaaacggcgatggatttgtggatcaggacgagtacattgctgacatgttttctcacgaagaaaatggccctgagcctgactgggtcctgtctgagagggaacagttcaacgaattcagagacttaaataaggatgggaagcttgataaggatgagattaggcactggattctgccccaggactatgaccatgcacaggcggaggccagacacctggtgtacgagtccgacaagaataaggacgaaaaactaacaaaagaggagattctggaaaattggaatatgtttgtgggatctcaggccactaattacggtgaggacctgactaaaaatcacgatgagctgtag

SEQ ID NO: 133267 - DNA, 87 bp, Artificial Sequence
  derived and/or modified sequence
gagatactggagaactggaacatgtttgtcgggtcacaggccaccaactatggcgaggatctcactaaaaaccatgatgaactgtag

SEQ ID NO: 133268 - DNA, 996 bp, Artificial Sequence
  derived and/or modified sequence
atggcccggggcggccggggccggcggctgggcctggccctgggcctgctgctggccctggtgctggccccccgggtgctgcgggccaagcccaccgtgaggaaggagcgggtggtgcggccagattctgagctgggggagcggcccccagaggacaaccagagcttccagtatgaccacgaggccttcctgggcaaggaggacagcaagacctttgaccagctgaccccagatgagagcaaggagcggctgggcaagatcgtggacagaattgacaatgatggagatggctttgtgaccacagaggagctgaagacctggatcaagagggtgcagaagcgctacatctttgacaacgtggccaaggtgtggaaggactatgaccgggacaaggatgacaagatctcctgggaggagtacaagcaggccacctacggctactacctgggcaacccagctgagttccatgacagcagtgaccaccacaccttcaagaagatgctgcccagagatgaaagacgcttcaaggctgctgacctgaatggagacctgacagccacccgggaggagttcaccgccttcctgcaccctgaggagtttgagcacatgaaggagatcgtggtgctggagaccctggaggacatcgacaagaatggagatggctttgtggaccaggatgagtacatcgctgacatgttcagccatgaagaaaatggacctgagccagactgggtgctgtctgagcgggagcagttcaatgagttccgggacctgaacaaggatggcaagctggacaaggatgagatccgccactggatcctgccccaggactatgaccacgcccaggccgaggcccggcacctggtgtatgaaagtgacaagaacaaggatgagaagctgaccaaggaggagatcctggagaactggaacatgtttgtgggcagccaggccaccaactacggggaggacctgaccaagaaccatgatgagctgtag

SEQ ID NO: 133269 - DNA, 87 bp, Artificial Sequence
  derived and/or modified sequence
gagatcctggagaactggaacatgtttgtgggcagccaggccaccaactatggagaggacctgaccaagaaccatgatgagctgtag

SEQ ID NO: 133270 - DNA, 996 bp, Artificial Sequence
  derived and/or modified sequence
atggcccggggcggccggggccggcggctgggcctggccctgggcttgctccttgccttagtgttggcacctcgcgtcttaagagctaagcctacggttaggaaggaacgggtggtcagacccgatagcgagttgggcgagaggccgccagaagacaatcagagcttccagtacgaccatgaggcttttctgggcaaggaggatagcaagaccttcgatcaactaactccggacgagtctaaagaacgtctgggaaaaatcgtcgatcgcattgacaatgacggagacggttttgtgaccaccgaggaactcaaaacctggattaagagagtgcaaaaacgctatatttttgacaacgtggcgaaagtgtggaaagactacgatcgggataaggacgataaaatttcatgggaggaatataagcaggctacgtacggctattatctcgggaatccagcagagttccacgatagctctgaccaccatacattcaaaaagatgctgcctcgggacgaacgtagattcaaagcagccgatcttaatggagacctgactgccacccgcgaggagttcaccgcatttctgcaccctgaggagttcgaacatatgaaggagatcgtagtacttgagaccctcgaagacatagataaaaatggggacggcttcgtagaccaggacgagtatattgccgacatgttcagccacgaggaaaacgggccagaaccggattgggtgctgtccgagcgggagcagtttaacgagtttagggatctcaacaaggatggaaagttggacaaggatgagatccgtcattggatactgccgcaagactatgaccatgcacaagccgaggccaggcatttagtatacgagtcggataaaaacaaagatgagaagctcaccaaagaagagatactggagaattggaacatgttcgtgggctctcaagccacgaactatggggaagaccttacgaagaatcacgacgaactctag

SEQ ID NO: 133271 - DNA, 87 bp, Artificial Sequence
  derived and/or modified sequence
gagatcctggagaactggaacatgttcgtgggcagccaggccaccaattacggagaggatctcacgaaaaaccacgacgaactctag

SEQ ID NO: 133272 - DNA, 996 bp, Artificial Sequence
  derived and/or modified sequence
atggccagggggggtagaggccgtagactcggtttggcattaggcttgctcctggcgttggtgctggctccacgggtgctgcgcgctaagcccacggttaggaaggaaagagtggtgcgtccagattccgaactgggtgaacggcctccggaggacaatcagagctttcagtatgatcacgaggccttcctgggtaaggaagactccaaaactttcgaccagctgacacctgacgaatcaaaggagcgtctgggtaaaatcgttgaccggattgacaatgatggggacggtttcgtgaccacagaagaactgaaaacctggatcaagcgggttcaaaaacgctacattttcgacaacgtggccaaggtctggaaggactacgacagggacaaagatgataagatttcctgggaagagtataagcaagccacatatggatattatcttggtaatcctgcagagttccacgattccagcgatcaccacacatttaagaagatgctcccaagggatgaaaggcggttcaaggccgctgacctgaacggcgatctgaccgccacaagggaagaattcacggctttcctccaccccgaggagttcgaacatatgaaagagatcgtagtccttgagaccctggaagacattgataaaaacggagacgggttcgtggaccaggacgaatacatcgccgacatgttttcccatgaagagaacggcccagaacccgattgggtgctatcagaacgggaacaattcaacgaatttagggatctgaacaaagatggaaaattagacaaggacgagatccgccactggattctgcctcaggactacgaccatgcgcaggcagaagctagacacttggtgtacgagtcagataagaataaggacgaaaagctgacgaaggaggaaattctcgagaattggaacatgtttgtgggcagccaggcaactaattacggggaggaccttacaaaaaaccacgacgaactgtag

SEQ ID NO: 133273 - DNA, 87 bp, Artificial Sequence
  derived and/or modified sequence
gagatcctagaaaactggaatatgttcgtggggagccaggccactaactatggcgaagatctgacaaagaatcacgacgaattatag

SEQ ID NO: 133274 - DNA, 996 bp, Artificial Sequence
  derived and/or modified sequence
atggcccggggcggacgcggccgcagattgggccttgcattggggctgctgctggcgcttgtgctcgccccgagagtgctgagagcaaaacctacagtgaggaaggaaagagtggtgaggcctgattctgagcttggcgaacggccacctgaagacaatcaaagtttccagtatgatcacgaagcgtttctgggcaaagaagatagcaaaacgttcgaccagcttacccccgatgagtccaaagaacgactgggtaagatcgtggatagaattgataacgatggtgacggtttcgtcactactgaggagctcaagacatggataaagcgcgtacagaaaagatacatatttgacaacgtcgcgaaggtgtggaaggactacgaccgggacaaagacgataaaatttcctgggaagaatacaaacaagccacatatggctactatcttgggaaccctgcggagttccacgactctagcgaccaccatacatttaaaaaaatgctacctagagacgagaggcgcttcaaggccgctgacctgaacggtgatctgacagccacccgcgaggagtttaccgccttcctgcaccccgaagagttcgaacatatgaaggagatcgtcgttctcgaaacactcgaagacatcgacaagaacggagatggttttgtggatcaggatgaatatatcgcagatatgttctctcacgaagaaaacggacctgagccggattgggttctgagcgaaagggaacagtttaatgagttccgggatcttaataaagatggtaaactggacaaggacgaaattcgacactggattttgccacaggactatgatcacgcacaggcagaggcccgacacttagtgtatgagtccgataaaaataaggatgaaaaactgactaaagaggagattttggaaaattggaacatgtttgttggcagtcaagcgacaaattatggagaagatttaaccaagaatcatgatgaattgtag

SEQ ID NO: 133275 - DNA, 996 bp, Artificial Sequence
  derived and/or modified sequence
atggcacggggtgggaggggaaggaggctcggcctcgctctgggtctactactcgctcttgttctggctccaagagtcctacgtgcgaagcctacagtccgtaaagagagagtggtgcggccagacagcgaactgggagagagaccgcctgaagataaccagagtttccagtacgaccacgaggctttcctgggcaaagaagactccaaaacctttgatcagctgacacctgacgagtccaaggagcgtctcggtaagattgtggataggatcgacaacgatggtgatgggtttgtgaccactgaagagctcaagacatggatcaaaagggtacagaaaagatacatcttcgacaacgtggcgaaggtctggaaggactacgaccgggacaaggacgacaaaataagctgggaggagtacaaacaagctacctatggatactatttgggaaatccagctgagttccacgatagctcagaccaccatacctttaaaaaaatgctgcctcgggacgaacgtagattcaaggccgccgacttgaacggggacttaactgcaactagagaggagttcaccgccttcctccatcctgaagaattcgaacacatgaaggaaatcgtggtcctggaaaccctggaagatattgacaaaaatggggatggtttcgtcgatcaggatgaatacattgctgacatgttttcgcacgaggagaacggccctgagccagactgggtattaagcgaaagggagcaatttaacgagttcagggatctgaataaggatggtaaactggataaggacgagataaggcattggatccttccgcaagactacgatcatgcccaggccgaagctcgccacctggtatacgaaagtgataaaaataaagatgaaaaactaaccaaggaagaaatactggagaattggaatatgtttgtagggagtcaggccacaaattatggagaggacttaaccaaaaatcacgatgaattatag

SEQ ID NO: 133276 - DNA, 2572 bp, Artificial Sequence
  derived and/or modified sequence
agccccgcgcccaccaccccagctggcgacgtggctccgcggccccggcttcccccggcagctcagcgaccaatgggcgcgcgagcggggccgcccgcagcttcccagcccgaggcccaggcgcgcccctctgctccggctcggggcgggcactggcggagggactggccagtcccctcctccgcgccggccccaaccctgtcgctgccgccgcgctccgagtccccattcccgagctgccgctgttgtcgctcgctcagcgtctccctctcggccgccctctcctcgggacgatggcgcgcggtggccgcggccgccgcctggggttagccctggggctgctgctggcgctggtgctggcgccgcgggttctgcgggccaagcccacggtgcgcaaagagcgcgtggtgcggcccgactcggagctgggcgagcggccccctgaggacaaccagagcttccagtacgaccacgaggccttcctgggcaaggaggactccaagaccttcgaccagctcaccccggacgagagcaaggagaggctagggaagattgttgatcgaatcgacaatgatggggatggctttgtcactactgaggagctgaaaacctggatcaaacgggtgcagaaaagatacatctttgataatgtcgccaaagtctggaaggattatgatagggacaaggatgataaaatttcctgggaagaatacaaacaagccacctatggttactacctaggaaaccccgcagagtttcatgattcttcagatcatcacacctttaaaaagatgctgccacgtgatgagagaagattcaaagctgcagacctcaatggtgacctgacagctactcgggaggagttcactgcctttctgcatcctgaagagtttgaacatatgaaggaaattgtggttttggaaaccctggaggacatcgacaagaacggggatgggtttgtggatcaggatgagtatattgcggatatgttttcccatgaggagaatggccctgagccagactgggttttatcagaacgggagcagtttaacgaattccgggatctgaacaaggacgggaagttagacaaagatgagattcgccactggatcctccctcaagattatgatcatgcacaggctgaggccaggcatctggtatatgaatcagacaaaaacaaggatgagaagctaactaaagaggaaatattggagaactggaacatgtttgtcggaagccaagctaccaattacggggaagatctcacaaaaaatcatgatgagctttgatagacactcaccagaatatggcagactgtcataggcattctgttattgtcttggattgttgctacaattgtctaatttacagcagttgtgatcccacaaaaagcaagtttatacctcagattggggtataaaaattgtttttcgctcagtatttactggaaaatggacatcactagtctttcagtaagatttctctcaaaacacgtgaaaaccttggtaaattgcaattctttctggggatatattggtacaacatgacttaaaacttttttttttctattaaaacttaaaggggaacaaaacttgaaaaagccctgttcttcagaaggtgagtgggttgagggaggcagtaatatgaagtgactgctgtgtattttaactaccagattttttatatttgccactgttaaatagttggaaaggggaaattctgattaagcgaaagtggtatcatcctaggtaagcttatttcagaacaagtctaatatttcagattctttcttttcgactttatactctgagttattacttactgtaagtggtgtatatgaaacctccatgcattttccagtatggatctgctaatatgcacagtaaatccatgtctttgtttgtttttctattaaaaagcaatcaagaaagataatgtgaaaaagaaaggaatttagaggtagggaaaagatgaatgtcagacatttgaagaactatagtaaaatgataaacactaaatatacttgagaaaactttcttaatatgccaatgaggtaggcctgatctttgaaatagtgaataggaatacaatgcatttcctcagtgatcactgattagaatgagttggtgggatccttgggaagccaaacggagcggagttctggatcatgtcccatccagtccagtgaatccacgacccgcagacctgtccccccgcaacagcttataccatggaatgaggacaaggtgatactctgagctgtggactgaactggcagacacaacctgtacagattgaaatttcaccttgtaaggaggaagtgaatgaaataaaggatccccctaaggattttctactgtgtcctgtggtgtttgacttcacagatgctatttgtgacattattcatatagcataaaacagtggggttggatcccatgaataacattataaaggttctggggttttttttcatccaattactagaatgttcagaatagactcatatttactaatttaataaatgtatgtacttaatgcctttacttttctaggtcattttaactataaaatc

SEQ ID NO: 133277 - DNA, 549 bp, Artificial Sequence
  derived and/or modified sequence
gaaatattggagaactggaacatgtttgtcggaagccaagctaccaattacggggaagatctcacaaaaaatcatgatgagctttgatagacactcaccagaatatggcagactgtcataggcattctgttattgtcttggattgttgctacaattgtctaatttacagcagttgtgatcccacaaaaagcaagtttatacctcagattggggtataaaaattgtttttcgctcagtatttactggaaaatggacatcactagtctttcagtaagatttctctcaaaacacgtgaaaaccttgtgatcactgattagaatgagttggtgggatccttgggaagccaaacggagcggagttctggatcatgtcccatccagtccagtgaatccacgacccgcagacctgtccccccgcaacagcttataccatggaatgaggacaaggtgatactctgagctgtggactgaactggcagacacaacctgtacagattgaaatttcaccttgtaaggaggaagtgaatgaaataaaggatccccctaagga

SEQ ID NO: 133278 - DNA, 996 bp, Artificial Sequence
  derived and/or modified sequence
atggccagaggcggcagaggcagaagactgggcctggccctgggcctgctgctggccctggtgctggcccccagagtgctgagagccaagcccaccgtgagaaaggagagagtggtgagacccgacagcgagctgggcgagagaccccccgaggacaaccagagcttccagtacgaccacgaggccttcctgggcaaggaggacagcaagaccttcgaccagctgacccccgacgagagcaaggagagactgggcaagatcgtggacagaatcgacaacgacggcgacggcttcgtgaccaccgaggagctgaagacctggatcaagagagtgcagaagagatacatcttcgacaacgtggccaaggtgtggaaggactacgacagagacaaggacgacaagatcagctgggaggagtacaagcaggccacctacggctactacctgggcaaccccgccgagttccacgacagcagcgaccaccacaccttcaagaagatgctgcccagagacgagagaagattcaaggccgccgacctgaacggcgacctgaccgccaccagagaggagttcaccgccttcctgcaccccgaggagttcgagcacatgaaggagatcgtggtgctggagaccctggaggacatcgacaagaacggcgacggcttcgtggaccaggacgagtacatcgccgacatgttcagccacgaggagaacggccccgagcccgactgggtgctgagcgagagagagcagttcaacgagttcagagacctgaacaaggacggcaagctggacaaggacgagatcagacactggatcctgccccaggactacgaccacgcccaggccgaggccagacacctggtgtacgagagcgacaagaacaaggacgagaagctgaccaaggaggagatcctggagaactggaacatgttcgtgggcagccaggccaccaactacggcgaggacctgaccaagaaccacgacgagctgtag

SEQ ID NO: 133279 - DNA, 87 bp, Artificial Sequence
  derived and/or modified sequence
gagatcctggagaactggaacatgttcgtgggcagccaggccaccaactacggcgaggacctgaccaagaaccacgacgagctgtag

SEQ ID NO: 133280 - protein, 317 aa, Artificial Sequence
  derived and/or modified sequence
MRLGPRTAALGLLLLCAAAAGAGKAEELHYPLGERRSDYDREALLGVQEDVDEYVKLGHEEQQKRLQAIIKKIDLDSDGFLTESELSSWIQMSFKHYAMQEAKQQFVEYDKNSDDTVTWDEYNIQMYDRVIDFDENTALDDAEEESFRKLHLKDKKRFEKANQDSGPGLSLEEFIAFEHPEEVDYMTEFVIQEALEEHDKNGDGFVSLEEFLGDYRWDPTANEDPEWILVEKDRFVNDYDKDNDGRLDPQELLPWVVPNNQGIAQEEALHLIDEMDLNGDKKLSEEEILENPDLFLTSEATDYGRQLHDDYFYHDEL

SEQ ID NO: 133281 - DNA, 954 bp, Artificial Sequence
  derived and/or modified sequence
atgaggctcggacccagaaccgctgctctaggcctgctgctcctttgcgctgcggcggctggagcaggcaaggcggaggagctccattatccactgggggagagacgaagcgactacgatagagaggcgctgctgggagtacaagaggacgtcgacgagtacgtgaaactggggcatgaggaacagcagaaacgtctccaggccattatcaaaaagattgacctggacagtgatggcttcctgacagagtctgagctctccagttggatccagatgtcgtttaagcactacgctatgcaggaagccaaacagcagtttgtagagtatgataagaactctgatgatacagtgacatgggatgagtataacattcaaatgtatgatagagtgatcgatttcgatgagaatacagccctggatgacgccgaggaagagagctttcgcaagttgcatcttaaagataaaaagcgatttgagaaagcaaaccaagactccggtccaggcctcagcttggaagaattcattgcctttgagcaccccgaagaagtcgactacatgacggaatttgtgatccaagaggcactggaggagcacgacaagaacggagatggcttcgtcagcctcgaggaatttctgggcgactatcgctgggatcctaccgctaacgaagacccagagtggattcttgttgaaaaggacaggtttgtgaacgattatgataaagataacgatggcagactcgacccacaggagctgctgccctgggtggtgcctaacaaccagggaatcgcacaggaggaggccctgcatcttatcgatgagatggatttgaatggcgataagaagttgagcgaagaagagattctggaaaaccccgatctctttctcacttccgaggccacagattacggaaggcaactgcacgacgattatttttaccacgatgaactctag

SEQ ID NO: 133282 - DNA, 954 bp, Artificial Sequence
  derived and/or modified sequence
atgaggctgggccccaggacagctgccctgggcctgctgctgctgtgtgccgctgctgctggggccggcaaggccgaggagctgcactaccccctgggggagaggagaagtgactatgaccgggaggccctgctgggcgtgcaggaggatgtggatgaatatgtgaagctgggccacgaggagcagcagaagaggctgcaggccatcatcaagaagattgacctggacagtgatggcttcctgacagagagcgagctgagctcctggatccagatgtccttcaagcactacgccatgcaggaggccaagcagcagtttgtggagtatgacaagaacagtgatgacacagtgacctgggatgagtacaacatccagatgtatgacagagtgattgactttgatgaaaatacagccctggatgatgctgaggaggagagcttcaggaagctgcacctgaaggacaagaagagatttgagaaggccaaccaggacagcggccctggcctgagcctggaggagttcatcgcctttgagcaccctgaggaggtggactacatgacagaatttgtgatccaggaggccctggaggagcatgacaagaatggagatggctttgtgtccctggaggagttcctgggggactaccgctgggaccccacagccaatgaagatcctgagtggatcctggtggagaaggacagatttgtgaatgactatgacaaggacaatgatggccgcctggacccccaggagctgctgccctgggtggtgcccaacaaccagggcatcgcccaggaggaggccctgcacctgattgatgagatggacctgaatggagacaagaagctgtctgaggaggagatcctggagaacccagacctcttcctgaccagcgaggccacagattatggccggcagctgcatgatgactacttctaccatgatgagctgtag

SEQ ID NO: 133283 - DNA, 954 bp, Artificial Sequence
  derived and/or modified sequence
atgcggctgggcccccggaccgccgccctgggcctgctgctgctgtgtgccgcagccgccggggccggcaaggccgaagaactccattatccacttggggagcggagatcagactatgaccgggaggcgcttctgggcgtccaagaggacgttgacgaatatgtgaagctcgggcatgaggagcagcagaagcgcctgcaggccatcatcaaaaaaatcgacttggatagcgacggattcctgactgaatccgaattgagtagttggattcagatgtcctttaagcattacgctatgcaagaggctaaacagcagtttgttgagtacgacaaaaatagcgacgacactgtcacctgggatgagtacaacatccagatgtacgacagagtcatcgactttgacgagaatacagccctagatgatgctgaagaagagtccttccgaaagctacatctgaaggataaaaagagattcgaaaaggccaaccaggatagtggccccggactgagcctggaagagttcatagcgtttgagcatcctgaagaagtggattatatgaccgaatttgttattcaagaagcacttgaagaacacgataagaacggggacggattcgtgagtcttgaagagttcctcggagattacagatgggaccccaccgccaatgaggacccagagtggatcctggtcgagaaggacaggtttgtgaacgactacgataaggataacgatggacgactggacccacaggaactgctgccatgggtcgtgcccaataatcagggaattgctcaggaggaagcccttcaccttatcgatgaaatggatcttaatggtgacaagaagcttagcgaagaagaaattctggaaaatccagacctgttcctcacatctgaggccactgactatgggcggcagctgcacgacgactatttttatcacgacgagttgtag

SEQ ID NO: 133284 - DNA, 954 bp, Artificial Sequence
  derived and/or modified sequence
atgaggctggggcctcggaccgccgctctgggacttttactcctgtgcgctgcagcagcaggagcaggaaaggctgaagaactacactatccgttgggagagcgcagatccgattacgacagagaggccctcctgggagttcaggaagacgtggatgagtatgttaaattagggcatgaggagcagcagaaacgactgcaggccattattaagaagattgaccttgactccgatggttttttgacggaatccgagctgtcctcctggatccagatgtcttttaaacattatgctatgcaggaagccaaacagcagttcgtggaatacgacaaaaattccgacgatacggtcacctgggacgaatacaacatccagatgtacgaccgggtgattgactttgacgaaaacacagccctggacgatgccgaggaggagagctttagaaaattacacttgaaggacaagaaaagatttgagaaggctaaccaggattccggtcctggcttatcactagaggagtttatagccttcgagcaccctgaagaagtcgattacatgaccgaattcgttattcaggaggcattggaagagcacgacaaaaacggggatggcttcgtttccctggaggaatttttaggcgactataggtgggaccctacagcaaacgaagacccagagtggatccttgtcgaaaaagataggtttgttaatgattacgataaagacaatgatgggaggctggacccccaggagctgctgccttgggtggttccaaataaccagggaattgcccaggaggaggccctgcatctgatagacgagatggacttaaatggcgataagaaactgtctgaggaagaaatccttgaaaatccagaccttttcctgacgtccgaggcaactgattacgggagacagcttcacgacgactacttttatcacgatgaactgtag

SEQ ID NO: 133285 - DNA, 2215 bp, Artificial Sequence
  derived and/or modified sequence
atataggcctcctcctggcgcgcctccgcaccgcattggtggaccggcccccagcccgtccatgggcgttgtggccgccaccgcaggttccgcctcccgttccctccgccctcaacgtacgtcgcaccgcctctctgtagccgcccgcggagcatcgcagccggcccgggcccccgccagcctccctcctcgcgtccctcggtgtcctccgcgggccggcgcgatgcggctgggcccgaggaccgcggcgttggggctgctgctgctgtgcgccgccgcggccggcgccggcaaggccgaggagctgcactacccgctgggcgagcgccgcagcgactacgaccgcgaggcgctgctgggcgtccaggaagatgtggatgaatatgttaaactcggccacgaagagcagcaaaaaagactgcaggcgatcataaagaaaatcgacttggactcagatggctttctcactgaaagtgaactcagttcatggattcagatgtcttttaagcattatgctatgcaagaagcaaaacaacagtttgttgaatatgataaaaacagtgatgatactgtgacttgggatgaatataacattcagatgtatgatcgtgtgattgactttgatgagaacactgctctggatgatgcagaagaggagtcctttaggaagcttcacttaaaggacaagaagcgatttgaaaaagctaaccaggattcaggtcccggtttgagtcttgaagaatttattgcttttgagcatcctgaagaagttgattatatgacggaatttgtcattcaagaagctttagaagaacatgacaaaaatggtgatggatttgttagtttggaagaatttcttggtgattacaggtgggatccaactgcaaatgaagatccagaatggatacttgttgagaaagacagattcgtgaatgattatgacaaagataacgatggcaggcttgatccccaagagctgttaccttgggtagtacctaataatcagggcattgcacaagaggaggcgcttcatctaattgatgaaatggatttgaatggtgacaaaaagctctctgaagaagagattctggaaaacccggacttgtttctcaccagtgaagccacagattatggcagacagctccatgatgactatttctatcatgatgagctttaatctctgagcctgtctcagtagagtactggctccttttataatttgttaccagctttacttttgtgataaaatattgatgttgtattttacactcttaagtcttaaccacagtcagaattatcttaatgtagattataattttggtcttttaggaaaaaaaaacaaaaatctgatatttatttcaaaatgtattgaagcaacaaaatattaatattgtgccatatgacaacaaagtctttcctaaatactccatctgtttagtactgtattgtggaatatttgagttctatttccatacttgaaaacatggaggattttagagatgcctgaacaatattatttaagtagtatgtgaccgagctataaatttttgtttttgttctaagtagatttaatttgggaactgacaggacaatgtttttaggtttagcattttgtttaaaaacctttaaagaaacctttagaaggacttagacctcacatattaatgttgagaagttctgcttaattttaaaatggtttctataaagggttttattgtatgaaatagaactttatatttttgcatatgtatagatagtaattatatttaatgtataactatagcattatggtgagtggaatttgacattgtccaaacctttttcatttttgagtgattaaaaatgaaatgtcctttgtatatgtttgtttgcttttctttaactttcagataaatattgaatttagcataggttttgtggtattgtacattatcttgcctcatccattcctttatgtggatagttcccaaaactgtcaaattattcttgctgcattttcttattttttttttaaataagagaatcatgttataatataattgaatgtgcacctgacacattttaataattggtgttgtagcaaatgtggttttgctctttggggctataaataatcttgagtaacgcaggttggaattaccaatagagctggtcagttatcaacagtagagctcagtatcaattttactgaaattaaaatcatacttgataagca

SEQ ID NO: 133286 - DNA, 954 bp, Artificial Sequence
  derived and/or modified sequence
atgagactgggccccagaaccgccgccctgggcctgctgctgctgtgcgccgccgccgccggcgccggcaaggccgaggagctgcactaccccctgggcgagagaagaagcgactacgacagagaggccctgctgggcgtgcaggaggacgtggacgagtacgtgaagctgggccacgaggagcagcagaagagactgcaggccatcatcaagaagatcgacctggacagcgacggcttcctgaccgagagcgagctgagcagctggatccagatgagcttcaagcactacgccatgcaggaggccaagcagcagttcgtggagtacgacaagaacagcgacgacaccgtgacctgggacgagtacaacatccagatgtacgacagagtgatcgacttcgacgagaacaccgccctggacgacgccgaggaggagagcttcagaaagctgcacctgaaggacaagaagagattcgagaaggccaaccaggacagcggccccggcctgagcctggaggagttcatcgccttcgagcaccccgaggaggtggactacatgaccgagttcgtgatccaggaggccctggaggagcacgacaagaacggcgacggcttcgtgagcctggaggagttcctgggcgactacagatgggaccccaccgccaacgaggaccccgagtggatcctggtggagaaggacagattcgtgaacgactacgacaaggacaacgacggcagactggacccccaggagctgctgccctgggtggtgcccaacaaccagggcatcgcccaggaggaggccctgcacctgatcgacgagatggacctgaacggcgacaagaagctgagcgaggaggagatcctggagaaccccgacctgttcctgaccagcgaggccaccgactacggcagacagctgcacgacgactacttctaccacgacgagctgtag

SEQ ID NO: 133287 - protein, 200 aa, Artificial Sequence
  derived and/or modified sequence
MGNSKSGALSKEILEELQLNTKFSEEELCSWYQSFLKDCPTGRITQQQFQSIYAKFFPDTDPKAYAQHVFRSFDSNLDGTLDFKEYVIALHMTTAGKTNQKLEWAFSLYDVDGNGTISKNEVLEIVMAIFKMITPEDVKLLPDDENTPEKRAEKIWKYFGKNDDDKLTEKEFIEGTLANKEILRLIQFEPQKVKEKMKNA

SEQ ID NO: 133288 - DNA, 1217 bp, Artificial Sequence
  derived and/or modified sequence
gccctccacaaagctcctgggcccctcctcccttcaaggattgcgaagaactggtcgcaaatcctcctaagccaccagcatctcggtcttcagctcacaccagccttgagcccagcctgcggccaggggaccacgcacgtcccacccacccagcgactccccagccgctgcccactcttcctcactcatggggaacagcaaaagtggggccctgtccaaggagatcctggaggagctgcagctgaacaccaagttctcggaggaggagctgtgctcctggtaccagtccttcctgaaggactgtcccaccggccgcatcacccagcagcagttccagagcatctacgccaagttcttccccgacaccgaccccaaggcctacgcccagcatgtgttccgcagcttcgattccaacctcgacggcaccctggacttcaaggagtacgtcatcgccctgcacatgaccaccgcgggcaagaccaaccagaagctggagtgggccttctccctctacgacgtggacggtaacgggaccatcagcaagaatgaagtgctggagatcgtcatggctattttcaaaatgatcactcccgaggacgtgaagctccttccagacgatgaaaacacgccggaaaagcgagccgagaagatctggaagtactttggaaagaatgatgatgataaacttacagagaaagaattcattgaggggacactggccaataaggaaattctgcgactgatccagtttgagcctcaaaaagtgaaggaaaagatgaagaacgcctgatgccaactgttcagctgtcctccctccacctaccactcacatgacacccgtgagcgcctgtgcacacacacacacatgcacacacacgcgcgcgcacacacacacacacacatccaccccagggccaagagaaaggcctgcacacaagcccacagcacagctccctgccaaactgaagcatctgtagtgacccactggttccttcttcctgggtcttcagcattccctcccatcatgcccggtcccacccctccctctgtccaccagcccatggccctgtgctaatcccaggattaggccataggagtcctaagtgtcaccccgctgtaagctcctttgtggagtgctgggtaagcagtttccaataaacgcaagctgagctgggaaaaaaaaaaaaaaaaaaaaaaaaaaaaaaaaaaaaaaaaaa

SEQ ID NO: 133289 - DNA, 2565 bp, Artificial Sequence
  derived and/or modified sequence
gccctccacaaagctcctgggcccctcctcccttcaaggattgcgaagaactggtcgcaaatcctcctaagccaccagcatctcggtcttcagctcacaccagccttgagcccagcctgcggccaggggaccacgcacgtcccacccacccagcgactccccagccgctgcccactcttcctcactcatggggaacagcaaaagtggggccctgtccaaggagatcctggaggagctgcagctgaacaccaagttctcggaggaggagctgtgctcctggtaccagtccttcctgaaggactgtcccaccggccgcatcacccagcagcagttccagagcatctacgccaagttcttccccgacaccgaccccaaggcctacgcccagcatgtgttccgcagcttcgattccaacctcgacggcaccctggacttcaaggagtacgtcatcgccctgcacatgaccaccgcgggcaagaccaaccagaagctggagtgggccttctccctctacgacgtggacggtaacgggaccatcagcaagaatgaagtgctggagatcgtcatggctattttcaaaatgatcactcccgaggacgtgaagctccttccagacgatgaaaacacgccggaaaagcgagccgagaagatctggaagtactttggaaagaatgatgatgataaacttacagagaaagaattcattgaggggacactggccaataaggaaattctgcgactgatccagtttgagcctcaaaaagtgaaggaaaagatgaagaacgcctgatgccaactgttcagctgtcctccctccacctaccactcacatgacacccgtgagcgcctgtgcacacacacacacatgcacacacacgcgcgcgcacacacacacacacacatccaccccagggccaagagaaaggcctgcacacaagcccacagcacagctccctgccaaactgaagcatctgtagtgacccactggttccttcttcctgggtcttcagcattccctcccatcatgcccggtcccacccctccctctgtccaccagcccatggccctgtgctaatcccaggattaggccataggagtcctaagtgtcaccccgctgtaagctcctttgtggagtgctgggtaagcagtttccaataaacgcaagctgagctgggcacgtggctgctggtcatccttcaactggaaaaggaaatgatttctatcagtcacacctcaaagacaaggctgtgttgcgatggcagccctaggctgggctgctttggtgcggaatgagtctaatgcggtcctgctgtcatggagctcatggtccagaggggacaatgaacctggaaggagccatgaccagtggcccaggttaccatggaaacgtgcagagcaccaggggaggacacagtggaaggggctgacttgtcaggggggatcagggaccacatccctgacgaagggagatttaaattcagaaccactgcacacgaggcgggggacggggtcggggtggggaagtctcaaacagaaggcggccaacacagagccgctgaggcatgaatgaccatctcgagttccaggagaaggtcggggtggctggagggtagaaggaggagggagagcaaagtgtgagctgaatctaaaaggtaggcgggggctggaccacgcaaagccctccctgcagcctgtggtaagcacttgggggctcaccatggggacagcggtgccactgtggagttggaagtaggaggggtttatgtttgtaagagaagtccccagcaggctaaaataagtcagagaggagcaactgggggctccctggagtcagggagcccgatgaataagcttttgcagccactcagatggcctgggccaggggaaaggcaatgggatggagaggaccagatccagtgaggacacatttaggaggtagcatccacctggctggctgagggggcaggaggagagagggcaggaatggcagccaggcctgtagcttgggcagtgggtgaatagcaatgccatctatggagatgagaaatacagagagtctttggggtttcagggaacaatgatgaattcagcttcaatatagtatgaggtgaaggcagagccatagatggccctaaagccccttgttttagagacaaggaaaaggagtcccaatgacaggaagcagcttgcccaagggcagccagctgatgagcagaggtcaggcaagggctacccaccggcccccaactgcctcctcaaagctccagggcctgggatacccaggaactccatcagtgcattctccaagatccctggatttgttgctttgaaggcccatttattctccagcctcaagttccaagatgaggtcagaaaaatgcatggataccctggattcttgactgacctgtctgcaacctcttgaggctgaggagtctctagttgctggtattgtggtgatgcctccagaccccactttagccacagagatgacacaatcaccactgccaaagagcactcctctgtgtggagagcaaacgtgagaataaacacttatgaaccgtg

SEQ ID NO: 133290 - DNA, 603 bp, Artificial Sequence
  derived and/or modified sequence
atgggaaacagcaagtcaggcgctctcagcaaagaaatattggaagagctgcaattaaatactaagttttcagaagaggaactgtgttcctggtatcagtcattccttaaagactgcccaaccggtcgcatcacacagcagcagtttcaatccatctacgctaagttttttcctgacactgacccaaaagcttatgctcaacacgtgtttcgcagttttgatagcaacctggatggaaccttggactttaaagaatatgtgattgccttacacatgaccactgccggcaagacaaatcagaagctggaatgggcattcagtctgtacgatgtagatggtaacggaactatatcgaagaacgaagtactcgagatcgtgatggccatattcaagatgattacgcctgaagacgtcaaactgctgcctgacgatgagaatacccccgaaaagcgagctgaaaagatctggaagtactttggcaagaatgacgacgataagctcaccgaaaaggagttcattgaagggactttggctaataaagaaatcctacgtctcatccaatttgagccgcagaaagtaaaagaaaagatgaagaatgcttag

SEQ ID NO: 133291 - DNA, 603 bp, Artificial Sequence
  derived and/or modified sequence
atgggcaacagcaagagcggggccctgagcaaggagatcctggaggagctgcagctgaacaccaagttcagcgaggaggagctgtgctcctggtaccagagcttcctgaaggactgccccaccggccgcatcacccagcagcagttccagagcatctatgccaagttcttcccagacacagaccccaaggcctatgcccagcacgtgttccgcagctttgacagcaacctggatggcaccctggacttcaaggagtatgtgattgccctgcacatgaccacagctgggaagaccaaccagaagctggagtgggccttcagcctgtatgatgtggatggaaatggcaccatcagcaagaatgaggtgctggagatcgtgatggccatcttcaagatgatcaccccagaagatgtgaagctgctgcctgatgatgagaacaccccagagaagagagctgagaagatctggaagtactttgggaagaatgatgatgacaagctgacagagaaggagttcatcgagggcaccctggccaacaaggagatcctgcggctcatccagtttgagccccagaaggtgaaggagaagatgaagaatgcctag

SEQ ID NO: 133292 - DNA, 603 bp, Artificial Sequence
  derived and/or modified sequence
atgggcaacagcaagagcggcgccctgagcaaggagatcctggaggagctacaactgaacaccaagttttcagaagaagagttgtgctcctggtaccagagcttcctgaaggattgtcctaccggccgcatcactcagcaacagttccagtctatctatgccaagtttttccctgacacggaccctaaggcctacgcccaacacgtatttagatctttcgacagtaaccttgatgggactttggactttaaagagtacgttatcgcgttgcacatgactacggccggcaaaactaatcagaaactggagtgggcctttagtctgtacgacgtagatgggaatgggacgatctctaagaatgaggtgttagagatcgtgatggctatctttaagatgataacccccgaagatgtgaagctgttgcccgacgatgagaacacccccgagaaacgggcagagaagatctggaagtattttggcaaaaatgatgacgataagctgaccgagaaagagttcatcgaaggaactctcgccaacaaagagatactccggcttatccagttcgaaccacaaaaagtcaaggagaaaatgaagaacgcgtag

SEQ ID NO: 133293 - DNA, 603 bp, Artificial Sequence
  derived and/or modified sequence
atgggcaacagcaaatccggagcactctcaaaggagattttagaggagctgcaactgaacaccaaatttagcgaggaggaactctgttcttggtatcagagtttcttgaaggattgcccaaccggccgtattactcaacaacagttccagagcatttacgctaaattcttccccgataccgatcccaaggcatatgctcagcatgtctttcgctcattcgactcgaacttagatgggactctggactttaaagagtatgtgatagctctgcacatgaccactgcaggcaagacaaatcaaaagctggaatgggcgttttctctatacgacgtcgatgggaatgggactatcagcaagaacgaggtacttgagatagtgatggcaatctttaagatgataaccccagaagacgttaagctgctgccagatgacgagaatacccccgagaagagagccgagaagatttggaagtactttggtaaaaatgatgacgacaaactcacagaaaaagagttcatcgaaggaactctggccaacaaagagatactgaggctcatccagtttgagccgcaaaaggtgaaggagaaaatgaagaatgcgtag

SEQ ID NO: 133294 - DNA, 603 bp, Artificial Sequence
  derived and/or modified sequence
atgggcaacagcaagagcggcgccctgagcaaggagatcctggaggagctgcagctgaacaccaagttcagcgaggaggagctgtgcagctggtaccagagcttcctgaaggactgccccaccggcagaatcacccagcagcagttccagagcatctacgccaagttcttccccgacaccgaccccaaggcctacgcccagcacgtgttcagaagcttcgacagcaacctggacggcaccctggacttcaaggagtacgtgatcgccctgcacatgaccaccgccggcaagaccaaccagaagctggagtgggccttcagcctgtacgacgtggacggcaacggcaccatcagcaagaacgaggtgctggagatcgtgatggccatcttcaagatgatcacccccgaggacgtgaagctgctgcccgacgacgagaacacccccgagaagagagccgagaagatctggaagtacttcggcaagaacgacgacgacaagctgaccgagaaggagttcatcgagggcaccctggccaacaaggagatcctgagactgatccagttcgagccccagaaggtgaaggagaagatgaagaacgcctag

SEQ ID NO: 133295 - protein, 387 aa, Artificial Sequence
  derived and/or modified sequence
MVPKGATMLVIPPGLSEEEEALQKKFNKLKKKKKALLALKKQSSSSTTSQGGVKRSLSEQPVMDTATATEQAKQLVKSGAISAIKAETKNSGFKRSRTLEGKLKDPEKGPVPTFQPFQRSISADDDLQESSRRPQRKSLYESFVSSSDRLRELGPDGEEAEGPGAGDGPPRSFDWGYEERSGAHSSASPPRSRSRDRSHERNRDRDRDRERDRDRDRDRDRERDRDRDRDRDRDRERDRDRERDRDRDREGPFRRSDSFPERRAPRKGNTLYVYGEDMTPTLLRGAFSPFGNIIDLSMDPPRNCAFVTYEKMESADQAVAELNGTQVESVQLKVNIARKQPMLDAATGKSVWGSLAVQNSPKGCHRDKRTQIVYSDDVYKENLVDGF

SEQ ID NO: 133296 - protein, 380 aa, Artificial Sequence
  derived and/or modified sequence
MLVIPPGLSEEEEALQKKFNKLKKKKKALLALKKQSSSSTTSQGGVKRSLSEQPVMDTATATEQAKQLVKSGAISAIKAETKNSGFKRSRTLEGKLKDPEKGPVPTFQPFQRSISADDDLQESSRRPQRKSLYESFVSSSDRLRELGPDGEEAEGPGAGDGPPRSFDWGYEERSGAHSSASPPRSRSRDRSHERNRDRDRDRERDRDRDRDRDRERDRDRDRDRDRDRERDRDRERDRDRDREGPFRRSDSFPERRAPRKGNTLYVYGEDMTPTLLRGAFSPFGNIIDLSMDPPRNCAFVTYEKMESADQAVAELNGTQVESVQLKVNIARKQPMLDAATGKSVWGSLAVQNSPKGCHRDKRTQIVYSDDVYKENLVDGF

SEQ ID NO: 133297 - protein, 159 aa, Artificial Sequence
  derived and/or modified sequence
MLVIPPGLSEEEEALQKKFNKLKKKKKALLALKKQSSSSTTSQGGVKRSLSEQPVMDTATATEQAKQLVKSGAISAIKAETKNSGFKRSRTLEGKLKDPEKGPVPTFQPFQRSISADDDLQESSRRPQRKSLYESFVSSSDRLRELGPDGEEAEGPGAG

SEQ ID NO: 133298 - protein, 294 aa, Artificial Sequence [sequence omitted]

SEQ ID NO: 133299 - DNA, 1405 bp, Artificial Sequence
  derived and/or modified sequence
atagccgtttctctgttcttcctctttgcgttgctctgcgggcgctacgctggctccaccgccttctctgccgttcaaaccccgcggttgtccttaccctagcgagggtaggggggtcgggtgccatcgtctttccgacggagtggatatttgtccctccttgaaccacatggtacctaaaggagccaccatgttggtgataccccccggactgagcgaggaagaggaggctctgcagaagaaattcaacaagctcaagaaaaagaaaaaggcattgctggctctgaagaagcaaagtagcagcagcacaaccagccaaggtggtgtcaaacgctcactatcagagcagcctgtcatggacacagccacagcaacagagcaggcaaagcagctggtgaagtcaggagccatcagtgccatcaaggctgagaccaagaactcaggcttcaagcgttctcgaacccttgaggggaagttaaaggaccccgagaagggaccagtccccactttccagccgttccagaggagcatatctgctgatgatgacctgcaagagtcatccagacgtccccagaggaaatctctgtatgagagctttgtgtcttctagtgatcgacttcgagaactaggaccagatggagaagaggcagagggcccaggggctggtgatggtccccctcgaagctttgactggggctatgaagaacgcagtggtgcccactcctcagcctcccctccccgaagccgcagccgggaccgcagccatgagaggaaccgggacagagaccgagatcgggagcgggatcgagaccgggatcgagacagagacagagagcgggacagggatcgggatcgggatcgagatcgagaccgggaacgggacagggatcgggagcgggatcgagaccgagaccgagagggtcctttccgcaggtcggattcattccctgaacggcgagcccctaggaaagggaatactctctatgtatatggagaagacatgacacccacccttctccgtggggccttctctccttttggaaacatcattgacctctccatggacccacccagaaactgtgccttcgtcacctatgaaaagatggagtcagcagatcaggccgttgctgagctcaacgggacccaggtggagtctgtacagctcaaagtcaacatagcccgaaaacagcccatgctggatgccgctactggcaagtctgtctggggctccctcgctgtccagaacagccctaagggttgccaccgggacaagaggacccagattgtctacagtgatgacgtctacaaggaaaaccttgtggatggcttctagggaacagagctggattccttgtgcctcatatgccccaatgctggtctcagtaaaacactgaggtggaagctt

SEQ ID NO: 133300 - DNA, 1584 bp, Artificial Sequence
  derived and/or modified sequence
aagtagaggcaacttccggtacagccccgccgagagcgtgaactatcgctgcggaggggcagacctggaccggtggaaggccgggcggaagtgcgcgcctggggccgccttggttaccgcgttttccgctcctcgctacgtcatcgttgtgagcccgctatcagcggccagcgcgggcgcggccggagaccgtggggcccccggttgccgccccctcgggagccaccatgttggtgataccccccggactgagcgaggaagaggaggctctgcagaagaaattcaacaagctcaagaaaaagaaaaaggcattgctggctctgaagaagcaaagtagcagcagcacaaccagccaaggtggtgtcaaacgctcactatcagagcagcctgtcatggacacagccacagcaacagagcaggcaaagcagctggtgaagtcaggagccatcagtgccatcaaggctgagaccaagaactcaggcttcaagcgttctcgaacccttgaggggaagttaaaggaccccgagaagggaccagtccccactttccagccgttccagaggagcatatctgctgatgatgacctgcaagagtcatccagacgtccccagaggaaatctctgtatgagagctttgtgtcttctagtgatcgacttcgagaactaggaccagatggagaagaggcagagggcccaggggctggtgatggtccccctcgaagctttgactggggctatgaagaacgcagtggtgcccactcctcagcctcccctccccgaagccgcagccgggaccgcagccatgagaggaaccgggacagagaccgagatcgggagcgggatcgagaccgggatcgagacagagacagagagcgggacagggatcgggatcgggatcgagatcgagaccgggaacgggacagggatcgggagcgggatcgagaccgagaccgagagggtcctttccgcaggtcggattcattccctgaacggcgagcccctaggaaagggaatactctctatgtatatggagaagacatgacacccacccttctccgtggggccttctctccttttggaaacatcattgacctctccatggacccacccagaaactgtgccttcgtcacctatgaaaagatggagtcagcagatcaggccgttgctgagctcaacgggacccaggtggagtctgtacagctcaaagtcaacatagcccgaaaacagcccatgctggatgccgctactggcaagtctgtctggggctccctcgctgtccagaacagccctaagggttgccaccgggacaagaggacccagattgtctacagtgatgacgtctacaaggaaaaccttgtggatggcttctagggaacagagctggattccttgtgcctcatatgccccaatgctggtctcagtaaaacactgaggtggaagcttacacatctccctcagcctctggtttttcagcacttgggattggggttaaacctttaaaaacggctgtcaggtttgatctcagtgtaacaacatggccagtgcctgttccccactcccttgccccaaaaggatctggaacaca

SEQ ID NO: 133301 - DNA, 765 bp, Artificial Sequence
  derived and/or modified sequence
ttttctcatagccgtttctctgttcttcctctttgcgttgctctgcgggcgctacgctggctccaccgccttctctgccgttcaaaccccgcggttgtccttaccctagcgagggtaggggggtcgggtgccatcgtctttccgacggagtggatatttgtccctccttgaaccacatggtacctaaaggtgctggtgtctgtgatccctggagacaggagggaatgctggatgatcccgaccagcgggagcttggacagcagcctggtttaagcaaggggagccaccatgttggtgataccccccggactgagcgaggaagaggaggctctgcagaagaaattcaacaagctcaagaaaaagaaaaaggcattgctggctctgaagaagcaaagtagcagcagcacaaccagccaaggtggtgtcaaacgctcactatcagagcagcctgtcatggacacagccacagcaacagagcaggcaaagcagctggtgaagtcaggagccatcagtgccatcaaggctgagaccaagaactcaggcttcaagcgttctcgaacccttgaggggaagttaaaggaccccgagaagggaccagtccccactttccagccgttccagaggagcatatctgctgatgatgacctgcaagagtcatccagacgtccccagaggaaatctctgtatgagagctttgtgtcttctagtgatcgacttcgagaactaggaccagatggagaagaggcagagggcccaggggctggt

SEQ ID NO: 133302 - DNA, 914 bp, Artificial Sequence
  derived and/or modified sequence
gtcttgggccctgcccctgaactaggagccaccatgttggtgataccccccggactgagcgaggaagaggaggctctgcagaagaaattcaacaagctcaagaaaaagaaaaaggcattgctggctctgaagaagcaaagtagcagcagcacaaccagccaaggtggtgtcaaacgctcactatcagagcagcctgtcatggacacagccacagcaacagagcaggcaaagcagctggtgaagtcaggagccatcagtgccatcaaggctgagaccaagaactcaggcttcaagcgttctcgaacccttgaggggaagttaaaggaccccgagaagggaccagtccccactttccagccgttccagaggagcatatctgctgatgatgacctgcaagagtcatccagacgtccccagaggaaatctctgtatgagagctttgtgtcttctagtgatcgacttcgagaactaggaccagatggagaagaggcagagggcccaggggctggtgatggtccccctcgaagctttgactggggctatgaagaacgcagtggtgcccactcctcagcctcccctccccgaagccgcagccgggaccgcagccatgagaggaaccgggacagagaccgagatcgggagcgggatcgagaccgggatcgagacagagacagagagcgggacagggatcgggatcgggatcgagatcgagaccgggaacgggacagggatcgggagcgggatcgagaccgagaccgagagggtcctttccgcaggtcggattcattccctgaacggcgagcccctaggaaagggaatactctctatgtatatggagaagacatgacacccacccttctccgtggggccttctctccttttggaaacatcattgacctctccatggacccacc

SEQ ID NO: 133303 - DNA, 1566 bp, Artificial Sequence
  derived and/or modified sequence
gtacagccccgccgagagcgtgaactatcgctgcggaggggcagacctggaccggtggaaggccgggcggaagtgcgcgcctggggccgccttggttaccgcgttttccgctcctcgctacgtcatcgttgtgagcccgctatcagcggccagcgcgggcgcggccggagaccgtggggcccccggttgccgccccctcgggagccaccatgttggtgataccccccggactgagcgaggaagaggaggctctgcagaagaaattcaacaagctcaagaaaaagaaaaaggcattgctggctctgaagaagcaaagtagcagcagcacaaccagccaaggtggtgtcaaacgctcactatcagagcagcctgtcatggacacagccacagcaacagagcaggcaaagcagctggtgaagtcaggagccatcagtgccatcaaggctgagaccaagaactcaggcttcaagcgttctcgaacccttgaggggaagttaaaggaccccgagaagggaccagtccccactttccagccgttccagaggagcatatctgctgatgatgacctgcaagagtcatccagacgtccccagaggaaatctctgtatgagagctttgtgtcttctagtgatcgacttcgagaactaggaccagatggagaagaggcagagggcccaggggctggtgatggtccccctcgaagctttgactggggctatgaagaacgcagtggtgcccactcctcagcctcccctccccgaagccgcagccgggaccgcagccatgagaggaaccgggacagagaccgagatcgggagcgggatcgagaccgggatcgagacagagacagagagcgggacagggatcgggatcgggatcgagatcgagaccgggaacgggacagggatcgggagcgggatcgagaccgagaccgagagggtcctttccgcaggtcggattcattccctgaacggcgagcccctaggaaagggaatactctctatgtatatggagaagacatgacacccacccttctccgtggggccttctctccttttggaaacatcattgacctctccatggacccacccagaaactgtgccttcgtcacctatgaaaagatggagtcagcagatcaggccgttgctgagctcaacgggacccaggtggagtctgtacagctcaaagtcaacatagcccgaaaacagcccatgctggatgccgctactggcaagtctgtctggggctccctcgctgtccagaacagccctaagggttgccaccgggacaagaggacccagattgtctacagtgatgacgtctacaaggaaaaccttgtggatggcttctagggaacagagctggattccttgtgcctcatatgccccaatgctggtctcagtaaaacactgaggtggaagcttacacatctccctcagcctctggtttttcagcacttgggattggggttaaacctttaaaaacggctgtcaggtttgatctcagtgtaacaacatggccagtgcctgttccccactcccttgccccaaaaggatctggaacaca

SEQ ID NO: 133304 - DNA, 1164 bp, Artificial Sequence
  derived and/or modified sequence
atggtgccgaaaggcgccacaatgctggtcattccaccagggctgtccgaggaagaagaagcactccagaaaaaatttaataaactcaaaaagaaaaagaaggcacttttagctttgaaaaaacagagctcaagctcaacaaccagccagggcggtgtaaagagatccttgtctgaacagcctgtgatggacactgccaccgctactgagcaagccaagcaattggtgaagagtggggcgataagtgcaattaaagccgaaacaaaaaattctggctttaaacggagcagaaccttggaaggcaaactgaaggaccccgaaaagggaccggtacctacctttcagccatttcaaagatcaatctctgctgacgatgatctgcaggagtcctccaggagacctcaacgtaaatccttgtatgagagctttgtttccagttcagaccggctccgcgaacttggaccagacggcgaggaagcggagggaccgggggctggggacggcccccctaggtcgttcgattggggttacgaagagaggagtggcgcacacagctctgccagtcccccgaggtcaaggtctcgggacaggagtcacgagagaaatcgggatcgggaccgggatagggagagggacagagaccgcgaccgagacagggaccgggaaagggatagagatcgcgatagggacagggatagagatagagagagggatagagacagggaacgcgatagggaccgggaccgagaaggtcccttcagacggtccgattcattcccagaacgaagggcgcctaggaaaggaaataccttgtacgtatacggagaagatatgacacctacattgctccggggagcattcagtcctttcgggaacatcatcgatctgtcaatggacccacctaggaactgcgcatttgtcacgtacgagaaaatggagtcggcagatcaggctgtggcagaactcaacggaacccaggttgagtctgtccaactgaaggtgaatattgcacgcaagcagcctatgctagacgccgccacggggaagagcgtttggggatcgctggcagttcagaacagtccaaagggatgccaccgggacaaacgtacgcagatcgtttattcagacgacgtgtacaaagaaaatcttgtggatgggttttag

SEQ ID NO: 133305 - DNA, 1143 bp, Artificial Sequence
  derived and/or modified sequence
atgcttgtaataccgccaggcttgagcgaggaggaggaggcactgcagaagaaattcaacaaactcaaaaaaaaaaaaaaagctctcttggctctgaagaagcagtcatcttctagcacaaccagccagggtggggtcaaacggagcctgtccgagcaaccagtgatggatacagcaaccgctactgaacaagctaaacagctggttaagtctggggctatttcagccattaaggccgagactaaaaattccggcttcaaaagatcacgcacgctcgagggcaagctcaaggacccagagaagggcccagtccctaccttccaaccttttcaacgctctattagtgctgatgacgacctgcaagagtctagtaggaggccacaacgaaagagcctctatgagagctttgtttcctcttctgaccgtctgcgagagctaggccccgacggggaggaagccgagggaccaggggccggcgacgggccgccaaggtcctttgattggggctacgaagagagatctggcgctcattctagcgcctcgcctccacgaagccggtcaagggataggagtcatgagaggaatcgcgatcgtgaccgtgacagggagcgagaccgagatcgggatagggatcgggaccgcgaacgagatagggatcgggatagagacagagatcgagaccgagaaagagatagggacagagagcgggacagagaccgcgaccgcgagggtcctttccgcaggtcagattcttttccagagcgtagagcccccaggaagggaaacacgctgtatgtttatggggaggacatgacccccacccttctcagaggagctttctcccctttcggaaacatcatcgatttgtcaatggacccaccccgaaattgtgcatttgtgacctatgagaagatggaaagtgcggaccaggcggtggccgagctgaatggcacgcaggtggagagcgttcagctgaaagtgaatattgcaagaaagcaaccgatgctggatgcagcgactggcaagtccgtctggggctctctagcggtgcagaattcgcccaaaggatgtcaccgcgacaaaagaactcagattgtatatagcgacgacgtctataaagagaacctggtggatggcttttag

SEQ ID NO: 133306 - DNA, 1143 bp, Artificial Sequence
  derived and/or modified sequence
atgcttgtgattcctcctggtctgagtgaggaagaagaggccctgcaaaaaaaattcaacaagctcaagaaaaagaaaaaagccctcctggcattgaaaaaacaaagcagcagctcaactacgagccaagggggcgtgaagcgtagtttatcagaacagcctgtgatggacacagccaccgccaccgagcaagctaagcaactagtgaaatccggggcaatctccgctattaaggcggaaacaaaaaacagcgggtttaagcggtcccggaccctggaagggaaactcaaagatcctgaaaagggcccagtccccacgttccagccattccaacgctcgatcagcgcggacgatgacctccaggagagttccagacgaccccagcgcaaaagtttgtacgagagcttcgtttcttcgagtgaccggctgcgagaactgggccccgacggcgaggaggctgaagggccaggcgcgggggatggaccccctcggagctttgattggggctacgaggagcgatcaggagcccactctagtgctagccctccccgtagcagatcccgagacagatcacacgaacggaaccgcgatcgtgatcgcgaccgtgagcgcgatcgcgatagggacagggatagggacagggagcgagatcgagatagggaccgggacagggaccgcgatcgggaaagagatcgcgatcgggaaagagatagggatcgggaccgcgagggcccttttagacgcagtgacagtttcccggaaagaagggccccgcgcaaaggaaatacactttatgtctatggcgaagacatgacacctactctgctcaggggagccttcagtcctttcggaaatataatcgatctgtctatggaccctccaaggaattgcgcttttgtgacatacgaaaagatggagtccgctgaccaggctgtggccgaactgaacgggacacaagtggagagcgtccagcttaaggtcaacattgcccgcaaacaaccaatgctcgatgccgctacgggcaagagtgtgtgggggagtttggccgtccagaattcaccaaagggttgccatcgggacaagcgcacacagatcgtgtatagcgacgacgtgtataaggaaaacttagtagacggattttag

SEQ ID NO: 133307 - DNA, 1143 bp, Artificial Sequence
  derived and/or modified sequence
atgctcgtgatcccacccggcctaagcgaagaagaagaagccctccagaagaagtttaacaagctgaagaagaagaaaaaggctctgctggccttaaagaagcagtccagttcatctacgacctctcagggcggcgttaagaggtcgcttagcgaacagcctgtgatggatacggcaaccgccactgaacaggcaaagcagctggtgaaaagcggcgcaatttcagccatcaaagctgaaactaaaaatagcggttttaaacgcagccgcacactggaaggtaaactaaaggatccagaaaaaggccctgtccccacatttcagcccttccagcgttctatcagcgcggatgatgatcttcaagagtcgagccgacgccctcagcgaaagtctctctacgaaagctttgtgtcctctagtgaccggttacgagagttagggccagatggcgaggaggctgagggacctggcgctggagacggaccgcctcgctccttcgactggggctatgaagagagatctggcgcccattcttctgccagcccccccagaagtcgatcacgagatcgaagccacgagagaaatagggatcgagaccgcgacagggagagggatagagatcgcgaccgcgaccgggaccgtgagcgggaccgcgaccgggatcgtgaccgtgacagagacagagaaagggaccgtgatagggaacgcgaccgggatagagatagggagggtcccttccggagatcggattctttccctgaaagacgcgcgcctagaaaaggtaacaccctgtatgtctacggggaggatatgacacccaccctgttgaggggcgctttcagtccctttggcaacattatcgacctttccatggatcccccacgaaattgtgcctttgtgacatatgagaagatggaaagtgctgatcaagcagttgcagaattgaacggcacacaggtcgaaagcgtgcagctaaaagtgaacatcgctcgcaaacagcctatgttagatgcagccaccgggaagagcgtatggggtagcctggcagtgcagaattcccccaagggctgtcacagggacaaacgaacacagattgtctatagtgacgatgtctataaggaaaatcttgtggacgggttctag

SEQ ID NO: 133308 - DNA, 885 bp, Artificial Sequence
  derived and/or modified sequence
atgttagtgattccaccggggctcagtgaggaggaggaggctcttcaaaaaaaattcaataagttgaagaagaaaaaaaaagcactccttgcgctgaagaaacagtcctcctcttcaacaaccagtcaggggggcgtcaagagaagtctcagcgagcagccagtaatggataccgccactgcaacagaacaggctaagcagctcgtgaaaagtggcgctatttcagctattaaggctgaaactaaaaattcagggtttaagcggtcccggacactggaaggtaagctaaaggacccggagaaaggccccgtgcccaccttccagccattccagagatccatttcagccgacgacgatttgcaggagagctcacgtagaccccagcggaagagtctttatgagtcctttgtgtcaagcagcgacagacttcgagaactaggaccagacggagaagaggccgagggacctggcgccggcgatggtccaccgagaagctttgactggggctacgaggagcgctcgggcgcccattcaagcgcttcccctcctcgtagccgtagccgggacagatcgcatgaaagaaatcgggaccgagacagagatagggagagagatagggatagagatagggaccgggatcgggaaagggatcgagatcgagacagggatcgcgacagagatcgtgagagagaccgggatcgcgagagggatcgggacagggatagggagggtccatttaggagatccgattctttcccagaaaggcgcgcccctcggaagggcaacacgctgtacgtttatggcgaagatatgaccccaacccttctgaggggcgctttttcacctttcgggaatatcattgacttgagtatggacccgccatag

SEQ ID NO: 133309 - DNA, 480 bp, Artificial Sequence
  derived and/or modified sequence
atgcttgtaatcccccccggcctgtctgaagaggaggaggccctgcagaagaagtttaataagctcaaaaaaaaaaaaaaggcactgctggccctcaaaaagcagagctcatcatcgacaacctcccagggaggcgtaaagcgctcactcagcgaacaacctgttatggacaccgcgacggccacagagcaggctaagcagctggtgaagtctggagctatatctgccatcaaagccgagactaaaaacagcggtttcaaacggtccaggactctcgaggggaagctcaaggatccggagaaaggacccgtccctactttccagccctttcagagatccatttccgccgacgatgatctgcaggaaagttctaggcgcccccagcgcaaatctctctatgaatcctttgtgagctcttcagatagactgcgcgaactcgggcccgatggggaggaggccgaaggcccaggtgcagggtag

SEQ ID NO: 133310 - DNA, 480 bp, Artificial Sequence
  derived and/or modified sequence
atgctagtgattcctcccggtctttcagaggaggaagaggcgttgcaaaaaaagttcaataagttgaagaaaaagaagaaagccctgctcgccttgaagaagcaatcgagctcttccaccaccagccaggggggagtgaagcgaagtctatcagagcagcctgtgatggatactgctacggccacagagcaggcaaagcagctagtgaagtctggggccatcagcgcaattaaggcggaaacaaagaactccgggttcaagagatctcgcacactggagggaaagctcaaggaccccgaaaaggggccagttcctactttccagcctttccagcgtagtattagcgctgatgatgaccttcaggaatccagtcgaagacctcagcggaagtcgctctatgaatcattcgtgagtagctctgatcggctcagagagctgggtcctgatggcgaggaggccgagggccctggagctgggtag

SEQ ID NO: 133311 - DNA, 480 bp, Artificial Sequence
  derived and/or modified sequence
atgctggttatcccacctgggctctccgaggaagaagaagccttgcagaagaaatttaacaagttgaaaaaaaaaaagaaggctctgcttgccctgaagaagcagtcatcaagtagtactacgtcacagggcggtgtgaagagaagcctgtcagaacagccggtcatggacactgcaaccgctacagagcaggccaaacaattagtaaaaagtggcgctatttccgcgatcaaagccgaaacaaagaacagcggcttcaagaggtcacgcaccttagaaggtaaactcaaggacccagagaagggacctgtccccacgtttcagccttttcagaggtccatctcggcggacgatgacttgcaggaaagcagtagacggccacagcgcaaaagtctgtacgaaagttttgtgagcagctctgacagattacgggagttgggcccagacggggaagaagcagaaggccctggagcaggatag

SEQ ID NO: 133312 - DNA, 480 bp, Artificial Sequence
  derived and/or modified sequence
atgctggtgattccaccaggcctttctgaggaagaagaagctctgcagaagaagtttaataagctgaagaagaagaagaaagccctgttagccctcaagaagcagtcaagttcgagtacaacgtctcaggggggagtcaaaaggagtctctcagagcaacccgttatggacacagctacggctacagaacaggcaaaacagttggtcaagtccggggcgatcagcgctatcaaggccgagacaaaaaacagcggttttaagcgctctcgtaccttagaaggcaagttgaaggaccctgaaaagggacctgtgcccacgtttcagccatttcagcggtccattagtgctgatgatgatttgcaggaatccagccgccggccacagcgcaaaagtctctacgagagcttcgtctcctcgtcagaccgcctcagagaactggggcccgacggcgaggaggcagaaggacccggggccggctag

SEQ ID NO: 133313 - DNA, 480 bp, Artificial Sequence
  derived and/or modified sequence
atgcttgtcatccccccgggactcagtgaagaggaggaggccctgcagaaaaaattcaacaaacttaaaaagaagaaaaaagcactattggctttaaagaaacagtcctcaagttccacaactagccaggggggagtcaagaggtccctaagcgaacagcctgtgatggacacggctaccgcaactgagcaggctaagcagctggtgaagtccggggccattagtgccattaaagcagagacaaagaacagcggctttaagagatccagaacgctggaaggcaagctgaaggaccctgagaagggacccgtgcccacattccagcctttccagcgtagcatctctgcggacgatgatctccaggaaagcagccgcagacctcaacgtaaaagcctctatgagtcctttgtgagtagttccgatcgtttgcgggagctgggccctgatggagaggaggccgaggggccaggggctgggtag

SEQ ID NO: 133314 - DNA, 1143 bp, Artificial Sequence
  derived and/or modified sequence
atgctcgtcattcccccaggtctctcggaggaagaggaggctctacagaagaaattcaacaaattaaagaaaaagaagaaagctctgctggcactgaaaaagcaatcatcctccagcactacaagccaaggtggagtcaaaaggtcgctttcagagcagcctgtgatggacactgccactgccacagaacaggccaaacagctcgtcaagagcggagcgatatccgctatcaaggctgagaccaaaaacagcggattcaaaaggagcaggaccttagaaggaaaactcaaagatccagagaagggacctgttcctacgttccagccatttcagcggtccatctcggcagatgatgacctacaggagagctccaggaggccccagcgcaaatcattatatgagagctttgtgagctcttcagatagattaagagaacttggtcccgacggcgaggaggccgagggcccaggcgcaggggatgggccgcctcgcagcttcgactggggttacgaggagaggtcaggcgctcacagttcagcttccccccctcgctcgagatcacgagatagatctcacgaaagaaatcgggatcgcgatcgggatagggagcgcgacagggatcgggatcgggatcgcgacagggaacgggaccgcgacagagatagagatcgcgacagagatagagagcgcgatagagacagggagcgggaccgcgaccgggaccgcgagggtccttttcgacggagtgattccttccctgagcgcagggcaccccgcaaaggtaacacactgtacgtatacggtgaggacatgaccccaaccctgctgcgaggggccttttcgccatttgggaacattatcgatctctccatggatcctccacggaactgcgcatttgtcacctacgagaaaatggaaagcgccgatcaagccgtggccgaactgaatggcacacaggtagagagtgtccaactgaaagtcaacatcgcacgaaagcaaccaatgctcgatgctgcgacagggaaatctgtgtggggatctcttgccgtccagaactctcctaaggggtgccatagggacaagcgaacacagatcgtttacagtgacgacgtgtataaagagaacctcgtcgatgggttctag

SEQ ID NO: 133315 - DNA, 885 bp, Artificial Sequence
  derived and/or modified sequence
atgttggtaatacctccagggctgtctgaagaggaggaggctcttcagaaaaagtttaataaactgaagaaaaaaaagaaagctctgttagcccttaaaaaacagtcatctagtagcaccacatctcagggcggcgtgaaaaggtccctgagtgagcaacctgttatggacaccgccaccgccacagagcaagctaagcaactggttaagtctggagcaatttcagcaattaaagccgagacaaaaaattctggctttaaaaggtccaggaccttagaaggaaaacttaaggacccagagaaggggccagtccctacctttcaaccattccagagatccatctcagcggacgacgacctgcaagagtcttccagacgtccgcagagaaaatcactctatgagtcttttgtctcttcgtcggaccgcttaagggagcttggacccgacggagaagaagcggagggccccggcgccggggacggcccgccccgttcttttgattggggttatgaagaacgctccggagcacactcttccgccagccctcctaggtcccgcagccgcgacaggtcccatgagcggaaccgcgatcgggatagggatagagaaagagatcgcgacagggacagagaccgagatcgtgagcgggaccgagatagagatagagatcgcgaccgcgacagagagcgggacagggatagagaacgcgatagagatcgcgatcgggaaggccccttcagaaggtccgactcttttcctgagcgcagagcacctaggaaggggaatactctgtacgtttatggtgaggacatgacacctactctgttgcgcggagccttttcaccattcggcaacataatagatctgtctatggatccgccctag

SEQ ID NO: 133316 - DNA, 885 bp, Artificial Sequence
  derived and/or modified sequence
atgctggtgatccctcccgggctatccgaagaggaggaggctctgcaaaagaaatttaacaagctgaagaagaagaagaaagccttattggcgttaaaaaaacagagttctagtagcactacctcccaggggggcgtgaagagatctttgtcagagcagccagtgatggatactgccacagccactgagcaggcaaagcagctagtgaaatccggcgcgatcagcgcaatcaaagccgaaactaagaactccgggtttaagcgcagcaggaccttagaagggaaacttaaggaccctgagaaggggccagtgcctaccttccagccatttcagcgttccatttcagctgacgacgatttacaggaatcaagccgccgcccccaacgaaaaagcctgtatgaaagttttgtgtcatcctcggataggctgcgtgagctcggccctgacggcgaagaggcagagggcccaggagctggagatggacctcccaggtctttcgactggggctacgaggaacggtcgggcgcgcactctagtgccagtccgccccggtcgcgctcacgtgacagatcacacgagcgaaatcgtgatagggacagagaccgtgagcgcgatcgagatagagaccgcgaccgagacagggagcgggacagagacagagatcgagacagagatcgggacagggaaagggatcgagatagagaacgcgatagagatcgggatcgcgagggacctttccgaaggtctgactcatttcctgagaggcgagcaccccgcaaaggaaacactttatacgtgtacggtgaagacatgactccgacgttattgcgcggagccttcagtccatttgggaacataatcgacctgtccatggacccaccttag

SEQ ID NO: 133317 - DNA, 1143 bp, Artificial Sequence
  derived and/or modified sequence
atgctggtcatcccccccggcctgagtgaggaagaagaggcactgcagaagaaattcaacaagctcaagaagaagaagaaggctctgctagcactcaaaaagcagtcttcaagcagcacgacctctcagggtggtgtcaagcgttccttgagtgaacagccggtgatggacaccgccactgctacggagcaggccaaacagctggtgaagtccggagctatatctgctatcaaagctgaaacaaaaaattccggctttaagcggtcgaggacgctcgagggaaagctgaaagacccggagaagggcccagtgccaactttccaacccttccagcgcagtatatcagctgatgacgacttacaggagagctccaggagaccacagagaaaatcgttgtacgagagcttcgtgtcttcttccgacagactcagagagcttggcccggatggtgaggaagccgagggacctggcgcaggggacgggcccccccgaagcttcgactggggatacgaggaacgatccggagctcactcctctgcaagcccgcctcgctcacgctcaagggataggtcacacgagcgcaatagggatcgggatcgtgatcgagaacgggacagggatagggacagggatcgggatagagagcgagatagagacagggaccgtgacagggatagggatcgggagagggaccgcgaccgggagcgggatagggatagagacagagagggcccattccgtagatccgattccttccctgagcggagagctcctaggaaaggcaacactctgtatgtatacggcgaagatatgactccaactttgctgagaggagccttcagcccatttggaaacataatcgacctttcaatggaccccccgcggaactgcgctttcgtgacatacgagaaaatggagagcgctgatcaagcagttgcagaactgaacgggactcaggtggagtctgttcagctcaaagtgaatattgctcgcaaacagccaatgctggatgccgctaccgggaaatccgtgtgggggtctttggcggtgcagaattcccccaaggggtgtcacagggataagcgcacacagatcgtgtacagcgacgacgtatataaggagaacttagtcgacggcttctag

SEQ ID NO: 133318 - DNA, 885 bp, Artificial Sequence
  derived and/or modified sequence
atgctggtcatcccacctggcctgtctgaggaggaggaggctctgcagaaaaagtttaacaagttaaaaaaaaagaagaaagccctcctggctctcaaaaaacagagtagcagtagtactacttcacaaggaggagtgaagcgaagtctgagcgagcaacctgtaatggataccgccaccgcaacagagcaggccaagcagctggttaagtcaggagctattagcgcaattaaggccgagacaaagaactccggattcaagaggtcgcgcactttggaaggcaaactgaaggacccagaaaagggacctgttccgacctttcaaccatttcagcgttcgattagcgctgacgacgacctacaagagtctagccggagaccccagcgcaagagcctgtatgagtccttcgtcagttccagtgatcgtctgagggaattaggccccgatggcgaggaggctgaggggccaggggctggggatggccctcctagaagtttcgactggggttacgaagagcgcagtggggctcactcctctgcctccccccctcgcagtcgaagtagggatcggagccatgaacgcaacagggaccgggatagggatagagagcgagatcgggaccgtgacagagacagggacagagaacgtgaccgcgatagagatagagatagagatagagatcgggaacgggacagagaccgcgaaagagatagggatagagaccgggaggggccttttagacgctctgattctttccccgagaggcgagctccgcgcaaaggtaataccctgtacgtgtatggggaggacatgacacctacactgcttcgcggagctttttctccatttgggaacattatagatctatcgatggacccgccatag

SEQ ID NO: 133319 - DNA, 885 bp, Artificial Sequence
  derived and/or modified sequence
atgctggtcatccctccaggcctctccgaggaagaggaggctctccaaaagaagtttaacaaactgaagaaaaagaaaaaagcactcctggccctcaagaagcaaagcagttcttcaaccacctctcagggaggcgtcaagcgctccctttcagaacagcctgtgatggataccgccaccgcaactgaacaggctaagcaactagtcaagagtggcgccatctctgctattaaggccgaaactaagaattccggctttaaaaggtccagaacactggaggggaagctgaaggatcctgagaaaggacccgtgcccaccttccagcctttccagcgttcaatttcagcagacgacgacctccaggaatctagccggaggccccagaggaagtctctttatgaaagcttcgtgagctcctctgaccgactcagggagttgggtcctgacggcgaagaagccgaaggccctggagccggcgacggaccgccaagatctttcgactggggttacgaggagaggtccggcgctcattccagtgcttcccccccccgttcaaggagtcgggacaggagtcacgaacggaatcgagacagggatcgggatagagagcgggatagagatcgggatagagaccgggatagggagcgggaccgagatcgagaccgggatcgagacagggaccgggagagggatagggaccgtgaaagagatagagatcgagatcgagaaggccctttcagaaggtcggacagctttcccgagcggcgggctcccaggaagggtaacaccctttacgtgtatggagaagatatgacaccaactcttctgcgaggagctttcagtccattcggcaacatcatcgacctgagtatggatccaccttag

SEQ ID NO: 133320 - DNA, 885 bp, Artificial Sequence
  derived and/or modified sequence
atgctggtaatccctcccgggttaagcgaagaggaagaggccttgcaaaaaaaattcaataagctgaaaaaaaaaaagaaggccctcttggccttaaagaagcaaagctcgagttcaacaacctcgcagggaggtgttaagcgtagcctttcagagcaacccgtcatggacacagcaacagccaccgagcaggcgaaacagttggttaagtcaggcgcaatcagcgcaattaaagctgagactaaaaattcaggcttcaaacggtcgaggaccctcgaaggaaaactgaaagaccctgagaagggacccgtgcctactttccaaccgttccagagatctatctcggccgacgacgacctccaagaaagctcacgccgaccacagcgcaaatccctgtacgaaagctttgtgtcttcttcggacaggcttagggagttaggccccgacggcgaggaggcagaggggccaggggccggcgacggaccccctcgctccttcgactgggggtacgaggaaagatccggggcccactcctcggcctccccaccacggagccgctctagggatagatcccatgagcgcaacagggaccgagaccgcgatagggagagagaccgggatcgggatcgggaccgtgacagagaaagggatcgggatcgcgatagagatcgcgacagagatagagaaagagaccgtgaccgtgagcgggaccgagacagggaccgcgagggcccatttcgtagatctgactcttttcccgaacgaagagctccccggaaggggaataccttgtatgtctacggagaagatatgactccaactctgctccgcggagcattctctcccttcggtaacattatcgacctctcgatggatccaccgtag

SEQ ID NO: 133321 - DNA, 1143 bp, Artificial Sequence
  derived and/or modified sequence
atgctggtaattcctcctggcctgagcgaggaggaggaagctctccagaaaaagttcaataaactgaaaaaaaagaagaaagcgcttttggcactcaagaagcagagctcaagcagtaccacttcccagggtggggttaaacggtccctgtctgaacagcccgttatggacaccgccacggcaaccgagcaggcaaaacagcttgtgaaatccggtgccatttccgctataaaagccgagaccaagaatagcgggtttaaacgatcgcgcacgcttgaggggaagctgaaggatcctgagaaggggccggtcccgacgttccagccctttcagcggtccatatcggcggacgacgacttacaggaatcaagccggcggcctcagcgaaaaagtctctatgagagttttgtgtctagttcggacaggcttagagaacttggcccagatggagaggaggcagaaggtcctggtgctggagatggtcccccaagatccttcgattgggggtatgaagagcgatcaggtgcgcactcgtctgcctcgccaccccgcagcaggagccgggaccgttctcacgagcgaaacagagatagggaccgcgacagagaacgcgatcgcgatagggatagagatcgtgacagagagagagatagagatcgggaccgagatcgcgacagagaccgcgaacgtgacagggatcgcgagagagatcgcgaccgagaccgagagggcccatttcgacggtccgactcattccctgaaagacgggcacctagaaaaggcaacacgctatatgtgtacggggaagacatgacccctacgctgctgagaggcgcgttttccccgttcgggaacattatagatctgtcgatggatcctccacgtaactgtgccttcgtgacctatgaaaagatggaatccgctgatcaggccgtggctgagctcaacggcacacaggtggaatctgtgcagttgaaagttaatatcgcgcgaaaacagcctatgttggatgctgctacgggcaaaagcgtctggggaagcctggccgtccaaaacagcccaaagggatgccacagagataaacgcacacagatagtctattcagacgatgtgtacaaagagaatcttgtcgacgggttctag

SEQ ID NO: 133322 - DNA, 480 bp, Artificial Sequence
  derived and/or modified sequence
atgctggtcattccgcctggcctttctgaagaggaagaagccttacaaaaaaaatttaacaagctgaagaagaaaaaaaaggcactcctcgcccttaaaaaacagtcctcgagttctacaacaagtcagggcggtgtgaagcggagcctttctgagcaacctgtgatggacacggcaacagcaaccgagcaggcaaagcagctagtgaagagcggggctatctcagcaatcaaagctgagaccaagaactctggatttaagaggagccggaccctcgaggggaaactgaaggaccccgagaagggcccggtaccgacttttcagccctttcaaaggtcaattagtgccgacgacgacctgcaggaatcttcccgacgcccgcagaggaaatccctctatgaatcttttgtatcctcctccgatcgactgcgggaactgggcccggatggcgaggaagctgaagggccaggtgccggatag

SEQ ID NO: 133323 - DNA, 1164 bp, Artificial Sequence
  derived and/or modified sequence
atggtccccaagggcgccaccatgctggtgatccctcccggcctgtcggaggaagaggaagcccttcaaaagaagttcaataaactgaagaaaaaaaagaaggccctcttggcgctgaagaagcagtccagtagctctacaacctctcaagggggtgtcaagagatctttgagcgagcaacccgtgatggacaccgccaccgctactgagcaggccaaacagcttgttaaatcaggggctattagcgctataaaggctgagaccaaaaattcggggttcaagcgatcaaggacacttgaggggaagctgaaggatccggagaaggggcccgttcccacgttccagccttttcagagaagcatcagcgcagacgatgatcttcaggaatcctctcgccgcccccaaaggaagagcctttacgaatcctttgtgagctcaagtgatcggcttcgggagttgggacctgacggtgaagaagccgagggcccaggcgccggggacgggcctcccaggagcttcgattggggatatgaagaacggtcaggagcgcactcctccgcgagccctcctcggagccgctctcgtgatcgcagccatgagcgtaacagagacagagatagggatcgggaacgtgacagagatcgggatagagatcgcgacagagaacgcgaccgcgacagggatagagacagagatagagatcgcgagcgcgatagggaccgggaacgagaccgcgaccgggacagggagggcccatttaggcggagcgactcctttcccgaacgccgtgcccctcgtaaaggaaacaccctgtacgtatatggcgaagacatgacccctactcttctgagaggagctttcagccccttcggtaacattattgacttaagtatggaccctcctcgaaattgcgcatttgttacatatgaaaagatggaatcggccgatcaggctgtagccgagctcaacgggacacaagtggaaagcgtgcagcttaaggtcaatatcgccaggaagcagcctatgctggatgctgccacgggaaaaagcgtatggggttcactggccgtgcagaactcaccaaaaggatgtcatagagacaaacggacgcagatcgtgtattcagatgacgtgtacaaggaaaacctggtggacggcttctag

SEQ ID NO: 133324 - DNA, 1164 bp, Artificial Sequence
  derived and/or modified sequence
atggtgcctaagggcgcaaccatgctcgtgatcccccccggtctttcagaagaggaagaagctctccagaagaagtttaataagctcaagaagaagaagaaggctctcctagccctgaagaaacagagctctagctccaccacatctcagggcggtgtgaaaaggtccctcagcgaacagcctgttatggacacagcaactgctaccgagcaagccaagcagctggtgaagagtggcgcgatttcggccataaaggctgagaccaagaacagcggcttcaagcgctccagaaccctcgaaggaaaactgaaggacccggagaaaggtcccgtacctacgttccagccatttcagcgctccatcagcgccgacgacgacttgcaggagtcctctagacgcccgcaaagaaagtctctgtacgaaagctttgtctcctccagtgatagactgagagaactgggaccagatggagaggaggcagagggcccgggagctggcgacggtccacccaggagctttgattggggatacgaagagcggtccggagcccacagcagcgccagtccgccccgcagtagatcacgcgatcggtctcacgagcgcaacagagaccgcgatagggatcgcgagagggatcgggatagagacagagatagggaccgggagcgtgaccgcgaccgtgaccgggatcgagatcgcgatcgcgaaagagatagagacagggaacgtgatagagacagagacagggaggggcctttccgacgttcagattcctttcccgaacgaagggcacccagaaagggcaatactttgtatgtgtatggggaggatatgaccccaaccctacttagaggcgcgttctcccccttcggaaacatcattgacctgagtatggaccctcccagaaactgtgcctttgtcacttacgagaagatggagagcgctgaccaggcggtcgctgaattgaacgggacccaagtcgagagtgtgcagctgaaggtgaatattgcgagaaaacaaccaatgctcgatgcagctacgggcaaaagcgtctgggggtcactcgcggtgcaaaatagccctaaaggatgtcacagagataaaagaacgcagattgtgtactcagatgatgtctacaaggaaaacctcgtcgatggcttctag

SEQ ID NO: 133325 - DNA, 1164 bp, Artificial Sequence
  derived and/or modified sequence
atggtgcccaagggcgccaccatgctggtcataccccctggactcagcgaagaggaagaagccctgcagaagaaattcaacaagctcaaaaaaaagaaaaaagctctgctcgccctgaaaaagcagagctctagcagcacaacatcccaggggggtgtcaagaggtccttgagcgagcagccagtcatggacactgccacggccacagaacaggccaagcaactagtgaaatcgggggccatcagtgcaatcaaggctgaaactaagaactccggatttaaaaggagccgaactctggagggtaagttaaaggaccctgagaaaggtcctgtgcccactttccagccatttcaaagatccatatccgccgatgacgatttacaagaatcttcccgcagaccccaacggaagagtctctacgaaagtttcgtaagctctagcgaccggctgagggaactggggcctgacggagaggaggctgaaggacccggtgccggtgacgggccacctcggtctttcgactggggctacgaggagaggtccggcgctcactcgagtgcatctccacctagaagccgctcgcgcgatcgctcacatgagaggaaccgcgacagggatagagacagagaacgcgacagggatagggatcgggatcgcgacagggagagagacagagacagggaccgggaccgtgacagagatcgggagcgggaccgggatagggaaagggatcgcgatcgagacagggaaggtccgtttcgcaggtccgattcatttccagaacgccgagctcctagaaagggtaacaccctctatgtgtatggggaggatatgacaccaaccctcctgaggggagcgttctctccatttggaaacatcatagacctgtccatggatcccccccgtaactgtgcgttcgtcacttacgaaaagatggaatcagccgaccaggctgtggctgagcttaacgggacccaggtagaaagtgttcaactcaaagtgaacatcgctcgaaagcagccgatgctggacgcggccaccggcaaaagtgtctggggctccttagccgttcagaactcaccgaaggggtgtcaccgggataaaaggacccaaatagtgtattctgacgacgtgtataaggaaaacctggtggatgggttctag

SEQ ID NO: 133326 - DNA, 1164 bp, Artificial Sequence
  derived and/or modified sequence
atggtgcctaaaggggcaacgatgctggtgattccgcccggactcagtgaggaggaggaggcactccagaagaaatttaacaagctgaaaaaaaaaaaaaaagccttgctagcactcaagaagcagtctagctctagtaccacaagtcagggcggggtgaagagaagcctgagcgaacagcccgtgatggacactgcaaccgcaaccgaacaggctaagcagctcgttaaatctggggcgatctccgccatcaaggccgagaccaagaattccggtttcaagcgcagccgcacactcgaaggtaagcttaaggaccccgaaaaggggccagtgcccaccttccaaccattccagaggtccatcagcgccgacgacgacctgcaggagtcatcccgtaggccgcagaggaaatccttgtatgagagttttgtctccagctccgatagactgagggaactggggccagatggtgaagaggctgagggtcctggcgccggggacggtcctccccgctcctttgactggggttatgaagagagatctggtgctcacagctctgccagtcctccaaggtctcgcagtcgcgaccggtctcacgagcgtaatagggacagagatagggaccgagaacgcgaccgggatcgtgatcgggatcgtgatcgtgaaagggaccgggaccgcgatcgcgacagagatcgcgaccgcgaacgcgatcgggacagagaaagggatagggatagagacagagaaggcccttttcgtaggtcagacagctttcctgagcgcagggcaccaaggaaggggaatactttatacgtgtacggggaggacatgacccctacactgttgagaggagcgttttcgccttttgggaatattattgacctctctatggatccacctcgaaattgcgctttcgtcacctacgagaaaatggagagcgccgaccaagccgttgcggagctgaacgggacccaggtagaatctgttcaacttaaggtgaacatcgcccggaagcagcccatgctggacgctgccacaggcaagtcggtgtggggcagcttggcagtccaaaattctcctaagggctgccacagagataaacggacacagatcgtgtattccgacgatgtatataaggaaaatctggtagatggattctag

SEQ ID NO: 133327 - DNA, 1164 bp, Artificial Sequence
  derived and/or modified sequence
atggtgccaaaaggtgcgacaatgctggttatccccccagggctcagcgaagaggaggaggccttacagaagaaattcaataaacttaagaaaaagaagaaagccttactggctcttaagaaacagtcgtccagtagcacaacttctcagggcggagtgaagagatctctctctgagcaacctgtgatggacacagctactgccacagagcaggcaaagcagctggtgaaaagcggtgcaatttctgcaataaaagcagagactaagaatagtggattcaaacggtcaagaacattggaagggaagctgaaggacccagagaaaggccccgtgcccaccttccagcctttccagcgctccatcagtgccgacgatgatctccaggagagtagccggcggccgcaacgcaaaagcctgtatgaaagtttcgtctcatcttctgatcgccttcgggaactgggccctgatggagaagaagctgagggcccaggcgctggtgatggtccgcctcgcagcttcgactggggatacgaggagaggagcggggcccactcgtcagctagccccccccgatcaaggtctagggatagatctcatgaacgtaaccgggatagagaccgcgacagggagcgagatcgtgatagagatagggaccgcgaccgggagagggatagagaccgagaccgggaccgggacagggaccgtgaaagagacagagaccgcgaacgtgatagggatcgggatcgagaggggccttttagacggtctgactcatttccagaacgcagggcccctcgtaaaggtaatacactgtacgtgtatggggaggacatgactcccactctcctgcgtggagccttttcgcctttcgggaacatcatcgacctgtccatggaccctccacgtaactgtgcattcgttacttacgaaaagatggagtccgcagatcaagctgtcgctgagctaaacgggactcaagtggagtctgtacaactcaaggtgaacatcgcccgtaagcagccaatgctggatgctgccacagggaaatccgtctggggatcccttgccgttcagaacagcccgaaaggatgccatcgtgacaagagaacacagattgtttacagtgatgacgtgtataaggagaacctggttgatgggttttag

SEQ ID NO: 133328 - DNA, 1164 bp, Artificial Sequence
  derived and/or modified sequence
atggtgcccaagggggccaccatgctggtgatccccccaggcctgtctgaggaggaggaggccctgcagaagaagttcaacaagctgaagaagaagaagaaggccctgctggccctgaagaagcagagcagcagcagcaccaccagccagggcggcgtgaagaggagcctgtctgagcagcctgtgatggacacagccacagccacagagcaggccaagcagctggtgaagagcggggccatcagcgccatcaaggccgagaccaagaacagcggcttcaagaggagcaggaccctggagggcaagctgaaggaccctgagaagggccctgtgcccaccttccagcccttccagaggagcatctctgcagatgatgacctgcaggagagcagccggcggccccagaggaagagcctgtatgagagctttgtgagcagcagtgaccggctgcgggagctgggcccagatggagaggaggccgagggccctggagctggagatggccccccaagaagctttgactggggctatgaggagaggtctggggcccacagcagcgccagccccccaagaagccgcagccgggacaggagccatgaaagaaacagagaccgggaccgggaccgggagcgggaccgggaccgggaccgggaccgggaccgggagcgggaccgggaccgggaccgggaccgggaccgggaccgggagcgggaccgggaccgggagcgggaccgggaccgggaccgggagggccccttccgccgcagtgacagcttccctgagcggcgggcccccaggaaaggaaacaccctgtatgtgtatggagaggacatgacccccaccctgctgcggggggccttcagccccttcggcaacatcatcgacctgtccatggacccccccaggaactgtgcctttgtgacctatgagaagatggagagcgctgaccaggccgtggccgagctgaatggcacccaggtggagagcgtgcagctgaaggtgaacatcgccaggaagcagcccatgctggatgctgccaccgggaagtctgtgtggggcagcctggccgtgcagaacagccccaagggctgccaccgggacaagaggacccagatcgtgtacagtgatgatgtgtacaaggagaacctggtggatggcttctag

SEQ ID NO: 133329 - DNA, 1143 bp, Artificial Sequence
  derived and/or modified sequence
atgctggtgattcctcctggcctgtctgaggaggaggaggccctgcagaagaagttcaacaagctgaagaagaagaagaaggccctgctggccctgaagaagcagagcagcagcagcaccaccagccagggcggcgtgaagaggagcctgtctgagcagcctgtgatggacacagccacagccacagagcaggccaagcagctggtgaagagcggggccatcagcgccatcaaggccgagaccaagaacagcggcttcaagaggagcaggaccctggagggcaagctgaaggaccctgagaagggccctgtgcccaccttccagcccttccagaggagcatctctgcagatgatgacctgcaggagagcagcagaagaccccagaggaagagcctgtatgagagctttgtgagcagcagtgaccggctgcgggagctgggcccagatggagaggaggccgagggccctggagctggagatggcccccccaggagctttgactggggctatgaggagaggtctggggcccacagcagcgccagcccccccaggagccgcagccgggacaggagccatgagaggaacagagaccgggaccgggaccgggagcgggaccgggaccgggaccgggaccgggaccgggagcgggaccgggaccgggaccgggaccgggaccgggaccgggagcgggaccgggaccgggagcgggaccgggaccgggaccgggagggccccttcagaagaagtgacagcttccctgagcggcgggcccccaggaagggcaacaccctgtatgtgtatggagaggacatgacccccaccctgctgcggggggccttcagcccctttggaaacatcatcgacctgtccatggaccccccaagaaactgtgcctttgtgacctatgagaagatggagagcgctgaccaggccgtggccgagctgaatggcacccaggtggagagcgtgcagctgaaggtgaacatcgccaggaagcagcccatgctggatgctgccaccgggaagtctgtgtggggcagcctggccgtgcagaacagccccaagggctgccaccgggacaagaggacccagatcgtgtacagtgatgatgtgtacaaggagaacctggtggatggcttctag

SEQ ID NO: 133330 - DNA, 885 bp, Artificial Sequence
  derived and/or modified sequence
atgctggtgattcctcctggcctgtctgaggaggaggaggccctgcagaagaagttcaacaagctgaagaagaagaagaaggccctgctggccctgaagaagcagagcagcagcagcaccaccagccagggcggcgtgaagaggagcctgtctgagcagcctgtgatggacacagccacagccacagagcaggccaagcagctggtgaagagcggggccatcagcgccatcaaggccgagaccaagaacagcggcttcaagaggagcaggaccctggagggcaagctgaaggaccctgagaagggccctgtgcccaccttccagcccttccagaggagcatctctgcagatgatgacctgcaggagagcagcagaagaccccagaggaagagcctgtatgagagctttgtgagcagcagtgaccggctgcgggagctgggcccagatggagaggaggccgagggccctggagctggagatggcccccccaggagctttgactggggctatgaggagaggtctggggcccacagcagcgccagcccccccaggagccgcagccgggacaggagccatgagaggaacagagaccgggaccgggaccgggagcgggaccgggaccgggaccgggaccgggaccgggagcgggaccgggaccgggaccgggaccgggaccgggaccgggagcgggaccgggaccgggagcgggaccgggaccgggaccgggagggccccttcagaagaagtgacagcttccctgagcggcgggcccccaggaagggcaacaccctgtatgtgtatggagaggacatgacccccaccctgctgcggggggccttcagcccctttggaaacatcatcgacctgtccatggaccccccatag

SEQ ID NO: 133331 - DNA, 480 bp, Artificial Sequence
  derived and/or modified sequence
atgctggtgattcctcctggcctgtctgaggaggaggaggccctgcagaagaagttcaacaagctgaagaagaagaagaaggccctgctggccctgaagaagcagagcagcagcagcaccaccagccagggcggcgtgaagaggagcctgtctgagcagcctgtgatggacacagccacagccacagagcaggccaagcagctggtgaagagcggggccatcagcgccatcaaggccgagaccaagaacagcggcttcaagaggagcaggaccctggagggcaagctgaaggaccctgagaagggccctgtgcccaccttccagcccttccagaggagcatctctgcagatgatgacctgcaggagagcagcagaagaccccagaggaagagcctgtatgagagctttgtgagcagcagtgaccggctgcgggagctgggcccagatggagaggaggccgagggccctggggccggctag

SEQ ID NO: 133332 - DNA, 1164 bp, Artificial Sequence
  derived and/or modified sequence
atggtgcccaagggcgccaccatgctggtgatcccccccggcctgtctgaagaagaggaagcactgcagaagaagttcaataagctgaagaaaaaaaaaaaggccctgctcgcgctgaagaagcagtcttccagttctactacttcccaagggggagtgaaacgatctctgagcgaacagcctgttatggacactgccaccgcaaccgagcaggctaagcagctcgtaaaaagcggggccatatctgcaattaaggccgagactaagaattccggcttcaaacggagcagaacgttagaggggaagctaaaagaccccgaaaagggcccagtgccgaccttccaacctttccagcgatctataagtgcggacgacgaccttcaggaaagctcccgacgtccacagagaaaatctttgtacgagagtttcgtatccagtagtgatcgcctgagagagcttggtcccgatggtgaagaagctgaaggtcctggcgctggggacggaccgcccaggagtttcgactggggatacgaagagcggtcaggggcccatagcagtgctagccccccacgttcgaggtctcgtgatagatcccatgaacgcaatcgagacagagatcgcgaccgcgagagagaccgggatcgggatcgagatcgcgacagagaaagggaccgcgacagagatcgcgatcgcgatagggacagagaaagggaccgcgatcgggagagagatcgcgatcgcgacagggagggtcctttccggagaagtgactctttcccagagcgcagggctccgcgcaagggtaataccctttatgtctacggggaagatatgacgcccactctgcttcggggcgccttctcccccttcggcaatattatagatttaagtatggaccctccgcgcaactgtgccttcgttacttatgagaagatggaatcggcggatcaggccgtggctgagttgaacgggacccaggtcgagagcgtgcaactgaaggttaatatcgccagaaagcagccaatgctcgacgccgccacaggaaaaagcgtgtgggggtcactggccgtacaaaattcgccaaaagggtgtcatcgggataagaggacccagatcgtctactcagatgacgtctacaaggaaaacctggtcgatggattttag

SEQ ID NO: 133333 - DNA, 1143 bp, Artificial Sequence
  derived and/or modified sequence
atgctggtgatcccccccggcctgagcgaggaggaggaggccctgcagaaaaaattcaacaagcttaaaaagaagaagaaggcactgctggctctcaagaaacaaagtagttcgtctactacctcacagggaggcgtgaagcgatctctgagcgagcaacccgtgatggatacagctacggccacagaacaggctaagcagctagtgaagtccggagcaataagtgccatcaaagctgagactaaaaattctggattcaagagaagtagaacgctggaaggaaaacttaaggaccccgaaaaggggccggtgccaacattccagcctttccaaaggtccatctctgcagacgacgacctacaggagtcttcaaggcggccacaaaggaagtcgctttacgagagcttcgtctcctcatccgataggcttcgggaactgggacccgatggcgaagaggctgagggcccaggcgccggggacggaccccccagaagttttgattggggttacgaagagcggtctggcgcccactcctctgcatcccccccacgatcaaggtcccgggacaggtcccatgaaagaaacagagaccgggatagagacagggagagggaccgagatcgggaccgggacagagatcgcgaaagagatcgggatcgcgaccgggatcgtgaccgcgaccgtgagcgggatcgcgacagggagcgcgaccgtgaccgggatcgcgagggacccttccgccgctccgactctttccccgagaggagagcccctagaaaaggaaataccctttacgtgtacggcgaggacatgacacccacgcttctgcggggggcgttcagtccgtttggaaacatcatcgatttatctatggaccctcctagaaactgtgcctttgttacttacgaaaagatggagtccgcggaccaagccgtggctgagttgaatgggactcaggttgagagtgtacagcttaaggtgaacattgctcgcaaacagcccatgctagatgcggccaccggaaagagtgtgtggggctcccttgcggtgcaaaacagccccaagggctgccatcgagacaaacgcacccagatagtgtattccgatgacgtgtataaggagaacctggttgatggcttctag

SEQ ID NO: 133334 - DNA, 1143 bp, Artificial Sequence
  derived and/or modified sequence
atgctggtgatcccccccggcctgagcgaggaggaggaggccctgcagaaaaaatttaacaaactgaagaagaagaagaaggccctgctcgctcttaaaaagcaaagctctagcagcacaaccagccaaggcggtgtgaagcgatccctttcagaacagcccgtcatggacaccgcaaccgcaactgagcaagccaagcagcttgtcaaatccggcgcaatttccgccatcaaagccgaaactaagaacagcggtttcaagagatcccgtaccctggaaggcaagctcaaggaccctgaaaagggccccgttcccacttttcagccctttcagcgcagcatatctgccgacgatgatcttcaggaatcatcacgaaggcctcagcggaaaagtctttatgagagttttgtgtcatcttccgatcggctaagagagctgggtcctgacggggaagaggccgaagggccaggtgcaggtgacggccctccacgaagtttcgactggggctatgaagagcgctccggagctcactcttccgcatccccgcctcggtcacgatcgcgcgatcggtctcacgaaaggaaccgggatcgcgatcgggatcgcgagagggaccgagacagagatcgggatcgagatcgagagcgcgacagagatcgagatcgagacagggaccgcgaccgcgagcgggaccgcgatcgtgagagggaccgtgaccgggaccgggagggcccctttcgccgcagcgactctttccccgaaagacgggcaccacggaagggtaacactttgtacgtgtacggcgaagacatgactcctaccctcttgaggggagccttctcccccttcgggaatataattgatctgtcaatggaccctccccgcaactgcgcattcgtgacctatgagaagatggaatccgctgatcaggcggtagccgagctgaacggaacccaagtggagagcgttcagttaaaggtgaatattgccaggaagcagccaatgctcgacgcagccacaggtaagtcagtgtggggctccctggctgtgcagaactcgccgaaaggatgccatcgggacaagaggacgcagatcgtttactccgacgacgtatacaaggaaaacctggtcgatggtttctag

SEQ ID NO: 133335 - DNA, 1143 bp, Artificial Sequence
  derived and/or modified sequence
atgctggtgatcccccccggcctgagcgaggaggaggaggccctgcagaagaaattcaacaagctaaagaagaagaaaaaggcactgcttgcccttaagaagcagagtagttcctcaaccacctcgcagggaggggtcaagcgatcactgtccgaacaacccgtgatggataccgccactgcgaccgaacaggccaagcagctggtcaagagcggagccatctccgccatcaaggccgagaccaagaacagcggcttcaagcggtcccggaccctggagggtaaactcaaggatccagaaaagggccccgtgccaaccttccagcctttccagagatcaatctcagctgatgacgacctgcaggaatcttcccggcgcccacagcggaagtcgttatacgagagctttgtgagttcatctgatagactgagagagttggggcctgacggagaggaggctgagggacctggcgccggagacggtcctcctcggtcctttgattggggatacgaggagaggtccggagcccacagcagcgcctcgcctccacggtcacgcagtcgcgaccgctcccatgaacggaacagggatcgggatagagaccgggagcgcgaccgagaccgggatagagacagggacagagagcgcgaccgcgaccgcgatcgcgatcgagatcgtgaccgcgagcgcgatagagaccgggaaagggaccgagatcgcgacagggagggtccatttaggaggagtgattccttccctgagaggcgagcccctcggaaaggcaacactctctacgtgtatggtgaggacatgacacccaccttgctgagaggtgcttttagcccttttggcaatatcatcgatctgtccatggacccccctcgcaactgcgcgtttgtgacgtacgagaaaatggagtctgccgaccaggctgtcgccgagttgaacgggacgcaggttgagtctgtgcagctgaaagtcaacatcgcacgcaaacagcctatgcttgacgctgctaccgggaagagcgtgtggggcagccttgccgtccaaaatagtcccaaggggtgtcacagggacaaacgtacccagatcgtgtactccgacgatgtatacaaggagaacctcgttgatggcttttag

SEQ ID NO: 133336 - DNA, 885 bp, Artificial Sequence
  derived and/or modified sequence
atgctggtgatcccccccggcctgagcgaggaggaggaggccctgcaaaagaagtttaataaactcaagaagaagaagaaagcattgctggctctgaaaaagcaaagttcctcatcaactacatcccaggggggggttaagaggagcttgagcgaacagcccgtgatggacactgctaccgccaccgagcaggctaagcagctggtcaagagtggcgcaatttcagctatcaaggcagagacaaagaatagtggcttcaaacggtctcggacactcgaaggaaagctcaaagaccctgagaagggccccgtccccacttttcaaccctttcaacggagcataagcgcggatgacgatttgcaagagtcatcacggcgcccgcagcgcaagtctctctacgagagcttcgtctctagcagcgatcgcttacgcgagctagggcctgacggagaagaggctgagggtccaggcgctggcgacgggccaccccgaagcttcgattggggatatgaggagcgaagcggggctcattccagcgcatcgccccctcgaagtcggagtcgggaccggtcccatgaaagaaaccgggatcgtgaccgagaccgcgaacgcgacagagatagggacagggaccgggatcgcgagcgggaccgggatcgggatcgcgatcgggaccgcgaccgggagagagatcgggatagggaacgggacagggacagggatcgcgagggcccttttaggaggtccgattccttccccgagagacgcgcccctaggaaggggaacaccttgtatgtgtacggcgaagacatgactcctactcttctaagaggggcattcagccctttcggtaatattatcgatctgtcaatggacccaccttag

SEQ ID NO: 133337 - DNA, 480 bp, Artificial Sequence
  derived and/or modified sequence
atgctggtgatcccccccggcctgagcgaggaggaggaggccctgcagaaaaagtttaataagctcaagaaaaaaaagaaagcactcctggccctgaaaaagcagtcaagctcctctactacttcccaggggggggtgaagcggtccctctctgagcagccagtgatggacacagctactgccaccgaacaggcaaaacagctggtcaaatcaggtgccattagcgccattaaagccgagaccaaaaattccggttttaagcggagccgcactctggagggaaaacttaaagatccggagaagggcccagttcccacattccagcctttccagaggagtatttcagcggatgatgatctgcaagagtcctcacggaggcctcagcgaaagagcctgtacgaatctttcgtgagttcaagcgacaggttgcgggagcttggacccgatggcgaggaagcggaagggcccggggctgggtag

SEQ ID NO: 133338 - DNA, 480 bp, Artificial Sequence
  derived and/or modified sequence
atgctggtgatcccccccggcctgagcgaggaggaggaggccctgcagaaaaagttcaataagttgaagaagaagaaaaaagcccttctggctttgaaaaaacagagtagttcttctacaacatcccaaggaggggtcaagcgctccctgtcagagcagccagtcatggacaccgccacagccacagagcaggctaagcaactcgtgaagagtggggccatatctgccataaaggccgaaacgaaaaactcggggtttaagcgctcccgcaccttagaaggaaaactgaaagaccctgagaaagggccggtccccacatttcagccattccagaggagcattagtgcggacgacgacttacaggagtctagccgccgcccccagaggaagtctctttacgagtcttttgtcagcagtagtgaccggctgagggagcttgggccagacggggaggaggccgagggccccggcgctggatag

SEQ ID NO: 133339 - DNA, 480 bp, Artificial Sequence
  derived and/or modified sequence
atgctggtgatcccccccggcctgagcgaggaggaggaggccctgcaaaagaagttcaacaagctcaagaagaagaagaaagcgcttcttgcccttaagaaacagagctcttcaagcacaacatcacagggcggcgtaaagcggtccctctcagagcagccagtgatggacacagcgaccgcaactgaacaggcgaagcagctcgtgaagtctggcgcaatttccgccattaaggccgagacaaaaaattccggcttcaagcgttcacggaccctagagggaaaactcaaagatccagaaaagggcccagtccctacttttcaacctttccagcgctctattagcgccgacgacgatctgcaggagtccagccgtcgcccccaaagaaaaagtctctatgagtcttttgtgtctagctcggaccgcctgagggaactcgggcccgatggcgaagaggcggaggggcccggcgccggctag

SEQ ID NO: 133340 - DNA, 480 bp, Artificial Sequence
  derived and/or modified sequence
atgctggtgatcccccccggcctgagcgaggaggaggaggccctgcagaagaaatttaataaattaaagaaaaagaagaaggcgttgttagcattaaagaagcagtcatcatccagcaccactagccaaggaggcgtgaaaagatccctgtctgagcagccggtgatggacactgcaacagctacggagcaggccaagcagctggtgaaaagtggggcgataagcgcgattaaggccgagaccaagaactccggattcaagcgctcccgcaccctcgagggcaagcttaaggacccagagaaagggccagtgcctacctttcagccatttcaacgttctatctctgcggacgatgatttgcaggaatcttcccgccgcccacagcgcaaatccctgtacgagagcttcgtcagcagctcagaccgactgcgggaacttgggccagatggtgaagaggctgaagggcccggcgccggctag

SEQ ID NO: 133341 - DNA, 480 bp, Artificial Sequence
  derived and/or modified sequence
atgctggtgatcccccccggcctgagcgaggaggaggaggccctgcaaaagaaatttaacaagttaaagaagaaaaaaaaagcactgcttgccctgaaaaagcagagctcgtccagcacgacctcacaaggaggcgtgaagcgcagcctctcagaacaaccagtgatggacacagctaccgcaactgaacaagctaaacagctggtgaaaagcggggctatcagcgccatcaaagcagaaacaaaaaatagtggattcaagcggtctcggactttagaaggcaaactgaaagatccagagaagggcccagtccccacttttcagcctttccaacggtctatttccgccgacgacgacctgcaggagagctctagaagaccccaacgtaagagcttgtatgaaagcttcgtctcatcctctgatcgtctcagggaactcggaccagacggagaagaggccgagggccctggggccggttag

SEQ ID NO: 133342 - DNA, 1143 bp, Artificial Sequence
  derived and/or modified sequence
atgctggtgatcccccccggcctgagcgaggaggaggaggccctgcaaaagaagttcaataagctgaagaaaaagaagaaagctctccttgccctgaaaaagcagtcttcatcctcaacaacctcgcaagggggtgtgaagcgcagcctgagtgagcagccggtcatggacacagcgaccgccaccgagcaggccaaacagttggtaaaaagcggcgccattagcgcaatcaaggccgagacaaagaactctggattcaagaggtccagaacactcgagggcaaacttaaggatccagagaaaggaccagtgccaacattccagcccttccagcggtctatcagcgctgatgatgacctgcaagagtctagccggaggccacagcgcaagtcgctgtacgagtcttttgtatccagttcggatcgccttagggagctcggccctgacggagaggaggccgaagggccaggcgccggggatggcccacctcgatcatttgactggggctacgaggagcgctccggagctcattcaagcgcctcgccaccccgtagccgttctcgagataggagccatgagaggaaccgtgatcgggatcgcgaccgcgagcgggatagggatcgggacagggatcgcgacagagagagagacagagatcgagatcgggatcgtgacagagaccgggagcgcgatcgggatagagaacgggatcgggaccgggaccgcgaaggtccgttccgcaggagtgattcttttcctgagcggcgcgcgcccaggaagggaaataccctctatgtgtatggcgaagatatgacacccaccctcctgagaggagccttttcccccttcgggaatataattgatctgtcgatggaccctccccgtaattgcgcatttgtgacatacgagaaaatggagtctgccgaccaagctgtcgcggaattgaatggcacccaagtggagtctgtccagctcaaggtgaatatcgccagaaaacagcctatgttggacgcggcaacaggcaaaagtgtttgggggtcacttgccgttcagaacagtcctaaaggctgccaccgggacaagcggactcagatcgtctacagcgacgacgtgtacaaagaaaaccttgtggatggtttttag

SEQ ID NO: 133343 - DNA, 885 bp, Artificial Sequence
  derived and/or modified sequence
atgctggtgatcccccccggcctgagcgaggaggaggaggccctgcagaagaagttcaataagcttaagaagaagaaaaaagcgctgctggcactgaaaaaacagtccagtagcagtaccacctcccagggaggcgtgaaacgcagcctgtctgagcagccagtcatggacaccgcgacagcaaccgagcaggccaagcagttagtgaagtcaggcgccatcagcgctattaaagccgagactaaaaattccggcttcaagcggtcccgtacgttggagggcaagttaaaagatccagaaaaaggccctgtccccacgtttcagcccttccagcggagtatcagtgccgatgacgacttacaggagagctccagaagaccacagcggaagtccctctatgagtcgttcgtctcttcctccgaccgtctgcgtgagctgggcccagacggagaagaggcagagggtccgggtgctggagacggaccgccccgctctttcgattgggggtacgaagaaagatcgggagctcattcgtccgcctccccgccccggtccagatctagggacaggtcccatgaaagaaatagagatcgggatagggacagagaacgagaccgcgaccgagacagggatcgggacagggaaagggaccgcgaccgggatagggaccgcgatcgagacagggagagggatagggatagagagagggatagggacagagaccgggaaggccccttcaggcgtagcgattcatttccggaacggcgtgccccccgtaaggggaacaccctgtacgtgtacggtgaggatatgactccaacgttacttcgtggcgcctttagtccttttggcaacatcatcgacctgagtatggatccgccctag

SEQ ID NO: 133344 - DNA, 885 bp, Artificial Sequence
  derived and/or modified sequence
atgctggtgatcccccccggcctgagcgaggaggaggaggccctgcagaaaaagttcaataagttgaagaagaagaagaaagcactgctcgcactgaaaaagcagagtagctctagcaccacatcccaagggggcgtaaaaagaagcctgtcggagcagccagtgatggacacggcaacagcgacagaacaagctaagcaacttgtcaaatccggagcgattagcgccatcaaagccgaaaccaagaattcaggattcaaaaggtccaggacactggaaggcaagttaaaggaccccgaaaagggccccgttcccactttccagccctttcagagatctatctcggcagatgatgacctgcaggagagctctcggaggccccagagaaagtcactgtatgagtctttcgtttccagcagtgaccgtctccgcgagttaggccctgatggcgaagaggccgagggccctggggccggagacgggcctcctagaagttttgactggggctacgaagaacgatcaggtgcacacagcagcgcttcccccccccgatcccggagtcgtgatcgaagtcatgagcggaatcgcgatcgcgatagagacagagagcgtgacagggatagagatagggaccgcgaccgggaacgtgaccgagacagggacagggacagagaccgcgacagagaaagagaccgggatagagaaagggatagagatcgagatcgagaagggccatttagaagaagtgactccttcccagaacggagagcgcctaggaaaggcaacaccctttacgtctatggagaagatatgacccccacccttctccgtggcgctttttcacccttcggtaatatcatagacctgagcatggatcctccctag

SEQ ID NO: 133345 - DNA, 1143 bp, Artificial Sequence
  derived and/or modified sequence
atgctggtgatcccccccggcctgagcgaggaggaggaggccctgcagaagaagttcaataaactaaaaaaaaagaagaaagctctcttagctctgaagaaacagagctcttcgtccaccacctcccaaggcggtgtgaagcgatctttaagtgaacagccagtcatggatacagccactgctacagagcaggccaagcaactagtgaaatctggcgctatttcggctattaaggcagagaccaagaacagcggattcaaaaggtccaggacgctggaaggcaaactgaaggatccagaaaagggccccgtccccaccttccagccatttcagcggagtatttctgcagacgatgacctgcaggaatcgagcaggcgtccacagcgcaaatccctgtatgagtcgttcgtcagctcaagtgatcgcctccgagagctgggacccgatggcgaggaagccgaggggcccggcgccggagatgggccgcccagatccttcgattgggggtacgaggagaggtccggcgctcactcaagcgcctcacctcccaggtccagaagtcgcgatcgctcacacgagaggaaccgggatcgggatagagatagggaaagagaccgcgacagagaccgagatagggaccgggagcgagacagggatagggatcgcgacagagatcgtgatcgggaaagagatcgcgaccgggaaagagaccgcgatcgtgaccgcgaaggacccttccgcagatcagacagcttccctgagagaagagctccgcgcaagggcaatacactctacgtgtacggggaggacatgactcccaccctcctgagaggcgcgttttccccattcggcaacattatcgacctgtctatggatccacccagaaactgcgccttcgtgacctatgagaagatggagagcgctgaccaggccgtggccgaactgaatggaactcaggttgagagtgtgcagctaaaagtgaatatagctcgaaaacagccaatgctcgatgccgcaacaggtaagtccgtctggggatctctcgccgtgcagaacagtcctaaaggatgtcaccgcgacaaacgaacacagatagtctacagcgatgatgtctataaggagaatctcgtggatggcttttag

SEQ ID NO: 133346 - DNA, 885 bp, Artificial Sequence
  derived and/or modified sequence
atgctggtgatcccccccggcctgagcgaggaggaggaggccctgcagaagaagttcaataagctcaaaaagaagaagaaggccttgttagctctcaaaaagcagagcagttcctctacaacctcacagggaggcgtgaaacgctcgctgagtgagcagccagtgatggacaccgctactgccaccgaacaggccaaacagcttgtaaaatccggagctatatccgctattaaggcagagactaagaattccggctttaagcgctcccggactctggaaggaaaactaaaggatcccgagaaaggccccgtgccaacatttcaaccctttcagagaagcatctccgcagatgacgatctgcaggagagttccaggcggccacagagaaagtcactctacgaatcatttgtcagctcatccgaccgcctgcgtgagttgggtcccgacggtgaggaggcggagggtccgggggctggcgacggtccacccagatcctttgactgggggtatgaggaacgatcaggcgctcactcctccgcatctccaccaaggagccgttctagagatcgctcacatgagcggaatagagacagggatagggaccgggagcgagaccgcgatcgagaccgcgatcgagacagagaaagggatagggaccgggatcgcgaccgggatcgggaccgcgagcgtgatagggaccgggagcgcgatagggatcgcgaccgggaggggccgttcaggagatcggacagttttcctgagagaagggctcccagaaagggcaatacactgtatgtctatggcgaagatatgacccctaccctcctgcgaggtgccttttccccttttggtaacataattgatttaagtatggatcccccttag

SEQ ID NO: 133347 - DNA, 885 bp, Artificial Sequence
  derived and/or modified sequence
atgctggtgatcccccccggcctgagcgaggaggaggaggccctgcagaaaaaattcaataaactcaagaaaaaaaagaaagccctcctggcccttaaaaaacagtcctcgtcttccactacctcccagggcggagtaaaacggtcgctttctgaacagccggttatggataccgccacagccacggaacaggctaagcagctggtgaagtctggagctataagcgccataaaggccgaaactaagaacagcggctttaagcgcagtcgcaccctagaagggaagctgaaggatcctgaaaagggccccgtacctaccttccaacccttccagcgatctatttccgctgatgacgacttacaggagtctagcagaaggccacagcgaaagtcgctctatgagagctttgtctcttcttctgaccggctgagggaactcgggcctgacggcgaggaggctgaggggcctggggccggagatgggcccccacgctcctttgactggggctacgaagagcggtctggtgcccacagtagtgccagtccacctaggagtcgaagccgcgacagaagccacgaacgcaatcgggacagggaccgggatcgagagagagacagggacagggatcgggatcgtgacagggagcgtgatcgcgacagagacagagaccgtgatagggatcgagagcgggatcgcgacagagagagagatcgcgatagggatcgcgagggtccttttcggcgaagtgacagtttcccggaacgacgggctccccgtaagggaaacacactttatgtctatggcgaagacatgacacctacgctccttaggggagccttttccccctttggtaacattatcgatttatccatggaccctccctag

SEQ ID NO: 133348 - DNA, 885 bp, Artificial Sequence
  derived and/or modified sequence
atgctggtgatcccccccggcctgagcgaggaggaggaggccctgcagaagaaatttaacaaattgaagaaaaagaagaaagctctgttggctttaaaaaagcaaagcagcagcagcacaaccagccagggtggagtcaaacgcagtctttccgagcagcccgtgatggatacagctactgcaaccgaacaagcgaagcagctggtcaagtctggcgccatcagcgccattaaagccgagaccaagaattcaggcttcaaaagaagtcggaccctcgaggggaagctgaaggaccctgagaaaggtcctgttccgacatttcagccttttcagcggtccataagtgctgacgatgacttacaggaatcatcaagacggccgcagagaaaaagcctgtatgaatcctttgtcagttctagtgaccgcttgcgtgaacttggcccagacggggaggaagctgagggcccaggcgccggagacgggccgccgcggagcttcgactggggatatgaagagcgttcgggagcccactcctccgcctcaccgcccaggagccgctcccgggatagatcccacgagagaaaccgtgaccgggaccgcgatcgcgaacgagatagggatcgcgacagggaccgagacagggagagagacagagatagagatcgggaccgcgatagagaccgggagagggatagagatcgggagcgggaccgcgaccgggaccgcgagggccccttcaggagaagcgattcttttcctgagagaagggcacccagaaagggaaacaccttatacgtctacggggaggatatgactcccacccttctgagaggagccttcagcccatttgggaatattatagacctaagcatggacccaccctag

SEQ ID NO: 133349 - DNA, 1143 bp, Artificial Sequence
  derived and/or modified sequence
atgctggtgatcccccccggcctgagcgaggaggaggaggccctgcaaaagaaatttaataaactgaaaaagaagaagaaggcattgctcgccctgaagaagcagtccagttcctccacaacatctcaagggggagtgaagcgaagtctgagcgagcagccagtgatggacaccgctaccgctactgaacaggccaagcagctcgtcaagagcggtgctatctctgcaataaaagccgaaacaaagaattccggcttcaagcgctctagaactctggaaggcaagctgaaggatcctgagaaggggcctgttccaacctttcagccgttccagaggtccattagcgccgacgacgacttgcaggagagcagcagacggcctcaaaggaagagtctgtatgagtcctttgtgtcttcctcagacaggctacgggaactgggcccagatggtgaagaagctgagggccccggggctggtgacgggccaccacggtctttcgactgggggtacgaggaaagatctggggctcatagttcagcctctccgcccaggtcccgttcacgtgatagatcacatgagcgtaatagagacagggacagggacagggaaagggatcgcgatcgtgaccgggatagggatagagagcgggaccgagatagggatagggacagggatagggacagagaaagagatcgagaccgagagcgtgatagagaccgggatcgggaggggccattcagaagaagtgacagcttccctgagaggagagcgcctaggaaagggaatactctttacgtttacggtgaagatatgacccccactctcttaagaggagcgttctcaccatttggaaatatcatcgacctgagtatggatccaccccgaaattgcgcctttgtcacctacgaaaagatggaatccgcggatcaagcagtggcggagctaaacggaacccaggtcgaaagcgtccagctgaaagtgaacatcgccagaaagcagccaatgttagacgccgcgaccggtaagtcagtgtggggatctttagcagtgcagaatagtcccaagggctgtcaccgggacaagcgcacccagatcgtatattcggatgatgtatacaaggagaacctcgtggatgggttctag

SEQ ID NO: 133350 - DNA, 480 bp, Artificial Sequence
  derived and/or modified sequence
atgctggtgatcccccccggcctgagcgaggaggaggaggccctgcaaaaaaaatttaacaagctgaagaaaaaaaaaaaggcgctgcttgcactgaagaaacagtcatctagctccacgaccagtcaggggggggttaagcgttctctgagcgagcaaccggtgatggacacagccaccgcaacagagcaggctaaacagctggtgaaatcaggagctatctctgctattaaggcggagaccaagaacagtgggttcaagcggtcccgtacgcttgaggggaaacttaaggatcctgaaaaagggccggtccccaccttccagcctttccaaaggagtatctctgcagacgacgacttacaggagtcatccaggcgccctcaacgaaaatctttatatgaatcattcgtctcttcatcggaccgcctgagggaactaggtcccgatggagaggaagccgaaggccctggagccgggtag

SEQ ID NO: 133351 - DNA, 1164 bp, Artificial Sequence
  derived and/or modified sequence
atggtgcccaagggcgccaccatgctggtgatcccccccggcctgtccgaggaagaagaggctctgcagaagaagtttaataaactgaagaagaagaaaaaggccctgctggctctgaagaaacagagttcctccagcacaacgagtcagggaggggtgaaacgatcattatctgagcagcctgttatggatactgccactgcaaccgagcaagctaagcaactggttaaatctggagccatctccgctattaaggctgaaaccaagaattctggattcaagagatctagaacgctggaaggaaagttgaaggatcccgaaaagggccctgttccgactttccaaccattccaaaggtctatttcggcagatgatgacctccaggagagtagcaggcgccctcagaggaagtctttgtacgagtcctttgtgtccagctcagaccggttgcgcgaactgggacctgacggcgaagaggctgagggacctggcgcaggcgatggcccacctcggtctttcgattgggggtacgaagaacggagcggagcccactcatccgcctctccccctagatctaggagcagggataggtcacacgagcgcaacagagatcgcgatagggaccgcgagagagaccgtgatcgggatcgggaccgggacagagagagagatagagatcgtgatagggatcgggatagagaccgggagcgagatcgcgatagggagagggaccgagacagggatcgcgaaggcccctttcggaggtcagattcctttccagagcgcagggccccccgcaagggcaatacgctctatgtctacggtgaagatatgacacctaccttgttacggggcgcatttagcccttttgggaacattattgacttaagtatggaccctccgagaaactgcgcatttgtgacctatgaaaagatggaatcagcagaccaggctgtggctgaactcaacggtacccaggtcgagtccgtgcagctcaaggtcaacatcgcccgtaagcagcctatgttagatgccgcgaccggaaaaagtgtttgggggtcccttgccgtgcagaactctccaaagggatgtcaccgcgacaaacggacgcagatagtgtacagcgatgacgtttacaaagagaacctggtcgacggtttctag

SEQ ID NO: 133352 - DNA, 1164 bp, Artificial Sequence
  derived and/or modified sequence
atggtgcccaagggcgccaccatgctggtgatcccccccggcctgtccgaggaagaggaggccctccagaagaagttcaacaagctcaaaaaaaagaaaaaggcactgttagcacttaaaaaacaatccagctcgtctactacaagccagggcggagtcaaacggtccctcagcgaacagccagtcatggacaccgcaaccgcaaccgagcaagccaaacagctagtaaagtccggggcaatctccgccattaaagccgagaccaaaaactccggatttaagcgcagtcgcacactggaggggaagctgaaagatccagaaaagggccccgtgcctacattccagccttttcaacggagcatatcagccgatgacgacctgcaagagagttcccgcagacctcagagaaagtccttgtatgaatccttcgtcagcagttcagatcggttgagggaactgggacctgacggggaggaagccgaagggcccggcgccggcgatggacctcccaggagcttcgactggggttacgaagaacgcagcggcgcacacagttctgcctcccctccccggagtaggagccgtgaccgatcgcacgagaggaaccgcgacagggaccgggatcgcgaacgcgaccgagatagggatagggaccgagatcgggagcgagatagggaccgggatcgggacagagatcgtgatcgggaacgagacagggatagagagcgcgatagggatagagatcgtgagggcccctttaggagatcagactcctttcccgagcgacgagctcctagaaaagggaataccctgtatgtatacggagaagatatgactcccaccttattgcggggggccttcagtccattcggaaatataatcgatcttagcatggaccccccgaggaactgcgcattcgtgacctatgagaaaatggaaagtgcagatcaggccgtggcagagctcaacggtacacaggtcgagagcgtgcaactgaaagtcaacatcgcccgaaaacagcccatgctcgacgccgctaccggcaagagcgtgtgggggagcctggctgttcagaacagtcccaaagggtgccaccgggacaaacgtacgcagattgtttacagcgacgatgtgtacaaagagaatcttgttgatggtttttag

SEQ ID NO: 133353 - DNA, 1164 bp, Artificial Sequence
  derived and/or modified sequence
atggtgcccaagggcgccaccatgctggtgatcccccccggcctgagcgaggaagaggaggcgctccaaaaaaagttcaataagctcaaaaagaagaaaaaggctttgcttgctctgaagaaacagagcagttcaagcacaaccagccagggcggagtgaagcgcagcctgtccgagcagcctgtgatggacactgcaacagctactgagcaggctaagcaattggttaaatccggagccatctcagccataaaagcagagaccaagaatagcggttttaaacgatctaggacattagaagggaaactcaaagaccctgagaaagggcccgtgcccacctttcaaccctttcagagatccatttctgcagatgacgacttgcaggaatcttcacggcggccccagcgcaagtccctgtatgagagtttcgtaagtagcagcgacaggctcagagaactgggtcccgacggcgaggaggctgaagggccaggagcgggtgacggccccccaagaagtttcgattggggctatgaagaacgctcaggggcgcatagctcggcatcgccacctcggtcaaggtcccgggacagatcacatgaaagaaacagggatcgcgaccgggacagggaacgcgacagagacagagatcgtgatagagatagggaacgggaccgcgatagggatcgtgaccgcgacagagatcgagagcgcgatcgggatcgcgaaagggaccgtgacagagatagggaagggccttttcggcgctcagattcatttcccgagcgccgggcaccaaggaagggcaataccctgtatgtgtatggcgaggacatgactcccacactgcttaggggcgctttctcgcctttcggaaacattattgatctatcaatggatcccccaaggaactgtgcttttgtcacttatgaaaagatggaatcggctgatcaagccgtagctgagcttaatggtacgcaagtggaaagcgtgcagctgaaggtcaacatcgccagaaaacagcctatgttagatgccgcaacgggaaagagcgtctgggggtcccttgccgtgcagaatagtccaaaggggtgccacagggacaagaggacccaaatagtttactcggacgatgtgtataaagagaacttagtggacgggttctag

SEQ ID NO: 133354 - DNA, 1164 bp, Artificial Sequence
  derived and/or modified sequence
atggtgcccaagggcgccaccatgctggtgatcccccccggcctgagtgaggaagaggaggccttgcagaaaaagtttaacaaactcaaaaaaaaaaagaaggccctcctggcgttaaagaaacagagtagctcatctacgacctcccagggcggcgttaaacgcagcctttcagaacagcccgtgatggacacagcgacagcaacagagcaggctaaacagctggtgaagtccggtgccataagcgctattaaagctgagacaaaaaactctgggtttaagcgtagcagaaccctcgagggaaagctgaaggatccggagaagggtcccgttcctacatttcaaccatttcagcgtagcatctccgcagacgacgacctgcaggaatctagtaggcggccacaaaggaaatcactgtatgagtcctttgtctccagttctgataggttacgggagctggggcccgacggtgaggaagctgagggacctggcgccggcgatggcccacctcgctctttcgactggggctacgaagagcgaagtggtgcacatagctcggcctctccaccaagatccagatccagggaccgcagtcacgaacgcaatcgggaccgcgaccgggacagggagcgggaccgcgaccgagatcgtgatagagatagagaacgggatagggaccgagatcgcgaccgagaccgcgacagagagcgggaccgagaccgggagcgtgatcgggaccgggatcgcgagggtccttttcgtagatccgacagttttcccgagcggcgcgcacctcggaaagggaataccttgtacgtgtacggtgaggacatgacccctacccttttgcggggggccttctcacccttcggtaacattatagacttaagcatggaccctcctagaaattgtgcgttcgttacttacgagaagatggagtccgcagaccaggctgtggccgagcttaatggaacgcaggtagagtctgtgcagctaaaggtcaatatcgcgaggaaacagcccatgcttgatgctgcgactggaaagtcagtttggggtagcctcgccgttcagaactcccccaagggatgtcacagggacaaacgaacacagatcgtatacagcgatgatgtatataaggagaatttagtcgatggattttag

SEQ ID NO: 133355 - DNA, 1164 bp, Artificial Sequence
  derived and/or modified sequence
atggtgcccaagggcgccaccatgctggtgatcccccccggcctgagtgaggaggaggaggctttgcagaaaaagtttaacaagctcaaaaaaaaaaagaaggccttactcgccctgaagaaacagagttcatccagtacgaccagccaaggtggggtgaaaaggtccctgtctgagcaaccggtgatggatacagcaactgctacagagcaggcaaaacagcttgtcaagtctggggcaatctccgccatcaaagccgaaactaagaacagcggatttaagcgcagtcggacattggagggaaagttgaaagatcccgaaaagggcccagttcccactttccagccctttcaaaggtcgatttccgctgatgacgacctccaagagagctctaggcgacctcagcggaagagcctctatgaaagcttcgtctccagtagtgatcgactgagggaactgggcccagatggagaagaggctgagggccctggcgcaggggatgggccccctcgctcattcgattgggggtacgaagagcggagtggagcccactcttccgcttcacctccaagaagccggagccgggatcggagccatgaacgcaacagggacagagatcgggatagggagagagacagagatcgtgaccgggatcgggacagagagagagatagggacagagaccgggacagagaccgagaccgcgagagagatagggacagggagcgggaccgtgatcgggacagggaaggacctttccggcgctctgactccttcccagagaggcgggctcccagaaagggaaacacgctctatgtgtatggagaggacatgaccccaacactgctacggggggcattttcaccgttcggcaatatcattgacctctccatggatcctccaagaaactgcgcatttgttacctatgaaaagatggaaagcgcagaccaggccgtagccgaactgaatggtactcaagtcgagtccgttcagcttaaggtcaacattgcgcggaagcagcctatgctggatgccgcaacaggcaaatctgtctggggatctttagctgtgcaaaacagtccaaaaggatgccacagagataaacggactcagatagtgtacagcgacgacgtttataaggagaacctcgtagacggattctag

SEQ ID NO: 133356 - DNA, 1164 bp, Artificial Sequence
  derived and/or modified sequence
atggtacctaagggggcaactatgctggtgatcccccctggactctctgaggaggaagaggctctccagaaaaagttcaataagctgaaaaaaaagaagaaggctctgcttgctctcaaaaagcagtctagttccagcacgacatctcaaggtggtgtgaagaggtctctgtcggaacagcccgtgatggatactgccaccgctactgaacaggcaaagcagctggtcaagagcggagctatttccgcgatcaaagccgagacaaagaacagcggctttaaacgctctagaactttggagggaaaactgaaagaccccgagaagggaccagtgcccaccttccagcccttccagcgctccatttccgcagacgatgatcttcaggagagttctcgcagaccgcagagaaaaagcctatacgagtccttcgtatccagctctgatcgtctaagggagctggggccagatggtgaagaagcagaaggccctggggctggcgatggccctcctcgcagcttcgactggggctatgaggagcggtctggcgctcattcatctgcttcacctccacgcagtagatcccgcgatagatcccatgagcgaaatagagacagggatagggaccgggagcgggaccgggatcgcgacagggaccgcgatcgagagcgcgaccgcgatagggacagggatcgggaccgggaccgggagcgtgacagagaccgagaaagggacagagatcgggacagggaaggcccatttcgaagaagtgattctttcccagaaagacgggcaccaagaaaggggaacactctctacgtctacggggaggacatgactccaacgctgctccgaggggctttctcaccatttgggaacattattgatctaagtatggatccgccacgtaactgcgccttcgtcacgtacgaaaagatggagagtgctgatcaggctgtggctgagctgaatggcacgcaggttgagtccgtacagctgaaggtaaacatcgcccgtaaacagcccatgcttgatgctgccaccggaaagtctgtgtggggctctctagcagtgcagaacagtcccaagggttgtcaccgcgataaacggacccaaatcgtctattccgatgatgtatataaggagaatctggttgatggcttttag

SEQ ID NO: 133357 - DNA, 1143 bp, Artificial Sequence
  derived and/or modified sequence
atgttggtaatccccccaggtctctccgaagaagaagaagcgctacaaaagaagttcaataaacttaaaaagaagaagaaggctctcctcgcgctgaagaaacaaagcagcagctccactacgagccagggcggagtgaaaaggagcctttctgaacagcctgtgatggataccgcaacagccaccgagcaggctaagcagctcgtcaaatctggtgcaatttccgctatcaaagcggagacgaaaaattctgggtttaagaggtcgagaactctggagggaaagctaaaagacccggaaaagggcccagtgcctacctttcagccgttccagcggtctatcagcgctgatgatgacttacaggaatcgtcacggcgaccccagagaaagtcactttatgagtcctttgtgagcagctcagataggctccgggagctgggacccgatggtgaggaagccgaggggcctggagccggagacggccctcccagaagtttcgactgggggtacgaggaaagatccggggcacatagctccgcatctccccctagatctcgcagtcgagaccggtctcacgaacgcaacagggaccgcgatcgggacagggagagggacagagacagggatagggaccgagaccgagagcgcgatagggatcgagatcgggacagggatagagatcgcgaacgggatcgcgaccgagagagggatagggacagggatagggaagggccttttcgcaggtccgatagttttcccgaaagaagagcccctaggaagggcaacactctttacgtgtacggcgaggatatgacccctactcttctgcggggagctttcagcccatttgggaatattatcgatctgtcaatggatccaccccgtaactgtgctttcgttacgtatgagaagatggagtccgcggatcaggcagtggctgagctcaacgggacccaggtggaatccgttcagctgaaagtaaatattgctcgcaagcagccaatgctcgatgccgctaccggcaaatcagtgtggggttcccttgcggtgcagaattctcccaaaggatgccacagagacaagcgcactcagatcgtgtactctgacgatgtgtataaagaaaacctcgtggatgggttttag

SEQ ID NO: 133358 - DNA, 1143 bp, Artificial Sequence
  derived and/or modified sequence
atgctggtcatccccccaggcttaagtgaagaggaggaggccctgcagaagaaattcaataaactaaagaagaaaaaaaaagccctattggcactgaagaagcagagcagttcctccactacgtcacagggtggcgtcaagcgatccctcagcgagcagcccgtcatggacaccgcaaccgccacagagcaagccaaacagctggtgaagagtggtgctatatcagctataaaggcggaaacaaaaaattcaggctttaaaaggtcgagaacactcgagggcaaactgaaggaccccgagaaagggcctgtccctacctttcagcctttccagaggagtatctctgccgatgatgatttacaggagagctcccgtcggccacagcgaaagagcctgtatgaaagctttgtgagcagcagcgaccggctgagagagctgggccctgatggcgaggaagccgaaggccctggtgcgggagatggaccccctagatcattcgactggggttatgaggaacggagcggcgctcactcaagtgcctctccgccacggagcagatctcgcgaccgcagccacgagaggaacagagaccgggatagagacagagagagggatcgcgacagggaccgggaccgcgatcgggaaagggaccgggatcgcgatagggaccgcgatcgggatagggaacgcgatagagaccgcgaacgcgatagagacagagaccgtgaaggccctttcaggcggtcggactcttttcccgagagaagagcccctagaaaagggaacactctttacgtgtatggtgaggacatgacaccaactctgttacggggagcattctcccctttcggtaacatcatcgacttgtctatggaccccccaaggaactgtgcgtttgtcacctatgagaaaatggagtccgcagaccaagcagtcgctgagctcaatggcacgcaagtagagtccgtgcagttgaaggtgaacattgcacgcaagcagcctatgctggatgcagccacagggaagtcagtgtggggaagtttagctgtgcagaattcccctaagggctgccaccgggacaaaaggacccagattgtgtatagcgacgacgtgtacaaagagaacctggttgacgggttttag

SEQ ID NO: 133359 - DNA, 1143 bp, Artificial Sequence
  derived and/or modified sequence
atgttggtgatcccaccagggctctctgaggaggaagaagccttacagaaaaagtttaataaactgaaaaagaagaagaaagccctcctggcgctgaagaaacagagttcttcttctacaactagccagggcggagtaaaaagaagcctaagcgagcagcctgtgatggacacagcaaccgcaaccgagcaagctaaacagctcgttaaaagtggagctatttcagcaattaaggctgagaccaaaaattcaggctttaaacgcagtaggacactcgaaggaaagctcaaggaccccgaaaaggggccagttccgactttccagccctttcaaaggagtattagtgctgatgatgatcttcaggagtcctccaggcgccctcagcgcaagtccctatatgaatcgtttgttagctcttccgacaggctccgagagttgggcccagacggtgaagaagccgagggtcccggagccggagacggtccacctaggtcttttgactgggggtacgaggaaaggtctggtgcccacagctcagcaagtcctccgaggagtaggagccgcgatagatcgcacgagagaaacagagacagggacagagaccgggagcgggatagggacagggatcgggatagagacagagaaagggatagagacagagatagggaccgagaccgcgacagagaacgggatcgtgacagggagcgggaccgagatcgggacagggaaggaccatttcggagatctgattcgtttccagaacgcagagcacctcgcaaggggaacacactttatgtttatggtgaagatatgacaccaacactgttgagaggtgccttctcaccgttcggcaatatcatcgatttaagcatggacccaccacggaactgcgcgttcgtgacgtacgaaaaaatggaaagtgccgatcaggctgttgccgagctgaacggaacacaggtggagtcagtgcaacttaaagtaaacatcgctagaaaacagcccatgctagatgctgccaccgggaagtccgtgtgggggtcactggccgtgcagaatagcccgaaggggtgtcatcgtgacaaaagaacgcagattgtatactctgacgacgtctacaaggagaacctggtggacggcttctag

SEQ ID NO: 133360 - DNA, 885 bp, Artificial Sequence
  derived and/or modified sequence
atgttagttataccacccggacttagtgaggaagaggaggccctccagaagaagtttaacaagttgaagaaaaagaagaaggcacttctcgccctcaagaagcaatcaagctctagcactacgtcccagggtggagtgaagcggtccttaagtgagcagcccgtgatggacactgcaactgccactgagcaggccaagcagttggtcaaatcaggcgcaatctcggcaattaaggcagaaacaaagaattcggggtttaagcgatctagaacactcgagggaaaactgaaggaccctgaaaagggaccagttccaacttttcagccctttcagaggagcatttctgccgacgacgatctgcaggagtcatctcggcgtccacagcgcaaatctctttacgaatcgttcgtatcaagctcagatcgcctacgagagctgggacctgacggagaggaggctgaaggacctggcgcaggtgatggcccacctcggtccttcgactggggatacgaagagaggtccggcgctcatagttccgcttctccgccacggtctaggtcacgagacagaagccacgagcgaaacagagaccgggaccgagatagagagagggatcgagatcgtgacagggatagggaccgggaaagagatagggacagggaccgagatcgcgaccgtgaccgcgaacgggatcgagaccgcgagcgggacagggatcgagatagggagggtcctttccgcagatccgattcattccctgaaaggagagccccacggaaaggtaacactctgtatgtgtacggcgaagatatgacgcctacactgcttagaggtgctttttccccattcggaaacattatagacctgagtatggatccaccatag

SEQ ID NO: 133361 - DNA, 480 bp, Artificial Sequence
  derived and/or modified sequence
atgctcgtgatcccccctgggctgagtgaggaggaagaagcactccaaaagaaattcaataagttgaagaaaaaaaagaaagctctgttggccctgaaaaaacagtcttcttcatctaccacgagccaggggggtgttaaacgctccctcagtgaacaacctgtgatggacactgctactgccactgagcaagcaaagcagcttgtcaagagcggcgctatctctgccatcaaggccgagactaaaaatagcggattcaagcggtcaaggacattagagggcaaactgaaggaccccgaaaaaggccctgtccctacatttcaacctttccagcgcagcatctcggctgacgatgatctccaagaaagtagccgaagaccccaaaggaaatctctctatgaatcgtttgtatcgtcaagtgacagactgagggaactgggtcctgatggcgaggaggcagaaggcccaggggctggatag

SEQ ID NO: 133362 - DNA, 480 bp, Artificial Sequence
  derived and/or modified sequence
atgttagtgatccctccagggctatctgaggaggaagaggcgcttcagaagaaatttaacaagctgaagaaaaagaaaaaagcactgcttgctctcaagaagcagtctagcagttctactacgtcccaggggggagtcaagcgtagcctgagcgaacagcccgttatggacactgctaccgcaactgaacaggccaagcagctcgtgaaatcaggcgctatctccgctatcaaggcggagacgaagaacagcggtttcaaacgatctaggacactggagggtaagcttaaggaccccgagaagggccctgtccctacattccagccatttcagagatcgatctcagctgacgatgatctgcaggaaagctctagacggcctcagaggaagtccctgtatgaatctttcgtgtcatcgtccgacaggctgcgagagctagggccagacggcgaggaggcagagggacctggagccggatag

SEQ ID NO: 133363 - DNA, 480 bp, Artificial Sequence
  derived and/or modified sequence
atgttagttattcccccaggactcagtgaagaggaagaggccttacaaaagaaatttaacaagctcaaaaaaaagaagaaggctctccttgccttgaagaaacagtcaagtagttcaaccacatctcaggggggtgttaaaaggtccctgtcagagcagcctgtgatggacacagccactgccactgagcaggccaaacagcttgtgaagtctggtgctatatcagcgatcaaagctgagacaaagaacagcggatttaaaaggagtcgcacccttgaaggcaagcttaaagatcctgagaaaggcccagtgcccaccttccagccctttcaacgaagtatcagcgcggacgatgatctgcaggaatctagtcgcaggccacagcggaaatccttgtacgagtcatttgtgagttctagtgacagactgcgggagcttggccctgacggcgaagaggccgagggaccaggagccggatag

SEQ ID NO: 133364 - DNA, 480 bp, Artificial Sequence
  derived and/or modified sequence
atgttggtaatacccccaggactgagtgaagaagaggaagcactgcagaagaagttcaataagctgaaaaaaaaaaaaaaggccctccttgccttaaaaaagcagtcatcaagtagtacgacctcccagggaggcgtaaagcggagtttatcagagcagcctgttatggataccgccactgcaactgagcaagccaagcagttggtcaagagcggtgcaattagcgcgatcaaggcagagactaaaaacagcggattcaagagaagcagaacgctggaaggaaaactgaaggatccagaaaagggcccagtcccaacatttcaacctttccaaagaagcatttccgccgacgacgacctacaggagagttcacggaggccacaacggaaatccctgtatgaatcctttgtgtcttcaagcgatcgcctacgggagctgggcccagatggcgaagaagccgagggacccggtgctggatag

SEQ ID NO: 133365 - DNA, 480 bp, Artificial Sequence
  derived and/or modified sequence
atgctggtgatcccacctggtctgtccgaagaagaagaagccctgcagaagaaattcaacaagctcaaaaaaaaaaagaaggctctgctggcccttaaaaaacagtcaagctcatcaacaacctcacagggtggagtgaaacgaagcctttctgagcagcccgtcatggacaccgccacggccacggaacaagccaagcaacttgtaaagtccggggcaataagcgcaatcaaggcggagaccaagaatagtgggttcaagcggtctcgcacactcgaggggaaacttaaggacccggaaaagggcccagtgcccaccttccagccctttcagcgctctatttccgcagacgacgatcttcaggagagttctcggcgaccgcagcgcaaatcgctatatgagtcatttgtgagcagttctgaccggttgcgggagctgggtcctgacggagaggaagcagagggaccgggtgcagggtag

SEQ ID NO: 133366 - DNA, 1143 bp, Artificial Sequence
  derived and/or modified sequence
atgctcgtaatcccgccaggcctatcagaggaggaagaggccctgcaaaagaaatttaacaagctcaagaagaaaaagaaagcactactagccctgaagaaacagtcgtcatcctcaacaacctcccagggaggggtaaagcgaagcttgagtgagcagccagtcatggataccgctacagcgactgagcaggcaaagcaactggtgaaatctggtgctatctctgcgatcaaggccgagacaaagaacagcggcttcaagcgatctagaacactcgagggaaaattgaaggatccagagaaagggcctgtcccgactttccagccattccaaaggagcatctcggccgatgacgacttgcaggaatcgagtagacggcctcaacgcaaaagcctgtatgagtcttttgtatcaagctccgatcgcctgcgcgagttaggaccagacggcgaagaagcagagggtccaggcgcaggcgatggccctcccagatcttttgattggggttacgaggaaaggtctggcgctcattcctctgccagccctccaagatctcgaagcagagaccgatcccatgaacggaaccgcgacagggacagggaccgagaacgcgacagggacagggatcgtgatagggacagggaacgcgatcgcgatagagatagggatcgggaccgtgatcgcgagcgcgatagagatcgggagcgcgatcgcgatagagaccgtgagggcccatttcgccgttcagactcatttcccgaacgcagagcccctcggaaggggaacaccctctacgtttacggggaggatatgacacctaccttgctccggggagccttctcgccatttgggaacatcatcgatctaagcatggaccctccgaggaattgtgcctttgtcacatatgaaaaaatggaatccgctgatcaggccgttgctgaactgaatggcacccaagttgaaagtgtgcaactgaaggtcaatattgcacgcaagcagcccatgttggacgctgctaccgggaaaagtgtctgggggtcactggccgtacagaattcacccaagggctgccatcgggacaagagaacccagattgtttatagcgatgatgtctacaaggaaaaccttgtggatggcttctag

SEQ ID NO: 133367 - DNA, 885 bp, Artificial Sequence
  derived and/or modified sequence
atgcttgttatcccgccaggtctaagcgaagaggaggaagcccttcagaaaaagtttaacaaacttaaaaagaaaaaaaaggctctgctggcactcaaaaagcagtcttcctcctcaacaacatctcaaggcggagtgaaaaggtcgctgtctgaacagccagtgatggataccgccacagccactgagcaggcaaaacagttggttaaatctggggcaatctcggctattaaggcagaaactaagaactcaggatttaaacgttccagaaccctggaaggcaaactcaaggacccggagaaagggcctgtccctacattccagccattccaacgctctattagcgcagacgacgatctgcaagaaagctcaaggcgccctcaaagaaagtccctgtacgaatctttcgtctcatctagtgatcgactgcgtgaactgggacctgacggcgaagaggctgagggtcccggtgctggggacggcccacctaggagcttcgactggggatatgaggaaagaagtggagctcatagtagcgcttcaccccctagatctagaagtagagatcggagtcacgagcggaacagagatcgggatcgcgaccgagaaagagatcgcgatcgggaccgggatagggatcgggaacgggacagggatcgtgacagagaccgggaccgagaccgggaaagggacagagatcgcgagagggatcgggacagggatcgcgagggccctttccggagaagcgacagttttcctgagcggcgtgcccctagaaaaggtaataccctctacgtgtatggagaggacatgactcccactctgctccggggagctttcagtcctttcggaaatataatcgatttatctatggatcctccctag

SEQ ID NO: 133368 - DNA, 885 bp, Artificial Sequence
  derived and/or modified sequence
atgctggtcatcccgcctgggttgtctgaagaagaggaggcccttcagaagaaatttaacaaactgaaaaagaaaaaaaaggctttgctcgccttaaagaagcagtcgagttcaagcacaacatctcagggtggagtcaaaaggagcctctccgagcagcctgtgatggacactgcgactgccactgagcaggcaaagcaactggtgaagtcaggggctatcagcgccatcaaggctgagaccaaaaatagcggattcaaacgctcccgaacccttgaaggcaagctgaaggatcctgagaagggtcccgttccaacattccagccgttccagcggtcaatcagtgcagatgacgatttacaggagtctagccgaagaccacagaggaagtccctatatgaatccttcgtaagcagctctgatagactgcgcgaactgggccctgatggtgaggaggcggagggacccggtgcaggagacggacctcctcgcagcttcgattggggctatgaagagaggagcggggctcacagttcagcctcgcctccgcgatccaggtcacgtgatcggagccacgagaggaatcgggatcgcgacagggatagggaacgcgatcgcgatcgggatcgggatagagacagagagcgggaccgcgatcgagaccgcgaccgagatcgcgatcgagaacgcgaccgcgacagggaaagagaccgtgatcgagatcgcgaaggaccattcagacgcagcgatagtttcccagagcggagggctccaagaaaaggtaacactctgtacgtctatggagaagatatgacaccgaccctgctgagaggggcatttagtccttttggcaatatcattgatctaagcatggacccgccatag

SEQ ID NO: 133369 - DNA, 1143 bp, Artificial Sequence
  derived and/or modified sequence
atgctagttatcccacccggtttgagtgaggaggaagaggcccttcagaagaaattcaataagctgaagaaaaaaaaaaaggctctccttgccctgaagaaacaatccagcagcagcacgacatcccaggggggagtgaagcgctccctctctgaacagccggtgatggatactgccacagccactgagcaggctaagcaactagttaagtcgggggctatttctgccataaaagctgagacgaagaactcgggtttcaagcgcagtagaacattagagggaaaactgaaagaccctgagaagggtcccgttccaacctttcaacccttccagcgctccatcagcgctgatgatgatctgcaagagtcttcacggagacctcagcggaagtccctctatgaaagctttgtgtcatcctctgacaggctgcgtgaactggggccagacggcgaggaggcggaaggacctggggctggagacgggcctcctcgttcattcgactggggctatgaagaaaggagcggagctcacagctctgctagcccgcctcgatctaggagtcgggaccggtcgcatgaaagaaacagagatcgtgaccgggaccgtgagcgcgacagagacagggaccgagatagagatcgcgagcgggatcgggatcgcgaccgggaccgggacagagatcgagaaagagatcgagatagggaacgggatcgggaccgtgaccgggaggggccttttcggagaagtgactccttcccggagaggcgggctccaagaaaaggcaatacactgtacgtctatggggaggatatgacgcctactcttttgcgaggcgcttttagcccttttggaaacattatagacctgagcatggaccccccacgcaactgtgcatttgtgacgtatgagaagatggagagtgcagatcaggctgtcgcagaacttaatggcacccaagttgaatcggtgcagctgaaggtcaacatcgctcgtaagcagcccatgttagacgcagcaacaggtaaaagtgtctggggttcacttgcagtgcagaacagtcccaagggctgccatcgcgacaagaggactcagatcgtctactctgatgacgtttacaaggagaatctggttgatggcttttag

SEQ ID NO: 133370 - DNA, 885 bp, Artificial Sequence
  derived and/or modified sequence
atgttggtcattccccctggtctctcggaggaggaagaagcattacagaaaaaatttaacaaactaaagaaaaagaagaaagctctcctcgcactaaaaaaacagagttcctcttctaccaccagccagggaggcgtgaagcgatctctgtctgagcaacccgtgatggacactgccacggcaactgagcaggcaaaacagttagttaagtcaggtgccatctcagcgatcaaggcagagaccaaaaattccggctttaaaaggtcacggaccttagaaggcaaattaaaggatcctgagaagggccctgtgcctaccttccagccattccaaagaagtatcagcgcggatgatgacctgcaagaaagctcccggcgtcctcagagaaaatccctgtatgagtccttcgtgtcttctagtgacaggttgagggagctcggtccagacggtgaggaggcggagggcccaggcgctggcgacggcccacctcggtccttcgattggggatacgaggaacgtagcggggcacactcatcagcgtccccaccacgtagccgaagcagagaccggagtcatgagagaaatcgcgaccgggaccgcgaccgcgagcgggaccgggaccgggaccgggatcgcgaccgtgaaagagatagagaccgagacagagatcgagatagagacagggagagagatcgggaccgggagagagaccgagaccgcgaccgtgaaggcccattccggcgatcagattcattcccggagcggagagcaccgaggaagggaaatacgctttatgtctatggcgaagatatgacccccaccctgctgaggggtgctttcagcccgttcggtaatattatcgatctttctatggatccgccttag

SEQ ID NO: 133371 - DNA, 885 bp, Artificial Sequence
  derived and/or modified sequence
atgctggtcattccaccaggattatctgaggaggaggaagcgcttcaaaagaagtttaacaaactgaagaaaaagaagaaagccctactggctctgaagaagcagtctagttcttccaccacttctcaaggcggtgtgaagcggagcctctcagagcagcctgtgatggacacagctacagctactgagcaagccaaacagctagttaagtctggagctattagtgcaattaaagcagaaacaaagaacagtggatttaagagatcccggacgctagagggcaagctgaaggatcctgagaagggcccagtgcctactttccagcctttccagaggagcatcagcgccgatgacgatctccaggaatctagtagacgaccccagagaaagtcgctatacgaatccttcgttagctcaagcgatagattacgtgaacttggacctgatggagaagaagcagagggacctggtgccggtgatggcccacctcgctctttcgactgggggtacgaggaacgtagtggggcacacagtagtgcttcgcctcctcggtcacgctctcgggatcggtcccatgagcggaatagggaccgagacagagatcgagaacgagaccgcgatcgagacagagatcgcgaccgtgaaagagaccgagatagagaccgagatcgtgatagagacagggaacgcgacagggatcgtgagcgagatcgcgatagagatcgcgaaggccctttccgtcgaagcgacagcttcccggagcgaagggccccacggaagggaaacactctctacgtttacggcgaggatatgacccccactctgcttaggggggctttcagtccattcggcaatatcatcgatcttagtatggaccctccatag

SEQ ID NO: 133372 - DNA, 885 bp, Artificial Sequence
  derived and/or modified sequence
atgttggtaattcctccagggctctccgaggaagaggaggccctacagaagaaattcaataagttgaaaaaaaagaaaaaggcgcttctcgccttgaaaaaacagagttcaagtagcactacatcgcaaggcggagtgaaacgttccctgtcagagcagccggtgatggacaccgcaaccgcaacagagcaggccaagcagttggtcaagtcaggtgctatctcagccattaaggccgagactaaaaactcaggttttaaacgatctcgcaccttggagggtaaactaaaagaccctgaaaagggtccggtccctacctttcagcctttccagagatcaatttctgcagatgacgacctccaagaaagctcaagaaggccccaacgaaagtccttgtatgagtccttcgtttcttcttccgaccgactcagggagctcgggccagacggggaagaggctgaaggccctggcgctggagacgggcctccgaggtcctttgactgggggtacgaggagagatcgggagctcacagctcagcgagtcccccacggagccggagccgggacagatcacacgagcgcaatcgagacagggaccgggatcgggagcgcgacagagaccgagatcgggatagggatagagagcgcgacagagacagagatcgggatcgcgatagggacagggagcgcgaccgggacagagagcgcgaccgggatcgcgatcgtgaaggcccatttaggcggtctgatagctttccagagcgcagagccccacgaaaaggtaatacactttatgtttacggggaggacatgacaccaacccttctgcgtggggctttctctcccttcgggaacatcatcgatctgtccatggatccaccttag

SEQ ID NO: 133373 - DNA, 1143 bp, Artificial Sequence
  derived and/or modified sequence
atgctggtcatccccccaggcctgagtgaagaagaggaggcgcttcagaagaagttcaacaagctcaaaaaaaaaaaaaaggctctcctggcactgaagaaacagagcagctcgtcaacaacaagccaaggaggagtcaagcgctcactgagtgagcagccagtcatggacaccgccaccgctaccgaacaggctaagcagttggtgaagagcggggcaattagcgcaattaaagcggagactaaaaactccggctttaagcgtagcaggacactggagggtaaactcaaggaccccgagaagggtcctgtccccacattccagccattccagcggtctatcagcgccgatgatgacctgcaggaatcatcacgtaggccccagaggaagtctctctatgaaagctttgtaagttccagcgacaggttgcgcgaactgggtcctgacggcgaagaagctgaaggtcccggagccggagacggccctcccaggtctttcgactggggctacgaggagaggagcggcgctcattcgtccgcttcaccaccgaggtcccggagtcgggataggtcgcatgaaagaaaccgggacagggacagggacagggaacgggaccgggatcgggatagggaccgggatagagagagagatcgcgaccgcgatagagatcgagacagggaccgcgaacgggatcgggatcgcgaaagagatagagacagagaccgagaagggccattccgacgctccgatagtttccccgaacgaagagcccctcgcaaaggaaatacgctgtatgtgtacggggaggatatgacaccgactcttttgcgtggtgctttttctcccttcggaaacatcattgacctgtcaatggacccccctagaaactgcgcctttgttacgtatgagaaaatggagtccgccgaccaggccgtggccgaactgaacggcacacaggtggaatctgttcaattaaaagtcaatatcgcgcgaaaacagcccatgctggatgctgctacaggaaagtccgtatggggaagcttagcagtccaaaattcccctaaaggatgccatcgtgataaaagaacccagattgtctattccgatgatgtgtataaagaaaacctggtagatgggttctag

SEQ ID NO: 133374 - DNA, 480 bp, Artificial Sequence
  derived and/or modified sequence
atgttagtcattccccctggactctctgaagaagaagaggcattacaaaaaaagtttaacaagcttaaaaaaaagaagaaggccctgctggccctgaagaaacagagtagttcttccaccaccagccagggcggtgtgaaaagaagtctgtcagagcagcctgtgatggatacagccacagctactgagcaggctaaacagctggtcaagtccggtgccatttcagccattaaggccgaaactaaaaatagtggatttaagcggagccggaccctggaaggaaaactcaaggatccagagaaaggaccggtgcccacctttcagccctttcaaagaagcatttccgccgacgatgacctgcaagaatctagtaggcgccctcagcggaaatcactttacgaaagctttgtgagcagttcagaccggctgagagagctgggcccagacggtgaagaagctgagggtcccggagccggatag

SEQ ID NO: 133375 - DNA, 1164 bp, Artificial Sequence
  derived and/or modified sequence
atggtaccaaaaggcgctacaatgctggtgatcccacccggactgtccgaggaagaagaggccctgcagaagaaatttaataaattaaaaaaaaagaagaaggcgctcctggcgttgaagaaacagagttcaagttcgaccacctctcagggcggagtgaagagatcactgtcagagcagcccgtgatggatacggctactgccactgagcaggcgaagcagctggtcaagagtggggcaatctccgcgatcaaggccgaaaccaagaatagtgggttcaagagatctaggacgctggaggggaagctgaaggatcctgaaaagggcccagtgcccacatttcagcctttccagcgttcaatctccgcagacgacgatttgcaggaatccagccgcaggccgcagaggaagtcactgtatgagagctttgtgtccagttcagataggctgagagagttggggccagacggagaagaggccgagggacccggtgcaggtgacggacccccaaggagtttcgattggggctacgaagagcgatctggcgcacacagctccgcgtcgccccctcgaagtcggtctcgcgatcgctcccacgaaagaaaccgtgatagagacagagatagagagcgcgatagagatagagatagagacagggaccgtgaaagggacagggaccgggatagagatcgcgacagggatcgggaaagggatagggacagagaacgtgaccgtgatagggatagagagggcccttttcgaaggagcgactcttttcctgaaaggcgggctcctagaaaaggaaataccctctatgtttatggcgaggatatgacccccactcttctgcggggagcgttctcgcccttcgggaacatcattgatctgagtatggatccaccccgaaattgcgctttcgtcacttacgagaagatggaaagcgccgaccaggctgttgcagagctcaatgggacacaggtcgagagtgtccagttgaaagtgaatatcgccaggaaacagccaatgctggatgccgcaactggcaagtctgtctggggatctctcgcagtacaaaacagccctaaagggtgccacagggacaaacggacccaaattgtgtattccgacgacgtgtataaagaaaatttggtggacggcttttag

SEQ ID NO: 133376 - DNA, 1164 bp, Artificial Sequence
  derived and/or modified sequence
atggtcccaaagggggctaccatgctagtgatccctccaggcctgtcggaggaagaagaggcactccagaaaaagttcaataaactaaagaaaaagaaaaaagctctgctggcactcaagaagcagtcatccagcagtactactagccagggcggtgtcaaacgaagcctctcagagcaacctgtcatggacaccgctaccgccaccgagcaggctaagcagttggtaaagtctggtgccatttccgcgattaaagcagagacaaaaaattctggattcaaacgctctcgtacgctcgagggaaaactgaaggaccccgagaaaggacctgtacctacattccaaccattccaacgcagcatttctgcggatgatgacctccaagagtcatcacgccgacctcaaagaaagtctctttacgagtcgttcgtgtccagctcagatcgtctacgggagcttggccctgatggagaggaagctgaaggcccaggggctggcgacggtccacccagaagcttcgactggggctatgaggagagatccggagcccactcaagcgcatcgcctccacgttcccgttcccgggataggtcccacgagaggaatagagacagggacagagaccgggagagggatagagacagagaccgggacagggacagggaaagggacagggatcgggatcgcgatcgagacagggatcgggagcgggatcgtgaccgcgagagggacagagaccgggatcgcgaggggccattccgcagaagtgactcctttccggagcgcagagcccctcggaaggggaacactttatatgtgtacggcgaggacatgacaccgaccctgcttcggggtgcgtttagcccattcggtaacattattgatctgagcatggaccccccaaggaactgcgctttcgttacatacgagaagatggaaagcgcagatcaggccgtggccgaactcaacggtacccaggtggaatcagtacaactgaaggtcaacatagcccgaaagcagcctatgctggacgcagccacagggaagtcagtctggggctctctcgccgtgcagaactcccccaagggatgccaccgggacaagcgaactcagatcgtctatagtgacgatgtgtacaaggaaaacttggtggatgggttctag

SEQ ID NO: 133377 - DNA, 1164 bp, Artificial Sequence
  derived and/or modified sequence
atggtgcccaagggggctacaatgttagtgattcctccaggactgagcgaggaggaggaggccctgcaaaaaaagtttaataagctgaaaaagaaaaagaaggcactgctggccctgaaaaaacaaagctctagctccaccacctctcaagggggagtcaaacgtagtctctctgagcagcccgtgatggacacagccactgccacggagcaggccaagcagctggtcaaatctggcgctattagtgcaatcaaggcagagactaagaactcggggtttaaaaggtcccgcactctggaaggaaagttgaaggatccagagaaaggccctgtgcctactttccagccttttcaaaggtcgatttctgcggatgacgatctccaggaatcgtcccgaagacctcagcggaaatctctgtatgagtcctttgtatctagctctgatagactcagagagctgggaccagacggcgaagaagctgaaggccctggggctggcgatgggccacctcggtcgttcgactgggggtacgaagaacgcagtggagcgcactcgagtgccagcccgccacgctcccgaagtagggatcgcagccatgagaggaatcgtgaccgggacagagaccgagagcgtgatagggatcgtgatcgcgaccgcgatcgcgagagagatcgggaccgggatcgggatcgtgatcgcgacagagaacgcgatagggatcgcgagagagaccgcgatagggatcgggagggccctttcaggcgcagcgactcattccccgagagaagagcaccccgaaagggtaacactctgtatgtgtacggtgaggatatgacccctacgctgttgaggggggctttctctccctttgggaacattatcgacttgagcatggatcctcctcgcaattgcgcttttgtcacttacgaaaagatggagtccgcagaccaggccgttgccgagctcaacggcactcaagtagagtccgtgcaattgaaggtcaatatcgcccgaaagcaaccaatgttagatgctgccaccggtaaatcggtttggggctccttggcagttcaaaacagtcccaaaggctgtcatcgcgataagagaactcagatcgtgtactctgatgacgtttataaagagaacttggtcgatggcttctag

SEQ ID NO: 133378 - DNA, 1164 bp, Artificial Sequence
  derived and/or modified sequence
atggtcccgaagggtgccaccatgctagtgatcccacccggactgtccgaggaagaagaagctctgcagaagaaattcaataagctgaaaaagaaaaaaaaggcactgctggcactgaagaagcagtcctcgtcaagcacaacttctcaaggcggtgtaaagagatctctttccgagcagccagttatggacacagccacagctaccgagcaagcgaaacaactggtgaagtctggagcgatttccgccattaaggctgagacaaaaaattctggcttcaaacgcagccgaactctagagggcaagttgaaagaccctgagaagggtcccgtccccaccttccagccttttcagagaagtattagtgctgatgatgacctacaagagtcgagtaggaggcctcagcgtaagtctttatatgagagttttgtctccagcagcgatagactgagggaactgggacctgatggcgaagaggctgagggacccggagcaggcgacggccctcctaggtcattcgactggggatatgaggaaagatcaggtgcgcattcctcagccagcccaccccgttcccgcagccgagacaggtcccacgagcgcaaccgtgacagagacagggacagggagagagatcgcgatagggatcgagatagagatcgagagagggatagagaccgggaccgcgatcgagatcgcgatagagagagagaccgggaccgcgagagggacagagaccgcgatcgcgaaggcccttttcgacggtcagatagctttccagaaagaagggctccacgcaaggggaacaccctctatgtttacggagaggatatgaccccaactttgctgagaggtgctttctccccctttgggaatatcatagatctcagtatggacccgccacggaactgcgcgttcgtgacgtacgaaaagatggagagcgccgaccaggccgtcgccgagcttaacggcacacaggtggagtcagtccaactgaaagtgaacattgccagaaagcaaccgatgctggacgcagcgaccggaaagtcagtatgggggtccctcgctgtgcagaattccccgaagggctgccaccgcgataaaaggactcaaattgtgtacagtgacgatgtgtacaaagagaacctggtggacggcttttag

SEQ ID NO: 133379 - DNA, 1164 bp, Artificial Sequence
  derived and/or modified sequence
atggtgccgaagggcgctactatgcttgtgatcccacctgggctgtctgaggaagaagaggccttgcagaagaagtttaacaagttaaaaaaaaagaagaaggcgctgctggcccttaagaagcagagctcatccagcactacaagccagggtggggtgaaaagaagccttagtgagcaaccagtgatggacactgccaccgcgactgagcaggcgaagcagctggtgaagtctggcgcaatctctgccattaaagctgagacgaagaattcgggatttaagcgctcacgcaccctggaaggaaagctgaaggatcccgagaagggcccagtacccaccttccaaccttttcaaaggtccatttccgcagatgacgacctgcaggaatcatctagacgtcctcagaggaagagcctgtacgagtccttcgtctcgtcaagcgacaggctgcgggagcttggccctgacggggaagaagccgaagggcctggtgctggagacgggccacctcggtcgttcgactggggttacgaagagaggtctggggcacattcctccgcctcccccccaaggtccagatctcgggaccggagtcatgaacgcaaccgcgacagggatcgggatcgggaaagggatagggatcgcgaccgtgatcgggatagggagagggatagagatcgggatcgtgaccgggatcgggaccgcgaaagagatagggatagagaacgtgatagggatagagaccgggagggtccattccggagatcagattccttcccggaaaggcgggctccaagaaagggaaatacgctgtatgtgtatggggaggacatgacaccaactcttttgcgcggagccttttctccatttggcaacatcattgatctgagcatggatccacccaggaattgcgcctttgtcacctatgagaaaatggaatcggcagatcaagccgttgccgagctcaacggtactcaagtagaaagcgtgcagctcaaggttaatatcgccaggaagcagccaatgctcgatgccgcaacaggtaagagcgtgtgggggtctctagctgtccagaactctcccaagggatgccatcgggacaagcgaacgcagattgtctatagcgatgacgtctacaaggagaacctggtcgacggcttctag

SEQ ID NO: 133380 - DNA, 1164 bp, Artificial Sequence
  derived and/or modified sequence
atggtgcccaagggcgccaccatgctggtgatcccccccggcctgagcgaggaggaggaggccctgcagaagaagttcaacaagctgaagaagaagaagaaggccctgctggccctgaagaagcagagcagcagcagcaccaccagccagggcggcgtgaagagaagcctgagcgagcagcccgtgatggacaccgccaccgccaccgagcaggccaagcagctggtgaagagcggcgccatcagcgccatcaaggccgagaccaagaacagcggcttcaagagaagcagaaccctggagggcaagctgaaggaccccgagaagggccccgtgcccaccttccagcccttccagagaagcatcagcgccgacgacgacctgcaggagagcagcagaagaccccagagaaagagcctgtacgagagcttcgtgagcagcagcgacagactgagagagctgggccccgacggcgaggaggccgagggccccggcgccggcgacggcccccccagaagcttcgactggggctacgaggagagaagcggcgcccacagcagcgccagcccccccagaagcagaagcagagacagaagccacgagagaaacagagacagagacagagacagagagagagacagagacagagacagagacagagacagagagagagacagagacagagacagagacagagacagagacagagagagagacagagacagagagagagacagagacagagacagagagggccccttcagaagaagcgacagcttccccgagagaagagcccccagaaagggcaacaccctgtacgtgtacggcgaggacatgacccccaccctgctgagaggcgccttcagccccttcggcaacatcatcgacctgagcatggacccccccagaaactgcgccttcgtgacctacgagaagatggagagcgccgaccaggccgtggccgagctgaacggcacccaggtggagagcgtgcagctgaaggtgaacatcgccagaaagcagcccatgctggacgccgccaccggcaagagcgtgtggggcagcctggccgtgcagaacagccccaagggctgccacagagacaagagaacccagatcgtgtacagcgacgacgtgtacaaggagaacctggtggacggcttctag

SEQ ID NO: 133381 - DNA, 1143 bp, Artificial Sequence
  derived and/or modified sequence
atgctggtgatcccccccggcctgagcgaggaggaggaggccctgcagaagaagttcaacaagctgaagaagaagaagaaggccctgctggccctgaagaagcagagcagcagcagcaccaccagccagggcggcgtgaagagaagcctgagcgagcagcccgtgatggacaccgccaccgccaccgagcaggccaagcagctggtgaagagcggcgccatcagcgccatcaaggccgagaccaagaacagcggcttcaagagaagcagaaccctggagggcaagctgaaggaccccgagaagggccccgtgcccaccttccagcccttccagagaagcatcagcgccgacgacgacctgcaggagagcagcagaagaccccagagaaagagcctgtacgagagcttcgtgagcagcagcgacagactgagagagctgggccccgacggcgaggaggccgagggccccggcgccggcgacggcccccccagaagcttcgactggggctacgaggagagaagcggcgcccacagcagcgccagcccccccagaagcagaagcagagacagaagccacgagagaaacagagacagagacagagacagagagagagacagagacagagacagagacagagacagagagagagacagagacagagacagagacagagacagagacagagagagagacagagacagagagagagacagagacagagacagagagggccccttcagaagaagcgacagcttccccgagagaagagcccccagaaagggcaacaccctgtacgtgtacggcgaggacatgacccccaccctgctgagaggcgccttcagccccttcggcaacatcatcgacctgagcatggacccccccagaaactgcgccttcgtgacctacgagaagatggagagcgccgaccaggccgtggccgagctgaacggcacccaggtggagagcgtgcagctgaaggtgaacatcgccagaaagcagcccatgctggacgccgccaccggcaagagcgtgtggggcagcctggccgtgcagaacagccccaagggctgccacagagacaagagaacccagatcgtgtacagcgacgacgtgtacaaggagaacctggtggacggcttctag

SEQ ID NO: 133382 - DNA, 885 bp, Artificial Sequence
  derived and/or modified sequence
atgctggtgatcccccccggcctgagcgaggaggaggaggccctgcagaagaagttcaacaagctgaagaagaagaagaaggccctgctggccctgaagaagcagagcagcagcagcaccaccagccagggcggcgtgaagagaagcctgagcgagcagcccgtgatggacaccgccaccgccaccgagcaggccaagcagctggtgaagagcggcgccatcagcgccatcaaggccgagaccaagaacagcggcttcaagagaagcagaaccctggagggcaagctgaaggaccccgagaagggccccgtgcccaccttccagcccttccagagaagcatcagcgccgacgacgacctgcaggagagcagcagaagaccccagagaaagagcctgtacgagagcttcgtgagcagcagcgacagactgagagagctgggccccgacggcgaggaggccgagggccccggcgccggcgacggcccccccagaagcttcgactggggctacgaggagagaagcggcgcccacagcagcgccagcccccccagaagcagaagcagagacagaagccacgagagaaacagagacagagacagagacagagagagagacagagacagagacagagacagagacagagagagagacagagacagagacagagacagagacagagacagagagagagacagagacagagagagagacagagacagagacagagagggccccttcagaagaagcgacagcttccccgagagaagagcccccagaaagggcaacaccctgtacgtgtacggcgaggacatgacccccaccctgctgagaggcgccttcagccccttcggcaacatcatcgacctgagcatggaccccccctag

SEQ ID NO: 133383 - DNA, 480 bp, Artificial Sequence
  derived and/or modified sequence
atgctggtgatcccccccggcctgagcgaggaggaggaggccctgcagaagaagttcaacaagctgaagaagaagaagaaggccctgctggccctgaagaagcagagcagcagcagcaccaccagccagggcggcgtgaagagaagcctgagcgagcagcccgtgatggacaccgccaccgccaccgagcaggccaagcagctggtgaagagcggcgccatcagcgccatcaaggccgagaccaagaacagcggcttcaagagaagcagaaccctggagggcaagctgaaggaccccgagaagggccccgtgcccaccttccagcccttccagagaagcatcagcgccgacgacgacctgcaggagagcagcagaagaccccagagaaagagcctgtacgagagcttcgtgagcagcagcgacagactgagagagctgggccccgacggcgaggaggccgagggccccggcgccggctag

SEQ ID NO: 133384 - protein, 318 aa, Artificial Sequence
  derived and/or modified sequence
MWLPLLLGALLWAVLWLLRDRQSLPASNAFVFITGCDSGFGRLLALQLDQRGFRVLASCLTPSGAEDLQRVASSRLHTTLLDITDPQSVQQAAKWVEMHVKEAGLFGLVNNAGVAGIIGPTPWLTRDDFQRVLNVNTMGPIGVTLALLPLLQQARGRVINITSVLGRLAANGGGYCVSKFGLEAFSDSLRRDVAHFGIRVSIVEPGFFRTPVTNLESLEKTLQACWARLPPATQAHYGGAFLTKYLKMQQRIMNLICDPDLTKVSRCLEHALTARHPRTRYSPGWDAKLLWLPASYLPASLVDAVLTWVLPKPAQAVY

SEQ ID NO: 133385 - DNA, 957 bp, Artificial Sequence
  derived and/or modified sequence
atgtggctcccactcctcctgggagccctgctgtgggcggtgctatggctattaagggatagacagtcactccccgcaagcaacgcctttgtgtttatcacaggttgtgacagcggattcgggagactgctggctctgcagcttgaccagcgcgggttccgcgtgctcgcctcttgcttgaccccttccggcgcggaggacttgcagcgagtcgcctcttcccgactgcacaccaccctgctcgatatcacagaccctcagagtgtacagcaggcagccaagtgggtcgagatgcacgtcaaggaggcaggtctgttcggactcgtgaataatgctggagtagccggaatcatcggtcccacaccctggctgacacgagacgactttcagcgcgtgctgaatgttaacacgatgggccccatcggggtgaccttggctctattaccccttcttcaacaggctcgagggcgggtcataaacatcacatcggtgctgggcagattggccgccaatggcggaggctactgcgtgtcgaagttcgggctggaagcctttagcgacagtctacggagagacgtggctcacttcggcatcagggtttcgatcgttgagccagggttcttcagaactcccgtcacaaacctggaatccctggaaaaaaccttgcaagcttgttgggcccgcttgccgcctgctacccaggcgcactacggaggcgctttcctcaccaagtacctgaaaatgcagcagcgcatcatgaatctgatctgcgatcccgaccttacaaaggtgtcccgatgccttgagcacgccctgactgcgagacatccccgtacacgttactcccctggctgggacgctaagctgctgtggctgcccgcaagctacctgcctgcctccctcgtggatgctgtgctgacctgggtcctcccgaagccggctcaggccgtctactag

SEQ ID NO: 133386 - DNA, 957 bp, Artificial Sequence
  derived and/or modified sequence
atgtggttgcctctgctgttgggggcgctactgtgggccgtcctctggctcttacgcgacagacagtctctccctgcatcaaatgcattcgtgttcattaccggttgcgattcaggatttggcagactgctggcactgcagctggaccagcgggggttcagagtgctcgcaagctgtctgacaccttccggcgcagaggaccttcagagggtggcctcaagcagactgcatactacccttcttgatattaccgatccacagagcgtgcagcaggccgcaaaatgggtggagatgcacgtgaaggaagcagggcttttcggtctcgtgaataatgccggagtagctggaatcatcggccctactccttggctcacaagggatgacttccaaagagtgctcaatgttaacactatggggcctattggggtgacactggccctcctacctctgttgcagcaggcgcggggccgggtgataaacatcacaagcgtcctgggaagactcgcagcgaacggtggcggatactgcgtgagtaagttcgggctggaggccttctccgatagtcttcgcagagatgtggcacacttcggaatacgcgtgagtatcgttgagccaggttttttccggacaccagtaacaaatctggaaagccttgaaaagaccctgcaagcttgctgggcacgtctgcctccagcgacacaggctcattatgggggcgccttcctgactaaataccttaaaatgcaacagaggatcatgaacctcatttgtgatccagatctgacgaaagtaagcaggtgtctggagcacgcattgacagctcgacacccacgaacccgttattcaccaggatgggacgccaagcttctgtggctccccgcctcgtacctgcccgcctctttagtcgatgcagttctgacgtgggtgttgccaaaacccgcccaggccgtatattag

SEQ ID NO: 133387 - DNA, 957 bp, Artificial Sequence
  derived and/or modified sequence
atgtggctgcccctgctgctgggcgccctgctgtgggccgtgctgtggctgctgcgggaccggcagagcctgcctgccagcaatgcctttgtgttcatcaccggctgtgacagcggcttcggccgcctgctggccctgcagctggaccagaggggcttccgggtgctggccagctgcctgaccccatctggagctgaggacctgcagagggtggccagcagccggctgcacaccaccctgctggacatcacagacccccagagcgtgcagcaggccgccaagtgggtggagatgcacgtgaaggaggccggcctgtttggcctggtgaacaatgctggggtggccggcatcatcggccccaccccctggctgaccagagatgacttccagagggtgctgaatgtgaacaccatgggccccatcggcgtgaccctggccctgctgcccctgctgcagcaggcccggggccgggtcatcaacatcacctctgtgctgggccgcctggccgccaatggaggcggctactgtgtgtccaagtttggcctggaggccttcagtgacagcctgcggagagatgtggcccacttcggcatccgggtgtccatcgtggagcccggcttcttccgcacccctgtgaccaacctggagagcctggagaagaccctgcaggcctgctgggcccggctgcccccagccacccaggcccactatggaggagccttcctgaccaagtacctgaagatgcagcagaggatcatgaacctgatctgtgaccctgacctgaccaaggtgagccgctgcctggagcacgccctgacagcccggcaccccaggacccgctacagccctggctgggatgccaagctgctgtggctgcctgccagctacctgcctgccagcctggtggatgctgtgctgacctgggtgctgcccaagccagcccaggccgtgtactag

SEQ ID NO: 133388 - DNA, 957 bp, Artificial Sequence
  derived and/or modified sequence
atgtggctgcccctgctgctgggcgccctgctgtgggccgtgctgtggctgttacgagacaggcagagcctccctgcgagtaacgcctttgtctttatcacgggatgcgattctgggtttggtagattactggcactgcaactagaccaaagggggttccgagtcctagcttcatgtcttacaccaagcggtgctgaggatctgcaaagagtggcgagctcgcgactccataccacgctgttggatatcaccgacccacaaagcgtgcaacaggcagctaaatgggtggagatgcacgtcaaggaagcagggcttttcggcctggtaaataatgcaggggtcgccgggattataggtcccactccctggctcacccgggatgactttcaacgggttttgaatgtaaacaccatgggtcctattggcgtcaccttggccctgctccctctgttgcagcaagcccgggggagggtaatcaatatcaccagcgttttgggccggctggcagcaaacggcggcgggtactgtgtatccaaatttgggctagaggccttcagcgactctctgcggcgggatgttgcccatttcggcattagagtcagcatcgtggagcccggcttctttcgaacccccgttacaaatttggagtccctcgagaaaaccctgcaggcttgctgggctaggctgccccctgcaacacaagcccactatggcggcgcatttctgaccaaataccttaagatgcaacaaagaattatgaatctgatctgtgaccccgacttgaccaaagtttcaagatgcttagagcacgccttgactgctagacatccacggactagatatagtcctgggtgggatgcaaagctgctgtggctgccagcttcctacttaccggcctcattggtggatgccgtgcttacgtgggtgctgcctaagcccgcacaggccgtgtactag

SEQ ID NO: 133389 - DNA, 957 bp, Artificial Sequence
  derived and/or modified sequence
atgtggctgcccctgctgctgggcgccctgctgtgggccgtgctgtggttacttagagataggcagagcttacccgcctcaaacgcatttgtgtttatcaccggctgtgattcaggcttcggcagattgctcgcactgcagttggatcaacgcggcttccgagttttagctagctgtttaacaccctctggggctgaggacctgcaaagggtggcatcttctaggctgcacacaacactactggatattacagaccctcagtcagtacagcaggcagctaagtgggtggagatgcacgtgaaagaggctggtctctttggactagtgaataatgccggagtggctggcatcattggccccactccatggctgaccagggacgacttccagagagtgctcaatgtaaacacgatggggcccattggagtgaccctggctttgctgcccctgctccagcaggcacgcggcagggttatcaatatcaccagcgttcttgggagattggcagcaaacggcggtgggtattgcgtgtcaaagttcggtctcgaagcgtttagcgactctctccgcagagacgtggcgcacttcgggatcagggtttctatagtcgaaccgggcttctttcgaacccctgttaccaaccttgagagtctggaaaagacactgcaggcgtgttgggctaggctgccacccgctacacaggcccattacggtggcgccttcttaacaaagtatctgaagatgcagcagagaattatgaacctcatttgtgatccagatctgacaaaggtctcacggtgtttggagcacgccctgacggcccgacatcccaggaccaggtattctccgggatgggatgctaagttactgtggctgcctgcatcttacttgcccgcgagcctggttgacgcagttctgacctgggtgctaccaaagcccgcccaggccgtctactag

SEQ ID NO: 133390 - DNA, 957 bp, Artificial Sequence
  derived and/or modified sequence
atgtggctgccattgctgttaggcgcactattatgggctgtcctctggcttctgcgtgaccgacaatcgcttcctgcttcaaacgcttttgttttcataactggttgtgattcagggtttggcaggttgctggcacttcaattggatcaaagaggctttcgtgttcttgccagttgtctcacgccaagtggcgctgaagacctgcagagggtcgctagctctcgattgcacactacactcctggatattaccgatccccagtctgtccagcaggctgccaaatgggttgagatgcacgtgaaagaggccggactttttgggttggtgaataacgcaggagtagcagggatcatcgggccaacaccgtggctgaccagggatgactttcaacgcgtccttaacgtgaacacgatggggcctattggcgtgacccttgctctactgcccctcttgcagcaggcccgaggacgggttatcaacattacatccgttttaggcaggttggcggcaaacggcggaggatactgcgtttctaaatttggcctggaggctttttctgacagtcttaggcgcgatgtggctcatttcggcattcgagtgtcgatcgtggagccaggattcttccgaaccccagtgaccaacctggagtccctagagaaaacccttcaggcctgttgggcccgactgcccccagccacccaggcccattacggcggagcctttctgaccaagtatctgaaaatgcagcagcgtataatgaatttgatttgtgacccagatctgactaaagtgagccgctgcctcgagcatgcgctgaccgccagacatccccgaacaaggtatagcccaggttgggacgctaagttgctgtggcttccagcatcctacctgcccgcttctctggtcgatgcagttctcacctgggtgttgcccaagccggcacaagcagtctactag

SEQ ID NO: 133391 - DNA, 957 bp, Artificial Sequence
  derived and/or modified sequence
atgtggcttcccctcctcttaggggctctgctttgggccgttctgtggctgcttcgagaccggcagtccctgcccgctagtaatgcatttgtgtttatcacaggctgtgacagcggattcggcagactgcttgctctacagcttgaccaaagaggctttagggtgcttgcttcctgtttgactccttctggcgctgaagacctccagagggtggcatccagccgtctgcatacaacactattggacattaccgacccccagagcgtccagcaggctgccaaatgggttgaaatgcatgtgaaagaggctggactgttcggcctggtcaataacgcaggtgttgctggaatcatcgggcctacaccttggctgacccgtgacgactttcagcgcgtccttaatgtgaacaccatgggacccattggcgtgacattagctctgctgcccctgctgcagcaggccagggggagggttatcaatattactagtgtactcggtcgcctggctgccaacgggggaggatactgtgtttccaagtttggtttagaagcattttctgatagtctccggagggatgtagctcacttcggaattcgcgtttcaattgtcgagcccggtttttttcgcacaccagtcaccaatttagaatctctcgagaagacattgcaagcttgctgggcccgattgccacctgcaactcaagctcactatggaggcgctttcctgacgaaatacctgaaaatgcaacagcggattatgaacttgatttgcgaccctgacctgactaaggtgtctaggtgcctggagcatgcacttaccgctcgtcatcccaggacccggtatagcccaggttgggacgcgaagctgctatggctccctgcatcttatctgccagcctctctcgttgacgcagtattgacttgggtccttccaaagccagctcaagctgtttactag

SEQ ID NO: 133392 - DNA, 1269 bp, Artificial Sequence
  derived and/or modified sequence
ggactttggccttagcagtagttagtgtgggaggctgggaagactgggagcagtctcttaaacaaaagcaaaagaataagcttcgggcgctgtagtacctgccagctttcgccacaggaggctgccacctgtaggtcacttgggctccagctatgtggctgcctcttctgctgggtgccttactctgggcagtgctgtggttgctcagggaccggcagagcctgcccgccagcaatgcctttgtcttcatcaccggctgtgactcaggctttgggcgccttctggcactgcagctggaccagagaggcttccgagtcctggccagctgcctgaccccctccggggccgaggacctgcagcgggtggcctcctcccgcctccacaccaccctgttggatatcactgatccccagagcgtccagcaggcagccaagtgggtggagatgcacgttaaggaagcagggctttttggtctggtgaataatgctggtgtggctggtatcatcggacccacaccatggctgacccgggacgatttccagcgggtgctgaatgtgaacacaatgggtcccatcggggtcacccttgccctgctgcctctgctgcagcaagcccggggccgggtgatcaacatcaccagcgtcctgggtcgcctggcagccaatggtgggggctactgtgtctccaaatttggcctggaggccttctctgacagcctgaggcgggatgtagctcattttgggatacgagtctccatcgtggagcctggcttcttccgaacccctgtgaccaacctggagagtctggagaaaaccctgcaggcctgctgggcacggctgcctcctgccacacaggcccactatgggggggccttcctcaccaagtacctgaaaatgcaacagcgcatcatgaacctgatctgtgacccggacctaaccaaggtgagccgatgcctggagcatgccctgactgctcgacacccccgaacccgctacagcccaggttgggatgccaagctgctctggctgcctgcctcctacctgccagccagcctggtggatgctgtgctcacctgggtccttcccaagcctgcccaagcagtctactgaatccagccttccagcaagagattgtttttcaaggacaaggactttgatttatttctgcccccaccctggtactgcctggtgcctgccacaaaataagcactaacaaaagtgtattgtttaaaaaataaaaagaaggtgggcagaaatgtgcccagtggaa

SEQ ID NO: 133393 - DNA, 1259 bp, Artificial Sequence
  derived and/or modified sequence
cagtagttagtgtgggaggctgggaagactgggagcagtctcttaaacaaaagcaaaagaataagcttcgggcgctgtagtacctgccagctttcgccacaggagcctaggctgccacctgtaggtcacttgggctccagctatgtggctgcctcttctgctgggtgccttactctgggcagtgctgtggttgctcagggaccggcagagcctgcccgccagcaatgcctttgtcttcatcaccggctgtgactcaggctttgggcgccttctggcactgcagctggaccagagaggcttccgagtcctggccagctgcctgaccccctccggggccgaggacctgcagcgggtggcctcctcccgcctccacaccaccctgttggatatcactgatccccagagcgtccagcaggcagccaagtgggtggagatgcacgttaaggaagcagggctttttggtctggtgaataatgctggtgtggctggtatcatcggacccacaccatggctgacccgggacgatttccagcgggtgctgaatgtgaacacaatgggtcccatcggggtcacccttgccctgctgcctctgctgcagcaagcccggggccgggtgatcaacatcaccagcgtcctgggtcgcctggcagccaatggtgggggctactgtgtctccaaatttggcctggaggccttctctgacagcctgaggcgggatgtagctcattttgggatacgagtctccatcgtggagcctggcttcttccgaacccctgtgaccaacctggagagtctggagaaaaccctgcaggcctgctgggcacggctgcctcctgccacacaggcccactatgggggggccttcctcaccaagtacctgaaaatgcaacagcgcatcatgaacctgatctgtgacccggacctaaccaaggtgagccgatgcctggagcatgccctgactgctcgacacccccgaacccgctacagcccaggttgggatgccaagctgctctggctgcctgcctcctacctgccagccagcctggtggatgctgtgctcacctgggtccttcccaagcctgcccaagcagtctactgaatccagccttccagcaagagattgtttttcaaggacaaggactttgatttatttctgcccccaccctggtactgcctggtgcctgccacaaaataagcactaacaaaagtgtattgtttaaaaaataaaaagaaggtgggcagaaatgtgcccagtggaa

SEQ ID NO: 133394 - DNA, 957 bp, Artificial Sequence
  derived and/or modified sequence
atgtggctgcccctgctgctgggcgccctgctgtgggccgtgctgtggctgctgagagacagacagagcctgcccgccagcaacgccttcgtgttcatcaccggctgcgacagcggcttcggcagactgctggccctgcagctggaccagagaggcttcagagtgctggccagctgcctgacccccagcggcgccgaggacctgcagagagtggccagcagcagactgcacaccaccctgctggacatcaccgacccccagagcgtgcagcaggccgccaagtgggtggagatgcacgtgaaggaggccggcctgttcggcctggtgaacaacgccggcgtggccggcatcatcggccccaccccctggctgaccagagacgacttccagagagtgctgaacgtgaacaccatgggccccatcggcgtgaccctggccctgctgcccctgctgcagcaggccagaggcagagtgatcaacatcaccagcgtgctgggcagactggccgccaacggcggcggctactgcgtgagcaagttcggcctggaggccttcagcgacagcctgagaagagacgtggcccacttcggcatcagagtgagcatcgtggagcccggcttcttcagaacccccgtgaccaacctggagagcctggagaagaccctgcaggcctgctgggccagactgccccccgccacccaggcccactacggcggcgccttcctgaccaagtacctgaagatgcagcagagaatcatgaacctgatctgcgaccccgacctgaccaaggtgagcagatgcctggagcacgccctgaccgccagacaccccagaaccagatacagccccggctgggacgccaagctgctgtggctgcccgccagctacctgcccgccagcctggtggacgccgtgctgacctgggtgctgcccaagcccgcccaggccgtgtactag

SEQ ID NO: 133395 - protein, 339 aa, Artificial Sequence
  derived and/or modified sequence
PHPKINVRVTTMDAELEFAIQPNTTGKQLFDQVVKTVGLREVWFFGLQYVDSKGYSTWLKLNKKVTQQDVKKENPLQFKFRAKFFPEDVSEELIQEITQRLFFLQVKEAILNDEIYCPPETAVLLASYAVQAKYGDYNKEIHKPGYLANDRLLPQRVLEQHKLTKEQWEERIQNWHEEHRGMLREDSMMEYLKIAQDLEMYGVNYFEIKNKKGTELWLGVDALGLNIYEHDDKLTPKIGFPWSEIRNISFNDKKFVIKPIDKKAPDFVFYAPRLRINKRILALCMGNHELYMRRRKPDTIEVQQMKAQAREEKHQKQLERSRLSKIKKKKRKKKKKKKK

SEQ ID NO: 133396 - DNA, 1752 bp, Artificial Sequence
  derived and/or modified sequence
atgcccaagcccatcaacgtgagagtgaccaccatggacgccgagctggagttcgccatccagcccaacaccaccggcaagcagctgttcgaccaggtggtgaagaccgtgggcctgagagaggtgtggttcttcggcctgcagtacgtggacagcaagggctacagcacctggctgaagctgaacaagaaggtgacccagcaggacgtgaagaaggagaaccccctgcagttcaagttcagagccaagttcttccccgaggacgtgagcgaggagctgatccaggagatcacccagagactgttcttcctgcaggtgaaggaggccatcctgaacgacgagatctactgcccccccgagaccgccgtgctgctggccagctacgccgtgcaggccaagtacggcgactacaacaaggagatccacaagcccggctacctggccaacgacagactgctgccccagagagtgctggagcagcacaagctgaccaaggagcagtgggaggagagaatccagaactggcacgaggagcacagaggcatgctgagagaggacagcatgatggagtacctgaagatcgcccaggacctggagatgtacggcgtgaactacttcgagatcaagaacaagaagggcaccgagctgtggctgggcgtggacgccctgggcctgaacatctacgagcacgacgacaagctgacccccaagatcggcttcccctggagcgagatcagaaacatcagcttcaacgacaagaagttcgtgatcaagcccatcgacaagaaggcccccgacttcgtgttctacgcccccagactgagaatcaacaagagaatcctggccctgtgcatgggcaaccacgagctgtacatgagaagaagaaagcccgacaccatcgaggtgcagcagatgaaggcccaggccagagaggagaagcaccagaagcagctggagagagcccagctggagaacgagaagaagaagagagagatcgccgagaaggagaaggagagaatcgagagagagaaggaggagctgatggagagactgaagcagatcgaggagcagaccatcaaggcccagaaggagctggaggagcagaccagaaaggccctggagctggaccaggagagaaagagagccaaggaggaggccgagagactggagaaggagagaagagccgccgaggaggccaagagcgccatcgccaagcaggccgccgaccagatgaagaaccaggagcagctggccgccgagctggccgagttcaccgccaagatcgccctgctggaggaggccaagaagaagaaggaggaggaggccaccgagtggcagcacaaggccttcgccgcccaggaggacctggagaagaccaaggaggagctgaagaccgtgatgagcgccccccccccccccccccccccccccgtgatcccccccaccgagaacgagcacgacgagcacgacgagaacaacgccgaggccagcgccgagctgagcaacgagggcgtgatgaaccacagaagcgaggaggagagagtgaccgagacccagaagaacgagagagtgaagaagcagctgcaggccctgagcagcgagctggcccaggccagagacgagaccaagaagacccagaacgacgtgctgcacgccgagaacgtgaaggccggcagagacaagtacaagaccctgagacagatcagacagggcaacaccaagcagagaatcgacgagttcgaggccatgtag

SEQ ID NO: 133397 - DNA, 1020 bp, Artificial Sequence
  derived and/or modified sequence
ccccaccccaagatcaacgtgagagtgaccaccatggacgccgagctggagttcgccatccagcccaacaccaccggcaagcagctgttcgaccaggtggtgaagaccgtgggcctgagagaggtgtggttcttcggcctgcagtacgtggacagcaagggctacagcacctggctgaagctgaacaagaaggtgacccagcaggacgtgaagaaggagaaccccctgcagttcaagttcagagccaagttcttccccgaggacgtgagcgaggagctgatccaggagatcacccagagactgttcttcctgcaggtgaaggaggccatcctgaacgacgagatctactgcccccccgagaccgccgtgctgctggccagctacgccgtgcaggccaagtacggcgactacaacaaggagatccacaagcccggctacctggccaacgacagactgctgccccagagagtgctggagcagcacaagctgaccaaggagcagtgggaggagagaatccagaactggcacgaggagcacagaggcatgctgagagaggacagcatgatggagtacctgaagatcgcccaggacctggagatgtacggcgtgaactacttcgagatcaagaacaagaagggcaccgagctgtggctgggcgtggacgccctgggcctgaacatctacgagcacgacgacaagctgacccccaagatcggcttcccctggagcgagatcagaaacatcagcttcaacgacaagaagttcgtgatcaagcccatcgacaagaaggcccccgacttcgtgttctacgcccccagactgagaatcaacaagagaatcctggccctgtgcatgggcaaccacgagctgtacatgagaagaagaaagcccgacaccatcgaggtgcagcagatgaaggcccaggccagagaggagaagcaccagaagcagctggagagaagcagactgagcaagatcaagaagaagaagagaaagaagaagaagaagaagaagaagtag

SEQ ID NO: 133398 - DNA, 1752 bp, Artificial Sequence
  derived and/or modified sequence
atgcctaagcccatcaatgtgagagtgacaacgatggatgccgaactcgagttcgccattcagcctaacactacaggcaagcaactgtttgaccaagtagttaagacagtcggccttagagaagtgtggttcttcggtctccagtacgttgacagcaaaggctactctacctggctaaagctcaataaaaaggttacccagcaggatgtgaagaaggagaatccactgcagttcaagttccgcgccaaattcttccctgaggacgtgtctgaagaactgatacaggaaatcacgcagcgacttttcttccttcaggtgaaggaagccatcttgaatgatgaaatctactgtcctcccgaaacagccgttctgcttgcctcttatgccgttcaagctaagtatggagactacaataaagagatacacaagcccggatacctggccaatgaccgactactccctcagagagttttggaacagcataagctgactaaagaacagtgggaagagagaattcagaattggcacgaggaacaccgggggatgctacgggaggatagcatgatggagtacttgaagattgcccaagatcttgaaatgtacggggttaattactttgagataaagaacaaaaaaggcaccgaactttggcttggcgtggacgcactgggcctgaacatctacgaacacgatgataagctgacccccaaaattgggttcccttggtcagagattaggaatatatcctttaatgataaaaagttcgtcatcaagccaatcgataaaaaagctcctgactttgttttctatgcaccccgattaaggatcaacaaacgcattctcgcactgtgtatgggcaatcacgagttgtatatgcgacggcgcaaacccgacacaattgaggtgcagcagatgaaagcccaagcccgcgaggagaagcatcagaagcagctggaacgggcacagctagaaaacgaaaagaaaaagagggagatcgctgagaaggaaaaagagaggatcgagagagaaaaagaggaacttatggagcgtctcaaacagattgaggaacaaaccatcaaggcgcaaaaagagctggaggagcagaccagaaaagccctcgagctagaccaggaaagaaaaagagcaaaggaagaagccgaaagattagagaaggaacgcagggccgccgaggaagccaagtccgctatcgccaagcaggccgctgatcagatgaagaaccaggaacagctggctgctgagctcgccgagtttactgcaaaaatcgcgctattagaggaagccaaaaagaaaaaggaggaagaagccactgagtggcagcataaggctttcgcagcccaagaagatctcgagaagacaaaggaagagctgaaaaccgtaatgtcagcccctcctccaccccctcccccacccgtgatacccccaacagagaatgaacacgatgagcacgacgagaataacgccgaagcttctgcagagctctctaacgagggcgtgatgaatcacaggagtgaagaggaaagagtgacggaaacgcagaaaaacgagagagtgaagaaacaactgcaggcattgtcatctgagttagcacaggcacgggacgagacaaaaaagacgcagaatgacgtgctgcatgctgagaatgttaaggccggcagggacaaatacaagactctccgacagataaggcagggtaacacaaagcagcgcatcgatgagttcgaggctatgtag

SEQ ID NO: 133399 - DNA, 1020 bp, Artificial Sequence
  derived and/or modified sequence
ccacaccctaagatcaatgtgcgcgtcaccactatggacgccgaactggaatttgccattcagccaaatacaacgggcaaacagctcttcgatcaggttgtgaagaccgtgggcctgagggaggtgtggttcttcggtctgcagtacgtggatagcaagggctactcaacctggctgaaactgaataagaaggtaacacagcaagacgtgaagaaggaaaaccctcttcagtttaaatttcgcgcgaagttttttcctgaagacgtttctgaggagctgatccaagagataacccagcggctctttttcctgcaggtcaaggaagcaattctcaacgacgaaatctactgccccccagagactgccgtgctgcttgcttcgtacgccgtccaggcgaagtatggagattataataaagagatccacaagcccggctatctagccaacgatagactgctgcctcaaagagttttggaacaacacaagctgaccaaagaacaatgggaggagaggatccagaactggcacgaggaacatagaggaatgctgcgagaagattcgatgatggaatatctgaagattgcccaggatctcgaaatgtacggggtgaattactttgagataaaaaacaaaaaaggtaccgaactttggctcggtgtggatgcactggggttgaacatctatgagcacgatgacaaattgacaccaaaaattgggtttccgtggagcgaaatacgtaacatcagcttcaacgataagaagtttgttataaaaccaatcgataaaaaggctcctgactttgtattctacgcacctaggctcagaattaacaaacggatattggctctgtgcatggggaatcacgagctttacatgcgtcgcaggaaaccagataccattgaagtgcaacagatgaaggcacaagctcgggaggaaaaacaccaaaagcagctcgaacgcagtcgactttccaagatcaaaaaaaaaaaacggaaaaagaaaaaaaaaaagaagaagtag

SEQ ID NO: 133400 - DNA, 1752 bp, Artificial Sequence
  derived and/or modified sequence
atgcccaagcccatcaacgtgcgggtgaccaccatggatgctgagctggagtttgccatccagcccaacaccaccgggaagcagctgtttgaccaggtggtgaagacagtgggcctgcgggaggtgtggttcttcggcctgcagtatgtggacagcaagggctacagcacctggctgaagctgaacaagaaggtgacccagcaggatgtgaagaaggagaaccccctgcagttcaagttccgggccaagttcttcccagaagatgtgtctgaggagctgatccaggagatcacccagaggctcttcttcctgcaggtgaaggaggccatcctgaatgatgagatctactgccccccagagacagctgtgctgctggccagctatgctgtgcaggccaagtacggggactacaacaaggagatccacaagccaggctacctggccaatgaccggctgctgccccagagggtgctggagcagcacaagctgaccaaggagcagtgggaggagcgcatccagaactggcatgaggagcaccggggcatgctgagagaagattccatgatggagtacctgaagatcgcccaggacctggagatgtatggagtgaactactttgagatcaagaacaagaagggcacagagctgtggctgggcgtggatgccctgggcctgaacatctatgaacatgatgacaagctgacccccaagattggcttcccctggagcgagatccggaacatctccttcaatgacaagaagtttgtgatcaagcccatcgacaagaaggccccagactttgtgttctacgccccccggctgcgcatcaacaagaggatcctggccctgtgcatgggcaaccacgagctgtacatgagaagaaggaagccagacaccatcgaggtgcagcagatgaaggcccaggcccgggaggagaagcaccagaagcagctggagcgggcccagctggagaatgagaagaagaagcgggagattgctgagaaggagaaggagcgcatcgagcgggagaaggaggagctgatggagcggctgaagcagatcgaggagcagaccatcaaggcccagaaggagctggaggagcagaccaggaaggccctggagctggaccaggagaggaagagggccaaggaggaggccgagcggctggagaaggagaggagagctgctgaggaggccaagagcgccatcgccaagcaggccgctgaccagatgaagaaccaggagcagctggccgctgagctggccgagttcaccgccaagatcgccctgctggaggaggccaagaagaagaaggaggaggaggccacagagtggcagcacaaggcctttgctgcccaggaggacctggagaagaccaaggaggagctgaagacagtgatgtctgcccctcctcctcctcctcctcctcctgtgatccccccaacagaaaatgaacatgatgaacatgatgaaaataatgctgaggccagcgctgagctgagcaatgaaggagtgatgaaccacaggtctgaggaggagcgggtgacagagacccagaagaatgaaagagtgaagaagcagctgcaggccctgagcagcgagctggcccaggccagagatgagaccaagaagacccagaatgatgtgctgcacgcagaaaatgtgaaggccggccgggacaagtacaagaccctgcggcagatccggcagggcaacaccaagcagagaattgatgaatttgaggccatgtag

SEQ ID NO: 133401 - DNA, 1020 bp, Artificial Sequence
  derived and/or modified sequence
ccccaccccaagatcaacgtgcgggtgaccaccatggatgctgagctggagtttgccatccagcccaacaccaccgggaagcagctgtttgaccaggtggtgaagacagtgggcctgcgggaggtgtggttcttcggcctgcagtatgtggacagcaagggctacagcacctggctgaagctgaacaagaaggtgacccagcaggatgtgaagaaggagaaccccctgcagttcaagttccgggccaagttcttcccagaagatgtgtctgaggagctgatccaggagatcacccagaggctcttcttcctgcaggtgaaggaggccatcctgaatgatgagatctactgccccccagagacagctgtgctgctggccagctatgctgtgcaggccaagtacggggactacaacaaggagatccacaagccaggctacctggccaatgaccggctgctgccccagagggtgctggagcagcacaagctgaccaaggagcagtgggaggagcgcatccagaactggcatgaggagcaccggggcatgctgagagaagattccatgatggagtacctgaagatcgcccaggacctggagatgtatggagtgaactactttgagatcaagaacaagaagggcacagagctgtggctgggcgtggatgccctgggcctgaacatctatgaacatgatgacaagctgacccccaagattggcttcccctggagcgagatccggaacatctccttcaatgacaagaagtttgtgatcaagcccatcgacaagaaggccccagactttgtgttctacgccccccggctgcgcatcaacaagaggatcctggccctgtgcatgggcaaccacgagctgtacatgagaagaaggaagccagacaccatcgaggtgcagcagatgaaggcccaggcccgggaggagaagcaccagaagcagctggagaggagccggctgagcaagatcaagaagaagaagaggaagaagaagaagaagaagaagaagtag

SEQ ID NO: 133402 - DNA, 1752 bp, Artificial Sequence
  derived and/or modified sequence
atgcccaagcccatcaacgtgcgggtgaccaccatggacgccgagctcgaatttgccatacagcctaataccacggggaaacaactgttcgatcaggtcgtgaaaactgtgggcttaagagaagtgtggttctttggcttacagtacgtggatagtaaagggtactccacctggctgaagctaaacaaaaaggtgacgcagcaagacgtcaaaaaggaaaaccccttacaattcaaatttagagccaaattctttccagaagatgtgagcgaagaattaatccaggagataacacagcgcctgttcttcctgcaggtcaaggaggcgatactgaacgacgaaatctactgccccccagaaacagccgtgctgctggcttcttacgctgtgcaggccaagtacggcgattacaacaaagagattcataagcccggctacctcgccaacgacaggcttctgccccagcgggtgctggagcagcacaagctgaccaaggaacagtgggaggagagaatccagaactggcacgaggagcatcgtggtatgctcagagaggactctatgatggagtatctgaagatcgctcaggatctagaaatgtacggtgtgaattattttgaaatcaaaaataaaaaagggaccgagctgtggctgggcgtggatgctctgggcctgaacatatatgaacacgacgacaagttgactccgaaaatcggattcccgtggtcggaaattcggaatatctcctttaatgataaaaagtttgtcatcaagcccatcgataagaaggcccctgactttgtgttttatgcgccccgccttcgtatcaacaaacgcatcctcgccctttgcatgggtaaccacgagttatacatgcggcgtaggaaacccgataccatagaagtgcagcagatgaaggcccaggcccgtgaggaaaagcatcagaagcagctggagagagcacagctagaaaacgaaaagaaaaaaagagaaattgcagaaaaggaaaaagaaagaatcgaacgcgagaaagaagaactgatggagcgcctcaaacagatagaggagcaaacaataaaagcacagaaggaattagaagagcagacccgaaaagccctggagctcgaccaggagaggaagagagctaaagaggaggctgaacgactggaaaaggagagacgtgctgccgaggaggcaaagagcgcgatcgccaagcaagcggcggatcagatgaaaaaccaagagcagctcgccgcggagctcgccgagttcaccgctaagatagccttgctcgaagaagcaaaaaagaaaaaagaagaagaagccactgaatggcagcataaggcgttcgccgctcaggaagacctggaaaagaccaaagaggaactgaagaccgtaatgtctgcaccaccccctcccccaccgccccctgtcatcccgcctaccgagaatgagcatgacgaacacgacgagaacaacgccgaggcatcggcggaactgtccaatgagggtgtaatgaaccatagatctgaagaggaacgtgtgaccgagacccagaagaacgaaagggttaagaagcagctgcaggccctgtcttccgaactggcccaggcccgagacgagactaaaaagacgcagaatgatgtattgcacgccgaaaacgtgaaagcaggacgcgacaagtacaagaccttgcgacagatcaggcagggaaataccaaacagaggattgatgagtttgaggccatgtag

SEQ ID NO: 133403 - DNA, 1020 bp, Artificial Sequence
  derived and/or modified sequence
ccccaccccaagatcaacgtgcgggtgaccaccatggacgccgagctggaattcgccatccagcctaacactactggtaagcaactgttcgaccaggtcgtgaagaccgtgggacttagggaagtctggttctttggcttacaatacgtcgatagtaaggggtatagcacatggctgaagttgaacaaaaaggtaacgcagcaggatgtgaagaaagagaacccgttgcaattcaaatttcgggccaaattctttccagaagacgtgtccgaggagctgatccaggagatcacccagaggctgttcttccttcaggtgaaagaggccattctgaacgatgagatatattgccctcctgaaactgccgttttgctcgcttcatatgccgtccaggctaagtatggggactataataaagaaattcataaacccgggtatctagcaaatgataggctactcccacagagggtactcgagcaacacaaactgaccaaagagcagtgggaggaacgcatccagaattggcacgaagaacaccggggcatgctcagagaggattcaatgatggaatatttgaaaatagctcaggacctggagatgtacggggtgaactactttgagattaagaacaaaaagggaactgagctgtggttgggagtggatgcacttggcctgaatatctatgagcacgatgacaaattaaccccaaaaatcgggtttccttggagcgagattcggaatattagctttaatgacaagaagtttgtgatcaaacctatcgataaaaaagctccagatttcgtgttctacgctccacgcctccgcattaacaaaaggattctggctctctgtatggggaatcacgaattgtatatgagacggcggaagccagacactatcgaagttcagcaaatgaaggctcaggcacgggaagagaaacatcagaagcagctggagagatcccgcctaagcaagattaagaagaagaagcgaaaaaaaaagaaaaagaaaaagaagtag

SEQ ID NO: 133404 - DNA, 1752 bp, Artificial Sequence
  derived and/or modified sequence
atgcctaaacctatcaatgtcagagttaccacaatggatgcggaattagaattcgcaatccagcctaatacaacaggaaaacagctgtttgaccaagtcgtgaaaactgtgggactacgtgaggtgtggttttttggactgcaatacgtcgatagcaaagggtactctacatggctgaagctgaacaagaaggttacacagcaggacgtcaaaaaggaaaacccactccagttcaagttccgggcaaagtttttcccagaagacgtgagtgaggaactcattcaggaaatcacacagaggcttttcttcctccaggttaaagaagcgattctgaatgatgaaatttattgcccccctgagaccgctgtacttctcgccagctacgcagtgcaggcgaagtatggagactacaacaaggaaattcacaaacctggatatctggccaatgatcgtctcttaccccagcgagtgctcgaacagcacaaattaaccaaggagcagtgggaggaaagaatccagaactggcatgaggaacacaggggcatgctgagggaagactctatgatggaatatcttaaaatcgcccaggacttagaaatgtacggcgtcaactatttcgaaataaagaacaaaaaagggaccgaactatggctgggtgtggatgccctggggctcaatatctacgagcatgatgataagctcacaccaaaaataggcttcccttggtccgaaatacgaaatataagtttcaacgacaagaagttcgtaataaaaccaattgataaaaaggccccagactttgtcttttatgctcccaggctgagaatcaacaagagaatactggccctctgcatggggaaccatgaactctatatgagacgtcgaaaaccagacaccattgaggtgcagcaaatgaaagcccaggcacgcgaagagaaacatcagaaacagcttgagcgggcacaacttgaaaacgaaaagaaaaaacgcgagattgcggagaaggagaaagaacgaattgaaagggaaaaagaggaactgatggagaggctcaagcagattgaagagcagaccattaaagcacaaaaagaattggaggagcagacaagaaaggcattggaactggatcaggaaaggaaaagggccaaggaagaggctgaacgactggagaaagagaggagagccgctgaggaggctaaaagtgccatagccaagcaggcggctgaccagatgaagaatcaggagcagcttgctgccgagctggccgagtttaccgcaaaaattgcactgctggaggaggcaaagaagaaaaaggaggaggaggccaccgagtggcaacacaaagcttttgctgctcaggaagacttagaaaagacaaaggaggagttaaaaaccgtgatgagtgcccctccacctcccccacctcccccagtgattccacctactgagaatgaacatgacgagcacgatgaaaacaacgccgaggccagcgcagagctttctaatgagggcgtgatgaaccaccggtctgaggaagagcgggtaacagagacgcagaagaatgaaagggtaaagaaacagctccaggcactgagtagtgagctcgcacaggccagagacgagaccaagaagacgcagaacgacgtgctgcatgctgagaatgttaaagctggcagagataaatacaagacactacggcagattagacaggggaataccaagcaaaggatcgacgagttcgaagctatgtag

SEQ ID NO: 133405 - DNA, 1020 bp, Artificial Sequence
  derived and/or modified sequence
ccccaccccaagattaacgttagagtgacaacaatggacgcagaattggagttcgctatccagcccaacactaccggaaagcagctgtttgaccaggttgtgaagacagtgggtttgagggaggtatggtttttcgggctgcagtacgtcgattctaaaggttactcaacttggcttaaactgaataagaaggtgacccagcaggatgttaagaaggaaaatcccctccagttcaagttcagagccaaattctttccagaggacgttagcgaagagttgatccaagaaatcacccagaggctgttctttctgcaggttaaggaggccatactgaacgatgaaatatattgccctccagaaacagccgtgctattagcctcgtatgcagtgcaggcgaaatatggggattataataaagagatccacaagcctggctatctggctaatgaccggctcctcccccagagggtcctggaacaacacaaattaacgaaggaacaatgggaggagcgtatccagaattggcatgaagagcaccgtggcatgctcagggaagacagcatgatggagtacctgaaaatcgctcaggatctggaaatgtacggcgtgaactattttgaaataaagaataaaaaaggaaccgaactgtggcttggagtggatgcccttgggctgaatatttacgaacacgatgataagctgacaccaaaaatcgggttcccctggtctgaaatccgaaacataagttttaacgacaaaaagttcgtgataaaacctatcgataaaaaagcacccgactttgtcttttatgcccctcgactccggattaacaagcggattctggcactctgcatgggaaatcatgaattgtatatgcgacgccgtaaacctgatactattgaggtccagcagatgaaggctcaagccagagaagagaagcatcagaaacagttggagcgctcccgcctgagtaagatcaagaagaaaaagaggaagaagaagaaaaaaaagaagaagtag

SEQ ID NO: 133406 - DNA, 4491 bp, Artificial Sequence
  derived and/or modified sequence
agcggcggcgttggcgctcagtccgcggcgcgaggacggccggccggcagggggaggcgggggggcgccgggcagccccgccttttcccgcggaggcgccgagcggccatattgcggagctgtctgcggtggcggcggcgcctctcgtctcccgcgggccagcgctcgcaccaccgcttctccctccctgtcgcagccgcgccgccgcgcagcgccccagccacacgccggcgggcagaagccgcccgctctccggaaagtgataacagaattcattgaagtggagaatttttaaagaaggtaacaaaaagagaaagaaaatgccgaaaccaatcaacgtaagagtaactacaatggatgctgagctggaatttgccattcagcccaatacaactggcaaacaactttttgaccaggtggtgaaaacagttggtttgcgtgaggtctggttttttgggctgcagtatgtagacagcaaaggttattctacatggcttaaactaaataaaaaggtaacacagcaggatgttaaaaaagagaatcctttacagttcaagtttagagctaaattctttcctgaagatgtttctgaggaattaattcaagaaataacccagagactcttcttcttgcaagttaaagaagccatcttaaatgatgagatatattgcccgccagaaactgcagttcttttggcttcctatgctgtccaagccaagtatggagattacaataaagagattcataagccaggctacctggctaatgatagactcctaccccagcgtgtattggaacaacacaaactaacaaaagaacagtgggaagaaagaatacagaactggcatgaagaacatagaggaatgttaagggaggattctatgatggaatacctgaagattgcacaagatctagaaatgtatggagtcaactattttgaaataaaaaataaaaaaggaactgaattgtggctaggtgttgatgctttgggtctgaatatttatgagcatgacgacaagttaacacctaaaattggttttccctggagtgaaatcagaaatatttcatttaatgacaaaaaatttgttataaagccaatcgacaaaaaggcacctgattttgtgttttatgcacctcgtctgagaatcaataagcggattttggccttatgtatgggaaaccatgaactatacatgcgaagaaggaagcctgatactattgaagtacaacagatgaaggctcaggctagggaggagaaacatcagaagcagttggaaagggcacaattagagaatgaaaagaagaaaagagaaatagcagaaaaggaaaaggaaagaatagaacgtgaaaaggaagagctaatggaacgtctaaaacaaattgaagagcagacaattaaagctcagaaagaactagaagaacagactcgaaaagctctagaactggatcaagaacgaaaacgagcaaaagaagaagcagaacgacttgaaaaggagcgtcgagctgctgaagaggcaaagtctgccatagcaaaacaagctgccgaccagatgaagaatcaggagcagctagcagcagaacttgctgaattcactgccaagattgcacttctagaggaagccaagaagaaaaaggaagaggaagctactgagtggcaacacaaagcttttgcagcccaggaagacttggaaaagaccaaagaagagttaaaaactgtgatgtctgccccccctccacctccaccaccaccagtcattcctccaacagaaaacgaacatgatgaacacgatgagaataatgctgaagctagtgctgaattatcaaatgaaggggtaatgaaccatagaagcgaggaagaacgtgtaaccgaaacacagaaaaatgagcgtgttaagaagcaacttcaggcattaagttcagaattagcccaagccagagatgaaaccaagaaaacacaaaatgatgttcttcatgctgagaatgttaaagcaggccgtgataagtacaagactctgcgacagattcgacaaggcaatacaaagcagcgtatcgatgagtttgaagcaatgtgagagctgttattttgcatatatgttcttcataagctgaaccaccaacagagaaaagcaggcctttgcagatatgatggaatgcatcccaccttgccaaagcacttacaccagtttgactgtgctagctaaaagacaaatttaaggggagctcttcaacattaaggcagtatgatatcatgcttggttttcttttttcttttggtccagggaatggagaatggtgttccattgcctcttttcacattttttttctttttcttttttttttctgttgaagattaacactaattatcacgtctgacaaatgtgtatgtgtggtttcagttctgtgtacattttaaaggataatggtgaacattttaatgggtttcccttgccctttccatatttaacctatttccacattctctctcactcacattttctcagtgtgcccttctcttatctgccatgtccatagccataattccaccatcatacagatcaggcagtgtttaaaatgatggtaggtagcacagtggacagtctttgatcatcatgtagaatatggctatgaatcaggaaagagattagaacatttaataatgtatgtacagctggtgcttagtttttttttaatctaaatttaattaccttattggatatttgatatttggttatttaatcacagtcatctttaacagcttacactgattggtgttttatctcctgtgatcctttgatggctttttttgcctaccatttcacagaggtttagacagcagtagtagctccctaggagagtttactgatgaaacagcctctgcaagattttaaaagttttgttcttttatagactgatttagaaaaacaaatgattagttaaaaaaagaaaatatacatttgttggtaactaatgttattttttaaaacctggaccttttctggaagggcagcatataaaaacatcagtcccgaggaggggacaacaatactacctcactactacatctgtgatgactggttgttcaaacacaatggagtgtgtaaggtatatgttttataattcataaccatagcctcgatcatcaagaaatactttcgaaatttcattttccttcagaatatcttaagagtgctaaatttttaactgcctttttgtcgagtcaaactgtgggattctgatttgtattaaaattgtaagctcctcactggtatactatcatcctggaggggtgttgtatggctgagcaagagagagagagaatgagagagagactgtgtgtgtgtgtgtgtgtgtgtgtgtgtgtactctgtgtgtgtatgagagagagaaatgctaaccttgtagcatgtgaagaatgtctgtaccttgatacgatagttacataatcagtatatttggtttctagatcactgtgcttattttgtttcaatctctgactaaaaatacttaaatttggtttgttaattcttattttagaaattataattttagtttatattaatttcggttatagcttactgaagaaatctttccagttagaaggaggttctaatattcacatgttctaatactttgtttattgtaaaacagctaaatttggagatacgtaaagccttgttttctctgtgtggttcagctactttccatttggtattacacagtcaaatttacatttatctattaaaattgccattttattaaacattttcatgcacagtagattcaagttgtgtctgaaaatatctcttgtgcttttttgattttgctgactttaaaaggattaatctgggcagacattatgtaaaagaaaggttgcgtttaatatattttttgaactttgtaggacaaaacatagctggttaaccttgaagtgactgttgtaccatggttgtgcacatgcttcagaatcctatggaagagaatattcctacttgcagtacatcaaaggaatggatggtggaccctactattcatgttttgagacataaatgttcactttaaagcaattgcataatagataaaaacctgaactttcattggatttttgttaattttcctcattttgaattatgtgcactaccatagctacatcagtttgatacagtattgaaaaattatcagttatattttgctgtttatgatctatttgtagattaggattaaaatggatttaatccatttttaaggctgtgtgaatttttctaaacaagaaccatttgcaatatggatttcttagagattaaaccaattataacttattagcagtcgcgagcacatgttcatatagtcaatgtaaaaatacactaatgagtatttggtaaatcccagtaggcttttaccattagcataattttgtgttgtacaattaagttacaattacatctctaattttggataatattcattggttaacaataaagtgacaaaagctca

SEQ ID NO: 133407 - DNA, 1017 bp, Artificial Sequence
  derived and/or modified sequence
ccacacccaaagatcaacgtaagagtaactacaatggatgctgagctggaatttgccattcagcccaatacaactggcaaacaactttttgaccaggtggtgaaaacagttggtttgcgtgaggtctggttttttgggctgcagtatgtagacagcaaaggttattctacatggcttaaactaaataaaaaggtaacacagcaggatgttaaaaaagagaatcctttacagttcaagtttagagctaaattctttcctgaagatgtttctgaggaattaattcaagaaataacccagagactcttcttcttgcaagttaaagaagccatcttaaatgatgagatatattgcccgccagaaactgcagttcttttggcttcctatgctgtccaagccaagtatggagattacaataaagagattcataagccaggctacctggctaatgatagactcctaccccagcgtgtattggaacaacacaaactaacaaaagaacagtgggaagaaagaatacagaactggcatgaagaacatagaggaatgttaagggaggattctatgatggaatacctgaagattgcacaagatctagaaatgtatggagtcaactattttgaaataaaaaataaaaaaggaactgaattgtggctaggtgttgatgctttgggtctgaatatttatgagcatgacgacaagttaacacctaaaattggttttccctggagtgaaatcagaaatatttcatttaatgacaaaaaatttgttataaagccaatcgacaaaaaggcacctgattttgtgttttatgcacctcgtctgagaatcaataagcggattttggccttatgtatgggaaaccatgaactatacatgcgaagaaggaagcctgatactattgaagtacaacagatgaaggctcaggctagggaggagaaacatcagaagcagttggaaaggagtaggctatctaaaataaaaaaaaaaaaaagaaaaaagaaaaagaaaaagaaaaag

SEQ ID NO: 133408 - protein, 619 aa, Artificial Sequence
  derived and/or modified sequence
MASGAYNPYIEIIEQPRQRGMRFRYKCEGRSAGSIPGEHSTDNNRTYPSIQIMNYYGKGKVRITLVTKNDPYKPHPHDLVGKDCRDGYYEAEFGQERRPLFFQNLGIRCVKKKEVKEAIITRIKAGINPFNVPEKQLNDIEDCDLNVVRLCFQVFLPDEHGNLTTALPPVVSNPIYDNRAPNTAELRICRVNKNCGSVRGGDEIFLLCDKVQKDDIEVRFVLNDWEAKGIFSQADVHRQVAIVFKTPPYCKAITEPVTVKMQLRRPSDQEVSESMDFRYLPDEKDTYGNKAKKQKTTLLFQKLCQDHVETGFRHVDQDGLELLTSGDPPTLASQSAGITVNFPERPRPGLLGSIGEGRYFKKEPNLFSHDAVVREMPTGVSSQAESYYPSPGPISSGLSHHASMAPLPSSSWSSVAHPTPRSGNTNPLSSFSTRTLPSNSQGIPPFLRIPVGNDLNASNACIYNNADDIVGMEASSMPSADLYGISDPNMLSNCSVNMMTTSSDSMGETDNPRLLSMNLENPSCNSVLDPRDLRQLHQMSSSSMSAGANSNTTVFVSQSDAFEGSDFSCADNSMINESGPSNSTNPNSHGFVQDSQYSGIGSMQNEQLSDSFPYEFFQV

SEQ ID NO: 133409 - DNA, 2592 bp, Artificial Sequence
  derived and/or modified sequence
ggtggacggcgacgctgggtgacccggggtgcaagaattcaggggttgggaaggtgtgagccgcaaacccagcggagggcgggaagaaggaggaggcctctagggtggtcgggggactgggggccccgccggcagaggtccctcggcctcctgactgactgactgcggccgcctccggccaggacgctgggagctgcctgcgggaaggtgcggggagcggagccatggcctccggtgcgtataacccgtatatagagataattgaacaacccaggcagaggggaatgcgttttagatacaaatgtgaagggcgatcagcaggcagcattccaggggagcacagcacagacaacaaccgaacatacccttctatccagattatgaactattatggaaaaggaaaagtgagaattacattagtaacaaagaatgacccatataaacctcatcctcatgatttagttggaaaagactgcagagacggctactatgaagcagaatttggacaagaacgcagacctttgtttttccaaaatttgggtattcgatgtgtgaagaaaaaagaagtaaaagaagctattattacaagaataaaggcaggaatcaatccattcaatgtccctgaaaaacagctgaatgatattgaagattgtgacctcaatgtggtgagactgtgttttcaagtttttctccctgatgaacatggtaatttgacgactgctcttcctcctgttgtctcgaacccaatttatgacaaccgtgctccaaatactgcagaattaaggatttgtcgtgtaaacaagaattgtggaagtgtcagaggaggagatgaaatatttctactttgtgacaaagttcagaaagatgacatagaagttcgttttgtgttgaacgattgggaagcaaaaggcatcttttcacaagctgatgtacaccgtcaagtagccattgttttcaaaactccaccatattgcaaagctatcacagaacccgtaacagtaaaaatgcagttgcggagaccttctgaccaggaagttagtgaatctatggattttagatatctgccagatgaaaaagatacttacggcaataaagcaaagaaacaaaagacaactctgcttttccagaaactgtgccaggatcacgtagaaacagggtttcgccatgttgaccaggatggtcttgaactcctgacatcaggtgatccacccaccttggcctcccaaagtgctgggattacagttaattttcctgagagaccaagacctggtctcctcggttcaattggagaaggaagatacttcaaaaaagaaccaaacttgttttctcatgatgcagttgtgagagaaatgcctacaggggtttcaagtcaagcagaatcctactatccctcacctgggcccatctcaagtggattgtcacatcatgcctcaatggcacctctgccttcttcaagctggtcatcagtggcccaccccaccccacgctcaggcaatacaaacccactgagtagtttttcaacaaggacacttccttctaattcgcaaggtatcccaccattcctgagaatacctgttgggaatgatttaaatgcttctaatgcttgcatttacaacaatgccgatgacatagtcggaatggaagcgtcatccatgccatcagcagatttatatggtatttctgatcccaacatgctgtctaattgttctgtgaatatgatgacaaccagcagtgacagcatgggagagactgataatccaagacttctgagcatgaatcttgaaaacccctcatgtaattcagtgttagacccaagagacttgagacagctccatcagatgtcctcttccagtatgtcagcaggcgccaattccaatactactgtttttgtttcacaatcagatgcatttgagggatctgacttcagttgtgcagataacagcatgataaatgagtcgggaccatcaaacagtactaatccaaacagtcatggttttgttcaagatagtcagtattcaggtattggcagtatgcaaaatgagcaattgagtgactcctttccatatgaattttttcaagtataacttgcaagatttaaatccttttaaatcttgataccacctatatagatgcagcattttgtatttgtctaactggggatataatactatatttatactgtatatataatactgactgagaatataatactgtatttgagaatataaaaaacttttttcagggaagaagcatacaactttggacatagcgaatacaaaattggaagctgtcataaaaagacaactcagaggccaggcgcaggggctcacacctgtaatcctagcactttgggaggccaaggcgggtggatcacttgagaccaggaattcgagaccagcctggccaacatggtgaaaccccgtctctactaaaaatacaaaaattagctgagcatggtggtacgtgcctgtactgtcagctacttgggaggctgaggcacaataattgtttgaacccaggaagcagaggttgcagtgagctgagatcacaccaccgcactccagcctgggtgacagagtgagactctgtctc

SEQ ID NO: 133410 - DNA, 1860 bp, Artificial Sequence
  derived and/or modified sequence
atggccagcggcgcctacaacccctacatcgagatcatcgagcagcccagacagagaggcatgagattcagatacaagtgcgagggcagaagcgccggcagcatccccggcgagcacagcaccgacaacaacagaacctaccccagcatccagatcatgaactactacggcaagggcaaggtgagaatcaccctggtgaccaagaacgacccctacaagccccacccccacgacctggtgggcaaggactgcagagacggctactacgaggccgagttcggccaggagagaagacccctgttcttccagaacctgggcatcagatgcgtgaagaagaaggaggtgaaggaggccatcatcaccagaatcaaggccggcatcaaccccttcaacgtgcccgagaagcagctgaacgacatcgaggactgcgacctgaacgtggtgagactgtgcttccaggtgttcctgcccgacgagcacggcaacctgaccaccgccctgccccccgtggtgagcaaccccatctacgacaacagagcccccaacaccgccgagctgagaatctgcagagtgaacaagaactgcggcagcgtgagaggcggcgacgagatcttcctgctgtgcgacaaggtgcagaaggacgacatcgaggtgagattcgtgctgaacgactgggaggccaagggcatcttcagccaggccgacgtgcacagacaggtggccatcgtgttcaagacccccccctactgcaaggccatcaccgagcccgtgaccgtgaagatgcagctgagaagacccagcgaccaggaggtgagcgagagcatggacttcagatacctgcccgacgagaaggacacctacggcaacaaggccaagaagcagaagaccaccctgctgttccagaagctgtgccaggaccacgtggagaccggcttcagacacgtggaccaggacggcctggagctgctgaccagcggcgacccccccaccctggccagccagagcgccggcatcaccgtgaacttccccgagagacccagacccggcctgctgggcagcatcggcgagggcagatacttcaagaaggagcccaacctgttcagccacgacgccgtggtgagagagatgcccaccggcgtgagcagccaggccgagagctactaccccagccccggccccatcagcagcggcctgagccaccacgccagcatggcccccctgcccagcagcagctggagcagcgtggcccaccccacccccagaagcggcaacaccaaccccctgagcagcttcagcaccagaaccctgcccagcaacagccagggcatcccccccttcctgagaatccccgtgggcaacgacctgaacgccagcaacgcctgcatctacaacaacgccgacgacatcgtgggcatggaggccagcagcatgcccagcgccgacctgtacggcatcagcgaccccaacatgctgagcaactgcagcgtgaacatgatgaccaccagcagcgacagcatgggcgagaccgacaaccccagactgctgagcatgaacctggagaaccccagctgcaacagcgtgctggaccccagagacctgagacagctgcaccagatgagcagcagcagcatgagcgccggcgccaacagcaacaccaccgtgttcgtgagccagagcgacgccttcgagggcagcgacttcagctgcgccgacaacagcatgatcaacgagagcggccccagcaacagcaccaaccccaacagccacggcttcgtgcaggacagccagtacagcggcatcggcagcatgcagaacgagcagctgagcgacagcttcccctacgagttcttccaggtgtag

SEQ ID NO: 133411 - DNA, 1860 bp, Artificial Sequence
  derived and/or modified sequence
atggcaagcggtgcttacaacccctacatcgaaatcattgagcagccccgccagcggggaatgcggtttcggtataagtgtgaggggcgatctgcgggctccatacctggcgagcatagtaccgataacaataggacctacccatcaatccaaatcatgaattactatgggaaaggcaaggtccgtattacattggttaccaagaatgacccatataagcctcatcctcacgatctagtgggtaaggactgtcgcgacggatactacgaggctgagttcggccaagaaaggcgacctctgttttttcaaaacttaggcattcgctgtgtaaagaaaaaagaggtgaaagaagcaattatcactcggatcaaggccggaattaaccctttcaatgtcccggagaagcagttgaatgatattgaagactgtgatttaaatgtcgtgagattgtgctttcaggtttttctgccggatgagcatggcaatctgacgactgctctgcctccagtggtgagtaatccaatctacgacaatagggcacctaataccgcagagttgagaatctgtcgggtgaataagaattgtggctcggtgaggggcggtgatgaaatctttcttctgtgtgacaaagtgcagaaagatgacatcgaagtgaggtttgttctgaacgattgggaagctaaaggaattttctcgcaggcagacgtgcatcggcaggttgcgatagtctttaagacaccaccctattgcaaagctattaccgagcccgtgacagtgaaaatgcaactcagaaggccatctgatcaggaggtgtctgagagcatggactttagatatctgcccgatgaaaaggacacttatggcaacaaagcgaaaaaacagaagacgactctcctttttcagaaattgtgccaagaccacgtggaaactggttttagacacgtggatcaggacggattggaactcctaacctctggagatcctcctacactggctagccagtccgccggaattacagtgaactttccagagaggccccgacccggactgcttggttccatcggcgaaggccgctatttcaagaaagaacctaacctgttcagtcacgatgcggtcgttcgcgagatgcctactggtgtgtcctctcaggccgaaagctattacccgtcgcccggccctatttcctccggtctcagccatcatgctagtatggccccgctgccctcatcatcttggtcttctgtggcacaccctaccccgagatctggaaataccaacccattatcaagctttagtacccggacgttgccctcaaactcccagggcattccacccttcctccgcattccggtgggcaacgacctaaacgccagcaacgcgtgcatttacaacaatgcagatgatatcgtcggaatggaagcctcatctatgccgtctgccgatctctatggaatcagcgatccaaacatgctgtctaactgcagtgtgaatatgatgacgacctcatctgactcaatgggcgagacggataatccaaggctcttgtcaatgaatcttgagaaccccagctgcaacagtgtcctagatcccagagatctacgtcagctgcaccagatgtcatccagctccatgtcagctggggctaattcaaatactaccgtgtttgtttcccagtccgacgcttttgaaggcagcgatttttcttgcgctgacaattcaatgatcaatgagtcgggaccttcaaactctaccaatcccaactcccacggatttgtacaagatagccaatactccggtatcggtagtatgcagaacgaacaactctctgattctttcccttacgaatttttccaagtttag

SEQ ID NO: 133412 - DNA, 1860 bp, Artificial Sequence
  derived and/or modified sequence
atggccagcggggcctacaacccctacatcgagatcatcgagcagccccggcagaggggcatgaggttccgctacaagtgtgagggccgctctgctggcagcatccctggagagcacagcacagacaacaacagaacctaccccagcatccagatcatgaactactacggcaagggcaaggtgcgcatcaccctggtgaccaagaatgacccctacaagccccacccccatgacctggtgggcaaggactgcagagatggctactatgaagctgagtttggccaggagcggcggcccctcttcttccagaacctgggcatccgctgtgtgaagaagaaggaggtgaaggaggccatcatcacccgcatcaaggccggcatcaaccccttcaacgtgcctgagaagcagctgaatgacatcgaggactgtgacctgaatgtggtgcggctgtgcttccaggtgttcctgcctgatgagcacggcaacctgaccacagccctgccccctgtggtgagcaaccccatctatgacaacagagcccccaacacagctgagctgcgcatctgccgggtgaacaagaactgtggctctgtgagaggaggagatgagatcttcctgctgtgtgacaaggtgcagaaggatgacatcgaggtgcgctttgtgctgaatgactgggaggccaagggcatcttcagccaggctgatgtgcaccggcaggtggccatcgtgttcaagaccccaccctactgcaaggccatcacagagcctgtgacagtgaagatgcagctgcggcggcccagcgaccaggaggtgtctgagagcatggacttccgctacctgcctgatgagaaggacacctacggcaacaaggccaagaagcagaagaccaccctgctcttccagaagctgtgccaggaccacgtggagaccggcttccgccacgtggaccaggacggcctggagctgctgaccagcggggacccccccaccctggccagccagagcgctggcatcaccgtgaacttccctgagcggccccggcccggcctgctgggcagcatcggggagggccgctacttcaagaaggagcccaacctcttcagccatgatgctgtggtgcgggagatgcccaccggggtgagcagccaggccgagagctactaccccagccctggccccatcagcagcggcctgagccaccacgcctccatggcccccctgcccagcagctcctggagctctgtggcccaccccacccccaggagcggcaacaccaaccccctgagcagcttcagcaccaggaccctgcccagcaacagccagggcatcccccccttcctgcgcatccctgtgggcaatgacctgaatgccagcaatgcctgcatctacaacaatgctgatgacatcgtgggcatggaggccagctccatgcccagcgctgacctgtatggcatcagtgaccccaacatgctgagcaactgcagcgtgaacatgatgaccaccagcagtgacagcatgggagaaacagacaacccccggctgctgtccatgaacctggagaaccccagctgcaacagcgtgctggacccccgggacctgcggcagctgcaccagatgagcagcagctccatgtctgctggggccaacagcaacaccaccgtgtttgtgtcccagagtgatgcctttgagggcagtgacttcagctgtgccgacaacagcatgatcaatgaaagtggccccagcaacagcaccaaccccaacagccacggctttgtgcaggacagccagtacagcggcatcggctccatgcagaatgagcagctgagtgacagcttcccctatgagttcttccaggtgtag

SEQ ID NO: 133413 - DNA, 1860 bp, Artificial Sequence
  derived and/or modified sequence
atggccagcggcgcctacaacccctacatcgagatcatcgagcagccacgtcagcgcggaatgaggttccgctataaatgcgaggggaggtcagctggcagcataccaggcgagcactccacggacaacaacaggacatacccctcgatccagatcatgaactattatggaaagggcaaggtgcgaattactctggttactaaaaatgacccttataaaccacacccccacgaccttgtgggcaaggattgcagggatgggtactatgaggctgaattcggccaggaacgtagacccctgttcttccagaatctgggaatccgttgcgtgaaaaagaaggaggtcaaggaagcgatcatcacacggatcaaagctggaataaatcctttcaatgttcctgagaagcagctgaatgatattgaggactgcgatttgaatgtcgtccggctctgttttcaagtattcttgccagatgagcatgggaatctgaccaccgcacttcccccagtggtgagtaaccccatttacgacaaccgggctcccaatactgccgaattacgaatctgcagggtgaataagaattgcggatcagttcgcgggggtgacgaaatctttcttttatgtgacaaggtccagaaagatgatatagaggtgcgtttcgtcctgaacgattgggaggcaaagggtatcttctcccaggcggacgtgcacagacaggttgcaattgtcttcaaaacccctccctactgcaaggctatcactgagcctgtgactgtcaaaatgcagctgaggcggcccagcgatcaggaagtctcagagtctatggactttcggtatctgcctgatgagaaagacacctatggcaataaggctaagaagcagaaaaccaccctgttgttccagaagttgtgccaggatcacgtggagactggcttccgccatgtggatcaagacggcctggaacttttaacctcaggcgaccccccaacacttgccagtcagagtgctggaattaccgtcaatttccctgaaaggccccggccagggcttctcgggagcataggggagggtcgctacttcaaaaaggaaccgaatttattttcccatgacgctgttgtgcgagaaatgccaacgggcgtaagctctcaggccgagagctactatccttcacctggccccattagcagcgggctgagccaccacgcttcaatggccccactgccatcttcctcgtggagctccgtggcccatcccacccctaggtccggaaacacaaaccctctgagcagtttcagtactagaaccctgccttccaacagccaggggatcccaccctttttgagaattccagtcggtaacgatctgaatgcttccaacgcatgtatttacaataatgctgacgatattgtgggaatggaagcttcctcaatgccctcagctgacctttacgggataagcgaccctaacatgctttctaactgctctgtcaatatgatgactacgtcaagcgatagcatgggagagaccgacaatccccgcctgttaagcatgaacctggaaaacccgagctgcaatagtgtgctggatccgcgcgatcttcggcaactccaccagatgagtagcagttctatgagtgctggggcgaactctaacaccactgtgttcgtttcgcagtctgacgccttcgagggcagcgacttttcttgtgcagacaatagcatgataaatgagagtggtccaagcaactctaccaaccctaactcccacggttttgtgcaggattcgcagtactccggaattggctcaatgcagaacgaacagctttccgacagttttccgtacgaattttttcaggtctag

SEQ ID NO: 133414 - DNA, 1860 bp, Artificial Sequence
  derived and/or modified sequence
atggccagcggtgcctacaatccgtatatcgagatcattgaacaaccccgtcagcggggaatgcgatttcgttacaagtgcgaaggtaggagcgcaggatccatccccggagagcactccacagacaacaacagaacttatcccagcattcagatcatgaactactacgggaagggaaaagtgcgcatcactctcgtcacaaaaaatgacccttacaagccacacccccacgacctggtgggcaaagactgtagggatggttattatgaagccgaatttggacaggaaagacggccactcttcttccagaatttgggcatacgctgtgtgaaaaaaaaggaggtgaaggaggctatcatcacccgcattaaagccggaattaacccatttaatgtgccagaaaagcaattgaacgatattgaggactgtgatctgaacgtggtcagactgtgttttcaggttttcttgccagacgagcatggcaatctcaccactgcgcttccgcctgtggtttccaacccaatctacgacaatcgcgctcctaataccgctgagcttcggatttgcagagtgaataagaactgcggtagcgttcgtgggggtgatgagatcttcctcctgtgcgataaggtgcagaaggacgatatagaggtccggttcgtgctgaacgactgggaagctaaaggaattttctcgcaggccgatgtgcaccgccaggtcgctatcgttttcaaaaccccaccgtactgcaaggctatcactgagcctgttacagtgaaaatgcagctaaggcggccttctgatcaggaagtgtccgaatcgatggattttcgctatctgccagatgagaaagatacatatggaaacaaagctaagaagcagaagacgacactactgtttcagaagctatgccaggaccacgtggagacagggttccggcacgtcgatcaggatgggctggagttactaacgagcggggacccccctacacttgccagccagagtgcgggaatcaccgtgaatttccccgagcggccaagacccggactgctgggcagtatcggggaaggtaggtactttaaaaaggagcccaaccttttttctcatgacgcggtcgtcagagagatgccaacaggcgtgtcttcccaggccgagagctactacccttctcccggtcccatttcctctgggctgagccaccatgcttctatggcccctctaccgtcttctagctggtcttccgtggctcaccccacccctcgctccgggaatactaatcccctgagtagcttttccaccaggacactgcccagtaattcacaaggcataccaccctttctgcgaatcccggtggggaatgacctgaacgctagcaatgcctgcatctacaataatgcggatgatattgtgggcatggaggcatcaagcatgccctccgctgacttgtacgggatttctgatcctaatatgctgtctaattgcagtgtaaacatgatgaccacctccagcgactctatgggtgagacagacaaccctagacttctaagcatgaatctggaaaatccgagttgcaactcagtcctagacccaagggacctgaggcaactccaccagatgagcagttcttcaatgtctgctggtgccaattccaacacgactgttttcgtgagccagtccgatgccttcgaaggctccgacttcagctgtgccgacaatagcatgatcaacgaatctggccctagtaattcaaccaacccaaactcacacggatttgtgcaggattcacaatacagcggaattggctctatgcaaaacgagcagttgagcgacagttttccttacgaattttttcaggtgtag

SEQ ID NO: 133415 - DNA, 3155 bp, Artificial Sequence
  derived and/or modified sequence
agccgcgggaaattcccctcccgccaggctgctcgcctctcggctgggccagcactcggctctccccgctccgccccctgcccctggctcccgtacggtggacggcgacgctgggtgacccggggtgcaagaattcaggggttgggaaggtgtgagccgcaaacccagcggagggcgggaagaaggaggaggcctctagggtggtcgggggactgggggccccgccggcagaggtccctcggcctcctgactgactgactgcggccgcctccggccaggacgctgggagctgcctgcgggaaggtgcggggagcggagccatggcctccggtgcgtataacccgtatatagagataattgaacaacccaggcagaggggaatgcgttttagatacaaatgtgaagggcgatcagcaggcagcattccaggggagcacagcacagacaacaaccgaacatacccttctatccagattatgaactattatggaaaaggaaaagtgagaattacattagtaacaaagaatgacccatataaacctcatcctcatgatttagttggaaaagactgcagagacggctactatgaagcagaatttggacaagaacgcagacctttgtttttccaaaatttgggtattcgatgtgtgaagaaaaaagaagtaaaagaagctattattacaagaataaaggcaggaatcaatccattcaatgtccctgaaaaacagctgaatgatattgaagattgtgacctcaatgtggtgagactgtgttttcaagtttttctccctgatgaacatggtaatttgacgactgctcttcctcctgttgtctcgaacccaatttatgacaaccgtgctccaaatactgcagaattaaggatttgtcgtgtaaacaagaattgtggaagtgtcagaggaggagatgaaatatttctactttgtgacaaagttcagaaagatgacatagaagttcgttttgtgttgaacgattgggaagcaaaaggcatcttttcacaagctgatgtacaccgtcaagtagccattgttttcaaaactccaccatattgcaaagctatcacagaacccgtaacagtaaaaatgcagttgcggagaccttctgaccaggaagttagtgaatctatggattttagatatctgccagatgaaaaagatacttacggcaataaagcaaagaaacaaaagacaactctgcttttccagaaactgtgccaggatcacgtagaaacagggtttcgccatgttgaccaggatggtcttgaactcctgacatcaggtgatccacccaccttggcctcccaaagtgctgggattacagttaattttcctgagagaccaagacctggtctcctcggttcaattggagaaggaagatacttcaaaaaagaaccaaacttgttttctcatgatgcagttgtgagagaaatgcctacaggggtttcaagtcaagcagaatcctactatccctcacctgggcccatctcaagtggattgtcacatcatgcctcaatggcacctctgccttcttcaagctggtcatcagtggcccaccccaccccacgctcaggcaatacaaacccactgagtagtttttcaacaaggacacttccttctaattcgcaaggtatcccaccattcctgagaatacctgttgggaatgatttaaatgcttctaatgcttgcatttacaacaatgccgatgacatagtcggaatggaagcgtcatccatgccatcagcagatttatatggtatttctgatcccaacatgctgtctaattgttctgtgaatatgatgacaaccagcagtgacagcatgggagagactgataatccaagacttctgagcatgaatcttgaaaacccctcatgtaattcagtgttagacccaagagacttgagacagctccatcagatgtcctcttccagtatgtcagcaggcgccaattccaatactactgtttttgtttcacaatcagatgcatttgagggatctgacttcagttgtgcagataacagcatgataaatgagtcgggaccatcaaacagtactaatccaaacagtcatggttttgttcaagatagtcagtattcaggtattggcagtatgcaaaatgagcaattgagtgactcctttccatatgaattttttcaagtataacttgcaagatttaaatccttttaaatcttgataccacctatatagatgcagcattttgtatttgtctaactggggatataatactatatttatactgtatatataatactgactgagaatataatactgtatttgagaatataaaaaacttttttcagggaagaagcatacaactttggacatagcgaatacaaaattggaagctgtcataaaaagacaactcagaggccaggcgcaggggctcacacctgtaatcctagcactttgggaggccaaggcgggtggatcacttgagaccaggaattcgagaccagcctggccaacatggtgaaaccccgtctctactaaaaatacaaaaattagctgagcatggtggtacgtgcctgtactgtcagctacttgggaggctgaggcacaataattgtttgaacccaggaagcagaggttgcagtgagctgagatcacaccaccgcactccagcctgggtgacagagtgagactctgtctcaaaaaaaaaaaaacaaaaaaaacacacttttttatatttctttttataatgttttaatgtattcttaaatttcaagcaaatttaagataaaacttgtaatggctatgccattgaaaaacttaattttttatttttgaggcccatgggccaaggtaacccctaaggggttttcttaggcttcttggagcttagatttgtatgtatatcaaaatgtctttaaaatgttaagttgggcagaaggcagttgaagtgagctttcaaggtatgggaggttttctacattttatactatttcaatctatgcctttaaagttgcttatgattttagctgtacactcattttttaaggggaagaagtttccttggaccattcgcctttcttagatgtcctcactccctgtgatctcataaaactgcctatttgacatctctatctagaaatctaattaaagctcacactcagcata

SEQ ID NO: 133416 - protein, 166 aa, Artificial Sequence
  derived and/or modified sequence
MAQTSSYFMLISCLMFLSQSQGQEAQTELPQARISCPEGTNAYRSYCYYFNEDRETWVDADLYCQNMNSGNLVSVLTQAEGAFVASLIKESGTDDFNVWIGLHDPKKNRRWHWSSGSLVSYKSWGIGAPSSVNPGYCVSLTSSTGFQKWKDVPCEDKFSFVCKFKN

SEQ ID NO: 133417 - DNA, 501 bp, Artificial Sequence
  derived and/or modified sequence
atggctcagacttcctcttacttcatgctaattagttgtctgatgttcctctcccagtcacagggccaagaagcccaaaccgaactgccacaagcgagaataagctgtcccgaaggcactaacgcctatcgcagctattgctactattttaacgaggaccgagaaacctgggtggacgccgacctttactgtcagaatatgaatagcggcaatctcgtctccgtccttacccaggcggagggggctttcgtggccagtctcattaaagaatcaggaactgacgacttcaacgtgtggattgggttacacgacccgaaaaagaacaggagatggcactggagtagcggctcactggtctcttataaatcttggggcattggagcccccagttccgttaatccaggctattgtgtctcactgacttcatctacaggctttcagaagtggaaagatgtaccctgcgaagacaagttttcctttgtgtgtaaatttaaaaactag

SEQ ID NO: 133418 - DNA, 501 bp, Artificial Sequence
  derived and/or modified sequence
atggcccagaccagcagctacttcatgctgatcagctgcctgatgttcctgagccagagccagggccaggaggcccagacagagctgccccaggcccgcatcagctgcccagagggcaccaatgcctaccgcagctactgctactacttcaatgaagatcgggagacctgggtggatgctgacctgtactgccagaacatgaacagcggcaacctggtgtctgtgctgacccaggccgagggcgcctttgtggccagcctcatcaaggagagcggcacagatgacttcaacgtgtggattggcctgcatgaccccaagaagaacagacgctggcactggagcagcggcagcctggtgtcctacaagtcctggggcatcggggcccccagctctgtgaaccctggctactgtgtgtccctgaccagcagcacaggcttccagaagtggaaggatgtgccctgtgaggacaagttctcctttgtgtgcaagttcaagaactag

SEQ ID NO: 133419 - DNA, 501 bp, Artificial Sequence
  derived and/or modified sequence
atggcccagaccagcagctacttcatgctgatcagctgcctgatgtttctgagtcagtcccagggccaggaagcccaaactgagttgccacaggcacgaattagctgccctgaaggtactaatgcttatcggtcctactgctactattttaatgaagacagagagacctgggtggacgctgatttgtattgtcagaatatgaattccggcaatctggtctccgtactgacacaggcagaaggtgccttcgtggcctccctgattaaggagtcaggtacagacgactttaatgtatggatcgggctgcatgaccctaagaaaaatagacgatggcactggtcaagcggttccctggtcagctataagtcctggggcatcggggcccctagctccgtcaatcccggctattgtgtgtcattgaccagcagcactggcttccagaagtggaaagatgtgccctgcgaagataagttcagcttcgtgtgtaagttcaaaaactag

SEQ ID NO: 133420 - DNA, 501 bp, Artificial Sequence
  derived and/or modified sequence
atggcccaaacttcttcttatttcatgctaataagttgcctgatgttcctgtctcagtcgcagggacaggaagctcagactgaactgccccaggcacggatcagctgccctgaggggacgaatgcctacagatcctattgctattacttcaatgaagatcgtgagacatgggtggatgctgatctttactgccaaaatatgaactcagggaatctcgtgtctgtgctgacacaggcggaaggtgcatttgtcgcctccctgattaaagagtccggtactgacgactttaatgtctggatcgggctgcatgaccctaagaagaaccggaggtggcactggagcagtggatcactggtgtcttacaagtcctggggaatcggcgcacctagttccgtgaatcctggttattgtgtttcgctgacgagcagcactggcttccagaagtggaaagacgtgccatgtgaagataagttctccttcgtctgtaagttcaagaactag

SEQ ID NO: 133421 - DNA, 808 bp, Artificial Sequence
  derived and/or modified sequence
gatataaagctcctacagctacctggcctgagaagccaactcagactcagccaacagagattgttgatttgcctcttaagcaagagattcattgcagctcagcatggctcagaccagctcatacttcatgctgatctcctgcctgatgtttctgtctcagagccaaggccaagaggcccagacagagttgccccaggcccggatcagctgcccagaaggcaccaatgcctatcgctcctactgctactactttaatgaagaccgtgagacctgggttgatgcagatctctattgccagaacatgaattcgggcaacctggtgtctgtgctcacccaggccgagggtgcctttgtggcctcactgattaaggagagtggcactgatgacttcaatgtctggattggcctccatgaccccaaaaagaaccgccgctggcactggagcagtgggtccctggtctcctacaagtcctggggcattggagccccaagcagtgttaatcctggctactgtgtgagcctgacctcaagcacaggattccagaaatggaaggatgtgccttgtgaagacaagttctcctttgtctgcaagttcaaaaactagaggcaactggaaaatacatgtctagaactgatccagcaattacaacggagtcaaaaattaaaccggaccatctctccaactcaactcaacctggacactctcttctctgctgagtttgccttgttaatcttcaatagttttacctaccccagtctttggaaccctaaataataaaaataaacatgtttccactattgtgctgtc

SEQ ID NO: 133422 - DNA, 501 bp, Artificial Sequence
  derived and/or modified sequence
atggcccagaccagcagctacttcatgctgatcagctgcctgatgttcctgagccagagccagggccaggaggcccagaccgagctgccccaggccagaatcagctgccccgagggcaccaacgcctacagaagctactgctactacttcaacgaggacagagagacctgggtggacgccgacctgtactgccagaacatgaacagcggcaacctggtgagcgtgctgacccaggccgagggcgccttcgtggccagcctgatcaaggagagcggcaccgacgacttcaacgtgtggatcggcctgcacgaccccaagaagaacagaagatggcactggagcagcggcagcctggtgagctacaagagctggggcatcggcgcccccagcagcgtgaaccccggctactgcgtgagcctgaccagcagcaccggcttccagaagtggaaggacgtgccctgcgaggacaagttcagcttcgtgtgcaagttcaagaactag

SEQ ID NO: 133423 - protein, 427 aa, Artificial Sequence
  derived and/or modified sequence
MSKGLPARQDMEKERETLQAWKERVGQELDRVVAFWMEHSHDQEHGGFFTCLGREGRVYDDLKYVWLQGRQVWMYCRLYRTFERFRHAQLLDAAKAGGEFLLRYARVAPPGKKCAFVLTRDGRPVKVQRTIFSECFYTMAMNELWRATGEVRYQTEAVEMMDQIVHWVQEDASGLGRPQLQGAPAAEPMAVPMMLLNLVEQLGEADEELAGKYAELGDWCARRILQHVQRDGQAVLENVSEGGKELPGCLGRQQNPGHTLEAGWFLLRHCIRKGDPELRAHVIDKFLLLPFHSGWDPDHGGLFYFQDADNFCPTQLEWAMKLWWPHSEAMIAFLMGYSDSGDPVLLRLFYQVAEYTFRQFRDPEYGEWFGYLSREGKVALSIKGGPFKGCFHVPRCLAMCEEMLGALLSRPAPAPSPAPTPACRGAE

SEQ ID NO: 133424 - protein, 254 aa, Artificial Sequence
  derived and/or modified sequence
MSKGLPARQDMEKERETLQAWKERVGQELDRVVAFWMEHSHDQEHGGFFTCLGREGRVYDDLKYVWLQGRQVWMYCRLYRTFERFRHAQLLDAAKAGGEFLLRYARVAPPGKKCAFVLTRDGRPVKVQRTIFSECFYTMAMNELWRATGEVRYQTEAVEMMDQIVHWVQEDASGLGRPQLQGAPAAEPMAVPMMLLNLVEQLGEADEELAGKYAELGDWCARRILQHVQATRWKPAGFCSVIAFGKATPNFEPT

SEQ ID NO: 133425 - DNA, 1284 bp, Artificial Sequence
  derived and/or modified sequence
atgtctaaagggctcccagccaggcaggatatggagaaggagcgcgaaactctgcaggcttggaaggaacgagtaggccaggagttagatagggttgtggccttttggatggagcattcacatgatcaggaacatgggggcttctttacatgtctcggcagggagggcagggtttatgacgatcttaaatacgtctggcttcaaggacgacaggtttggatgtactgccgcctgtacagaactttcgaacgctttaggcacgctcagctcctagatgctgcaaaagcagggggcgagttcttgctccggtatgcccgggtagcaccaccgggcaagaaatgtgcgttcgttctgacaagagacggccggcccgtaaaagttcaaaggacgattttctccgagtgcttttacactatggctatgaacgaactgtggcgagcaacaggagaggtaagatatcagacagaagccgtggaaatgatggaccagatcgtgcattgggttcaggaggacgcatctgggctgggaagaccgcagttgcagggtgcacctgcagctgagccaatggcagtgccaatgatgttgcttaacttggtggagcagctgggtgaagcagatgaggaattggctggtaagtacgcggagctcggcgactggtgtgcgcggcgtatcctccagcacgtccaaagagacgggcaggctgttcttgaaaatgtctccgaagggggaaaggagctgccaggatgtctcgggcgccagcagaatcctggacataccctggaagccggctggtttctgctgagacactgcattcgtaaaggggatccggagctgagggcccatgtgatagataaattcctgctgctcccttttcatagcggctgggatccagatcacggtgggcttttctacttccaggatgcagataacttttgcccaacccaactggagtgggcaatgaagctttggtggccccatagtgaggccatgattgcctttttaatgggatattcagattcaggagatcccgtgctgctgcggttattttaccaggtggcagagtacacatttagacaattcagagatcctgaatacggcgagtggttcggctacctttctcgagagggcaaagtggccttaagcataaaaggcggaccatttaaaggctgcttccacgtcccccgatgcctggccatgtgtgaggagatgctgggtgcgctgttgtcacgtcctgctccagcacctagcccagcgcccacccccgcttgccgtggcgcggagtag

SEQ ID NO: 133426 - DNA, 765 bp, Artificial Sequence
  derived and/or modified sequence
atgagcaaaggcctgccggccaggcaggatatggaaaaagagagagagactctgcaggcttggaaagaacgtgtgggtcaagagctcgatcgggtggtcgcgttctggatggagcattcccacgaccaagaacatggagggttcttcacatgtctggggcgggaggggcgcgtgtatgatgatctcaagtacgtttggctgcaggggagacaggtttggatgtactgccgtttgtaccgcacgttcgagaggtttagacacgcacaactacttgatgctgcaaaggcaggaggagaatttctcctgagatacgccagggtagcgcctcctggtaaaaagtgtgctttcgtactcacacgcgatggtaggcccgttaaagttcagagaacaatattcagcgaatgcttctacacaatggccatgaatgagctgtggcgggccacgggcgaagttcgataccagactgaagccgttgagatgatggaccagattgtccactgggtacaggaagatgcctccgggctggggagaccacaactgcaaggagctcccgccgctgagcccatggcggtccccatgatgttattgaatttggtggaacaattgggggaagctgatgaggagcttgccggcaagtacgccgaattgggagactggtgcgcaagacgcattctgcagcacgtccaggccaccaggtggaagccggccggattttgcagtgttatagccttcgggaaggccaccccaaacttcgaacctacatag

SEQ ID NO: 133427 - DNA, 1284 bp, Artificial Sequence
  derived and/or modified sequence
atgagcaagggcctgcctgcccggcaggacatggagaaggagcgggagaccctgcaggcctggaaggagcgggtgggccaggagctggacagagtggtggccttctggatggagcacagccatgaccaggagcacggcggcttcttcacctgcctgggccgggagggccgggtgtatgatgacctgaagtatgtgtggctgcagggccggcaggtgtggatgtactgccgcctgtaccgcacctttgagcgcttcagacatgcccagctgctggatgctgccaaggccggcggggagttcctgctgcgctatgcccgggtggcccctcctgggaagaagtgtgcctttgtgctgaccagagatggccggcctgtgaaggtgcagaggaccatcttcagcgagtgcttctacaccatggccatgaatgagctgtggagggccaccggggaggtgcgctaccagacagaagctgtggagatgatggaccagatcgtgcactgggtgcaggaggatgccagcggcctgggccggccccagctgcagggcgccccagctgctgagcccatggctgtgcccatgatgctgctgaacctggtggagcagctgggggaggctgatgaggagctggccggcaagtatgcagagctgggggactggtgtgcccggcgcatcctgcagcacgtgcagagagatggccaggccgtgctggagaatgtgtctgagggcggcaaggagctgcccggctgcctgggccggcagcagaaccctggccacaccctggaggccggctggttcctgctgcggcactgcatcagaaaaggagaccctgagctgcgggcccacgtgattgacaagttcctgctgctgcccttccacagcggctgggaccctgaccatggaggcctcttctacttccaggatgctgacaacttctgccccacccagctggagtgggccatgaagctgtggtggccccacagcgaggccatgattgccttcctgatgggctacagcgacagcggggaccctgtgctgctgcggctcttctaccaggtggccgagtacaccttccggcagttccgggaccctgaatatggagagtggtttggctacctgagccgggagggcaaggtggccctgagcatcaagggcggccccttcaagggctgcttccacgtgccccgctgcctggccatgtgtgaggagatgctgggcgccctgctgagcaggcctgccccagcccccagccctgcccccaccccagcctgccgcggggctgagtag

SEQ ID NO: 133428 - DNA, 765 bp, Artificial Sequence
  derived and/or modified sequence
atgagcaagggcctgcctgcccggcaggacatggagaaggagcgggagaccctgcaggcctggaaggagcgggtgggccaggagctggacagagtggtggccttctggatggagcacagccatgaccaggagcacggcggcttcttcacctgcctgggccgggagggccgggtgtatgatgacctgaagtatgtgtggctgcagggccggcaggtgtggatgtactgccgcctgtaccgcacctttgagcgcttcagacatgcccagctgctggatgctgccaaggccggcggggagttcctgctgcgctatgcccgggtggcccctcctgggaagaagtgtgcctttgtgctgaccagagatggccggcctgtgaaggtgcagaggaccatcttcagcgagtgcttctacaccatggccatgaatgagctgtggagggccaccggggaggtgcgctaccagacagaagctgtggagatgatggaccagatcgtgcactgggtgcaggaggatgccagcggcctgggccggccccagctgcagggcgccccagctgctgagcccatggctgtgcccatgatgctgctgaacctggtggagcagctgggggaggctgatgaggagctggccggcaagtatgcagagctgggggactggtgtgcccggcgcatcctgcagcacgtgcaggccacccgctggaagccagctggcttctgcagcgtcatcgccttcggcaaggccacccccaactttgagcccacctag

SEQ ID NO: 133429 - DNA, 1284 bp, Artificial Sequence
  derived and/or modified sequence
atgagcaagggcctgcccgcccggcaggacatggagaaggagcgggaaaccctccaggcttggaaagagcgggtcggccaagagctggacagagttgtggctttttggatggagcactctcatgatcaggagcacggtggcttctttacatgtctgggcagggagggaagagtatacgacgatctgaagtatgtctggctgcaaggaagacaggtgtggatgtactgcaggctgtaccggaccttcgaaagattcagacatgctcagctgctggatgctgccaaggcagggggcgagtttctgctccggtacgccagagtggctccacctgggaagaaatgtgcatttgtgttgaccagagatggtcgccctgtgaaggtgcagcgtactattttctcagagtgtttctacactatggccatgaatgagctgtggcgggcgacaggcgaggtgaggtatcagacagaggctgttgagatgatggatcagatcgtgcattgggttcaggaggacgcatctggtttgggaaggcctcagctgcaaggagcccccgccgccgagccgatggctgtccccatgatgttgttaaatctggtcgagcagttgggcgaggccgacgaggaactcgccgggaagtacgctgaactaggagactggtgcgcccgaaggattctccaacatgttcaaagagatggccaggccgtcctggagaatgtctccgagggaggtaaagaacttcccggatgtctggggcggcagcaaaaccccgggcatactctggaggctggatggttcctgcttaggcactgcatccggaagggagatcctgagctcagagctcatgtgatcgataaatttttactgctcccttttcattccgggtgggatcccgatcatggcggactgttctacttccaggacgccgacaacttttgtcccacccaactggaatgggccatgaaactgtggtggccacatagtgaagccatgattgcatttctcatggggtacagcgacagtggagatcccgtacttctcagactgttttatcaggttgctgaatacaccttcaggcagttccgagacccagaatacggcgaatggtttggatacttgtcccgtgaggggaaggtcgctttaagtataaaaggagggccctttaaaggttgctttcatgtgcctaggtgcctggctatgtgcgaggaaatgttgggcgctttgctgtctagaccagctccagctccttcacccgctcccacccccgcctgccgtggcgcggagtag

SEQ ID NO: 133430 - DNA, 765 bp, Artificial Sequence
  derived and/or modified sequence
atgagcaagggcctgcccgcccggcaggacatggagaaggagcgggaaactctccaggcatggaaagaaagagtagggcaggagctcgatcgtgtagtcgctttttggatggaacactcacacgaccaggaacacggcggcttttttacctgcctggggcgtgaggggcgggtgtatgacgacctcaagtacgtatggctgcaggggaggcaagtgtggatgtattgccgactctaccgcacattcgagcgctttcgccacgcccagcttctcgacgccgcaaaagctggcggggagttcttgctgaggtatgccagagtagcacctcccggcaaaaagtgcgccttcgtgctcacaagggacgggagacctgtgaaagtgcaacgaaccatcttctccgagtgtttttatacgatggcaatgaacgagctgtggagggcaactggcgaggtgcgctatcagacggaggctgtggagatgatggatcaaatcgtgcactgggtccaagaagacgcatccggcttggggagaccccagctccagggagcacccgcagccgaaccaatggcagtccccatgatgctcctgaacctagtcgagcagctgggtgaggctgatgaggaactggctggaaagtacgcagagctgggcgactggtgcgcaaggcggatattacaacatgtccaggctaccagatggaagcccgcgggattttgtagtgtaatcgcctttgggaaagctacacccaacttcgaaccaacatag

SEQ ID NO: 133431 - DNA, 1284 bp, Artificial Sequence
  derived and/or modified sequence
atgagtaaaggccttccagccagacaggatatggagaaggagcgcgagactctccaagcgtggaaagaacgtgttgggcaggaactggaccgggtagtggccttctggatggagcacagccacgaccaagagcacggtggcttttttacctgcttggggagagagggtagggtgtacgatgacttgaagtacgtgtggcttcagggcaggcaagtgtggatgtactgcagactatatcggactttcgagcggtttagacatgctcagttgcttgatgctgccaaggctggcggtgagtttcttctgcgatacgctcgcgtcgcccctcctgggaagaaatgtgcatttgtcctcactcgagacggtagacccgtgaaggtccagcgcacaatcttcagcgagtgcttctacaccatggcaatgaatgagctttggagggccacaggcgaggtcaggtaccaaacagaggccgtggaaatgatggaccagatcgtccactgggtccaagaagacgcatccggcttgggacgccctcagcttcagggtgctcccgcagccgagccgatggctgtgcctatgatgctgttgaacctcgttgagcagctaggagaagctgacgaagaactggctggcaagtacgcagaactgggcgactggtgcgccagaagaatcttacagcacgttcagagggacggccaagctgtgctagagaacgtgtcggaaggcggtaaggagctgcctggatgccttgggaggcaacaaaacccaggccacacgcttgaggctggttggttccttctgcgccactgcatccgcaagggcgacccagagctcagagcgcatgttatagacaaatttcttctgcttccttttcactcgggctgggatcctgaccatgggggactgttctacttccaagacgccgacaatttttgccctacacagctggaatgggcaatgaagctgtggtggccccactctgaggcgatgatagcatttttaatgggctactcagattcgggcgaccctgttcttcttaggctcttttatcaagtggcagaatatacgttccggcagttccgggacccagaatacggtgaatggttcgggtacctgagccgggaggggaaggtggcactgtcaataaagggaggacccttcaaagggtgtttccacgtgcctaggtgtttggcaatgtgcgaggagatgttaggtgcactgctgtctcgccctgcccctgctcctagccccgcacctacgcctgcatgtcgaggcgcagaatag

SEQ ID NO: 133432 - DNA, 765 bp, Artificial Sequence
  derived and/or modified sequence
atgagtaaaggactaccggcaagacaggatatggaaaaggagagagaaacactgcaggcgtggaaggagcgcgtcggccaggagctggatcgagtcgtagctttttggatggagcacagtcacgaccaggaacacgggggattttttacctgccttggcagagagggccgagtctatgacgatttaaagtacgtatggcttcagggacgacaggtgtggatgtactgccgcctctaccgaacatttgaacgctttagacacgcacagttgctggatgctgcaaaggcaggcggagagttcctcctgcgttacgcacgcgtggcgcctccagggaaaaagtgtgctttcgtcctgacccgcgatggccgtccagtcaaagtccagaggacaatcttctctgagtgcttttacacaatggccatgaacgaactctggagggctaccggggaggtgcggtatcagaccgaagctgtagaaatgatggaccagatcgtgcactgggtccaggaagacgcatccggtctgggcagaccacagttgcaaggagctcctgctgcagaacccatggctgtgcccatgatgttgttgaaccttgtcgagcagctcggcgaggctgacgaagagctggctggcaaatacgccgagctcggggattggtgtgctcggagaattctacagcacgttcaggcaactcggtggaagcctgcgggattttgtagcgtcatagccttcggcaaggctaccccgaactttgagcctacctag

SEQ ID NO: 133433 - DNA, 1388 bp, Artificial Sequence
  derived and/or modified sequence
agccgggcgcggctgtgtcagctgagtgacagtcacgggaccgcgaccaactctgtctggcttcctagaggagcaggagggatgagcaagggtctcccagcgcgacaggacatggagaaagagcgagagactctgcaggcctggaaggagcgcgtggggcaggagctggaccgcgtggtggctttctggatggagcactcccacgaccaggagcacgggggcttcttcacgtgccttggccgcgaggggcgggtgtatgatgacctcaagtatgtgtggctgcaggggaggcaggtatggatgtattgtcgcctgtaccgcactttcgagcgcttccgccatgctcagcttctggacgcagcaaaagcaggtggtgagttcttgctgcggtatgcccgggtggcacctcctggcaagaagtgtgcctttgtgctgactcgggacggccgcccggtcaaggtgcagcgaaccatcttcagtgagtgtttctacaccatggccatgaacgagctgtggagagccacaggggaagtgcggtaccagacggaagcggtggagatgatggatcagatcgtccactgggtgcaggaggacgcgtcgggactgggccggccccagctccagggggccccggctgcggagcccatggcggtgcccatgatgctactgaacctggtggagcagctcggggaggcagatgaggagctggcgggcaaatacgcagagctgggggactggtgcgcccggaggattctgcagcacgtgcagagggatggacaagctgtgctggagaatgtgtcagagggtggcaaggaacttcctggctgcctggggagacagcagaacccaggccacacgctggaagccggctggtttctgctccgtcattgcattcggaaaggcgaccccgaacttcgagcccacgtgattgacaagttcctattgttgcccttccactccggatgggaccctgaccacggaggcctcttttacttccaggatgctgataacttctgccccacccagctggagtgggccatgaagctctggtggccacacagtgaagccatgattgccttcctcatgggttacagtgacagtggggaccctgtgctgctgcgcctcttctaccaagtggctgagtacaccttccgccagtttcgcgatcccgagtacggggaatggtttggctacctgagccgagagggcaaggtggccctctccatcaagggaggtcctttcaaaggctgcttccacgtgccgcggtgcctagccatgtgcgaggagatgctgggcgccctgctgagccgccccgcccccgccccctcccccgcccccacccccgcctgccgaggcgcggaataaaggctgagtccgctccacctgcg

SEQ ID NO: 133434 - DNA, 1388 bp, Artificial Sequence
  derived and/or modified sequence
gtggagggtcgcggcaggaacaagtgcgggggtcgggctcaaagccccgccccaggcccagcggaaccctgaagaggagggggagggtgagccgggcgcggctgtgtcagctgagtgacagtcacgggaccgcgaccaactctgtctggcttcctagaggagcaggagggatgagcaagggtctcccagcgcgacaggacatggagaaagagcgagagactctgcaggcctggaaggagcgcgtggggcaggagctggaccgcgtggtggctttctggatggagcactcccacgaccaggagcacgggggcttcttcacgtgccttggccgcgaggggcgggtgtatgatgacctcaagtatgtgtggctgcaggggaggcaggtatggatgtattgtcgcctgtaccgcactttcgagcgcttccgccatgctcagcttctggacgcagcaaaagcaggtggtgagttcttgctgcggtatgcccgggtggcacctcctggcaagaagtgtgcctttgtgctgactcgggacggccgcccggtcaaggtgcagcgaaccatcttcagtgagtgtttctacaccatggccatgaacgagctgtggagagccacaggggaagtgcggtaccagacggaagcggtggagatgatggatcagatcgtccactgggtgcaggaggacgcgtcgggactgggccggccccagctccagggggccccggctgcggagcccatggcggtgcccatgatgctactgaacctggtggagcagctcggggaggcagatgaggagctggcgggcaaatacgcagagctgggggactggtgcgcccggaggattctgcagcacgtgcaggccacacgctggaagccggctggtttctgctccgtcattgcattcggaaaggcgaccccgaacttcgagcccacgtgattgacaagttcctattgttgcccttccactccggatgggaccctgaccacggaggcctcttttacttccaggatgctgataacttctgccccacccagctggagtgggccatgaagctctggtggccacacagtgaagccatgattgccttcctcatgggttacagtgacagtggggaccctgtgctgctgcgcctcttctaccaagtggctgagtacaccttccgccagtttcgcgatcccgagtacggggaatggtttggctacctgagccgagagggcaaggtggccctctccatcaagggaggtcctttcaaaggctgcttccacgtgccgcggtgcctagccatgtgcgaggagatgctgggcgccctgctgagccgccccgcccccgccccctcccccgcccccacccccgcctgccgaggcgcggaataaaggctgagtccgctcc

SEQ ID NO: 133435 - DNA, 1284 bp, Artificial Sequence
  derived and/or modified sequence
atgagcaagggcctgcccgccagacaggacatggagaaggagagagagaccctgcaggcctggaaggagagagtgggccaggagctggacagagtggtggccttctggatggagcacagccacgaccaggagcacggcggcttcttcacctgcctgggcagagagggcagagtgtacgacgacctgaagtacgtgtggctgcagggcagacaggtgtggatgtactgcagactgtacagaaccttcgagagattcagacacgcccagctgctggacgccgccaaggccggcggcgagttcctgctgagatacgccagagtggccccccccggcaagaagtgcgccttcgtgctgaccagagacggcagacccgtgaaggtgcagagaaccatcttcagcgagtgcttctacaccatggccatgaacgagctgtggagagccaccggcgaggtgagataccagaccgaggccgtggagatgatggaccagatcgtgcactgggtgcaggaggacgccagcggcctgggcagaccccagctgcagggcgcccccgccgccgagcccatggccgtgcccatgatgctgctgaacctggtggagcagctgggcgaggccgacgaggagctggccggcaagtacgccgagctgggcgactggtgcgccagaagaatcctgcagcacgtgcagagagacggccaggccgtgctggagaacgtgagcgagggcggcaaggagctgcccggctgcctgggcagacagcagaaccccggccacaccctggaggccggctggttcctgctgagacactgcatcagaaagggcgaccccgagctgagagcccacgtgatcgacaagttcctgctgctgcccttccacagcggctgggaccccgaccacggcggcctgttctacttccaggacgccgacaacttctgccccacccagctggagtgggccatgaagctgtggtggccccacagcgaggccatgatcgccttcctgatgggctacagcgacagcggcgaccccgtgctgctgagactgttctaccaggtggccgagtacaccttcagacagttcagagaccccgagtacggcgagtggttcggctacctgagcagagagggcaaggtggccctgagcatcaagggcggccccttcaagggctgcttccacgtgcccagatgcctggccatgtgcgaggagatgctgggcgccctgctgagcagacccgcccccgcccccagccccgcccccacccccgcctgcagaggcgccgagtag

SEQ ID NO: 133436 - DNA, 765 bp, Artificial Sequence
  derived and/or modified sequence
atgagcaagggcctgcccgccagacaggacatggagaaggagagagagaccctgcaggcctggaaggagagagtgggccaggagctggacagagtggtggccttctggatggagcacagccacgaccaggagcacggcggcttcttcacctgcctgggcagagagggcagagtgtacgacgacctgaagtacgtgtggctgcagggcagacaggtgtggatgtactgcagactgtacagaaccttcgagagattcagacacgcccagctgctggacgccgccaaggccggcggcgagttcctgctgagatacgccagagtggccccccccggcaagaagtgcgccttcgtgctgaccagagacggcagacccgtgaaggtgcagagaaccatcttcagcgagtgcttctacaccatggccatgaacgagctgtggagagccaccggcgaggtgagataccagaccgaggccgtggagatgatggaccagatcgtgcactgggtgcaggaggacgccagcggcctgggcagaccccagctgcagggcgcccccgccgccgagcccatggccgtgcccatgatgctgctgaacctggtggagcagctgggcgaggccgacgaggagctggccggcaagtacgccgagctgggcgactggtgcgccagaagaatcctgcagcacgtgcaggccaccagatggaagcccgccggcttctgcagcgtgatcgccttcggcaaggccacccccaacttcgagcccacctag

SEQ ID NO: 133437 - protein, 1118 aa, Artificial Sequence
  derived and/or modified sequence
MSVEAYGPSSQTLTFLDTEEAELLGADTQGSEFEFTDFTLPSQTQTPPGGPGGPGGGGAGGPGGAGAGAAAGQLDAQVGPEGILQNGAVDDSVAKTSQLLAELNFEEDEEDTYYTKDLPIHACSYCGIHDPACVVYCNTSKKWFCNGRGNTSGSHIVNHLVRAKCKEVTLHKDGPLGETVLECYNCGCRNVFLLGFIPAKADSVVVLLCRQPCASQSSLKDINWDSSQWQPLIQDRCFLSWLVKIPSEQEQLRARQITAQQINKLEELWKENPSATLEDLEKPGVDEEPQHVLLRYEDAYQYQNIFGPLVKLEADYDKKLKESQTQDNITVRWDLGLNKKRIAYFTLPKTDSDMRLMQGDEICLRYKGDLAPLWKGIGHVIKVPDNYGDEIAIELRSSVGAPVEVTHNFQVDFVWKSTSFDRMQSALKTFAVDETSVSGYIYHKLLGHEVEDVIIKCQLPKRFTAQGLPDLNHSQVYAVKTVLQRPLSLIQGPPGTGKTVTSATIVYHLARQGNGPVLVCAPSNIAVDQLTEKIHQTGLKVVRLCAKSREAIDSPVSFLALHNQIRNMDSMPELQKLQQLKDETGELSSADEKRYRALKRTAERELLMNADVICCTCVGAGDPRLAKMQFRSILIDESTQATEPECMVPVVLGAKQLILVGDHCQLGPVVMCKKAAKAGLSQSLFERLVVLGIRPIRLQVQYRMHPALSAFPSNIFYEGSLQNGVTAADRVKKGFDFQWPQPDKPMFFYVTQGQEEIASSGTSYLNRTEAANVEKITTKLLKAGAKPDQIGIITPYEGQRSYLVQYMQFSGSLHTKLYQEVEIASVDAFQGREKDFIILSCVRANEHQGIGFLNDPRRLNVALTRARYGVIIVGNPKALSKQPLWNHLLNYYKEQKVLVEGPLNNLRESLMQFSKPRKLVNTINPGARFMTTAMYDAREAIIPGSVYDRSSQGRPSSMYFQTHDQIGMISAGPSHVAAMNIPIPFNLVMPPMPPPGYFGQANGPAAGRGTPKGKTGRGGRQKNRFGLPGPSQTNLPNSQASQDVASQPFSQGALTQGYISMSQPSQMSQPGLSQPELSQDSYLGDEFKSQIDVALSQDSTYQGERAYQHGGVTGLSQY

SEQ ID NO: 133438 - DNA, 3357 bp, Artificial Sequence
  derived and/or modified sequence
atgagcgtggaggcctacggccccagcagccagaccctgaccttcctggacaccgaggaggccgagctgctgggcgccgacacccagggcagcgagttcgagttcaccgacttcaccctgcccagccagacccagaccccccccggcggccccggcggccccggcggcggcggcgccggcggccccggcggcgccggcgccggcgccgccgccggccagctggacgcccaggtgggccccgagggcatcctgcagaacggcgccgtggacgacagcgtggccaagaccagccagctgctggccgagctgaacttcgaggaggacgaggaggacacctactacaccaaggacctgcccatccacgcctgcagctactgcggcatccacgaccccgcctgcgtggtgtactgcaacaccagcaagaagtggttctgcaacggcagaggcaacaccagcggcagccacatcgtgaaccacctggtgagagccaagtgcaaggaggtgaccctgcacaaggacggccccctgggcgagaccgtgctggagtgctacaactgcggctgcagaaacgtgttcctgctgggcttcatccccgccaaggccgacagcgtggtggtgctgctgtgcagacagccctgcgccagccagagcagcctgaaggacatcaactgggacagcagccagtggcagcccctgatccaggacagatgcttcctgagctggctggtgaagatccccagcgagcaggagcagctgagagccagacagatcaccgcccagcagatcaacaagctggaggagctgtggaaggagaaccccagcgccaccctggaggacctggagaagcccggcgtggacgaggagccccagcacgtgctgctgagatacgaggacgcctaccagtaccagaacatcttcggccccctggtgaagctggaggccgactacgacaagaagctgaaggagagccagacccaggacaacatcaccgtgagatgggacctgggcctgaacaagaagagaatcgcctacttcaccctgcccaagaccgacagcgacatgagactgatgcagggcgacgagatctgcctgagatacaagggcgacctggcccccctgtggaagggcatcggccacgtgatcaaggtgcccgacaactacggcgacgagatcgccatcgagctgagaagcagcgtgggcgcccccgtggaggtgacccacaacttccaggtggacttcgtgtggaagagcaccagcttcgacagaatgcagagcgccctgaagaccttcgccgtggacgagaccagcgtgagcggctacatctaccacaagctgctgggccacgaggtggaggacgtgatcatcaagtgccagctgcccaagagattcaccgcccagggcctgcccgacctgaaccacagccaggtgtacgccgtgaagaccgtgctgcagagacccctgagcctgatccagggcccccccggcaccggcaagaccgtgaccagcgccaccatcgtgtaccacctggccagacagggcaacggccccgtgctggtgtgcgcccccagcaacatcgccgtggaccagctgaccgagaagatccaccagaccggcctgaaggtggtgagactgtgcgccaagagcagagaggccatcgacagccccgtgagcttcctggccctgcacaaccagatcagaaacatggacagcatgcccgagctgcagaagctgcagcagctgaaggacgagaccggcgagctgagcagcgccgacgagaagagatacagagccctgaagagaaccgccgagagagagctgctgatgaacgccgacgtgatctgctgcacctgcgtgggcgccggcgaccccagactggccaagatgcagttcagaagcatcctgatcgacgagagcacccaggccaccgagcccgagtgcatggtgcccgtggtgctgggcgccaagcagctgatcctggtgggcgaccactgccagctgggccccgtggtgatgtgcaagaaggccgccaaggccggcctgagccagagcctgttcgagagactggtggtgctgggcatcagacccatcagactgcaggtgcagtacagaatgcaccccgccctgagcgccttccccagcaacatcttctacgagggcagcctgcagaacggcgtgaccgccgccgacagagtgaagaagggcttcgacttccagtggccccagcccgacaagcccatgttcttctacgtgacccagggccaggaggagatcgccagcagcggcaccagctacctgaacagaaccgaggccgccaacgtggagaagatcaccaccaagctgctgaaggccggcgccaagcccgaccagatcggcatcatcaccccctacgagggccagagaagctacctggtgcagtacatgcagttcagcggcagcctgcacaccaagctgtaccaggaggtggagatcgccagcgtggacgccttccagggcagagagaaggacttcatcatcctgagctgcgtgagagccaacgagcaccagggcatcggcttcctgaacgaccccagaagactgaacgtggccctgaccagagccagatacggcgtgatcatcgtgggcaaccccaaggccctgagcaagcagcccctgtggaaccacctgctgaactactacaaggagcagaaggtgctggtggagggccccctgaacaacctgagagagagcctgatgcagttcagcaagcccagaaagctggtgaacaccatcaaccccggcgccagattcatgaccaccgccatgtacgacgccagagaggccatcatccccggcagcgtgtacgacagaagcagccagggcagacccagcagcatgtacttccagacccacgaccagatcggcatgatcagcgccggccccagccacgtggccgccatgaacatccccatccccttcaacctggtgatgccccccatgcccccccccggctacttcggccaggccaacggccccgccgccggcagaggcacccccaagggcaagaccggcagaggcggcagacagaagaacagattcggcctgcccggccccagccagaccaacctgcccaacagccaggccagccaggacgtggccagccagcccttcagccagggcgccctgacccagggctacatcagcatgagccagcccagccagatgagccagcccggcctgagccagcccgagctgagccaggacagctacctgggcgacgagttcaagagccagatcgacgtggccctgagccaggacagcacctaccagggcgagagagcctaccagcacggcggcgtgaccggcctgagccagtactag

SEQ ID NO: 133439 - DNA, 3357 bp, Artificial Sequence
  derived and/or modified sequence
atgtcggtggaggcgtacggaccatcctctcagactctgactttcctcgacactgaggaggccgagctcctgggggctgacacgcaggggtctgaattcgagtttacagactttaccctgccctctcagacccagacaccccccggtggccctgggggccctggaggtggtggtgccgggggccctggcggcgcaggtgccggagcagctgccggtcagctagatgctcaagttgggccggaaggcattttgcagaacggcgccgtggacgattcagtcgccaaaacaagtcagctcttggccgagctcaactttgaggaggacgaggaggatacctactatactaaggacttgcccattcacgcctgtagctactgcggcattcatgatccggcctgcgtggtctattgcaacactagcaagaagtggttctgcaatggccgcggcaataccagcgggtctcacatagtgaaccatctggttcgggccaagtgtaaggaggtgacgctccacaaagatggtccattaggagagacagtcctggagtgctataattgtggctgcagaaatgtgtttttactgggcttcatcccagccaaggctgactccgttgttgtcttgctgtgcagacagccctgtgcgagccagagctccctgaaggatatcaactgggactcctcccagtggcagccactgatacaggatcggtgcttcttgtcttggctggtcaagattcccagtgagcaagagcaactgagagctcggcaaattactgcacaacagatcaacaagctggaagagctgtggaaagaaaatccatccgccacactggaggatttggagaagccaggagtggatgaggaaccacagcatgtgcttctgagatacgaagatgcgtatcagtaccaaaatatatttggacccctggtcaagctggaggccgactacgataagaagctgaaggagagccagactcaggacaatatcacagtgcgttgggatctgggtctgaataagaagcggatcgcttacttcacactgccaaagacagacagtgatatgcggctgatgcaaggcgacgaaatctgcctgcgatacaagggcgacctggcacctttgtggaagggcattggacatgtgattaaggtgcccgacaactacggagatgagattgcaatcgagctgcgcagctcagttggcgcacccgtggaggtgacgcacaatttccaggttgacttcgtgtggaagagtacgtcttttgacaggatgcagtcggccctaaagacgttcgcagtcgatgaaactagtgtgagtggctatatctatcataagctgctcgggcacgaggtggaggacgtgattattaaatgtcaattaccaaagaggttcactgcccaaggtctcccagacctgaatcacagtcaggtctatgccgttaagaccgtacttcagcggcctctcagcctgattcaggggcctcctgggactggcaaaaccgtcacatccgcaacaattgtgtaccacctggccaggcaaggaaacgggccagtgctggtgtgcgccccgtcaaacattgcggtcgaccaattgacggagaagattcaccaaactggactgaaagtcgtccggctttgtgcgaagtcccgggaagccattgactccccggtgagcttcctagcccttcacaatcagattcgtaatatggattcgatgcctgaactgcagaaactgcagcaacttaaggacgaaaccggggagctttccagcgccgatgagaagaggtatagggccctcaagcggacagccgagagggaactgctcatgaacgctgatgtgatatgctgcacgtgcgtaggggccggcgatccaaggctggctaagatgcagtttcgttccattctcattgacgagagcacccaggctactgagcccgagtgcatggtccccgttgtgctgggcgctaaacagttgatcctggtgggagatcactgccagctgggaccagtcgtgatgtgtaaaaaagccgctaaggcagggctgtcccagagccttttcgaacgtctcgtggttcttggtatccgacctatacggctgcaggtgcagtacagaatgcaccctgccctgagtgctttccccagcaatatattttatgaagggagtctgcagaatggagtgaccgcagctgatcgagtaaaaaagggttttgacttccagtggccccaaccagataaacccatgttcttttatgtcactcagggacaagaagaaattgcttcaagcggtactagctatcttaataggacggaagcggcgaacgtagaaaagattaccactaagttgctcaaggcaggggcaaagccagaccaaattggtattatcactccatatgagggtcaacgcagctacctggtgcagtacatgcagtttagcggctcgctccatactaaattatatcaggaagtcgagatcgcgtccgtggacgcatttcaggggagggaaaaagacttcatcatcttaagctgtgtccgggctaacgagcatcaggggatcggctttctgaatgatccacgccggcttaatgtggccctcaccagagcccgctatggagtaattatagtcggcaatccaaaagctctaagtaaacaaccactctggaaccatctgctcaattattataaggagcagaaggtactggtcgaaggacctctgaacaacctccgtgaatctctcatgcaattctctaagccaagaaagcttgtgaataccataaacccaggcgccaggtttatgaccacggcaatgtacgatgcccgggaagccattattccagggagtgtgtacgacagatcttctcaaggcaggcccagtagcatgtatttccagacgcatgatcagattggaatgatctccgccggaccgtcccacgtggccgccatgaacattcccatccctttcaatttagttatgcccccgatgcctccacccgggtacttcggacaggctaacggacctgccgcaggtcgcggaactcccaagggtaaaacagggagaggcggacgacaaaaaaataggtttgggcttcctggaccctcacagaccaatcttcccaattcacaggctagccaggacgtggcgtcccagccattcagccagggggcattaacccagggttacatcagtatgtcccagccatcccagatgtctcagccagggttgagtcagccggagcttagtcaggattcatatctgggcgatgagttcaagtcgcaaattgatgtggcactctcacaggattccacctatcagggcgagcgtgcttatcagcacggaggcgtcactggactgagtcaatattag

SEQ ID NO: 133440 - DNA, 3357 bp, Artificial Sequence
  derived and/or modified sequence
atgtctgtggaggcctacggccccagcagccagaccctgaccttcctggacacagaggaggccgagctgctgggcgctgacacccagggcagcgagtttgagttcacagacttcaccctgcccagccagacccagaccccacctgggggccctgggggccctgggggcggcggggccggcggccctgggggcgctggggccggggctgctgctggccagctggatgcccaggtgggccctgagggcatcctgcagaatggagctgtggatgacagcgtggccaagaccagccagctgctggccgagctgaactttgaagaagatgaggaggacacctactacaccaaggacctgcccatccacgcctgcagctactgcggcatccatgaccctgcctgtgtggtgtactgcaacaccagcaagaagtggttctgcaatggccggggcaacaccagcggcagccacatcgtgaaccacctggtgcgggccaagtgcaaggaggtgaccctgcacaaggatggccccctgggggagaccgtgctggagtgctacaactgtggctgcagaaatgtgttcctgctgggcttcatcccagccaaggctgacagcgtggtggtgctgctgtgccggcagccctgtgccagccagagcagcctgaaggacatcaactgggacagcagccagtggcagcccctcatccaggaccgctgcttcctgtcctggctggtgaagatccccagcgagcaggagcagctgcgggcccggcagatcacagcccagcagatcaacaagctggaggagctgtggaaggagaaccccagcgccaccctggaggacctggagaagccaggagtggatgaggagccccagcacgtgctgctgcgctatgaagatgcctaccagtaccagaacatcttcggccccctggtgaagctggaggccgactatgacaagaagctgaaggagagccagacccaggacaacatcaccgtgcgctgggacctgggcctgaacaagaagagaattgcctacttcaccctgcccaagacagacagcgacatgaggctgatgcagggagatgagatctgcctgcgctacaagggggacctggcccccctgtggaagggcattggacatgtgatcaaggtgcctgacaactatggagatgaaattgccatcgagctgcggagctctgtgggcgcccctgtggaggtgacccacaacttccaggtggactttgtgtggaagagcaccagctttgacaggatgcagagcgccctgaagacctttgctgtggatgagacctctgtgtctggctacatctaccacaagctgctgggccacgaggtggaggatgtgatcatcaagtgccagctgcccaagcgcttcaccgcccagggcctgcctgacctgaaccacagccaggtgtatgctgtgaagacagtgctgcagaggcccctgagcctcatccagggccccccaggcaccgggaagacagtgaccagcgccaccatcgtgtaccacctggcccggcagggcaatggacctgtgctggtgtgtgcccccagcaacattgctgtggaccagctgacagagaagatccaccagacaggcctgaaggtggtgcggctgtgtgccaagagccgggaggccatcgacagccctgtgtccttcctggccctgcacaaccagatccggaacatggacagcatgcctgagctgcagaagctgcagcagctgaaggatgagaccggggagctgagcagcgcagatgagaagcgctaccgggccctgaagaggacagctgagcgggagctgctgatgaatgctgatgtgatctgctgcacctgtgtgggcgctggggacccccggctggccaagatgcagttccgcagcatcctgattgatgagagcacccaggccacagagcctgagtgcatggtgcctgtggtgctgggcgccaagcagctgatcctggtgggggaccactgccagctgggccctgtggtgatgtgcaagaaggccgccaaggccggcctgagccagagcctgtttgagcggctggtggtgctgggcatccggcccatccggctgcaggtgcagtacaggatgcacccagccctgagcgccttccccagcaacatcttctatgagggcagcctgcagaatggagtgacagctgctgacagagtgaagaagggctttgacttccagtggccccagcctgacaagcccatgttcttctacgtgacccagggccaggaggagatcgccagcagcggcaccagctacctgaacagaacagaggccgccaacgtggagaagatcaccaccaagctgctgaaggccggggccaagccagaccagatcggcatcatcaccccctatgagggccagaggagctacctggtgcagtacatgcagttcagcggcagcctgcacaccaagctgtaccaggaggtggagatcgcctctgtggatgccttccagggccgggagaaggacttcatcatcctgagctgtgtgcgggccaatgagcaccagggcatcggcttcctgaatgacccccggcggctgaatgtggccctgacccgggcccgctatggagtcatcatcgtgggcaaccccaaggccctgagcaagcagcccctgtggaaccacctgctgaactactacaaggagcagaaggtgctggtggagggccccctgaacaacctgcgggagagcctgatgcagttcagcaagcccaggaagctggtgaacaccatcaaccctggggcccgcttcatgaccacagccatgtatgatgcccgggaggccatcatccctggctctgtgtatgacaggagcagccagggccggcccagctccatgtacttccagacccatgaccagatcggcatgatctctgctggccccagccacgtggccgccatgaacatccccatccccttcaacctggtgatgccacccatgcctcctcctggctacttcggccaggccaacggccctgctgctggccggggcacccccaagggcaagacaggccggggcggccggcagaagaacagatttggcctgcccggccccagccagaccaacctgcccaacagccaggccagccaggatgtggccagccagcccttcagccagggcgccctgacccagggctacatctccatgagccagcccagccagatgagccagcccggcctgagccagcctgagctgagccaggacagctacctgggagatgagttcaagagccagattgatgtggccctgagccaggacagcacctaccagggcgagcgggcctaccagcacggcggcgtgacaggcctgagccagtactag

SEQ ID NO: 133441 - DNA, 3357 bp, Artificial Sequence
  derived and/or modified sequence
atgagcgtggaggcctacggccccagcagccagaccctgaccttcctggataccgaagaggccgagctgctaggggcggatacgcaaggatcggaatttgagttcactgacttcaccctgccttcccagacccagacacctcctggaggtccagggggacctggcggaggcggcgccggaggacctggcggagcaggagccggagctgccgccgggcagctagacgcacaggtcggacccgagggcatcctacagaatggcgctgttgacgactccgtcgccaagacaagtcaactgttagctgagctcaatttcgaagaggatgaagaggacacatactacacaaaagacctgcccatacatgcttgcagctactgcggcatacatgacccagcctgtgtggtctattgtaataccagcaagaaatggttttgtaacggccgggggaacacatccgggagccatatcgtgaaccatctcgtgcgtgccaaatgtaaagaagtgaccctccacaaggacggcccccttggcgaaactgtcctcgaatgctacaattgcggctgcaggaacgtatttctgctcgggttcatccccgccaaggccgatagtgtggtcgtcctcctatgccggcagccatgtgcttctcagtcgtcactcaaagatattaactgggactccagccagtggcaaccattgatccaggaccggtgctttctgtcatggctcgtgaagattccctcagagcaggagcaattgcgggctaggcagatcacagctcagcagatcaacaagctcgaggagttgtggaaagagaatcccagcgcaactctggaggacttggaaaaacctggggtggatgaagagccccaacacgtgctgttaagatacgaggacgcttaccagtatcaaaatatttttggaccccttgtcaaattggaagccgactacgataaaaaactgaaagaatctcagactcaggacaatattactgtccgctgggatttgggtctgaataagaagaggatcgcatattttactttgccaaagacggatagtgacatgaggcttatgcagggagacgaaatttgtctgagatataagggagaccttgcaccgctctggaagggcattggccatgtgatcaaggtcccagacaattatggtgatgagatcgcaattgagctgcgcagtagcgttggagccccagtcgaagtgacacataattttcaggtagatttcgtttggaagagcacgtctttcgatcgcatgcagagtgctttgaagacgttcgctgttgatgaaacatccgtttctggctacatataccacaaacttctgggccacgaggtagaggatgtaatcatcaaatgccagttgccaaagcgtttcacagcccagggattgcccgaccttaaccactcccaggtgtacgcagtgaagactgtgctgcaacgtcccttgtcacttattcaaggaccacccggcaccggaaaaacagtaacctctgctaccatcgtttaccatctggcacggcagggcaacgggcctgtgctggtttgcgctccgagcaatatcgcggtggaccagctgaccgagaagatccaccagactggactcaaggtggtgaggctctgtgctaaatcgagagaagctattgactcccccgtgagcttcctagctcttcataatcagattaggaacatggactctatgccagaactacaaaaattacaacagctgaaggatgaaacaggggaactatcctccgccgatgagaaacgctaccgagccttaaagaggaccgcggagagagagctgttgatgaacgccgatgtgatttgctgtacttgcgtgggggcgggggatccgcgcctggccaagatgcagttccgctctattctaatcgatgagtccacgcaggccactgaacctgagtgcatggtgccagtcgtgctcggcgccaagcagctcatactggtgggagaccattgtcagctcggacccgtggtgatgtgtaaaaaagcagccaaggccggtctgtcccagtccctttttgaaaggttagtggttctgggcattagacctatcaggttgcaggtgcagtacagaatgcatccagccctgagtgctttcccgtctaacattttctacgaagggtcactgcagaatggagtcactgccgccgacagggtgaagaagggatttgattttcagtggccccagcccgacaagccgatgtttttttatgtgactcaagggcaggaagaaattgcttcttcgggtacctcctatcttaaccggactgaggcagctaatgtggaaaagatcaccacaaagctgctgaaggccggcgcaaagcctgaccagatcggaatcattactccatatgagggacagcgttcatatttggttcagtacatgcagttctctggatcgctgcatacaaaactctaccaggaagtggagatcgcgtcggtggacgcttttcaaggcagagaaaaggatttcatcatcctgtcctgcgtcagggcaaatgagcaccaggggattggctttcttaatgaccctaggcggctgaatgtggcactgacacgcgcgcgctacggcgtcataatcgtgggtaaccctaaggcattgagtaagcagcccctgtggaatcatcttctaaattactacaaggagcagaaggtgctagtcgagggaccgttgaacaatctgcgggagtcgctgatgcagttttcaaagccccgcaagctggtgaacaccattaaccctggagctcggtttatgactaccgccatgtatgatgcccgagaggctataattcctgggtcagtatatgatcgaagcagccagggaagaccttccagcatgtatttccagacacatgaccagatcgggatgataagcgctggtccttctcacgtggctgccatgaatatccctatcccctttaacttggtcatgccaccgatgccaccgccaggatatttcggccaggcaaatgggcccgccgccggaagagggacacctaagggtaagactggccgcggcggtcgtcaaaaaaacagattcggtctgcctggacccagccagacaaatctgcctaattcacaggcaagccaggatgttgccagtcagccattctctcagggagctcttacgcagggctatatcagtatgagccagccgagtcagatgagccaaccagggctgagccaaccagagttgagtcaggacagttacctgggcgacgaatttaaaagccaaatcgatgtggccctttctcaggactctacttaccagggtgaacgggcctatcagcatgggggagtcactggtctttcccagtattag

SEQ ID NO: 133442 - DNA, 3357 bp, Artificial Sequence
  derived and/or modified sequence
atgtctgtggaagcgtatggaccatcatcacagacattaactttcctggataccgaagaggctgaattgctgggcgcagatactcagggatccgagttcgaatttacagattttaccctccctagtcagacccagaccccacctggtggacctggaggacctggcggagggggagccggtggccctgggggagccggtgcaggcgctgccgctggtcagctcgatgcgcaggttggccctgaaggcattctgcagaacggtgcagtggatgatagcgtggccaaaaccagccagctgttagctgaattgaacttcgaagaggatgaagaggatacatattatactaaggatttgcctattcacgcctgttcctactgcggtatccacgacccagcgtgcgttgtttactgtaatacatccaagaaatggttttgtaatggaaggggcaacacatctggatctcacattgtaaatcatttggtgcgggctaagtgcaaggaggtcacattgcacaaggacggtcctttaggagagactgtgctggaatgctacaactgtggctgcaggaatgtgttcctactggggtttatccctgcgaaggccgattccgtggtggtgctgctttgtaggcagccctgcgcaagtcaatccagtcttaaggacatcaattgggacagcagtcagtggcagcctcttatccaggacaggtgtttcttaagttggctggtaaagatcccatccgagcaggagcagctacgggctcgccagattaccgcgcagcagataaacaagttggaggagctgtggaaagagaacccctcagccacactggaggatctggagaaacctggggtcgacgaggaaccgcagcacgtcctgctgagatacgaagatgcctaccagtaccaaaacattttcggaccccttgtgaagctggaggccgactatgacaaaaagctaaaggaatcacagacccaagataatattacggtgaggtgggacctaggattgaacaaaaaacggattgcctacttcactctgccaaaaacagatagcgatatgagactgatgcagggcgacgagatctgtttgcggtataaaggcgacctcgccccattgtggaagggcataggacacgtgatcaaagtgcccgataactacggcgacgagatcgccatcgaactaaggagttccgtaggggcaccagtggaagtgacccacaacttccaggtagatttcgtgtggaaatcgaccagcttcgatagaatgcaatcagctctgaagaccttcgccgtggacgaaacttcggtttcagggtatatttaccacaaactgctgggccatgaggtggaggatgtgattattaagtgtcagttgccgaagcggttcacggcgcagggtctaccagacctgaatcacagccaggtctacgccgtgaagaccgtacttcagaggcctctgtctctcattcagggcccacctggtaccggaaagacagtgacgtccgcgaccatcgtgtatcacctggcaagacaaggaaatggacccgtgctggtatgtgcgccatccaacatcgcggtggaccagctgacagaaaagatacatcagacaggactgaaggtcgtgcggctgtgtgccaaaagccgtgaagctattgattctcccgtttcatttctggccctccacaatcagatccgcaatatggattcgatgccagaactgcaaaaactccagcagttgaaagacgaaacaggggagctgtcatccgccgatgaaaaaagataccgggcactgaagcgcacagcagagcgggaactgctcatgaacgccgatgtcatctgctgcacatgcgtgggggctggcgatcctcgcctcgctaaaatgcagtttcggtccattctgatcgatgagtctactcaggctaccgagcccgaatgcatggtgcctgtggttcttggagccaagcagctgatactggtcggcgaccactgccagctgggacctgttgttatgtgtaaaaaggccgcaaaggccggactttcgcagagtctgtttgagagactggtcgtgctgggtatccgccctattcggcttcaggtgcagtatcgcatgcatcctgccctttccgccttcccaagtaacatcttctacgagggatcgctccagaatggcgtaactgccgctgacagagttaaaaaaggtttcgacttccagtggccacagcctgacaaacccatgttcttctacgttacacaggggcaagaagagatcgcttcctccggtaccagctacctcaaccggacagaggctgccaacgttgaaaagattaccacaaagctactgaaggccggtgccaagcctgaccagatcggcattattacaccttatgaaggacagcgcagttatctggtccagtatatgcagtttagcggatccctccacacaaaactctatcaagaggtcgaaatcgcctccgtggacgcctttcaagggcgagagaaggatttcataatactgtcctgtgtccgggctaatgagcaccaggggatcggcttcctcaacgacccgagaagactgaatgtcgcactcacgcgcgcacggtatggagttataatcgtgggaaacccgaaggcgctgagcaagcagccactttggaaccatcttcttaactactataaagagcagaaggtcttagtggagggtcctctcaacaatctgcgagaatccctcatgcaatttagcaagccacgcaaacttgtaaataccatcaatccaggcgctagatttatgaccacagctatgtatgatgctcgcgaggcaattatccccggttcagtgtacgatagatcttcccagggaaggccatcaagcatgtatttccagactcacgatcagatcggcatgatcagcgcgggtcctagccatgtcgcagcaatgaacatcccaattcccttcaacttggtcatgcccccaatgccgcctcccggatactttggacaggcaaacggccctgccgctggtagaggcacacctaagggcaaaactggcaggggcggaagacagaagaatcgattcggactccccggaccatctcagactaacctgcctaacagccaggccagtcaggatgttgctagccaacccttctctcaaggcgcattgacccaggggtacattagcatgtctcagcccagtcagatgagtcagccaggcctgtctcagcctgagctgtctcaggactcatacttgggagacgagtttaagtcccagatagacgttgccctgtctcaggatagcacgtaccagggagaacgggcatatcagcacgggggagtgactggactgtcacagtactag

SEQ ID NO: 133443 - DNA, 5344 bp, Artificial Sequence
  derived and/or modified sequence
cacggcgacggcggcggtggcggcagttcctgctctaggctgcgagcggctggcggcttcgaggggagctgaggcgcggaggggctcggcggcagcggcggcggctcggcactgttacctctcggtccggctggcgccggggcgcgcggtttggtcctttccgggcgcgcgggggcgacagcggcagcgacccgaggcctgcggcctaggcctcagcgcggcggcgggctcgagtgcagcgcggaaccggcccgagggccctacccggaggcaccatgagcgtggaggcgtacgggcccagctcgcagactctcactttcctggacacggaggaggccgagctgcttggcgccgacacacagggctccgagttcgagttcaccgactttactcttcctagccagacgcagacgccccccggcggccccggcggcccgggcggtggcggcgcgggaggcccgggcggcgcgggcgcgggcgctgcggcgggacagctcgacgcgcaggttgggcccgaaggcatcctgcagaacggggctgtggacgacagtgtagccaagaccagccagttgttggctgagttgaacttcgaggaagatgaagaagacacctattacacgaaggacctccccatacacgcctgcagttactgtggaatacacgatcctgcctgcgtggtttactgtaataccagcaagaagtggttctgcaacggacgtggaaatacttctggcagccacattgtaaatcaccttgtgagggcaaaatgcaaagaggtgaccctgcacaaggacgggcccctgggggagacagtcctggagtgctacaactgcggctgtcgcaacgtcttcctcctcggcttcatcccggccaaagctgactcagtggtggtgctgctgtgcaggcagccctgtgccagccagagcagcctcaaggacatcaactgggacagctcgcagtggcagccgctgatccaggaccgctgcttcctgtcctggctggtcaagatcccctccgagcaggagcagctgcgggcacgccagatcacggcacagcagatcaacaagctggaggagctgtggaaggaaaacccttctgccacgctggaggacctggagaagccgggggtggacgaggagccgcagcatgtcctcctgcggtacgaggacgcctaccagtaccagaacatattcgggcccctggtcaagctggaggccgactacgacaagaagctgaaggagtcccagactcaagataacatcactgtcaggtgggacctgggccttaacaagaagagaatcgcctacttcactttgcccaagactgactctgacatgcggctcatgcagggggatgagatatgcctgcggtacaaaggggaccttgcgcccctgtggaaagggatcggccacgtcatcaaggtccctgataattatggcgatgagatcgccattgagctgcggagcagcgtgggtgcacctgtggaggtgactcacaacttccaggtggattttgtgtggaagtcgacctcctttgacaggatgcagagcgcattgaaaacgtttgccgtggatgagacctcggtgtctggctacatctaccacaagctgttgggccacgaggtggaggacgtaatcatcaagtgccagctgcccaagcgcttcacggcgcagggcctccccgacctcaaccactcccaggtttatgccgtgaagactgtgctgcaaagaccactgagcctgatccagggcccgccaggcacggggaagacggtgacgtcggccaccatcgtctaccacctggcccggcaaggcaacgggccggtgctggtgtgtgctccgagcaacatcgccgtggaccagctaacggagaagatccaccagacggggctaaaggtcgtgcgcctctgcgccaagagccgtgaggccatcgactccccggtgtcttttctggccctgcacaaccagatcaggaacatggacagcatgcctgagctgcagaagctgcagcagctgaaagacgagactggggagctgtcgtctgccgacgagaagcggtaccgggccttgaagcgcaccgcagagagagagctgctgatgaacgcagatgtcatctgctgcacatgtgtgggcgccggtgacccgaggctggccaagatgcagttccgctccattttaatcgacgaaagcacccaggccaccgagccggagtgcatggttcccgtggtcctcggggccaagcagctgatccttgtaggcgaccactgccagctgggcccagtggtgatgtgcaagaaggcggccaaggccgggctgtcacagtcgctcttcgagcgcctggtggtgctgggcatccggcccatccgcctgcaggtccagtaccggatgcaccctgcactcagcgccttcccatccaacatcttctacgagggctccctccagaatggtgtcactgcagcggatcgtgtgaagaagggatttgacttccagtggccccaacccgataaaccgatgttcttctacgtgacccagggccaagaggagattgccagctcgggcacctcctacctgaacaggaccgaggctgcgaacgtggagaagatcaccacgaagttgctgaaggcaggcgccaagccggaccagattggcatcatcacgccctacgagggccagcgctcctacctggtgcagtacatgcagttcagcggctccctgcacaccaagctctaccaggaggtggagatcgccagtgtggacgcctttcagggacgcgagaaggacttcatcatcctgtcctgtgtgcgggccaacgagcaccaaggcattggctttttaaatgaccccaggcgtctgaacgtggccctgaccagagcaaggtatggcgtcatcattgtgggcaacccgaaggcactatcaaagcagccgctctggaaccacctgctgaactactataaggagcagaaggtgctggtggaggggccgctcaacaacctgcgtgagagcctcatgcagttcagcaagccacggaagctggtcaacactatcaacccgggagcccgcttcatgaccacagccatgtatgatgcccgggaggccatcatcccaggctccgtctatgatcggagcagccagggccggccttccagcatgtacttccagacccatgaccagattggcatgatcagtgccggccctagccacgtggctgccatgaacattcccatccccttcaacctggtcatgccacccatgccaccgcctggctattttggacaagccaacgggcctgctgcagggcgaggcaccccgaaaggcaagactggtcgtgggggacgccagaagaaccgctttgggcttcctggacccagccagactaacctccccaacagccaagccagccaggatgtggcgtcacagcccttctctcagggcgccctgacgcagggctacatctccatgagccagccttcccagatgagccagcccggcctctcccagccggagctgtcccaggacagttaccttggtgacgagtttaaatcacaaatcgacgtggcgctctcacaggactccacgtaccagggagagcgggcttaccagcatggcggggtgacggggctgtcccagtattaaaaggtggcggcggaagagctaagcaacgtggcttagtccatcagcatcttattctgggtaataaaaaataaaaataaacggatacctgttttccactgctaaaactgaagcaccactgtgtgagcaacaggaagggagagcgcacgagggagaggagccgaggccgagcgccccctgctggcccgcggcggcgaggagcagagggagcggaggaggggccggcccgcgggagccgcggccaccaggaggccccgctccgtcccatcggggctgcggccagggcggagggaggaagaccctcatctcagagtagccctttcctctgttcttttatttctttttctctttgattgaaaggggactacgtcttagcaggaaaaaaaacttcgcatttctgtgcccgagcaggctccttgcaaagacagcagcgtgcggggcagagccccgggagggcgcgtctgtccacgcctaccggacgcgccgaggtcgcgctgcctgtgttctccgagggccttcatttaaagaaaataagggtgttttgggtttttctctttgtttttttcaagattcttttaaaggagtactgaagaatactttcctaagtttgtctgtaaaatcttagcggtggacctgggagatttgagaagcttccagaaacagtttaaacaagccagcgctactggagaagaggagcaacacctgtgccgcggccggaggagttttgttgttggttttagcttccagtggcttctttctgcggggcatcaggctgctggggtagccgcccgccgagcctggaagctgctcgttctccgctggactcagaagccaagctgcttcccgcctagactcggcgcagggccccgcaccggtgaggaaggtgcttttggccccattgcgaggggccttggccaggactggccctgtggccaggaggcgagaaggtggctgttcccggattgacggctttttcccgggggcctttggaagatttggtggaaggacaagagggcctgtccctgtccccgtccccaggaggtaccgacagtccctgtgctggttagacacggagcgctgcacaccgaaagcccaaattgggagctctgcctgccggcaactttgctgatggggtgattgctgcttctggggggtaaggaaacaagttacagaaattaccgcgttctgtgtgaagggactgagggtgtggtgtcattggcagagggtcattttaggagagctgccccagcccctcgaacgcctggcttggggtgtcattctgcctggcggccaggcctccagcttcccctgccccgggcctggggctgtcactggccctgatccgaacacctccagattccggcttctacatgggacagacggggacgcacaggccaccttccttctggcagggactcttatttattcccattgctctagggctttcggtttccccttcttccggtaggccgcgtagaggcatgcaccgggtaggtttccgcggtgaccccgcggcggcctgagggacgctccctgccccatcccggctgttgggctgggccgctttgcctctgcttcgccctgtgctgtgttctccagctttgtagcagcagccttgacaaacccaggcgcactgtaccaaggcaatgtaacttttgattttcggtcaatttaagttcttttgtcaccaaatattaataaacagttttgacttc

SEQ ID NO: 133444 - protein, 3130 aa, Artificial Sequence
  derived and/or modified sequence
MFSVRIVTADYYMASPLQGLDTCQSPLTQAPVKKVPVVRVFGATPAGQKTCLHLHGIFPYLYVPYDGYGQQPESYLSQMAFSIDRALNVALGNPSSTAQHVFKVSLVSGMPFYGYHEKERHFMKIYLYNPTMVKRICELLQSGAIMNKFYQPHEAHIPYLLQLFIDYNLYGMNLINLAAVKFRKARRKSNTLHATGSCKNHLSGNSLADTLFRWEQDEIPSSLILEGVEPQSTCELEVDAVAADILNRLDIEAQIGGNPGLQAIWEDEKQRRRNRNETSQMSQPESQDHRFVPATESEKKFQKRLQEILKQNDFSVTLSGSVDYSDGSQEFSAELTLHSEVLSPEMLQCTPANMVEVHKDKESSKGHTRHKVEEALINEEAILNLMENSQTFQPLTQRLSESPVFMDSSPDEALVHLLAGLESDGYRGERNRMPSPCRSFGNNKYPQNSDDEENEPQIEKEEMELSLVMSQRWDSNIEEHCAKKRSLCRNTHRSSTEDDDSSSGEEMEWSDNSLLLASLSIPQLDGTADENSDNPLNNENSRTHSSVIATSKLSVKPSIFHKDAATLEPSSSAKITFQCKHTSALSSHVLNKEDLIEDLSQTNKNTEKGLDNSVTSFTNESTYSMKYPGSLSSTVHSENSHKENSKKEILPVSSCESSIFDYEEDIPSVTRQVPSRKYTNIRKIEKDSPFIHMHRHPNENTLGKNSFNFSDLNHSKNKVSSEGNEKGNSTALSSLFPSSFTENCELLSCSGENRTMVHSLNSTADESGLNKLKIRYEEFQEHKTEKPSLSQQAAHYMFFPSVVLSNCLTRPQKLSPVTYKLQPGNKPSRLKLNKRKLAGHQETSTKSSETGSTKDNFIQNNPCNSNPEKDNALASDLTKTTRGAFENKTPTDGFIDCHFGDGTLETEQSFGLYGNKYTLRAKRKVNYETEDSESSFVTHNSKISLPHPMEIGESLDGTLKSRKRRKMSKKLPPVIIKYIIINRFRGRKNMLVKLGKIDSKEKQVILTEEKMELYKKLAPLKDFWPKVPDSPATKYPIYPLTPKKSHRRKSKHKSAKKKTGKQQRTNNENIKRTLSFRKKRSHAILSPPSPSYNAETEDCDLNYSDVMSKLGFLSERSTSPINSSPPRCWSPTDPRAEEIMAAAEKEAMLFKGPNVYKKTVNSRIGKTSRARAQIKKSKAKLANPSIVTKKRNKRNQTNKLVDDGKKKPRAKQKTNEKGTSRKHTTLKDEKIKSQSGAEVKFVLKHQNVSEFASSSGGSQLLFKQKDMPLMGSAVDHPLSASLPTGINAQQKLSGCFSSFLESKKSVDLQTFPSSRDDLHPSVVCNSIGPGVSKINVQRPHNQSAMFTLKESTLIQKNIFDLSNHLSQVAQNTQISSGMSSKIEDNANNIQRNYLSSIGKLSEYRNSLESKLDQAYTPNFLHCKDSQQQIVCIAEQSKHSETCSPGNTASEESQMPNNCFVTSLRSPIKQIAWEQKQRGFILDMSNFKPERVKPRSLSEAISQTKALSQCKNRNVSTPSAFGEGQSGLAVLKELLQKRQQKAQNANTTQDPLSNKHQPNKNISGSLEHNKANKRTRSVTSPRKPRTPRSTKQKEKIPKLLKVDSLNLQNSSQLDNSVSDDSPIFFSDPGFESCYSLEDSLSPEHNYNFDINTIGQTGFCSFYSGSQFVPADQNLPQKFLSDAVQDLFPGQAIEKNEFLSHDNQKCDEDKHHTTDSASWIRSGTLSPEIFEKSTIDSNENRRHNQWKNSFHPLTTRSNSIMDSFCVQQAEDCLSEKSRLNRSSVSKEVFLSLPQPNNSDWIQGHTRKEMGQSLDSANTSFTAILSSPDGELVDVACEDLELYVSRNNDMLTPTPDSSPRSTSSPSQSKNGSFTPRTANILKPLMSPPSREEIMATLLDHDLSETIYQEPFCSNPSDVPEKPREIGGRLLMVETRLANDLAEFEGDFSLEGLRLWKTAFSAMTQNPRPGSPLRSGQGVVNKGSSNSPKMVEDKKIVIMPCKCAPSRQLVQVWLQAKEEYERSKKLPKTKPTGVVKSAENFSSSVNPDDKPVVPPKMDVSPCILPTTAHTKEDVDNSQIALQAPTTGCSQTASESQMLPPVASASDPEKDEDDDDNYYISYSSPDSPVIPPWQQPISPDSKALNGDDRPSSPVEELPSLAFENFLKPIKDGIQKSPCSEPQEPLVISPINTRARTGKCESLCFHSTPIIQRKLLERLPEAPGLSPLSTEPKTQKLSNKKGSNTDTLRRVLLTQAKNQFAAVNTPQKETSQIDGPSLNNTYGFKVSIQNLQEAKALHEIQNLTLISVELHARTRRDLEPDPEFDPICALFYCISSDTPLPDTEKTELTGVIVIDKDKTVFSQDIRYQTPLLIRSGITGLEVTYAADEKALFHEIANIIKRYDPDILLGYEIQMHSWGYLLQRAAALSIDLCRMISRVPDDKIENRFAAERDEYGSYTMSEINIVGRITLNLWRIMRNEVALTNYTFENVSFHVLHQRFPLFTFRVLSDWFDNKTDLYRWKMVDHYVSRVRGNLQMLEQLDLIGKTSEMARLFGIQFLHVLTRGSQYRVESMMLRIAKPMNYIPVTPSVQQRSQMRAPQCVPLIMEPESRFYSNSVLVLDFQSLYPSIVIAYNYCFSTCLGHVENLGKYDEFKFGCTSLRVPPDLLYQVRHDITVSPNGVAFVKPSVRKGVLPRMLEEILKTRFMVKQSMKAYKQDRALSRMLDARQLGLKLIANVTFGYTSANFSGRMPCIEVGDSIVHKARETLERAIKLVNDTKKWGARVVYGDTDSMFVLLKGATKEQSFKIGQEIAEAVTATNPKPVKLKFEKVYLPCVLQTKKRYVGYMYETLDQKDPVFDAKGIETVRRDSCPAVSKILERSLKLLFETRDISLIKQYVQRQCMKLLEGKASIQDFIFAKEYRGSFSYKPGACVPALELTRKMLTYDRRSEPQVGERVPYVIIYGTPGVPLIQLVRRPVEVLQDPTLRLNATYYITKQILPPLARIFSLIGIDVFSWYHELPRIHKATSSSRSEPEGRKGTISQYFTTLHCPVCDDLTQHGICSKCRSQPQHVAVILNQEIRELERQQEQLVKICKNCTGCFDRHIPCVSLNCPVLFKLSRVNRELSKAPYLRQLLDQF

SEQ ID NO: 133445 - DNA, 9393 bp, Artificial Sequence
  derived and/or modified sequence
atgttttcagttagaatcgtcaccgccgactattacatggctagtccattacagggcctggacacatgccaatccccattgacgcaagcgccagtgaagaaggtacccgtcgtacgtgtctttggagcgactcccgccggacaaaagacgtgcttgcatctgcatgggattttcccatacctgtacgtgccctacgatggttatggacaacaacccgagagctacctgtcgcaaatggcattctctatcgatcgtgcactcaacgtggctttgggaaaccctagcagtacagcacagcatgtgtttaaggtctccctcgtcagcggaatgccattctacggctatcatgagaaggagcggcacttcatgaagatctacctgtataatcccactatggttaagcggatttgcgagcttctccagtctggagcgataatgaacaaattctatcagccacacgaagcccatataccctacctgctgcaactgttcattgactacaacttatatgggatgaatttgattaatctggccgcagtgaagttcaggaaggcgaggaggaagagcaataccctgcacgccacaggatcatgcaagaatcatctcagcggcaatagtcttgccgacacactgttcaggtgggagcaggacgagattccatcctccttgattctggaaggcgtggaaccccaatccacttgcgagctggaggtggatgcggtggcagcagatattctaaatcgactggacatcgaggctcagattggtgggaaccctgggctgcaggctatttgggaggatgaaaagcagcgccgcagaaaccggaatgagacaagccagatgtcgcagcccgagtcccaggaccacaggttcgtacctgctaccgaatctgaaaagaaattccagaaacgattacaagagatcctcaaacaaaacgacttttctgttacgctgagcggttctgtggattattctgatggaagtcaggagttttctgccgagttgacactgcattccgaggtgctgagtcctgaaatgctccagtgtacacctgccaacatggtcgaagtacacaaagacaaagagtcgtctaaaggccacacccgtcacaaagtcgaagaggcgctcattaacgaagaggccatcctgaatttgatggaaaattcacagacattccagccacttacccaaaggttatctgagtcacccgtgttcatggactcttctcccgacgaagcactggttcacttgttggccggcctcgaatccgacggatacagaggtgagcgtaacaggatgcctagcccctgcagaagcttcggcaacaacaaatatcctcagaacagtgatgacgaggaaaatgaaccccaaatcgagaaggaggagatggagctctctctagttatgagccagcgctgggatagtaatattgaagagcactgtgctaagaagagaagcctgtgtcgcaatacacatagatcatccaccgaggatgacgacagtagttccggagaggaaatggaatggagcgacaactcacttttgttggccagcctaagtataccccagctggatgggactgccgatgagaacagcgacaatccactgaacaacgagaattcaaggacacactctagtgttattgcaacatccaagttgtcggttaaacctagtatttttcacaaggatgcggcaactctggaaccttcttcttccgcaaaaatcacctttcagtgcaaacacacaagtgcactctcttctcacgtgctcaataaagaagatttgatagaggacctcagtcagactaataaaaataccgagaaagggttagacaacagtgttacatctttcaccaacgaaagtacatactccatgaagtaccctggatcgctgtctagcacggtgcactctgaaaactctcacaaagagaattctaaaaaggaaatcctgcctgtcagtagctgcgagtctagcatcttcgactatgaagaggatattcccagcgtgacccgacaggtgccttccagaaagtacaccaatatccgaaagatcgagaaagattcacccttcattcacatgcacaggcatccgaacgaaaataccctgggaaagaactccttcaacttttccgacttaaaccactcaaagaacaaggtgtcctccgaagggaatgaaaagggaaattccacagccctttcctctctcttcccatcctccttcaccgagaattgtgagctattgtcctgctcaggcgagaatagaactatggtccatagccttaatagcaccgcggatgagtctgggctgaataagctgaaaatcaggtatgaggagttccaggagcacaaaaccgaaaagcctagcctgagtcaacaggctgcacattacatgttcttcccatccgtggtgctgtccaactgtctgaccaggccacagaaactgtcccccgtcacatataaattgcagccaggtaataaaccgagtcgcctgaaactcaacaaacgcaagctagcaggacatcaggagaccagcaccaagtcctccgaaactgggagcacaaaggataattttatccaaaataatccctgtaatagtaatcccgaaaaggataatgccttagccagtgatttaacgaagaccacacggggggccttcgaaaataaaacccctaccgatgggtttattgattgtcacttcggagatggtactctggaaaccgagcagtccttcggactgtacggcaataagtacactctcagagccaagcgtaaagttaactacgagactgaagactcagaatccagcttcgtgacccacaactccaagatcagcctaccacacccaatggagattggtgagtctttagatggcacattgaagtcacgaaaaagacggaagatgtccaaaaaactaccccctgtaataatcaaatacattataattaataggttccgcggtagaaagaacatgcttgtgaaactggggaagatagacagcaaggagaagcaagtgattctcactgaggagaagatggagctgtacaagaagctggctcctctgaaggatttctggccaaaagttcccgacagcccagctaccaaatatcctatttatcctctgacccctaagaaaagccaccggcgcaaatcaaagcacaagagtgccaaaaagaagacaggaaagcaacagagaactaataacgagaatataaagcgaacgttgagctttagaaaaaagagatctcacgctattctgtccccacctagtccgagctacaatgcagagaccgaggattgcgatctaaactacagtgatgtgatgtctaagctgggtttcttaagtgaacgttccacctcccccattaattcctccccacccaggtgctggagtcctacagatcctagggccgaagagatcatggctgctgccgagaaggaggccatgttattcaaggggcccaacgtctataaaaagacggtgaacagccggattgggaaaacctctcgcgcccgtgcacaaatcaagaagagcaaggcgaaactggcgaacccatcaattgtcacaaagaaacgaaataaacggaaccaaaccaataagctggttgacgacggcaagaagaagcctcgcgccaaacaaaagaccaatgaaaagggcacatctcgaaagcataccacactgaaagatgaaaaaattaaatcccagtctggtgcggaggtcaaattcgtgctcaaacaccagaacgtcagtgagttcgccagcagtagtggggggtctcagctcttgttcaaacagaaagacatgcctctcatggggagcgcagtggaccaccccctctctgcttcactgccgaccggcatcaacgcacaacagaagctgtcaggctgctttagttcattcttggaatccaagaagagcgttgacctccagactttccccagtagtagagacgacttacatccatcagtcgtgtgcaacagcattggccccggggtgtctaagatcaatgtgcagcgccctcacaaccagtccgccatgtttacactcaaggagagcacccttatccaaaaaaacatttttgatctttcaaaccacctctctcaggtggcgcagaatactcagatcagctccggcatgtcctccaagattgaggacaatgccaataacatacagaggaactatctcagttcgatcggcaaactgagcgaatatcgcaacagcctcgaaagcaagttggatcaggcttacacccccaacttcctgcattgcaaagactcacagcaacagattgtgtgtatcgccgagcagagtaagcacagcgaaacgtgttcacccggtaacaccgcttcagaagagtcgcagatgccgaacaactgctttgtcacgagcctgcgaagtcccattaagcagatagcatgggagcagaagcagcggggtttcatattagacatgagcaatttcaaacccgaacgggtgaagccgaggtcactatccgaagccatcagtcagactaaagcgctctcccagtgcaaaaatcgcaacgtaagtacgccgtctgcattcggggagggacagtccggtctggccgtgctgaaagaactgctgcagaaacgacaacagaaggcacagaacgctaatactacgcaggaccctctgtctaataaacaccaaccaaacaagaacatttcaggcagcctcgaacacaacaaggccaataagaggaccaggagtgtgacgagtccccggaagccacgaaccccacggtccacgaagcagaaagagaagatccccaaactgttgaaggtggattccttgaatcttcaaaattcttctcagctagacaattctgtctccgacgattcgcccatcttttttagtgatccaggattcgagtcttgctacagccttgaggacagcctctctccagagcacaactacaatttcgatataaacaccattggacagactggattctgctcattttacagtgggtcccagtttgtcccagcggatcagaacctccctcaaaaattcctcagcgacgccgtgcaagatctgtttcccgggcaggccatcgagaaaaatgaattcctgagtcacgacaatcaaaagtgtgacgaggacaaacaccataccactgattcagcctcctggattcgctccggtacactttcccctgagatttttgaaaaaagtactattgactccaacgaaaaccggcgccacaaccaatggaaaaattcgttccaccctctgactacgagatctaattccatcatggattccttttgcgtgcaacaggcggaagattgtctgtctgaaaaatcccggctgaatcgcagctccgtctcaaaggaggttttcctctcacttcctcagcccaacaatagtgactggattcagggtcacacacgaaaggaaatgggccaaagcttagattccgccaatactagtttcacggcaattctcagctcacccgatggcgagctggtcgatgtcgcttgtgaagatctggaactatacgtgtcccgaaacaatgatatgttaactcccacacccgacagttcaccacggtccaccagcagtccaagccagtctaaaaatggcagcttcacaccacggacagcgaacattctcaagccactgatgtcccccccttctcgtgaggaaatcatggctaccctgctggaccatgatttaagcgaaaccatttatcaggagccattctgcagcaacccctccgatgtgcctgaaaagcccagagagataggaggcaggctgttgatggtagagactcgcttggccaacgatctggcagaatttgagggggacttctccctggagggattgcgtttatggaagactgcattttctgccatgacgcagaaccctagaccaggatccccactgcgctctgggcagggcgtggtaaacaagggctctagcaacagtcccaaaatggtcgaagacaaaaagatcgtgatcatgccctgcaaatgtgctccaagccggcagttggtgcaagtttggctgcaggcaaaggaggagtacgagcggagcaagaagttgcccaagacaaaacctacaggcgtcgttaaaagcgcagaaaatttttccagtagtgtgaaccctgatgacaagcctgtggtcccaccaaagatggacgtgtcaccgtgcatccttcccactactgctcacaccaaagaagacgtggataacagtcaaatcgcgctccaggctcccacgactggctgtagccagaccgcgagtgagagccagatgttgccccccgtcgctagtgcctctgacccagagaaggatgaagacgacgacgacaactactatatcagctatagcagtccggattcccctgtgattcccccgtggcaacaacccattagccccgactctaaggctctgaacggtgacgacaggcccagttcccccgtggaggaactgccatccctggccttcgagaatttcttgaagccgattaaggacggcatccagaagtccccctgttcagagccgcaggagcccctcgtgatctccccgattaatacacgcgcacggaccgggaagtgcgagagtctttgcttccacagcacacccattatccagcggaaactgcttgaacgattgccagaagctcccggactgagtccgctgtccaccgaacctaagactcaaaaactctcaaataaaaaaggaagtaacaccgacaccctgagaagagtactgctgacacaagcaaagaatcaattcgccgcagtaaacacccctcagaaggaaacctcccagatagatggtccttcgttgaacaatacgtatggatttaaagtgagtatccagaacctgcaggaggcaaaggccctccacgaaatccagaatctcacgctgatctcagtcgaattgcacgcacggactcgcagggacttggaaccggaccctgaattcgatccaatctgtgctcttttctactgcatttcttccgataccccgctcccagacacggagaagactgagctcacaggcgttatcgtgatcgataaggataagacagtattctcgcaggatattaggtatcagactccgctcctgatcaggagcgggatcacgggcttggaagtgacctacgcggccgatgagaaagcactctttcacgagatcgctaatatcattaagcggtatgacccggacatcctgctgggctacgagattcaaatgcattcttggggatatctcttgcagagagctgccgctctgtccatcgacttgtgtcgcatgattagtcgggttcccgatgacaagattgaaaatcgctttgccgcagagcgggacgagtacggctcatacaccatgtcagaaattaacatcgttggtagaatcactcttaacctttggcggatcatgcgcaacgaggtcgcccttaccaactacacattcgaaaatgtcagcttccatgtgctgcaccagaggtttccacttttcaccttcagggtcctctccgactggttcgacaataaaacagacctataccgatggaaaatggtagaccactatgtatctagagtgagaggcaatctgcagatgctggaacagctggatctcataggcaagaccagtgagatggcccggctatttggcatccaattccttcatgtgcttacgagaggatcacagtacagggtggaaagtatgatgctccgaatagctaagcccatgaactacattcctgtgacgccgtccgtgcagcaacgatcccagatgcgtgctccacaatgtgtcccattgattatggaaccggagtcaaggttttactcaaacagcgtgctggtcctggattttcaatctttatatccgagtatagttattgcatacaattactgcttcagtacctgcctcggccatgtggaaaatctggggaagtacgatgaattcaagtttggctgtacgagcctccgggtgcctcctgacttgctgtatcaggttcgccacgatataaccgttagccccaatggggtcgcctttgtgaaaccaagcgtaagaaaaggggtgctcccccgcatgctggaagaaatcttgaaaaccagatttatggtcaagcagagcatgaaggcgtacaagcaggaccgggcccttagtcgtatgctggatgcaagacaattggggctaaaacttattgctaatgtcacctttggctacacctctgccaacttctcaggccgtatgccatgtatcgaggtgggggacagcatcgttcacaaggctcgtgaaacccttgagcgggctataaagttggtgaacgatactaaaaagtggggtgctcgggtggtgtacggtgacacagattctatgtttgtgctgctgaaaggtgccactaaggaacaatccttcaaaatcggccaagagattgctgaagccgtgacggcaacaaatcctaaacctgttaaacttaagttcgagaaggtgtatttgccatgcgtgctgcagacaaaaaagcgctatgttggctatatgtatgagacactcgaccagaaggaccctgtgtttgatgcgaaggggattgagactgttagacgcgatagctgtcctgccgtgagcaaaatcctggaaagatctctaaagttgctcttcgaaaccagggatatctcactgattaagcagtacgtgcagcgtcaatgcatgaaattacttgagggtaaagcttctattcaggacttcatcttcgcaaaggaatatcgcggaagcttttcttacaagccaggagcctgcgtgccagcactggaattgactagaaagatgctaacttacgataggagatcggagcctcaggtaggcgaacgcgtgccgtacgtgatcatctacggcactccaggggtcccactgatacaattggtgagaagacctgtggaagtactgcaagatcccactttaaggttaaacgccacctactacataaccaagcagatcctgcctcccttggctcgtattttctcactgattggtatagatgtgttttcatggtaccacgagctgccaagaatccacaaggcaacctcctcctctaggtcggaaccagagggtcggaagggtactatctctcaatactttaccactctgcactgccccgtttgcgatgacctcactcagcatggcatctgctcaaaatgcaggagccagccccagcacgttgcagtaattctcaaccaagaaatccgcgaactggagcgtcagcaagagcaattggtaaagatctgcaaaaactgcactgggtgtttcgaccggcacataccatgcgtctccttgaactgccctgtgctctttaagctgtcgcgtgtcaaccgggagctctcaaaggctccatatctgcggcagcttctagatcaattctag

SEQ ID NO: 133446 - DNA, 9393 bp, Artificial Sequence
  derived and/or modified sequence
atgttttctgtaagaattgtgactgccgactactatatggcttcaccactccaggggctggacacatgccaaagcccgctgacccaagctcctgtcaagaaggtgccggtggtgagagtgttcggcgctactcccgcagggcagaaaacctgtctgcacctgcacggtatcttcccttacctctatgtgccttacgatggctacgggcaacagccagagagctatctgtcacagatggcattctctattgacagagcactgaacgtggcactagggaacccgagcagtactgctcagcacgtttttaaagtgagcctagtgtcgggcatgcctttctacggctaccacgagaaagaacgccactttatgaaaatctatctgtataaccctacaatggtcaagagaatttgcgagctgcttcagtctggagccattatgaacaagttttatcaaccacacgaggctcatataccatacctgctgcaactattcatagattataatttgtacggcatgaacctgatcaacctcgctgctgttaaattcagaaaagcacgtaggaaatccaatacgcttcacgccacaggcagttgcaaaaaccatctatctggcaattccctggccgatacactcttccgctgggagcaggatgaaataccctcatcccttatcctagagggggtggagccccagagtacctgcgagctggaggtagacgctgtggcagctgacatcctgaacagactggacatcgaggcgcagatcggcggaaaccccggactgcaggctatctgggaagacgagaaacaaagacgaagaaacaggaacgagaccagccagatgtcccagcctgaatctcaagaccatcgattcgttcctgcgactgagagcgaaaagaaattccagaagcggcttcaggagatcctgaagcagaacgactttagcgttacgctatccggtagcgtggattattcagatgggtctcaggaatttagcgccgagctcacccttcactccgaggttctctcccccgaaatgctgcaatgcactcctgccaatatggttgaagtgcataaagacaaagagagttccaaaggccataccaggcataaggtggaggaagccctgattaatgaggaagccattctcaacctcatggaaaattcgcagacgttccagcccttgacccagcgcctctcggagtcacctgtcttcatggattcgagccccgatgaagccctggtgcacctgctggccggtttggaaagtgacgggtaccgtggcgagagaaatcgcatgccatctccatgtcggagttttggcaacaataaatatccgcaaaattctgatgatgaggaaaacgagccccagatcgagaaggaagaaatggagctctccctggtgatgtcccagcgctgggacagcaatatcgaagaacactgcgccaaaaaaaggtcactctgccgcaatacccaccgaagcagcaccgaggatgacgattcctcttctggggaggagatggagtggagcgacaactctctgctgctggcctcgctatctatcccacaactggacggcacggccgatgagaacagtgacaaccctctgaacaatgagaattctcgcactcactcctctgtcattgcgacgtctaagctcagtgtcaaacctagtatttttcacaaggacgccgccacactcgaacctagcagttcagctaaaattaccttccagtgtaagcacacttcagcattatcctcccacgtgctgaataaagaagacctcatcgaggacctgagtcagacaaacaagaacacagagaagggactggacaatagtgtgacatctttcacaaacgaaagcacatacagcatgaaataccctggcagtctgtcttccaccgttcactccgaaaacagccataaagagaatagcaagaaggagatcctcccagtaagcagctgtgaaagcagtatttttgattacgaagaggacatcccaagcgtgaccaggcaagttccatctcggaaatacactaatatcagaaaaatcgagaaggacagcccttttatccacatgcataggcaccccaacgagaatacactcggtaaaaattcgtttaacttctcagatctcaatcatagcaaaaataaggtgagctcagaaggtaacgaaaaagggaacagcaccgccctgtctagcttattccccagctcattcaccgagaattgtgagcttttgtcctgctcgggggaaaaccgcactatggtgcattccctgaatagcactgctgatgagtctggattgaataaattgaagatccgctatgaggagttccaggagcacaaaaccgagaagccgtcactcagccagcaggccgctcattacatgttctttccaagcgtggttctctctaactgcctgactagacctcagaaactctcaccagtcacttacaaactacagccgggcaacaaaccttccaggctgaagctgaataagcgcaagcttgcgggacatcaggaaaccagtactaagtcaagcgagacaggttctaccaaagataatttcatccagaataatccgtgtaacagcaatcctgagaaagacaacgcactggcaagcgacctgacaaaaacaacgcgtggtgcatttgaaaataagactcccacggatggattcatagattgtcactttggagacgggaccctggaaaccgagcagtccttcgggctttatggaaacaaatacaccctgagggcgaaacgcaaggttaattacgagacagaggatagcgagtccagcttcgtgacacataacagcaaaatctcattacctcatccaatggaaatcggtgaatccctggatggcaccctgaaatcccgaaaaagacgcaagatgagcaaaaaattgccccccgtgattataaagtatatcatcattaaccggtttaggggaaggaagaacatgctggtgaagttgggcaagattgactcgaaagagaagcaagtgatcctcactgaagagaagatggagttgtataaaaaactggctcctctgaaggacttctggccaaaggtgcctgacagtcccgctactaagtatccaatatatccactcacacctaagaaaagccacagaaggaaatcgaagcacaagtcagcaaagaagaaaaccggaaaacaacaacgcacaaataacgaaaacataaaacgaacactgtccttcagaaaaaagaggtcgcacgctatcctgtcccctccatctccctcttacaacgccgaaaccgaggactgcgatcttaactactcggatgtgatgtccaaactgggtttcctgagcgagcgtagtactagccctattaactcatccccccctagatgctggagccctacagatcccagggctgaggagataatggccgccgccgagaaggaagccatgttgtttaaagggccgaatgtgtacaagaagaccgtgaattcgagaattggcaaaacctcaagagcccgggcacagatcaaaaagtccaaggcaaagttggctaatccttccatcgttactaaaaagcgcaataaacgaaaccaaacaaacaaattagtggacgatggcaaaaagaaaccaagagccaaacagaagacaaatgagaaaggaacaagtagaaagcatactacacttaaagatgaaaagatcaaatcccagtcgggcgctgaggtgaagtttgtgctgaaacatcagaatgtttcagagttcgcatccagtagcggagggagccagctgttatttaagcagaaagatatgccactaatgggctctgccgtggaccaccctctgtcggcctccctgcctacgggaataaacgcacagcaaaagttgagtgggtgcttttctagtttcctcgaaagcaaaaagtcagtggacctgcaaacttttcccagttccagagacgacctccacccctctgtcgtgtgcaactcaatcggtcccggcgtgtccaaaatcaacgtccagagacctcataatcagagcgcgatgttcacactaaaagagtcaaccctcatccagaagaatatatttgacctgtccaatcatctgtcccaggtggcccagaacacacaaatatcatccggcatgtcgtccaaaatagaagacaacgccaacaacatccagagaaactatctgtcttccatcggtaagctgtctgaatatcgtaattcgctcgaaagtaaactagatcaggcatacaccccaaattttcttcactgtaaggattctcaacagcaaatagtgtgtattgcagaacaatctaaacactcagagacttgctcccccggcaacaccgcaagcgaggaatcccagatgccaaacaactgcttcgtgacgtccctccgatcaccaatcaaacagattgcatgggagcagaaacaacgcggtttcattctggacatgtcgaacttcaagccggagagagtgaaacctcgctccctatctgaggccatatcccagacaaaggcactgtcccaatgcaagaatcgcaacgtgagtacccccagcgcctttggcgagggtcaatccggtctggctgtgttaaaggagctcctgcaaaagagacagcagaaggcccaaaacgcaaacactacccaggatcctttgtcaaacaaacaccagcctaacaaaaatatttcaggatccctagagcacaacaaggctaataagcgaaccagaagcgtgaccagtccccgaaagcctcgaactcctcgatcaactaagcagaaggagaaaatccccaagctgctaaaagtagacagcctaaatctgcagaatagcagtcagctggataattcagtgtccgacgatagccccatctttttctctgatccagggtttgaatcctgttacagcctcgaggactccctctccccagagcacaattataacttcgatatcaatacaattggtcagacaggtttctgtagcttctactctgggtctcaatttgtcccagcagatcagaatctgccccagaaatttctgtccgatgcagttcaggacttatttcccgggcaggccatagaaaaaaatgaattcctcagtcacgataaccagaagtgtgacgaggacaagcaccacaccactgattccgcatcctggattcgcagcggaacactgagcccagagatcttcgaaaaatcaaccatagattcgaatgagaacagaagacataaccagtggaaaaacagcttccatccactgacaaccagaagcaacagcatcatggatagcttctgcgtccagcaggccgaggactgcttaagtgaaaaatctcggttaaaccgcagctccgtaagcaaagaggtgttcctcagtcttcctcagcccaataatagcgattggatccaaggacacaccaggaaggaaatgggccagtctttagattcagctaacacctcatttacagccatcctatcctcacccgacggagaactggttgacgtggcatgtgaagaccttgaactgtacgtgtcacgaaataatgacatgctgacaccaacgcccgacagctccccccgtagtacatcttccccatcccagtccaaaaacgggtcctttactccccggaccgcgaacatcctgaagccgttgatgtccccccccagtagggaggagatcatggccaccctgctagatcatgacttgagcgagaccatctaccaggaaccattttgcagtaaccccagtgacgttcctgagaagcctcgtgaaatcggaggacgcctactcatggtggaaacgcggcttgccaatgacctggccgagttcgagggtgacttttccctcgagggactgcggctctggaagactgccttctccgcaatgactcagaatcctaggccaggcagccctttgcgtagcggccaaggtgtagtgaacaaaggatcctcaaattcgcctaagatggttgaggacaaaaagatcgtcataatgccctgtaagtgtgcccccagcagacagctcgtccaggtatggctccaggccaaggaggaatatgagcgctccaagaagctgcccaagacaaagcctaccggtgtcgttaagtcagcagaaaactttagctcatccgtaaaccccgatgacaaacccgtggtcccccctaagatggatgttagtccctgtatcctcccaactaccgcacataccaaagaagacgtggacaattcgcagatagctttgcaggctccaacaactggatgctcccagaccgccagcgagtctcagatgttacctccagtggcgtccgcttctgaccccgagaaagacgaggacgacgatgataattactatatttcatattcaagtcccgactccccggttatacccccctggcagcagccaatttctcccgatagcaaggccctgaacggggacgacaggccatcaagcccagtggaggaactgccatctctcgcattcgaaaacttcttgaagcccatcaaggacggaatccagaagtctccgtgctccgaaccacaggagccacttgtgatctccccaattaatactagagcccgcactggcaagtgcgaatccctgtgttttcacagtacaccaatcatacagagaaagttgcttgagagactgcctgaggctcctggcctttccccactatcaactgagccaaagactcagaagttgagcaataaaaaggggtccaacactgatactctgaggcgggtcctgctaacccaagcgaagaaccagttcgctgccgtaaatacaccccaaaaggaaacgtcgcagattgacgggccatcattgaacaacacatacggctttaaggtatctatacagaacttgcaggaggcaaaggcactgcacgaaatccagaaccttacccttatcagcgtcgagctacatgcccggacacggcgtgatctggaaccagatccagagttcgatccaatttgcgcattattttactgtatctcttccgatacgcctctgcccgacaccgaaaagacagaactcacgggcgtcatcgtgattgataaggataaaactgtgttttcacaggatatccgatatcagacacctttactgatcagaagcggcattacaggacttgaagtgacctatgctgcagacgaaaaagccttatttcatgaaattgcaaacattatcaaacggtatgaccctgatatcttactcggttacgaaattcagatgcattcatgggggtacttgctgcagagggcggccgccctgtctatcgacctgtgccgaatgatcagtcgggttcccgatgataaaatagagaacagattcgccgccgagcgcgatgaatatggatcctatactatgagcgaaattaatatcgtaggccgcatcactttgaatctgtggcgtatcatgcgtaacgaggttgctctgaccaactatacttttgagaatgtgagctttcacgtcctgcaccagaggtttcctctgttcaccttccgggttttgtccgattggttcgataacaaaacggacctgtaccgttggaagatggtggatcactacgtaagccgagtaagaggtaacttacagatgttggaacagctggacttgatcgggaagacctctgagatggccagactctttggtatccaattcttgcacgtgctgaccaggggctctcaatacagggtagagtctatgatgctgcgcattgcaaaaccgatgaactatattcccgtgactccgagcgtgcagcagcgctcccaaatgagagcccctcagtgcgtaccactcattatggagcctgaatcacgtttttacagcaacagcgtccttgtcctcgatttccagagcttgtatccgagtatagtaatcgcttacaactactgtttttcgacttgtcttggtcacgtcgaaaatttgggaaaatacgacgagttcaagtttggatgcactagtctgcgggtcccccctgacctgctgtaccaggtccggcatgatatcacagtctcacccaacggggtggccttcgtcaagccgagtgtgcgtaagggggtgttaccccggatgttggaggaaatactgaaaactcgtttcatggtaaaacagtctatgaaagcttataagcaggaccgagccctatctaggatgctggatgcccggcagctaggacttaagttaattgccaacgtgactttcggatacacatccgccaacttcagcgggcgaatgccatgcattgaagtgggggattctattgtacataaagcgcgcgagacacttgagcgcgctatcaagctggtcaatgacacgaagaagtggggagctcgagttgtatacggagacactgacagcatgttcgtcctgttgaagggtgccacaaaggagcagtccttcaaaatcgggcaggagatcgccgaagcagtgactgccactaatccaaagccagtcaagctgaagttcgaaaaggtatacttaccatgtgtcctgcaaaccaagaagcgatacgtcgggtacatgtacgaaacacttgaccagaaggatcccgtgttcgatgccaaaggaattgaaacggtgagaagagacagctgtcctgcagtgagtaaaattctggagcggtctctgaaactgctctttgagacgagagacataagcctgatcaagcagtacgtccagagacagtgcatgaaactgctggaggggaaggcctctattcaggattttatctttgcaaaggagtacaggggatcgtttagctacaaacccggggcttgcgtgcccgcactggaactgaccagaaagatgctgacctacgaccggcggtcggagccgcaggttggtgagcgcgtgccctatgtgatcatctatggcacgccaggagtgccgctcattcagttggtacgccgcccagtggaggttttacaagatcctaccttgcgtctgaacgccacatattacatcacaaagcagattctcccccctttagccaggattttttccctgatcggaatcgatgtgtttagctggtaccacgaactcccgagaatccacaaggccactagtagctccagaagtgaacctgaagggagaaagggaacgatctctcagtactttacaacccttcactgcccagtgtgtgacgatttgacacagcacggaatttgttccaagtgtcgttcacaaccgcaacatgttgcagtgatacttaatcaggaaatacgggaactagaaaggcaacaggaacagctcgttaaaatctgcaagaattgcaccggatgctttgatagacatattccatgcgtaagcctgaactgccctgtgttgttcaaactctctagggtgaaccgcgaactgtccaaggccccctatttgcgtcaactgctagaccagttttag

SEQ ID NO: 133447 - DNA, 9393 bp, Artificial Sequence
  derived and/or modified sequence
atgttttcggttcggatagtcacagccgattactacatggcctccccactgcagggtctcgatacgtgtcagagtccactgacacaggcaccagtcaaaaaggttcccgtagtcagagtgttcggagccacccctgccggccagaaaacatgtctgcatctacacggcatctttccgtatctctatgtgccttacgatggctatggccaacagcctgaatcgtatctgtcccagatggcgttctctatcgaccgcgctttaaacgtggctctcgggaacccatcaagtaccgcccaacacgtctttaaggttagcctggtcagcggaatgcccttttacggataccatgagaaagagcgacactttatgaaaatatatctgtacaacccgaccatggtgaagcgcatatgcgaactcctccagagtggggcgataatgaataagttttaccagcctcacgaggcccacatcccttacctgctgcagctgtttatcgactacaacctgtacggcatgaacttaatcaaccttgctgccgttaagttccggaaagctcgacggaagtcaaacactctccacgccacaggatcttgtaaaaatcacttgtccggaaactccttggctgacaccttgtttcggtgggagcaggatgaaattccaagctcactcattctcgaaggcgtcgagccacagagtacctgcgaactggaggtcgacgccgttgctgctgacatcctgaacaggctggacattgaggcacaaatcggtggaaatcccgggctgcaggcgatatgggaggatgagaaacagagaagacgtaatcgcaacgagacctctcaaatgtcccagccagagtcgcaggaccatcggttcgtgccagcaactgaatcagaaaagaagttccagaagaggcttcaggaaatcttaaaacaaaatgacttctcagtgacactctccggcagtgtagattacagtgacggatcccaggagttcagcgcagaacttactctccattccgaagtcctgtctcccgagatgcttcagtgcaccccagcaaacatggttgaggtgcataaagacaaggaatcgagcaagggacatactcgccacaaagtcgaggaagccttgattaacgaagaggccattttgaatctgatggagaactcccagacttttcagccactgacccagcggctatctgagtccccagtgttcatggactctagcccggatgaggcgcttgtccacttgctggccggcctggaaagtgatggctataggggagaacggaacaggatgccttccccatgccggtcgttcggcaataataaatatccacagaattccgacgatgaagaaaatgagccgcagatcgagaaggaagaaatggagctctcactggtgatgtctcaacgatgggatagtaatattgaggaacattgcgccaaaaaaagatcactctgcagaaacacccatcgttcaagtaccgaggatgacgactcttcaagcggtgaggagatggagtggtccgacaattccctcctattggcttcgctctctatcccccagctcgatggaaccgccgacgagaatagtgacaatcccctgaataacgagaactccaggacacattcctccgtaatcgccacatcaaaactttcggtgaagccgagtatttttcacaaggatgccgcgactctggagccctccagcagcgcaaaaatcactttccaatgcaagcacaccagcgctctatctagtcatgtgctcaacaaagaagaccttatcgaagatttatcgcagaccaacaagaacactgagaagggtctggataacagcgttacatcattcactaacgagagtacctattcgatgaagtacccaggatccctatcatcaacagtccacagcgaaaactctcataaggagaacagtaaaaaggagatcctcccggtatccagctgcgaaagctctattttcgactacgaggaagatatccccagcgtcaccagacaggtgccctctagaaagtacactaatatacgcaaaattgagaaggactccccctttattcatatgcacagacaccccaatgagaacactctggggaagaactctttcaacttttccgatctgaaccacagtaagaataaggtgagcagcgagggtaacgagaaggggaattctacggctctgagttcacttttcccctcttcattcaccgaaaattgcgaactgctgagctgttcaggtgaaaatcgcacaatggtgcatagcctaaattccaccgctgacgagtcagggctgaacaagctgaagatccggtatgaggagttccaggagcacaagaccgagaagcccagcctatctcagcaggctgcccattatatgtttttcccctctgtggtgctttccaactgcctgacccggcctcagaaattgtccccagtgacatataagctccagcccggtaacaaacccagtcgccttaaattgaacaagcggaaactagccgggcaccaggagacatctacaaaaagctcagagacagggtccaccaaagacaacttcatacagaataacccttgcaattctaaccccgaaaaagacaacgccctcgccagtgacctgaccaagacaacacggggtgcgttcgagaacaagacccccacagacgggtttatcgactgccattttggggatggtactctggagaccgaacagtcttttggcttgtacggaaataagtacactctgagagccaaacgaaaagtgaattatgagaccgaggatagtgaaagctcctttgtaacgcacaattctaaaatctctctcccacatcctatggaaattggagaaagcctggacggtaccctgaaatcaagaaagaggagaaaaatgagcaagaagttaccacccgtgataatcaaatacatcatcattaacaggtttcgcgggagaaaaaacatgcttgttaagcttggaaagatcgactcaaaggagaagcaggtgatccttaccgaggaaaaaatggagctctacaagaagctcgccccgctcaaggacttctggcccaaggttcccgattcaccagccactaagtatccaatataccctctcacaccgaagaaaagccacaggcgtaaatctaaacataagagcgctaaaaaaaaaacaggtaaacagcaaaggacgaacaacgaaaacattaaaaggactctgagctttaggaaaaagcgctcccacgctatcctcagtccccctagtccgtcttacaatgctgagaccgaagattgcgatcttaactacagtgatgttatgtcgaagttgggatttctcagcgagcggtctaccagcccaatcaacagcagtccaccgcgttgttggtctcctactgatccgcgcgcggaagagataatggccgccgccgagaaagaggctatgctgtttaaaggccctaacgtctacaaaaaaactgtcaatagcagaattggcaagacgtcccgcgcgcgtgcgcaaataaaaaaatctaaagctaagctggcaaatccctctattgtcactaagaaacgcaacaagcggaaccagaccaataagctggtggatgacggcaaaaaaaagcctcgcgctaagcaaaagactaatgaaaagggaacgagtaggaagcataccacacttaaggacgaaaagataaaaagccagtccggagcagaggtcaagtttgtgctgaagcaccagaatgtgtcggaatttgcttcctcctcaggaggctcccagttgctgtttaagcaaaaggacatgccactgatggggtctgccgttgatcatcccttaagcgcctctctcccaacaggaattaatgcacagcagaagctatctgggtgtttttcatccttcttggagagtaaaaagtcagtggatcttcagacctttccatcttctcgcgacgatctgcacccatcagttgtgtgcaattcgattgggcccggtgtgtctaagatcaatgtccaacgtccccataaccagtcagccatgtttactctgaaggagtctaccctgatccaaaagaatatcttcgatctgtccaaccatctgagccaggtggcccagaacacacagatcagcagtgggatgtcatccaaaatcgaggacaatgccaataacatccaacggaactatctgagcagtatcggcaagctgtccgagtacagaaatagcttagagagcaaactggaccaggcctataccccaaattttttacattgcaaagacagccagcagcagatagtctgcatagctgagcagagtaaacacagcgaaacctgtagcccaggcaataccgcatcggaggagagtcagatgcccaataactgctttgtcacctctcttcgttccccaattaaacagattgcttgggaacagaaacagcgcgggtttatcctcgacatgtcaaatttcaagcctgagagggtaaaaccaaggagcctctctgaggctatctcccagacgaaagcattgagtcagtgtaaaaatagaaatgtgtccaccccctctgccttcggcgaaggacagagcggcctggccgtgctgaaggagcttttacagaaacgacagcagaaagcccagaatgctaacacgactcaggaccctttgtccaataagcatcagcctaacaagaatatcagtgggagtctcgaacacaataaagccaataaaagaactcgatcggtgacctctccccgcaagccgaggactcccaggtctacaaaacagaaagaaaagatcccaaagctcctcaaggtggactctctgaatctgcagaattcctctcaattggacaatagcgtgtcagacgatagcccaattttcttctctgaccccggctttgaatcctgctacagtctggaggattctttgtcacccgagcataactataactttgacatcaacacaattgggcagaccgggttctgtagtttctattccggctctcaattcgtccccgctgaccagaatcttcctcaaaaattcctgtcggacgcagtgcaggatctgttcccaggccaggcgatagagaagaatgagttcctgtctcacgacaaccaaaagtgtgacgaggacaaacaccacaccaccgacagtgccagctggataagaagtggaactttgagccccgaaattttcgaaaagtcgactatcgacagtaatgagaatcgaaggcacaatcagtggaagaatagcttccacccgctaactaccagatcaaactccattatggacagcttctgcgtgcagcaggctgaggattgtctcagtgagaagtcccggctaaataggtccagcgtaagcaaagaagtcttcttgagcctgcctcagccgaataactctgactggatccagggacacacgaggaaggaaatgggccaaagcctggactcggccaatactagtttcacggctattctgtcctcaccagacggcgaattagtcgatgtggcctgtgaggatttggaactatacgtcagtaggaataacgacatgttgacgcccacacccgatagcagcccccgtagtacatcatcgcctagtcaaagtaaaaacggaagcttcactccacgcacagccaatatcctcaagccgcttatgtccccaccctctagagaggagataatggcaacattattggaccacgacttatctgagaccatctatcaggagcctttttgttctaacccatcagacgtgcccgaaaaaccgcgggaaattggaggccgcctgctcatggtggagacccggctcgcaaacgatctggccgagttcgagggagatttttcactggagggattaaggctgtggaagactgcattcagcgcaatgacacagaacccacggcctggtagccccctgaggtcaggccagggcgtggtgaataaaggctcgagtaattcacccaagatggtggaggacaaaaagattgttattatgccctgcaagtgtgcccccagcagacagctcgtccaggtttggctgcaggccaaggaagaatacgagaggtctaagaaattgcctaaaactaaacctaccggagttgtcaaatccgctgagaacttttcatctagtgtgaatcctgatgacaaacccgtcgttcctcctaaaatggacgtgagtccttgcattctccccactacagctcacactaaggaagatgtagataacagccaaatagctttgcaggcacctacaaccggctgtagccagaccgcctctgagagccagatgctgccgcccgtcgctagcgcctccgacccagaaaaggacgaagatgacgacgataactattatatctcctatagcagccctgacagcccagtgattcctccttggcagcagcccatttcccctgacagcaaggcactgaatggagatgaccgcccaagcagtcccgtagaagaactaccttctcttgctttcgaaaacttccttaaacctattaaagacggtatccagaagagcccatgctccgagcctcaagaaccgttggtcatctcaccaataaatacaagagccagaacggggaagtgtgaaagtctgtgttttcatagcactcctataatacagcgaaaacttttagaacggctgcccgaagccccaggactgtcccccctgtctaccgaacctaaaacccaaaaactgagcaacaagaagggtagcaacacggataccctaaggcgggtgctcttgacccaagctaaaaatcagtttgccgcggttaacacccctcagaaggagaccagtcagatcgacggacctagtctgaataacacctatggattcaaagtctctatccaaaacttgcaagaagccaaagcattgcacgagatacaaaatttaaccctgatctccgtggaactacatgccagaacaaggcgagatctcgagcccgatcccgaattcgaccctatttgtgccctcttctactgcataagctcggacactccactcccagatacggagaaaacagaactgaccggagtgattgtaatagataaggacaaaactgtcttctcgcaggacatccggtaccagactcccctgctgattcggagtggcatcaccgggcttgaggtaacctatgctgccgatgagaaagcacttttccatgagatcgccaacatcataaaaaggtatgatcccgacatcctgttgggctacgaaatacagatgcacagttgggggtacctgctgcagcgtgccgcagcgctcagcatagacctgtgtcgcatgatctcgagagtgcccgatgacaagatcgaaaaccgattcgccgctgaaagggacgagtacgggtcctacaccatgtctgagataaatatcgtagggaggatcactctgaacttgtggagaataatgaggaatgaagtcgccctgactaattatacatttgaaaacgtgagtttccacgtgctgcaccaacgctttcctctcttcaccttccgagtgctgagcgactggttcgacaataagaccgatttgtaccggtggaaaatggtcgaccattacgtcagtcgcgtaagaggtaatttgcagatgttggaacagctggatttgatcggaaagaccagtgaaatggcccgactgttcggaatccaattcctgcatgtacttacccgcgggtctcaataccgtgtcgagagcatgatgctgagaatcgcaaagccaatgaattacatccccgtgactcccagtgtacagcagcgttctcagatgagggcaccacaatgcgtaccgttgatcatggagccggagtcccgcttttatagcaatagcgtgctcgttctggacttccagagcctgtatccttccatcgtcattgcctataactactgcttttccacctgtttaggtcatgttgagaacctcggcaagtatgacgagtttaagttcggatgtacctcgctgagggtacctccagatttgctttaccaggtgcgccacgacatcacagtcagcccaaacggcgtggcctttgtcaaacctagcgttagaaagggggtgctgccaagaatgctggaagaaattcttaaaacacgcttcatggtaaaacaatctatgaaggcctacaaacaagaccgcgccctgtcccggatgcttgatgctcgccaattgggcttaaagttgattgccaatgtgacattcgggtatacttccgcgaatttcagcggccggatgccctgtatcgaggtgggggactcaatcgtgcataaggcccgagagactctggagagagccattaaactggtaaacgacactaaaaaatggggcgctcgggtcgtgtacggtgacactgacagcatgtttgtgctgctgaaaggcgctaccaaagagcagagttttaaaatcggtcaggagattgcggaggccgtgacagccaccaacccaaaacctgtgaaactgaagtttgagaaagtctaccttccgtgcgttctgcagaccaaaaagcggtacgtgggttacatgtatgagactctggaccagaaggaccctgtttttgacgctaaggggatcgaaaccgttaggcgtgattcctgccctgccgtttccaagatcctagaacggagcttgaagctgttgttcgagacacgcgatatcagtctcattaagcagtacgtgcagagacaatgcatgaagctgctggaaggcaaggccagcatccaggatttcattttcgccaaggagtaccggggctcttttagttacaaacctggcgcttgcgtcccagcccttgaactgacacggaagatgttaacatacgaccgaagatcggaacctcaagtcggcgagcgggtaccttacgtcattatctacggaacacctggagtcccccttatacagttggtgcgcaggccagtggaggttcttcaagaccccaccctaaggttgaatgccacatactatatcacgaagcaaatactcccacctttggctcgcatatttagtctaatcggtatcgatgtcttcagctggtatcacgaactgcctcggatccacaaggccacatcctccagtcgctccgagcccgaaggtcgcaagggcactatcagccagtatttcactactctgcattgccctgtgtgcgatgatttgacgcagcacggaatttgttccaagtgccgcagccagcctcaacacgtggccgttattttaaatcaagagattcgggagctagagaggcagcaggagcagttggtgaaaatatgtaagaattgcaccggttgcttcgatagacacatcccgtgcgttagtcttaactgccctgtgctgtttaaactgtcaagggtcaaccgggagctcagtaaagccccttaccttcgtcaactgcttgaccagttttag

SEQ ID NO: 133448 - DNA, 9393 bp, Artificial Sequence
  derived and/or modified sequence
atgttttctgtgcgcatcgtgacagctgactactacatggccagccccctgcagggcctggacacctgccagagccccctgacccaggcccctgtgaagaaggtgcctgtggtgcgggtgtttggagccaccccagctggccagaagacctgcctgcacctgcacggcatcttcccctacctgtatgtgccctatgatggctacggccagcagcctgagagctacctgagccagatggccttcagcattgaccgggccctgaatgtggccctgggcaaccccagcagcacagcccagcacgtgttcaaggtgtccctggtgtctggcatgcccttctacggctaccacgagaaggagcggcacttcatgaagatctacctgtacaaccccaccatggtgaagaggatctgtgagctgctgcagagcggggccatcatgaacaagttctaccagccccatgaggcccacatcccctacctgctgcagctgttcatcgactacaacctgtatggcatgaacctgatcaacctggccgctgtgaagttcaggaaggcccggaggaagagcaacaccctgcacgccaccggcagctgcaagaaccacctgagcggcaacagcctggccgacaccctcttccgctgggagcaggatgagatccccagcagcctcatcctggagggcgtggagccccagagcacctgtgagctggaggtggatgctgtggccgctgacatcctgaaccggctggacatcgaggcccagattggaggcaaccctggcctgcaggccatctgggaggatgagaagcagaggagaagaaacagaaatgagaccagccagatgagccagcctgagagccaggaccacagatttgtgcctgccacagaaagtgagaagaagttccagaagaggctgcaggagatcctgaagcagaatgacttctctgtgaccctgagcggctctgtggactacagtgatggcagccaggagttctctgctgagctgaccctgcacagcgaggtgctgagccctgagatgctgcagtgcaccccagccaacatggtggaggtgcacaaggacaaggagagcagcaagggccacaccaggcacaaggtggaggaggccctgatcaatgaggaggccatcctgaacctgatggagaacagccagaccttccagcccctgacccagaggctgtctgagagccctgtgttcatggacagcagcccagatgaggccctggtgcacctgctggccggcctggagagtgatggctacagaggagagaggaacaggatgcccagcccctgccgcagctttggaaacaacaagtacccccagaacagtgatgatgaagaaaatgagccccagatcgagaaggaggagatggagctgagcctggtgatgagccagcgctgggacagcaacatcgaggagcactgtgccaagaagaggagcctgtgcaggaacacccacaggagcagcacagaagatgatgacagcagcagtggagaggagatggagtggagcgacaacagcctgctgctggccagcctgagcatcccccagctggatggaacagcagatgagaacagcgacaaccccctgaacaatgaaaacagcaggacccacagcagcgtcatcgccaccagcaagctgtctgtgaagcccagcatcttccacaaggatgctgccaccctggagcccagcagcagcgccaagatcaccttccagtgcaagcacaccagcgccctgagcagccacgtgctgaacaaggaggacctgattgaggacctgagccagaccaacaagaacacagagaagggcctggacaacagcgtgaccagcttcaccaatgaaagcacctacagcatgaagtacccaggcagcctgagcagcacagtgcacagcgagaacagccacaaggagaacagcaagaaggagatcctgcctgtgagcagctgtgagagcagcatctttgattatgaggaggacatccccagcgtgacccggcaggtgcccagcaggaagtacaccaacatcaggaagattgagaaggacagccccttcatccacatgcaccgccaccccaatgaaaacaccctgggcaagaacagcttcaacttcagtgacctgaaccacagcaagaacaaggtgtcctctgagggcaatgagaagggcaacagcacagccctgagcagcctcttccccagcagcttcacagagaactgtgagctgctgagctgcagcggggagaacagaaccatggtgcacagcctgaacagcacagcagatgaaagtggcctgaacaagctgaagatccgctatgaggagttccaggagcacaagacagagaagcccagcctgagccagcaggccgcccactacatgttcttccccagcgtggtgctgagcaactgcctgacccggccccagaagctgagccctgtgacctacaagctgcagcccggcaacaagcccagccggctgaagctgaacaagaggaagctggccggccaccaggagaccagcaccaagagcagcgagaccggcagcaccaaggacaacttcatccagaacaacccctgcaacagcaaccctgagaaggacaatgccctggccagtgacctgaccaagaccaccaggggggcctttgagaacaagacccccacagatggcttcatcgactgccactttggagatggcaccctggagacagagcagagctttggcctgtatggcaacaagtacaccctgcgggccaagaggaaggtgaactatgaaacagaggacagcgagagcagctttgtgacccacaacagcaagatcagcctgccccaccccatggagattggagagagcctggatggcaccctgaagagcaggaagaggaggaagatgagcaagaagctgccccctgtgatcatcaagtacatcatcatcaaccgcttccggggcaggaagaacatgctggtgaagctgggcaagattgacagcaaggagaagcaggtgatcctgacagaggagaagatggagctgtacaagaagctggcccccctgaaggacttctggcccaaggtgcctgacagccctgccaccaagtaccccatctaccccctgacccccaagaagagccacaggaggaagagcaagcacaagagcgccaagaagaagacaggcaagcagcagaggaccaacaatgaaaacatcaagaggaccctgtccttcaggaagaagaggagccacgccatcctgagcccccccagccccagctacaatgctgagacagaggactgtgacctgaactacagtgatgtgatgagcaagctgggcttcctgtctgagaggagcaccagccccatcaacagcagccccccacgctgctggagccccacagaccccagggctgaggagatcatggctgctgctgagaaggaggccatgctgttcaagggccccaacgtgtacaagaagacagtgaacagccgcatcggcaagaccagccgggcccgggcccagatcaagaagagcaaggccaagctggccaaccccagcatcgtgaccaagaagaggaacaagaggaaccagaccaacaagctggtggatgatggcaagaagaagccccgggccaagcagaagaccaatgagaagggcaccagcaggaagcacaccaccctgaaggatgagaagatcaagagccagagcggggctgaggtgaagtttgtgctgaagcaccagaatgtgtctgaatttgccagcagcagcggcggcagccagctgctcttcaagcagaaggacatgcccctgatgggcagcgctgtggaccaccccctgagcgccagcctgcccaccggcatcaatgcccagcagaagctgagcggctgcttcagcagcttcctggagagcaagaagtctgtggacctgcagaccttccccagcagcagagatgacctgcaccccagcgtggtgtgcaacagcatcggccctggggtgtccaagatcaacgtgcagaggccccacaaccagagcgccatgttcaccctgaaggagagcaccctcatccagaagaacatctttgacctgagcaaccacctgagccaggtggcccagaacacccagatcagcagcggcatgagcagcaagattgaagataatgccaacaacatccagaggaactacctgagcagcatcggcaagctgtctgagtacagaaacagcctggagagcaagctggaccaggcctacacccccaacttcctgcactgcaaggacagccagcagcagatcgtgtgcatcgccgagcagagcaagcacagcgagacctgcagccctggcaacacagccagcgaggagagccagatgcccaacaactgctttgtgaccagcctgcggagccccatcaagcagatcgcctgggagcagaagcagaggggcttcatcctggacatgagcaacttcaagccagagcgggtgaagcccaggagcctgtctgaggccatcagccagaccaaggccctgagccagtgcaagaacagaaatgtgtccacccccagcgccttcggggagggccagagcggcctggccgtgctgaaggagctgctgcagaagaggcagcagaaggcccagaatgccaacaccacccaggaccccctgagcaacaagcaccagcccaacaagaacatcagcggcagcctggagcacaacaaggccaacaagaggaccaggtctgtgaccagccccaggaagcccaggacccccaggagcaccaagcagaaggagaagatccccaagctgctgaaggtggacagcctgaacctgcagaacagcagccagctggacaacagcgtgtctgatgacagccccatcttcttcagtgaccccggctttgagagctgctacagcctggaggacagcctgagccctgagcacaactacaactttgacatcaacaccatcggccagacaggcttctgcagcttctacagcggcagccagtttgtgcctgctgaccagaacctgccccagaagttcctgagtgatgctgtgcaggacctcttccctggccaggccatcgagaagaatgagttcctgagccatgacaaccagaagtgtgatgaggacaagcaccacaccacagacagcgcctcctggatccgcagcggcaccctgagccctgagatctttgagaagagcaccatcgacagcaatgaaaatagaagacacaaccagtggaagaacagcttccaccccctgaccaccaggagcaacagcatcatggacagcttctgtgtgcagcaggccgaggactgcctgtctgagaagagccggctgaacagaagctctgtgtccaaggaggtgttcctgagcctgccccagcccaacaacagcgactggatccagggccacaccaggaaggagatgggccagagcctggacagcgccaacaccagcttcaccgccatcctgagcagcccagatggagagctggtggatgtggcctgtgaggacctggagctgtatgtgtccagaaataatgacatgctgacccccaccccagacagcagccccaggagcaccagcagccccagccagagcaagaatggcagcttcacccccaggacagccaacatcctgaagcccctgatgagcccccccagccgggaggagatcatggccaccctgctggaccatgacctgtctgagaccatctaccaggagcccttctgcagcaaccccagtgatgtgcctgagaagccccgggagatcggcggccgcctgctgatggtggagacccggctggccaatgacctggccgagtttgaaggagacttcagcctggagggcctgcggctgtggaagacagccttcagcgccatgacccagaaccccaggcctggcagccccctgcggagcggccagggcgtggtgaacaagggcagcagcaacagccccaagatggtggaggacaagaagatcgtcatcatgccctgcaagtgtgcccccagccggcagctggtgcaggtgtggctgcaggccaaggaggagtatgaaagaagcaagaagctgcccaagaccaagcccaccggggtggtgaagtctgctgagaacttcagcagctctgtgaacccagatgacaagcctgtggtgccccccaagatggatgtgagcccctgcatcctgcccaccacagcccacaccaaggaggatgtggacaacagccagatcgccctgcaggcccccaccaccggctgcagccagacagccagcgagagccagatgctgccccctgtggccagcgccagtgaccctgagaaggatgaagatgatgatgacaactactacatctcctacagcagcccagacagccctgtgatccccccctggcagcagcccatcagcccagacagcaaggccctgaatggagatgaccggcccagcagccctgtggaggagctgcccagcctggcctttgagaacttcctgaagcccatcaaggatggcatccagaagagcccctgcagcgagccccaggagcccctggtgatcagccccatcaacacccgggccaggactggaaaatgtgagagcctgtgcttccacagcacccccatcatccagaggaagctgctggagcggctgcctgaggcccctggcctgagccccctgagcacagagcccaagacccagaagctgagcaacaagaagggcagcaacacagacaccctgcggcgggtgctgctgacccaggccaagaaccagtttgctgctgtgaacaccccccagaaggagaccagccagattgatggccccagcctgaacaacacctacggcttcaaggtgtccatccagaacctgcaggaggccaaggccctgcacgagatccagaacctgaccctcatctctgtggagctgcacgcccggacccggcgggacctggagccagaccctgagtttgaccccatctgtgccctcttctactgcatcagcagtgacacccccctgcctgacacagagaagacagagctgactggagtcatcgtcatcgacaaggacaagacagtgttcagccaggacatccgctaccagacccccctgctgatccgcagcggcatcaccggcctggaggtgacctatgctgctgatgagaaggccctcttccatgaaattgccaacatcatcaagagatatgaccctgacatcctgctgggctatgagatccagatgcacagctggggctacctgctgcagagagctgctgccctgagcattgacctgtgcaggatgatcagccgggtgcctgatgacaagattgagaacagatttgctgctgagagagatgaatatggcagctacaccatgtctgagatcaacatcgtgggccgcatcaccctgaacctgtggaggatcatgagaaatgaggtggccctgaccaactacacctttgaaaatgtgtccttccacgtgctgcaccagcgcttccccctcttcaccttccgggtgctgagtgactggtttgacaacaagacagacctgtaccgctggaagatggtggaccactacgtgtcccgggtgcggggcaacctgcagatgctggagcagctggacctgattggcaagaccagcgagatggcccggctgtttggcatccagttcctgcacgtgctgacccggggcagccagtacagagtggagagcatgatgctgcgcatcgccaagcccatgaactacatccctgtgacccccagcgtgcagcagaggagccagatgagggccccccagtgtgtgcccctcatcatggagcctgagagccgcttctacagcaacagcgtgctggtgctggacttccagagcctgtaccccagcatcgtcatcgcctacaactactgcttcagcacctgcctgggccacgtggagaacctgggcaagtatgatgagttcaagtttggctgcaccagcctgcgggtgcccccagacctgctgtaccaggtgagacatgacatcaccgtgagccccaacggggtggcctttgtgaagcccagcgtgaggaaaggagtgctgcccaggatgctggaggagatcctgaagacccgcttcatggtgaagcagagcatgaaggcctacaagcaggaccgggccctgagcaggatgctggatgcccggcagctgggcctgaagctgattgccaacgtgaccttcggctacaccagcgccaacttcagcggccgcatgccctgcatcgaggtgggggacagcatcgtgcacaaggcccgggagaccctggagcgggccatcaagctggtgaatgacaccaagaagtggggcgcccgggtggtgtatggagacacagacagcatgtttgtgctgctgaagggggccaccaaggagcagagcttcaagattggccaggagattgctgaggccgtgacagccaccaaccccaagcctgtgaagctgaagtttgagaaggtgtacctgccctgtgtgctgcagaccaagaagagatatgtgggctacatgtatgagaccctggaccagaaggaccctgtgtttgatgccaagggcattgaaacagtgagaagagacagctgcccagctgtgtccaagatcctggagaggagcctgaagctgctgtttgagacccgggacatcagcctcatcaagcagtatgtgcagaggcagtgcatgaagctgctggagggcaaggccagcatccaggacttcatctttgccaaggagtaccggggcagcttctcctacaagccaggggcctgtgtgcctgccctggagctgaccaggaagatgctgacctatgacagaagaagtgagccccaggtgggggagcgggtgccctacgtgatcatctacggcaccccaggagtgcccctcatccagctggtgagaagacctgtggaggtgctgcaggaccccaccctgcggctgaatgccacctactacatcaccaagcagatcctgccccccctggcccgcatcttcagcctgattggaattgatgtgttctcctggtaccacgagctgccccgcatccacaaggccaccagcagcagccgctctgagcctgagggcaggaagggcaccatcagccagtacttcaccaccctgcactgccctgtgtgtgatgacctgacccagcacggcatctgcagcaagtgccgcagccagccccagcacgtggccgtcatcctgaaccaggagatccgggagctggagcggcagcaggagcagctggtgaagatctgcaagaactgcaccggctgctttgacagacacatcccctgtgtgtccctgaactgccctgtgctcttcaagctgagccgggtgaaccgggagctgagcaaggccccctacctgcggcagctgctggaccagttctag

SEQ ID NO: 133449 - DNA, 9393 bp, Artificial Sequence
  derived and/or modified sequence
atgttcagcgtgcggatcgtgaccgccgactactacatggccagcccattacagggtctggatacctgtcagagccccctcacccaggcccccgtgaaaaaggtgcccgtggtgagagtattcggggccacccctgccgggcagaagacatgtttacacctgcacggtatcttcccttatctgtacgtcccatacgatggatatggtcagcagccggaatcttacctctcgcaaatggccttcagcatcgacagggccttgaatgttgctctcgggaacccatcatctaccgctcagcacgtgtttaaagtgtcactagtgagcggcatgcccttctatggttaccacgagaaggaacgccattttatgaagatatatctgtataatcccaccatggtgaagcgcatatgtgaactgctacagagtggggctatcatgaataagttctatcagcctcatgaggctcacatcccctatctgctgcaactttttatcgactataacctttatgggatgaacctgatcaacctcgccgccgtaaaattccggaaggccaggcgcaagagtaatactctgcatgctacaggatcttgtaagaatcatctgtctggtaatagtctggctgatacattgtttcgctgggagcaagacgaaataccctccagcctcatcctggaaggggtggagccgcaatcaacgtgcgaactggaagtggatgccgtagcggctgacatcttgaaccgcctggatatcgaggcccagattggaggcaaccctggactgcaggcaatttgggaggacgagaagcaacgtaggagaaacaggaatgagacctcccaaatgagtcagccagagagtcaggaccaccggttcgtgcctgctactgagagtgagaagaaatttcagaagcgactccaggagattttaaagcagaatgatttctctgtgaccctgagcggatccgtcgactattctgacggttcacaggagtttagtgccgaactcaccctacatagcgaagttctgtctccagagatgttacagtgcacaccagccaatatggtggaggtccacaaggacaaagaatcatcaaagggccatacacggcataaggtggaggaggccctgatcaacgaagaggccatcctcaatttgatggaaaatagccagactttccagccgctcacgcagcggttatcagaatccccagtgtttatggactcaagccctgacgaagctctggtgcacctacttgccggcctggagtcagatgggtatcgcggggagcggaatagaatgccatcaccatgtcgtagttttggcaataacaagtatccacagaattccgacgacgaggagaacgagccacagatcgagaaggaggagatggaactctcccttgtgatgagtcagcgatgggactctaatatcgaggaacattgcgcgaaaaaaagatccctgtgccgcaacacacatcggtcctcgaccgaggatgatgattcaagctcgggcgaagagatggagtggtccgataactccttactcctggctagcctgtcaatcccgcaacttgatggcactgccgacgagaattccgataatcctctgaataacgaaaacagtaggacccacagttctgtgatagccacaagcaaactcagcgtgaaacctagcatctttcacaaggatgctgctactctcgagccctccagttcagccaagattacattccagtgcaagcacacgagcgctttaagtagtcacgttctcaataaagaagatttgatcgaagacctcagtcagactaacaagaacacagagaagggcctggacaattcggtcacctcgttcaccaatgaatccacctattctatgaaatatcctggctccctctcctctaccgtgcattccgagaattctcataaggagaattcaaaaaaagagatacttcctgtctcatcttgcgagtcttcgatcttcgactatgaggaagatataccctcagtcacccggcaggttccgagtagaaagtacaccaacattcggaagattgagaaggactctcctttcatccacatgcacagacaccctaacgagaataccctgggaaagaactcctttaatttctctgatctgaaccacagtaaaaataaagtgagctctgagggaaacgaaaaggggaattcgactgcactgagcagtctgtttccaagcagctttacagagaactgtgagctgctgagctgctccggtgagaacaggaccatggttcacagccttaactcgactgccgacgagagcggtttgaacaagttgaaaatccggtacgaagagtttcaagaacacaagaccgagaaaccgtccttatcgcagcaggccgctcactacatgttctttccttccgtggttctctcaaattgcttgacaagaccccagaaactgtccccagtgacttacaagctgcaacccggtaacaaacctagccgcctgaagctgaataagcgcaagctagctggccaccaggagactagtacgaagagctcagaaaccggcagcacaaaggacaatttcattcagaacaatccttgtaattctaatcccgaaaaggataacgccctggcctccgacttgacgaagacaacgcgtggagccttcgaaaacaagacccccaccgatggctttattgattgtcatttcggcgacggcactctagagactgagcagtcttttgggctttacggtaacaagtatacacttcgggccaagcggaaagttaattacgagaccgaggatagcgagtcgagctttgtcacacacaattcaaagatctcactgccccaccctatggaaattggtgagtccctcgacgggaccctcaaatcaaggaaacgcagaaagatgtcgaaaaaacttcccccggtgataatcaagtacatcattattaacagattccgcgggcgtaagaatatgctggtaaaattgggcaagatagatagcaaggaaaaacaggtcattctcactgaagagaaaatggaactatacaagaagctcgccccgctgaaagacttctggcccaaggtgcccgactcacctgccacgaaataccctatttaccccttaacccctaaaaaatcacacagacggaaaagcaaacataagtctgcgaaaaaaaaaacagggaaacagcagagaacaaataatgagaatattaaaagaaccttaagctttaggaagaaacggagtcatgcaatactctcacctccttcgcccagctacaatgcagagaccgaggactgtgatctgaattacagcgatgtgatgtccaagctcggcttcctttccgaaagaagtacttcccctattaatagtagcccacctcgctgttggagccccactgacccacgcgccgaagaaattatggccgctgccgaaaaggaagccatgctcttcaaggggcccaatgtgtacaaaaaaactgtgaatagccggattgggaagacctccagggctagagcacaaatcaaaaagtcaaaggctaaactggccaacccttccattgtgacaaagaaacgaaataaacggaatcaaactaacaagctagtcgacgatggcaagaagaaaccgcgggctaagcagaaaacaaacgagaagggcactagcaggaagcatactactcttaaagatgaaaaaattaagagtcagagtggagctgaagtcaagttcgtcctgaagcatcagaacgtgtctgaatttgcctctagcagcggcggcagccaattgctttttaagcagaaagatatgcctctaatgggctccgccgtggatcacccgctgagtgcctctcttccaacaggcattaacgctcagcagaaattaagtggatgttttagctctttcctggagtcgaagaaaagcgtggatctacagaccttccccagttcacgggacgacctacatccgtctgtggtgtgcaactccattggccctggagtctctaagatcaatgtacagaggcctcataatcagtctgccatgttcaccctgaaggaaagcaccttaatccagaagaacatttttgacctcagcaatcacttaagccaggtcgcccaaaatacacagatctccagcggaatgtcctcaaaaatagaagataatgccaacaatattcagcggaactacctgtcctcaatcggaaagctgagtgagtaccggaatagtcttgagtctaagctcgaccaagcgtatacccccaactttttgcactgcaaagacagtcagcagcaaatcgtttgcatagctgaacagagtaaacacagcgagacctgttctccggggaacactgcctctgaggagagtcagatgccaaacaattgcttcgtcaccagcctgagatccccaatcaagcagattgcttgggagcagaagcaaagagggttcattctcgacatgtctaatttcaaacctgagcgagttaagcccaggtcactgtcagaagctataagtcagaccaaagccctctcacagtgtaaaaataggaacgtgagcacccccagcgcgttcggcgaaggacaaagtggtttggctgtgctgaaggagttgctccaaaaaagacagcagaaggcgcagaacgccaacacaacacaggaccccctaagtaacaaacatcagcccaataaaaatattagtggttctctggagcataacaaggcgaacaagaggacgagatcggttacctcgcctaggaaaccacgaacaccacgttccacgaagcagaaagagaaaatccccaagctgctgaaggtggactctctcaatcttcaaaattcttcccagctggacaacagtgtctccgacgactcacccatttttttttcggatcctgggttcgaatcctgttattcactcgaggattcgctgtcaccagaacataactacaactttgacataaatacaataggtcagacaggtttttgtagcttctacagcggatctcagtttgttcctgctgaccagaatctgccccagaaatttctctctgacgccgtacaggatctgttccctggacaggcgattgagaaaaatgagttcttgtcgcatgataaccagaaatgcgacgaggacaagcatcacacaaccgacagtgcctcttggataaggagtggcactctgtccccagaaatcttcgaaaagagcaccatcgattccaacgaaaaccgtagacataatcagtggaaaaattcttttcatccactgactacgcggagcaacagcataatggacagtttttgtgtgcagcaggctgaagactgtctaagcgagaagtctagactgaaccgttcatccgtctctaaggaagtgttcctgtcactgccccagcccaacaactctgattggatccagggtcacactcggaaggagatggggcagagccttgacagtgcgaacacttctttcactgctatcctttcctctcccgacggcgagctcgtggatgtcgcatgcgaggatttggagctatacgtgtccaggaacaatgacatgctgacccccacgcccgatagctctcctcgcagtacttcgagtcccagccaatccaaaaatgggagttttaccccccgcaccgccaatatcctgaaacctctgatgtcccctccctcccgagaggagattatggcaactctacttgaccacgatttatccgagaccatctaccaggaacccttctgcagtaatccctccgatgtgcccgaaaagccaagagaaattggagggcgccttcttatggtggagactaggcttgctaacgacctcgctgagtttgaaggagacttctctttggagggcctccggctgtggaagacagccttcagtgccatgacacaaaacccacgacctgggtcgccactgaggtctggacagggcgttgtcaataaaggctcctcaaactcccctaagatggtcgaagacaagaaaattgttattatgccttgcaagtgtgcaccctcaagacagctggtacaggtgtggctgcaggctaaagaagagtatgagcggagcaagaagctgcctaagaccaagcctactggagtcgtcaagagtgcagaaaacttcagtagttccgtcaaccccgatgataaacccgtagtgccacccaagatggacgtgtccccgtgcatcctgcctactacagcacataccaaggaggatgttgacaattcccagattgccttgcaagcccccactacagggtgctcacagacagcctcagaaagccaaatgttgccccccgtggctagcgcgtctgacccggagaaagacgaggatgatgatgataactactatatttcctacagctcccccgacagcccagtgattcccccttggcaacagccaataagccctgactcgaaggcattgaatggcgatgaccggccctctagtcctgtggaagagctcccctccctggcattcgagaatttcctgaaaccgattaaagatgggatccagaagtcaccttgcagcgagccacaggagcctctggtgatctcccctattaatacccgggcccgcaccggcaagtgtgagtccttatgcttccacagtacccccatcattcagagaaaacttctcgaacgcctacctgaagcccctggtctgagcccgctgtctaccgaacccaagacgcagaagcttagcaataaaaagggcagcaacaccgacacactgcgaagggtgctgctgacccaagcaaagaaccaattcgccgctgtgaatactccccagaaggagacttctcagatcgatgggccaagcctgaacaatacatatggctttaaggtgtccatacagaacctgcaagaggccaaagccctgcacgagatccagaacctcactttgatttccgtggaacttcacgctcggacgcgccgggacctggagccggaccctgagtttgatccgatatgtgctctgttttattgcatttcatctgacacccctctcccagatacagaaaagaccgaacttacgggagtgatcgtcattgacaaggataaaacagtgttttctcaggacatccggtatcagacccctttgctaattaggtcaggcattacggggctcgaggtgacgtacgcagctgatgagaaggccctgttccacgagattgccaatattataaagaggtacgaccccgacatcctgttagggtatgagatccagatgcattcctggggatacctcttgcagagggcggctgctctgagcatcgacctgtgccggatgatatcacgtgtaccagacgacaagattgagaatagattcgccgctgagagagatgaatacgggtcatatacgatgtcagagataaacatcgtcggtcgcattacactgaatctgtggcgcatcatgcgtaacgaggtggccctcacgaattatacgttcgagaatgtgtcttttcatgtactccatcagcgtttccctctgtttacttttcgcgtcctctcagattggttcgacaataaaacggacctgtaccggtggaaaatggtagatcattacgtttcgagggtgaggggaaacttgcaaatgctcgaacagttggatctgataggaaagactagcgaaatggcccgcttgtttgggatccagtttctccatgtcctgactaggggcagccagtatcgagtggaatccatgatgttaagaatcgctaagcccatgaactacatccctgttacacctagcgtgcagcagcgctctcagatgcgagctcctcagtgtgtccctttaattatggagcccgagtccaggttttactcaaactcagtcttagtgcttgacttccagtctttatatccttcaatagtaatcgcttataactattgctttagtacgtgtcttggccacgtcgagaatctgggcaagtatgacgaatttaaattcgggtgcacctcactccgggtgccccccgacctgttgtatcaggttaggcatgacattacagtgtctcccaacggggttgcatttgtgaaaccttctgtcaggaagggcgttcttccaagaatgctggaggagatcttgaagacacgctttatggtaaaacaaagcatgaaggcttacaagcaagacagggccttatcgcgaatgctggatgctaggcagcttggtctcaaacttatcgcaaacgtgacttttgggtatacctccgccaacttctcaggccggatgccatgcatcgaagtaggtgacagcattgtgcacaaggcgagggaaactctggagcgcgccattaagctagtcaatgacactaagaaatggggcgctagggtggtttatggagacactgattcaatgtttgtgctgctgaaaggggccaccaaagaacagtctttcaagatcggccaggaaatcgctgaagcggtgacagccaccaaccccaagccagtaaagctcaaatttgagaaagtctatctgccctgtgtgctccagactaaaaagagatatgtcggatatatgtatgaaacgttggatcagaaggacccggttttcgacgctaaggggatcgaaactgtcagacgcgacagttgccctgctgtgtccaaaatccttgagagatccctcaaacttctcttcgagaccagggatatcagcctgatcaagcagtacgtccagcggcagtgcatgaaactcctcgagggaaaggcttctatacaggacttcattttcgctaaagagtataggggatcgttctcttacaaacccggtgcttgcgttccagccctcgagttgactaggaaaatgctgacctatgaccggcgatccgagccacaagtgggcgaaagggtgccttacgtcatcatctacggcaccccaggcgtgccactgatccagctcgtccgacgccctgtggaggtacttcaggaccctacactccgattaaacgctacttactacataacgaaacagatcctgccacccctggccaggatattttcattgatcggcatcgatgttttctcttggtaccacgaactcccacgcatccacaaagccactagtagttcaagatccgagcctgaaggcaggaaaggaacaatttcccagtacttcactacgttacattgtcccgtgtgtgacgatcttacccaacatggcatttgcagcaagtgcagatctcaaccccagcacgtggcggtaatacttaatcaggaaatccgagaactggagagacagcaagagcagctggtgaagatatgcaaaaactgtactgggtgctttgatcgccacatcccgtgcgtgagtctgaattgtccggtgttgttcaaactttcccgggtgaatcgggaactaagcaaggcaccctacctgcggcaactgcttgaccagttctag

SEQ ID NO: 133450 - DNA, 9393 bp, Artificial Sequence
  derived and/or modified sequence
atgttcagcgtgcggatcgtgaccgccgactactacatggccagccctctacagggacttgacacgtgccaaagccccctgactcaggcgccagtgaaaaaagtaccagtggtgagagtgtttggcgctactccggcaggtcagaaaacctgcctgcatctccatggcatcttcccctacttgtatgtcccatacgacggatatggccagcagccagagtcctacctgagtcagatggctttttccatcgacagggcccttaacgttgctctcggaaaccccagctcaaccgcccaacatgtgttcaaagttagcttggtgagtggcatgccattctacggctatcacgaaaaagagcgccattttatgaaaatctacctctacaacccaacgatggtgaagaggatctgtgagctcctgcagagcggggcaattatgaataagttttatcaaccacacgaagcccacataccttatctgctgcagttgtttatcgactacaatttgtatggcatgaacctcatcaacctagccgccgtgaagttccggaaagcacgtaggaagtcaaatacactgcatgccaccggctcttgtaagaatcatcttagtggcaactctctggccgacactttattccgatgggaacaggatgagatacctagttcattaattctggaaggagttgaaccccaatcaacctgcgaacttgaggtggacgcagtcgctgcagatatactcaatcgcttggacatagaggcccagattggcggtaaccccgggttgcaagcaatttgggaggatgaaaaacagcgccgacgaaatcggaacgagacctcccagatgagtcagcccgaaagccaagaccatcggtttgtaccagcaaccgagagtgagaaaaaattccaaaagcggcttcaggagatcctgaagcaaaacgacttcagtgtgaccctgtcaggttcagttgactattcagacggctctcaggagttttctgcagagctgacactgcattccgaagttctgagccccgaaatgttacaatgcacccctgccaatatggtcgaggtgcacaaggacaaggaaagcagcaaaggccatactcgccacaaggtggaggaggccctgatcaacgaagaggccattctcaacctcatggagaacagccaaacattccagcccctgacccagcggttgtccgagagtcctgtcttcatggatagttcacccgatgaagccctcgttcacttgctggctgggctcgaatctgatggctacagaggggaaagaaataggatgcctagtccttgtagatcattcggcaacaacaaatatccgcagaattctgatgatgaggaaaacgaacctcagatagagaaggaggaaatggagctgtcactggtgatgtcccagcgttgggatagcaatatagaagagcactgcgccaaaaagcgcagcctgtgccgaaacacgcacaggagttccaccgaggacgacgattcttcctccggcgaagaaatggagtggtccgataacagcttgcttctcgcttcccttagcattcctcagcttgatgggactgcggatgaaaactctgataatccactaaacaatgaaaactcgcggacccacagtagtgtcatcgccactagtaagttatccgttaaaccctccatttttcataaagatgcagcaaccttggaaccttctagcagcgcaaaaatcaccttccagtgtaagcatacatccgccctaagtagccacgtcctcaataaggaagacctgattgaagacttgtcgcaaaccaataagaacacagaaaaggggctcgataattcggtcaccagttttaccaacgagtctacgtattctatgaaataccctggcagcctgtctagcacagtccattctgagaactcccacaaagaaaacagtaagaaggagatccttccagtcagtagttgcgagtctagtatttttgactatgaagaagacattccctccgtgacccgccaggtaccatctaggaaatacactaatattcggaagatcgagaaagattccccgtttattcatatgcaccgtcacccgaacgagaatacattgggcaaaaacagtttcaatttctctgatctgaatcactctaagaacaaggtttcaagcgaaggaaacgaaaaaggcaattctactgccctcagctcactgttcccctcttcctttaccgagaactgtgagctgctttcgtgttctggtgagaataggactatggtacactctctgaacagcaccgctgacgagagcgggctcaacaagcttaaaatccgctacgaagaattccaagagcacaagactgaaaaaccatctctcagccagcaagccgctcactacatgttctttccctcagtagtcctctctaactgtctgactaggccgcagaagctctctcccgtgacatataagctgcagccaggtaataaaccgtcccgactgaagttgaacaagcggaagttggcaggacaccaagaaacatctactaaatcatccgagacaggttcaacaaaagacaactttatccagaacaatccatgtaattctaatcctgagaaggataacgcgctcgcttccgatctgactaaaaccacgaggggagccttcgaaaacaaaacccctacggacgggttcatcgattgccattttggcgacgggactttggagactgaacagagttttgggctatacggtaacaaatataccctgagggcgaagaggaaggtcaattacgagactgaggactctgaatcgtccttcgtaacgcataacagcaagatatcccttcctcaccctatggagattggagagagcttagatggaaccctcaagagtaggaaacggagaaaaatgtcaaaaaaattgcctcctgtgattattaaatatatcatcatcaaccgatttcgagggcgcaaaaatatgctggttaagttggggaaaattgacagtaaagagaagcaggttatcctgacagaggagaaaatggagctttacaagaaattagccccattaaaggatttctggcccaaggtccctgattcacccgccactaagtatccaatctacccattaacaccgaaaaagagccatagacggaaaagtaagcataagtcagctaaaaaaaagacgggaaaacaacagagaaccaataatgaaaatataaaaagaaccctgagcttccggaagaagcgctcccacgccatactgagccctccttccccatcttataatgctgaaactgaagattgcgacctaaattattccgatgtcatgagtaaactgggtttcctgtcagaaaggtccacaagtccaattaactcatcgccaccacgttgctggagccccactgatccccgagccgaagagattatggccgcagccgagaaggaggcaatgctattcaaggggcccaatgtgtacaaaaagaccgttaattcacggatcggaaagacctcaagagcaagggcccagatcaagaagtccaaggcaaagcttgccaatccatctattgtgactaaaaagcgaaataagcgtaaccaaacaaataagttagttgatgacgggaagaagaaaccaagggcaaagcagaagacaaacgagaaagggacatctcggaagcacacgacattgaaagacgagaaaattaagtcccagtccggggctgaagtgaagtttgtgctaaagcaccaaaacgtatcagagtttgccagctcctctggaggatcacagctcttattcaagcagaaagacatgccactgatgggtagtgcggtcgaccatcccctgagtgcctcgctgcccacagggattaatgctcagcaaaagctgagtggatgcttttcctcatttctcgagtcaaagaaatctgtcgacctgcagacattcccgagcagtcgggacgatctccacccctctgtggtgtgcaatagtataggacctggtgtatcgaagatcaacgtgcagcgacctcataatcagagtgccatgttcaccttgaaggaaagcacattaatccagaagaacattttcgaccttagcaaccatttgagtcaagtggctcaaaatacccagatctcatcaggcatgagctctaagatcgaggacaacgcaaataacatccagaggaattacctgtcctcgattggaaaactttcagagtaccgcaatagcctggagtccaagctggatcaggcttatactcccaactttttgcactgtaaagacagccagcagcagatagtttgtattgcggagcagagcaaacacagtgagacctgttcaccaggtaataccgcatcagaggaatcccaaatgccaaataactgcttcgtgacatctttaagaagcccaattaagcagattgcctgggaacagaagcagcggggcttcatcctggatatgtctaactttaagcccgagcgtgtgaagcctcgcagcttaagcgaggcaatttctcaaaccaaagcactatcccagtgcaagaaccggaatgtctctacccccagcgcgttcggcgaaggacaaagcgggcttgccgtgctcaaggaactccttcaaaagcgccagcagaaggctcagaacgccaatacaacacaagaccctttgtccaacaagcatcagcctaacaaaaacatcagcggctcactggagcataataaagccaacaagaggacgcgctctgtcactagcccccggaaacctaggacacctaggagtaccaagcaaaaagagaagatcccaaaactgctgaaggttgactccttgaacctccagaattcctcccagctggacaattccgtgtcggacgacagtccaatattcttctctgaccccggatttgagtcatgctatagcttggaagactctctctctccggaacacaactataacttcgacattaacacaattggccaaactggtttttgctctttctattcaggctcccaatttgtgccggcagaccaaaacctcccgcagaagttcttgtcagatgccgtccaggacctgtttccaggtcaggctatagagaagaatgagtttctttcacatgacaaccaaaagtgtgacgaggacaagcatcacaccacagacagtgcaagctggatacggtcaggaaccctttcaccagaaatttttgagaagagtaccattgactctaatgaaaatcgaagacataaccagtggaaaaattccttccacccactgaccacccgctctaattccatcatggatagcttttgtgtacagcaggcggaggattgtttaagcgaaaaatcacgactgaatcggtcatctgtttccaaagaggtgttcttgagccttccccagcccaacaatagcgattggattcagggccatacgaggaaggagatgggacaatcccttgactcagcaaacacctcgtttacggccatcctgagtagtcctgacggcgagttggtggacgtggcctgcgaggatttggagctgtacgtgtccagaaataatgacatgctgacaccaacacccgactcttccccccgctccacctccagcccttcccagtcaaaaaacggatcttttacccccaggaccgccaacatactaaagcctctgatgagccctcctagcagggaggagatcatggcgacactgctcgaccatgatctgagcgaaactatctatcaagagccattctgctcaaacccttctgacgtgcccgagaaaccccgagagatcggtggccgattgctgatggtggagacccgtctcgccaatgacctggctgagttcgagggagacttctctcttgagggcttgagattatggaaaaccgcgttctccgccatgacacagaatccaagacctggatccccattacgctccgggcagggcgttgtgaataagggatcaagcaactcacccaagatggtggaagacaagaaaatcgtgattatgccatgcaagtgcgccccctccagacagctggtgcaggtgtggctacaggcaaaagaagagtatgaacggagcaagaagctgccaaagactaaacctaccggtgtggtaaaatcagccgaaaacttctcctcctctgtgaaccctgatgataagcctgtggtgccccctaagatggatgtgtctccctgtattctgcctactaccgctcacactaaggaggacgtcgacaattcccagatcgccctgcaggctcccaccacaggttgctcccaaaccgcaagcgagagccagatgctgcctcccgtcgcctctgcctcagatcccgaaaaggacgaggatgatgatgataactactacatctcttactctagccctgattccccagtgattcctccttggcagcaacctatcagtcctgatagtaaggcactaaacggtgacgataggccaagctcaccagttgaggagttaccaagtctggccttcgagaacttcctcaagcccattaaagatgggatccagaaatctccttgtagcgaacctcaggaacctcttgtgatatctccaattaatactcgggctaggacaggaaagtgtgaaagcttatgcttccatagcactccgattattcaaaggaagttactggagagactccccgaggctcctggcctgtcacctctaagtactgagccaaaaactcagaaactatccaacaaaaaagggtcaaacactgacaccctgcggagggtcctccttactcaagctaaaaaccagttcgccgccgtgaacactccacagaaagaaacctctcagatcgatgggccttctctgaataacacctatgggttcaaagtgtcaattcagaacctgcaggaagcaaaggcactccatgaaattcagaatctgaccctgatcagcgtggagctgcatgcacggacgcggagagacctcgaacctgatccagaattcgatcctatttgcgctctgttctattgcattagttctgacactccactcccagacactgaaaagacagagctgaccggcgtgatagtcattgataaggataagaccgtgttttctcaggacattcggtatcagacccctctgctgataagatcgggaattacaggtctggaagttacatatgcggccgacgagaaagctcttttccatgagattgctaacataattaagaggtacgacccagacattcttctggggtacgagattcaaatgcattcgtggggctacctactgcagagggcggccgctttaagcatcgatctgtgcagaatgatctcacgagttcccgacgataagattgaaaatagatttgctgcagaaagagacgagtacgggtcctacacgatgtctgagattaacatcgtggggaggatcacactcaatctgtggcggatcatgcggaatgaagtcgcccttacaaactacacattcgaaaacgtgtcctttcacgtactgcaccagaggttccccctgttcacttttcgggttctgagtgattggttcgacaataagacggatctatacagatggaaaatggtagaccactacgtgtctagggtgcggggaaatcttcagatgctggaacagctagatctaattggcaaaacctccgagatggccagactttttggcatacagtttttacacgtactgactcgcggaagccagtatagggttgaaagtatgatgctgcgcatcgcaaagccgatgaactacatcccagttacgcctagcgttcagcagcgtagccaaatgagagctccgcaatgcgtgcctcttattatggaacccgaaagcagattttattcaaacagcgtgcttgttctggactttcagtctctctaccctagcatcgttatcgcttacaattattgtttcagcacttgcctaggtcacgtggagaaccttgggaagtacgatgaattcaagttcggctgtaccagcttgagggttccacctgatcttctttatcaggtgaggcatgacataactgtcagtccgaacggcgtcgcattcgtcaagcctagcgtccggaagggtgtgcttccaagaatgcttgaagagatattgaagactcggttcatggttaagcagtctatgaaagcctacaagcaagacagagcactgtccagaatgttggatgcccgccagctcggacttaagctgattgcaaacgtgacatttggatacacgtcagctaattttagtgggcgaatgccctgtatcgaggtgggcgatagtatcgtgcacaaagctcgcgagacactggaaagagccataaaactcgttaacgacacgaaaaaatggggagcccgagtggtctatggcgacactgattccatgttcgtgcttttaaaaggcgccacgaaggagcagtcttttaagatcgggcaggagatcgctgaggctgtgaccgccactaaccctaagccggtgaagttaaaatttgagaaagtgtatctaccctgtgtgctccagacaaagaaacgttatgtaggctatatgtacgagaccctagaccagaaggaccctgtttttgacgccaaaggcattgagaccgtcagacgcgattcatgccccgccgtcagcaaaattctggaaagaagtcttaaactcttattcgagaccagggacatctcgctgattaagcagtacgtgcagcgccaatgcatgaagttactggaggggaaggcctcaatacaagatttcatattcgccaaagagtaccgcgggtccttttcatataagcccggcgcatgcgtcccagcactcgaactgacaaggaagatgctaacctatgaccggaggagtgagccacaggtgggcgaacgagtgccatacgtaattatctacggtacaccaggagtacccttgatccagctcgtccggagaccggtagaggtgttgcaggaccccaccttgaggctgaatgcaacctattacattactaagcagatcctcccaccactcgccaggatctttagtctgattggcatagatgtcttttcatggtaccatgagctgcctcggattcataaagccactagcagcagtcggtccgagcctgagggtcggaagggaactatctctcagtactttactactctccattgtcctgtgtgtgacgatctgacgcagcacgggatttgcagtaaatgtcgctcacagccgcagcacgttgctgtgattcttaaccaggagattcgcgaactggagcgccagcaggagcagttagtgaagatctgcaaaaattgtaccggctgctttgatcgacatataccatgtgtgtcactgaactgtccagtactctttaagctaagccgagtgaaccgagaactgagtaaagccccatatttacgacagctgctcgatcaattttag

SEQ ID NO: 133451 - DNA, 9393 bp, Artificial Sequence
  derived and/or modified sequence
atgttcagcgtgcggatcgtgaccgccgactactacatggccagccccctgcaggggcttgatacctgtcagagccctttgacccaggccccagtgaaaaaggttccggttgtgcgagtcttcggcgccacccccgctggccagaagacctgtttgcaccttcacggtatcttcccctatctttatgtgccttatgatgggtacggtcagcagccggaatcgtacctcagccagatggccttttccatcgaccgtgcactgaacgtcgctttggggaatccctcatcgacagcccaacacgtgtttaaggtctctctcgtctctggaatgcccttttatggctatcatgaaaaagagagacacttcatgaaaatttacctctataaccccactatggttaagagaatatgtgagttgctccaatctggtgcaatcatgaataagttttaccagccccacgaggctcacataccttatcttctgcaattgttcatcgactacaatctgtacgggatgaacttgatcaacttagccgctgttaaatttcggaaagccagaaggaaaagtaacactcttcatgccactgggagctgcaagaaccacctgtcaggcaattccctggcagacaccctcttccgctgggaacaagatgagatcccctcttcccttattctggagggggtggagccccagtctacatgcgaactggaagttgatgcagtagcagcagatatcctcaaccgactcgacattgaagcccagattggcgggaatcctggactccaagcgatttgggaggatgagaaacagcgcaggagaaaccggaatgaaacctcgcaaatgagtcagcccgaaagccaggaccacagattcgtgccggcaaccgaaagcgaaaaaaagttccagaaaagattgcaggagatcctcaagcagaacgatttcagcgtgaccctctccgggagtgtggattattctgacgggagccaggagttcagcgcagagctgacccttcacagcgaagttttgtcgcccgagatgctccagtgtacaccagcaaatatggtagaggtacataaagataaagagtcgtcgaaagggcacacacgccataaggtcgaagaggctctgataaatgaggaggcaatcctcaatctgatggaaaacagtcagaccttccaaccgctgacacagagactctctgaaagtcctgtgtttatggatagctccccagatgaggcgcttgtgcaccttttggcaggcctggagtctgacggttaccgaggagaaagaaacaggatgccatccccttgccgcagtttcggtaacaacaagtacccacagaactccgacgatgaagagaacgaaccacagattgaaaaggaggaaatggagctctctctggtgatgagtcagcggtgggattccaacatagaggagcactgcgccaagaagcgctctctttgcaggaacacccatcgctcctccactgaggacgatgattctagctccggagaagaaatggaatggagtgataattctttgttgcttgcctccctatctatcccacagttggatggaactgccgatgagaacagcgataacccgcttaacaacgaaaattccagaacacacagtagtgtgatcgccacctccaaactatccgtgaagcccagtatcttccacaaagacgcagccactctcgagcccagttccagtgcaaaaatcacattccagtgcaaacatacaagtgcattgtcaagtcacgtgttgaacaaggaagatctcattgaggacctttcgcagacaaataaaaatacagaaaagggcctggataactctgtgacgtcctttaccaatgaatctacttactctatgaaatatcccggtagtctgtcttcaacggtccacagcgaaaatagtcataaagagaattccaagaaagaaattctgcctgtatcttcctgcgaaagttccatcttcgactatgaggaagatatccctagtgtgactagacaggtgccctcgcggaaatacaccaacattcggaagatcgaaaaggactcaccctttatacatatgcatcggcatcctaatgagaacacactcggaaagaattcatttaacttcagcgacctgaaccatagcaagaacaaagtgagtagcgagggcaatgagaaagggaacagcactgccttatcgagcttgttcccatcaagtttcaccgaaaattgcgaacttctgagctgctctggggagaatcgcaccatggttcacagcctcaactcaacagccgacgaatcaggcctcaataaactgaagatcagatacgaagaattccaagagcacaagacagagaaaccaagcctctcacagcaagccgcgcattatatgtttttcccatccgtcgtgctgagtaattgtctcacccggccccagaagctgtccccggtgacctacaagctacaacctgggaataaaccttctaggctcaagctgaataagcggaaactcgctgggcatcaagaaacaagtacaaagtcaagtgaaaccggcagcactaaagataacttcatccagaacaatccttgtaacagtaaccccgaaaaggataatgctttggcctctgaccttaccaaaacaaccagaggcgcttttgagaacaaaactcccacagacggattcatcgattgccactttggggacggtacactcgagaccgagcagagcttcggactctacggtaataagtacactttaagagcgaaaagaaaggtgaactacgagacagaggacagcgagtcttctttcgtcacacataatagtaaaatctctctgccgcaccccatggaaattggtgagagcctggatggtactctcaagtcccggaagcgtcgcaaaatgtcaaagaagcttccacctgtgattatcaagtacattataatcaaccgcttcagagggcgcaaaaacatgctggttaaactgggcaaaatcgactccaaagaaaagcaggtgatcctcaccgaggagaagatggagctgtataagaagctggctccactcaaggacttctggcctaaggtgcctgacagcccggctaccaagtatcccatctacccacttacgcctaagaagagtcatagaaggaagtctaagcataagagcgctaaaaaaaagacaggaaaacagcagagaaccaacaatgaaaacatcaaaagaacactgtcctttcggaagaagaggtcccatgctattctgtcacctccctctccctcatacaatgcagagacggaggattgcgatttaaattatagcgacgtcatgtccaagctgggatttcttagcgagcggtctacaagcccaatcaactccagccctccccgctgctggtcacctacggaccccagggcagaggaaatcatggccgccgccgagaaggaagccatgttgttcaaaggcccaaacgtgtacaagaagactgtgaatagccgaatcggaaagacctcacgggctagagcacagatcaagaagtctaaagccaagttggcaaaccctagcattgtcactaagaaacgcaataagaggaatcaaacaaataagctggtggacgacggaaagaaaaagccaagggcgaagcagaagacaaatgaaaagggaaccagcaggaaacatacaacattgaaggacgagaagattaagtcacagtcgggagctgaagtgaagttcgttctaaaacaccagaacgttagcgaattcgcgtcatcctctggaggcagtcagctgcttttcaaacagaaagacatgcccctgatgggctccgcagtggaccaccctctgagcgccagtttacctaccggcattaacgcccagcagaaactgtctggttgcttctccagctttctggagtccaagaagtctgtggatctgcaaacatttcctagctcacgcgatgatctgcacccttctgttgtgtgcaattcgataggccccggagtgtcaaaaataaatgtgcagcggccacataaccaaagcgcaatgtttacactgaaagaatcgactttgatccagaaaaacatcttcgacctcagcaaccatctcagccaggtggcacaaaatacccagataagctcagggatgagttctaagattgaggacaacgccaataatatccagcgtaactacctgagcagcataggaaagctgagtgagtatcggaattccctcgagagcaagcttgaccaggcatacacccccaatttccttcattgtaaggattctcagcagcagatcgtgtgtattgccgagcagtccaagcactccgagacctgtagtcctgggaacaccgcttctgaagaatcccaaatgccgaacaattgtttcgtcacctccctcagatcaccaattaaacagattgcctgggagcaaaaacaacggggcttcatcctcgatatgtcaaatttcaagcctgaaagagttaaaccgcgcagcctctctgaagcgatcagtcaaaccaaagcactttcacaatgcaagaatcgtaatgtatctaccccatcggccttcggggaggggcagtcggggctggcggtactgaaggagcttttgcagaagaggcagcaaaaagcccagaacgcgaatacaacgcaggatccactttccaacaagcatcagccgaataaaaacatttcgggctccctcgaacacaacaaggcgaacaaacgtactaggtcagtaaccagtccacgcaagccgcgtaccccccgatcaaccaagcagaaagagaaaatcccaaagctcttaaaggtggactcccttaacctccagaactcaagtcagcttgataacagtgtgtcagacgattccccaatttttttcagcgacccaggcttcgaaagctgttattcccttgaggactccctaagccccgagcacaattataactttgacatcaacacgatcggacagacaggattctgcagtttctattcgggaagccagttcgtacccgcggaccagaatcttccacagaaattcctgtctgacgcggtgcaggacctgttccctggtcaggcaatcgaaaaaaacgagttcctgtcacacgacaatcagaagtgcgacgaagataagcaccacactactgactccgcgagttggatccggtcagggactctctctcccgaaattttcgaaaaaagcaccatagactctaacgagaatcgcaggcacaatcagtggaagaacagctttcatcccctgacgacacgctccaacagcataatggattctttttgtgttcagcaagccgaggattgcctaagcgagaaatcgaggctgaaccgctcatcggtctctaaagaggtattcctaagtctgcctcagcctaacaacagcgactggattcaagggcacacaaggaaggagatgggacagtccctagactcagctaatacgagcttcacggccattctcagctctccagacggcgaactggtggatgtggcgtgtgaggacctggaactttatgtgtccagaaataatgatatgctgacccccactccggattcctctccacggtctacctcaagtccatcccagtcaaaaaacggtagcttcacgccacgcaccgccaatattttaaaacccctgatgtccccccctagcagagaggagattatggctacactcctggatcacgatctgagcgaaacaatctatcaggagccgttctgctccaaccctagtgatgtccctgagaagcccagggaaattggtgggcgattgttgatggttgagaccagactcgcaaatgatctggctgagttcgaaggagatttcagccttgaaggcttgagattgtggaagacagccttcagtgcaatgacacagaacccccggccgggatctccgctcagatcaggacagggcgtggtgaataagggaagcagtaattctccgaaaatggttgaggacaagaagatcgtcatcatgccctgtaaatgcgccccatctcggcaattggtgcaggtgtggcttcaggctaaagaggagtatgaaagaagtaaaaagctgccaaagacaaagccaaccggggtagtgaagtcagctgagaactttagctcttcagtgaatcccgatgacaagccggtggttccacccaagatggacgtatccccatgcatcctgcctacaactgcacacacaaaagaggacgtggacaatagtcagattgctctgcaagcaccgactactggttgttcccagacggcatccgagtcgcagatgctgccacccgtggcctccgcctctgaccctgaaaaagatgaggacgacgatgataattattacataagctattcatcaccagacagcccagtaattcccccctggcagcagccgatcagccccgactctaaggccctaaacggggatgaccgaccctcttccccagtcgaagagctaccttccttggcctttgagaattttctgaaaccaatcaaggacggaattcagaagtctccgtgttctgaaccccaggaaccactggttatttccccgatcaacactcgggcccgaactggtaagtgcgaatcactctgttttcacagtactcccatcattcaacggaaattgcttgagcgcctgccagaggcacccggcctgtctcccctgtcaaccgagcccaagacccaaaagttgtccaacaaaaagggttcaaacactgacacactgcgtagagtgctcctgactcaagcgaagaaccaatttgcagcggtgaatacaccgcagaaagagaccagccagattgacggaccaagtctcaataacacatatgggttcaaagtcagcatacaaaacctgcaagaggcgaaggctttgcatgaaattcagaacctgaccttaatctccgttgagctgcacgcacggacccggagggacctggaacccgacccagagttcgatcctatctgcgcactattttattgcatttcatcagacacacccctgcccgatacagaaaaaaccgagctgaccggagtgatagtaattgacaaagataagactgtgttttcacaggatatccgctatcagacaccattactcatccgtagcggcattactggcctcgaggttacttacgcagcagatgagaaagcactattccatgagattgccaatatcatcaagcgctatgaccctgatatcctactggggtacgagatccagatgcacagctgggggtatctgctacagagggctgctgcgctgtcaattgatttatgcagaatgatttctcgcgtaccagacgacaaaattgaaaacagatttgccgcggagagagacgaatatgggagctatacaatgtcagagataaacattgtcgggcggataacacttaatctctggaggatcatgcgaaacgaagtggccctcacaaattacacgttcgaaaacgtgagctttcacgtactgcaccaaaggtttcccttatttaccttccgcgtgctctcagattggtttgacaataagaccgacctctacagatggaagatggtggaccactacgtcagcagggtgcgcgggaatcttcagatgctggaacagctggatctgatcggaaagaccagcgaaatggcaagactgtttgggatccagtttttacacgtgctgacaagaggcagccaataccgggtggaatcaatgatgcttcgaatcgcaaagccaatgaactatattcctgtgaccccttctgtgcaacagcgttcccagatgagggccccccagtgcgtgcccctgatcatggagcctgagagcaggttctactctaatagtgtgctcgttctcgatttccagtctctttatccatctattgtgatcgcctataactattgctttagtacctgcctggggcacgtcgaaaacctgggtaagtacgatgagtttaagtttgggtgtaccagcttacgcgtgccaccggatctcctgtatcaggtgaggcatgatatcacagtcagccccaacggtgttgcttttgtaaagcccagcgtgcgcaagggtgtcctcccgcgcatgctcgaggagatactgaagactcgttttatggtaaagcagtccatgaaggcttacaagcaggaccgggcgctgagccgaatgctcgatgcccggcagctgggactcaaattgattgccaacgtaacgttcggatacactagcgccaacttctcaggaagaatgccctgtattgaggtcggagattcaatcgtgcacaaagctagagaaactctggagcgcgccatcaaactggttaatgacacaaagaagtggggcgcgcgagtcgtgtatggcgacaccgattccatgttcgtgttgctcaagggcgctacaaaggaacagtcatttaagattggccaggagattgctgaagccgtaacagctactaatcccaaaccagtgaaactcaagtttgagaaagtgtacctcccatgtgtgctgcagaccaagaagaggtacgtggggtacatgtatgagacactcgaccagaaggacccagtgtttgatgccaaaggcatcgagaccgtccggagagattcctgtcccgcagtgtccaagattctcgagcgtagcctcaagctgttatttgagacaagagacatcagcctcatcaagcagtacgttcagagacagtgcatgaagctcctggagggcaaagcgagtatccaggattttatcttcgccaaggagtatagaggctccttctcttacaaacccggcgcgtgcgtgccagcacttgagctgacaaggaaaatgctgacctacgaccgtcgctcagagccgcaggtgggagaacgggtgccctacgtgataatctacggaaccccaggtgtcccacttattcagctggtgagaagaccagtcgaagttctccaggatccaaccctgcggctcaacgcaacgtactatataaccaagcagattctgccacccttagccagaattttctctcttatcggcatcgatgtgttcagttggtaccacgaactgccccgaatccacaaggctacttccagctcccgaagcgagcctgaaggaaggaaggggacgataagccagtatttcacaaccctccattgtcccgtctgtgatgatctgacccagcacggcatctgctccaaatgcaggtctcagcctcagcatgtggctgttattctgaatcaggagattcgagaattagaacggcagcaagaacagctcgttaaaatctgcaaaaactgtacagggtgttttgatagacatataccatgcgtgtccctgaattgcccagtgctgtttaagctatctagagttaaccgcgagctctcaaaggctccttatctgcggcagctgctggatcaattctag

SEQ ID NO: 133452 - DNA, 9392 bp, Artificial Sequence
  derived and/or modified sequence
atgtttagtgttaggatcgtcacggcagattattatatggccagtcctctgcagggattggatacttgccagtcccctctgacacaggccccagtgaagaaagtgcctgtggtcagagtgttcggagctacacccgcaggacagaaaacctgcttgcatttacacggcatctttccatatctttacgtcccctatgacgggtacggccaacagcctgagtcttatctgtcccagatggctttctccatcgaccgagctctcaacgttgcgttgggcaaccctagttccacagcccagcacgtattcaaagtgtcactggtaagtggaatgccattttatggctatcatgaaaaggaaagacacttcatgaagatctacctctataaccccacgatggtgaagcgtatctgcgagctgctgcaatccggcgctatcatgaataagttctatcagcctcacgaggcgcatattccctatcttcttcagctctttatagactacaacctgtacggcatgaaccttataaatctcgctgcagtaaaattccggaaagccagacgcaagtcaaatacccttcacgccactgggagctgcaagaatcacctctccgggaacagcctggctgacacactctttaggtgggagcaggatgagatcccaagctcccttattcttgaaggcgtggagccacagtcgacttgcgagttggaggtggatgccgttgctgcagatattttgaatagactggatattgaggctcagattgggggaaatcctgggttacaagcaatttgggaagatgagaagcaacgacgcaggaaccggaacgagactagtcaaatgtcccagccagagagtcaggatcatcggttcgtgcccgctacggagagcgagaaaaaattccaaaagagactgcaggagatcctcaagcaaaacgatttcagcgttacactttcaggtagtgtcgactatagcgacggctctcaagaattttctgctgagcttaccctgcatagcgaggtgctgtcacccgagatgctgcagtgtacacccgcaaacatggtcgaggtacacaaggataaagagtcatctaaggggcatacccgccacaaagtagaagaggccctaattaatgaggaagccattttaaatctcatggagaattcccaaacctttcagccgctcacacagagactctctgagtctccagtcttcatggattcttctccagatgaagccctggttcacctgttagccggacttgagagcgatggctaccggggagaaaggaatcgtatgcctagtccctgcagaagcttcggcaataataaatacccacagaattctgacgacgaagaaaatgaaccacagatagagaaggaagaaatggagctctcactggtgatgagccaacgatgggattctaatattgaagaacattgtgccaagaagcgcagtctgtgccgaaacacgcaccgctcttctacagaagacgacgatagctctagcggcgaagagatggagtggtctgataattcactcctgctggcatctctatccatcccccagctggacggaaccgcagatgagaactctgacaatcccctgaacaatgagaacagccgcacgcatagctctgttatcgccacatccaaactatctgtgaagccaagtattttccacaaagacgcggcaaccctggagccctcatcttccgccaagataaccttccagtgcaagcatacttcagcgctgagttctcacgtgctgaacaaggaggatctcattgaggatctcagccagacgaacaaaaacaccgaaaaaggattggataactcagtgacttcgttcacaaacgaatccacatacagtatgaaatatcctggttcactgagctccacagtgcatagcgagaactctcataaagagaacagcaagaaggaaatcttacctgtaagttcatgcgagtcttcaatttttgattatgaagaggatatcccaagcgtgaccagacaggtgccgagcagaaagtataccaatattcgaaaaatcgagaaggactccccatttattcatatgcacagacatcccaatgaaaacactctgggtaaaaacagcttcaatttcagcgacctcaatcatagcaaaaataaagtgtcctcagagggcaatgaaaaaggaaatagcaccgccttatcctccctgttcccttcatccttcaccgaaaactgtgaactgctctcgtgtagcggagagaatcggacaatggtacacagcctcaattctactgctgatgaatcgggtttgaacaaactgaaaatcaggtatgaggaatttcaggaacacaagactgagaagccgtcactgagtcagcaggcggcacattacatgttcttcccctctgtggtcctttccaattgcctaactagaccccagaagctgtcacccgtgacctataagctccaacccggaaataaaccctcaagactcaagctcaacaaacggaaactggctgggcatcaagagacatctactaaaagttcggagacgggatcgactaaggataactttattcagaacaacccatgtaatagtaaccctgagaaggataacgcgctggcttccgaccttaccaagacaaccagaggggcattcgagaataaaactcctaccgacgggttcatcgactgtcactttggggacggcaccctggagacggagcaaagtttcggactgtacgggaataaatacacgcttcgtgctaaaagaaaggtcaattacgaaaccgaggattctgagagtagctttgtaacacacaatagtaaaatttctctgccgcacccaatggaaatcggcgagagcctcgatggaacactgaaatcaagaaagcggaggaagatgtccaagaagctgcccccagtcattatcaaatacatcataattaatcgtttccgtgggcgaaaaaacatgttggtgaagcttggcaaaattgactcaaaggagaaacaggttattctcacggaagaaaaaatggagttgtataaaaagttggcccctctgaaagatttttggcctaaagtgccagatagcccggctacaaaatatcctatctaccctctgactcctaaaaaaagtcacaggcggaagagcaagcataagtccgccaaaaagaagacagggaagcaacagagaacaaataatgaaaacattaagcgcacgctgagctttcgaaagaaaaggagccatgccatcctgagtcccccaagcccttcctacaatgctgaaactgaagactgcgatctgaattactctgacgtcatgagcaagctgggattcctgtccgagcgatccacatctcctattaattcaagcccacctcggtgttggagccccacagatccaagggctgaggaaataatggccgcagccgagaaagaggctatgctgttcaaaggaccaaacgtctacaagaaaactgtcaatagccgtattggcaaaaccagtcgcgctcgggcacagatcaagaagtcaaaagcaaagctcgcgaacccaagcatcgtaactaagaagcgcaacaagaggaaccagaccaataaactcgtggatgacggaaaaaaaaaaccaagggcgaagcaaaaaactaacgaaaaggggacttccaggaaacacaccactcttaaggatgagaaaatcaaatcacagtccggggctgaggtcaaattcgtgctgaagcatcagaatgtttcagaattcgctagttccagtggtggatcgcaactgctattcaaacagaaggatatgccattgatgggcagcgccgtagaccatcccctgagcgcttctctacccacaggtatcaacgctcagcagaaactgagtggatgtttctccagcttcctggaatccaagaagtcagtggacctgcaaacctttccctcttcccgggatgatctgcacccctctgtcgtatgcaactctattggccctggggtttctaagattaatgtgcagaggccccacaatcagtctgcgatgtttacattgaaagaatccacccttatccagaaaaatatcttcgacctgtccaaccatctgtcccaggtggcccagaatactcagatctctagtgggatgtcctccaaaatcgaagacaacgccaacaacatccagaggaactacctgtccagcataggcaagttgagcgaataccggaattccctcgagtctaagctcgaccaagcttacactccaaatttcctccattgcaaagattcccagcagcagattgtgtgcatcgccgaacaaagtaagcacagcgaaacgtgttcacccggtaacaccgcatcagaggagtcacaaatgcccaataattgttttgtgacatcccttaggagtccgattaaacaaattgcatgggagcaaaagcagagaggttttatactggatatgtctaactttaaacctgagcgggtcaaaccgagatctctctcggaggcgatttcccagaccaaggcccttagccagtgtaagaatagaaacgtctcaacgccatcagctttcggggaggggcagtcagggcttgccgttctgaaggaactgctgcagaagcgacagcaaaaggcgcagaacgccaatactactcaggaccccctctccaacaagcatcagcccaacaaaaatatttctggcagcttagagcacaataaagccaataagagaacaagatcagtgaccagcccacgtaagcctcggaccccaagatctacaaaacagaaggaaaagatccctaaactgctgaaggtcgacagcctgaacctgcagaatagttcgcagctggacaatagcgttagcgatgacagccctatatttttttccgacccaggatttgagtcttgctattcgttggaggattcactatctcctgagcataattacaacttcgatatcaacaccataggacagacgggtttctgctcattctactccggtagccagttcgttcccgcagatcagaacctgccacagaagtttttgtccgatgcagtgcaggacctattccccggtcaggctattgaaaagaatgagtttctctctcatgacaaccagaaatgtgatgaggacaaacaccacactacagacagtgcctcttggatccgctcaggaactttgtcccccgagatctttgaaaaatcaacaatagacagtaatgagaatcgaagacataaccagtggaaaaacagctttcatcccttgaccacccgttcgaactccatcatggattccttctgtgtgcaacaagccgaggactgcctgtccgaaaaatcccgactaaaccgcagtagcgtatcgaaggaggtgttcctgagccttccacagcccaacaattctgattggatacagggccacacacggaaggaaatgggtcagagtctggattccgccaacacatcctttacagctatcctctcatcacctgatggtgaactcgtggacgttgcctgcgaagacctcgaactctacgtaagccggaataacgacatgctgacaccaacccctgattcttctcctcgatcaaccagctcccctagccagagcaaaaacggctcatttacaccacgaaccgctaatatcttgaaacccctgatgtcccctccctctcgcgaggagatcatggccactctacttgatcatgacctgagtgaaaccatttatcaggagccattttgcagcaatccgagcgacgtacctgaaaagcccagggagatcggaggcaggctccttatggttgaaacccgactcgccaatgatctggccgaatttgaaggggacttttctctggaaggtctgaggttgtggaaaactgctttctctgctatgacccagaaccctcgacctggctcccccttgaggtcaggccagggagtggtgaacaagggttcttcaaactcccccaaaatggtggaggataagaaaatcgtcatcatgccgtgcaagtgtgcaccaagtcggcagctcgtgcaggtgtggctgcaggcaaaggaggagtacgaacgctccaaaaagctgcctaaaaccaagccaacaggagtggtgaagtctgccgagaatttttctagttcggtaaatcccgacgacaagcctgtggtccccccaaagatggacgtttcaccttgtatactccccacaacggctcacaccaaagaggacgtcgacaatagccagatagccttgcaggcacccaccaccggttgctctcaaacagcaagtgaatcccagatgctccccccagtcgccagtgcttctgaccccgagaaggatgaggatgacgacgacaattattatatttcttacagctcccccgacagcccagtaattcccccttggcaacaaccaatcagtcccgatagtaaggcccttaatggggatgatcgaccctcttctcccgtggaggagcttcctagtttagcattcgagaatttcttgaagcctataaaggacggaattcaaaaaagtccttgttccgaaccccaggagccccttgttataagccctattaacacacgggctaggaccggcaagtgcgagagcctctgctttcacagcactcctataatacaacgtaagctgctagagagactgcccgaagccccaggtctgtcgcctctatcgacagagccgaagactcagaagctgtccaacaagaaaggatcaaatacagacactctacgcagggtactgctgactcaagctaagaatcagtttgccgctgtaaacacgccccaaaaggaaaccagccagatcgacggtcccagcctcaacaacacttatggcttcaaggtaagtatccaaaacctgcaggaagccaaagctctgcacgagattcagaacctcaccctaatcagtgtggagctccacgccagaactcgtagggacctggagccagaccctgaattcgaccccatatgtgcacttttttactgcatctcatctgatacacccctgccagacacggaaaagaccgaactgaccggtgtgattgtcatcgacaaagataaaaccgtctttagtcaagacattcgataccagacaccccttctgattagaagtgggattaccgggcttgaagttacttacgcggctgatgagaaagccttgtttcatgaaatcgcaaatatcattaagaggtatgacccggacattctgttggggtacgaaatccagatgcattcctggggttatctacttcagcgggctgcggcattgtcaatcgatttatgccgcatgatttctagagtgccagatgacaagattgagaaccggttcgctgctgagagggatgaatatggctcatataccatgagcgagattaatattgtgggtcgtatcacgctcaacctgtggcggattatgcgtaatgaggtcgccctgacgaattacacattcgagaacgtttcgtttcacgtgctgcatcagaggttcccactattcacttttcgtgtgttgagcgattggtttgataacaaaaccgatttatatagatggaagatggtggaccattacgtgtcaagggtgcgcggaaatctccagatgctcgaacagctggatttgatcgggaagacgtctgagatggcccgtctcttcggaatccagtttctacatgtcctaaccaggggatcccaataccgtgtggaatctatgatgctgaggatcgcgaagccaatgaattatatcccagttaccccctccgtgcagcagaggagtcagatgagggcccctcagtgtgtgcctctgatcatggagcccgagtcgaggttttattccaattcagtcctagtcttggacttccaatcactgtatccgtccatcgtgatcgcgtacaactactgcttttcaacgtgtctaggacacgtcgaaaatttgggaaagtacgacgaatttaaattcggctgtactagcttacgtgtcccccctgacctgctgtaccaagtgcggcatgacattacggtatcacctaatggcgtggcatttgtaaagcccagcgtacggaagggggttcttccccgaatgttggaagaaattttgaagacccgattcatggttaaacagagtatgaaggcctataagcaggatcgggctctctcaaggatgctggacgctcggcagctgggactcaagctcatagcaaacgtcacatttggatacacaagtgctaatttctcaggacggatgccttgcatcgaggtgggagacagcatcgtgcacaaagcacgcgagaccctggaaagagccataaaactcgtgaatgataccaaaaaatggggagccagggtcgtgtacggcgacaccgatagcatgttcgttctcctaaagggggctaccaaggagcaatcttttaagatcggccaggaaatcgccgaagcggtgactgccactaatcccaagccagtaaagctgaagttcgagaaggtgtacctgccctgtgtcctccagacaaaaaagcgctatgtggggtatatgtatgaaactctagaccagaaggaccctgttttcgatgcgaagggtatcgaaacggtccgccgagatagttgccctgccgtcagcaagatcctcgagaggagtctcaaattacttttcgagacccgcgatattagcttaatcaagcagtacgtccagcggcagtgtatgaagcttctcgaggggaaagccagcatccaagacttcatcttcgcgaaggaatatagggggtctttctcgtataagccaggagcatgcgtccccgctctggagctcacccggaaaatgctaacctacgatagacgctccgagccacaggttggcgagagggtgccctatgttatcatatacggcacccctggcgtccctctcatccagttagtgaggaggcccgtggaggtgctacaggatcccacccttagacttaacgcgacgtattatatcaccaaacagatactccccccactggcacggattttctccttgattggtattgatgtgttctcctggtatcatgaactgccaaggatccacaaggcgacgtccagtagcaggagtgaaccggaggggaggaaggggaccattagtcagtactttactacgttgcattgccccgtttgtgacgacctaacccagcacggcatatgttcaaaatgtcgcagccagcctcagcatgtggcggtcatccttaatcaggagatccgagaattggagcgacagcaggaacaactggtcaagatttgcaaaaactgtaccggatgttttgacaggcacataccctgtgtgtcacttaattgtccggtgctgttcaagctgtctcgagtcaaccgtgagctatctaaggcgccatacctgcgccagctccttgaccagttcta

SEQ ID NO: 133453 - DNA, 9392 bp, Artificial Sequence
  derived and/or modified sequence
atgttcagtgtccgaattgtgaccgccgactactatatggccagtcctcttcagggcctagacacatgccagtctcccctgactcaggctcccgtgaagaaggttcctgtggtgcgcgtgttcggcgctactcccgcaggccaaaagacatgcctgcacctgcatggcatcttcccgtacctgtatgtgccatatgacggatatggccagcaacccgaaagctacctgagccaaatggccttcagtatcgacagggccctgaatgtggccctgggaaatccttccagtaccgctcagcacgtttttaaagtcagccttgtctcaggaatgccgttctatggttatcatgagaaggagcggcattttatgaagatttatttgtacaaccccacaatggtgaagaggatttgcgaactactccagagtggagccattatgaacaagttttatcaaccgcacgaagcacacataccctacttgctgcaactgttcattgactacaatctgtacggaatgaacctcatcaacctagccgcagtgaagttccgcaaggccaggaggaaaagtaacaccttacacgcaacagggagctgtaaaaaccacttatcaggcaattccctggccgataccctgttcagatgggagcaggacgaaatcccctcaagcctgatccttgagggggtggagccccagagcacttgtgagcttgaggtggacgccgtggccgcagacatactcaataggcttgatatagaggcccagatcggtggaaaccctggtctccaggccatctgggaagacgagaaacagcgccgacgcaatagaaatgaaactagccagatgagccagcccgagtctcaggatcatcggttcgttcctgcaactgaaagtgagaaaaagtttcagaagcgcctccaagaaattctgaagcaaaacgactttagcgtgacccttagcggctctgtggattacagtgacggaagtcaggagttctccgctgagctcaccctccacagcgaggttctttcccctgaaatgctacaatgtactccagctaacatggtggaggtgcataaagacaaagagtcctctaaaggacacactcgccacaaagtggaagaggctctgatcaacgaggaagccatccttaacctgatggagaattcccagaccttccaacccctgacacagcgcctgtcagagtctcccgttttcatggatagttcgccagatgaagccctcgtgcatctgctcgccggtttagagtctgacggctaccgcggagaaaggaatcgcatgcctagcccttgcagaagttttgggaacaacaagtatccacaaaattctgacgacgaggaaaatgagccccagatagaaaaagaagaaatggaactatcactggtgatgtcccagcgatgggactcaaacattgaagagcactgtgccaagaagcgcagcctttgccgtaacacccatagatcctctactgaagatgacgactcttcctccggcgaggagatggagtggagtgataacagccttctgttagcatcgctatctatcccccagctcgatggaactgcggatgagaattctgacaatcccttgaataacgagaattcccgcacccattcgtccgttatagccaccagtaaactgagcgttaagccgagcatcttccacaaagatgcagccacactggaaccctccagctctgcgaaaatcacgttccagtgtaaacatacttctgcgctgagttcacacgtcttaaacaaggaagatttgatagaggatttgtcacagaccaataagaacacggaaaagggtctagacaatagcgtcacctcattcaccaacgagtcgacctatagcatgaagtatccgggtagcctctcaagcacggtccactcagagaacagccacaaggagaattcaaaaaaagagatactcccagtaagctcatgcgaaagcagtattttcgattatgaggaggatattccctcagttacacgacaggttcctagtcgaaagtacaccaacattaggaagatcgagaaggattcccccttcattcacatgcatagacatcctaatgagaatacgctgggaaagaatagctttaacttttctgacttaaaccattctaaaaacaaggtgtcaagtgaggggaatgaaaaagggaactctaccgcactgtcatctttatttccttcttcattcactgaaaactgcgagctgctctcgtgctccggcgaaaaccgtacaatggtgcatagtttaaacagtaccgccgatgagtcggggctgaataagcttaaaatcagatacgaagagtttcaggagcataaaactgaaaagccttcactgtctcagcaggccgcacactatatgttttttcctagtgtcgtcctcagcaattgcctgacaaggccccaaaaactgtcccccgtcacttataaactgcagcccggaaataagccaagccgcctgaaacttaataagaggaaactggcgggacaccaggagacttctactaagagctctgagacgggttcaacaaaggacaatttcattcagaacaacccatgtaattcaaatcccgagaaagacaacgctttagccagcgacctgacgaaaactacacgcggtgccttcgaaaacaagacgccaacggatggattcatcgactgccatttcggggatggcaccctagagaccgagcagagcttcggcctgtacggcaacaagtataccttaagggccaaaaggaaggtcaattacgaaaccgaagattctgagagcagctttgtcacccacaactctaagatttctctgccacatcccatggagataggggaatccctggatggtacattgaagtcacggaaaaggcgaaaaatgtcgaaaaagctaccgcctgtgattataaaatatatcataataaatcgcttccggggacgaaaaaacatgctggtgaagcttggcaaaatcgactcaaaagagaagcaggttattctgaccgaagaaaagatggagctgtacaaaaaactcgctcccttaaaagatttttggcccaaagtccctgactcccctgcaaccaagtatcccatctaccccctgactcccaagaaaagccataggcggaaaagcaaacacaagtcagccaagaaaaagactggtaagcagcagcggactaataatgagaatataaagagaaccctgagctttagaaaaaagcgttcgcatgcgatcctgtcgccacctagcccctcctacaatgcagaaacggaggattgtgatctgaactactccgacgttatgtcaaaactgggctttctgtccgagagaagtacctcccccattaacagcagcccaccacgctgctggtccccaactgatcccagagcagaggaaattatggccgctgcagaaaaggaggccatgctcttcaaggggccaaatgtctataaaaaaactgtgaattcccggattggcaaaacctctcgggcacgggctcaaattaaaaaatcaaaggctaagctggccaatccaagcatcgtcacaaaaaagaggaataagaggaaccagaccaataagttggtcgacgacgggaaaaagaagcctcgagcaaaacagaagactaacgaaaagggaacgtcaagaaaacataccacgttaaaggatgaaaagatcaaatcacagtctggcgcagaggtgaagtttgtactcaaacatcagaacgtcagcgagtttgcctctagctcaggcggtagtcagctactcttcaaacagaaggatatgcctttgatgggcagcgccgtggatcatccattgtcagcatctttgccaacaggtatcaacgctcagcagaagctctcagggtgtttctcctcctttctggaatccaaaaagtctgtcgatctccagactttcccctcctctagggatgacctccatccaagtgtggtctgcaatagtattggcccaggggtgtccaagatcaacgttcaacgaccgcataaccagagtgccatgttcacactaaaggaaagcacccttatccagaaaaatatcttcgaccttagtaatcacctgtcgcaggttgcacagaacactcagattagctccgggatgtcctcaaaaatcgaggacaacgccaataacattcagagaaactacctgtcctccattggaaagctttcggagtacaggaactctctggagtccaagctagatcaggcttacactcctaactttctgcattgcaaagattcacagcagcagatcgtatgtattgccgaacagtctaaacatagcgaaacttgtagtcctgggaacaccgcatccgaggagtctcaaatgccgaataattgtttcgtgaccagcctccgcagcccgatcaagcagatcgcttgggaacagaagcagagaggatttattttggatatgtctaacttcaaacctgagcgggttaagcccagaagtctgtctgaagccatctctcagaccaaggccctgagccagtgcaaaaaccgcaatgtgagtacgcccagcgcttttggagagggccaatccggactggcggtcctcaaagaactgctgcaaaagcggcagcagaaggctcaaaatgccaataccacacaagatcccctcagcaacaaacatcagcccaacaagaatatcagtgggagcctcgaacataataaggccaataagcgaactcgaagcgtaacgagtccgagaaaaccacggacaccccgaagcaccaagcagaaagagaagattcccaaattgttgaaggtggatagtctgaacttgcaaaacagcagccagctggacaactctgtgagcgacgatagtcccatcttcttttcagaccctggatttgaatcctgctacagcctcgaggactccctctcgccagaacacaactacaatttcgatattaatacgattgggcagaccggtttttgctctttctattctgggagccagttcgtgcccgctgaccagaacctaccccagaaatttcttagcgacgctgtgcaagatctgtttcctggccaggccatagaaaagaacgaatttttatcacacgataaccagaaatgcgacgaggataagcatcacaccacagatagtgcgagctggattcgctccgggacactctctcccgagatttttgagaaatcgacaattgactccaatgagaaccgaaggcacaaccagtggaagaactcctttcatcctctgactacccgcagcaattctatcatggacagtttctgtgtgcagcaggcggaggactgcctgagcgaaaagagccgacttaatcgcagttcagtgtccaaggaggtcttcctttctctaccccagccaaacaactctgattggattcaagggcacacaaggaaagaaatgggacagagtcttgattccgcaaacacctcctttactgcaattctgagttctcccgacggagaactcgttgacgttgcatgcgaagaccttgaattgtacgtgtctcgcaataacgacatgctgacacctacaccggattcaagcccgagaagtacgtccagcccctcccagtccaagaacggttcctttacaccgaggacggcaaatattttgaagcctctaatgagtccacccagccgcgaggagattatggcaacccttctggaccacgacctttccgagaccatctaccaggaaccgttctgtagcaatccctcagatgtgccggaaaagcccagggaaataggtgggaggttacttatggtcgaaacccggcttgccaatgacctggcagaatttgagggcgacttcagccttgaaggactgcgtctgtggaaaactgcctttagtgccatgactcagaatcctcgccctgggtctcccctccgctctggccagggcgtggtcaacaagggcagcagcaattctcctaaaatggttgaagacaaaaagatcgtgattatgccctgcaagtgtgcaccatcccgacaattggtccaagtgtggcttcaggccaaggaagaatatgagagaagcaagaagctaccgaaaaccaagccaaccggcgtcgtgaaatccgcagagaacttctcatcctcagtgaacccagacgacaagccagtggtaccgccaaaaatggacgtctctccatgcatccttccaactacagctcacacaaaggaagatgttgacaactcgcagatcgccttgcaagccccaaccactggctgttcccagacagccagcgaatctcagatgctgccccctgtggcaagcgcttccgaccccgagaaggacgaggatgatgacgataactactacatttcctacagttctcccgacagtccagtaattccaccatggcagcagcctatttcgcccgattccaaggccctcaatggggacgatcgacccagcagccctgtcgaggaactgccaagcctcgcgttcgaaaacttcctgaagccaataaaggatggaattcaaaaaagcccttgttccgagccacaggagccattagtgatttccccaatcaatacccgcgcaagaacgggcaagtgcgagtcactgtgtttccattctacgcctattattcagaggaaattgctggaaagattgcccgaagctccgggtctgagcccgctctccacagagcctaaaacccaaaagctgagcaataagaaaggcagtaatacagacacattgagacgagtgctcctgacccaggccaaaaatcagtttgccgctgtgaacacacctcagaaggaaacctcacagatcgatgggccttcacttaacaatacctacggcttcaaagtcagtatacagaacctacaggaagcaaaagctttgcatgagatccaaaacctgactctcattagcgtcgagctccacgcgaggacccgtcgggacctagaaccggatcctgagttcgacccgatttgtgccctgttctattgcatttcgtccgacaccccgctccccgataccgaaaaaactgagttgaccggtgttattgttatcgataaggacaaaactgttttctcgcaagatattcgataccagaccccattactcattaggagcggcatcaccggcctagaagtgacctacgcggcagacgagaaggctctgttccatgagatcgcgaatattataaagaggtatgaccctgacatccttctcggctatgagattcagatgcacagctggggatacctactccagagagcggctgccttgagcatcgatctgtgtagaatgatatcccgtgtgcctgacgacaagattgaaaatcggttcgcagcagaaagggacgaatatggctcctacacaatgagcgagatcaatattgtaggacggattaccctaaacctgtggcgcatcatgcgcaacgaggtggccctgactaattacactttcgaaaacgtgtccttccatgttctccaccagagatttccacttttcacattccgggtgctttctgattggttcgataacaaaactgatctatataggtggaagatggtcgatcactatgtgagcagggtcagggggaatctgcagatgttggaacaactggatcttatagggaagaccagtgagatggcgaggctttttggcatccaatttcttcatgtactgaccagggggagccagtatcgggttgaatcaatgatgcttcgcatcgcaaagcccatgaactatattccagtcactccatcagtccagcaacggagtcagatgagggcccctcaatgtgtccctctgatcatggagccagagtcaaggttctattcaaattccgtcctggtcctcgattttcagagcctgtatccgagcatcgtgatagcttataactattgttttagcacgtgcttggggcacgtcgaaaatctgggcaaatatgacgagtttaaattcggctgcactagccttcgcgtaccccctgacctgctgtatcaggtcaggcatgatataaccgtctccccaaacggggtcgcttttgtcaagccctccgtccggaagggggtactgcctcgtatgcttgaagaaatcctaaagacccgtttcatggtcaagcaatccatgaaggcatataaacaagacagagccctcagtcgaatgttggacgccagacagctcggcctcaagctcatagctaatgtgacattcggctatacttccgcaaatttctcaggtaggatgccatgcattgaagtgggggacagcatcgtgcacaaagcgagggaaaccttggaacgggcaattaagctagtgaacgacactaagaaatggggtgcgcgagtggtctacggtgacaccgatagcatgttcgtcctccttaagggggctactaaagaacagagcttcaaaattgggcaggaaatagcggaagccgtgactgccacaaatcccaaacccgtgaagttgaagttcgaaaaagtttacctgccatgcgtgttgcaaaccaagaagagatacgtgggctatatgtatgagacattagatcagaaagaccctgtcttcgacgcaaaagggattgagaccgtcaggcgcgacagttgcccggctgtcagcaaaattttggaaagatcactcaaacttttatttgagaccagagacatcagtttaataaagcaatatgtgcagcgccagtgcatgaagctgttagagggcaaagcctccatccaagacttcatcttcgccaaggaatacagaggttcttttagctataagcccggtgcttgcgtaccagcactggagttaacgaggaagatgctgacctacgatcgaagaagcgaacctcaagtcggagaaagagtgccatacgttatcatctatgggaccccaggcgtgccattaattcaattagtgcgccgtcccgtggaagtgctccaggaccctaccctgagactcaacgccacctattatatcactaagcaaatccttcccccacttgcaaggattttttctcttattggcatcgatgtcttttcttggtatcacgagttgccccgtatccataaggccacttcatcatctagaagcgaacccgaagggagaaaggggaccatcagccagtacttcactactctccattgcccagtttgtgatgacctcacgcaacacggcatctgcagcaagtgccgctctcagccccagcacgtggccgtcatcctgaaccaggagattcgggaattggaacgccaacaggagcagctggtcaaaatctgcaagaattgtactggatgttttgatcgtcacattccctgtgtaagcctcaattgcccagtgctgtttaagctgagtcgggtgaatcgcgagctctcgaaggccccatatctgcggcaacttctggaccagttcta

SEQ ID NO: 133454 - DNA, 9393 bp, Artificial Sequence
  derived and/or modified sequence
atgtttagcgtgcgaattgtaactgccgactattacatggctagcccactgcagggcctcgatacctgtcagtcccctctgacccaggctcccgtgaagaaagtgcccgtcgtccgggtgttcggcgcaacccctgctggccaaaaaacatgtctacacctgcacggaatcttcccatacttgtatgtcccttacgacggttacgggcagcagcccgagtcctatctgtcacaaatggcattctctatcgatagagccttaaatgtggccctcggtaacccctccagtaccgcacagcatgtattcaaagtttcgctggtctcaggtatgcccttttacggataccacgaaaaagaaagacacttcatgaagatttacttgtacaacccgacaatggtgaaacgaatctgcgaactcctccagagtggtgccataatgaacaaattctatcagccccatgaggcccatattccttacttactgcagttattcatcgactataacctgtacggtatgaaccttatcaatctggccgctgtaaaattccggaaggctaggaggaaatcaaacacactgcatgccaccgggagctgcaaaaaccacctgtctggaaactctcttgcagatactctctttcggtgggaacaggacgagatcccgagctccctgatccttgagggggtggagccacagagcacctgcgagctagaagtagacgcggtggctgccgacatccttaacagactggacattgaggcccaaattggcggaaacccaggcctccaggccatatgggaggacgagaaacaaaggcgccgtaaccgcaacgagacctcccaaatgtcccagcctgagtcccaggaccaccgcttcgtgcctgccacagaaagcgagaagaagtttcagaagagactgcaggaaattttgaagcagaatgatttttccgtcaccctgtcgggaagcgtggactactcagatggttcccaggagttcagcgctgagctcacactccactccgaagtcctctcgccagaaatgttacagtgcaccccagccaatatggtggaagttcacaaggacaaggaaagctctaaggggcacacacggcacaaggttgaagaggccctgatcaacgaggaagctatcctgaacctgatggagaattcacaaaccttccagcctctaactcagcgactgagtgaaagtcctgtgtttatggactctagcccagatgaggccctggtacacctcttggccggactcgagtctgatgggtaccgtggagaacgaaatcggatgccttctccatgtaggagcttcgggaataacaaataccctcaaaactccgacgacgaagaaaacgaaccacagattgaaaaagaagaaatggagctgtcactggtgatgtctcaacggtgggattccaatatcgaagagcattgcgctaaaaaacggagtctgtgcagaaacacccatagaagctctaccgaagacgatgattcctcctcaggtgaggaaatggaatggtcagataactcgctgctcctcgcgagtctttctattccacagctggacggcaccgccgacgaaaatagcgataatcctctgaataacgaaaacagcaggactcattccagcgtcatcgctacctcaaaactatccgtgaaaccctctatttttcacaaagatgctgccactctggaaccttcctcttcagccaagatcacctttcagtgcaaacacaccagtgcactaagctcccacgtcctgaataaagaagatctcatcgaggacctgtcccagacaaacaagaatacggagaaggggctggataactcggtgacctcgttcactaacgagtccacctatagcatgaagtatccgggtagcctgtcttccaccgtgcatagcgaaaactctcacaaggagaactcaaagaaagagatacttcccgttagctcttgtgagtcatcaatctttgattacgaggaggatataccgagcgtgactaggcaagtacccagtaggaaatacaccaacatcaggaagattgaaaaggattctcctttcatacacatgcaccggcaccctaacgagaacactctcgggaaaaattcttttaacttctcagacctgaaccactcaaaaaataaggtcagtagcgagggtaacgaaaaaggtaattccactgccctgtcttcactgttcccttcctccttcacggagaactgtgagctgctgagttgctctggggaaaacagaaccatggtgcatagcttaaacagtactgctgacgagagcgggctgaacaagctcaagatcagatacgaagaattccaggagcacaagaccgaaaaaccttccctgagccagcaggcagcccactacatgttttttccgtctgtggtgctgagcaattgcctgaccagaccacagaagctcagtccggtaacatacaagctacagcctggcaacaaaccctctcgactcaagctcaacaaaagaaaactggcaggacaccaggaaaccagcacgaagtcatccgagactggatctaccaaggacaactttattcaaaacaacccctgtaatagcaatcccgagaaagataatgccttagccagcgatttgacaaaaactactcgcggtgccttcgaaaacaagacccccaccgacgggttcatcgattgccacttcggagacgggacattagaaacagagcagagttttggattatacgggaataagtacactctgcgagccaagaggaaggtgaactatgaaacagaagattcagagtcctctttcgtaactcataactccaaaatctccttgccccatcccatggagattggcgagtcattagatggcaccctgaaatctagaaagcgccgaaagatgagcaaaaagcttcctcctgtcatcataaaatatattattatcaacaggttcaggggacggaagaatatgcttgtcaaactgggcaagatcgactccaaggaaaagcaggtgatcctgaccgaggagaagatggagctgtacaaaaagctagcaccactcaaagatttttggcccaaagtgcccgattcaccggctaccaagtaccccatatatcccctgacacccaagaaatcccacagacgtaaaagtaagcataaatccgctaaaaagaagaccggcaagcagcaaagaaccaataacgagaacattaaaagaaccctgtcttttagaaaaaaacgctctcacgctattctatcacctccttccccttcctacaacgccgagacagaggattgtgatctgaattattctgatgtcatgagcaagctggggttcctgagcgaaagatcgaccagtcctatcaattcttcgccgcctcggtgttggtcccccacggatccacgagccgaggaaataatggctgccgctgagaaagaggccatgttattcaagggccctaacgtgtataagaagacagtgaatagtcggataggcaagaccagccgtgcacgggcacagatcaaaaagtcaaaggcaaagttggcgaacccttctattgtgactaagaagcgtaataaacgcaaccaaaccaacaaacttgtggacgacggcaaaaaaaagccgagggctaaacagaaaaccaatgaaaaaggtacttcaagaaaacacactacactaaaggatgagaagattaagtcacaaagcggagccgaggttaaatttgtcttaaaacaccagaacgtctcagagttcgccagcagtagtgggggaagccagctgctgttcaaacagaaggatatgcctctcatgggttctgccgtagatcaccccctctctgctagcctgccaaccggaataaacgcacagcagaaattatctggctgcttcagttctttcttagaatctaagaaaagcgtcgacttgcagacttttcctagctctagggacgaccttcacccctcagtggtgtgtaattctatcgggcctggtgtgtccaaaataaacgttcagaggccccataaccagagcgccatgttcaccctcaaagagtcgacgctcattcaaaagaatatatttgatctgtccaatcacctgagccaggttgcgcagaatacccaaatcagctcgggtatgtcttctaagattgaggacaatgcaaataacatccagcgaaactatctctctagtatcggaaaactgtcggagtaccgaaattccctagaaagcaagctagaccaggcctatacaccaaactttctacattgtaaagatagtcaacagcagattgtgtgtatcgcagaacagtctaaacattccgagacctgttctcccggaaacacggccagcgaggagagtcagatgcccaacaattgttttgtgacctcactgcgcagtcctattaaacagatcgcatgggagcagaaacagagagggttcatcctcgatatgtctaactttaagccagagagagtcaagccccgttcgctttcagaggccatctcccagacaaaggccctgtcgcaatgcaaaaacagaaatgttagcacgccatctgcattcggcgaaggtcagagcggcttggctgtgctgaaagagctgctccagaaaaggcagcagaaagcgcagaacgccaacacaacacaggaccccctgtcgaataaacaccagcccaataaaaatatatctggatctctggaacacaataaggccaacaaacgcacccggagtgtgactagcccaagaaagcccaggacacctcgatcgactaagcaaaaagagaaaatccctaaactgctgaaagtcgactccctgaacctccaaaactctagtcagctggacaactctgtgtccgatgattctccgatcttcttttcggaccctggatttgaaagttgttattcccttgaagacagtctctcccccgaacacaactataactttgatatcaatactattggccaaaccggtttttgtagtttctatagcgggtctcagttcgttcccgcagatcagaacctgccccagaagtttttgtccgatgccgtccaagatctgttccccggacaggccatagaaaaaaacgagttcctgtctcacgataaccagaagtgtgacgaggacaagcaccatacaaccgacagcgcctcgtggatccgcagcggtacgctgtcgcccgagatttttgaaaagagcacgatcgatagtaatgagaatcgccgacataatcagtggaagaattcatttcaccccctgactactcgatcgaactctataatggactctttttgcgtgcagcaggctgaagattgcctctctgagaaaagccgcttgaatagatcttccgttagcaaggaagtcttcctgagtttgccccaacctaacaacagtgactggatccaggggcatacccgcaaggagatggggcagtccctggacagtgctaacacctcctttaccgcgatccttagttcacccgatggtgaactggtggatgtcgcttgcgaagatctggagttgtacgtgtctagaaataatgatatgttaactcccaccccagactcgtcgcctcgctccacatctagtccctcacagtccaaaaacggtagcttcacccctcgtaccgcgaacatccttaagcccctgatgagccctccttctagagaagagatcatggccaccctcctcgatcacgacctcagtgaaaccatttaccaggagcccttctgtagcaacccttccgacgtccccgaaaaaccgagggaaatcggaggtcgcctgctcatggtggagacaagactcgccaacgatttggccgaatttgagggtgacttttccctggagggtctgaggctgtggaaaaccgcattcagcgctatgactcagaatcctaggccagggagcccgctccgttctgggcaaggagtggttaataagggatcctcaaattcacctaagatggtggaagataaaaagattgtaattatgccctgcaaatgcgctccttctcgacaattagtgcaagtatggcttcaggcaaaagaagagtatgagcgaagcaaaaaactgcctaagactaaacctacgggcgtggtgaagtccgcggaaaattttagcagcagcgtgaacccggacgataagcctgtggtgcctccaaagatggatgtgtccccctgcattcttcctacaactgcacataccaaagaagacgttgataattcgcagattgcattacaggctcccacaacagggtgttcacagaccgcttctgagagtcaaatgctccctcccgtggcttctgctagtgacccagagaaagatgaagacgatgacgacaactactacatttcctactccagcccagatagccccgtgatccccccttggcagcaacccatatcacctgatagcaaagcacttaatggtgatgataggccatcatcacccgttgaggaactgccttccctggctttcgaaaattttcttaaacctatcaaagacggcatccagaaaagcccctgtagtgagccgcaagagccgctcgtaatttcccctatcaatacaagagctcgtactgggaagtgcgaaagcctgtgctttcattccacacctataatccagagaaagctgctggaacggcttcctgaggctcccggactgtcccccctcagcactgagcccaagacccagaagctctcgaacaagaaaggctctaatacagataccctgaggcgagtgcttctcacgcaagccaagaatcagttcgcggcagtgaacactccccagaaggaaacaagtcagatagatggtcccagccttaacaatacttatggtttcaaggtgtccatacagaatctccaagaagctaaagctttacacgagatccagaacctcacactgatttccgttgaacttcatgccagaacgcggcgagaccttgagccggacccagagttcgatcctatttgcgctctgttctactgtatttccagcgatacccccctgcccgacacggaaaagaccgagctcacaggcgtgatcgtcattgacaaggacaaaacggtcttctcacaggatatccgttaccagacaccactgttaattcggtcaggaataaccggcctcgaggtcacttatgccgctgacgaaaaggcattgtttcatgagatcgcaaacattataaagcggtacgatccggatatcctgttaggctacgaaattcagatgcactcctgggggtatctgctgcaacgtgctgctgcattatctattgacttgtgcaggatgattagcagggtgcccgatgacaaaattgagaaccggttcgcagccgaaagggatgagtacgggagctatacaatgagtgagatcaacattgtgggcagaatcaccctgaatctctggagaataatgcgtaatgaggtcgcactaactaattacacctttgaaaacgtttcgttccatgtgttgcatcagaggtttcctctgtttaccttccgcgtactttcagattggttcgataacaagactgacctgtaccgctggaaaatggttgaccactacgtctcccgggtgagagggaacctgcagatgctggagcagctcgacctcatcggtaagacatccgaaatggccagattgtttggaatccagttccttcatgtactcacgcgcggatcccagtacagggtggagtcgatgatgttgagaatcgcaaaaccaatgaactacattccagtcactccttctgtacaacagaggtcacagatgagggccccacagtgtgtccccctgattatggaaccagagtcccggttctatagcaattcagtgctagttttggactttcagagtctttatccctcaatcgtaattgcctataattattgtttcagcacatgccttgggcatgtcgagaacctcggcaagtacgacgagttcaaattcggttgcaccagcctgagagtgcctccagacttactgtatcaagtgcgccacgatattaccgtcagcccaaatggcgtggcttttgtcaaaccgtccgtccgcaagggcgtgctgcctagaatgttggaggaaatattgaaaacacggtttatggtcaaacagagtatgaaggcctacaaacaggacagagctttaagtagaatgcttgacgcacggcaactgggtctgaagctgatcgcaaacgtcacctttggctacactagtgcaaacttcagcggcagaatgccgtgtatcgaagtgggtgactccatcgtccataaggcccgtgagactcttgagcgcgcaatcaaacttgtgaatgacacaaaaaaatggggggctcgggttgtctacggcgacacagatagcatgtttgttctgctgaaaggtgcaacgaaggagcagtcattcaagattggacaagagatcgccgaagccgttaccgcaactaatcccaaaccagtcaagcttaagttcgaaaaggtctatctgccttgcgttctgcagacaaaaaaaagatatgtgggatatatgtatgaaaccttagatcaaaaggacccagtgtttgacgccaaaggcatcgagacagtgagacgcgatagttgcccagccgtgagtaagattctcgagcggtcactgaagctgctcttcgaaaccagggatataagtctgattaagcagtacgtccaacgccaatgtatgaagctcctggaagggaaagccagtatccaggatttcatctttgctaaagagtacagagggtccttttcatataaacccggagcctgcgtccctgcattggagctgaccagaaagatgctcacatacgaccgcagatcagagcctcaggtgggagaaagggtcccatacgtgataatctacggaacgcccggtgtgccgcttatacagttggttcggaggcccgtggaggtgctgcaggatccaaccttgagacttaacgcgacatattatattacaaaacagatcttgcctccattggcacgtatctttagtcttatcggcattgacgtcttttcctggtatcatgagttacctcgcatccataaagctacgagcagctcgaggagtgagcccgaggggagaaaagggaccatctcccagtacttcaccaccctgcattgtcccgtttgcgacgatctcacccagcatggcatctgcagcaagtgccgatcccagcctcagcacgttgcagtgatcctgaatcaggaaatcagagagctggagcggcaacaagagcagctggtcaagatctgtaaaaattgcactggatgtttcgaccgtcacattccctgcgtttccctcaattgtcctgttctttttaaactctctcgagtaaaccgcgagctttctaaggccccatacctgagacagctgctggatcagttctac

SEQ ID NO: 133455 - DNA, 10789 bp, Artificial Sequence
  derived and/or modified sequence
cgagatctgcgcctcgcctccctcctcacgcgggcggattttcttaccttgtgaaaaaccgtctcagcggctgcccccgcctcctctgctggatgtgaaatggcggtcggcgagtggttgcgtccgtgacatcatcatcatggcaacaagagctgcagcctgggaccgaggagcccgtgtgattcccggcggtggcggcagtggcggcagcaccagcaccgacgaaagctcgagggcttctctcctgcggccccttgccgggtgctcctgaggaggcggcggcagcagcgcctacaccgccccgcccgccgctcctcgaggtgcctctgtgtgaggggagggggccgtgccgagaaggggagggggcgccgccgccgctgcggagggagccgccgccgctgctgctgccgctgccgggtcgccagtgaagggaggcagtggcggcggcggcgaacatgttttcagtaaggatagtgactgcagactactacatggccagcccgctgcaggggctggatacctgccaatcccccctcacccaggcccctgtcaagaaggtgccggtggtgcgagtcttcggagcgaccccggcaggtcagaagacatgtcttcatctacatggcatctttccttacctctatgtgccatacgatggttatggacagcagccagaaagctatctttctcagatggcattcagtatcgacagagcacttaatgtggctttaggcaatccatcttccactgctcagcatgtgttcaaagtgtcattagtatcaggaatgcctttttatggttatcatgagaaggaaagacactttatgaagatctatctttacaatcctacaatggtgaaaaggatatgtgaacttttgcaaagcggagccataatgaataaattttaccagcctcatgaagcgcatattccctacctcctacagctcttcattgactacaatctttatggcatgaatttaataaatctggctgctgtcaagttccgaaaagcaagaaggaaaagtaatacattgcatgcaactggatcctgcaagaatcatttatcaggaaattctcttgctgatactttatttcggtgggaacaagatgaaataccaagctctttaatattggaaggtgttgaaccacagagtacatgtgaattagaagtggatgctgtagctgctgatatcttaaatcgtctggacattgaagctcaaattggtggaaaccctggtctacaggccatatgggaagatgaaaagcaacggcgaagaaacagaaatgaaacttctcaaatgagccaacctgagtcacaagatcacaggtttgtgccagcaacagaaagtgaaaaaaaatttcagaagagacttcaggaaattctcaaacagaatgatttctctgtaacattatcaggatctgtggactacagcgatggatcccaggagttctctgctgagttaacattgcactctgaggttctgtctcctgaaatgcttcagtgtacaccagccaatatggtagaagttcacaaagacaaagagtcaagcaaaggtcacactagacacaaagtggaagaagctcttattaatgaagaagcaattttgaaccttatggaaaatagtcagacttttcagcctttgacccaaagactgagtgagtcacctgttttcatggacagtagtcctgatgaggctctggtacatcttcttgctggtttggaaagtgatggatatcggggggaaagaaataggatgccatcaccatgtcgctcctttggaaataataaatatccacaaaatagtgatgatgaagaaaatgaaccacagattgaaaaagaggaaatggagcttagtttggtgatgtcccagagatgggacagcaatattgaagaacattgtgccaaaaagagatcactgtgcagaaatacccacagaagttcaactgaagatgatgactcatcttcaggagaagaaatggaatggagtgataacagtttgcttctagccagtctttctatacctcagttagatggaactgcagatgaaaatagtgacaatccattgaacaatgaaaattctagaacccactcttctgtaattgcaacaagcaagctttcagttaaaccctccatctttcacaaagatgctgctacattagaaccctcatcttctgctaagattacctttcagtgtaaacacacaagtgccctttcttcccatgttttgaacaaggaagatttaattgaagacctttcacagacaaacaaaaatacagaaaaaggtctagataactcagtcacttcttttacaaacgaaagcacttattctatgaaataccctggatctttaagcagtactgttcattcagaaaattctcataaagagaatagtaagaaagagatcctcccagtatcttcctgtgaaagtagtatttttgattatgaagaagatattccatctgttacaagacaagtaccaagtagaaaatatacaaacattagaaaaatcgaaaaggattccccttttatacatatgcaccgtcaccctaacgagaatacattgggcaaaaattctttcaacttttctgacttaaatcattcaaaaaataaagtatcctctgaaggaaatgaaaaaggaaacagcacagctctgagtagtttattcccttcatcatttactgaaaattgtgaattactgtcatgctcaggggagaatagaactatggtgcattctcttaatagcactgctgatgaaagtggactaaataaacttaaaattaggtatgaagaatttcaagaacataaaacagaaaagccaagcctcagccagcaagcagcacactatatgttttttcccagtgttgttctttctaactgtcttactagaccacagaaactatctcctgtcacatataaattacaacctggcaataaaccatcccggttaaaattgaataaaaggaaacttgcaggtcatcaggagacttctaccaaaagtagtgagactggatccacaaaagataattttatacaaaataatccttgtaatagtaatcctgagaaggataatgcattggctagtgatttaactaaaaccactcgtggagcttttgaaaataaaacacccacagatggttttatagactgtcactttggagatggaacgttagaaactgagcagtcctttggactatatggaaataaatacacacttagagccaaacgcaaggtaaattatgagactgaagacagtgagtcaagttttgtaactcacaactcaaaaattagtctacctcatcccatggaaattggtgaaagtttagatggaactctcaaatcccgaaaacgaagaaaaatgtctaaaaagctgccccctgtcatcataaagtatattattattaatagatttagagggagaaaaaatatgcttgtgaagctaggaaaaatagactctaaagaaaaacaagtaatattaacagaagaaaaaatggaactatataaaaagcttgcacctttgaaggacttttggccaaaagttcccgactcccctgcaaccaaatatcccatttatccactaacaccaaagaaaagtcacagaagaaagtcaaaacataaatctgctaagaaaaaaactggtaaacaacaaaggacaaataatgaaaatattaaaagaactttgtctttcaggaaaaaacggtcacatgctattctttctcctccctcaccatcttacaatgctgaaaccgaagattgtgacctgaattatagtgatgttatgtctaaactaggttttctttctgagagaagcacaagtcccataaattcttctccacctcgctgctggtctcccacagatccaagagctgaagaaatcatggctgctgcagaaaaagaggcaatgctttttaagggtcctaatgtatataagaagactgttaattctcgtataggaaaaactagtcgcgcaagagcacagattaagaaatcaaaagcaaagcttgctaatccctctatagttactaagaaaaggaacaaacgaaatcagacaaataaactagtagatgatggaaaaaagaaaccaagagcaaaacaaaaaacaaatgagaaaggtacatcgagaaagcatacaacacttaaggatgaaaaaataaaatctcagtctggtgctgaggttaagtttgtactgaaacaccagaatgtgtctgaatttgcaagtagttctggaggctctcaactactttttaaacagaaagatatgccactaatgggctctgctgtagatcatcccctttctgcttccctacccactggaattaatgcacaacagaagttatctggctgcttttcttctttcttagaaagcaagaagtctgtagatttgcagacattccccagttcacgagatgatttgcatccatcagttgtttgtaattctataggacctggagtctcaaaaattaatgttcaaaggcctcataatcaaagtgctatgtttactctaaaggaatcaacgttaattcaaaaaaatatatttgacctttccaatcatttatctcaggtagcacagaatacacagatatcttctggtatgtcctcaaagatagaagataatgcaaataatatacaaagaaactatttgtcatcaatcggaaagttaagtgaatatcgcaattccctagaatcaaagctggaccaagcatatacccctaattttttgcattgcaaagacagtcagcagcagattgtgtgcatagcggaacagtcaaagcacagtgaaacttgttctccgggaaatacagcttcagaggaaagccaaatgcctaataattgctttgtaacttccttgagaagtccaatcaaacaaatagcatgggagcaaaagcaaaggggctttattttagatatgtcaaattttaaacctgaaagagtaaaaccgaggtcgttatcagaagcaatttcacaaaccaaagcactttctcagtgtaaaaatcgaaatgtgtcaacaccttcagcatttggtgaaggacagtctggactggcagttctaaaagaattgttacaaaaaagacagcagaaagcacaaaatgcaaatactacacaagacccattatccaataaacatcaaccaaataaaaatatttctggttcccttgagcataacaaagcaaataaacggacacgatcggtaacgtccccaagaaaacctcgaactcccagaagtacaaaacaaaaagaaaaaatccccaaacttctcaaagtagactctttaaatttacaaaactctagccagttggataactctgtatcagatgatagtcccatctttttttcagatccaggctttgaaagttgttactcacttgaagatagtttatctcctgaacataattataattttgatattaacacaataggtcagactggattttgtagcttttattctggaagtcagtttgtcccagctgatcagaatttgcctcagaagttcctaagtgatgctgttcaggatctttttccaggacaagctatagaaaaaaatgagtttttaagtcatgacaaccagaaatgtgatgaagacaagcatcataccacagactcagcctcatggattagatctggtactttaagtcctgaaatttttgagaagtcaaccatagatagcaatgagaatcgtcgccacaaccagtggaaaaatagctttcatcctctaacaactcggtctaactcaataatggattctttctgtgttcagcaggcagaagactgtctaagtgaaaaatctagattgaataggagttcagtaagcaaagaagtgtttcttagcctcccacagccaaacaattcagactggattcaaggtcacaccagaaaagaaatgggacagtctcttgactcagccaatacctcttttactgcaatactctcctcccctgatggtgaacttgtagacgtggcctgtgaagatttagaactgtatgtttcaagaaacaatgatatgttgacaccaactcctgatagttcaccaagatctactagctctccttcacaatctaaaaatggcagcttcacccctcgaactgctaacattctgaaaccacttatgtcccccccaagtagggaagaaattatggcaactttgttggatcatgacctgtctgagactatttaccaggaaccattttgcagtaatccttctgatgtaccagaaaagcccagggagattggtggacggctcctcatggtagaaactcgacttgcaaatgatctggctgagtttgagggagacttttccttggaaggacttcgtctttggaaaacagcattctcagcaatgactcagaatccaaggccagggtcaccccttcgcagtggccaaggagttgtcaataaagggtcaagtaatagccctaagatggttgaagataaaaaaattgtgattatgccttgcaaatgtgccccaagtcgacaactggttcaagtgtggcttcaagccaaagaagaatacgaacgttccaagaaactgcctaaaaccaagccaactggagttgtaaaatctgctgagaactttagctcttcagttaacccagatgacaaacctgtagtgcctccaaaaatggatgtaagtccatgtatactccccactacagcacataccaaggaggatgttgataattctcagattgctttacaagcaccaaccacgggatgtagtcaaactgcaagtgaaagtcagatgctgccaccagttgcctctgcaagtgatcccgaaaaagatgaagatgatgatgataactattacattagttatagctcccctgattctccagtaattcccccttggcaacaaccaatatccccagattccaaagcattaaatggagatgatagaccctcatcaccagtagaggagctgccttcattggcttttgagaacttcttaaagccaataaaagatggtatacaaaaaagcccctgcagtgagcctcaagagcctctagtgatatctccaattaatactagggcaagaactgggaaatgtgaatcactttgctttcatagtacaccaatcatacagagaaaacttctggaaaggcttcctgaagcacctggccttagcccattatcaacagaaccaaaaacacagaagttgagtaataagaaaggaagtaatactgacactcttagaagagtactgttaacacaagcaaagaatcaatttgcagcagtaaataccccacagaaagaaacttctcagattgatggaccatctttaaacaatacttacggtttcaaagtcagcatacaaaacttacaggaggcaaaagctttacatgagatacaaaatcttaccctaatcagtgtggagttgcatgctcgaactagacgagacttagaaccggatcctgaatttgacccaatctgtgctctgttctactgcatctcatctgacactccactgccagatacagaaaaaacagaactcacaggtgtaatagtgattgataaagacaagacagttttcagtcaagatatcagatatcagactccattacttattagatctggaattacaggactcgaagtcacctatgctgctgatgagaaggcactttttcatgaaattgcaaatataataaagaggtatgatcctgatattctgctaggatatgagattcagatgcattcctggggttacctcttacaaagggctgccgctttaagtattgacttatgtcggatgatctctcgggtgccagatgacaaaattgagaacagatttgcagctgaaagagatgagtatggatcatatacaatgagtgagataaatattgttggccgaattacactaaatctttggagaatcatgagaaatgaggtggctctaactaactacacctttgaaaatgtgagctttcatgttcttcatcagcgttttcccctctttacctttcgagtcttgtcagactggtttgataacaagacagatctatacagatggaaaatggttgatcattatgttagccgtgtccgtggaaatctccaaatgttagaacagctggacctgattgggaaaaccagtgagatggctagactttttggcattcagtttttacatgtactgacaaggggttcacagtaccgtgtggaatcaatgatgttgcgtattgctaaaccaatgaactatattcctgtgacacctagtgttcagcaaagatcccagatgagagccccacagtgtgttcctctaattatggagcctgaatcccgcttctatagcaactctgttctcgttttggatttccaatcactttatccttctattgtgattgcatataactactgcttttccacctgccttggccatgtggagaacttgggaaagtatgatgagttcaaatttggctgtacctctctgagagtacctccagatttactttaccaagttaggcatgatatcacagtgtcccccaatggagtagcttttgtcaagccttcagtaagaaaaggtgtactaccaagaatgcttgaagaaattttgaagactagatttatggtgaagcagtcaatgaaggcttacaagcaagacagagccctgtcacgaatgcttgatgcgcgtcagttgggacttaagctgatagcaaatgtcacatttggctatacatctgctaatttttctgggagaatgccatgcattgaggttggcgatagtattgttcacaaagccagagagaccttggaacgagctattaaactggtgaatgataccaagaaatggggggctagggttgtatatggcgatactgacagtatgtttgtgctactgaaaggagccactaaggagcagtcttttaagattggtcaggaaattgccgaagctgtaactgctaccaatcctaaaccagtgaaattgaagtttgaaaaggtatatttgccctgtgttttacaaacaaaaaagaggtatgtgggttacatgtatgaaacactggatcagaaggacccagtatttgatgcaaaaggaatagaaacagtcagaagagattcctgccctgctgtttctaagatacttgagcgttctctaaagctgctatttgaaacgagagatataagtctaattaaacagtatgttcagcgacaatgtatgaagcttctggaaggaaaggccagcatacaagactttatctttgccaaggaatacagaggaagtttttcttataaaccaggagcttgtgtgccagcccttgaacttacaaggaaaatgctgacttatgaccggcgctctgagcctcaggttggggagcgagtgccatacgtcatcatttatgggacccccggagtaccacttatccagcttgtaaggcgcccagtggaagtcctgcaggacccaactctgagactgaatgctacttactatattaccaagcaaatccttccacccttggcaagaatcttctcacttattggtattgatgtcttcagctggtatcatgaattaccaaggatccataaagctaccagctcctcgcgaagtgaacctgaagggcggaaaggcactatttcacaatattttactaccttacactgtcctgtgtgtgatgacctaactcagcatggcatctgtagtaaatgtcggagccaacctcagcatgttgcagtcatcctcaaccaagaaatccgggagttggaacgtcaacaggagcaacttgtaaagatatgcaagaactgtacaggttgctttgatcgacacatcccatgtgtttctctgaactgcccagtacttttcaaactctcccgagtaaatagagaattgtccaaggcaccatatctccggcagttattagaccagttttaaattgtcaatatcacagtattacaggtgctatttttttcagtgcttaccactaaactgttgtgcatggtgctttttaactttcatcgagtcaaggatgttcactgtctgttatctgaagactatgaagacttctatgctaaccgaattaaaatgtacttgttgatctctgaatagctcacttcttacaatgtacaaattcctcattctgtcaccttttaaacattgttttataatgcaggtgttggatttgctccagtatgtgtaccatcttgtaaattcatttgagtagatcatgtttacttcccagtggaaggagcactgaaaacctcttaaagaaaaagcatttgtgtgttttccttgaactgtctgtatcaagacgtgttacttcgagatatccattcactttataattttgactgcaaaatattttgtaaatacacttttttacttttcaaacgagcaaaataatgtgcaatgatttttatacaaatgattttcaagttgtttggtatatttcctctaggttttgcttgactcaaagtagatcgttattttgatcaaactgtgcaaacagtagtaccacgtgtagcattttgaaacattatttttttttaaaaaatgctgtcttgctttagctattaatggggcattgtgaggaactgtgcaaagacatttttgttacaaacctgtgggcctgttgcaatactttaaaaataaaaaattttattccatttgcttgttttgtatagacatttctattgcttctaaatatacttaaaatattttctttccttatgtactgtacagttaatcttatttgccatcatcttgaacacaaaatgtgtatttagaatatttgtataactgtgtaaaataaaaaaggaattatgtggtcagtgcattgttttttaaactggaaatcattttgttttaaaagttaa

SEQ ID NO: 133456 - DNA, 10701 bp, Artificial Sequence
  derived and/or modified sequence
catcatcatggcaacaagagctgcagcctgggaccgaggagcccgtgtgattcccggcggtggcggcagtggcggcagcaccagcaccgacgaaagctcgagggcttctctcctgcggccccttgccgggtgctcctgaggaggcggcggcagcagcgcctacaccgccccgcccgccgctcctcgaggtgcctctgtgtgaggggagggggccgtgccgagaaggggagggggcgccgccgccgctgcggagggagccgccgccgctgctgctgccgctgccgggtcgccagtgaagggaggcagtggcggcggcggcgaacatgttttcagtaaggatagtgactgcagactactacatggccagcccgctgcaggggctggatacctgccaatcccccctcacccaggcccctgtcaagaaggtgccggtggtgcgagtcttcggagcgaccccggcaggtcagaagacatgtcttcatctacatggcatctttccttacctctatgtgccatacgatggttatggacagcagccagaaagctatctttctcagatggcattcagtatcgacagagcacttaatgtggctttaggcaatccatcttccactgctcagcatgtgttcaaagtgtcattagtatcaggaatgcctttttatggttatcatgagaaggaaagacactttatgaagatctatctttacaatcctacaatggtgaaaaggatatgtgaacttttgcaaagcggagccataatgaataaattttaccagcctcatgaagcgcatattccctacctcctacagctcttcattgactacaatctttatggcatgaatttaataaatctggctgctgtcaagttccgaaaagcaagaaggaaaagtaatacattgcatgcaactggatcctgcaagaatcatttatcaggaaattctcttgctgatactttatttcggtgggaacaagatgaaataccaagctctttaatattggaaggtgttgaaccacagagtacatgtgaattagaagtggatgctgtagctgctgatatcttaaatcgtctggacattgaagctcaaattggtggaaaccctggtctacaggccatatgggaagatgaaaagcaacggcgaagaaacagaaatgaaacttctcaaatgagccaacctgagtcacaagatcacaggtttgtgccagcaacagaaagtgaaaaaaaatttcagaagagacttcaggaaattctcaaacagaatgatttctctgtaacattatcaggatctgtggactacagcgatggatcccaggagttctctgctgagttaacattgcactctgaggttctgtctcctgaaatgcttcagtgtacaccagccaatatggtagaagttcacaaagacaaagagtcaagcaaaggtcacactagacacaaagtggaagaagctcttattaatgaagaagcaattttgaaccttatggaaaatagtcagacttttcagcctttgacccaaagactgagtgagtcacctgttttcatggacagtagtcctgatgaggctctggtacatcttcttgctggtttggaaagtgatggatatcggggggaaagaaataggatgccatcaccatgtcgctcctttggaaataataaatatccacaaaatagtgatgatgaagaaaatgaaccacagattgaaaaagaggaaatggagcttagtttggtgatgtcccagagatgggacagcaatattgaagaacattgtgccaaaaagagatcactgtgcagaaatacccacagaagttcaactgaagatgatgactcatcttcaggagaagaaatggaatggagtgataacagtttgcttctagccagtctttctatacctcagttagatggaactgcagatgaaaatagtgacaatccattgaacaatgaaaattctagaacccactcttctgtaattgcaacaagcaagctttcagttaaaccctccatctttcacaaagatgctgctacattagaaccctcatcttctgctaagattacctttcagtgtaaacacacaagtgccctttcttcccatgttttgaacaaggaagatttaattgaagacctttcacagacaaacaaaaatacagaaaaaggtctagataactcagtcacttcttttacaaacgaaagcacttattctatgaaataccctggatctttaagcagtactgttcattcagaaaattctcataaagagaatagtaagaaagagatcctcccagtatcttcctgtgaaagtagtatttttgattatgaagaagatattccatctgttacaagacaagtaccaagtagaaaatatacaaacattagaaaaatcgaaaaggattccccttttatacatatgcaccgtcaccctaacgagaatacattgggcaaaaattctttcaacttttctgacttaaatcattcaaaaaataaagtatcctctgaaggaaatgaaaaaggaaacagcacagctctgagtagtttattcccttcatcatttactgaaaattgtgaattactgtcatgctcaggggagaatagaactatggtgcattctcttaatagcactgctgatgaaagtggactaaataaacttaaaattaggtatgaagaatttcaagaacataaaacagaaaagccaagcctcagccagcaagcagcacactatatgttttttcccagtgttgttctttctaactgtcttactagaccacagaaactatctcctgtcacatataaattacaacctggcaataaaccatcccggttaaaattgaataaaaggaaacttgcaggtcatcaggagacttctaccaaaagtagtgagactggatccacaaaagataattttatacaaaataatccttgtaatagtaatcctgagaaggataatgcattggctagtgatttaactaaaaccactcgtggagcttttgaaaataaaacacccacagatggttttatagactgtcactttggagatggaacgttagaaactgagcagtcctttggactatatggaaataaatacacacttagagccaaacgcaaggtaaattatgagactgaagacagtgagtcaagttttgtaactcacaactcaaaaattagtctacctcatcccatggaaattggtgaaagtttagatggaactctcaaatcccgaaaacgaagaaaaatgtctaaaaagctgccccctgtcatcataaagtatattattattaatagatttagagggagaaaaaatatgcttgtgaagctaggaaaaatagactctaaagaaaaacaagtaatattaacagaagaaaaaatggaactatataaaaagcttgcacctttgaaggacttttggccaaaagttcccgactcccctgcaaccaaatatcccatttatccactaacaccaaagaaaagtcacagaagaaagtcaaaacataaatctgctaagaaaaaaactggtaaacaacaaaggacaaataatgaaaatattaaaagaactttgtctttcaggaaaaaacggtcacatgctattctttctcctccctcaccatcttacaatgctgaaaccgaagattgtgacctgaattatagtgatgttatgtctaaactaggttttctttctgagagaagcacaagtcccataaattcttctccacctcgctgctggtctcccacagatccaagagctgaagaaatcatggctgctgcagaaaaagaggcaatgctttttaagggtcctaatgtatataagaagactgttaattctcgtataggaaaaactagtcgcgcaagagcacagattaagaaatcaaaagcaaagcttgctaatccctctatagttactaagaaaaggaacaaacgaaatcagacaaataaactagtagatgatggaaaaaagaaaccaagagcaaaacaaaaaacaaatgagaaaggtacatcgagaaagcatacaacacttaaggatgaaaaaataaaatctcagtctggtgctgaggttaagtttgtactgaaacaccagaatgtgtctgaatttgcaagtagttctggaggctctcaactactttttaaacagaaagatatgccactaatgggctctgctgtagatcatcccctttctgcttccctacccactggaattaatgcacaacagaagttatctggctgcttttcttctttcttagaaagcaagaagtctgtagatttgcagacattccccagttcacgagatgatttgcatccatcagttgtttgtaattctataggacctggagtctcaaaaattaatgttcaaaggcctcataatcaaagtgctatgtttactctaaaggaatcaacgttaattcaaaaaaatatatttgacctttccaatcatttatctcaggtagcacagaatacacagatatcttctggtatgtcctcaaagatagaagataatgcaaataatatacaaagaaactatttgtcatcaatcggaaagttaagtgaatatcgcaattccctagaatcaaagctggaccaagcatatacccctaattttttgcattgcaaagacagtcagcagcagattgtgtgcatagcggaacagtcaaagcacagtgaaacttgttctccgggaaatacagcttcagaggaaagccaaatgcctaataattgctttgtaacttccttgagaagtccaatcaaacaaatagcatgggagcaaaagcaaaggggctttattttagatatgtcaaattttaaacctgaaagagtaaaaccgaggtcgttatcagaagcaatttcacaaaccaaagcactttctcagtgtaaaaatcgaaatgtgtcaacaccttcagcatttggtgaaggacagtctggactggcagttctaaaagaattgttacaaaaaagacagcagaaagcacaaaatgcaaatactacacaagacccattatccaataaacatcaaccaaataaaaatatttctggttcccttgagcataacaaagcaaataaacggacacgatcggtaacgtccccaagaaaacctcgaactcccagaagtacaaaacaaaaagaaaaaatccccaaacttctcaaagtagactctttaaatttacaaaactctagccagttggataactctgtatcagatgatagtcccatctttttttcagatccaggctttgaaagttgttactcacttgaagatagtttatctcctgaacataattataattttgatattaacacaataggtcagactggattttgtagcttttattctggaagtcagtttgtcccagctgatcagaatttgcctcagaagttcctaagtgatgctgttcaggatctttttccaggacaagctatagaaaaaaatgagtttttaagtcatgacaaccagaaatgtgatgaagacaagcatcataccacagactcagcctcatggattagatctggtactttaagtcctgaaatttttgagaagtcaaccatagatagcaatgagaatcgtcgccacaaccagtggaaaaatagctttcatcctctaacaactcggtctaactcaataatggattctttctgtgttcagcaggcagaagactgtctaagtgaaaaatctagattgaataggagttcagtaagcaaagaagtgtttcttagcctcccacagccaaacaattcagactggattcaaggtcacaccagaaaagaaatgggacagtctcttgactcagccaatacctcttttactgcaatactctcctcccctgatggtgaacttgtagacgtggcctgtgaagatttagaactgtatgtttcaagaaacaatgatatgttgacaccaactcctgatagttcaccaagatctactagctctccttcacaatctaaaaatggcagcttcacccctcgaactgctaacattctgaaaccacttatgtcccccccaagtagggaagaaattatggcaactttgttggatcatgacctgtctgagactatttaccaggaaccattttgcagtaatccttctgatgtaccagaaaagcccagggagattggtggacggctcctcatggtagaaactcgacttgcaaatgatctggctgagtttgagggagacttttccttggaaggacttcgtctttggaaaacagcattctcagcaatgactcagaatccaaggccagggtcaccccttcgcagtggccaaggagttgtcaataaagggtcaagtaatagccctaagatggttgaagataaaaaaattgtgattatgccttgcaaatgtgccccaagtcgacaactggttcaagtgtggcttcaagccaaagaagaatacgaacgttccaagaaactgcctaaaaccaagccaactggagttgtaaaatctgctgagaactttagctcttcagttaacccagatgacaaacctgtagtgcctccaaaaatggatgtaagtccatgtatactccccactacagcacataccaaggaggatgttgataattctcagattgctttacaagcaccaaccacgggatgtagtcaaactgcaagtgaaagtcagatgctgccaccagttgcctctgcaagtgatcccgaaaaagatgaagatgatgatgataactattacattagttatagctcccctgattctccagtaattcccccttggcaacaaccaatatccccagattccaaagcattaaatggagatgatagaccctcatcaccagtagaggagctgccttcattggcttttgagaacttcttaaagccaataaaagatggtatacaaaaaagcccctgcagtgagcctcaagagcctctagtgatatctccaattaatactagggcaagaactgggaaatgtgaatcactttgctttcatagtacaccaatcatacagagaaaacttctggaaaggcttcctgaagcacctggccttagcccattatcaacagaaccaaaaacacagaagttgagtaataagaaaggaagtaatactgacactcttagaagagtactgttaacacaagcaaagaatcaatttgcagcagtaaataccccacagaaagaaacttctcagattgatggaccatctttaaacaatacttacggtttcaaagtcagcatacaaaacttacaggaggcaaaagctttacatgagatacaaaatcttaccctaatcagtgtggagttgcatgctcgaactagacgagacttagaaccggatcctgaatttgacccaatctgtgctctgttctactgcatctcatctgacactccactgccagatacagaaaaaacagaactcacaggtgtaatagtgattgataaagacaagacagttttcagtcaagatatcagatatcagactccattacttattagatctggaattacaggactcgaagtcacctatgctgctgatgagaaggcactttttcatgaaattgcaaatataataaagaggtatgatcctgatattctgctaggatatgagattcagatgcattcctggggttacctcttacaaagggctgccgctttaagtattgacttatgtcggatgatctctcgggtgccagatgacaaaattgagaacagatttgcagctgaaagagatgagtatggatcatatacaatgagtgagataaatattgttggccgaattacactaaatctttggagaatcatgagaaatgaggtggctctaactaactacacctttgaaaatgtgagctttcatgttcttcatcagcgttttcccctctttacctttcgagtcttgtcagactggtttgataacaagacagatctatacagatggaaaatggttgatcattatgttagccgtgtccgtggaaatctccaaatgttagaacagctggacctgattgggaaaaccagtgagatggctagactttttggcattcagtttttacatgtactgacaaggggttcacagtaccgtgtggaatcaatgatgttgcgtattgctaaaccaatgaactatattcctgtgacacctagtgttcagcaaagatcccagatgagagccccacagtgtgttcctctaattatggagcctgaatcccgcttctatagcaactctgttctcgttttggatttccaatcactttatccttctattgtgattgcatataactactgcttttccacctgccttggccatgtggagaacttgggaaagtatgatgagttcaaatttggctgtacctctctgagagtacctccagatttactttaccaagttaggcatgatatcacagtgtcccccaatggagtagcttttgtcaagccttcagtaagaaaaggtgtactaccaagaatgcttgaagaaattttgaagactagatttatggtgaagcagtcaatgaaggcttacaagcaagacagagccctgtcacgaatgcttgatgcgcgtcagttgggacttaagctgatagcaaatgtcacatttggctatacatctgctaatttttctgggagaatgccatgcattgaggttggcgatagtattgttcacaaagccagagagaccttggaacgagctattaaactggtgaatgataccaagaaatggggggctagggttgtatatggcgatactgacagtatgtttgtgctactgaaaggagccactaaggagcagtcttttaagattggtcaggaaattgccgaagctgtaactgctaccaatcctaaaccagtgaaattgaagtttgaaaaggtatatttgccctgtgttttacaaacaaaaaagaggtatgtgggttacatgtatgaaacactggatcagaaggacccagtatttgatgcaaaaggaatagaaacagtcagaagagattcctgccctgctgtttctaagatacttgagcgttctctaaagctgctatttgaaacgagagatataagtctaattaaacagtatgttcagcgacaatgtatgaagcttctggaaggaaaggccagcatacaagactttatctttgccaaggaatacagaggaagtttttcttataaaccaggagcttgtgtgccagcccttgaacttacaaggaaaatgctgacttatgaccggcgctctgagcctcaggttggggagcgagtgccatacgtcatcatttatgggacccccggagtaccacttatccagcttgtaaggcgcccagtggaagtcctgcaggacccaactctgagactgaatgctacttactatattaccaagcaaatccttccacccttggcaagaatcttctcacttattggtattgatgtcttcagctggtatcatgaattaccaaggatccataaagctaccagctcctcgcgaagtgaacctgaagggcggaaaggcactatttcacaatattttactaccttacactgtcctgtgtgtgatgacctaactcagcatggcatctgtagtaaatgtcggagccaacctcagcatgttgcagtcatcctcaaccaagaaatccgggagttggaacgtcaacaggagcaacttgtaaagatatgcaagaactgtacaggttgctttgatcgacacatcccatgtgtttctctgaactgcccagtacttttcaaactctcccgagtaaatagagaattgtccaaggcaccatatctccggcagttattagaccagttttaaattgtcaatatcacagtattacaggtgctatttttttcagtgcttaccactaaactgttgtgcatggtgctttttaactttcatcgagtcaaggatgttcactgtctgttatctgaagactatgaagacttctatgctaaccgaattaaaatgtacttgttgatctctgaatagctcacttcttacaatgtacaaattcctcattctgtcaccttttaaacattgttttataatgcaggtgttggatttgctccagtatgtgtaccatcttgtaaattcatttgagtagatcatgtttacttcccagtggaaggagcactgaaaacctcttaaagaaaaagcatttgtgtgttttccttgaactgtctgtatcaagacgtgttacttcgagatatccattcactttataattttgactgcaaaatattttgtaaatacacttttttacttttcaaacgagcaaaataatgtgcaatgatttttatacaaatgattttcaagttgtttggtatatttcctctaggttttgcttgactcaaagtagatcgttattttgatcaaactgtgcaaacagtagtaccacgtgtagcattttgaaacattatttttttttaaaaaatgctgtcttgctttagctattaatggggcattgtgaggaactgtgcaaagacatttttgttacaaacctgtgggcctgttgcaatactttaaaaataaaaaattttattccatttgcttgttttgtatagacatttctattgcttctaaatatacttaaaatattttctttccttatgtactgtacagttaatcttatttgccatcatcttgaacacaaaatgtgtatttagaatatttgtataactgtgtaaaataaaaaaggaattatgtggtcagtgcattgttttttaaactggaaatcattttgttttaaaagttaataatggaaaccatattaaaattgaataaaatataaaataatata

SEQ ID NO: 133457 - DNA, 10461 bp, Artificial Sequence
  derived and/or modified sequence
tggttgcgtccgtgacatcatcatcatggcaacaagagctgccgggtcgccagtgaagggaggcagtggcggcggcggcgaacatgttttcagtaaggatagtgactgcagactactacatggccagcccgctgcaggggctggatacctgccaatcccccctcacccaggcccctgtcaagaaggtgccggtggtgcgagtcttcggagcgaccccggcaggtcagaagacatgtcttcatctacatggcatctttccttacctctatgtgccatacgatggttatggacagcagccagaaagctatctttctcagatggcattcagtatcgacagagcacttaatgtggctttaggcaatccatcttccactgctcagcatgtgttcaaagtgtcattagtatcaggaatgcctttttatggttatcatgagaaggaaagacactttatgaagatctatctttacaatcctacaatggtgaaaaggatatgtgaacttttgcaaagcggagccataatgaataaattttaccagcctcatgaagcgcatattccctacctcctacagctcttcattgactacaatctttatggcatgaatttaataaatctggctgctgtcaagttccgaaaagcaagaaggaaaagtaatacattgcatgcaactggatcctgcaagaatcatttatcaggaaattctcttgctgatactttatttcggtgggaacaagatgaaataccaagctctttaatattggaaggtgttgaaccacagagtacatgtgaattagaagtggatgctgtagctgctgatatcttaaatcgtctggacattgaagctcaaattggtggaaaccctggtctacaggccatatgggaagatgaaaagcaacggcgaagaaacagaaatgaaacttctcaaatgagccaacctgagtcacaagatcacaggtttgtgccagcaacagaaagtgaaaaaaaatttcagaagagacttcaggaaattctcaaacagaatgatttctctgtaacattatcaggatctgtggactacagcgatggatcccaggagttctctgctgagttaacattgcactctgaggttctgtctcctgaaatgcttcagtgtacaccagccaatatggtagaagttcacaaagacaaagagtcaagcaaaggtcacactagacacaaagtggaagaagctcttattaatgaagaagcaattttgaaccttatggaaaatagtcagacttttcagcctttgacccaaagactgagtgagtcacctgttttcatggacagtagtcctgatgaggctctggtacatcttcttgctggtttggaaagtgatggatatcggggggaaagaaataggatgccatcaccatgtcgctcctttggaaataataaatatccacaaaatagtgatgatgaagaaaatgaaccacagattgaaaaagaggaaatggagcttagtttggtgatgtcccagagatgggacagcaatattgaagaacattgtgccaaaaagagatcactgtgcagaaatacccacagaagttcaactgaagatgatgactcatcttcaggagaagaaatggaatggagtgataacagtttgcttctagccagtctttctatacctcagttagatggaactgcagatgaaaatagtgacaatccattgaacaatgaaaattctagaacccactcttctgtaattgcaacaagcaagctttcagttaaaccctccatctttcacaaagatgctgctacattagaaccctcatcttctgctaagattacctttcagtgtaaacacacaagtgccctttcttcccatgttttgaacaaggaagatttaattgaagacctttcacagacaaacaaaaatacagaaaaaggtctagataactcagtcacttcttttacaaacgaaagcacttattctatgaaataccctggatctttaagcagtactgttcattcagaaaattctcataaagagaatagtaagaaagagatcctcccagtatcttcctgtgaaagtagtatttttgattatgaagaagatattccatctgttacaagacaagtaccaagtagaaaatatacaaacattagaaaaatcgaaaaggattccccttttatacatatgcaccgtcaccctaacgagaatacattgggcaaaaattctttcaacttttctgacttaaatcattcaaaaaataaagtatcctctgaaggaaatgaaaaaggaaacagcacagctctgagtagtttattcccttcatcatttactgaaaattgtgaattactgtcatgctcaggggagaatagaactatggtgcattctcttaatagcactgctgatgaaagtggactaaataaacttaaaattaggtatgaagaatttcaagaacataaaacagaaaagccaagcctcagccagcaagcagcacactatatgttttttcccagtgttgttctttctaactgtcttactagaccacagaaactatctcctgtcacatataaattacaacctggcaataaaccatcccggttaaaattgaataaaaggaaacttgcaggtcatcaggagacttctaccaaaagtagtgagactggatccacaaaagataattttatacaaaataatccttgtaatagtaatcctgagaaggataatgcattggctagtgatttaactaaaaccactcgtggagcttttgaaaataaaacacccacagatggttttatagactgtcactttggagatggaacgttagaaactgagcagtcctttggactatatggaaataaatacacacttagagccaaacgcaaggtaaattatgagactgaagacagtgagtcaagttttgtaactcacaactcaaaaattagtctacctcatcccatggaaattggtgaaagtttagatggaactctcaaatcccgaaaacgaagaaaaatgtctaaaaagctgccccctgtcatcataaagtatattattattaatagatttagagggagaaaaaatatgcttgtgaagctaggaaaaatagactctaaagaaaaacaagtaatattaacagaagaaaaaatggaactatataaaaagcttgcacctttgaaggacttttggccaaaagttcccgactcccctgcaaccaaatatcccatttatccactaacaccaaagaaaagtcacagaagaaagtcaaaacataaatctgctaagaaaaaaactggtaaacaacaaaggacaaataatgaaaatattaaaagaactttgtctttcaggaaaaaacggtcacatgctattctttctcctccctcaccatcttacaatgctgaaaccgaagattgtgacctgaattatagtgatgttatgtctaaactaggttttctttctgagagaagcacaagtcccataaattcttctccacctcgctgctggtctcccacagatccaagagctgaagaaatcatggctgctgcagaaaaagaggcaatgctttttaagggtcctaatgtatataagaagactgttaattctcgtataggaaaaactagtcgcgcaagagcacagattaagaaatcaaaagcaaagcttgctaatccctctatagttactaagaaaaggaacaaacgaaatcagacaaataaactagtagatgatggaaaaaagaaaccaagagcaaaacaaaaaacaaatgagaaaggtacatcgagaaagcatacaacacttaaggatgaaaaaataaaatctcagtctggtgctgaggttaagtttgtactgaaacaccagaatgtgtctgaatttgcaagtagttctggaggctctcaactactttttaaacagaaagatatgccactaatgggctctgctgtagatcatcccctttctgcttccctacccactggaattaatgcacaacagaagttatctggctgcttttcttctttcttagaaagcaagaagtctgtagatttgcagacattccccagttcacgagatgatttgcatccatcagttgtttgtaattctataggacctggagtctcaaaaattaatgttcaaaggcctcataatcaaagtgctatgtttactctaaaggaatcaacgttaattcaaaaaaatatatttgacctttccaatcatttatctcaggtagcacagaatacacagatatcttctggtatgtcctcaaagatagaagataatgcaaataatatacaaagaaactatttgtcatcaatcggaaagttaagtgaatatcgcaattccctagaatcaaagctggaccaagcatatacccctaattttttgcattgcaaagacagtcagcagcagattgtgtgcatagcggaacagtcaaagcacagtgaaacttgttctccgggaaatacagcttcagaggaaagccaaatgcctaataattgctttgtaacttccttgagaagtccaatcaaacaaatagcatgggagcaaaagcaaaggggctttattttagatatgtcaaattttaaacctgaaagagtaaaaccgaggtcgttatcagaagcaatttcacaaaccaaagcactttctcagtgtaaaaatcgaaatgtgtcaacaccttcagcatttggtgaaggacagtctggactggcagttctaaaagaattgttacaaaaaagacagcagaaagcacaaaatgcaaatactacacaagacccattatccaataaacatcaaccaaataaaaatatttctggttcccttgagcataacaaagcaaataaacggacacgatcggtaacgtccccaagaaaacctcgaactcccagaagtacaaaacaaaaagaaaaaatccccaaacttctcaaagtagactctttaaatttacaaaactctagccagttggataactctgtatcagatgatagtcccatctttttttcagatccaggctttgaaagttgttactcacttgaagatagtttatctcctgaacataattataattttgatattaacacaataggtcagactggattttgtagcttttattctggaagtcagtttgtcccagctgatcagaatttgcctcagaagttcctaagtgatgctgttcaggatctttttccaggacaagctatagaaaaaaatgagtttttaagtcatgacaaccagaaatgtgatgaagacaagcatcataccacagactcagcctcatggattagatctggtactttaagtcctgaaatttttgagaagtcaaccatagatagcaatgagaatcgtcgccacaaccagtggaaaaatagctttcatcctctaacaactcggtctaactcaataatggattctttctgtgttcagcaggcagaagactgtctaagtgaaaaatctagattgaataggagttcagtaagcaaagaagtgtttcttagcctcccacagccaaacaattcagactggattcaaggtcacaccagaaaagaaatgggacagtctcttgactcagccaatacctcttttactgcaatactctcctcccctgatggtgaacttgtagacgtggcctgtgaagatttagaactgtatgtttcaagaaacaatgatatgttgacaccaactcctgatagttcaccaagatctactagctctccttcacaatctaaaaatggcagcttcacccctcgaactgctaacattctgaaaccacttatgtcccccccaagtagggaagaaattatggcaactttgttggatcatgacctgtctgagactatttaccaggaaccattttgcagtaatccttctgatgtaccagaaaagcccagggagattggtggacggctcctcatggtagaaactcgacttgcaaatgatctggctgagtttgagggagacttttccttggaaggacttcgtctttggaaaacagcattctcagcaatgactcagaatccaaggccagggtcaccccttcgcagtggccaaggagttgtcaataaagggtcaagtaatagccctaagatggttgaagataaaaaaattgtgattatgccttgcaaatgtgccccaagtcgacaactggttcaagtgtggcttcaagccaaagaagaatacgaacgttccaagaaactgcctaaaaccaagccaactggagttgtaaaatctgctgagaactttagctcttcagttaacccagatgacaaacctgtagtgcctccaaaaatggatgtaagtccatgtatactccccactacagcacataccaaggaggatgttgataattctcagattgctttacaagcaccaaccacgggatgtagtcaaactgcaagtgaaagtcagatgctgccaccagttgcctctgcaagtgatcccgaaaaagatgaagatgatgatgataactattacattagttatagctcccctgattctccagtaattcccccttggcaacaaccaatatccccagattccaaagcattaaatggagatgatagaccctcatcaccagtagaggagctgccttcattggcttttgagaacttcttaaagccaataaaagatggtatacaaaaaagcccctgcagtgagcctcaagagcctctagtgatatctccaattaatactagggcaagaactgggaaatgtgaatcactttgctttcatagtacaccaatcatacagagaaaacttctggaaaggcttcctgaagcacctggccttagcccattatcaacagaaccaaaaacacagaagttgagtaataagaaaggaagtaatactgacactcttagaagagtactgttaacacaagcaaagaatcaatttgcagcagtaaataccccacagaaagaaacttctcagattgatggaccatctttaaacaatacttacggtttcaaagtcagcatacaaaacttacaggaggcaaaagctttacatgagatacaaaatcttaccctaatcagtgtggagttgcatgctcgaactagacgagacttagaaccggatcctgaatttgacccaatctgtgctctgttctactgcatctcatctgacactccactgccagatacagaaaaaacagaactcacaggtgtaatagtgattgataaagacaagacagttttcagtcaagatatcagatatcagactccattacttattagatctggaattacaggactcgaagtcacctatgctgctgatgagaaggcactttttcatgaaattgcaaatataataaagaggtatgatcctgatattctgctaggatatgagattcagatgcattcctggggttacctcttacaaagggctgccgctttaagtattgacttatgtcggatgatctctcgggtgccagatgacaaaattgagaacagatttgcagctgaaagagatgagtatggatcatatacaatgagtgagataaatattgttggccgaattacactaaatctttggagaatcatgagaaatgaggtggctctaactaactacacctttgaaaatgtgagctttcatgttcttcatcagcgttttcccctctttacctttcgagtcttgtcagactggtttgataacaagacagatctatacagatggaaaatggttgatcattatgttagccgtgtccgtggaaatctccaaatgttagaacagctggacctgattgggaaaaccagtgagatggctagactttttggcattcagtttttacatgtactgacaaggggttcacagtaccgtgtggaatcaatgatgttgcgtattgctaaaccaatgaactatattcctgtgacacctagtgttcagcaaagatcccagatgagagccccacagtgtgttcctctaattatggagcctgaatcccgcttctatagcaactctgttctcgttttggatttccaatcactttatccttctattgtgattgcatataactactgcttttccacctgccttggccatgtggagaacttgggaaagtatgatgagttcaaatttggctgtacctctctgagagtacctccagatttactttaccaagttaggcatgatatcacagtgtcccccaatggagtagcttttgtcaagccttcagtaagaaaaggtgtactaccaagaatgcttgaagaaattttgaagactagatttatggtgaagcagtcaatgaaggcttacaagcaagacagagccctgtcacgaatgcttgatgcgcgtcagttgggacttaagctgatagcaaatgtcacatttggctatacatctgctaatttttctgggagaatgccatgcattgaggttggcgatagtattgttcacaaagccagagagaccttggaacgagctattaaactggtgaatgataccaagaaatggggggctagggttgtatatggcgatactgacagtatgtttgtgctactgaaaggagccactaaggagcagtcttttaagattggtcaggaaattgccgaagctgtaactgctaccaatcctaaaccagtgaaattgaagtttgaaaaggtatatttgccctgtgttttacaaacaaaaaagaggtatgtgggttacatgtatgaaacactggatcagaaggacccagtatttgatgcaaaaggaatagaaacagtcagaagagattcctgccctgctgtttctaagatacttgagcgttctctaaagctgctatttgaaacgagagatataagtctaattaaacagtatgttcagcgacaatgtatgaagcttctggaaggaaaggccagcatacaagactttatctttgccaaggaatacagaggaagtttttcttataaaccaggagcttgtgtgccagcccttgaacttacaaggaaaatgctgacttatgaccggcgctctgagcctcaggttggggagcgagtgccatacgtcatcatttatgggacccccggagtaccacttatccagcttgtaaggcgcccagtggaagtcctgcaggacccaactctgagactgaatgctacttactatattaccaagcaaatccttccacccttggcaagaatcttctcacttattggtattgatgtcttcagctggtatcatgaattaccaaggatccataaagctaccagctcctcgcgaagtgaacctgaagggcggaaaggcactatttcacaatattttactaccttacactgtcctgtgtgtgatgacctaactcagcatggcatctgtagtaaatgtcggagccaacctcagcatgttgcagtcatcctcaaccaagaaatccgggagttggaacgtcaacaggagcaacttgtaaagatatgcaagaactgtacaggttgctttgatcgacacatcccatgtgtttctctgaactgcccagtacttttcaaactctcccgagtaaatagagaattgtccaaggcaccatatctccggcagttattagaccagttttaaattgtcaatatcacagtattacaggtgctatttttttcagtgcttaccactaaactgttgtgcatggtgctttttaactttcatcgagtcaaggatgttcactgtctgttatctgaagactatgaagacttctatgctaaccgaattaaaatgtacttgttgatctctgaatagctcacttcttacaatgtacaaattcctcattctgtcaccttttaaacattgttttataatgcaggtgttggatttgctccagtatgtgtaccatcttgtaaattcatttgagtagatcatgtttacttcccagtggaaggagcactgaaaacctcttaaagaaaaagcatttgtgtgttttccttgaactgtctgtatcaagacgtgttacttcgagatatccattcactttataattttgactgcaaaatattttgtaaatacacttttttacttttcaaacgagcaaaataatgtgcaatgatttttatacaaatgattttcaagttgtttggtatatttcctctaggttttgcttgactcaaagtagatcgttattttgatcaaactgtgcaaacagtagtaccacgtgtagcattttgaaacattatttttttttaaaaaatgctgtcttgctttagctattaatggggcattgtgaggaactgtgcaaagacatttttgttacaaacctgtgggcctgttgcaatactttaaaaataaaaaattttattccatttgcttgttttgtatagacatttctattgcttctaaatatacttaaaatattttctttccttatgtactgtacagttaatcttatttgccatcatcttgaacacaaaatgtgtatttagaatatttgtataactgtgtaaaataaaaaaggaattatgtggtcagtgcattgttttttaaactggaaatcattttgttttaaaagttaataatggaaaccatattaaaattgaataaaatataaaataatata

SEQ ID NO: 133458 - DNA, 10917 bp, Artificial Sequence
  derived and/or modified sequence
cgagatctgcgcctcgcctccctcctcacgcgggcggattttcttaccttgtgaaaaaccgtctcagcggctgcccccgcctcctctgctggatgtgaaatggcggtcggcgagtggttgcgtccgtgacatcatcatcatggcaacaagagctgcagcctgggaccgaggagcccgtgtgattcccggcggtggcggcagtggcggcagcaccagcaccgacgaaagctcgagggcttctctcctgcggccccttgccgggtgctcctgaggaggcggcggcagcagcgcctacaccgccccgcccgccgctcctcgaggtgcctctgtgtgaggggagggggccgtgccgagaaggggagggggcgccgccgccgctgcggagggagccgccgccgctgctgctgccgctgccgggtcgccagtgaagggaggcagtggcggcggcggcgaacatgttttcagtaaggatagtgactgcagactactacatggccagcccgctgcaggggctggatacctgccaatcccccctcacccaggcccctgtcaagaaggtgccggtggtgcgagtcttcggagcgaccccggcagaataaaacccaagacaagccacataaaagcaacctaaaaattaaactgtcatcatattatttgttttaaaactatggaataatatatctgaggaagatttctctcaaaattgtttttctcaatttcaagtcagaagacatgtcttcatctacatggcatctttccttacctctatgtgccatacgatggttatggacagcagccagaaagctatctttctcagatggcattcagtatcgacagagcacttaatgtggctttaggcaatccatcttccactgctcagcatgtgttcaaagtgtcattagtatcaggaatgcctttttatggttatcatgagaaggaaagacactttatgaagatctatctttacaatcctacaatggtgaaaaggatatgtgaacttttgcaaagcggagccataatgaataaattttaccagcctcatgaagcgcatattccctacctcctacagctcttcattgactacaatctttatggcatgaatttaataaatctggctgctgtcaagttccgaaaagcaagaaggaaaagtaatacattgcatgcaactggatcctgcaagaatcatttatcaggaaattctcttgctgatactttatttcggtgggaacaagatgaaataccaagctctttaatattggaaggtgttgaaccacagagtacatgtgaattagaagtggatgctgtagctgctgatatcttaaatcgtctggacattgaagctcaaattggtggaaaccctggtctacaggccatatgggaagatgaaaagcaacggcgaagaaacagaaatgaaacttctcaaatgagccaacctgagtcacaagatcacaggtttgtgccagcaacagaaagtgaaaaaaaatttcagaagagacttcaggaaattctcaaacagaatgatttctctgtaacattatcaggatctgtggactacagcgatggatcccaggagttctctgctgagttaacattgcactctgaggttctgtctcctgaaatgcttcagtgtacaccagccaatatggtagaagttcacaaagacaaagagtcaagcaaaggtcacactagacacaaagtggaagaagctcttattaatgaagaagcaattttgaaccttatggaaaatagtcagacttttcagcctttgacccaaagactgagtgagtcacctgttttcatggacagtagtcctgatgaggctctggtacatcttcttgctggtttggaaagtgatggatatcggggggaaagaaataggatgccatcaccatgtcgctcctttggaaataataaatatccacaaaatagtgatgatgaagaaaatgaaccacagattgaaaaagaggaaatggagcttagtttggtgatgtcccagagatgggacagcaatattgaagaacattgtgccaaaaagagatcactgtgcagaaatacccacagaagttcaactgaagatgatgactcatcttcaggagaagaaatggaatggagtgataacagtttgcttctagccagtctttctatacctcagttagatggaactgcagatgaaaatagtgacaatccattgaacaatgaaaattctagaacccactcttctgtaattgcaacaagcaagctttcagttaaaccctccatctttcacaaagatgctgctacattagaaccctcatcttctgctaagattacctttcagtgtaaacacacaagtgccctttcttcccatgttttgaacaaggaagatttaattgaagacctttcacagacaaacaaaaatacagaaaaaggtctagataactcagtcacttcttttacaaacgaaagcacttattctatgaaataccctggatctttaagcagtactgttcattcagaaaattctcataaagagaatagtaagaaagagatcctcccagtatcttcctgtgaaagtagtatttttgattatgaagaagatattccatctgttacaagacaagtaccaagtagaaaatatacaaacattagaaaaatcgaaaaggattccccttttatacatatgcaccgtcaccctaacgagaatacattgggcaaaaattctttcaacttttctgacttaaatcattcaaaaaataaagtatcctctgaaggaaatgaaaaaggaaacagcacagctctgagtagtttattcccttcatcatttactgaaaattgtgaattactgtcatgctcaggggagaatagaactatggtgcattctcttaatagcactgctgatgaaagtggactaaataaacttaaaattaggtatgaagaatttcaagaacataaaacagaaaagccaagcctcagccagcaagcagcacactatatgttttttcccagtgttgttctttctaactgtcttactagaccacagaaactatctcctgtcacatataaattacaacctggcaataaaccatcccggttaaaattgaataaaaggaaacttgcaggtcatcaggagacttctaccaaaagtagtgagactggatccacaaaagataattttatacaaaataatccttgtaatagtaatcctgagaaggataatgcattggctagtgatttaactaaaaccactcgtggagcttttgaaaataaaacacccacagatggttttatagactgtcactttggagatggaacgttagaaactgagcagtcctttggactatatggaaataaatacacacttagagccaaacgcaaggtaaattatgagactgaagacagtgagtcaagttttgtaactcacaactcaaaaattagtctacctcatcccatggaaattggtgaaagtttagatggaactctcaaatcccgaaaacgaagaaaaatgtctaaaaagctgccccctgtcatcataaagtatattattattaatagatttagagggagaaaaaatatgcttgtgaagctaggaaaaatagactctaaagaaaaacaagtaatattaacagaagaaaaaatggaactatataaaaagcttgcacctttgaaggacttttggccaaaagttcccgactcccctgcaaccaaatatcccatttatccactaacaccaaagaaaagtcacagaagaaagtcaaaacataaatctgctaagaaaaaaactggtaaacaacaaaggacaaataatgaaaatattaaaagaactttgtctttcaggaaaaaacggtcacatgctattctttctcctccctcaccatcttacaatgctgaaaccgaagattgtgacctgaattatagtgatgttatgtctaaactaggttttctttctgagagaagcacaagtcccataaattcttctccacctcgctgctggtctcccacagatccaagagctgaagaaatcatggctgctgcagaaaaagaggcaatgctttttaagggtcctaatgtatataagaagactgttaattctcgtataggaaaaactagtcgcgcaagagcacagattaagaaatcaaaagcaaagcttgctaatccctctatagttactaagaaaaggaacaaacgaaatcagacaaataaactagtagatgatggaaaaaagaaaccaagagcaaaacaaaaaacaaatgagaaaggtacatcgagaaagcatacaacacttaaggatgaaaaaataaaatctcagtctggtgctgaggttaagtttgtactgaaacaccagaatgtgtctgaatttgcaagtagttctggaggctctcaactactttttaaacagaaagatatgccactaatgggctctgctgtagatcatcccctttctgcttccctacccactggaattaatgcacaacagaagttatctggctgcttttcttctttcttagaaagcaagaagtctgtagatttgcagacattccccagttcacgagatgatttgcatccatcagttgtttgtaattctataggacctggagtctcaaaaattaatgttcaaaggcctcataatcaaagtgctatgtttactctaaaggaatcaacgttaattcaaaaaaatatatttgacctttccaatcatttatctcaggtagcacagaatacacagatatcttctggtatgtcctcaaagatagaagataatgcaaataatatacaaagaaactatttgtcatcaatcggaaagttaagtgaatatcgcaattccctagaatcaaagctggaccaagcatatacccctaattttttgcattgcaaagacagtcagcagcagattgtgtgcatagcggaacagtcaaagcacagtgaaacttgttctccgggaaatacagcttcagaggaaagccaaatgcctaataattgctttgtaacttccttgagaagtccaatcaaacaaatagcatgggagcaaaagcaaaggggctttattttagatatgtcaaattttaaacctgaaagagtaaaaccgaggtcgttatcagaagcaatttcacaaaccaaagcactttctcagtgtaaaaatcgaaatgtgtcaacaccttcagcatttggtgaaggacagtctggactggcagttctaaaagaattgttacaaaaaagacagcagaaagcacaaaatgcaaatactacacaagacccattatccaataaacatcaaccaaataaaaatatttctggttcccttgagcataacaaagcaaataaacggacacgatcggtaacgtccccaagaaaacctcgaactcccagaagtacaaaacaaaaagaaaaaatccccaaacttctcaaagtagactctttaaatttacaaaactctagccagttggataactctgtatcagatgatagtcccatctttttttcagatccaggctttgaaagttgttactcacttgaagatagtttatctcctgaacataattataattttgatattaacacaataggtcagactggattttgtagcttttattctggaagtcagtttgtcccagctgatcagaatttgcctcagaagttcctaagtgatgctgttcaggatctttttccaggacaagctatagaaaaaaatgagtttttaagtcatgacaaccagaaatgtgatgaagacaagcatcataccacagactcagcctcatggattagatctggtactttaagtcctgaaatttttgagaagtcaaccatagatagcaatgagaatcgtcgccacaaccagtggaaaaatagctttcatcctctaacaactcggtctaactcaataatggattctttctgtgttcagcaggcagaagactgtctaagtgaaaaatctagattgaataggagttcagtaagcaaagaagtgtttcttagcctcccacagccaaacaattcagactggattcaaggtcacaccagaaaagaaatgggacagtctcttgactcagccaatacctcttttactgcaatactctcctcccctgatggtgaacttgtagacgtggcctgtgaagatttagaactgtatgtttcaagaaacaatgatatgttgacaccaactcctgatagttcaccaagatctactagctctccttcacaatctaaaaatggcagcttcacccctcgaactgctaacattctgaaaccacttatgtcccccccaagtagggaagaaattatggcaactttgttggatcatgacctgtctgagactatttaccaggaaccattttgcagtaatccttctgatgtaccagaaaagcccagggagattggtggacggctcctcatggtagaaactcgacttgcaaatgatctggctgagtttgagggagacttttccttggaaggacttcgtctttggaaaacagcattctcagcaatgactcagaatccaaggccagggtcaccccttcgcagtggccaaggagttgtcaataaagggtcaagtaatagccctaagatggttgaagataaaaaaattgtgattatgccttgcaaatgtgccccaagtcgacaactggttcaagtgtggcttcaagccaaagaagaatacgaacgttccaagaaactgcctaaaaccaagccaactggagttgtaaaatctgctgagaactttagctcttcagttaacccagatgacaaacctgtagtgcctccaaaaatggatgtaagtccatgtatactccccactacagcacataccaaggaggatgttgataattctcagattgctttacaagcaccaaccacgggatgtagtcaaactgcaagtgaaagtcagatgctgccaccagttgcctctgcaagtgatcccgaaaaagatgaagatgatgatgataactattacattagttatagctcccctgattctccagtaattcccccttggcaacaaccaatatccccagattccaaagcattaaatggagatgatagaccctcatcaccagtagaggagctgccttcattggcttttgagaacttcttaaagccaataaaagatggtatacaaaaaagcccctgcagtgagcctcaagagcctctagtgatatctccaattaatactagggcaagaactgggaaatgtgaatcactttgctttcatagtacaccaatcatacagagaaaacttctggaaaggcttcctgaagcacctggccttagcccattatcaacagaaccaaaaacacagaagttgagtaataagaaaggaagtaatactgacactcttagaagagtactgttaacacaagcaaagaatcaatttgcagcagtaaataccccacagaaagaaacttctcagattgatggaccatctttaaacaatacttacggtttcaaagtcagcatacaaaacttacaggaggcaaaagctttacatgagatacaaaatcttaccctaatcagtgtggagttgcatgctcgaactagacgagacttagaaccggatcctgaatttgacccaatctgtgctctgttctactgcatctcatctgacactccactgccagatacagaaaaaacagaactcacaggtgtaatagtgattgataaagacaagacagttttcagtcaagatatcagatatcagactccattacttattagatctggaattacaggactcgaagtcacctatgctgctgatgagaaggcactttttcatgaaattgcaaatataataaagaggtatgatcctgatattctgctaggatatgagattcagatgcattcctggggttacctcttacaaagggctgccgctttaagtattgacttatgtcggatgatctctcgggtgccagatgacaaaattgagaacagatttgcagctgaaagagatgagtatggatcatatacaatgagtgagataaatattgttggccgaattacactaaatctttggagaatcatgagaaatgaggtggctctaactaactacacctttgaaaatgtgagctttcatgttcttcatcagcgttttcccctctttacctttcgagtcttgtcagactggtttgataacaagacagatctatacagatggaaaatggttgatcattatgttagccgtgtccgtggaaatctccaaatgttagaacagctggacctgattgggaaaaccagtgagatggctagactttttggcattcagtttttacatgtactgacaaggggttcacagtaccgtgtggaatcaatgatgttgcgtattgctaaaccaatgaactatattcctgtgacacctagtgttcagcaaagatcccagatgagagccccacagtgtgttcctctaattatggagcctgaatcccgcttctatagcaactctgttctcgttttggatttccaatcactttatccttctattgtgattgcatataactactgcttttccacctgccttggccatgtggagaacttgggaaagtatgatgagttcaaatttggctgtacctctctgagagtacctccagatttactttaccaagttaggcatgatatcacagtgtcccccaatggagtagcttttgtcaagccttcagtaagaaaaggtgtactaccaagaatgcttgaagaaattttgaagactagatttatggtgaagcagtcaatgaaggcttacaagcaagacagagccctgtcacgaatgcttgatgcgcgtcagttgggacttaagctgatagcaaatgtcacatttggctatacatctgctaatttttctgggagaatgccatgcattgaggttggcgatagtattgttcacaaagccagagagaccttggaacgagctattaaactggtgaatgataccaagaaatggggggctagggttgtatatggcgatactgacagtatgtttgtgctactgaaaggagccactaaggagcagtcttttaagattggtcaggaaattgccgaagctgtaactgctaccaatcctaaaccagtgaaattgaagtttgaaaaggtatatttgccctgtgttttacaaacaaaaaagaggtatgtgggttacatgtatgaaacactggatcagaaggacccagtatttgatgcaaaaggaatagaaacagtcagaagagattcctgccctgctgtttctaagatacttgagcgttctctaaagctgctatttgaaacgagagatataagtctaattaaacagtatgttcagcgacaatgtatgaagcttctggaaggaaaggccagcatacaagactttatctttgccaaggaatacagaggaagtttttcttataaaccaggagcttgtgtgccagcccttgaacttacaaggaaaatgctgacttatgaccggcgctctgagcctcaggttggggagcgagtgccatacgtcatcatttatgggacccccggagtaccacttatccagcttgtaaggcgcccagtggaagtcctgcaggacccaactctgagactgaatgctacttactatattaccaagcaaatccttccacccttggcaagaatcttctcacttattggtattgatgtcttcagctggtatcatgaattaccaaggatccataaagctaccagctcctcgcgaagtgaacctgaagggcggaaaggcactatttcacaatattttactaccttacactgtcctgtgtgtgatgacctaactcagcatggcatctgtagtaaatgtcggagccaacctcagcatgttgcagtcatcctcaaccaagaaatccgggagttggaacgtcaacaggagcaacttgtaaagatatgcaagaactgtacaggttgctttgatcgacacatcccatgtgtttctctgaactgcccagtacttttcaaactctcccgagtaaatagagaattgtccaaggcaccatatctccggcagttattagaccagttttaaattgtcaatatcacagtattacaggtgctatttttttcagtgcttaccactaaactgttgtgcatggtgctttttaactttcatcgagtcaaggatgttcactgtctgttatctgaagactatgaagacttctatgctaaccgaattaaaatgtacttgttgatctctgaatagctcacttcttacaatgtacaaattcctcattctgtcaccttttaaacattgttttataatgcaggtgttggatttgctccagtatgtgtaccatcttgtaaattcatttgagtagatcatgtttacttcccagtggaaggagcactgaaaacctcttaaagaaaaagcatttgtgtgttttccttgaactgtctgtatcaagacgtgttacttcgagatatccattcactttataattttgactgcaaaatattttgtaaatacacttttttacttttcaaacgagcaaaataatgtgcaatgatttttatacaaatgattttcaagttgtttggtatatttcctctaggttttgcttgactcaaagtagatcgttattttgatcaaactgtgcaaacagtagtaccacgtgtagcattttgaaacattatttttttttaaaaaatgctgtcttgctttagctattaatggggcattgtgaggaactgtgcaaagacatttttgttacaaacctgtgggcctgttgcaatactttaaaaataaaaaattttattccatttgcttgttttgtatagacatttctattgcttctaaatatacttaaaatattttctttccttatgtactgtacagttaatcttatttgccatcatcttgaacacaaaatgtgtatttagaatatttgtataactgtgtaaaataaaaaaggaattatgtggtcagtgcattgttttttaaactggaaatcattttgttttaaaagttaa

SEQ ID NO: 133459 - DNA, 9393 bp, Artificial Sequence
  derived and/or modified sequence
atgttcagcgtgagaatcgtgaccgccgactactacatggccagccccctgcagggcctggacacctgccagagccccctgacccaggcccccgtgaagaaggtgcccgtggtgagagtgttcggcgccacccccgccggccagaagacctgcctgcacctgcacggcatcttcccctacctgtacgtgccctacgacggctacggccagcagcccgagagctacctgagccagatggccttcagcatcgacagagccctgaacgtggccctgggcaaccccagcagcaccgcccagcacgtgttcaaggtgagcctggtgagcggcatgcccttctacggctaccacgagaaggagagacacttcatgaagatctacctgtacaaccccaccatggtgaagagaatctgcgagctgctgcagagcggcgccatcatgaacaagttctaccagccccacgaggcccacatcccctacctgctgcagctgttcatcgactacaacctgtacggcatgaacctgatcaacctggccgccgtgaagttcagaaaggccagaagaaagagcaacaccctgcacgccaccggcagctgcaagaaccacctgagcggcaacagcctggccgacaccctgttcagatgggagcaggacgagatccccagcagcctgatcctggagggcgtggagccccagagcacctgcgagctggaggtggacgccgtggccgccgacatcctgaacagactggacatcgaggcccagatcggcggcaaccccggcctgcaggccatctgggaggacgagaagcagagaagaagaaacagaaacgagaccagccagatgagccagcccgagagccaggaccacagattcgtgcccgccaccgagagcgagaagaagttccagaagagactgcaggagatcctgaagcagaacgacttcagcgtgaccctgagcggcagcgtggactacagcgacggcagccaggagttcagcgccgagctgaccctgcacagcgaggtgctgagccccgagatgctgcagtgcacccccgccaacatggtggaggtgcacaaggacaaggagagcagcaagggccacaccagacacaaggtggaggaggccctgatcaacgaggaggccatcctgaacctgatggagaacagccagaccttccagcccctgacccagagactgagcgagagccccgtgttcatggacagcagccccgacgaggccctggtgcacctgctggccggcctggagagcgacggctacagaggcgagagaaacagaatgcccagcccctgcagaagcttcggcaacaacaagtacccccagaacagcgacgacgaggagaacgagccccagatcgagaaggaggagatggagctgagcctggtgatgagccagagatgggacagcaacatcgaggagcactgcgccaagaagagaagcctgtgcagaaacacccacagaagcagcaccgaggacgacgacagcagcagcggcgaggagatggagtggagcgacaacagcctgctgctggccagcctgagcatcccccagctggacggcaccgccgacgagaacagcgacaaccccctgaacaacgagaacagcagaacccacagcagcgtgatcgccaccagcaagctgagcgtgaagcccagcatcttccacaaggacgccgccaccctggagcccagcagcagcgccaagatcaccttccagtgcaagcacaccagcgccctgagcagccacgtgctgaacaaggaggacctgatcgaggacctgagccagaccaacaagaacaccgagaagggcctggacaacagcgtgaccagcttcaccaacgagagcacctacagcatgaagtaccccggcagcctgagcagcaccgtgcacagcgagaacagccacaaggagaacagcaagaaggagatcctgcccgtgagcagctgcgagagcagcatcttcgactacgaggaggacatccccagcgtgaccagacaggtgcccagcagaaagtacaccaacatcagaaagatcgagaaggacagccccttcatccacatgcacagacaccccaacgagaacaccctgggcaagaacagcttcaacttcagcgacctgaaccacagcaagaacaaggtgagcagcgagggcaacgagaagggcaacagcaccgccctgagcagcctgttccccagcagcttcaccgagaactgcgagctgctgagctgcagcggcgagaacagaaccatggtgcacagcctgaacagcaccgccgacgagagcggcctgaacaagctgaagatcagatacgaggagttccaggagcacaagaccgagaagcccagcctgagccagcaggccgcccactacatgttcttccccagcgtggtgctgagcaactgcctgaccagaccccagaagctgagccccgtgacctacaagctgcagcccggcaacaagcccagcagactgaagctgaacaagagaaagctggccggccaccaggagaccagcaccaagagcagcgagaccggcagcaccaaggacaacttcatccagaacaacccctgcaacagcaaccccgagaaggacaacgccctggccagcgacctgaccaagaccaccagaggcgccttcgagaacaagacccccaccgacggcttcatcgactgccacttcggcgacggcaccctggagaccgagcagagcttcggcctgtacggcaacaagtacaccctgagagccaagagaaaggtgaactacgagaccgaggacagcgagagcagcttcgtgacccacaacagcaagatcagcctgccccaccccatggagatcggcgagagcctggacggcaccctgaagagcagaaagagaagaaagatgagcaagaagctgccccccgtgatcatcaagtacatcatcatcaacagattcagaggcagaaagaacatgctggtgaagctgggcaagatcgacagcaaggagaagcaggtgatcctgaccgaggagaagatggagctgtacaagaagctggcccccctgaaggacttctggcccaaggtgcccgacagccccgccaccaagtaccccatctaccccctgacccccaagaagagccacagaagaaagagcaagcacaagagcgccaagaagaagaccggcaagcagcagagaaccaacaacgagaacatcaagagaaccctgagcttcagaaagaagagaagccacgccatcctgagcccccccagccccagctacaacgccgagaccgaggactgcgacctgaactacagcgacgtgatgagcaagctgggcttcctgagcgagagaagcaccagccccatcaacagcagcccccccagatgctggagccccaccgaccccagagccgaggagatcatggccgccgccgagaaggaggccatgctgttcaagggccccaacgtgtacaagaagaccgtgaacagcagaatcggcaagaccagcagagccagagcccagatcaagaagagcaaggccaagctggccaaccccagcatcgtgaccaagaagagaaacaagagaaaccagaccaacaagctggtggacgacggcaagaagaagcccagagccaagcagaagaccaacgagaagggcaccagcagaaagcacaccaccctgaaggacgagaagatcaagagccagagcggcgccgaggtgaagttcgtgctgaagcaccagaacgtgagcgagttcgccagcagcagcggcggcagccagctgctgttcaagcagaaggacatgcccctgatgggcagcgccgtggaccaccccctgagcgccagcctgcccaccggcatcaacgcccagcagaagctgagcggctgcttcagcagcttcctggagagcaagaagagcgtggacctgcagaccttccccagcagcagagacgacctgcaccccagcgtggtgtgcaacagcatcggccccggcgtgagcaagatcaacgtgcagagaccccacaaccagagcgccatgttcaccctgaaggagagcaccctgatccagaagaacatcttcgacctgagcaaccacctgagccaggtggcccagaacacccagatcagcagcggcatgagcagcaagatcgaggacaacgccaacaacatccagagaaactacctgagcagcatcggcaagctgagcgagtacagaaacagcctggagagcaagctggaccaggcctacacccccaacttcctgcactgcaaggacagccagcagcagatcgtgtgcatcgccgagcagagcaagcacagcgagacctgcagccccggcaacaccgccagcgaggagagccagatgcccaacaactgcttcgtgaccagcctgagaagccccatcaagcagatcgcctgggagcagaagcagagaggcttcatcctggacatgagcaacttcaagcccgagagagtgaagcccagaagcctgagcgaggccatcagccagaccaaggccctgagccagtgcaagaacagaaacgtgagcacccccagcgccttcggcgagggccagagcggcctggccgtgctgaaggagctgctgcagaagagacagcagaaggcccagaacgccaacaccacccaggaccccctgagcaacaagcaccagcccaacaagaacatcagcggcagcctggagcacaacaaggccaacaagagaaccagaagcgtgaccagccccagaaagcccagaacccccagaagcaccaagcagaaggagaagatccccaagctgctgaaggtggacagcctgaacctgcagaacagcagccagctggacaacagcgtgagcgacgacagccccatcttcttcagcgaccccggcttcgagagctgctacagcctggaggacagcctgagccccgagcacaactacaacttcgacatcaacaccatcggccagaccggcttctgcagcttctacagcggcagccagttcgtgcccgccgaccagaacctgccccagaagttcctgagcgacgccgtgcaggacctgttccccggccaggccatcgagaagaacgagttcctgagccacgacaaccagaagtgcgacgaggacaagcaccacaccaccgacagcgccagctggatcagaagcggcaccctgagccccgagatcttcgagaagagcaccatcgacagcaacgagaacagaagacacaaccagtggaagaacagcttccaccccctgaccaccagaagcaacagcatcatggacagcttctgcgtgcagcaggccgaggactgcctgagcgagaagagcagactgaacagaagcagcgtgagcaaggaggtgttcctgagcctgccccagcccaacaacagcgactggatccagggccacaccagaaaggagatgggccagagcctggacagcgccaacaccagcttcaccgccatcctgagcagccccgacggcgagctggtggacgtggcctgcgaggacctggagctgtacgtgagcagaaacaacgacatgctgacccccacccccgacagcagccccagaagcaccagcagccccagccagagcaagaacggcagcttcacccccagaaccgccaacatcctgaagcccctgatgagcccccccagcagagaggagatcatggccaccctgctggaccacgacctgagcgagaccatctaccaggagcccttctgcagcaaccccagcgacgtgcccgagaagcccagagagatcggcggcagactgctgatggtggagaccagactggccaacgacctggccgagttcgagggcgacttcagcctggagggcctgagactgtggaagaccgccttcagcgccatgacccagaaccccagacccggcagccccctgagaagcggccagggcgtggtgaacaagggcagcagcaacagccccaagatggtggaggacaagaagatcgtgatcatgccctgcaagtgcgcccccagcagacagctggtgcaggtgtggctgcaggccaaggaggagtacgagagaagcaagaagctgcccaagaccaagcccaccggcgtggtgaagagcgccgagaacttcagcagcagcgtgaaccccgacgacaagcccgtggtgccccccaagatggacgtgagcccctgcatcctgcccaccaccgcccacaccaaggaggacgtggacaacagccagatcgccctgcaggcccccaccaccggctgcagccagaccgccagcgagagccagatgctgccccccgtggccagcgccagcgaccccgagaaggacgaggacgacgacgacaactactacatcagctacagcagccccgacagccccgtgatccccccctggcagcagcccatcagccccgacagcaaggccctgaacggcgacgacagacccagcagccccgtggaggagctgcccagcctggccttcgagaacttcctgaagcccatcaaggacggcatccagaagagcccctgcagcgagccccaggagcccctggtgatcagccccatcaacaccagagccagaaccggcaagtgcgagagcctgtgcttccacagcacccccatcatccagagaaagctgctggagagactgcccgaggcccccggcctgagccccctgagcaccgagcccaagacccagaagctgagcaacaagaagggcagcaacaccgacaccctgagaagagtgctgctgacccaggccaagaaccagttcgccgccgtgaacaccccccagaaggagaccagccagatcgacggccccagcctgaacaacacctacggcttcaaggtgagcatccagaacctgcaggaggccaaggccctgcacgagatccagaacctgaccctgatcagcgtggagctgcacgccagaaccagaagagacctggagcccgaccccgagttcgaccccatctgcgccctgttctactgcatcagcagcgacacccccctgcccgacaccgagaagaccgagctgaccggcgtgatcgtgatcgacaaggacaagaccgtgttcagccaggacatcagataccagacccccctgctgatcagaagcggcatcaccggcctggaggtgacctacgccgccgacgagaaggccctgttccacgagatcgccaacatcatcaagagatacgaccccgacatcctgctgggctacgagatccagatgcacagctggggctacctgctgcagagagccgccgccctgagcatcgacctgtgcagaatgatcagcagagtgcccgacgacaagatcgagaacagattcgccgccgagagagacgagtacggcagctacaccatgagcgagatcaacatcgtgggcagaatcaccctgaacctgtggagaatcatgagaaacgaggtggccctgaccaactacaccttcgagaacgtgagcttccacgtgctgcaccagagattccccctgttcaccttcagagtgctgagcgactggttcgacaacaagaccgacctgtacagatggaagatggtggaccactacgtgagcagagtgagaggcaacctgcagatgctggagcagctggacctgatcggcaagaccagcgagatggccagactgttcggcatccagttcctgcacgtgctgaccagaggcagccagtacagagtggagagcatgatgctgagaatcgccaagcccatgaactacatccccgtgacccccagcgtgcagcagagaagccagatgagagccccccagtgcgtgcccctgatcatggagcccgagagcagattctacagcaacagcgtgctggtgctggacttccagagcctgtaccccagcatcgtgatcgcctacaactactgcttcagcacctgcctgggccacgtggagaacctgggcaagtacgacgagttcaagttcggctgcaccagcctgagagtgccccccgacctgctgtaccaggtgagacacgacatcaccgtgagccccaacggcgtggccttcgtgaagcccagcgtgagaaagggcgtgctgcccagaatgctggaggagatcctgaagaccagattcatggtgaagcagagcatgaaggcctacaagcaggacagagccctgagcagaatgctggacgccagacagctgggcctgaagctgatcgccaacgtgaccttcggctacaccagcgccaacttcagcggcagaatgccctgcatcgaggtgggcgacagcatcgtgcacaaggccagagagaccctggagagagccatcaagctggtgaacgacaccaagaagtggggcgccagagtggtgtacggcgacaccgacagcatgttcgtgctgctgaagggcgccaccaaggagcagagcttcaagatcggccaggagatcgccgaggccgtgaccgccaccaaccccaagcccgtgaagctgaagttcgagaaggtgtacctgccctgcgtgctgcagaccaagaagagatacgtgggctacatgtacgagaccctggaccagaaggaccccgtgttcgacgccaagggcatcgagaccgtgagaagagacagctgccccgccgtgagcaagatcctggagagaagcctgaagctgctgttcgagaccagagacatcagcctgatcaagcagtacgtgcagagacagtgcatgaagctgctggagggcaaggccagcatccaggacttcatcttcgccaaggagtacagaggcagcttcagctacaagcccggcgcctgcgtgcccgccctggagctgaccagaaagatgctgacctacgacagaagaagcgagccccaggtgggcgagagagtgccctacgtgatcatctacggcacccccggcgtgcccctgatccagctggtgagaagacccgtggaggtgctgcaggaccccaccctgagactgaacgccacctactacatcaccaagcagatcctgccccccctggccagaatcttcagcctgatcggcatcgacgtgttcagctggtaccacgagctgcccagaatccacaaggccaccagcagcagcagaagcgagcccgagggcagaaagggcaccatcagccagtacttcaccaccctgcactgccccgtgtgcgacgacctgacccagcacggcatctgcagcaagtgcagaagccagccccagcacgtggccgtgatcctgaaccaggagatcagagagctggagagacagcaggagcagctggtgaagatctgcaagaactgcaccggctgcttcgacagacacatcccctgcgtgagcctgaactgccccgtgctgttcaagctgagcagagtgaacagagagctgagcaaggccccctacctgagacagctgctggaccagttctag

SEQ ID NO: 133460 - protein, 1147 aa, Artificial Sequence
  derived and/or modified sequence
MDIRKFFGVIPSGKKLVSETVKKNEKTKSDEETLKAKKGIKEIKVNSSRKEDDFKQKQPSKKKRIIYDSDSESEETLQVKNAKKPPEKLPVSSKPGKISRQDPVTYISETDEEDDFMCKKAASKSKENGRSTNSHLGTSNMKKNEENTKTKNKPLSPIKLTPTSVLDYFGTGSVQRSNKKMVASKRKELSQNTDESGLNDEAIAKQLQLDEDAELERQLHEDEEFARTLAMLDEEPKTKKARKDTEAGETFSSVQANLSKAEKHKYPHKVKTAQVSDERKSYSPRKQSKYESSKESQQHSKSSADKIGEVSSPKASSKLAIMKRKEESSYKEIEPVASKRKENAIKLKGETKTPKKTKSSPAKKESVSPEDSEKKRTNYQAYRSYLNREGPKALGSKEIPKGAENCLEGLIFVITGVLESIERDEAKSLIERYGGKVTGNVSKKTNYLVMGRDSGQSKSDKAAALGTKIIDEDGLLNLIRTMPGKKSKYEIAVETEMKKESKLERTPQKNVQGKRKISPSKKESESKKSRPTSKRDSLAKTIKKETDVFWKSLDFKEQVAEETSGDSKARNLADDSSENKVENLLWVDKYKPTSLKTIIGQQGDQSCANKLLRWLRNWQKSSSEDKKHAKFGKFSGKDDGSSFKAALLSGPPGVGKTTTASLVCQELGYSYVELNASDTRSKSSLKAIVAESLNNTSIKGFYSNGAASSVSTKHALIMDEVDGMAGNEDRGGIQELIGLIKHTKIPIICMCNDRNHPKIRSLVHYCFDLRFQRPRVEQIKGAMMSIAFKEGLKIPPPAMNEIILGANQDIRQVLHNLSMWCARSKALTYDQAKADSHRAKKDIKMGPFDVARKVFAAGEETAHMSLVDKSDLFFHDYSIAPLFVQENYIHVKPVAAGGDMKKHLMLLSRAADSICDGDLVDSQIRSKQNWSLLPAQAIYASVLPGELMRGYMTQFPTFPSWLGKHSSTGKHDRIVQDLALHMSLRTYSSKRTVNMDYLSLLRDALVQPLTSQGVDGVQDVVALMDTYYLMKEDFENIMEISSWGGKPSPFSKLDPKVKAAFTRAYNKEAHLTPYSLQAIKASRHSTSPSLDSEYNEELNEDDSQSDEKDQDAIETDAMIKKKTKSSKPSKPEKDKEPRKGKGKSSKK

SEQ ID NO: 133461 - DNA, 3444 bp, Artificial Sequence
  derived and/or modified sequence
atggacatcagaaagttcttcggcgtgatccccagcggcaagaagctggtgagcgagaccgtgaagaagaacgagaagaccaagagcgacgaggagaccctgaaggccaagaagggcatcaaggagatcaaggtgaacagcagcagaaaggaggacgacttcaagcagaagcagcccagcaagaagaagagaatcatctacgacagcgacagcgagagcgaggagaccctgcaggtgaagaacgccaagaagccccccgagaagctgcccgtgagcagcaagcccggcaagatcagcagacaggaccccgtgacctacatcagcgagaccgacgaggaggacgacttcatgtgcaagaaggccgccagcaagagcaaggagaacggcagaagcaccaacagccacctgggcaccagcaacatgaagaagaacgaggagaacaccaagaccaagaacaagcccctgagccccatcaagctgacccccaccagcgtgctggactacttcggcaccggcagcgtgcagagaagcaacaagaagatggtggccagcaagagaaaggagctgagccagaacaccgacgagagcggcctgaacgacgaggccatcgccaagcagctgcagctggacgaggacgccgagctggagagacagctgcacgaggacgaggagttcgccagaaccctggccatgctggacgaggagcccaagaccaagaaggccagaaaggacaccgaggccggcgagaccttcagcagcgtgcaggccaacctgagcaaggccgagaagcacaagtacccccacaaggtgaagaccgcccaggtgagcgacgagagaaagagctacagccccagaaagcagagcaagtacgagagcagcaaggagagccagcagcacagcaagagcagcgccgacaagatcggcgaggtgagcagccccaaggccagcagcaagctggccatcatgaagagaaaggaggagagcagctacaaggagatcgagcccgtggccagcaagagaaaggagaacgccatcaagctgaagggcgagaccaagacccccaagaagaccaagagcagccccgccaagaaggagagcgtgagccccgaggacagcgagaagaagagaaccaactaccaggcctacagaagctacctgaacagagagggccccaaggccctgggcagcaaggagatccccaagggcgccgagaactgcctggagggcctgatcttcgtgatcaccggcgtgctggagagcatcgagagagacgaggccaagagcctgatcgagagatacggcggcaaggtgaccggcaacgtgagcaagaagaccaactacctggtgatgggcagagacagcggccagagcaagagcgacaaggccgccgccctgggcaccaagatcatcgacgaggacggcctgctgaacctgatcagaaccatgcccggcaagaagagcaagtacgagatcgccgtggagaccgagatgaagaaggagagcaagctggagagaaccccccagaagaacgtgcagggcaagagaaagatcagccccagcaagaaggagagcgagagcaagaagagcagacccaccagcaagagagacagcctggccaagaccatcaagaaggagaccgacgtgttctggaagagcctggacttcaaggagcaggtggccgaggagaccagcggcgacagcaaggccagaaacctggccgacgacagcagcgagaacaaggtggagaacctgctgtgggtggacaagtacaagcccaccagcctgaagaccatcatcggccagcagggcgaccagagctgcgccaacaagctgctgagatggctgagaaactggcagaagagcagcagcgaggacaagaagcacgccaagttcggcaagttcagcggcaaggacgacggcagcagcttcaaggccgccctgctgagcggcccccccggcgtgggcaagaccaccaccgccagcctggtgtgccaggagctgggctacagctacgtggagctgaacgccagcgacaccagaagcaagagcagcctgaaggccatcgtggccgagagcctgaacaacaccagcatcaagggcttctacagcaacggcgccgccagcagcgtgagcaccaagcacgccctgatcatggacgaggtggacggcatggccggcaacgaggacagaggcggcatccaggagctgatcggcctgatcaagcacaccaagatccccatcatctgcatgtgcaacgacagaaaccaccccaagatcagaagcctggtgcactactgcttcgacctgagattccagagacccagagtggagcagatcaagggcgccatgatgagcatcgccttcaaggagggcctgaagatccccccccccgccatgaacgagatcatcctgggcgccaaccaggacatcagacaggtgctgcacaacctgagcatgtggtgcgccagaagcaaggccctgacctacgaccaggccaaggccgacagccacagagccaagaaggacatcaagatgggccccttcgacgtggccagaaaggtgttcgccgccggcgaggagaccgcccacatgagcctggtggacaagagcgacctgttcttccacgactacagcatcgcccccctgttcgtgcaggagaactacatccacgtgaagcccgtggccgccggcggcgacatgaagaagcacctgatgctgctgagcagagccgccgacagcatctgcgacggcgacctggtggacagccagatcagaagcaagcagaactggagcctgctgcccgcccaggccatctacgccagcgtgctgcccggcgagctgatgagaggctacatgacccagttccccaccttccccagctggctgggcaagcacagcagcaccggcaagcacgacagaatcgtgcaggacctggccctgcacatgagcctgagaacctacagcagcaagagaaccgtgaacatggactacctgagcctgctgagagacgccctggtgcagcccctgaccagccagggcgtggacggcgtgcaggacgtggtggccctgatggacacctactacctgatgaaggaggacttcgagaacatcatggagatcagcagctggggcggcaagcccagccccttcagcaagctggaccccaaggtgaaggccgccttcaccagagcctacaacaaggaggcccacctgaccccctacagcctgcaggccatcaaggccagcagacacagcaccagccccagcctggacagcgagtacaacgaggagctgaacgaggacgacagccagagcgacgagaaggaccaggacgccatcgagaccgacgccatgatcaagaagaagaccaagagcagcaagcccagcaagcccgagaaggacaaggagcccagaaagggcaagggcaagagcagcaagaagtag

SEQ ID NO: 133462 - DNA, 3444 bp, Artificial Sequence
  derived and/or modified sequence
atggatatcaggaagtttttcggcgtgattccgagtggcaagaagctcgtcagcgaaaccgtaaagaagaacgaaaaaacaaagtctgatgaggagactctaaaagccaagaagggcatcaaagagattaaggtgaacagctcccgaaaagaagacgacttcaagcaaaaacagcctagcaagaagaaacgaataatttacgactcagatagcgaatccgaggaaaccttacaggtgaaaaacgcaaagaagcccccggaaaaactgcccgtgtcttccaagccaggaaaaatatcccggcaggaccccgtcacctatatctctgagactgacgaggaggacgacttcatgtgtaaaaaggcagcctctaagtctaaggagaatgggaggtccaccaactcccaccttggcacttcaaacatgaaaaagaacgaggaaaacactaagaccaagaataagcctctgagtcctattaagctgaccccaacatcggtgctcgattacttcggaaccgggagtgtgcaacgtagcaacaagaagatggtcgcatcgaagaggaaagagcttagtcagaacaccgatgaaagtggtttgaacgatgaggccatagcaaagcaactacagctcgatgaagacgctgaactcgaaaggcaacttcacgaagatgaggagtttgccagaactttggccatgctggatgaggagcctaaaactaagaaggcccggaaggacaccgaagccggagagaccttcagctccgtacaggctaatctgagcaaggctgagaagcacaaatatccccataaagtgaagaccgctcaggtctccgatgaaaggaaatcttactcccccagaaaacagagtaaatatgaatcctcaaaagagtcccaacagcattccaagtcttctgccgacaagatcggtgaagtgagcagcccaaaggccagtagcaaactcgcaatcatgaaaagaaaggaagaaagcagttataaggagatcgagcctgtggcttctaagaggaaagagaatgcgattaaactcaaaggggaaacaaagactccgaaaaagaccaaatccagccctgctaagaaagagagcgtgtctcctgaagattccgaaaagaagaggaccaactatcaagcgtaccgttcttatctgaatagagagggacccaaggctctcggctccaaagagatccccaaaggggctgaaaactgtcttgaaggcctcatttttgtgattaccggggttctggagtccatcgaacgagacgaagcaaagtctctaatagaacggtacgggggcaaggtgactggcaacgtgagcaagaaaaccaattacctggtgatgggtcgtgacagcggacaatccaagagtgacaaggccgccgctctcgggacaaaaataatcgatgaggacgggcttctcaacctgattcgcactatgcccggtaagaagagcaagtacgagatcgccgttgagaccgagatgaagaaagaaagcaagctcgagcgaaccccccaaaaaaatgtgcagggcaagcgcaaaatctctcccagtaaaaaagagagcgagagtaagaaaagcaggcccacgtctaagagggacagcctggcaaagactatcaagaaggagacagacgttttctggaaaagtctggattttaaggaacaggtcgcagaagagacctccggggactcaaaggctagaaacctggccgacgatagctctgagaataaggtggaaaatctgctctgggtcgataaatacaagcccacctccttgaaaacaattatagggcagcagggtgaccagagctgtgcaaacaagctattgagatggcttagaaactggcagaaaagctcttcggaggacaagaagcatgcaaagttcggaaaattctccggaaaggacgacggctcttccttcaaggcggccctcctttcaggcccccccggcgttgggaagactacaactgcttccctggtttgccaggagctaggctactcttatgtagagcttaatgcctccgatacccggagcaagtcctcacttaaggccatcgtagccgaatccttgaataataccagtataaaaggattctacagtaacggggctgcatcctctgtcagcactaagcatgcattgattatggacgaagtagatggtatggccggcaatgaggaccgcggaggcatccaggagttgatcggcctaattaagcacaccaaaattccaattatttgcatgtgcaacgaccggaaccatcctaaaataaggtccctggtgcattattgcttcgacctgagatttcaaagaccaagggtggagcagattaagggagccatgatgagcatagcttttaaggaaggcctgaaaattccaccacccgctatgaacgagatcattctgggcgctaaccaggacattaggcaggtactgcataacctttccatgtggtgtgcccgttccaaggcattgacctatgaccaggctaaagccgactctcatagggccaaaaaggacatcaagatgggaccgtttgacgtggcacggaaggttttcgccgcaggtgaggagacggcccacatgtccctggttgacaagagcgacttgtttttccatgactacagcattgcacctctcttcgtgcaagagaactacatacatgtgaaacccgtcgcagccggaggagatatgaagaagcatttgatgctattgtcgcgtgccgccgatagtatttgcgacggcgacctggttgattctcagattcgatccaagcaaaactggagccttttgcctgctcaagcaatctacgcatccgtgctgcccggtgaactgatgagggggtacatgacacagttccccacttttccatcctggctgggcaagcactcctccactggaaaacatgaccggatagttcaggacctggcactgcacatgtccctgcgcacgtacagttccaaaaggaccgtgaacatggactatctgagcttactacgcgatgcgttggttcagcctcttaccagccagggggtcgacggggtgcaagatgtggtggctctgatggacacctattatttaatgaaagaggattttgagaacatcatggaaatttcatcatggggaggcaagccaagcccgttttccaaactggacccgaaagtgaaagcagccttcacgcgcgcctataacaaggaagctcacctaaccccctatagtctccaagccattaaggcctctagacactcaacatctccatccttggacagcgaatacaatgaggaactgaatgaggacgactctcagtctgacgaaaaggaccaggatgcaattgagacagatgccatgatcaaaaaaaagaccaagagctctaaaccttccaagcccgagaaggacaaggaaccgcggaaaggcaagggcaaatcaagcaagaaatag

SEQ ID NO: 133463 - DNA, 3444 bp, Artificial Sequence
  derived and/or modified sequence
atggacatcaggaagttctttggagtcatccccagcggcaagaagctggtgtctgagaccgtgaagaagaatgagaagaccaagagtgatgaggagaccctgaaggccaagaagggcatcaaggagatcaaggtgaacagcagcaggaaagaagatgacttcaagcagaagcagcccagcaagaagaagaggatcatctatgacagcgacagcgagagcgaggagaccctgcaggtgaagaatgccaagaagcccccagagaagctgcctgtgagcagcaagccaggcaagatcagccggcaggaccctgtgacctacatcagcgagacagatgaagaagatgacttcatgtgcaagaaggccgccagcaagagcaaagaaaatggccgcagcaccaacagccacctgggcaccagcaacatgaagaagaatgaggagaacaccaagaccaagaacaagcccctgagccccatcaagctgacccccacctctgtgctggactactttggaactggatctgtgcagaggagcaacaagaagatggtggccagcaagaggaaggagctgagccagaacacagatgagagcggcctgaatgatgaggccatcgccaagcagctgcagctggatgaagatgctgagctggagcggcagctgcatgaagatgaggagtttgcccggaccctggccatgctggatgaggagcccaagaccaagaaggccaggaaggacacagaagctggggagaccttcagctctgtgcaggccaacctgagcaaggccgagaagcacaagtacccccacaaggtgaagacagcccaggtgtctgatgagaggaagagctacagccccaggaagcagagcaaatatgagagcagcaaggagagccagcagcacagcaagagcagcgctgacaagattggagaggtgagcagccccaaggccagcagcaagctggccatcatgaagaggaaggaggagagcagctacaaggagattgagcctgtggccagcaagaggaaagaaaatgccatcaagctgaagggggagaccaagacccccaagaagaccaagagcagccctgccaagaaggagagcgtgtccccagaggacagcgagaagaagaggaccaactaccaggcctaccgcagctacctgaaccgggagggccccaaggccctgggcagcaaggagatccccaagggagctgagaactgcctggagggcctcatcttcgtcatcactggagtgctggagagcattgaaagagatgaggccaagagcctcatcgagagatatggaggcaaggtgactggaaatgtgtccaagaagaccaactacctggtgatgggccgggacagcggccagagcaagagtgacaaggctgctgccctgggcaccaagatcattgatgaagatggcctgctgaacctgatccgcaccatgcctgggaagaagagcaaatatgaaattgctgtggagacagagatgaagaaggagagcaagctggagaggaccccccagaagaatgtgcagggcaagaggaagatcagccccagcaagaaggagagcgagagcaagaagagccggcccaccagcaagagggacagcctggccaagaccatcaagaaggagacagatgtgttctggaagagcctggacttcaaggagcaggtggccgaggagaccagcggggacagcaaggccaggaacctggctgatgacagcagcgagaacaaggtggagaacctgctgtgggtggacaagtacaagcccaccagcctgaagaccatcatcggccagcagggcgaccagagctgtgccaacaagctgctgcgctggctgaggaactggcagaagagcagcagcgaggacaagaagcacgccaagtttgggaagttcagcggcaaggatgatggcagcagcttcaaggccgccctgctgagcggccccccaggagtgggcaagaccaccacagccagcctggtgtgccaggagctgggctacagctatgtggagctgaatgccagtgacaccaggagcaagagcagcctgaaggccatcgtggccgagagcctgaacaacaccagcatcaagggcttctacagcaatggagctgccagctctgtgtccaccaagcacgccctgatcatggatgaggtggatggcatggctggaaatgaagatagaggaggcatccaggagctgattggcctcatcaagcacaccaagatccccatcatctgcatgtgcaatgacaggaaccaccccaagatccgcagcctggtgcactactgctttgacctgcgcttccagaggccccgggtggagcagatcaagggggccatgatgagcatcgccttcaaggagggcctgaagatccccccaccagccatgaatgagatcatcctgggcgccaaccaggacatccggcaggtgctgcacaacctgtccatgtggtgtgcccggagcaaggccctgacctatgaccaggccaaggctgacagccaccgggccaagaaggacatcaagatgggcccctttgatgtggccaggaaggtgtttgctgctggggaggagacagcccacatgagcctggtggacaagagtgacctcttcttccatgactacagcatcgcccccctgtttgtgcaggagaactacatccacgtgaagcctgtggccgccggcggggacatgaagaagcacctgatgctgctgagcagagctgctgacagcatctgtgatggagacctggtggacagccagatccgcagcaagcagaactggagcctgctgcctgcccaggccatctatgcctctgtgctgcccggggagctgatgaggggctacatgacccagttccccaccttccccagctggctgggcaagcacagcagcacaggcaagcatgaccgcatcgtgcaggacctggccctgcacatgagcctgcggacctacagcagcaagaggacagtgaacatggactacctgagcctgctgagagatgccctggtgcagcccctgaccagccagggcgtggatggagtgcaggatgtggtggccctgatggacacctactacctgatgaaggaggactttgagaacatcatggagatcagctcctggggcggcaagcccagccccttcagcaagctggaccccaaggtgaaggccgccttcacccgggcctacaacaaggaggcccacctgaccccctacagcctgcaggccatcaaggccagccgccacagcaccagccccagcctggacagcgagtacaatgaggagctgaatgaagatgacagccagagtgatgagaaggaccaggatgccattgaaacagatgccatgatcaagaagaagaccaagagcagcaagcccagcaagccagagaaggacaaggagcccaggaagggcaagggcaagagcagcaagaagtag

SEQ ID NO: 133464 - DNA, 3444 bp, Artificial Sequence
  derived and/or modified sequence
atggacatccggaagttcttcggcgtgatccccagcggcaagaagctggtttccgagacggttaaaaagaatgagaaaacaaagtctgacgaggaaaccctgaaggctaagaaggggatcaaggagattaaagtcaattcgagcagaaaggaagatgattttaaacaaaaacagcccagtaagaagaagaggatcatctatgatagcgacagtgagtcagaagaaaccttgcaggttaagaacgctaagaagccccccgagaagctgcctgtgtcttctaaacccggaaagatctcgagacaagacccagtcacctatattagcgaaaccgatgaagaggatgacttcatgtgtaagaaggctgcctcgaaaagtaaagaaaatgggcggagtacgaatagccacctgggaacttcgaatatgaagaagaatgaggagaatacaaaaacaaagaacaagcctctgtctccaattaagcttactccaacaagtgtcctggactatttcggcaccgggtcggttcagagatccaacaagaagatggtcgcgtcaaaacggaaagaactctcacagaataccgatgagtccggtctcaacgacgaggccatcgccaaacagctgcagctggacgaagacgccgagctagagagacaacttcatgaagatgaggagttcgccaggacactagctatgctggatgaagagcctaagacaaaaaaggccaggaaggatacggaagctggtgaaacttttagctccgtccaggctaatctcagtaaggccgagaagcacaaataccctcacaaagttaaaacagcccaggtgtccgatgaaaggaaaagttatagcccacgcaagcagtcaaaatatgagtctagcaaggagagtcaacaacacagcaagtctagcgcagataagattggcgaggtgtcttctccgaaggcctccagcaaacttgccattatgaagagaaaagaggaatctagttataaggagatcgagcccgtggcatcgaagcgtaaggagaacgcaattaagttgaagggggaaaccaagactcccaagaaaacaaagtcatcgcctgcaaagaaggaatctgtttcccccgaggacagtgaaaagaagaggacaaattatcaggcctatagaagctacctcaatcgggaaggacctaaggccctgggatcgaaagaaattcccaagggggccgagaactgtctggagggtttgattttcgtgattactggtgtccttgaatctattgagagggatgaagccaagtctctgatcgagcgctacggcggaaaagtgactgggaatgtctcaaaaaagacaaattatctggtgatgggccgcgatagcgggcagagcaaaagcgacaaagcagctgccctggggacgaagatcattgatgaagatggcctgttgaacctcatcaggacaatgcctggaaagaaaagcaaatatgaaattgctgtggagacagagatgaagaaggaatccaagctggagcgcaccccccaaaagaacgtgcagggcaagcggaagatctccccaagcaagaaggagagcgagtccaagaagtctcgccctacatcaaagcgagactctcttgcgaaaaccatcaagaaagaaactgacgtattttggaagagtctggacttcaaggaacaggtcgccgaagagacatctggagatagcaaagcccggaatctggccgatgattctagcgaaaataaggtcgagaacctgctgtgggttgataagtataaacctacatctcttaagactatcattgggcagcagggagaccagtcttgcgccaacaagcttttgagatggctgagaaattggcagaagtctagtagcgaagacaagaaacatgctaaattcgggaagttctcagggaaggatgacggttcatcttttaaagcagcactcctgtcgggtccgcccggcgtcggaaagacgaccaccgcctctctggtgtgccaggagctgggatacagctacgtagagctgaacgcatccgacacacggagcaagagctcactcaaagccatcgtggctgaatcactcaataatacatcaatcaagggcttttattcaaacggcgccgccagttcagtgtccaccaaacatgccctaatcatggatgaggtggacgggatggctggtaatgaggatcggggtggcattcaggagcttattggcctcattaagcacacaaagatccctataatctgcatgtgcaatgaccggaatcatcctaaaatacgctctctcgtccactattgtttcgatctgagatttcagcgccctcgggtggagcagataaagggtgccatgatgtccatagccttcaaagaaggcctcaagattcccccacccgcgatgaacgagattattctaggcgccaatcaggacattcggcaggtccttcacaacttgtccatgtggtgtgcaagaagtaaagcactgacctatgatcaggctaaggcagattcacatcgggcaaaaaaggacatcaagatgggcccattcgacgttgcccgcaaagtgttcgccgctggcgaagaaactgctcacatgagcctagtggataagagtgatctgttctttcacgattactctatcgctccactgttcgtccaggagaactacatacatgtaaagcccgtcgcagccggcggagatatgaaaaaacacctgatgctcctaagccgggcggccgacagcatttgcgatggggatttggtagacagtcaaatccggtcgaaacaaaattggtctttattgccagctcaggccatctacgcctctgtattacccggagagctcatgcggggttacatgacccagttccccaccttcccttcttggctggggaaacattcctccactggaaaacacgacaggatcgttcaagatctggctctgcatatgagcttgaggacttattcttctaaaagaacggtaaatatggactacttatctctattacgcgacgcgctcgtacaacccttaactagtcaaggtgtggacggcgtgcaggatgtagtggctctgatggacacttattacttgatgaaggaggatttcgagaacattatggagataagctcgtggggggggaagccatcccccttttcaaaactggatccgaaagtgaaggctgctttcactagagcgtacaataaggaggctcacttaacaccctactcgctgcaggccatcaaggcatctcggcactctaccagcccatctcttgatagtgagtacaatgaggaactgaacgaagacgactctcagagtgacgagaaagaccaggacgctatcgaaacagatgcaatgattaaaaagaagactaagagctcaaagccctccaaacctgagaaagataaggaacccagaaagggcaagggcaagagtagcaaaaaatag

SEQ ID NO: 133465 - DNA, 3444 bp, Artificial Sequence
  derived and/or modified sequence
atggatatccgcaaattcttcggagtcatcccttctggcaaaaagctagtatccgagacagtaaagaagaacgaaaagaccaagagcgacgaagaaacgctgaaagccaagaaaggaatcaaggagattaaagttaacagcagcagaaaagaagacgattttaaacagaagcagccatccaaaaaaaaaagaatcatctatgatagcgactccgagtccgaagaaactctgcaagtaaagaatgccaaaaagccgcctgagaaattgcctgtgagctcgaagcctgggaaaatcagccggcaggatccagtaacatacattagcgagacagatgaggaggacgatttcatgtgcaaaaaagccgctagcaaaagtaaagaaaatgggagatcaacaaattcccacctcggtacctctaacatgaagaagaatgaagagaacactaaaacaaagaataagcccctgtcccccatcaaacttaccccaacatccgtactcgactatttcggaaccggatcggtgcagcggtcaaacaaaaagatggtcgcctccaagagaaaagagcttagccagaataccgatgagagtggcctgaacgacgaggccatagctaaacagctgcagcttgatgaagatgccgagctagagaggcagttgcacgaggatgaagagttcgccagaacactcgctatgctggacgaagagcccaaaacaaaaaaagctcggaaagatacagaggcaggagagacattcagctccgtgcaggcaaacctgtccaaggcagagaagcacaaatatccacataaagtgaaaaccgcccaagtttcagatgagcggaagtcctacagcccaaggaagcagtccaaatatgaatccagcaaagaaagccagcagcattccaagtcctcggcagataagataggagaggtgtcttcccccaaagcctcaagcaaacttgccatcatgaagcgaaaggaggagtcaagctataaagaaatcgagcccgtggcaagtaaaagaaaagagaatgctatcaagctgaaaggagagacaaagacgccaaagaaaaccaagtcatctcctgctaagaaggagtcagtgtcacctgaagatagtgaaaaaaagagaacgaactaccaggcttaccgttcgtaccttaacagggaaggccctaaggcactgggaagcaaagaaatacccaagggagctgaaaattgcctggagggcctgatcttcgtgattaccggagtgctggagtctattgaaagagacgaagccaaatctctgatcgagcgatacggtggaaaagtcacagggaatgtttcaaagaaaacaaactacctggtcatgggcagagatagcggccagagcaaaagtgataaggctgcggctttgggtaccaaaattattgacgaagatgggctcttaaatcttatcaggacaatgccaggtaagaagtcaaagtatgagatcgccgttgagaccgagatgaagaaggagagcaagctggagaggaccccccaaaagaacgtgcagggcaagcggaagatctctccatccaaaaaagagagcgaatcaaagaagtcccgaccaacttccaagagggactctcttgccaagactattaagaaggaaaccgacgtcttttggaagtctttagatttcaaggagcaggtagctgaggaaacttcgggcgatagcaaggcgaggaatctcgctgacgattcatctgaaaacaaagtagagaacctcctgtgggtagataaatataagcctacttcattgaagacaataattgggcaacagggtgaccaatcatgtgccaataagctgttacgctggttacggaattggcagaagtcgtctagtgaagataaaaagcacgcgaagttcgggaagttctctgggaaagatgacggctcctccttcaaggccgcactgctgagcggtcctcctggagtcggtaagaccaccaccgcttccctcgtgtgtcaagaattgggctacagttacgtggagctcaacgcaagtgacacacgatcaaagagttccctaaaggcaattgtggctgaatccctgaacaatacttctattaagggattttactcaaatggtgctgcatccagtgtgagcacaaagcacgctctcatcatggacgaagtggatgggatggctgggaatgaggaccgaggcggaattcaggagctgattggtctgatcaaacacacaaaaattcctataatctgcatgtgtaatgatcgaaatcacccaaaaattcggtctctggtgcattactgctttgacctcagattccagcggcctagagtggaacagatcaaaggcgcaatgatgagcattgcttttaaagaagggcttaagatccctcctcccgcaatgaacgaaattatcctcggcgcaaaccaggatatccgccaggttttacataacttgtctatgtggtgtgcccgaagcaaagctctaacttacgaccaggccaaagctgatagccacagagcaaaaaaagacattaagatgggaccgtttgatgtggctcgtaaagttttcgctgctggtgaggaaaccgctcacatgagcctggtcgacaagagcgacttgttttttcacgactattccatcgcacccctgtttgtgcaggagaactacattcatgtcaaaccggtagccgcaggcggtgacatgaaaaagcacctgatgctgctgtcgcgcgctgcggatagcatctgcgatggcgatctggtggattctcagatcaggagtaaacagaattggtctctccttcccgctcaggccatttatgccagtgtactacctggggaactcatgcgcggatacatgactcaattcccaacatttccctcctggctggggaagcatagttcaactgggaagcacgaccgcatcgttcaggatctcgctttacacatgagtctgaggacgtacagttctaagagaacagttaacatggattacctctcactcttaagagatgccctggtccagcctttaacatcacagggcgtcgatggcgttcaggatgtggtcgctttaatggatacctactatctgatgaaggaagatttcgagaacataatggaaatttctagctggggaggaaagccgagccctttctccaaactggatccgaaggtgaaggctgcgttcactagagcctacaacaaggaggcacatctcacgccgtacagcttgcaggcaataaaggccagtagacattctacttccccaagccttgattccgaatacaacgaggaactcaacgaagacgactctcagtctgatgaaaaagatcaagatgccattgaaacggatgccatgattaaaaagaagacaaagtcaagcaagcccagtaagcctgagaaggataaagaacccaggaaaggcaaaggaaaaagctcaaaaaaatag

SEQ ID NO: 133466 - DNA, 4859 bp, Artificial Sequence
  derived and/or modified sequence
cttgcacttcgcgggagaagttgttggcgcgaatggatcctgagcctcgataacagattcctcaaccggcccacccgccagccagccagcgccttcatcctggggctgcgatggacattcggaaattctttggagtaataccaagtggaaagaaacttgtaagtgaaacagtaaagaagaatgagaaaacaaagtctgatgaagaaactttaaaagcaaagaaaggaataaaggaaatcaaggtaaatagctcccgtaaagaggatgacttcaaacaaaagcaaccaagcaagaaaaagaggatcatctatgattcagattcagagtcagaggagacgttgcaggtaaaaaatgccaaaaagccaccagaaaaactgccagtatcttctaaacctggtaaaatttcacggcaggatcctgttacatacatttcagaaacagatgaagaagatgactttatgtgtaagaaggcggcctctaaatcaaaagagaatggaagatctacaaatagtcatcttggaacatcaaacatgaaaaagaatgaagaaaacactaagaccaagaataagcctttatcaccaataaaacttacacccacatcagtacttgattattttggaactggaagtgtccaaagatctaataagaagatggtggcaagcaaaagaaaagagctttcacaaaatacagatgagtctggattaaatgatgaagccatcgccaagcaattacagcttgatgaagatgcggagctggagaggcagttgcatgaagatgaagagtttgccagaacattagccatgttggatgaagaacccaagaccaaaaaggctcgaaaggacacagaagcgggagaaacgttttcatctgtccaagccaatttaagtaaagcagaaaaacataaatatcctcataaagtaaaaacagcacaagtttcagatgaaagaaagagctacagtcctaggaagcaaagtaaatatgaaagttcaaaagaatctcagcaacattccaagtcatcagctgacaaaataggagaagtctcttctcccaaggccagttctaagctggcaattatgaaaagaaaagaagagagctcttataaagaaatagagcctgtggcctcaaaaagaaaagaaaatgccattaaattgaaaggagagacaaaaactcctaagaaaaccaaaagttctccagctaaaaaagagtctgtaagtcctgaagattctgaaaagaaacgcactaattatcaagcttatcgaagctacttaaatcgagaaggtcccaaggctctgggctccaaagaaataccaaagggagctgaaaattgcttggaaggccttatatttgtaatcacaggcgtgctggagtctattgaacgagatgaggccaagtctctaattgaacgttatgggggaaaagtaacaggaaatgtcagcaagaaaacaaattatcttgtcatgggtcgtgatagtggacagtccaagagtgataaggccgcagccttggggacaaaaattattgatgaagatggcctgttgaatctgattcggactatgccaggcaagaaatccaagtatgaaatagcagttgaaactgagatgaagaaagagtccaaactggagagaacaccccaaaaaaatgtccaaggaaaaagaaaaattagtccatctaaaaaggaatcagaatctaaaaagagcaggccgacttccaaaagggacagtttggcaaagacaataaaaaaggaaacagatgtgttttggaaaagcctggatttcaaggagcaggtggctgaggagacaagtggtgacagcaaggctaggaatttggctgatgacagcagtgaaaacaaagtggaaaatttgctctgggtggataaatataagccaacctcgctcaagaccataattggacagcaaggtgaccagagctgtgccaacaaactcctacgctggctccgaaactggcaaaagagttcttccgaagataaaaaacacgcaaagtttggtaaattttccggcaaagatgatggctctagttttaaagcagcgttgctgtcaggccctcctggtgttggcaaaaccaccacagcttccctggtgtgtcaggagttgggatacagctacgtggaactgaatgcaagtgacacccggagtaagagcagtttgaaggcgattgttgctgagtcactgaacaataccagcatcaaaggcttttattcaaatggagcagcctcttcagtaagcacgaaacatgctctcatcatggatgaagtagatggcatggcaggcaatgaggataggggaggaattcaggaattaattggcctgataaaacatactaaaattcccattatttgtatgtgcaatgatagaaatcatcccaagattcgctctctggttcattattgttttgatcttcgttttcaaagacctcgggttgaacagattaagggtgctatgatgtctattgcatttaaagaaggtttaaagattccccctccagctatgaatgaaataattttgggagccaatcaagatatcagacaggttttacataatctgagtatgtggtgtgcacgaagtaaagcattaacctatgaccaggccaaagctgattctcacagagccaaaaaggatatcaaaatgggcccatttgatgttgcccggaaagtgtttgcagctggagaggagactgctcacatgtcacttgtggacaagtcagatctcttttttcatgattattcaatagcacccctcttcgtccaggaaaattacatacacgtgaagcctgtagcagcagggggtgacatgaaaaagcacctgatgcttttaagcagagcagcagacagcatatgcgatggtgacctagtggacagccagatccggagtaagcaaaactggagtcttctgcctgcgcaggccatttatgccagtgttcttcctggagagttgatgagggggtacatgacccagtttcccaccttcccaagctggctggggaagcactcgtctacaggcaaacatgatcgtattgttcaggacctggccttgcatatgagtctcagaacttactccagcaaaaggactgtaaacatggattatctgtcgcttctaagggatgcacttgtacagcccttgacctcacaaggagtagacggagtacaggatgttgttgcacttatggacacatattatttgatgaaagaagactttgagaatatcatggaaatcagcagctggggtggcaaacctagtcccttttcaaagctggatcccaaggtgaaagcagccttcacaagagcttacaataaggaagcccaccttactccatactcacttcaagctataaaggcatctagacacagcacaagcccatccctggattcggaatacaatgaagaattaaatgaagatgactctcaatctgatgagaaagaccaagatgctatagaaactgatgccatgatcaagaaaaagacaaaatcttcaaagccttcaaaaccagaaaaagataaggagcccagaaaaggaaaaggaaaaagttcgaagaaatgaaaccatttttcactagcgacagccactttttactctccctcctgaccagtccagctggtctagagaaagccttgttttttcccagagcaaccatgttttagcataatgggatgacctggtgtcccattataaataaagggtggtatggctagaagggtatgagcagtaggcttatgtacacctcttatagaggttgataggactgcttgggtcctccactgtcctctgtcaatctagttagacgtgcttctgaatgactgtagaattggaactagaaactacacctgggctttggagtcagattttagttaacaataatgagcctgggagcagtagtactaaggcgtcttttgtaggcttaagaatttatcctaatggcctttataggaccaatgctgattttttttaaaggcagttcctattatgtggtgaaattttgtaaataaatgattatacaaaacagtcaccacctagaactgggtattctttgtacattgtcagatatctttcaaagtataaattaggaataaaaatgttccacatgatatgtgtacaaattctttttaagattgtcatcttgtacagcaaaatattatgttggtatattacttccttattaatttgcaaatgattggattaaaaaagctcactgtattccttactaacctgttgtgtgaaacataacattggcagtcgaggagtcagaactcggattcccagcctcactccctctgtgtgtgttgaccacgtctctgctgtgaataggatttcatgcagtggtctgttatggggctttgcagcgtggggggctgcagaagattctcagacattcttatccttctggagtctcaacccatcaggttcagaccagtaggaaccaggctgggtcaggctcttaatttcactatggtgggggacaaaatgaacactggcttttgttcactttgcccctgagagatctagtcctgtcctgtgatggcttccacaaaccctgttggaagtttgggttattcctataactgtatgtgttgagtggccgtgaggctatggacctagcctggaatttagatgtctagctattttttaatcttgttggtaaatgctcagaggtctgtgctacctctgtgaggtatatactaaaatgaatgtaaaataaggatcgtattccctgctttaaggaactggtagtcttgtttgggtgatgagacaaagttcttgagacatttaaactgtatttaccagtgtgaaaaatgtcatttatggagattaattcattatggaaataaaacattgcctaagcccttg

SEQ ID NO: 133467 - protein, 320 aa, Artificial Sequence
  derived and/or modified sequence
MEVEAVCGGAGEVEAQDSDPAPAFSKAPGSAGHYELPWVEKYRPVKLNEIVGNEDTVSRLEVFAREGNVPNIIIAGPPGTGKTTSILCLARALLGPALKDAMLELNASNDSMTDGAQQALRRTMEIYSKTTRFALACNASDKIIEPIQSRCAVLRYTKLTDAQILTRLMNVIEKERVPYTDDGLEAIIFTAQGDMRQALNNLQSTFSGFGFINSENVFKVCDEPHPLLVKEMIQHCVNANIDEAYKILAHLWHLGYSPEDIIGNIFRVCKTFQMAEYLKLEFIKEIGYTHMKIAEGVNSLLQMAGLLARLCQKTMAPVAS

SEQ ID NO: 133468 - DNA, 963 bp, Artificial Sequence
  derived and/or modified sequence
atggaagtcgaggctgtgtgcgggggggctggggaggtggaggcccaggactctgaccctgcacccgccttctccaaagcccccgggagtgctgggcactacgagttgccttgggttgagaaatacagacctgttaaattgaacgaaattgttggtaatgaagataccgtgtcccgcctcgaggtttttgcacgtgaagggaacgtgccgaacattattatcgccggtccccccggaaccggcaaaacaactagcattttgtgtttggctcgggccctgctgggtccagctctgaaggatgctatgcttgaactgaacgccagtaacgacagtatgaccgacggcgcccaacaggccctacgaagaaccatggagatttactcaaaaaccacccggtttgcattggcctgtaatgcctctgacaaaattatagagcctattcagtcgagatgtgcggtactgagatacaccaagctcaccgacgctcagatcctaacacgcctgatgaacgtgatcgaaaaggagcgcgttccctatacagacgacggtctagaggctattatctttaccgcccagggagacatgcgccaggcacttaataacctgcaatctacattctccggctttgggtttatcaacagcgagaatgtttttaaggtgtgtgacgagccacaccctctcctagtgaaggagatgattcagcactgtgtgaatgcaaatatagacgaggcctataagatccttgcccacctgtggcatctcgggtattcacccgaggacataatcgggaatatcttcagggtgtgcaagacctttcagatggctgagtacctcaagctggagtttattaaagagatcggctacacacatatgaagatcgcagaaggcgtaaattctctgcttcagatggccggcctgctggccaggctttgccagaaaaccatggcacccgtggccagctag

SEQ ID NO: 133469 - DNA, 963 bp, Artificial Sequence
  derived and/or modified sequence
atggaggtggaggccgtgtgtggcggggccggggaggtggaggcccaggacagcgaccctgccccagccttcagcaaggcccctggcagcgctggccactatgagctgccctgggtggagaagtacagacctgtgaagctgaatgagatcgtgggcaatgaagacacagtgtcccggctggaggtgtttgcccgggagggcaatgtgcccaacatcatcatcgccggccccccaggcaccgggaagaccaccagcatcctgtgcctggcccgggccctgctgggccctgccctgaaggatgccatgctggagctgaatgccagcaatgacagcatgacagatggagcccagcaggccctgcggaggaccatggagatctacagcaagaccaccaggtttgccctggcctgcaatgccagtgacaagatcatcgagcccatccagagccgctgtgctgtgctgcgctacaccaagctgacagatgcccagatcctgacccggctgatgaatgtcatcgagaaggagcgggtgccctacacagatgatggcctggaggccatcatcttcaccgcccagggcgacatgaggcaggccctgaacaacctgcagagcaccttcagcggcttcggcttcatcaacagtgaaaatgtgttcaaggtgtgtgatgagccccaccccctgctggtgaaggagatgatccagcactgtgtgaatgccaacattgatgaggcctacaagatcctggcccacctgtggcacctgggctacagccctgaggacatcatcggcaacatcttccgggtgtgcaagaccttccagatggccgagtacctgaagctggagttcatcaaggagatcggctacacccacatgaagattgctgagggcgtgaacagcctgctgcagatggccggcctgctggcccggctgtgccagaagaccatggcccctgtggccagctag

SEQ ID NO: 133470 - DNA, 963 bp, Artificial Sequence
  derived and/or modified sequence
atggaggtggaggccgtgtgcggcggcgccggcgaggtggaggcccaagattccgacccagctccggccttctccaaagctcctggatccgccggacattacgagctcccctgggtcgaaaaatatcgcccagtcaagctgaacgagatagtgggtaatgaagatacagtcagtagattggaagtatttgcaagggaagggaatgttcccaatattattattgctgggcccccaggtaccggtaaaacgacctccatactgtgccttgctcgagctttactgggacccgccctgaaggatgcaatgctggaactgaacgcttctaatgattcaatgaccgatggagctcagcaggcactgaggcgaaccatggaaatttactccaagacaactaggtttgccctggcttgcaacgcttctgacaagatcatcgaacctatacaatccagatgcgcagtgctcagatacactaaactcactgatgcgcaaattttaacccgactcatgaacgttatagaaaaggaaagggtgccttacacagacgacggcctggaggccatcatctttaccgcccaaggcgacatgagacaggccctgaataacctgcagagtaccttttcaggctttgggttcattaacagtgagaacgtcttcaaggtgtgtgacgagccccaccccctccttgtgaaggagatgattcagcactgtgtgaacgcgaacattgatgaggcttacaaaatcctggctcatctgtggcatctggggtacagccctgaggatatcatcggaaacatctttagagtgtgtaaaaccttccagatggccgagtacctgaagctggagtttatcaaagagatcggatatactcacatgaaaattgcggaaggcgtcaactcactcttacagatggctggattgctagcccggctctgccagaaaacaatggcacccgtagcttcatag

SEQ ID NO: 133471 - DNA, 963 bp, Artificial Sequence
  derived and/or modified sequence
atggaagtcgaggcagtgtgcggaggtgctggcgaggtggaggcacaggacagcgaccccgctcccgctttcagcaaagccccaggctcagcgggacactatgagctgccatgggtggagaagtacagacctgtcaaattaaatgaaattgtcggtaacgaggataccgttagtcggctggaagttttcgccagagaaggcaatgtgccgaatatcattatcgctggcccacctggaacgggcaaaactacgtcaatactgtgtttggccagggccctcctcggaccagctttgaaagatgccatgctcgaactgaatgcaagcaatgatagcatgacagacggagcacagcaggcattaaggcggaccatggaaatctattctaaaacaacaagattcgctctcgcctgcaacgcatcggacaagatcatcgagcccattcagtctaggtgcgccgtgcttagatacacaaagctgacagatgcccagatcttgacacggctcatgaacgtcattgaaaaggaaagggtaccatatactgacgatggcttggaggccattatctttacagcacaaggcgatatgaggcaggccctgaacaatcttcaaagtacattctctggctttggctttatcaattccgaaaatgtctttaaagtgtgcgacgaaccacatcctctgttagtcaaggagatgatccagcactgtgtgaacgccaatattgatgaagcttacaagattttagcacatctgtggcatctgggatactccccagaagatatcattggtaacatttttcgcgtgtgtaaaaccttccaaatggccgaatacctcaagctcgagtttatcaaagaaatcgggtacacccacatgaagattgcggaaggcgtaaattccttgcttcaaatggctggtttgctggccagattgtgccagaagactatggcaccagtggcgagctag

SEQ ID NO: 133472 - DNA, 1576 bp, Artificial Sequence
  derived and/or modified sequence
gcgagaatggaggtggaggccgtctgtggtggcgcgggcgaggtggaggcccaggactctgaccctgcccctgccttcagcaaggcccccggcagcgccggccactacgaactgccgtgggttgaaaaatataggccagtaaagctgaatgaaattgtcgggaatgaagacaccgtgagcaggctagaggtctttgcaagggaaggaaatgtgcccaacatcatcattgcgggccctccaggaaccggcaagaccacaagcattctgtgcttggcccgggccctgctgggcccagcactcaaagatgccatgttggaactcaatgcttcaaatgacagcatgaccgacggagcccagcaagccttgaggagaaccatggaaatctactctaaaaccactcgcttcgcccttgcttgtaatgcttcggataagatcatcgagcccattcagtcccgctgtgcagtcctccggtacacaaagctgaccgacgcccagatcctcaccaggctgatgaatgttatcgagaaggagagggtaccctacactgatgacggcctagaagccatcatcttcacggcccagggagacatgaggcaggcgctgaacaacctgcagtccaccttctcaggatttggcttcattaacagtgagaacgtgttcaaggtctgtgacgagccccacccactgctggtaaaggagatgatccagcactgtgtgaatgccaacattgacgaagcctacaagattcttgctcacttgtggcatctgggctactcaccagaagatatcattggcaacatctttcgagtgtgtaaaactttccaaatggcagaatacctgaaactggagtttatcaaggaaattggatacactcacatgaaaatagcggaaggagtgaactctcttttgcagatggcaggcctcctggcaaggctgtgtcagaagacaatggccccggtggccagttagagcagagacttcactgactgacttacaggtgccctattctgaggtacaggagccgcggctttctgatgggggaaaatgccgccttaggctggagccaacatgactgtcctttaaactccagtggctggccaggcacggtagctcacgcctgtaatcccaacactttgggaggccgaggcaggtggatcacctgaggtcagaagttcaagaccagcctggccaacatggggaaaccctgtctttactaaaaatataaaaattagctgggtgtggtggcgggcacctgtaatcccagctactcgggaggctgtggcaggagaatcgcttgaacccaggaggtggaggttgcagtgagccaagatcacaccattgcactccagcctgggcgacagagtctccatctggggaaaaaaattaaataaataaactcccgtgacttgcatgtttgcttctgggacgtctgtgccccgcaagtgtttgagtttggcctccaccccattgatgcggtgacggggcggaaaggcgcagagaagctgagggcggtctctgatctgtgtgtgggttgacattttagctaataaagccttgcagtgtttgttggcaataa

SEQ ID NO: 133473 - DNA, 963 bp, Artificial Sequence
  derived and/or modified sequence
atggaggtggaggccgtgtgcggcggcgccggcgaggtggaggcccaggacagcgaccccgcccccgccttcagcaaggcccccggcagcgccggccactacgagctgccctgggtggagaagtacagacccgtgaagctgaacgagatcgtgggcaacgaggacaccgtgagcagactggaggtgttcgccagagagggcaacgtgcccaacatcatcatcgccggcccccccggcaccggcaagaccaccagcatcctgtgcctggccagagccctgctgggccccgccctgaaggacgccatgctggagctgaacgccagcaacgacagcatgaccgacggcgcccagcaggccctgagaagaaccatggagatctacagcaagaccaccagattcgccctggcctgcaacgccagcgacaagatcatcgagcccatccagagcagatgcgccgtgctgagatacaccaagctgaccgacgcccagatcctgaccagactgatgaacgtgatcgagaaggagagagtgccctacaccgacgacggcctggaggccatcatcttcaccgcccagggcgacatgagacaggccctgaacaacctgcagagcaccttcagcggcttcggcttcatcaacagcgagaacgtgttcaaggtgtgcgacgagccccaccccctgctggtgaaggagatgatccagcactgcgtgaacgccaacatcgacgaggcctacaagatcctggcccacctgtggcacctgggctacagccccgaggacatcatcggcaacatcttcagagtgtgcaagaccttccagatggccgagtacctgaagctggagttcatcaaggagatcggctacacccacatgaagatcgccgagggcgtgaacagcctgctgcagatggccggcctgctggccagactgtgccagaagaccatggcccccgtggccagctag

SEQ ID NO: 133474 - protein, 356 aa, Artificial Sequence
  derived and/or modified sequence
MSLWVDKYRPCSLGRLDYHKEQAAQLRNLVQCGDFPHLLVYGPSGAGKKTRIMCILRELYGVGVEKLRIEHQTITTPSKKKIEISTIASNYHLEVNPSDAGNSDRVVIQEMLKTVAQSQQLETNSQRDFKVVLLTEVDKLTKDAQHALRRTMEKYMSTCRLILCCNSTSKVIPPIRSRCLAVRVPAPSIEDICHVLSTVCKKEGLNLPSQLAHRLAEKSCRNLRKALLMCEACRVQQYPFTADQEIPETDWEVYLRETANAIVSQQTPQRLLEVRGRLYELLTHCIPPEIIMKGLLSELLHNCDGQLKGEVAQMAAYYEHRLQLGSKAIYHLEAFVAKFMALYKKFMEDGLEGMMF

SEQ ID NO: 133475 - DNA, 1071 bp, Artificial Sequence
  derived and/or modified sequence
atgtctttgtgggtggataagtacaggccctgctccctgggaaggctagactatcataaggaacaggctgctcagctacgtaacctggtacagtgtggcgatttcccccatttgctggtgtacgggccaagcggcgcaggtaagaaaacacgcatcatgtgtatcctgagagagttatacggcgttggggtggagaagttgcgaattgaacatcaaacaattactacgccctccaagaagaagatcgaaatctccactatcgcatcgaattaccatttggaggtgaacccttctgacgccgggaactctgaccgagtcgttatccaggagatgctaaagacagtggcccagtctcagcagttggaaactaattctcagagggatttcaaggtcgtactcctgactgaagtggacaagctaacaaaggatgcgcagcacgccttgcgtcggacaatggaaaagtatatgtctacgtgtcgtctcattttatgttgcaacagcacatcgaaggtgataccccccattcgctccaggtgtctggccgtccgagtccccgcgccaagcatagaagatatctgtcacgtgctgtctaccgtgtgcaaaaaagaagggctgaacctgccctctcagctagcacaccggcttgccgagaagtcctgtagaaatctgagaaaggccctgctgatgtgcgaagcctgccgcgttcagcagtacccgttcaccgccgatcaggaaataccggagacagattgggaggtgtatctccgagagactgctaacgcaattgtgtctcagcaaacaccccagaggttgctggaggtgagagggcgcctgtatgagctgctgacgcactgtattcctcctgagataattatgaaaggactcctgtcggaactgctccataactgcgatggacagttaaagggtgaggtagcccagatggccgcgtactacgaacaccggcttcagctgggcagcaaagcaatctaccacttggaggcatttgtggctaagtttatggctttatataagaaattcatggaggatgggcttgaagggatgatgttctag

SEQ ID NO: 133476 - DNA, 1071 bp, Artificial Sequence
  derived and/or modified sequence
atgagcctgtgggtggacaagtaccggccctgcagcctgggccgcctggactaccacaaggagcaggccgcccagctgaggaacctggtgcagtgtggggacttcccccacctgctggtgtatggccccagcggggccggcaagaagacccgcatcatgtgcatcctgcgggagctgtatggagtgggcgtggagaagctgagaattgagcaccagaccatcaccacccccagcaagaagaagattgagatcagcaccatcgccagcaactaccacctggaggtgaaccccagtgatgctggcaacagcgacagagtggtgatccaggagatgctgaagacagtggcccagagccagcagctggagaccaacagccagagggacttcaaggtggtgctgctgacagaggtggacaagctgaccaaggatgcccagcacgccctgcggaggaccatggagaagtacatgagcacctgccgcctcatcctgtgctgcaacagcaccagcaaggtgattcctcccatccgcagccgctgcctggccgtgcgggtgcctgcccccagcattgaggacatctgccacgtgctgagcacagtgtgcaagaaggagggcctgaacctgcccagccagctggcccaccggctggccgagaagagctgcaggaacctgaggaaggccctgctgatgtgtgaggcctgccgggtgcagcagtaccccttcaccgctgaccaggagatccctgagacagactgggaggtgtacctgcgggagacagccaatgccatcgtgtcccagcagaccccccagaggctgctggaggtgcggggccgcctgtatgagctgctgacccactgcatccccccagagatcatcatgaagggcctgctgtctgagctgctgcacaactgtgatggccagctgaagggggaggtggcccagatggccgcctactatgagcaccggctgcagctgggcagcaaggccatctaccacctggaggcctttgtggccaagttcatggccctgtacaagaagttcatggaggatggcctggagggcatgatgttttag

SEQ ID NO: 133477 - DNA, 1071 bp, Artificial Sequence
  derived and/or modified sequence
atgagcctgtgggtggacaagtaccggccctgcagcctgggccggctggactatcacaaagaacaagcggcacagctgcgaaacctcgtgcagtgcggtgacttcccccatctactagtatacgggccctctggagctggcaaaaagacaagaatcatgtgcattctcagggaactctatggcgtgggcgtggagaagttgagaatcgagcaccagactataaccaccccttcaaagaagaaaatcgagatatcaactatagcatccaactatcatctggaggtcaatcccagcgatgctggaaattcagaccgtgtggtgatccaggagatgctgaagacagtggctcagtcccagcagctagagacaaactcccagcgggattttaaagttgtgctgcttacagaggttgataaactcactaaggacgcccagcacgccttacgccggacaatggaaaagtacatgtctacttgtagacttatcctgtgctgcaattcgacctcgaaagtgatccctcctatcaggtcaagatgcctggctgtacgcgttcctgccccaagcattgaagacatttgtcatgtcttgagcactgtgtgcaagaaggaggggttgaatcttccttcacaattggcccatcgactggccgagaaaagctgcaggaacctgcggaaagcattgctgatgtgcgaagcctgtcgggtgcaacaatatccatttaccgcggaccaagagatcccagagacagattgggaggtgtacctgagagaaacagcaaacgccatcgtgtcacagcagacaccccagaggcttctggaagttagagggcgactttacgagctgctaacccactgcatcccccccgagattatcatgaaaggacttctctcagagctactgcataattgcgatggccagctgaagggagaggtggcgcaaatggccgcctattacgagcacaggcttcagctcggttctaaggcaatttatcacctggaagcgttcgtcgcaaaattcatggccctatacaaaaagtttatggaagatgggctcgagggcatgatgttctag

SEQ ID NO: 133478 - DNA, 1071 bp, Artificial Sequence
  derived and/or modified sequence
atgtccctttgggtagacaaatatcgcccatgcagcctgggaagactcgattaccataaagaacaagccgctcagctgcgcaatcttgtgcagtgcggggactttcctcaccttttggtgtatggtccaagtggggctgggaagaagacccggattatgtgcatcctccgagagctgtatggcgtcggggttgagaagctgcgaatcgaacaccaaaccattacgacacccagcaaaaaaaaaatcgaaatctctacaattgcttcgaattaccatctggaggtgaatccctcggatgccggaaattcagacagagtggtcatccaggagatgttaaaaaccgtcgcgcagtctcagcagttggaaactaacagccagcgtgatttcaaggtcgtgctgctgacagaggtggacaaactgaccaaggacgcacagcacgcgttgcgaaggacaatggagaagtatatgagtacgtgtaggctgatcttgtgttgtaattccaccagtaaagtgattcctcccataaggtccagatgcctggctgtgcgagtgcccgcaccaagcattgaggacatttgccatgtcctcagcacagtctgtaagaaggagggccttaatctacccagccagctcgctcatcggctcgccgaaaagtcctgcagaaatctccggaaggcattgctcatgtgcgaggcatgccgggtacagcagtacccgttcactgccgaccaggaaatccctgaaacggactgggaggtgtatttgcgcgaaacagcaaatgcaatcgtctcccagcagacccctcaaagactgttggaggtgcggggtcgattatatgaactgctgacccattgcattcccccagaaatcataatgaagggcttgctcagcgagttgttgcacaattgtgacggccagctgaaaggagaggtcgcccagatggctgcctattatgagcatagactgcagttagggtccaaggcaatttatcacctggaagccttcgttgcaaagttcatggcgctttataagaagttcatggaggatggcctagaggggatgatgttctag

SEQ ID NO: 133479 - DNA, 2402 bp, Artificial Sequence
  derived and/or modified sequence
tttacgcggccgcgaccggtagtgacgtcacgagatttggagctcgcgggaaaacttgtctctgcgttgtggggaggacgcgcgctcgcgcgggattttcaagcgtaggcccccgggaactcgagctgccatgagcctctgggtggacaagtatcggccctgctccttgggacggctggactatcacaaggagcaggcggcccagctgcggaacctggtgcagtgtggtgactttcctcatctgttagtgtacggaccatcaggtgctggaaaaaagacaagaattatgtgtattctacgtgaactttatggtgttggagtggaaaaattgagaattgaacatcagaccatcacaactccatctaaaaaaaaaattgaaattagcaccattgcaagtaactaccaccttgaagttaatcctagtgatgctggaaatagtgaccgagtagtcattcaggagatgttgaaaacagtggcacaatcacaacaacttgaaacaaactctcaaagggattttaaagtggtattattgacagaagttgacaaactcaccaaagatgctcagcatgccttgcgaagaaccatggaaaaatatatgtctacctgcagattgatcttgtgctgcaattctacatctaaagtgatcccacctattcgtagtaggtgcttggcggttcgtgtgcctgctcccagcattgaagatatttgccacgtgttatctactgtgtgtaagaaggaaggtctgaatcttccttcacaactggctcatagacttgcagagaagtcttgtagaaatctcagaaaagccctgcttatgtgtgaagcctgcagagtgcaacaatatccttttactgcagatcaagaaatccctgagacagattgggaggtgtatctgagggagactgcaaatgctattgtcagtcagcaaactccacaaaggctccttgaagttcgtggaaggctgtatgagcttctaactcattgtattcctcctgagataataatgaagggccttctctcagaactgttacataattgtgatggacaactgaaaggggaggtggcacaaatggcagcttactatgagcatcgtctacagctgggtagcaaagccatttatcacttggaagcgtttgtggccaaattcatggcactttataagaagttcatggaggatggattggaaggcatgatgttctgacttctgtcagttattcttgcaaagatttctcagtatcagtatttacatacagcttatattaaaagagctgtgggtaaattaactgaacttaatcatgtcgtatttgcgtttttttggtaataacttctctgtgaactattaatcatcctctgagttaaataattgctcctatactattgaagtatgtagttttgtacataacttagagactttagagtctaagaaaatgatcttaatttactttaagcattggttattcaagtattcattgttgatcctcctattctcttccgtctaatctctcacctgctaaaggagatttacacattagaaagcaaagattattttcatttatccagatgaccattttctgccacaggtaacatgattgtttgacacaccattatatttaattctagtttctctcaatgaataattgtatttttgtaggaaatgtaagatttcattctgaaacataattattggtatggacaaaattgcagataccatttctgttgaggctgcagatttccaacttttatttcagtggttcagattagtattaggtcggtactaagaaataagcatgttttcactaatttaagtacttgagactcttgaagaaaattcagaatgaagttctggagaaaggtatgttactgtagtaattactctttgaacaggttttgtgttttgtcattagctctgccctttttaattaaatattttggttcatggaccaaagggtttacttgacaaatttgtgtgacagactccgaacaattcctttactacgaagtataatttataaaataaaatatacccattttaagggtacagtttgatttttgaccagtgaaactatgatcccaatcaaggtatagatgccgtcaccccaaaaagttccctccatatccctttgcagtcagttcatccctaccctggcccagatgatcactgatcttgtcattatagatgagttttgccagttcaagaatttaatggaatcagatattgtaagcattcttgtgtaatacttcattctctctcattattgagattcatccatattgttgaatgtttcactagttaatgtttattgttcaatatttttgtatatacttttaaagcctattcacttgctgatggatctttggtttgtttccaggtttggttattatgaataaagttgctgtgaata

SEQ ID NO: 133480 - DNA, 1071 bp, Artificial Sequence
  derived and/or modified sequence
atgagcctgtgggtggacaagtacagaccctgcagcctgggcagactggactaccacaaggagcaggccgcccagctgagaaacctggtgcagtgcggcgacttcccccacctgctggtgtacggccccagcggcgccggcaagaagaccagaatcatgtgcatcctgagagagctgtacggcgtgggcgtggagaagctgagaatcgagcaccagaccatcaccacccccagcaagaagaagatcgagatcagcaccatcgccagcaactaccacctggaggtgaaccccagcgacgccggcaacagcgacagagtggtgatccaggagatgctgaagaccgtggcccagagccagcagctggagaccaacagccagagagacttcaaggtggtgctgctgaccgaggtggacaagctgaccaaggacgcccagcacgccctgagaagaaccatggagaagtacatgagcacctgcagactgatcctgtgctgcaacagcaccagcaaggtgatcccccccatcagaagcagatgcctggccgtgagagtgcccgcccccagcatcgaggacatctgccacgtgctgagcaccgtgtgcaagaaggagggcctgaacctgcccagccagctggcccacagactggccgagaagagctgcagaaacctgagaaaggccctgctgatgtgcgaggcctgcagagtgcagcagtaccccttcaccgccgaccaggagatccccgagaccgactgggaggtgtacctgagagagaccgccaacgccatcgtgagccagcagaccccccagagactgctggaggtgagaggcagactgtacgagctgctgacccactgcatcccccccgagatcatcatgaagggcctgctgagcgagctgctgcacaactgcgacggccagctgaagggcgaggtggcccagatggccgcctactacgagcacagactgcagctgggcagcaaggccatctaccacctggaggccttcgtggccaagttcatggccctgtacaagaagttcatggaggacggcctggagggcatgatgttctag

SEQ ID NO: 133481 - protein, 979 aa, Artificial Sequence
  derived and/or modified sequence
MATQAYTELQAAPPPSQPPQAPPQAQPQPPPPPPPAAPQPPQPPTAAATPQPQYVTELQSPQPQAQPPGGQKQYVTELPAVPAPSQPTGAPTPSPAPQQYIVVTVSEGAMRASETVSEASPGSTASQTGVPTQVVQQVQGTQQRLLVQTSVQAKPGHVSPLQLTNIQVPQQALPTQRLVVQSAAPGSKGGQVSLTVHGTQQVHSPPEQSPVQANSSSSKTAGAPTGTVPQQLQVHGVQQSVPVTQERSVVQATPQAPKPGPVQPLTVQGLQPVHVAQEVQQLQQVPVPHVYSSQVQYVEGGDASYTASAIRSSTYSYPETPLYTQTASTSYYEAAGTATQVSTPATSQAVASSGSMPMYVSGSQVVASSTSTGAGASNSSGGGGSGGGGGGGGGGGGGGSGSTGGGGSGAGTYVIQGGYMLGSASQSYSHTTRASPATVQWLLDNYETAEGVSLPRSTLYCHYLLHCQEQKLEPVNAASFGKLIRSVFMGLRTRRLGTRGNSKYHYYGLRIKASSPLLRLMEDQQHMAMRGQPFSQKQRLKPIQKMEGMTNGVAVGQQPSTGLSDISAQVQQYQQFLDASRSLPDFTELDLQGKVLPEGVGPGDIKAFQVLYREHCEAIVDVMVNLQFTLVETLWKTFWRYNLSQPSEAPPLAVHDEAEKRLPKAILVLLSKFEPVLQWTKHCDNVLYQGLVEILIPDVLRPIPSALTQAIRNFAKSLESWLTHAMVNIPEEMLRVKVAAAGAFAQTLRRYTSLNHLAQAARAVLQNTAQINQMLSDLNRVDFANVQEQASWVCRCEDRVVQRLEQDFKVTLQQQNSLEQWAAWLDGVVSQVLKPYQGSAGFPKAAKLFLLKWSFYSSMVIRDLTLRSAASFGSFHLIRLLYDEYMYYLIEHRVAQAKGETPIAVMGEFANLATSLNPLDPDKDEEEEEEEESEDELPQDISLAAGGESPALGPETLEPPAKLARTDARGLFVQALPSS

SEQ ID NO: 133482 - DNA, 4392 bp, Artificial Sequence
  derived and/or modified sequence
acagttgccccggtgagggaaacggaggcgccatagccacggtagtcgtggcgaccaagcaacccggcaacgcgagtcaacaacaacaaccgcccggccgacccccacccccaccccccaggcccggcccggggaccccagcacgtcccgtccccttcccaacatcgactccgagacctccgaaaagcgtttccgcagacagaagtggggagaagcggaggaattaaaaaaaaaaaaaagccttatttattatcattttccccaccgttggcatggcaacacaggcgtatactgagctacaggcagccccgccaccatcccagccgccacaggccccgccacaagcccagccccagccgccaccgccaccacccccagcggcaccccagcccccgcagccacccaccgctgctgccacccctcagccccaatatgtcaccgagctgcagagcccccagccccaggcacagccaccgggtggccagaagcagtacgtgacggagctcccggctgtacccgcaccctcgcagccaaccggtgcacccaccccttcgcctgcaccccagcagtacatcgtggtcactgtctctgaaggtgccatgcgggccagcgagacagtgtcggaggccagccccggctccaccgccagccagaccggcgttcctactcaggtggttcagcaggtgcagggcacccagcagcggctgctggtccagacgagcgtgcaggccaagccaggccacgtgtcgcccctccagctgaccaacatccaagtgccccagcaggctcttcccacgcagcgtctggtggtgcagagcgcagccccaggcagcaaaggtggccaggtctccctgacggtccatggtacccagcaggtgcactcgcccccagagcagtcgccggtgcaggccaacagctcttccagcaagacagccggggcccccacgggcacagtgccacagcagctgcaggtccacggcgtccagcagagtgtccccgtcacccaagagagatctgtggtccaggccactccacaagcgcccaaacccggcccggtgcagccgctgaccgtgcagggcctccagccagtccacgtggctcaagaggtgcagcagctccagcaggtgcccgtcccacacgtgtactccagccaggtgcagtatgtggagggcggcgatgccagctacacggccagtgccatccgttccagcacctactcctatcccgagacgccgctgtacacgcagacggcaagcaccagctactacgaggccgcaggcacggccacccaggtcagcacccccgccacctcccaggcggtggccagcagtggctccatgcccatgtacgtgtccggcagccaggtcgtcgccagctccaccagcactggggctggggccagcaacagcagcggaggtggtggcagtggtggtggcggcggcggcgggggaggcggtggcgggggtggcagtggcagcaccggaggcggcggcagcggagcaggcacctacgtgatccaaggcggctacatgctgggcagtgccagccagtcttactctcacaccacccgtgcctcgccagccacggtccagtggctcctggacaactatgagacggctgagggcgtgagtctgccacggagcaccctctactgccactacttactgcactgccaggagcagaagctggagcccgtcaacgccgcctccttcggcaagctcatccgctccgtcttcatgggcctgcgaacccgccgtctgggcaccaggggcaactccaagtaccactactatggcctgcgcatcaaggccagctcacccctgctgcggctgatggaggaccagcagcacatggccatgcggggccagcccttctcgcagaagcagaggctcaagcccatccagaagatggaaggcatgaccaacggcgtggcggtggggcagcagccgagcacggggctgtcggacatcagcgcccaggtgcagcagtaccagcaatttttggatgcctctcggagcctccctgacttcacagagctcgacctccagggcaaggtgctgcctgagggcgtcgggcccggggacatcaaagccttccaggtcctgtaccgggaacactgtgaggccattgtcgacgtcatggtgaacctgcagttcaccctggtggagacgctgtggaagaccttctggaggtacaacctcagccagcccagtgaggcgccaccgctggctgtacatgacgaggccgagaagcgactgcccaaagccatcctggtgctcctctccaagttcgagcccgtgctccaatggaccaagcactgtgacaacgtgctgtaccagggcctggtggaaatcctcattcccgacgtgctgcggcccatccccagtgccttgacccaagcgatccggaactttgccaagagcctggagagctggctcacccacgccatggtcaacatccccgaggagatgctgcgggtgaaggtggccgcggctggcgccttcgcgcagacactgcggcgctacacgtcgctcaaccacctggcgcaggcggcgcgcgctgtgctgcagaacaccgcacagatcaaccagatgctgagcgacctcaaccgcgtggacttcgccaacgtgcaggagcaggcctcgtgggtgtgccgctgcgaggaccgcgtggtgcagcggctggagcaggacttcaaggtgacgctgcagcagcagaactcgctggagcagtgggcggcctggctggacggcgtggtgagccaggtgctcaagccctaccagggcagcgccggcttccccaaggccgccaagctcttcctcctcaagtggtccttctacagctccatggtgatccgggacctgaccctgcgcagcgccgccagcttcggttccttccacctcatccggctgctctacgacgagtacatgtactacctgatcgagcaccgcgtagcccaggccaagggcgagacccccatcgccgtcatgggcgagttcgccaatctggccacctccctgaaccccctggaccccgacaaagacgaggaggaagaagaggaggaggagagcgaggacgagctgccgcaggacatctcactggcggctggcggcgagtcacccgcgctgggcccggagaccctggagccgccggccaagctggcgcggactgacgcgcgcggcctcttcgtgcaggcgctgccctccagctaagcccttggcctccccgccccacccgcccccgccacccctccacgccagggtccctcaaagcttctgtggcttcgtggtcactgctccagcctcagccagggcagggagggggactccgagacagggaagaccggggccctcctcccttatggggccggcacaatcagtgggctgggcggagccgcagctgcaaactctgacacaaaagacgtgccttaaggaacccgccgcgtgcccaggtgccccgcggggcatccagctcggccccttggccgcccccctcccaggccccagcgtcttctccccagccccgtcctcccaccaccccagggggcaggcaggcaggccccctcccgtgcgaaactgttaacttattcagctcgctggctttgcacagcctgtcctgggcccagccctgagccccgggccggcgcaggtgggcgtcacctggggactccccactgtcagcagcagccccgggacaccctacccccagcaaccccactgcttccccttcttggtattaagtgcaattaaagccgtgggtgtcgcatcttctccagcgctgggccctcccttgcccccaagctcaagaagggggcactgcccggcccggctgtgaggagggcggcagggggcacggcctccagcttccaaagagcagcgagccgcggagccggggagtgcccacagaccccagcccccgcgcccccgccctccgccgctggtttgtaatggaaccttttctgtgcccctatcttcccggagaccacgcttctcctccgtgccgtgcgacccccaccccatgactattgtgcgattcgtgagcgccgcccgagcggagttggtaacttgttgggtttttttccaaccatcatggccttatctgttccagttttctcagtgttttcagcctgtgagatagatgtttatggcaagaaaaaggaaaaaaaaatggaaatctgacctattgtataaaaatcactattttgtgtgctccgcgtgctatagcttttggggcggccctgcccagtccccgtgcccacggggctccctctcccggtggtgaaagtgtccacacgtgtggtagtctagtgtgccgagctgttttctacctttttgtagtctttcttaaaacaataaattccgctgtgatatttgcctaaaaaaaaaaaaaaaa

SEQ ID NO: 133483 - DNA, 2940 bp, Artificial Sequence
  derived and/or modified sequence
atggctacacaggcctacaccgaacttcaggctgctcccccaccttctcagccacctcaagctccaccccaggcgcagccccaaccaccccccccgcctccccctgccgcgccacagccccctcagcctccaactgctgccgctactccgcagccacaatacgtgactgagctgcagtctccccagccacaagctcagccgcccggggggcagaaacaatatgtgaccgagctgccagctgtccccgccccttcccagcccactggcgcacctacaccttcccccgctcctcagcagtacatcgtcgttacggtttcagaaggtgccatgagggcttctgagaccgtgagcgaggcaagccctggcagcaccgcttcccagacaggggtgcctacacaggtggtccaacaagtgcaggggacgcagcagaggctgctggtccagaccagtgttcaggctaaaccaggacacgtctccccactccagctgacgaatatccaggtgccacaacaggcccttcctacacagcgcctcgttgtccagtccgccgcccccggatccaaaggaggacaggtctccctgacggtgcacggcacacagcaggtccactctcccccggaacagtcccctgtgcaagctaattcttcttcttctaagactgccggcgctccaaccggcacggtgcctcagcagcttcaggtgcacggcgtccagcagtccgtgccagtgactcaggaacgctcggtggttcaggctacccctcaagcacctaagcccgggcccgtacagcctctgaccgtacaaggcttgcagcccgtccatgtggcccaggaagtccagcaactgcagcaagtgccagttccccacgtgtatagcagtcaggtgcagtatgtggagggtggtgatgctagttataccgcttccgccatacgatcttcaacatactcttatcctgaaacacccctgtatacacagacagccagtacatcgtactacgaggccgctggaactgccacccaggtgagtacccccgccaccagccaagccgttgcaagctctggcagtatgcccatgtacgtgtccggcagccaggtggtcgcgagctctacaagtacaggggctggcgcatctaactccagtggcggtggtggcagcggcggaggcgggggtggcggaggcgggggcggtggagggggctctggctctacgggcggcggtgggtccggtgctggcacatatgtaatccaaggaggttacatgttgggctccgctagccagtcttattcacatactacaagagccagtcccgccaccgtacaatggctgctggacaactatgagacagccgagggcgtcagtctccctcgttcaactctctattgccactatctgctgcactgccaggaacagaagttagagcctgtgaatgcagctagctttgggaaactgatccgatccgttttcatggggcttaggacacgcaggttggggacaaggggcaacagtaaataccattactacgggctgcggatcaaggcctcttccccactgttgcgactcatggaggatcagcagcacatggccatgcgtgggcagccattctcacagaagcaaagactcaaacccatacagaagatggagggcatgaccaatggggtggcagttggtcaacagccctcgaccggcttgtcagacatcagcgcccaagtccagcagtaccagcaatttctggacgcttctcggtcactccccgactttaccgagctggatcttcaaggaaaggtcttgccagaaggtgttgggccgggtgatatcaaagcatttcaggttctgtaccgggaacattgcgaggccattgtggacgtgatggtcaatcttcagtttaccctggtagaaaccctatggaaaactttctggcgatacaacctatctcaaccgtctgaggccccccccctcgcagtgcatgatgaagccgagaagcgcttgccaaaagccatcctggttctgcttagcaaattcgagcccgttctgcagtggaccaagcactgcgacaatgttctctaccaaggtcttgtggagatcctgatccctgacgtcctgcgccccatcccctctgccctcacccaggccattcgcaatttcgcaaaatccttagagagctggcttacccatgccatggtgaacattcccgaggagatgctgcgcgtgaaggtcgctgccgccggagcttttgcacagaccctgagacgctacacttcactcaatcaccttgcacaggcagcccgcgctgttttgcagaatactgctcagatcaatcagatgttgtccgatcttaacagggtagacttcgccaacgtccaggagcaggcttcttgggtgtgcagatgtgaggaccgtgtcgtgcagcgcttagagcaggattttaaagtaaccctccagcagcagaacagtctggagcagtgggcggcttggttggatggagttgtatctcaggtgctgaagccctatcagggcagcgctggcttccccaaggccgcaaaattgttccttcttaagtggtcattttacagttccatggtgatacgggatctgacactgcgctctgcagcctcctttgggtcctttcatctaattcgtctcctctacgatgaatatatgtattacctgatcgagcatagggtcgcacaggccaaaggcgagactcccatcgctgtcatgggcgagtttgctaatctcgcaacgagtctcaaccctcttgatcctgacaaggacgaggaagaggaggaggaagaagaatctgaagatgagctcccacaagatatatctctggctgccgggggagaatctccggcgttggggcctgagaccctggagcccccggcgaaactggcgcggacggacgctcgagggctcttcgttcaggccttgccttcttcctag

SEQ ID NO: 133484 - DNA, 2940 bp, Artificial Sequence
  derived and/or modified sequence
atggccacccaggcctacacagagctgcaggccgcccccccacccagccagcccccccaggccccaccccaggcccagccccagcccccacctcctcctcctcctgctgccccccagcccccccagcccccaacagctgctgccaccccccagccccagtatgtgacagagctgcagagcccccagccccaggcccagcccccaggcggccagaagcagtatgtgacagagctgcctgctgtgcctgcccccagccagcccaccggggcccccacccccagccctgccccccagcagtacatcgtggtgacagtgtctgagggcgccatgagggccagcgagaccgtgtctgaggccagccctggcagcacagccagccagacaggagtgcccacccaggtggtgcagcaggtgcagggcacccagcagaggctgctggtgcagacctctgtgcaggccaagccaggccacgtgagccccctgcagctgaccaacatccaggtgccccagcaggccctgcccacccagaggctggtggtgcagagcgctgcccctggcagcaagggcggccaggtgtccctgactgtgcacggcacccagcaggtgcacagccccccagagcagagccctgtgcaggccaacagcagcagcagcaagacagctggggcccccactggaacagtgccccagcagctgcaggtgcatggagtgcagcagagcgtgcctgtgacccaggagaggtctgtggtgcaggccaccccccaggcccccaagccaggccctgtgcagcccctgactgtgcagggcctgcagcctgtgcacgtggcccaggaggtgcagcagctgcagcaggtgcctgtgccccacgtgtacagcagccaggtgcagtatgtggagggcggagatgccagctacacagccagcgccatccgcagcagcacctacagctacccagagacccccctgtacacccagacagccagcaccagctactatgaggccgccggcacagccacccaggtgtccaccccagccaccagccaggccgtggccagcagcggctccatgcccatgtatgtgtctggcagccaggtggtggccagcagcaccagcactggagctggggccagcaacagcagcggcggcggcggcagcggcggcggcggcggcggcggcggcggcggcggcggcggcggcagcggcagcactggaggcggcggcagcggggccggcacctacgtgatccagggcggctacatgctgggcagcgccagccagagctacagccacaccacccgggccagccctgccaccgtgcagtggctgctggacaactatgaaacagctgagggcgtgtccctgcccaggagcaccctgtactgccactacctgctgcactgccaggagcagaagctggagcctgtgaatgctgccagctttgggaagctgatccgcagcgtcttcatgggcctgcggacccggcggctgggcacccggggcaacagcaagtaccactactacggcctgcgcatcaaggccagcagccccctgctgcggctgatggaggaccagcagcacatggccatgaggggccagcccttcagccagaagcagaggctgaagcccatccagaagatggagggcatgaccaatggagtggccgtgggccagcagcccagcacaggcctgagtgacatcagcgcccaggtgcagcagtaccagcagttcctggatgccagccgcagcctgcctgacttcacagagctggacctgcagggcaaggtgctgcctgagggcgtgggccctggggacatcaaggccttccaggtgctgtaccgggagcactgtgaggccatcgtggatgtgatggtgaacctgcagttcaccctggtggagaccctgtggaagaccttctggagatacaacctgagccagcccagcgaggccccacccctggccgtgcatgatgaggccgagaagaggctgcccaaggccatcctggtgctgctgagcaagtttgagcctgtgctgcagtggaccaagcactgtgacaacgtgctgtaccagggcctggtggagatcctgatcccagatgtgctgcggcccatccccagcgccctgacccaggccatccggaactttgccaagagcctggagagctggctgacccacgccatggtgaacatccctgaggagatgctgcgggtgaaggtggccgctgctggggcctttgcccagaccctgcggcgctacaccagcctgaaccacctggcccaggccgcccgggctgtgctgcagaacacagcccagatcaaccagatgctgagtgacctgaacagagtggactttgccaacgtgcaggagcaggcctcctgggtgtgccgctgtgaagatagagtggtgcagaggctggagcaggacttcaaggtgaccctgcagcagcagaacagcctggagcagtgggccgcctggctggatggagtggtgtcccaggtgctgaagccctaccagggcagcgctggcttccccaaggccgccaagctgttcctgctgaagtggagcttctacagctccatggtgatccgggacctgaccctgcggtctgctgccagctttggcagcttccacctgatccggctgctgtatgatgagtacatgtactacctgattgagcaccgggtggcccaggccaagggggagacccccatcgctgtgatgggagaatttgccaacctggccaccagcctgaaccccctggaccctgacaaggatgaggaggaggaggaggaggaggagagtgaagatgagctgccccaggacatcagcctggccgccggcggggagagccctgccctgggccctgagaccctggagcccccagccaagctggccaggacagatgcccggggcctgtttgtgcaggccctgcccagcagctag

SEQ ID NO: 133485 - DNA, 2940 bp, Artificial Sequence
  derived and/or modified sequence
atggccacccaggcctacaccgagctgcaggccgccccccccccctctcagccaccgcaggcaccacctcaggctcaacctcaacctccaccacctccgccgccagcagccccgcaaccccctcagccaccgaccgctgcggcaactccccagcctcagtatgttactgaattacagtcgcctcagcctcaagctcagcctcctgggggacagaagcagtatgtaaccgaattacctgccgtgcctgccccttcacagcctactggggcgcctaccccatcacctgctccccagcaatacattgtggtaacagtatctgaaggcgccatgcgcgcttcagagaccgttagtgaggccagcccaggaagcaccgcatcacagacgggggttccgacccaggtggtgcagcaagttcagggaacacagcagcggcttcttgtgcagacttccgtacaggccaagcctggtcacgtgtctcccctccagcttacaaacatccaggtgccacagcaggcactcccgactcagagactcgtggtgcagtccgccgctcctggatcgaagggcggccaggtatcactgaccgtgcacgggacccaacaggtccactcgccacctgaacagtctcccgtgcaggcaaattctagctctagcaaaacagccggcgctccaactggaaccgtgccacagcagctgcaagttcatggtgtccagcagtccgtgcccgtgacacaggaacgctctgttgtgcaggctaccccccaggctcctaagcccggacccgtgcagccccttaccgtgcagggcctgcagcccgtacacgttgcccaggaagtgcaacagctccagcaagtcccagtgccccacgtgtattcctcccaagtgcaatatgtcgagggcggcgacgcaagttatacagcatcagccatacgttcctcaacctactcctaccccgaaacccccctctacacccagaccgccagcacatcatactatgaggcagctggaaccgcgacacaggtcagcacacccgccactagccaagcagtggcgtcaagcggaagcatgccaatgtatgtgtccgggagccaagtggtggcttctagcacctcaaccggagctggggctagcaatagctccggcggtggcggatcagggggcggcgggggcggcggcggaggaggagggggggggggctcaggtagtacgggaggtggcggttcaggcgctggaacctacgtgattcagggaggttatatgttgggctcagcctcccagtcttattctcacacgacaagggcatcacctgctactgtgcagtggctcttggacaattatgagaccgccgaaggcgtgagcctgccccgctcaactctttattgccattatttgctgcactgccaggaacagaagctggagcccgtcaatgcggcttctttcggaaaactgattaggtctgtgttcatgggcctcagaactagacgcctgggcacaaggggaaacagcaaatatcattactatgggctgcgtatcaaggcctccagtccccttctgcgccttatggaggatcagcagcatatggcaatgcgggggcagccattcagtcagaaacaacgactcaaacctatacaaaaaatggaagggatgacaaacggtgtagctgtgggccaacagccttcaactggactttcagatattagtgctcaggtccagcagtaccagcaatttctggacgctagcagatctctcccagattttaccgaactcgacctgcaggggaaggtgctgcctgaaggcgtgggcccgggggacatcaaagcttttcaggtgctgtatcgggagcactgcgaggctattgtcgacgtgatggttaatctgcaattcacattagtagagacgctgtggaaaacgttttggaggtataatttatcacagccttcagaagccccaccgctcgccgtccatgacgaggccgaaaaaaggctgcccaaagcaattctcgtcttgctgtcgaagttcgaacctgttctgcagtggacgaagcactgcgacaacgtgctctaccagggcctggtggaaatcctgataccagatgttctgagacccatcccttccgcactcacccaggccatcaggaattttgccaaaagcctagaaagctggctgacccacgccatggtgaacatacctgaggaaatgctgagggttaaggttgctgccgccggggcttttgctcagaccctgagaaggtacacctccctcaaccatctggctcaagctgctcgggccgtgctccagaataccgcccagatcaaccagatgctcagcgacttgaacagggtagacttcgcaaacgtccaggagcaggccagctgggtctgtcgttgtgaggacagagtggtacagaggctggaacaagacttcaaggtgacactccagcagcaaaattccttggagcagtgggccgcctggctagatggagttgtgtcccaagtgctgaagccatatcagggatccgccggcttcccaaaggcagccaagctctttctgctcaagtggtctttctacagttctatggtaatcagggatctgaccctgcgttctgcagccagttttgggtcttttcatctcatccggttactttacgacgagtatatgtattacctgatcgaacatagagtcgcacaggccaagggagagacccctatagcagtaatgggcgagtttgctaatctcgccacgagcttgaaccctctcgacccagataaggacgaagaagaggaggaggaagaagaaagcgaggacgagctcccgcaggacatctccctcgccgcaggcggcgagagccctgccttggggccggagacattagaaccaccagcgaagctcgccaggacagatgccagaggactcttcgtccaggccctgccttcttcttag

SEQ ID NO: 133486 - DNA, 2940 bp, Artificial Sequence
  derived and/or modified sequence
atggctacccaagcatatacagagctccaggctgccccacccccttcccaaccccctcaagcccctccccaagcacagccacagcccccaccccctcctccccctgccgcaccccagcctccccagccacccacagcggctgctacaccacagccgcaatatgtgaccgagctgcagtccccacagccacaagctcagcctccagggggacaaaaacagtacgtcacagagctgcccgcagtgccagcaccatcacagcctaccggcgcacctactccttcgccagcacctcagcagtatatcgttgtcactgtaagcgagggagcaatgagagctagcgagactgtgagcgaggcctcaccaggatctactgcctcgcagactggagtcccaacccaggtggtccagcaggtgcaggggacccagcagagactcctggtacagacaagtgtccaagccaaaccgggtcatgtgagcccattacagcttaccaatatccaggtgcctcagcaggcccttccgacacaacgccttgtggtacagtccgcagccccaggctccaagggaggccaggtgagtttaaccgtgcacggaacgcaacaagtgcatagccccccagagcagagtccagtgcaggccaattccagctccagcaaaactgccggtgctcccaccggtactgttccgcagcagctgcaagtgcatggggtgcagcagagcgttccagtgactcaggagcgcagcgtggtgcaggctaccccccaggcccctaagcccggacccgtgcaacccctcacagtccaaggcctgcagccagttcatgttgcccaagaggtgcaacaactccagcaggtgccagtgccccacgtatatagctcacaggtccagtatgttgaaggaggtgacgcctcttatacagcctctgccattagaagctccacctactcttaccccgagacaccactgtatacccaaacggcctccactagctattacgaagccgctgggactgccacgcaggtatccacacctgctactagccaggctgtcgcaagcagcggctcaatgccaatgtacgttagcggttctcaggtcgtggcctctagcacgtccaccggtgctggggcttctaattcatccggtggagggggtagtgggggaggcggagggggaggcggaggcggtggtggcggtgggtcaggcagcaccggcggaggaggctcaggggctgggacttatgtcattcaaggtggatacatgctgggcagtgcctcacaatcttactctcacactacaagagccagccccgctacggttcagtggctactggacaactacgaaaccgccgaaggcgtctccttgcctagaagcacgctctactgtcactacctgctacattgtcaggagcaaaaactggaacccgtgaatgccgcttcttttggcaagctgattagaagcgttttcatgggcttgcgaactaggcgcctgggtacccgtggaaattcaaaataccattattatggcctacggatcaaagctagcagtcccttactgcgactgatggaggaccaacaacatatggctatgcgaggacagccgttttcccagaaacagagattgaagcctatccagaagatggaaggcatgaccaatggtgtggctgtcggacagcagccatccacagggctgtcggacatctccgcgcaggtgcagcagtatcagcagttcctcgacgcctcccgctctcttcccgattttaccgaactggacctgcaggggaaagtcctcccagaaggagttggccctggggatatcaaagcgtttcaagtgttataccgcgagcactgcgaagccatcgtggacgtgatggttaacctacagtttaccctcgtggagaccctgtggaagactttctggcgatacaacctgtcccagccgtcggaagcaccacccctcgccgttcacgacgaggctgagaagcgacttccgaaggctattttggtcctgctctcaaagttcgagcccgtgctgcagtggaccaagcattgtgataatgtgctgtaccaaggcctcgtggagatccttatccctgacgtgctgcggccaatccccagtgcccttacccaggccattagaaacttcgccaagagtttagagtcttggctcacacacgctatggtgaatattccagaagaaatgctgagggtgaaagtggccgctgcaggcgctttcgcacagaccctcaggagatatacttcactcaaccaccttgctcaggcggcaagggccgtgctccagaacacagctcagatcaatcaaatgctctccgacctgaacagggtggacttcgcaaacgtgcaggaacaagcctcctgggtgtgtcgctgcgaagatcgcgtggtccagcgactcgaacaggatttcaaggtcaccctgcaacagcaaaacagtcttgagcagtgggctgcttggctggatggagttgtctcccaggttctcaaaccttaccaggggtccgcgggattccctaaggctgccaagttatttctgcttaaatggagcttttactctagcatggtgattcgcgacttaacattgcgatccgctgccagcttcggcagcttccacttaatcaggctactgtatgatgaatacatgtactatttgatcgagcatcgagttgctcaggccaaaggagagacacccatcgcggtgatgggtgaattcgctaatctggctacctccctgaatcccctggacccagataaggatgaagaagaggaggaggaggaggagtcagaagatgagctcccccaagacatctctctggccgcagggggagaaagcccagctctgggaccggagaccctggaaccccctgccaaactcgctagaaccgatgccagagggctcttcgtgcaggccctcccgtcatcctag

SEQ ID NO: 133487 - DNA, 4376 bp, Artificial Sequence
  derived and/or modified sequence
acagttgccccggtgagggaaacggaggcgccatagccacggtagtcgtggcgaccaagcaacccggcaacgcgagtcaacaacaacaaccgcccggccgacccccacccccaccccccaggcccggcccggggaccccagcacgtcccgtccccttcccaacatcgactccgagacctccgaaaagcgtttccgcagacagaagtggggagaagcggaggaattaaaaaaaaaaaaaagccttatttattatcattttccccaccgttggcatggcaacacaggcgtatactgagctacaggcagccccgccaccatcccagccgccacaggccccgccacaagcccagccccagccgccaccgccaccacccccagcggcaccccagcccccgcagccacccaccgctgctgccacccctcagccccaatatgtcaccgagctgcagagcccccagccccaggcacagccaccgggtggccagaagcagtacgtgacggagctcccggctgtacccgcaccctcgcagccaaccggtgcacccaccccttcgcctgcaccccagcagtacatcgtggtcactgtctctgaaggtgccatgcgggccagcgagacagtgtcggaggccagccccggctccaccgccagccagaccggcgttcctactcaggtggttcagcaggtgcagggcacccagcagcggctgctggtccagacgagcgtgcaggccaagccaggccacgtgtcgcccctccagctgaccaacatccaagtgccccagcaggctcttcccacgcagcgtctggtggtgcagagcgcagccccaggcagcaaaggtggccaggtctccctgacggtccatggtacccagcaggtgcactcgcccccagagcagtcgccggtgcaggccaacagctcttccagcaagacagccggggcccccacgggcacagtgccacagcagctgcaggtccacggcgtccagcagagtgtccccgtcacccaagagagatctgtggtccaggccactccacaagcgcccaaacccggcccggtgcagccgctgaccgtgcagggcctccagccagtccacgtggctcaagaggtgcagcagctccagcaggtgcccgtcccacacgtgtactccagccaggtgcagtatgtggagggcggcgatgccagctacacggccagtgccatccgttccagcacctactcctatcccgagacgccgctgtacacgcagacggcaagcaccagctactacgaggccgcaggcacggccacccaggtcagcacccccgccacctcccaggcggtggccagcagtggctccatgcccatgtacgtgtccggcagccaggtcgtcgccagctccaccagcactggggctggggccagcaacagcagcggaggtggtggcagtggtggtggcggcggcggcgggggaggcggtggcgggggtggcagtggcagcaccggaggcggcggcagcggagcaggcacctacgtgatccaaggcggctacatgctgggcagtgccagccagtcttactctcacaccacccgtgcctcgccagccacggtccagtggctcctggacaactatgagacggctgagggcgtgagtctgccacggagcaccctctactgccactacttactgcactgccaggagcagaagctggagcccgtcaacgccgcctccttcggcaagctcatccgctccgtcttcatgggcctgcgaacccgccgtctgggcaccaggggcaactccaagtaccactactatggcctgcgcatcaaggccagctcacccctgctgcggctgatggaggaccagcagcacatggccatgcggggccagcccttctcgcagaagcagaggctcaagcccatccagaagatggaaggcatgaccaacggcgtggcggtggggcagcagccgagcacggggctgtcggacatcagcgcccaggtgcagcagtaccagcaatttttggatgcctctcggagcctccctgacttcacagagctcgacctccagggcaaggtgctgcctgagggcgtcgggcccggggacatcaaagccttccaggtcctgtaccgggaacactgtgaggccattgtcgacgtcatggtgaacctgcagttcaccctggtggagacgctgtggaagaccttctggaggtacaacctcagccagcccagtgaggcgccaccgctggctgtacatgacgaggccgagaagcgactgcccaaagccatcctggtgctcctctccaagttcgagcccgtgctccaatggaccaagcactgtgacaacgtgctgtaccagggcctggtggaaatcctcattcccgacgtgctgcggcccatccccagtgccttgacccaagcgatccggaactttgccaagagcctggagagctggctcacccacgccatggtcaacatccccgaggagatgctgcgggtgaaggtggccgcggctggcgccttcgcgcagacactgcggcgctacacgtcgctcaaccacctggcgcaggcggcgcgcgctgtgctgcagaacaccgcacagatcaaccagatgctgagcgacctcaaccgcgtggacttcgccaacgtgcaggagcaggcctcgtgggtgtgccgctgcgaggaccgcgtggtgcagcggctggagcaggacttcaaggtgacgctgcagcagcagaactcgctggagcagtgggcggcctggctggacggcgtggtgagccaggtgctcaagccctaccagggcagcgccggcttccccaaggccgccaagctcttcctcctcaagtggtccttctacagctccatggtgatccgggacctgaccctgcgcagcgccgccagcttcggttccttccacctcatccggctgctctacgacgagtacatgtactacctgatcgagcaccgcgtagcccaggccaagggcgagacccccatcgccgtcatgggcgagttcgccaatctggccacctccctgaaccccctggaccccgacaaagacgaggaggaagaagaggaggaggagagcgaggacgagctgccgcaggacatctcactggcggctggcggcgagtcacccgcgctgggcccggagaccctggagccgccggccaagctggcgcggactgacgcgcgcggcctcttcgtgcaggcgctgccctccagctaagcccttggcctccccgccccacccgcccccgccacccctccacgccagggtccctcaaagcttctgtggcttcgtggtcactgctccagcctcagccagggcagggagggggactccgagacagggaagaccggggccctcctcccttatggggccggcacaatcagtgggctgggcggagccgcagctgcaaactctgacacaaaagacgtgccttaaggaacccgccgcgtgcccaggtgccccgcggggcatccagctcggccccttggccgcccccctcccaggccccagcgtcttctccccagccccgtcctcccaccaccccagggggcaggcaggcaggccccctcccgtgcgaaactgttaacttattcagctcgctggctttgcacagcctgtcctgggcccagccctgagccccgggccggcgcaggtgggcgtcacctggggactccccactgtcagcagcagccccgggacaccctacccccagcaaccccactgcttccccttcttggtattaagtgcaattaaagccgtgggtgtcgcatcttctccagcgctgggccctcccttgcccccaagctcaagaagggggcactgcccggcccggctgtgaggagggcggcagggggcacggcctccagcttccaaagagcagcgagccgcggagccggggagtgcccacagaccccagcccccgcgcccccgccctccgccgctggtttgtaatggaaccttttctgtgcccctatcttcccggagaccacgcttctcctccgtgccgtgcgacccccaccccatgactattgtgcgattcgtgagcgccgcccgagcggagttggtaacttgttgggtttttttccaaccatcatggccttatctgttccagttttctcagtgttttcagcctgtgagatagatgtttatggcaagaaaaaggaaaaaaaaatggaaatctgacctattgtataaaaatcactattttgtgtgctccgcgtgctatagcttttggggcggccctgcccagtccccgtgcccacggggctccctctcccggtggtgaaagtgtccacacgtgtggtagtctagtgtgccgagctgttttctacctttttgtagtctttcttaaaacaataaattccgctgtgatatttgcct

SEQ ID NO: 133488 - DNA, 2940 bp, Artificial Sequence
  derived and/or modified sequence
atggccacccaggcctacaccgagctgcaggccgcccccccccccagccagcccccccaggcccccccccaggcccagccccagcccccccccccccccccccccgccgccccccagcccccccagccccccaccgccgccgccaccccccagccccagtacgtgaccgagctgcagagcccccagccccaggcccagccccccggcggccagaagcagtacgtgaccgagctgcccgccgtgcccgcccccagccagcccaccggcgcccccacccccagccccgccccccagcagtacatcgtggtgaccgtgagcgagggcgccatgagagccagcgagaccgtgagcgaggccagccccggcagcaccgccagccagaccggcgtgcccacccaggtggtgcagcaggtgcagggcacccagcagagactgctggtgcagaccagcgtgcaggccaagcccggccacgtgagccccctgcagctgaccaacatccaggtgccccagcaggccctgcccacccagagactggtggtgcagagcgccgcccccggcagcaagggcggccaggtgagcctgaccgtgcacggcacccagcaggtgcacagcccccccgagcagagccccgtgcaggccaacagcagcagcagcaagaccgccggcgcccccaccggcaccgtgccccagcagctgcaggtgcacggcgtgcagcagagcgtgcccgtgacccaggagagaagcgtggtgcaggccaccccccaggcccccaagcccggccccgtgcagcccctgaccgtgcagggcctgcagcccgtgcacgtggcccaggaggtgcagcagctgcagcaggtgcccgtgccccacgtgtacagcagccaggtgcagtacgtggagggcggcgacgccagctacaccgccagcgccatcagaagcagcacctacagctaccccgagacccccctgtacacccagaccgccagcaccagctactacgaggccgccggcaccgccacccaggtgagcacccccgccaccagccaggccgtggccagcagcggcagcatgcccatgtacgtgagcggcagccaggtggtggccagcagcaccagcaccggcgccggcgccagcaacagcagcggcggcggcggcagcggcggcggcggcggcggcggcggcggcggcggcggcggcggcagcggcagcaccggcggcggcggcagcggcgccggcacctacgtgatccagggcggctacatgctgggcagcgccagccagagctacagccacaccaccagagccagccccgccaccgtgcagtggctgctggacaactacgagaccgccgagggcgtgagcctgcccagaagcaccctgtactgccactacctgctgcactgccaggagcagaagctggagcccgtgaacgccgccagcttcggcaagctgatcagaagcgtgttcatgggcctgagaaccagaagactgggcaccagaggcaacagcaagtaccactactacggcctgagaatcaaggccagcagccccctgctgagactgatggaggaccagcagcacatggccatgagaggccagcccttcagccagaagcagagactgaagcccatccagaagatggagggcatgaccaacggcgtggccgtgggccagcagcccagcaccggcctgagcgacatcagcgcccaggtgcagcagtaccagcagttcctggacgccagcagaagcctgcccgacttcaccgagctggacctgcagggcaaggtgctgcccgagggcgtgggccccggcgacatcaaggccttccaggtgctgtacagagagcactgcgaggccatcgtggacgtgatggtgaacctgcagttcaccctggtggagaccctgtggaagaccttctggagatacaacctgagccagcccagcgaggccccccccctggccgtgcacgacgaggccgagaagagactgcccaaggccatcctggtgctgctgagcaagttcgagcccgtgctgcagtggaccaagcactgcgacaacgtgctgtaccagggcctggtggagatcctgatccccgacgtgctgagacccatccccagcgccctgacccaggccatcagaaacttcgccaagagcctggagagctggctgacccacgccatggtgaacatccccgaggagatgctgagagtgaaggtggccgccgccggcgccttcgcccagaccctgagaagatacaccagcctgaaccacctggcccaggccgccagagccgtgctgcagaacaccgcccagatcaaccagatgctgagcgacctgaacagagtggacttcgccaacgtgcaggagcaggccagctgggtgtgcagatgcgaggacagagtggtgcagagactggagcaggacttcaaggtgaccctgcagcagcagaacagcctggagcagtgggccgcctggctggacggcgtggtgagccaggtgctgaagccctaccagggcagcgccggcttccccaaggccgccaagctgttcctgctgaagtggagcttctacagcagcatggtgatcagagacctgaccctgagaagcgccgccagcttcggcagcttccacctgatcagactgctgtacgacgagtacatgtactacctgatcgagcacagagtggcccaggccaagggcgagacccccatcgccgtgatgggcgagttcgccaacctggccaccagcctgaaccccctggaccccgacaaggacgaggaggaggaggaggaggaggagagcgaggacgagctgccccaggacatcagcctggccgccggcggcgagagccccgccctgggccccgagaccctggagccccccgccaagctggccagaaccgacgccagaggcctgttcgtgcaggccctgcccagcagctag

SEQ ID NO: 133489 - protein, 707 aa, Artificial Sequence
  derived and/or modified sequence
MQTSETGSDTGSTVTLQTSVASQAAVPTQVVQQVPVQQQVQQVQTVQQVQHVYPAQVQYVEGSDTVYTNGAIRTTTYPYTETQMYSQNTGGNYFDTQGSSAQVTTVVSSHSMVGTGGIQMGVTGGQLISSSGGTYLIGNSMENSGHSVTHTTRASPATIEMAIETLQKSDGLSTHRSSLLNSHLQWLLDNYETAEGVSLPRSTLYNHYLRHCQEHKLDPVNAASFGKLIRSIFMGLRTRRLGTRGNSKYHYYGIRVKPDSPLNRLQEDMQYMAMRQQPMQQKQRYKPMQKVDGVADGFTGSGQQTGTSVEQTVIAQSQHHQQFLDASRALPEFGEVEISSLPDGTTFEDIKSLQSLYREHCEAILDVVVNLQFSLIEKLWQTFWRYSPSTPTDGTTITESSNLSEIESRLPKAKLITLCKHESILKWMCNCDHGMYQALVEILIPDVLRPIPSALTQAIRNFAKSLEGWLSNAMNNIPQRMIQTKVAAVSAFAQTLRRYTSLNHLAQAARAVLQNTSQINQMLSDLNRVDFANVQEQASWVCQCDDNMVQRLETDFKMTLQQQSTLEQWAAWLDNVMMQALKPYEGRPSFPKAARQFLLKWSFYSSMVIRDLTLRSAASFGSFHLIRLLYDEYMFYLVEHRVAQATGETPIAVMGEVREAERAVTHWVIKNKPELHFSLNTLLIKTMVPNQVSLRARRDCGVIARVP

SEQ ID NO: 133490 - protein, 195 aa, Artificial Sequence
  derived and/or modified sequence
MQTSETGSDTGSTVTLQTSVASQAAVPTQVVQQVPVQQQVQQVQTVQQVQHVYPAQVQYVEGSDTVYTNGAIRTTTYPYTETQMYSQNTGGNYFDTQGSSAQVTTVVSSHSMVGTGGIQMGVTGGQLISSSGGTYLIGNSMENSGHSVTHTTRASPATANSVPEMKLLRQITMNRLFPTLNHKLTEGSGPHFQSI

SEQ ID NO: 133491 - protein, 138 aa, Artificial Sequence
  derived and/or modified sequence
MLSDLNRVDFANVQEQASWVCQCDDNMVQRLETDFKMTLQQQSTLEQWAAWLDNVMMQALKPYEGRPSFPKAARQFLLKWSFYSSMVIRDLTLRSAASFGSFHLIRLLYDEYMFYLVEHRVAQATGETPIAVMGEVPM

SEQ ID NO: 133492 - protein, 156 aa, Artificial Sequence
  derived and/or modified sequence
VQQVQTVQQVQHVYPAQVQYVEGSDTVYTNGAIRTTTYPYTETQMYSQNTGGNYFDTQGSSAQVTTVVSSHSMVGTGGIQMGVTGGQLISSSGGTYLIGNSMENSGHSVTHTTRASPATANSVPEMKLLRQITMNRLFPTLNHKLTEGSGPHFQSI

SEQ ID NO: 133493 - protein, 138 aa, Artificial Sequence
  derived and/or modified sequence
MQTSETGSDTGSTVTLQTSVASQAAVPTQVVQQVPVQQQVQQVQTVQQVQHVYPAQVQYVEGSDTVYTNGAIRTTTYPYTETQMYSQNTGGNYFDTQGSSAQVTTVVSSHSMVGTGGIQMGVTGGQLISSSGGTYLIG

SEQ ID NO: 133494 - protein, 124 aa, Artificial Sequence
  derived and/or modified sequence
EQASWVCQCDDNMVQRLETDFKMTLQQQSTLEQWAAWLDNVMMQALKPYEGRPSFPKAARQFLLKWSFYSSMVIRDLTLRSAASFGSFHLIRLLYDEYMFYLVEHRVAQATGETPIAVMGEVPM

SEQ ID NO: 133495 - protein, 184 aa, Artificial Sequence
  derived and/or modified sequence
MQTSETGSDTGSTVTLQTSVASQAAVPTQVVQQVPVQQQVQQVQTVQQVQHVYPAQVQYVEGSDTVYTNGAIRTTTYPYTETQMYSQNTGGNYFDTQGSSAQVTTVVSSHSMVGTGGIQMGVTGGQLISSSGGTYLIGNSMENSGHSVTHTTRASPATIEMAIETLQKSDGLSTHRSSLLNSHV

SEQ ID NO: 133496 - DNA, 3275 bp, Artificial Sequence
  derived and/or modified sequence
cgtgcgagtgtctccctctccctctcgctctctctctctctccctctctctctctcttttgtgagttatagcaaccgttgccttgtgaatcaagcgccatagtcaccgtagtcctggcgactgttacccatcaacaacaactactcctctcctcctcctcctcctcttcctcctcctcctccccaccaccaccatctccatcacccaccaacaacaccacaataatccacagccaaggccacttggtcattctggcattttatggtagagaatacgttgagtttggctctggaaggaatatgagagaccatcatgcagacatcagagactgggtcggacacaggctcgacagtgaccttacaaacatctgtggctagtcaagcagcagtgcctacgcaggtggtacagcaagtaccagtacaacaacaggtacagcaggtacagactgtgcagcaggtacaacatgtctatcccgctcaggtgcagtatgtggaaggaagcgatactgtctataccaatggagcaatccgaacaacaacgtatccttacacagagacacagatgtacagccaaaatactggagggaattactttgatactcaagggagttccgcccaggtgactaccgtggtctcatcccacagtatggtgggcactggtgggattcagatgggcgtcacaggaggacaactcatcagcagctctggaggaacctatctgatcggcaactcaatggagaattctggtcactcagtgacacacacaactcgggcctccccagcgacaattgaaatggcgattgagacgctgcaaaagtctgacggtctgtccactcacagaagctctcttctcaacagccatctccagtggctgttggacaattatgagacagcagaaggagtgagccttcccagaagcactctgtacaaccactaccttcgacactgtcaggaacacaaactggacccagtcaatgctgcctcttttggaaaattaataagatcaatttttatggggctacgaaccaggagattgggcactagaggaaactccaaataccactactatgggattcgtgtcaagccagattcccctcttaatcgtctgcaagaagacatgcagtatatggctatgagacaacaacccatgcaacagaaacaaaggtacaagcctatgcagaaagtggatggggttgcagatggtttcacaggaagtggtcaacagacaggcacatctgttgagcaaactgtaattgcccaaagccaacatcatcaacagtttttagatgcatctcgagcacttccagagtttggagaagttgaaatctcttctctgccagatggtactacctttgaggatatcaagtcactgcagagtctttatagagagcactgtgaggcaatattggacgttgttgtgaatcttcaatttagcctgatagaaaaattgtggcaaacattctggcgctattctccctctactccaactgatggcactaccattaccgaatcgagcaatctgagtgaaatagaaagtcgacttccgaaagcaaagctgataactctgtgcaaacatgagtctatcctgaaatggatgtgtaactgtgaccatgggatgtaccaggctttggtggagattctcatccccgacgtccttagacctattcctagtgccttgacccaagccattcgaaattttgcaaaaagccttgaaggttggctttccaatgccatgaacaatattccacagagaatgatacaaaccaaggttgccgctgtaagtgcctttgcccagactctgcgaagatacacgtcgcttaatcacctggcccaggcagctcgtgcagtgcttcagaacacttcccaaatcaaccagatgcttagtgacctcaaccgtgtcgactttgccaatgtccaggagcaggcttcctgggtgtgccagtgtgatgacaacatggttcagagactagaaacagacttcaagatgactcttcagcagcagagcaccctggagcagtgggctgcgtggcttgacaatgtgatgatgcaagcactgaaaccctatgaaggaagacccagttttcctaaagccgccaggcagtttctgctaaaatggtctttctacagctcaatggttattcgggacttaaccttacgcagtgctgctagctttggctccttccacctgatccgtctactctacgacgaatatatgttttacttagtagaacatcgtgttgctcaggcaacaggagagactcctatagcagtcatgggcgaggtaagagaggctgaaagagctgtgacccactgggttattaaaaataagccagaattacacttcagtctaaatacattattgattaaaaccatggttcctaaccaagtcagcctcagagccaggagggactgtggagttattgcaagagttccttaaattcctctgttcttatgtgcttaatcaaaagattctaaaattgtggattatatcatgtgaaagttcatggaatgtgtctctatattatacaggtacctatgtaaaagaaaaacttgagaaccactggaatatgaaaaatattttaagtgggaaaaagattggtgctcctgataaagcaaagggctgggaatacaatggaaaggattaaatatgtattttgtagactctttcccggtctccaagaacaaagtaaatgattctattttagaaggataaaaatggtaatgatgataactaacattttttggacacttactatgtgcgaggcacagttctatgttttttacatgtaataaagcacttaatgcaagtctttgagatacgttctactttattctgttttacaataagcatccgaggtttatgcagaaagctaaggcacagaaaggttaaatgattactcagctaaaaaatggtagagatttttttttcaaacacagtctgattttcaaacccatatgcttctaaccactaatgatgtaagggggaaaattctcttcttcagaatttctgaatagtcatcaaaatggcttatcaaaaagcttaaactctgaatataacaagggctggttaatataatgaggaatagatgcaaatgctcagatggttcagcactggcttattttgttatattgaatgcaggaggcgggggtagtttataccttgtcgaatcataccagattattaaatgtgacaaattacccaaggcggtaaaaaagacatgttcacttttaagctatgtgtatgtgcttatataaataaaaaagagtgaaaacaga

SEQ ID NO: 133497 - DNA, 2124 bp, Artificial Sequence
  derived and/or modified sequence
atgcaaacttccgagacaggtagtgatacgggaagtacggtcacccttcagaccagcgtggcaagccaggcagccgtccctacgcaagtggtgcaacaggtgcctgtgcagcaacaagtacagcaggtgcagaccgtacagcaagtccagcacgtgtatcccgctcaagttcagtatgtggagggcagtgacacagtgtataccaacggggccatccgaaccacaacctatccatacactgaaacacagatgtacagccagaatactggtgggaattactttgatacacagggatccagtgcacaggtgacaacagtggtgtcatcccactcaatggtgggcacaggtgggatccagatgggcgtgactggcgggcagctcatttccagctctggcggaacttacctgattggtaattccatggaaaattccggtcattcagtgacccacaccacacgcgcgagtccagctactatagagatggccatcgaaaccctacagaaatcagacggcctgagtacacacagatcttcccttctcaattcccacctgcaatggttgctggacaactacgagacagcagagggggtgagcttgccaagaagtaccctgtataaccactacctgcgccattgtcaggagcacaagctagaccccgtaaacgctgctagcttcggcaagctgatcagatccatatttatggggttgcgaacaagaaggctcggaaccagaggcaattctaaatatcattactacggaatccgcgttaagcccgactcccctctcaatagactacaggaggacatgcagtatatggcaatgcgccagcagcctatgcagcagaaacagcggtacaagcccatgcagaaagtggatggggtcgccgatggttttactggaagtggccagcagaccgggacctctgtcgagcagactgtgatagcccagtcacagcaccaccaacagtttctcgacgcttcacgggccctcccagaatttggagaggtcgaaatttccagtcttcctgacggcactaccttcgaggatatcaagagcttgcagagtctgtaccgagaacattgcgaagctatcttggatgtggtggtaaatctccagttttcacttatcgaaaagctgtggcagaccttttggcggtactcaccttccactccgacggatggcaccactattaccgagagttcgaatctttctgagatcgaatctagactgccaaaggctaaattaattacactgtgtaagcacgaatccatcctgaagtggatgtgtaactgtgatcacggcatgtaccaagctctggttgaaattctcatccccgacgttctaaggcctatcccgagtgccctgacccaagctataaggaacttcgccaaatcgctggagggttggctctccaatgcgatgaacaatatccctcagaggatgatccagacaaaggtggctgcagtaagtgcctttgcgcagacgctgcggagatatacaagccttaatcacctggcacaggctgcccgcgccgttttgcagaacacttcccagattaatcaaatgctgagcgacttgaaccgcgtagactttgctaacgtgcaagaacaggcctcttgggtctgccagtgcgatgacaacatggttcagcgcctggagaccgatttcaaaatgaccctgcagcagcagagtaccttggagcagtgggctgcttggctcgacaacgtaatgatgcaggctctcaaaccctacgagggtcggccaagcttccctaaagcagccaggcagttcctgctgaagtggagcttttacagctccatggttatccgagatctgaccctgagaagcgccgcctccttcggctccttccaccttattcgcctcctgtacgacgagtacatgttctacctcgtagagcacagagtggcgcaggccaccggcgagactcctattgccgttatgggagaggtgagggaggcagagcgagctgtgacccactgggtgatcaagaacaagcccgagcttcacttcagcctgaacaccctgctgattaaaaccatggtgcctaatcaggtttcattgagagcccgaagagactgcggggtcattgctcgagtgccctag

SEQ ID NO: 133498 - DNA, 2124 bp, Artificial Sequence
  derived and/or modified sequence
atgcagacatctgagactggctctgatacaggctccactgttactctgcaaacatcggtcgcaagtcaagcggccgtgccaactcaggtggtccagcaggtccccgtacagcagcaagttcagcaggttcagacagtgcagcaggtgcagcatgtttatcccgctcaggtgcaatatgtggaggggtcagacactgtgtatacgaacggcgccattcgcacaaccacctacccgtacacggagacccagatgtatagccaaaacacgggcgggaattacttcgacacccagggttcttccgcacaagtgaccaccgtcgtgagcagccactctatggtgggaactggcggcatccagatgggcgtaaccgggggtcagcttatctcctccagtggtgggacctatctgatcgggaacagtatggagaactctggacatagcgtgacccacacgacaagagcaagccccgcaacaatcgagatggccattgagaccctgcagaaatcagacgggctgtctactcacagatcttcactgctaaatagccacctacagtggctgcttgacaactacgaaaccgctgagggggtatctcttccaaggagtacgttgtataatcactacttgcggcactgccaagagcataaactagaccctgtgaatgcagcttcatttggaaagttgatccggtccatcttcatgggcctgcgaactcggcgcctcgggacccgcgggaactcaaagtaccactactatggcattcgggtgaagcctgatagccccctcaacagactccaggaggatatgcagtatatggcaatgcgacagcagcccatgcagcagaaacagaggtacaaaccgatgcaaaaggtggatggtgtcgctgatggatttactggaagcgggcagcagacgggcacctctgtagaacagaccgtcatcgcccagagccagcatcatcagcaattccttgacgcaagcagggccttgccggagttcggggaggtggagatctcaagcttgccagacggcaccacttttgaggacattaaaagcctccaatcgctctacagagaacactgtgaagcaatcttggacgtggtcgtgaacctgcagttcagcctaatcgagaagctgtggcagacattttggcgttacagtccttcaactcccaccgatggcacaacaatcacagaaagctcaaacctgtcagagatcgaatccaggctgcccaaggcaaagctgatcaccctttgcaagcatgagtctatacttaagtggatgtgcaactgtgatcacggaatgtaccaggctctcgtggaaatcttgattccggatgttctccggcccatcccttcggcattgacccaagccataaggaattttgcaaaatcactcgagggctggctttcaaacgccatgaacaatattcctcagagaatgatccagacaaaagtggcagcagtgtcagcttttgcacagactttacgacggtatacaagcctgaatcacctcgcccaggcagcaagggcagtcctacagaacacatcccaaattaaccaaatgctctccgacttgaatagggtggactttgctaatgtgcaggagcaagcttcttgggtgtgtcagtgtgatgacaatatggtgcagcgcctggagactgattttaagatgacattacagcagcagtcaacgttagaacagtgggctgcttggctggacaatgtaatgatgcaagccctaaaaccttatgaaggtagaccatctttccctaaagctgcaaggcaattccttctgaagtggtccttttactcctccatggtcattagagatctgacactgcgtagcgctgctagttttggctcattccacttaattcgcctgttatacgatgaatatatgttttacctggtcgagcaccgcgtcgcgcaggctacgggggagacccccatcgccgtgatgggcgaggtcagagaagccgagagagctgtcacacattgggttataaaaaataaaccagagttgcactttagcctcaatacactactgattaagaccatggtccctaatcaggtgagcctcagggcccgaagggactgcggcgttatcgctagagttccgtag

SEQ ID NO: 133499 - DNA, 2124 bp, Artificial Sequence
  derived and/or modified sequence
atgcagaccagcgagaccggcagtgacaccggcagcacagtgaccctgcagacctctgtggccagccaggccgctgtgcccacccaggtggtgcagcaggtgcctgtgcagcagcaggtgcagcaggtgcagacagtgcagcaggtgcagcacgtgtacccagcccaggtgcagtatgtggagggcagtgacacagtgtacaccaatggagccatccgcaccaccacctacccctacacagagacccagatgtacagccagaacacaggaggcaactactttgacacccagggcagcagcgcccaggtgaccaccgtggtgagcagccacagcatggtgggcactggaggcatccagatgggcgtgactggaggccagctgatcagcagcagcggcggcacctacctgattggcaacagcatggagaacagcggccacagcgtgacccacaccacccgggccagccctgccaccatcgagatggccatcgagaccctgcagaagagtgatggcctgagcacccacaggagcagcctgctgaacagccacctgcagtggctgctggacaactatgaaacagctgagggcgtgtccctgcccaggagcaccctgtacaaccactacctgcggcactgccaggagcacaagctggaccctgtgaatgctgccagctttgggaagctgatccgcagcatcttcatgggcctgcggacccggcggctgggcacccggggcaacagcaagtaccactactacggcatccgggtgaagccagacagccccctgaaccggctgcaggaggacatgcagtacatggccatgaggcagcagcccatgcagcagaagcagcgctacaagcccatgcagaaggtggatggagtggctgatggcttcaccggcagcggccagcagacaggcacctctgtggagcagaccgtcatcgcccagagccagcaccaccagcagttcctggatgccagccgggccctgcctgagtttggagaggtggagatcagcagcctgcctgatggcaccacctttgaggacatcaagagcctgcagagcctgtaccgggagcactgtgaggccatcctggatgtggtggtgaacctgcagttcagcctcatcgagaagctgtggcagaccttctggagatacagccccagcacccccacagatggcaccaccatcacagagagcagcaacctgtctgaaattgagagccggctgcccaaggccaagctgatcaccctgtgcaagcatgagagcatcctgaagtggatgtgcaactgtgaccacggcatgtaccaggccctggtggagatcctgatcccagatgtgctgcggcccatccccagcgccctgacccaggccatccggaactttgccaagagcctggagggctggctgagcaatgccatgaacaacatcccccagaggatgatccagaccaaggtggccgctgtgtctgcctttgcccagaccctgcggcgctacaccagcctgaaccacctggcccaggccgcccgggctgtgctgcagaacaccagccagatcaaccagatgctgagtgacctgaacagagtggactttgccaacgtgcaggagcaggcctcctgggtgtgccagtgtgatgacaacatggtgcagaggctggagacagacttcaagatgaccctgcagcagcagagcaccctggagcagtgggccgcctggctggacaacgtgatgatgcaggccctgaagccctatgagggccggcccagcttccccaaggccgcccggcagttcctgctgaagtggagcttctacagctccatggtgatccgggacctgaccctgcggtctgctgccagctttggcagcttccacctgatccggctgctgtatgatgagtacatgttctacctggtggagcaccgggtggcccaggccaccggggagacccccatcgctgtgatgggagaggtgcgggaggccgagagagctgtgacccactgggtgatcaagaacaagccagagctgcacttcagcctgaacaccctgctgatcaagaccatggtgcccaaccaggtgtccctgcgggcccggcgggactgtggggtgattgcccgggtgccctag

SEQ ID NO: 133500 - DNA, 2971 bp, Artificial Sequence
  derived and/or modified sequence
agaccatcatgcagacatcagagactgggtcggacacaggctcgacagtgaccttacaaacatctgtggctagtcaagcagcagtgcctacgcaggtggtacagcaagtaccagtacaacaacaggtacagcaggtacagactgtgcagcaggtacaacatgtctatcccgctcaggtgcagtatgtggaaggaagcgatactgtctataccaatggagcaatccgaacaacaacgtatccttacacagagacacagatgtacagccaaaatactggagggaattactttgatactcaagggagttccgcccaggtgactaccgtggtctcatcccacagtatggtgggcactggtgggattcagatgggcgtcacaggaggacaactcatcagcagctctggaggaacctatctgatcggcaactcaatggagaattctggtcactcagtgacacacacaactcgggcctccccagcgacaattgaaatggcgattgagacgctgcaaaagtctgacggtctgtccactcacagaagctctcttctcaacagccatctccagtggctgttggacaattatgagacagcagaaggagtgagccttcccagaagcactctgtacaaccactaccttcgacactgtcaggaacacaaactggacccagtcaatgctgcctcttttggaaaattaataagatcaatttttatggggctacgaaccaggagattgggcactagaggaaactccaaataccactactatgggattcgtgtcaagccagattcccctcttaatcgtctgcaagaagacatgcagtatatggctatgagacaacaacccatgcaacagaaacaaaggtacaagcctatgcagaaagtggatggggttgcagatggtttcacaggaagtggtcaacagacaggcacatctgttgagcaaactgtaattgcccaaagccaacatcatcaacagtttttagatgcatctcgagcacttccagagtttggagaagttgaaatctcttctctgccagatggtactacctttgaggatatcaagtcactgcagagtctttatagagagcactgtgaggcaatattggacgttgttgtgaatcttcaatttagcctgatagaaaaattgtggcaaacattctggcgctattctccctctactccaactgatggcactaccattaccgaatcgagcaatctgagtgaaatagaaagtcgacttccgaaagcaaagctgataactctgtgcaaacatgagtctatcctgaaatggatgtgtaactgtgaccatgggatgtaccaggctttggtggagattctcatccccgacgtccttagacctattcctagtgccttgacccaagccattcgaaattttgcaaaaagccttgaaggttggctttccaatgccatgaacaatattccacagagaatgatacaaaccaaggttgccgctgtaagtgcctttgcccagactctgcgaagatacacgtcgcttaatcacctggcccaggcagctcgtgcagtgcttcagaacacttcccaaatcaaccagatgcttagtgacctcaaccgtgtcgactttgccaatgtccaggagcaggcttcctgggtgtgccagtgtgatgacaacatggttcagagactagaaacagacttcaagatgactcttcagcagcagagcaccctggagcagtgggctgcgtggcttgacaatgtgatgatgcaagcactgaaaccctatgaaggaagacccagttttcctaaagccgccaggcagtttctgctaaaatggtctttctacagctcaatggttattcgggacttaaccttacgcagtgctgctagctttggctccttccacctgatccgtctactctacgacgaatatatgttttacttagtagaacatcgtgttgctcaggcaacaggagagactcctatagcagtcatgggcgaggtaagagaggctgaaagagctgtgacccactgggttattaaaaataagccagaattacacttcagtctaaatacattattgattaaaaccatggttcctaaccaagtcagcctcagagccaggagggactgtggagttattgcaagagttccttaaattcctctgttcttatgtgcttaatcaaaagattctaaaattgtggattatatcatgtgaaagttcatggaatgtgtctctatattatacaggtacctatgtaaaagaaaaacttgagaaccactggaatatgaaaaatattttaagtgggaaaaagattggtgctcctgataaagcaaagggctgggaatacaatggaaaggattaaatatgtattttgtagactctttcccggtctccaagaacaaagtaaatgattctattttagaaggataaaaatggtaatgatgataactaacattttttggacacttactatgtgcgaggcacagttctatgttttttacatgtaataaagcacttaatgcaagtctttgagatacgttctactttattctgttttacaataagcatccgaggtttatgcagaaagctaaggcacagaaaggttaaatgattactcagctaaaaaatggtagagatttttttttcaaacacagtctgattttcaaacccatatgcttctaaccactaatgatgtaagggggaaaattctcttcttcagaatttctgaatagtcatcaaaatggcttatcaaaaagcttaaactctgaatataacaagggctggttaatataatgaggaatagatgcaaatgctcagatggttcagcactggcttattttgttatattgaatgcaggaggcgggggtagtttataccttgtcgaatcataccagattattaaatgtgacaaattacccaaggcggtaaaaaagacatgttcacttttaagctatgtgtatgtgcttatataaataaaaaagagtgaaaacaga

SEQ ID NO: 133501 - DNA, 2124 bp, Artificial Sequence
  derived and/or modified sequence
atgcagaccagcgagaccggcagcgacaccggcagcaccgtgaccctgcaaacaagcgtggcctcccaggccgctgttccaacccaagttgtgcagcaagtaccggtgcagcagcaggttcaacaggtgcaaaccgtccaacaagttcagcatgtgtacccggcacaggtgcaatatgtggagggctccgataccgtctatactaatggagccatcaggacaaccacgtatccttatactgaaacccaaatgtattcgcagaacaccgggggtaattacttcgatacccaggggtcctcggctcaggttaccacagtggtgagcagccactctatggtgggcaccgggggcatccagatgggggtgaccggaggacagctgatttcaagttctggggggacatacttaattggaaacagtatggaaaattctggacatagcgtcactcacaccactcgggcttctcctgcgactatcgagatggctattgagacactccagaagagcgacgggctttcaacgcataggtcgagtctcctgaattcccacttgcaatggctgctggacaactacgagacagctgagggggtgagcttgcctcgtagcactttatataatcattatcttagacactgtcaggaacataagcttgacccagttaacgccgcatccttcggcaagttgattaggtcaatttttatgggtcttcgtactaggagactgggaactagaggtaactcaaaataccattactatggtatccgagttaagccggattcaccgttgaacaggctgcaggaggacatgcaatatatggcaatgcgccaacagcccatgcagcaaaagcaaagatacaagcccatgcaaaaagtagatggcgttgccgacggctttacaggaagcggccagcagacgggtacttctgtagagcaaaccgtgattgctcaatcacaacatcaccagcagttccttgatgcttctagggcccttcccgagttcggggaggtggagatctctagtctgcccgacggaactacttttgaggatataaagtccctacagagcctctatcgagaacactgtgaagccattctggatgtcgtggtgaacttacagttttctttgatagaaaagctgtggcagactttctggaggtactctccttctacccccaccgatgggaccactatcactgaatccagcaacctgtcggagatcgagtcaagactgcccaaggccaaactgatcacgttatgcaaacacgagagcattctcaagtggatgtgcaactgcgaccacgggatgtaccaagcgctcgtggagattcttatcccagatgtgctccggccaatcccatcggccctgacccaggcgatccgcaatttcgcaaaatcactcgagggctggctgagcaacgcaatgaataatatccctcaaaggatgatacagacaaaagtggcggcagtttccgctttcgcgcagacactgagacgctacacctctctgaatcacctggctcaggccgctcgggcagtattacagaatacgtctcaaatcaatcaaatgctgtccgatcttaatagagttgacttcgccaatgtgcaggaacaagccagttgggtgtgccagtgcgacgacaacatggtgcagagactggagactgatttcaagatgacacttcagcagcagtctactctcgaacagtgggctgcctggttagacaacgtaatgatgcaggccctgaagccctatgaagggcgaccgtcctttccaaaagccgcccggcagttcctcctcaagtggagcttttactcctccatggtgatccgagacctcacactgagaagcgctgccagtttcgggtccttccatttaattagattactgtatgatgaatatatgttctacctggtcgagcaccgggtcgcccaggccacaggagagacacccatcgccgtcatgggcgaggttcgggaagccgagcgcgctgtgacccactgggtgatcaagaataagcccgaactccacttcagccttaacaccctgctcatcaagactatggtgcctaaccaggtgtctctgcgggcacgccgcgactgtggcgtgatcgcacgcgtgccatag

SEQ ID NO: 133502 - DNA, 2124 bp, Artificial Sequence
  derived and/or modified sequence
atgcagaccagcgagaccggcagcgacaccggcagcaccgtgaccctccagacctctgttgcatcccaggccgctgtgccaacccaagtggttcaacaggttcccgtccagcagcaggtgcaacaggtgcaaactgtgcagcaggtacagcacgtctacccagcccaagtccagtacgtggagggctctgacacagtgtacactaacggggcgatcaggaccaccacttatccatatactgaaacccagatgtactctcagaacacaggaggcaattacttcgacacacagggctcaagtgcccaagtgactaccgtggtgagctcacattccatggtagggacggggggaatccaaatgggtgtgacaggaggacaactcatctcatccagtggcggtacgtacctgataggcaacagtatggaaaacagcggccacagtgtgacccataccactagggcatccccagcgaccatcgagatggccattgagacactgcagaaaagcgacggcctgagtacccaccgctcttcactcctgaattcccatttgcagtggctgctggataactatgagaccgcagaaggagtatccctgccccgcagcaccctttacaatcactacctgagacactgtcaggaacacaaattggatcccgtgaatgccgcaagctttgggaagcttatccgtagtattttcatggggctcagaaccagaagacttggcacgaggggaaatagcaagtaccactactacgggattcgagttaagcctgactcccctctcaaccgcctccaggaagacatgcagtatatggccatgcgccagcaacccatgcagcagaagcagagatacaagccaatgcaaaaagtggacggcgtggctgatgggttcaccgggtctgggcagcaaaccgggaccagcgtagaacagaccgtaatagcacaatcccagcatcatcagcaatttcttgatgctagccgggccctcccagaattcggtgaggtggagattagctccctgccagatggtactacattcgaggatataaagtccctccagtctctatatcgtgagcattgcgaagccatactcgatgtcgtcgttaatcttcagtttagtctcatcgagaaactttggcagaccttttggcgctatagcccatcaaccccgacggacggcaccaccatcacggagagcagtaatctctctgagattgagagcagactgccaaaggccaagctgatcactctctgtaagcatgaaagtattctaaagtggatgtgcaactgtgatcatggcatgtaccaggcattagtagagatcctcatccccgacgtgctaagaccaataccatctgcgctgacacaagccatcaggaacttcgctaaatcactggagggctggttgtccaacgcaatgaataatatcccacagcgcatgatccaaaccaaagtcgctgctgtgtcagctttcgcccagacactgaggcggtacacctctctcaaccaccttgcccaggcggcccgggccgtcttacagaacacgtctcaaatcaatcagatgctctccgacctgaaccgtgtggatttcgctaatgttcaggagcaggctagttgggtgtgccagtgcgacgataacatggttcaacgcctagaaactgacttcaaaatgactcttcaacagcaaagcaccctcgaacaatgggctgcttggctggacaacgtcatgatgcaagctctgaagccctatgagggcaggccatcatttcccaaggctgcaaggcaatttctgctcaagtggtcattctattccagcatggttatacgcgacctaactctccgttcagcggcaagcttcggctcattccacctgataaggctgctgtacgatgaatacatgttctatctggtcgaacatagagtggcccaggctaccggcgaaaccccaatcgccgtaatgggcgaagttagggaagccgagagggcagtgacccattgggtgatcaagaacaagcccgagctgcactttagcctgaataccctcctgatcaagaccatggtgcccaaccaagtttctctgcgagccaggagagactgcggggtcattgcccgtgttccctag

SEQ ID NO: 133503 - DNA, 2124 bp, Artificial Sequence
  derived and/or modified sequence
atgcagacatcagaaactgggtctgacaccggatctaccgtgacccttcaaacctcagtcgctagccaagcggcagttcctactcaagtggttcagcaggtgccagtgcagcaacaggtccagcaggtccagaccgtgcaacaagtgcagcacgtctatcccgctcaagttcaatatgtggagggctccgacacagtgtacaccaacggcgcaatcagaaccacaacatatccctacaccgaaactcagatgtacagccagaacaccgggggtaattatttcgatactcagggatcctctgcccaggtgacaaccgtggtctcatcccatagcatggtgggcacagggggtatccagatgggggttacgggaggacagctaatcagtagtagcggtggcacgtatctcatcggaaattccatggaaaattctggccatagcgtgactcataccacacgcgcttctcccgcaacaattgagatggctattgaaaccctgcagaagtccgacgggttgagcactcaccgcagtagtctcctcaattcccacctacagtggctcctggacaattatgagaccgccgagggagtgagtctcccaagatctacgctctataaccattaccttaggcactgtcaggaacacaaactagaccccgttaatgccgcatcattcggcaagttgatacggagcatctttatgggactgcgcaccaggagactagggactagaggtaattccaagtaccactactatggtatccgcgtgaagccagattcccctctcaatcgtctgcaggaggatatgcagtatatggcgatgcgccaacaacctatgcaacagaaacaacgttacaagccaatgcagaaagtcgatggggtggccgacggattcacgggatccggacaacagaccggcaccagtgtggagcaaacagtcatcgcccagagccagcatcaccagcaattcttggatgcgtcccgggctttgccggagtttggagaagttgagattagctcactgcctgacggaacaacatttgaagatatcaagagcttgcaatcgctgtacagggagcattgtgaggctatcttagacgtggtggtgaatttgcaattctccctcattgaaaagctatggcaaacgttctggaggtacagtcccagtacccctacagatggaaccaccataacagagagcagcaacctgtctgagatcgagagcagactcccgaaagctaagttgataactctgtgtaagcatgaatcaatcctcaaatggatgtgtaactgcgaccatggaatgtaccaggccctcgttgagattctgattccagacgtgctacggcctatcccatccgcacttactcaggcaattagaaactttgccaagtctctggagggttggctgagtaacgccatgaataacatcccacagcgcatgatacagactaaggtcgccgctgtctctgcctttgctcagaccttgcgtaggtacacctcgctcaaccacctggctcaggccgctcgagcggtgctgcaaaatacatcccagattaaccagatgctgtcggaccttaatagagttgatttcgctaacgtgcaggagcaagcctcatgggtgtgtcagtgtgatgacaatatggtgcagcgattggaaactgacttcaaaatgactttacaacagcagagcactctggagcaatgggccgcatggcttgataatgtgatgatgcaggccctgaagccatacgaaggaaggccttcatttccaaaggctgccagacagtttctgcttaagtggtccttctattctagcatggtgatcagggatctgacgctgcggtccgcagcttccttcgggtccttccacttaataagactgctgtacgatgagtacatgttttaccttgtagagcatagggtggcccaggcgaccggcgagacccccatagctgtgatgggggaggtcagagaggctgaacgagcggtgacacattgggtgattaaaaataagcccgagctgcatttctctctcaataccctgctgattaaaaccatggtccccaatcaagtcagcctccgtgcaagacgcgattgtggcgtgatcgcccgtgtgccatag

SEQ ID NO: 133504 - DNA, 2124 bp, Artificial Sequence
  derived and/or modified sequence
atgcagacatcagagaccggctcagatactggctctacagttacgttgcagacctctgtggcgagtcaggccgcagtccctacacaggtggtgcagcaggtgcctgtgcagcagcaggtccagcaagttcagaccgtgcaacaggttcagcacgtgtaccccgctcaagtgcagtatgtggagggatcagatacggtttataccaatggggcaatccgcacaaccacttacccctataccgaaacccagatgtacagccagaacactggagggaactatttcgatacacaaggaagttcagcccaggtgacaaccgtggtgtcgtcccacagtatggtcggcactggtggcattcaaatgggggtaaccggaggccagctgatatccagctcagggggaacatatctcataggtaacagtatggaaaactccggacactctgtgacacataccacgagggccagccccgctaccatagaaatggccattgaaactctgcaaaagagtgatggactgagcacgcataggtcaagcctactcaacagtcaccttcagtggctgttggacaattacgagactgcagagggggtgagcctgccaaggagcactctctataaccattacctcagacactgccaggagcacaagcttgatccagtgaatgcggcatcatttggtaaactgattcgctctatcttcatgggacttaggacccgacggctcggaaccaggggcaattccaaataccactattacgggatacgggtcaaacccgactctcccctcaatcgtcttcaggaggacatgcagtacatggccatgcgtcaacagccaatgcaacagaagcagcggtacaaacccatgcaaaaggtagatggggtggctgatgggtttaccggcagcggccagcagactggcactagcgttgaacagaccgtgattgcccaaagccagcaccaccagcaattcctggatgcctctagagctttgccagaattcggcgaggtcgaaatcagttcgcttcctgacggaacaacttttgaagacattaaaagcctccagtccctgtaccgcgagcactgtgaagctattctggacgtggtggtgaacctacagttttccttaatcgaaaagctctggcagaccttctggcgctattctcccagtactcccactgatggcacgacaattaccgaaagctctaacctgagtgagatcgagtccagactgcccaaggctaagctaatcactttatgtaaacatgagagcatactgaagtggatgtgcaattgcgaccatggcatgtatcaggctttggtggagatcctgattcctgacgttctgagaccaatcccaagtgccctgacccaagcaatcagaaacttcgctaagagcctggagggatggctgtcaaacgcaatgaacaacatcccccaacggatgattcaaacaaaagttgccgcagtgtcagctttcgctcaaactctgcgtcggtatacctctctaaatcatctcgctcaggctgcccgtgctgtgttacagaatacttcccaaatcaatcagatgctctccgatttgaacagagtggacttcgcaaatgtccaagaacaggcttcatgggtgtgtcagtgtgacgacaacatggtccagaggctcgagacagattttaagatgactctccagcagcaatctacactcgaacagtgggctgcctggctggacaatgttatgatgcaggccctgaagccctacgagggccgaccctcatttcccaaggccgctcgccagtttctccttaaatggtctttttattctagtatggtcatacgggatctaactttgagaagtgctgcgagcttcgggtccttccatttaatcaggttgctctatgatgaatacatgttctatctagtggagcaccgagtcgcacaggcaactggggaaactcccatcgccgtgatgggggaggtgcgggaggcggagcgggctgtgacccactgggtcatcaagaataagcccgagctacatttcagcttaaacacactgctgattaagacaatggttccaaaccaggtctccctgcgcgctagacgggactgtggcgtgattgcacgtgttccttag

SEQ ID NO: 133505 - DNA, 2124 bp, Artificial Sequence
  derived and/or modified sequence
atgcagaccagcgagaccggcagcgacaccggcagcaccgtgaccctgcagaccagcgtggccagccaggccgccgtgcccacccaggtggtgcagcaggtgcccgtgcagcagcaggtgcagcaggtgcagaccgtgcagcaggtgcagcacgtgtaccccgcccaggtgcagtacgtggagggcagcgacaccgtgtacaccaacggcgccatcagaaccaccacctacccctacaccgagacccagatgtacagccagaacaccggcggcaactacttcgacacccagggcagcagcgcccaggtgaccaccgtggtgagcagccacagcatggtgggcaccggcggcatccagatgggcgtgaccggcggccagctgatcagcagcagcggcggcacctacctgatcggcaacagcatggagaacagcggccacagcgtgacccacaccaccagagccagccccgccaccatcgagatggccatcgagaccctgcagaagagcgacggcctgagcacccacagaagcagcctgctgaacagccacctgcagtggctgctggacaactacgagaccgccgagggcgtgagcctgcccagaagcaccctgtacaaccactacctgagacactgccaggagcacaagctggaccccgtgaacgccgccagcttcggcaagctgatcagaagcatcttcatgggcctgagaaccagaagactgggcaccagaggcaacagcaagtaccactactacggcatcagagtgaagcccgacagccccctgaacagactgcaggaggacatgcagtacatggccatgagacagcagcccatgcagcagaagcagagatacaagcccatgcagaaggtggacggcgtggccgacggcttcaccggcagcggccagcagaccggcaccagcgtggagcagaccgtgatcgcccagagccagcaccaccagcagttcctggacgccagcagagccctgcccgagttcggcgaggtggagatcagcagcctgcccgacggcaccaccttcgaggacatcaagagcctgcagagcctgtacagagagcactgcgaggccatcctggacgtggtggtgaacctgcagttcagcctgatcgagaagctgtggcagaccttctggagatacagccccagcacccccaccgacggcaccaccatcaccgagagcagcaacctgagcgagatcgagagcagactgcccaaggccaagctgatcaccctgtgcaagcacgagagcatcctgaagtggatgtgcaactgcgaccacggcatgtaccaggccctggtggagatcctgatccccgacgtgctgagacccatccccagcgccctgacccaggccatcagaaacttcgccaagagcctggagggctggctgagcaacgccatgaacaacatcccccagagaatgatccagaccaaggtggccgccgtgagcgccttcgcccagaccctgagaagatacaccagcctgaaccacctggcccaggccgccagagccgtgctgcagaacaccagccagatcaaccagatgctgagcgacctgaacagagtggacttcgccaacgtgcaggagcaggccagctgggtgtgccagtgcgacgacaacatggtgcagagactggagaccgacttcaagatgaccctgcagcagcagagcaccctggagcagtgggccgcctggctggacaacgtgatgatgcaggccctgaagccctacgagggcagacccagcttccccaaggccgccagacagttcctgctgaagtggagcttctacagcagcatggtgatcagagacctgaccctgagaagcgccgccagcttcggcagcttccacctgatcagactgctgtacgacgagtacatgttctacctggtggagcacagagtggcccaggccaccggcgagacccccatcgccgtgatgggcgaggtgagagaggccgagagagccgtgacccactgggtgatcaagaacaagcccgagctgcacttcagcctgaacaccctgctgatcaagaccatggtgcccaaccaggtgagcctgagagccagaagagactgcggcgtgatcgccagagtgccctag

SEQ ID NO: 133506 - protein, 295 aa, Artificial Sequence
  derived and/or modified sequence
MAETSALPTGFGELEVLAVGMVLLVEALSGLSLNTLTIFSFCKTPELRTPCHLLVLSLALADSGISLNALVAATSSLLRVSHRRWPYGSDGCQAHGFQGFVTALASICSSAAIAWGRYHHYCTRSQLAWNSAVSLVLFVWLSSAFWAALPLLGWGHYDYEPLGTCCTLDYSKGDRNFTSFLFTMSFFNFAMPLFITITSYSLMEQKLGKSGHLQVNTTLPARTLLLGWGPYAILYLYAVIADVTSISPKLQMVPALIAKMVPTINAINYALGNEMVCRGIWQCLSPQKREKDRTK

SEQ ID NO: 133507 - DNA, 888 bp, Artificial Sequence
  derived and/or modified sequence
atggcagaaacaagcgctctccctaccggcttcggtgagctagaagtgttggctgtcggcatggtgctgttagtggaggccctgagtggactgagcttgaatacattaactattttcagcttttgcaagacccccgagctacgcactccatgtcatctattagtactgtccctcgcactggcagattctgggataagcctgaacgccctggtggctgccaccagcagcctgttacgcgtgagtcaccggagatggccctacgggtcggacggatgtcaggcccacgggtttcagggattcgttactgccctggcctctatttgttcctctgccgcgatcgcgtgggggaggtatcaccattactgtacccgcagtcagcttgcctggaattccgctgtaagcctcgtgctctttgtttggctttcgagtgctttctgggcagccctgcccctgctcggctggggccattatgattacgagcccctcgggacttgttgcacgcttgattattcaaaaggtgaccggaatttcacatcgtttttgttcactatgagcttctttaattttgctatgcctttattcattactatcacctcatacagtcttatggagcagaagctcgggaaaagcggccatcttcaggtgaataccaccctccctgccagaactctcctgcttggctgggggccgtacgcaattctttacctttacgccgttattgctgacgtcaccagcattagcccgaaactccaaatggtcccagccctcatcgccaagatggtgcccaccatcaacgcaattaattatgcactcgggaacgaaatggtttgtcgggggatttggcagtgtctgtcaccacagaagcgggagaaggatcgtaccaagtag

SEQ ID NO: 133508 - DNA, 363 bp, Artificial Sequence
  derived and/or modified sequence
atggccgaaactagtgcactcccaacagggttcggtgagctggaagtgttagccgttgggatggtgctgttggtggaggatccgggggcagcggatagtctgcctcccacgggcgcggagttgggctcctgcggacagtgggaccagcccgaatgccctcggtgctcccacatccagcccagcccttgcttgcctcaggctctcgccttgcgccttggccgattgcccgggagtcgtctgcccggcctctgtgatagcgttggtcagcacctgcagcagtgctcgcatcgaatgggcgcccttagccccttgttgcatcccccgaagtgctgccatagaagtcatcattttgagtggagatag

SEQ ID NO: 133509 - DNA, 888 bp, Artificial Sequence
  derived and/or modified sequence
atggccgagaccagcgccctgcccactggatttggagagctggaggtgctggccgtgggcatggtgctgctggtggaggccctgagcggcctgagcctgaacaccctgaccatcttctccttctgcaagaccccagagctgcggaccccctgccacctgctggtgctgagcctggccctggccgacagcggcatcagcctgaatgccctggtggccgccaccagcagcctgctgcgggtgagccaccggcgctggccctacggcagtgatggctgccaggcccacggcttccagggctttgtgacagccctggccagcatctgcagcagcgctgccatcgcctggggccgctaccaccactactgcaccaggagccagctggcctggaacagcgctgtgtccctggtgctgtttgtgtggctgagcagcgccttctgggccgccctgcccctgctgggctggggccactatgactatgagcccctgggcacctgctgcaccctggactacagcaagggggacaggaacttcaccagcttcctgttcaccatgtccttcttcaactttgccatgcccctcttcatcaccatcaccagctacagcctgatggagcagaagctgggcaagagcggccacctgcaggtgaacaccaccctgcctgcccggaccctgctgctgggctggggcccctatgccatcctgtacctgtatgctgtgattgctgatgtgaccagcatcagccccaagctgcagatggtgcctgccctgattgccaagatggtgcccaccatcaatgccatcaactatgccctgggcaatgagatggtgtgccggggcatctggcagtgcctgagcccccagaagcgggagaaggacaggaccaagtag

SEQ ID NO: 133510 - DNA, 888 bp, Artificial Sequence
  derived and/or modified sequence
atggccgagaccagcgccctgcccaccggcttcggcgagctggaggtcctggccgtgggaatggtgctcctggtcgaggctctctccgggttatccttgaacactctaacaatcttttctttctgtaagacgcctgagctgcggaccccttgtcaccttctggtccttagcctagctttagccgactccgggattagcctgaatgcactggttgcagcaactagctcgcttcttcgggtatcccaccggcgatggccctacgggtctgacgggtgtcaggctcacggctttcagggattcgtgaccgctctggcctctatctgcagctcagcagcaatcgcctggggacgctatcatcattactgcacaaggagccagcttgcctggaatagtgcagttagtctagttctgtttgtctggttgtcttccgcattttgggctgccctgcccctgttagggtggggtcattacgactacgagccactcgggacatgctgcaccttggattactcgaaaggggatcgtaatttcacctcattccttttcacaatgagcttttttaacttcgcaatgcctctatttatcaccattaccagctacagcctgatggaacagaagcttgggaaaagtggacatctccaggtcaacactaccttgcccgcaagaacacttctgctggggtggggtccttacgctatcttatatctgtacgctgtgattgcagatgtgaccagcatcagcccgaagcttcagatggtccctgccttaattgctaagatggtgcccacaatcaatgccatcaactatgctctcggaaacgagatggtgtgcagaggaatatggcaatgccttagccctcagaagcgcgagaaggacagaactaagtag

SEQ ID NO: 133511 - DNA, 363 bp, Artificial Sequence
  derived and/or modified sequence
atggccgagaccagcgccctgcccaccggcttcggcgagctggaggtcctggctgtgggcatggtcctgctggtcgaggatcccggcgctgcggattctctgccccccacgggggccgagcttgggtcttgcggccagtgggatcagcccgaatgcccacgttgcagtcatatccagccttctccatgtctgcctcaagccctcgcccttaggctgggccgcctccctggaagcagactcccaggtctctgcgacagcgtgggacaacaccttcaacagtgttcccacaggatgggtgctctgagcccactgctacaccccccgaagtgttgtcatcgaagtcatcactttgaatggcgatag

SEQ ID NO: 133512 - DNA, 888 bp, Artificial Sequence
  derived and/or modified sequence
atggccgaaacctctgcgctgccaactggctttggggagttggaagtgctggccgtcgggatggttctgctcgttgaggctctttctggactctcgctgaatacactgacaattttctcattctgcaagacgcctgaacttaggaccccttgtcatttgcttgtccttagtctggccttggcagactctggaattagtcttaatgccctggtagccgcaacttctagtctgctgagagtgtcccatcggcgatggccatacggctccgacgggtgccaggcacatggcttccagggttttgtgacggccctggccagtatctgctcgtctgccgctatagcatggggcagataccatcactactgtactagaagtcagttggcctggaatagcgcggtgtctttggtcctctttgtgtggttgtcatcggcattctgggccgctttgcctcttttgggctgggggcactatgactacgaacctctcggcacctgctgcactctagactacagcaagggtgatcgcaatttcacttcttttttgttcactatgagttttttcaacttcgcaatgcccctttttattacaataacctcatatagtctgatggagcagaagctggggaaatctggtcatctgcaggtgaacacaacactgccagctcgaactctgctcctcgggtgggggccttatgccatcctgtacctgtatgctgtgatagccgatgtcacttctatttcgcccaaacttcagatggtgcctgctctaatagctaaaatggtgcccacgataaacgccataaattatgctctaggtaatgaaatggtgtgccgcggaatctggcaatgtctcagccctcagaaacgggaaaaagataggacgaaatag

SEQ ID NO: 133513 - DNA, 363 bp, Artificial Sequence
  derived and/or modified sequence
atggctgagacgtctgcgctcccaacgggattcggcgaactcgaggtgttagccgtgggcatggtgctgttggttgaggatcccggtgcagctgacagccttccgccaaccggggcagaactcggttcctgcgggcagtgggatcagcccgagtgtccaagatgcagtcatatccagccctctccctgcctccctcaggctctggccctgagattaggccgacttccaggctctcggctgccagggctgtgtgacagcgtcggccagcacctgcagcagtgttcccatcggatgggcgctctgagtcccctactgcacccgccaaagtgttgtcaccgatcgcaccatttcgagtggcgatag

SEQ ID NO: 133514 - DNA, 2247 bp, Artificial Sequence
  derived and/or modified sequence
agagacagctgggccactggcagtgagggagagtgaggatggcagagaccagtgccctgcccactggcttcggggagctcgaggtgctggctgtggggatggtgctactggtggaagctctctccggtctcagcctcaataccctgaccatcttctctttctgcaagaccccggagctgcggactccctgccacctactggtgctgagcttggctcttgcggacagtgggatcagcctgaatgccctcgttgcagccacatccagccttctccgtgtctcccacaggcgctggccctacggctcggacggctgccaggctcacggcttccagggctttgtgacagcgttggccagcatctgcagcagtgcagccatcgcatgggggcgttatcaccactactgcacccgtagccagctggcctggaactcagccgtctctctggtgctcttcgtgtggctgtcttctgccttctgggcagctctgccccttctgggttggggtcactacgactatgagccactggggacatgctgcaccctggactactccaagggggacagaaacttcaccagcttcctcttcaccatgtccttcttcaacttcgccatgcccctcttcatcacgatcacttcctacagtctcatggagcagaaactggggaagagtggccatctccaggtaaacaccactctgccagcaaggacgctgctgctcggctggggcccctatgccatcctgtatctatacgcagtcatcgcagacgtgacttccatctcccccaaactgcagatggtgcccgccctcattgccaaaatggtgcccacgatcaatgccatcaactatgccctgggcaatgagatggtctgcaggggaatctggcagtgcctctcaccgcagaagagggagaaggaccgaaccaagtgagcctgccaccctggagtgagccccaggccaggaggctgttccaggagtcctgcccagcagcctcagtggccaagcccagacactcacccaccttccccagtggccccgtggatcctggtcctaggctggacacaggattcagaaagacaccaggctgcacagaaagagccagatggacctgagtgtcggtcacagccccctacactcaaggctgagaggcctcaggaaagtcattcctttttaaaaataataataaatgtaagggggtacagtgcagttttgttacatggatagattgcctagtggtgaagtctgggcttttagtgtaaccatcaccctaataatatacgttgtacccattaagttatttctcatccctcaccccctcccaccttgtcacccttctgagtctccaatgtctattattccacactccatgtccacgtgtacacattatttagctcccacttacaagtgagaacatgtggtatttgactttctgtttttgagttatttcacttaaaataatgacctccagtttcatccatgttgctgcaaaagacatgatctcgttcttttttatggcagtgtagtattccattccatatacatatataaacgttatatatatgtaacgttttctttatccaatcatctgttgatggatagattccatatctttgctactgtaaacagctgtgataagcatacaagtgcaggtttctttttgatatactgatttcttttcctttgggtagataccagtagtaggactgctggatcaaatggtagctctatttttaagacagtatggagaaatcaccatactgttttccataggggttgtactaatttacagtcccaccaacagtgtataggtgttcccttttctctgcatccttaccaatatctgtaattttttgactttttaataatagccattctcacttgtgtgagataaggtctcattgtggttttaatttccatttctctgatgacttttgatgttaagcattttttcatatgcttcttagccacgtgtatgtattctttttgaaaaaatgtttattcatgtcttttgcccactttttaatggcattatttggattttttttgttgagttatttgagtttcttatatattctggataatagtctggataatatattctggataatatataatagtcttatatattctggatatattctggatacatggtttgcaaatattttctccggttctgcacgttgttcattctgttgatggtttattttgctgtgcagaaacttttttagtttaattaagtcccatttgtcta

SEQ ID NO: 133515 - DNA, 868 bp, Artificial Sequence
  derived and/or modified sequence
tgaggatggcagagaccagtgccctgcccactggcttcggggagctcgaggtgctggctgtggggatggtgctactggtggaagaccccggagctgcggactccctgccacctactggtgctgagcttggctcttgcggacagtgggatcagcctgaatgccctcgttgcagccacatccagccttctccgtgtctcccacaggcgctggccctacggctcggacggctgccaggctcacggcttccagggctttgtgacagcgttggccagcatctgcagcagtgcagccatcgcatgggggcgttatcaccactactgcacccgccaaaatgctgccatcggtctcatcattttgagtggcgataggttagccctcttgtccacttggcctcagagcacttctcccactccttacatcccagcccctgcccctaatgctcccttggaccatcttatacacacacacacacacacacacacacacacacacacaccaccttctcagatagcaacaggcttctctgcctcaatatagaacagttaatccctgtgccagaggccttagatcaaagccctttctatactgagagcatggcagagcagtgtgaaggcaggcaaaggggaatgaggaggtctgaattcatctactccatccctgggtggttgtaggcatgtcaccttggccatctgtttctaaagctgaaagtctgaggcagcacaatggtccaggtagatattaattattgtgcccacagagaattgtttgaacctggaaggcagaggttgcagtgagctgagatggcaccactgcactccagcctgggcaacagaatgagactccgcctcaataaaaaaaaaaaaaaaaa

SEQ ID NO: 133516 - DNA, 888 bp, Artificial Sequence
  derived and/or modified sequence
atggccgagaccagcgccctgcccaccggcttcggcgagctggaggtgctggccgtgggcatggtgctgctggtggaggccctgagcggcctgagcctgaacaccctgaccatcttcagcttctgcaagacccccgagctgagaaccccctgccacctgctggtgctgagcctggccctggccgacagcggcatcagcctgaacgccctggtggccgccaccagcagcctgctgagagtgagccacagaagatggccctacggcagcgacggctgccaggcccacggcttccagggcttcgtgaccgccctggccagcatctgcagcagcgccgccatcgcctggggcagataccaccactactgcaccagaagccagctggcctggaacagcgccgtgagcctggtgctgttcgtgtggctgagcagcgccttctgggccgccctgcccctgctgggctggggccactacgactacgagcccctgggcacctgctgcaccctggactacagcaagggcgacagaaacttcaccagcttcctgttcaccatgagcttcttcaacttcgccatgcccctgttcatcaccatcaccagctacagcctgatggagcagaagctgggcaagagcggccacctgcaggtgaacaccaccctgcccgccagaaccctgctgctgggctggggcccctacgccatcctgtacctgtacgccgtgatcgccgacgtgaccagcatcagccccaagctgcagatggtgcccgccctgatcgccaagatggtgcccaccatcaacgccatcaactacgccctgggcaacgagatggtgtgcagaggcatctggcagtgcctgagcccccagaagagagagaaggacagaaccaagtag

SEQ ID NO: 133517 - protein, 209 aa, Artificial Sequence
  derived and/or modified sequence
MRAAAISTPKLDKMPGMFFSANPKELKGTTHSLLDDKMQKRRPKTFGMDMKAYLRSMIPHLESGMKSSKSKDVLSAAEVMQWSQSLEKLLANQTGQNVFGSFLKSEFSEENIEFWLACEDYKKTESDLLPCKAEEIYKAFVHSDAAKQINIDFRTRESTAKKIKAPTPTCFDEAQKVIYTLMEKDSYPRFLKSDIYLNLLNDLQANSLK

SEQ ID NO: 133518 - DNA, 630 bp, Artificial Sequence
  derived and/or modified sequence
atgcgcgcagccgctattagtaccccaaagctcgacaagatgccagggatgtttttcagcgcgaatccaaaggagttgaagggaacgactcactcattgctggatgacaaaatgcagaaacgtcgccccaagaccttcggaatggatatgaaggcctatctgagatctatgatcccccatctggagtcaggcatgaaatcctctaagtccaaggacgtgctgagtgccgctgaggtcatgcagtggtctcagtcgttagagaaactcttggcaaaccagaccggacagaacgtctttggtagcttcctgaagtcagagttctcggaagaaaatatcgagttctggctggcctgtgaagattataaaaagactgaaagcgatttgctgccttgcaaggccgaagagatttacaaagcgtttgtgcacagcgatgctgctaaacagattaacatagacttccggactcgagagagcacagccaagaagatcaaggctccaactcccacctgcttcgatgaggcgcagaaggttatctacacactaatggaaaaagacagctatcctcgattcctcaagagcgacatctacttaaatttgttgaatgacttacaagctaactcattgaagtag

SEQ ID NO: 133519 - DNA, 630 bp, Artificial Sequence
  derived and/or modified sequence
atgagagctgctgccatcagcacccccaagctggacaagatgcctggcatgttcttcagcgccaaccccaaggagctgaagggcaccacccacagcctgctggatgacaagatgcagaagagaagacccaagaccttcggcatggacatgaaggcctacctgcgctccatgatcccccacctggagagcggcatgaagagcagcaagagcaaggatgtgctgtctgctgctgaggtgatgcagtggagccagagcctggagaagctgctggccaaccagacaggccagaatgtgtttggcagcttcctgaagtctgagttcagcgaggagaacatcgagttctggctggcctgtgaggactacaagaagacagaaagtgacctgctgccctgcaaggccgaggagatctacaaggcctttgtgcacagtgatgctgccaagcagatcaacatcgacttccgcacccgggagagcacagccaagaagatcaaggcccccacccccacctgctttgatgaggcccagaaggtgatctacaccctgatggagaaggacagctacccccgcttcctgaagagtgacatctacctgaacctgctgaatgacctgcaggccaacagcctgaagtag

SEQ ID NO: 133520 - DNA, 630 bp, Artificial Sequence
  derived and/or modified sequence
atgcgggccgccgccatcagcacccccaagctggacaagatgcccggcatgtttttttccgccaaccccaaagaattgaagggaaccacacatagtctgctggatgacaaaatgcagaagcggagacctaagacattcggtatggatatgaaagcctatctaagatcaatgattccccatctcgagtccgggatgaagtccagcaagtctaaggacgtcctgtctgcagctgaagtgatgcagtggtcccaatccctggaaaagctcttagccaaccaaactgggcagaatgtgttcggaagcttcctgaagagcgagttctccgaagaaaacattgaattttggctcgcttgcgaagactataagaaaaccgagtcagacctcctaccctgcaaggctgaggagatatacaaggctttcgtccactccgacgccgctaaacaaattaatatcgattttagaactcgggaatcgactgctaagaagatcaaagccccaacccctacatgcttcgatgaggcccagaaagtgatatacacattgatggaaaaggatagctatcccagatttctgaagtccgacatctacctcaacctgctcaacgacttgcaggccaattcactcaaatag

SEQ ID NO: 133521 - DNA, 630 bp, Artificial Sequence
  derived and/or modified sequence
atgcgcgctgcagccatatccaccccaaaactggacaagatgcctgggatgttcttctctgccaatcctaaggaactcaagggaaccacccattccctcctggacgataaaatgcagaaacgccgacccaaaacatttggtatggatatgaaagcatacctgaggtcaatgatcccacacttggaatccggcatgaagagtagtaagagtaaagacgttctgagtgcagccgaagtaatgcaatggtcgcaatctctggaaaaactgctggctaatcaaaccggacagaatgtgttcgggtccttcctaaaaagcgaattcagtgaagagaatatcgagttttggttagcctgcgaggattataaaaagactgagtctgatctcctgccctgcaaagccgaggagatctataaagcctttgtgcactcagacgcagctaagcagatcaatatcgattttaggacccgagaatcaactgccaagaagatcaaagctcccacgccaacctgcttcgatgaagcccagaaagtcatttacacactcatggagaaagactcttaccccagattcctgaagagtgatatatatctcaatctgctgaacgatctgcaggccaatagcctcaaatag

SEQ ID NO: 133522 - DNA, 1405 bp, Artificial Sequence
  derived and/or modified sequence
gcctgtctgcattctactatataaagcagcagagacgttgactagcgcatatttgctaagagcaccatgcgcgcagcagccatctccactccaaagttagacaaaatgccaggaatgttcttctctgctaacccaaaggaattgaaaggaaccactcattcacttctagacgacaaaatgcaaaaaaggaggccaaagacttttggaatggatatgaaagcatacctgagatctatgatcccacatctggaatctggaatgaaatcttccaagtccaaggatgtactttctgctgctgaagtaatgcaatggtctcaatctctggaaaaacttcttgccaaccaaactggtcaaaatgtctttggaagtttcctaaagtctgaattcagtgaggagaatattgagttctggctggcttgtgaagactataagaaaacagagtctgatcttttgccctgtaaagcagaagagatatataaagcatttgtgcattcagatgctgctaaacaaatcaatattgacttccgcactcgagaatctacagccaagaagattaaagcaccaacccccacgtgttttgatgaagcacaaaaagtcatatatactcttatggaaaaggactcttatcccaggttcctcaaatcagatatttacttaaatcttctaaatgacctgcaggctaatagcctaaagtgactggtccctggctgaagggaattaacagatagtatcaagcgcagaaggaatgtgccagtatggctccctgggtgaacagcttggccttttttgggtgtcttgacaggccaagaagaacaaatgactcagaatggattaacatgaaagttatccaggcgcagagttgaagaagcataagcaagacaaaaacagagagaccgcagaaggaggaagatactgtggtactgtcataaaaaacagtggagctctgtattagaaagcccctcagaactgggaaggccaggtaactctagttacacagaaactgtgactaaagtctatgaaactgattacaacagactgtaagaatcaaagtcaactgacatctatgctacatattattatatagtttgtactgagctattgaagtcccattaacttaaagtatatgttttcaaattgccattgctactattgcttgtcggtgttattttattttattgtttttgactttggaagagatgaactgtgtatttaacttaagctattgctcttaaaaccagggagtcagaatatatttgtaagttaaatcattggtgctaataataaatgtggattttgtattaaaatatatagaagcaatttctgtttacatgtccttgctacttttaaaaacttgcatttattcctcagattttaaaaataaataaataattcatttaagattctt

SEQ ID NO: 133523 - DNA, 630 bp, Artificial Sequence
  derived and/or modified sequence
atgagagccgccgccatcagcacccccaagctggacaagatgcccggcatgttcttcagcgccaaccccaaggagctgaagggcaccacccacagcctgctggacgacaagatgcagaagagaagacccaagaccttcggcatggacatgaaggcctacctgagaagcatgatcccccacctggagagcggcatgaagagcagcaagagcaaggacgtgctgagcgccgccgaggtgatgcagtggagccagagcctggagaagctgctggccaaccagaccggccagaacgtgttcggcagcttcctgaagagcgagttcagcgaggagaacatcgagttctggctggcctgcgaggactacaagaagaccgagagcgacctgctgccctgcaaggccgaggagatctacaaggccttcgtgcacagcgacgccgccaagcagatcaacatcgacttcagaaccagagagagcaccgccaagaagatcaaggcccccacccccacctgcttcgacgaggcccagaaggtgatctacaccctgatggagaaggacagctaccccagattcctgaagagcgacatctacctgaacctgctgaacgacctgcaggccaacagcctgaagtag

SEQ ID NO: 133524 - protein, 211 aa, Artificial Sequence
  derived and/or modified sequence
MQSAMFLAVQHDCRPMDKSAGSGHKSEEKREKMKRTLLKDWKTRLSYFLQNSSTPGKPKTGKKSKQQAFIKPSPEEAQLWSEAFDELLASKYGLAAFRAFLKSEFCEENIEFWLACEDFKKTKSPQKLSSKARKIYTDFIEKEAPKEINIDFQTKTLIAQNIQEATSGCFTTAQKRVYSLMENNSYPRFLESEFYQDLCKKPQITTEPHAT

SEQ ID NO: 133525 - DNA, 636 bp, Artificial Sequence
  derived and/or modified sequence
atgcagagcgccatgttcctggccgtgcagcacgactgcagacccatggacaagagcgccggcagcggccacaagagcgaggagaagagagagaagatgaagagaaccctgctgaaggactggaagaccagactgagctacttcctgcagaacagcagcacccccggcaagcccaagaccggcaagaagagcaagcagcaggccttcatcaagcccagccccgaggaggcccagctgtggagcgaggccttcgacgagctgctggccagcaagtacggcctggccgccttcagagccttcctgaagagcgagttctgcgaggagaacatcgagttctggctggcctgcgaggacttcaagaagaccaagagcccccagaagctgagcagcaaggccagaaagatctacaccgacttcatcgagaaggaggcccccaaggagatcaacatcgacttccagaccaagaccctgatcgcccagaacatccaggaggccaccagcggctgcttcaccaccgcccagaagagagtgtacagcctgatggagaacaacagctaccccagattcctggagagcgagttctaccaggacctgtgcaagaagccccagatcaccaccgagccccacgccacctag

SEQ ID NO: 133526 - DNA, 636 bp, Artificial Sequence
  derived and/or modified sequence
atgcagagcgccatgttcctggctgtgcagcatgattgccggcccatggataagagcgcgggctccggtcataaatccgaggaaaagcgtgaaaagatgaagaggactctgctcaaggactggaagactcgcttgtcatacttcctgcagaatagcagcacccctggcaaaccaaaaactggtaaaaagtctaagcagcaagctttcatcaagccatctcccgaggaggcacagttatggagcgaagctttcgacgagctgctggcaagcaagtatggccttgctgcttttagggcattcctgaagtccgagttctgtgaagaaaatatcgaattttggctggcttgtgaagacttcaaaaaaaccaagagtccccagaagctcagctccaaggctaggaagatctatacagattttatcgaaaaggaagcccctaaagagattaacatcgattttcagacaaagactttgattgctcaaaatattcaggaggccaccagcggttgtttcaccaccgcgcagaagcgagtctactccctaatggagaacaactcttatccaaggtttttagagagcgagttttaccaggatttatgtaagaagccacaaattactacggagccacatgcaacctag

SEQ ID NO: 133527 - DNA, 636 bp, Artificial Sequence
  derived and/or modified sequence
atgcagagcgccatgttcctggccgtgcagcacgactgccggcccatggacaagtctgctggcagcggccacaagtctgaggagaagcgggagaagatgaagaggaccctgctgaaggactggaagacccggctgagctacttcctgcagaacagcagcaccccaggcaagcccaagacaggcaagaagagcaagcagcaggccttcatcaagcccagccctgaggaggcccagctgtggagcgaggcctttgatgagctgctggccagcaaatatggcctggccgccttccgggccttcctgaagtctgagttctgtgaggagaacatcgagttctggctggcctgtgaggacttcaagaagaccaagagcccccagaagctgagcagcaaggccaggaagatctacacagacttcatcgagaaggaggcccccaaggagatcaacatcgacttccagaccaagaccctcatcgcccagaacatccaggaggccaccagcggctgcttcaccacagcccagaagagggtgtacagcctgatggagaacaacagctacccccgcttcctggagagcgagttctaccaggacctgtgcaagaagccccagatcaccacagagccccacgccacctag

SEQ ID NO: 133528 - DNA, 636 bp, Artificial Sequence
  derived and/or modified sequence
atgcagagcgccatgttcctggccgtgcagcacgactgccggcccatggataagagcgccggcagcgggcacaaatctgaggaaaaacgtgagaagatgaagcgtactctgctgaaagattggaaaacacggttaagttatttccttcagaattcaagtacacctgggaagccaaaaaccggcaaaaagagcaagcaacaggccttcattaagccatctcccgaggaggctcagctgtggagcgaggcattcgatgagttgctggctagcaaatacggcctggcagcgtttagagccttccttaagtctgagttctgtgaggaaaacatcgagttctggctggcttgcgaggactttaaaaaaaccaagtccccccagaaattaagtagcaaggccaggaagatttatactgatttcatcgaaaaagaggctcccaaggaaattaatatcgatttccagacgaaaacactgatcgcacaaaacatccaggaggcaacgagcgggtgtttcactaccgcacagaaacgcgtctattctctcatggagaacaattcctacccacggttcttggagtccgaattttatcaagacctctgtaagaagcctcaaatcaccacagaacctcatgccacatag

SEQ ID NO: 133529 - DNA, 636 bp, Artificial Sequence
  derived and/or modified sequence
atgcagagcgccatgtttctggccgtgcagcatgactgccggccaatggacaagtctgcagggagcggacacaaaagtgaagagaaacgcgaaaagatgaagcgaactctgttgaaggattggaaaacacggctcagctatttcctacaaaactccagtacccctggtaagcccaaaaccggcaaaaagtccaaacaacaggcattcatcaagccctcaccggaggaggctcagctctggtccgaagcgtttgacgaactcctggcttctaaatacggcttggccgctttccgggcatttttgaaatcagagttttgtgaagagaacatcgagttctggcttgcctgtgaggattttaagaaaacaaagtccccccagaagcttagttccaaggcacggaaaatttacactgactttattgagaaggaggctccaaaagagattaatattgattttcagaccaagactttgatagcccagaacatccaggaggccacgtccgggtgcttcacaactgcccaaaagcgagtgtactctctgatggagaacaattcataccctcgtttcctggaatccgaattctatcaggacttatgtaagaagcctcagataaccacagagccacatgccacatag

SEQ ID NO: 133530 - DNA, 1344 bp, Artificial Sequence
  derived and/or modified sequence
aaacagccggggctccagcgggagaacgataatgcaaagtgctatgttcttggctgttcaacacgactgcagacccatggacaagagcgcaggcagtggccacaagagcgaggagaagcgagaaaagatgaaacggacccttttaaaagattggaagacccgtttgagctacttcttacaaaattcctctactcctgggaagcccaaaaccggcaaaaaaagcaaacagcaagctttcatcaagccttctcctgaggaagcacagctgtggtcagaagcatttgacgagctgctagccagcaaatatggtcttgctgcattcagggcttttttaaagtcggaattctgtgaagaaaatattgaattctggctggcctgtgaagacttcaaaaaaaccaaatcaccccaaaagctgtcctcaaaagcaaggaaaatatatactgacttcatagaaaaggaagctccaaaagagataaacatagattttcaaaccaaaactctgattgcccagaatatacaagaagctacaagtggctgctttacaactgcccagaaaagggtatacagcttgatggagaacaactcttatcctcgtttcttggagtcagaattctaccaggacttgtgtaaaaagccacaaatcaccacagagcctcatgctacatgaaatgtaaaagggagcccagaaatggaggacatttcattctttttcctgaggggaaggactgtgacctgccataaagactgaccttgaattcagcctgggtgttcaggaaacatcactcagaactattgattcaaagttgggtagtgaatcaggaagccagtaactgactaggagaagctggtatcagaacagcttccctcactgtgtacagaacgcaagaagggaataggtggtctgaacgtggtgtctcactctgaaaagcaggaatgtaagatgatgaaagagacaatgtaatactgttggtccaaaagcatttaaaatcaatagatctgggattatgtggccttaggtagctggttgtacatctttccctaaatcgatccatgttaccacatagtagttttagtttaggattcagtaacagtgaagtgtttactatgtgcaacggtattgaagttcttatgaccacagatcatcagtactgttgtctcatgtaatgctaaaactgaaatggtccgtgtttgcattgttaaaaatgatgtgtgaaatagaatgagtgctatggtgttgaaaactgcagtgtccgttatgagtgccaaaaatctgtcttgaaggcagctacactttgaagtggtctttgaatacttttaataaatttattttgataaataatattg

SEQ ID NO: 133531 - protein, 487 aa, Artificial Sequence
  derived and/or modified sequence
MAQGNNYGQTSNGVADESPNMLVYRKMEDVIARMQDEKNGIPIRTVKSFLSKIPSVFSGSDIVQWLIKNLTIEDPVEALHLGTLMAAHGYFFPISDHVLTLKDDGTFYRFQTPYFWPSNCWEPENTDYAVYLCKRTMQNKARLELADYEAESLARLQRAFARKWEFIFMQAEAQAKVDKKRDKIERKILDSQERAFWDVHRPVPGCVNTTEVDIKKSSRMRNPHKTRKSVYGLQNDIRSHSPTHTPTPETKPPTEDELQQQIKYWQIQLDRHRLKMSKVADSLLSYTEQYLEYDPFLLPPDPSNPWLSDDTTFWELEASKEPSQQRVKRWGFGMDEALKDPVGREQFLKFLESEFSSENLRFWLAVEDLKKRPIKEVPSRVQEIWQEFLAPGAPSAINLDSKSYDKTTQNVKEPGRYTFEDAQEHIYKLMKSDSYPRFIRSSAYQELLQAKKKSGNSMDRRTSFEKFAQNVGKSLTSKRLTSLAQSY

SEQ ID NO: 133532 - DNA, 1464 bp, Artificial Sequence
  derived and/or modified sequence
atggcccaggggaataactatgggcagaccagtaatggcgttgctgacgaatcccctaatatgctggtttaccgaaaaatggaagacgtcatcgcccgtatgcaagatgagaagaacggcatccctatccgcaccgtcaagagtttcctgtcaaaaataccttccgtgttcagcggtagtgatatcgtgcaatggctaattaaaaatcttacgattgaggatccagttgaggcactgcacttggggacattgatggctgcccatgggtattttttccctataagcgaccacgtgctgactctgaaagacgacggtactttttaccggtttcagacaccttatttctggcctagcaactgttgggaacccgagaatactgattatgcagtctacctgtgtaagcgcaccatgcagaacaaggcccggttggaactggccgactatgaagctgaatcactggcacgcttgcagagggccttcgctaggaagtgggaattcatctttatgcaggctgaagcacaggctaaagtcgataaaaagagagacaagattgagagaaaaattttggactctcaagagagagcattctgggatgtccaccgtcccgtccctgggtgcgtgaacacaaccgaagtcgatataaagaagagcagcagaatgcgaaacccacacaaaacacggaagtcagtgtacgggcttcagaatgatatacgatctcactcgccaactcacacgcccacacccgagaccaagcccccaactgaagatgagctgcaacagcagattaagtattggcaaattcagctagataggcatcggctgaaaatgagcaaagttgcggatagcctactgtcatacacggaacaatatcttgagtatgatccattcctgttacctcctgacccatccaacccctggctgtctgacgacactactttctgggagctggaagcatctaaggaaccttcacagcagcgagtgaagcgctggggatttgggatggatgaggcacttaaagatccagttggcagggaacagttcctgaaattccttgagtcagaattctctagtgaaaatctgcggttttggctggcagtagaggatctgaaaaagagacccataaaggaagtgccatccagggtgcaggaaatctggcaggagttcctggcccccggagccccaagtgccattaatctcgacagcaagtcctatgataaaacaactcagaacgtcaaagaaccgggcaggtacacctttgaggacgctcaagagcatatctataagcttatgaagagtgactcctacccgagattcatccgcagctccgcataccaagagctgctgcaagccaaaaaaaagagcggaaacagtatggacagacgcactagtttcgaaaaattcgcacagaacgtgggaaaatcacttactagtaagcgactgacaagtttggcccagtcctactag

SEQ ID NO: 133533 - DNA, 1464 bp, Artificial Sequence
  derived and/or modified sequence
atggcccagggcaacaactacggccagaccagcaatggagtggctgatgagagccccaacatgctggtgtacaggaagatggaggatgtgattgccaggatgcaggatgagaagaatggcatccccatcagaacagtgaagagcttcctgagcaagatccccagcgtcttcagcggcagtgacatcgtgcagtggctgatcaagaacctgaccattgaagatcctgtggaggccctgcacctgggcaccctgatggccgcccacggctacttcttccccatcagtgaccacgtgctgaccctgaaggatgatggcaccttctaccgcttccagaccccctacttctggcccagcaactgctgggagcctgagaacacagattatgctgtgtacctgtgcaagaggaccatgcagaacaaggcccggctggagctggccgactatgaggccgagagcctggcccggctgcagagggcctttgccaggaagtgggagttcatcttcatgcaggccgaggcccaggccaaggtggacaagaagagggacaagattgaaaggaagatcctggacagccaggagcgggccttctgggatgtgcacaggcctgtgcccggctgtgtgaacaccacagaggtggacatcaagaagagcagcaggatgaggaacccccacaagaccaggaagtctgtgtatggcctgcagaatgacatccgcagccacagccccacccacacccccaccccagagaccaagccacccacagaagatgagctgcagcagcagatcaagtactggcagatccagctggacagacaccggctgaagatgagcaaggtggccgacagcctgctgagctacacagagcagtacctggagtatgaccccttcctgctgcccccagaccccagcaacccctggctgagtgatgacaccaccttctgggagctggaggccagcaaggagcccagccagcagagggtgaagcgctggggcttcggcatggatgaggccctgaaggaccctgtgggccgggagcagttcctgaagttcctggagagcgagttcagcagcgagaacctgcgcttctggctggccgtggaggacctgaagaagaggcccatcaaggaggtgcccagccgggtgcaggagatctggcaggagttcctggcccctggggcccccagcgccatcaacctggacagcaagagctatgacaagaccacccagaatgtgaaggagcccggccgctacacctttgaagatgcccaggagcacatctacaagctgatgaagagtgacagctacccccgcttcatccgcagcagcgcctaccaggagctgctgcaggccaagaagaagagcggcaacagcatggacaggaggaccagctttgagaagtttgcccagaatgtgggcaagagcctgaccagcaagaggctgaccagcctggcccagagctactag

SEQ ID NO: 133534 - DNA, 1464 bp, Artificial Sequence
  derived and/or modified sequence
atggcccagggcaacaactacggccagaccagcaacggcgtggccgacgagagcccaaatatgttagtataccggaagatggaggatgtgatcgcacgcatgcaggacgaaaagaacggaatacccatcaggacagtcaaaagttttctctctaaaattccgtcggtgttctcagggtccgacatcgttcagtggctgattaagaatcttactattgaagatccagtggaggccctccacctagggacactgatggctgcacacggttatttttttccaatcagcgaccatgtgttgactctcaaggatgatggaaccttttatcggtttcaaactccttacttttggcctagcaattgctgggagccagaaaacaccgactatgctgtgtacctgtgtaaaagaacgatgcagaacaaagccagactggagcttgcagattacgaggcagaaagtctcgcaagacttcagcgtgcctttgccaggaaatgggagttcattttcatgcaggcggaggctcaggcaaaagtcgacaagaagcgggataaaattgagcgcaagattcttgattctcaggaaagggctttctgggacgtccaccggccggtccctggctgcgtaaatacaaccgaagttgacattaagaaatcctctcggatgaggaatccgcataaaactcgaaagtcagtgtatggcttacagaatgacattaggtctcattcaccaacccatactcccacccccgagaccaaaccaccgacagaggatgagctgcagcagcagatcaagtactggcagatccagcttgaccgccaccgccttaaaatgagtaaggtggccgattccttgctgtcatacaccgagcagtacctagaatacgatccttttttattgcctccggaccctagtaacccgtggctctctgacgatacaacgttctgggagcttgaagcctccaaggagccctctcaacaacgcgtgaagcggtggggttttggaatggacgaagctctcaaagatccagtcgggcgggagcagttcctaaaattcctggaatcagaattctcgagtgagaatttgcgattctggctggcagttgaagatttgaagaaacgtccgatcaaggaggtccctagtcgggtgcaagagatatggcaggagttcttggcacccggggccccaagcgccataaatttggattccaagagttatgataaaaccactcagaatgtgaaggaacctggccgttacacgttcgaagatgcgcaggagcatatctataaacttatgaagtccgacagttaccccagatttatccgcagctccgcttaccaggagctcctgcaggctaaaaagaagagcggaaacagcatggacagaaggacgtcctttgagaagtttgcgcaaaacgtggggaaatctctcacatctaagcgcctgacttccttagctcagtcctactag

SEQ ID NO: 133535 - DNA, 1464 bp, Artificial Sequence
  derived and/or modified sequence
atggcacaaggcaacaattatgggcagaccagcaacggggtggcagacgagtctcccaacatgctggtttaccggaagatggaggacgtaatcgcacgaatgcaggatgaaaaaaacgggatccctatccggacagttaagagcttcctctcaaagattccctccgtattttcaggaagcgatattgttcagtggctgataaaaaacctgacaatcgaagatcccgtcgaggctttacacctgggcactcttatggctgcccacggctacttttttcccattagcgaccacgttctgacactgaaagatgacggcacgttttacagatttcagaccccttacttttggcccagtaactgttgggagccagaaaacaccgattacgccgtatacttatgcaagcggacaatgcagaataaggcacgtctggagttggcagattatgaagccgaatcgctcgcgaggctccagcgtgcttttgctaggaagtgggagttcattttcatgcaagctgaagcacaggcaaaagtcgacaagaaaagagacaaaatagaaaggaagattctggattcacaggaaagggccttttgggacgtgcatcgcccagtaccaggctgtgtgaatacgactgaggtggatattaagaagtcaagccgcatgaggaatccacacaaaacaagaaagagcgtctatggcttacaaaatgacatccgttcacactcccccacccacactcctactcccgagacgaagcccccaactgaggatgaactgcaacagcagatcaaatattggcagatccagctggaccgccaccggctgaagatgagtaaggttgctgatagcctcctcagttatacagagcagtacctggaatatgacccattccttctccccccagatcccagcaatccatggctgtcggacgacaccaccttttgggagctggaagcatcaaaggagccgagtcaacagcgggtgaagcgttggggcttcggcatggatgaagccctgaaggatcctgttggaagggagcaatttctgaagtttctcgagagcgaattttcttcagaaaacctgcggttctggctggccgtggaagatcttaaaaagcggccaatcaaggaggtgccgagtcgcgtgcaggagatttggcaggagttccttgcccctggtgccccaagcgcgatcaatctagattcaaagtcgtatgacaagaccacccagaatgttaaggaaccagggcgatatactttcgaggacgcccaggagcacatctacaagttaatgaagagtgatagctaccccaggtttatacgctcttccgcctaccaggagctgctgcaggcgaaaaagaaatctggcaacagcatggaccggaggacaagcttcgaaaagttcgcccagaacgtgggcaaatctctcacatccaagcgcttaacctccttggcgcagagctattag

SEQ ID NO: 133536 - DNA, 2494 bp, Artificial Sequence
  derived and/or modified sequence
gtcgcgcgcacgggccgggcgtctcgactcccgcgcgcgctcggctggtcccagtccccgggagaagaagcggaggagggagagagccagcgaggcggcccaggggagcgggcgcgagtggcggctgccggagccgcctgtgcacgggcggcggcgaggcgagggtggcggtcgcctgagcagctagagccggggcggcgcggaatccgcatccgccgcgagtgtgatgaagctaccctgcctcgctgctccgcttgccgccagctgacaccgcctgcacccagcccgcccgggaggggagacgccgcggggccgtgaccttggcggaggagggcacactgataattcttgtatcttgagagtggaccaagttttgggtgacatggcccaggggaataattatgggcagaccagcaacggggtggccgatgaatcacccaacatgctggtgtacagaaagatggaagacgtcatagcacggatgcaagatgaaaaaaatggaattcctattcgtacggtcaaaagctttctttccaagatacctagcgtcttctctggttcagacattgttcaatggttgataaagaacttaactatagaagatccagtggaggcgctccatttgggaacattaatggctgcccacggctacttctttccaatctcagatcatgtcctcacactcaaggatgatggcaccttttaccggtttcaaaccccctatttttggccatcaaattgttgggagccggaaaacacagattatgccgtttacctctgcaagagaacaatgcaaaacaaggcacgactggagctcgcagactatgaggctgagagcctggccaggctgcagagagcatttgcccggaagtgggagttcattttcatgcaagcagaagcacaagcaaaagtggacaagaagagagacaagattgaaaggaagatccttgacagccaagagagagcgttctgggacgtgcacaggcccgtgcctggatgtgtaaatacaactgaagtggacattaagaagtcatccagaatgagaaacccccacaaaacacggaagtctgtctatggtttacaaaatgatattagaagtcacagtcctacccacacacccacaccagaaactaaacctccaacagaagatgagttacaacaacagataaaatattggcaaatacagttagatagacatcggttaaaaatgtcaaaagtcgctgacagtctactaagttacacggaacagtatttagaatacgacccgtttcttttgccacctgacccttctaacccatggctgtccgatgacaccactttctgggaacttgaggcaagcaaagaaccgagccagcagagggtaaaacgatggggttttggcatggacgaggcattgaaagacccagttgggagagaacagttccttaaatttctagagtcagaattcagctcggaaaatttaagattctggctggcagtggaggacctgaaaaagaggcctattaaagaagtaccctcaagagttcaggaaatatggcaagagtttctggctcccggagcccccagtgctattaacttggattccaagagttatgacaaaaccacacagaacgtgaaggaacctggacgatacacatttgaagatgctcaggagcacatttacaaactgatgaaaagtgattcatacccacgttttataagatccagtgcctatcaggagcttctacaggcaaagaaaaagtctggaaactcaatggatcgcagaacatcttttgaaaaatttgcacagaatgtggggaaatctctcacgtccaagaggttaacaagccttgctcagtcttactaaacggatcatcttgtagcatgaatgcagactggagtcactgcacacactttgtagctcaatgttgtgacctggagcagaggacattagaacaagatgttgcatgagcaaaggacctaaattgttatttttgtgtgtacattccatctccaatggactcttccgtctcaatgcctccattccaaactgttgtctgctttctttctccttctactatgctggatctgtgtctcttcctttttaacaagttcaagtgaagtaaaaccttttctttttttccttctttctctctctctctctctcaaagcttcagttagacacacagttcactgaaaattcagtcagtcaaaaactggaagaactgtaaaagaaaaaagtatatatcaataagtatacatgtggcttcacatttattaaacaataaattccgcacagaaagtttcatttcaccaatgtgtcacagtcagaaacaaactcatgtcttcgtctgttgtctgtacattctccgttaatgtttctcgcatttatttttataccatatttaaagaagaaacaccttttactccaaatgtattaaagttgatcccttctctgtaaatttgtgtatgtttatattgttgttttatctttcattaaaagatgcagaatctc

SEQ ID NO: 133537 - DNA, 1464 bp, Artificial Sequence
  derived and/or modified sequence
atggcccagggcaacaactacggccagaccagcaacggcgtggccgacgagagccccaacatgctggtgtacagaaagatggaggacgtgatcgccagaatgcaggacgagaagaacggcatccccatcagaaccgtgaagagcttcctgagcaagatccccagcgtgttcagcggcagcgacatcgtgcagtggctgatcaagaacctgaccatcgaggaccccgtggaggccctgcacctgggcaccctgatggccgcccacggctacttcttccccatcagcgaccacgtgctgaccctgaaggacgacggcaccttctacagattccagaccccctacttctggcccagcaactgctgggagcccgagaacaccgactacgccgtgtacctgtgcaagagaaccatgcagaacaaggccagactggagctggccgactacgaggccgagagcctggccagactgcagagagccttcgccagaaagtgggagttcatcttcatgcaggccgaggcccaggccaaggtggacaagaagagagacaagatcgagagaaagatcctggacagccaggagagagccttctgggacgtgcacagacccgtgcccggctgcgtgaacaccaccgaggtggacatcaagaagagcagcagaatgagaaacccccacaagaccagaaagagcgtgtacggcctgcagaacgacatcagaagccacagccccacccacacccccacccccgagaccaagccccccaccgaggacgagctgcagcagcagatcaagtactggcagatccagctggacagacacagactgaagatgagcaaggtggccgacagcctgctgagctacaccgagcagtacctggagtacgaccccttcctgctgccccccgaccccagcaacccctggctgagcgacgacaccaccttctgggagctggaggccagcaaggagcccagccagcagagagtgaagagatggggcttcggcatggacgaggccctgaaggaccccgtgggcagagagcagttcctgaagttcctggagagcgagttcagcagcgagaacctgagattctggctggccgtggaggacctgaagaagagacccatcaaggaggtgcccagcagagtgcaggagatctggcaggagttcctggcccccggcgcccccagcgccatcaacctggacagcaagagctacgacaagaccacccagaacgtgaaggagcccggcagatacaccttcgaggacgcccaggagcacatctacaagctgatgaagagcgacagctaccccagattcatcagaagcagcgcctaccaggagctgctgcaggccaagaagaagagcggcaacagcatggacagaagaaccagcttcgagaagttcgcccagaacgtgggcaagagcctgaccagcaagagactgaccagcctggcccagagctactag

SEQ ID NO: 133538 - protein, 167 aa, Artificial Sequence
  derived and/or modified sequence
MEHIHDSDGSSSSSHQSLKSTAKWAASLENLLEDPEGVKRFREFLKKEFSEENVLFWLACEDFKKMQDKTQMQEKAKEIYMTFLSSKASSQVNVEGQSRLNEKILEEPHPLMFQKLQDQIFNLMKYDSYSRFLKSDLFLKHKRTEEEEEDLPDAQTAAKRASRIYNT

SEQ ID NO: 133539 - DNA, 504 bp, Artificial Sequence
  derived and/or modified sequence
atggagcacatccacgacagcgacggcagcagcagcagcagccaccagagcctgaagagcaccgccaagtgggccgccagcctggagaacctgctggaggaccccgagggcgtgaagagattcagagagttcctgaagaaggagttcagcgaggagaacgtgctgttctggctggcctgcgaggacttcaagaagatgcaggacaagacccagatgcaggagaaggccaaggagatctacatgaccttcctgagcagcaaggccagcagccaggtgaacgtggagggccagagcagactgaacgagaagatcctggaggagccccaccccctgatgttccagaagctgcaggaccagatcttcaacctgatgaagtacgacagctacagcagattcctgaagagcgacctgttcctgaagcacaagagaaccgaggaggaggaggaggacctgcccgacgcccagaccgccgccaagagagccagcagaatctacaacacctag

SEQ ID NO: 133540 - DNA, 504 bp, Artificial Sequence
  derived and/or modified sequence
atggaacatatccatgacagtgacggtagcagctctagttcccaccagagtctgaagtccacagccaagtgggccgcaagcctggagaacttattagaggaccccgaaggcgtgaagaggttcagagagttccttaagaaggagttctcggaagagaacgtattattttggctggcttgtgaggactttaagaaaatgcaggacaaaacccaaatgcaggagaaagctaaagaaatctatatgacctttctaagttctaaagcaagttctcaggttaatgtcgaaggccagtctcgcctgaacgagaagatactggaggagcctcacccacttatgttccagaagttgcaggatcagatctttaatttaatgaagtacgattcctacagtcgcttcctcaaatccgacctgtttctcaaacacaagagaaccgaagaagaggaggaggatctacctgacgcgcagacagccgccaagagagcctctaggatttacaatacatag

SEQ ID NO: 133541 - DNA, 504 bp, Artificial Sequence
  derived and/or modified sequence
atggagcacatccatgacagtgatggcagcagcagcagcagccaccagagcctgaagagcacagccaagtgggccgccagcctggagaacctgctggaggaccctgagggcgtgaagcgcttccgggagttcctgaagaaggagttcagcgaggagaatgtgctcttctggctggcctgtgaggacttcaagaagatgcaggacaagacccagatgcaggagaaggccaaggagatctacatgaccttcctgagcagcaaggccagcagccaggtgaatgtggagggccagagccggctgaatgagaagatcctggaggagccccaccccctgatgttccagaagctgcaggaccagatcttcaacctgatgaagtatgacagctacagccgcttcctgaagagtgacctcttcctgaagcacaagaggacagaggaggaggaggaggacctgcctgatgcccagacagctgccaagagggccagccgcatctacaacacctag

SEQ ID NO: 133542 - DNA, 504 bp, Artificial Sequence
  derived and/or modified sequence
atggagcacatccacgacagcgacggcagcagcagcagcagccaccagagcctgaagagcactgctaagtgggcggcgagtttggaaaatctcctggaggaccccgaaggtgtcaagcggtttcgcgaattcttgaaaaaggagtttagcgaggaaaacgtattattttggctcgcttgcgaggacttcaaaaagatgcaggacaaaacccagatgcaggaaaaagccaaggagatctatatgacttttctgagttctaaagcgtctagccaggtgaatgttgagggccagtccaggttgaatgagaagattctcgaggaaccgcatcccctcatgtttcagaaactgcaggatcaaatcttcaacctgatgaaatacgacagttactctaggtttctgaaatccgatcttttcctgaaacataagcggaccgaggaggaggaagaagacctgcctgacgcacagactgctgcaaagcgggcctcccgcatctacaatacatag

SEQ ID NO: 133543 - DNA, 504 bp, Artificial Sequence
  derived and/or modified sequence
atggagcacattcatgactcagatgggagcagctctagtagccatcagagcctcaaatccacagctaaatgggccgcttcacttgaaaatctgctggaagatcccgagggggtgaaacgcttcagggaattcttgaagaaggagttttccgaggagaatgtcctgttttggcttgcctgcgaggatttcaagaagatgcaagacaaaactcagatgcaggagaaagccaaagaaatatatatgaccttcctgagctctaaagcctctagccaggtgaacgttgaaggccagtcccgattaaacgaaaagattctcgaggaaccacatccacttatgtttcagaagctgcaagatcagatctttaatctgatgaagtatgatagctatagcagattcctcaagtccgacctgttcttgaaacacaagagaacagaagaagaggaagaagacttgcccgatgcgcagaccgcagctaagcgagcatcaaggatttacaacacctag

SEQ ID NO: 133544 - DNA, 852 bp, Artificial Sequence
  derived and/or modified sequence
ggcgtctctgggaaggcagtggattgttggtctgcgtggaacttctcaggtggacaccagagcatggaacacatccacgacagcgatggcagttccagcagcagccaccagagcctcaagagcacagccaaatgggcggcatccctggagaatctgctggaagacccagaaggcgtgaaaagatttagggaatttttaaaaaaggaattcagtgaagaaaatgttttgttttggctagcatgtgaagattttaagaaaatgcaagataagacgcagatgcaggaaaaggcaaaggagatctacatgacctttctgtccagcaaggcctcatcacaggtcaacgtggaggggcagtctcggctcaacgagaagatcctggaagaaccgcaccctctgatgttccagaaactccaggaccagatctttaatctcatgaagtacgacagctacagccgcttcttaaagtctgacttgtttttaaaacacaagcgaaccgaggaagaggaagaagatttgcctgatgctcaaactgcagctaaaagagcttccagaatttataacacatgagcccccaaaaagccgggactggcagctttaagaagcaaaggaatttcctctcaggaccgtgccgggtttatcattgctttgttatttgtaaggactgaaatgtacaaaacccttcaatgggatgtgtgttttattaactgcttcaccagtaaattttgcatgatggctaagctaacataaaaaaagaataataataacttggaagttttagtttacaaaacagagattccttcaacactggacacgtcgagcattttgtagcttaattaaacctcatgtaaggcc

SEQ ID NO: 133545 - protein, 159 aa, Artificial Sequence
  derived and/or modified sequence
MSRRNCWICKMCRDESKRPPSNLTLEEVLQWAQSFENLMATKYGPVVYAAYLKMEHSDENIQFWMACETYKKIASRWSRISRAKKLYKIYIQPQSPREINIDSSTRETIIRNIQEPTETCFEEAQKIVYMHMERDSYPRFLKSEMYQKLLKTMQSNNSF

SEQ ID NO: 133546 - DNA, 480 bp, Artificial Sequence
  derived and/or modified sequence
atgagcagaagaaactgctggatctgcaagatgtgcagagacgagagcaagagaccccccagcaacctgaccctggaggaggtgctgcagtgggcccagagcttcgagaacctgatggccaccaagtacggccccgtggtgtacgccgcctacctgaagatggagcacagcgacgagaacatccagttctggatggcctgcgagacctacaagaagatcgccagcagatggagcagaatcagcagagccaagaagctgtacaagatctacatccagccccagagccccagagagatcaacatcgacagcagcaccagagagaccatcatcagaaacatccaggagcccaccgagacctgcttcgaggaggcccagaagatcgtgtacatgcacatggagagagacagctaccccagattcctgaagagcgagatgtaccagaagctgctgaagaccatgcagagcaacaacagcttctag

SEQ ID NO: 133547 - DNA, 480 bp, Artificial Sequence
  derived and/or modified sequence
atgtccaggaggaactgttggatttgtaaaatgtgccgggatgagagtaagaggcccccctctaatctgaccctggaagaggtcctgcaatgggcgcagagttttgaaaacttgatggcaaccaagtacggccctgtggtgtatgccgcctatctaaagatggagcactccgatgagaacatacaattttggatggcttgtgagacatataagaaaatcgccagtaggtggtccaggatatcaagggccaagaagctatataaaatctatattcaaccccagtcgcccagagaaattaatattgacagctccacaagggaaaccattattcggaacattcaggaacctacggaaacatgttttgaggaggcccagaagatcgtatacatgcacatggagagggactcctaccctcgttttctcaaatcagagatgtatcaaaaattgcttaaaactatgcagtccaataattcgttctag

SEQ ID NO: 133548 - DNA, 480 bp, Artificial Sequence
  derived and/or modified sequence
atgtccagaaggaattgttggatatgcaagatgtgcagagacgaatctaagagaccaccctccaatctgacactcgaagaggtgctgcagtgggcacaatcctttgagaacctcatggcaacgaaatatggtcctgtggtgtacgccgcttacctgaagatggagcactccgatgaaaacatccaattttggatggcatgcgagacatacaagaagatcgccagccggtggtctagaatttcacgcgccaaaaaactgtataaaatctacattcaaccgcagtcccctagggagatcaacattgactcatccactcgtgagaccatcatccgaaacatccaggagcctaccgaaacttgctttgaggaagcacagaaaatcgtttacatgcacatggagcgggactcttacccccgctttctcaagagcgagatgtatcagaaactgctgaagaccatgcaaagcaataattcattttag

SEQ ID NO: 133549 - DNA, 480 bp, Artificial Sequence
  derived and/or modified sequence
atgagcagaagaaactgctggatctgcaagatgtgcagagatgagagcaagaggcctcccagcaacctgaccctggaggaggtgctgcagtgggcccagagctttgagaacctgatggccaccaagtatggccctgtggtgtatgctgcctacctgaagatggagcacagtgatgagaacatccagttctggatggcctgtgagacctacaagaagatcgccagccgctggagccgcatcagccgggccaagaagctgtacaagatctacatccagccccagagcccccgggagatcaacatcgacagcagcacccgggagaccatcatccggaacatccaggagcccacagagacctgctttgaggaggcccagaagatcgtgtacatgcacatggagcgggacagctacccccgcttcctgaagtctgagatgtaccagaagctgctgaagaccatgcagagcaacaacagcttctag

SEQ ID NO: 133550 - DNA, 480 bp, Artificial Sequence
  derived and/or modified sequence
atgagccggcggaactgctggatctgcaagatgtgccgggacgagagcaaacgccccccctctaatctcactcttgaggaggtgttacagtgggcccagagttttgagaatctgatggcaaccaaatacgggcccgtggtctacgccgcttacctgaaaatggagcactcagatgaaaacatccagttttggatggcatgtgaaacttataagaaaattgcctctagatggtctcggatctctagggcgaagaagttgtataaaatctacattcaaccccagtcacctagggagattaatatcgacagctctactcgtgagacaatcatcaggaatatccaagagccgaccgagacatgtttcgaggaggctcagaagatcgtttatatgcatatggagagggactcttatccccgtttcctgaagtccgagatgtaccagaaactcttaaagacgatgcagagcaacaattcattttag

SEQ ID NO: 133551 - DNA, 480 bp, Artificial Sequence
  derived and/or modified sequence
atgagccggcggaactgctggatctgcaagatgtgccgggacgagtcaaagcgccctccctccaacctgaccctcgaggaggtgttgcaatgggcccagtcatttgagaatctaatggccaccaagtacgggcccgtggtgtacgcagcatatctgaaaatggagcactcggacgagaacattcagttttggatggcatgcgagacctataagaagatcgcctccagatggtctaggatcagtagagccaagaagttatataaaatctatattcagccccagtccccccgggaaattaacattgatagctcgacacgcgagacaatcattaggaatatccaggagccaacggagacttgttttgaggaggcccaaaagatcgtctatatgcatatggagcgagatagttacccacgctttctgaaaagcgagatgtaccagaaactactaaagaccatgcagagcaataattctttctag

SEQ ID NO: 133552 - DNA, 480 bp, Artificial Sequence
  derived and/or modified sequence
atgtctcggaggaattgttggatctgcaagatgtgtcgggatgaatccaagaggcctccctccaacctaaccctggaggaagtgctgcagtgggcccaaagcttcgagaatcttatggccaccaagtacggcccagtagtgtatgcagcctacctcaaaatggaacattcagacgagaacatccagttttggatggcatgtgaaacctataagaaaatcgcttccagatggtcacggatttctcgcgcaaagaaactatataaaatctacatccagcctcagtctccgagggagatcaatattgatagcagcacacgggagaccatcatcaggaacatccaggagcccacggagacatgcttcgaagaggcccaaaagatagtttacatgcacatggaacgagattcttacccaagattcctcaagtctgagatgtatcagaagctgttaaagacaatgcagtcaaataactccttttag

SEQ ID NO: 133553 - DNA, 480 bp, Artificial Sequence
  derived and/or modified sequence
atgtcccgacggaactgctggatctgcaaaatgtgtcgcgacgaatcaaagcgccctccatcaaatctaacactggaagaggtgttacagtgggcccagtctttcgaaaatctgatggcaaccaagtacggcccagtggtttatgcagcatatttaaagatggaacactcagatgaaaatatccagttctggatggcttgtgagacctataaaaaaatagcatcaaggtggtctcgaatcagtcgggcaaagaaactttacaaaatctatattcagccccagtctcccagagaaattaatatcgattcctctacgcgtgaaaccattattaggaacatacaagaacccaccgaaacgtgttttgaggaagcacagaagatcgtctacatgcatatggaaagagatagttatccgcgattcctaaagtccgaaatgtaccaaaaattgctgaagacaatgcagtccaacaactctttctag

SEQ ID NO: 133554 - DNA, 1505 bp, Artificial Sequence
  derived and/or modified sequence
tcatactgaggccagagtgccatcgaaggtaattatagagacagtaaaatccttttactctgggaaaaataaaatgctgggtgtctcacaaaatttcagaacctgatttcaaacggatcataacaaagaggagatcaaatttagcatggtggactgctcgacaggatatatttgtcaatggaatgtttccacatattataccaccaacatgagaaaaaaatgatcattgtttatttgaagcttgatgatattctaacgctgccttttctcttctcattttagagaaaaatgagcaggcggaattgttggatttgtaagatgtgcagagatgaatctaagaggcccccttcaaaccttactttggaggaagtattacagtgggcccagtcttttgaaaatttaatggctacaaaatatggtccagtagtctatgcagcatatttaaaaatggagcacagtgacgagaatattcaattctggatggcatgtgaaacctataagaaaattgcctcacggtggagcagaatttctagggcaaagaagctttataagatttacatccagccacagtcccctagagagattaacattgacagttcgacaagagagactatcatcaggaacattcaggaacccactgaaacatgttttgaagaagctcagaaaatagtctatatgcatatggaaagggattcctaccccagatttctaaagtcagaaatgtaccaaaaacttttgaaaactatgcagtccaacaacagtttctgactacaactcaaaagtttaaatagaaaacagtatattgaaagtggtgggtttgatctttttatttagaaacccacaaaatcagaaacacagtacaaataaaacagaaatcaaactataagttgacttttagttcctaaaaagaaacatatttcaaaagcaatggaatctagaattcttataacatgaataacaaaatgtacagcaagcctatgtagttcaattaatatataaggaaaaggaaggtctttcttcatgatacaagcattataaagtttttactgtagtagtcaattaatggatatttccttgttaataaaattttgtgtcataatttacaaattagttctttaaaaattgttgttatatgaattgtgtttctagcatgaatgttctatagagtactctaaataacttgaatttatagacaaatgctactcacagtacaatcaattgtattataccatgagaaaatcaaaaaggtgttcttcagagacattttatctataaaattttcctactattatgttcattaacaaacttctttatcacatgtatcttctacatgtaaaacatttctgatgattttttaacaaaaaatatatgaatttcttcatttgctcttgcatctacattgctataaggatataaaatgtggtttctatattttgagatgttttttccttacaatgtgaactcatcgtgatcttggaaatcaataaagtcaaatatcaactaaa

SEQ ID NO: 133555 - DNA, 1458 bp, Artificial Sequence
  derived and/or modified sequence
gaggccagagtgccatcgaaggtaattatagagacagtaaaatccttttactctgggaaaaataaaatgctgggtgtctcacaaaatttcagaacctgatttcaaacggatcataacaaagaggagatcaaatttagcatggtggactgctcgacaggatatatttgtcaatggaatgtttccacatattataccaccaacatgagaaaaaaatgatcattgtttatttgaagcttgaaaaatgagcaggcggaattgttggatttgtaagatgtgcagagatgaatctaagaggcccccttcaaaccttactttggaggaagtattacagtgggcccagtcttttgaaaatttaatggctacaaaatatggtccagtagtctatgcagcatatttaaaaatggagcacagtgacgagaatattcaattctggatggcatgtgaaacctataagaaaattgcctcacggtggagcagaatttctagggcaaagaagctttataagatttacatccagccacagtcccctagagagattaacattgacagttcgacaagagagactatcatcaggaacattcaggaacccactgaaacatgttttgaagaagctcagaaaatagtctatatgcatatggaaagggattcctaccccagatttctaaagtcagaaatgtaccaaaaacttttgaaaactatgcagtccaacaacagtttctgactacaactcaaaagtttaaatagaaaacagtatattgaaagtggtgggtttgatctttttatttagaaacccacaaaatcagaaacacagtacaaataaaacagaaatcaaactataagttgacttttagttcctaaaaagaaacatatttcaaaagcaatggaatctagaattcttataacatgaataacaaaatgtacagcaagcctatgtagttcaattaatatataaggaaaaggaaggtctttcttcatgatacaagcattataaagtttttactgtagtagtcaattaatggatatttccttgttaataaaattttgtgtcataatttacaaattagttctttaaaaattgttgttatatgaattgtgtttctagcatgaatgttctatagagtactctaaataacttgaatttatagacaaatgctactcacagtacaatcaattgtattataccatgagaaaatcaaaaaggtgttcttcagagacattttatctataaaattttcctactattatgttcattaacaaacttctttatcacatgtatcttctacatgtaaaacatttctgatgattttttaacaaaaaatatatgaatttcttcatttgctcttgcatctacattgctataaggatataaaatgtggtttctatattttgagatgttttttccttacaatgtgaactcatcgtgatcttggaaatcaataaagtcaaatatcaactaaa

SEQ ID NO: 133556 - protein, 202 aa, Artificial Sequence
  derived and/or modified sequence
MCRTLAAFPTTCLERAKEFKTRLGIFLHKSELGCDTGSTGKFEWGSKHSKENRNFSEDVLGWRESFDLLLSSKNGVAAFHAFLKTEFSEENLEFWLACEEFKKIRSATKLASRAHQIFEEFICSEAPKEVNIDHETHELTRMNLQTATATCFDAAQGKTRTLMEKDSYPRFLKSPAYRDLAAQASAASATLSSCSLDEPSHT

SEQ ID NO: 133557 - DNA, 609 bp, Artificial Sequence
  derived and/or modified sequence
atgtgccgcacgctagcagcttttcccaccacgtgtcttgagagggctaaggagttcaagacgagacttggaatcttcctgcacaagagtgaattggggtgtgatacgggttctaccgggaaatttgagtggggctcaaagcatagtaaggagaaccgcaatttctccgaagacgtcctggggtggcgcgaatctttcgatctcctcctctccagtaaaaatggcgtggccgccttccacgcattcttaaagacggaatttagtgaagagaatttagagttctggctcgcctgcgaggagtttaaaaaaatcagatccgcaacgaaactggcttctcgggcccaccagatttttgaggaatttatttgtagtgaggctccgaaggaagttaatatcgaccatgaaacccacgagctgacacggatgaacctccagaccgcaacagcaacgtgcttcgacgcagcgcagggtaaaaccagaactctgatggaaaaggactcctatcctcgcttcctgaaatccccagcttacagggacctcgctgctcaagcatccgccgcttcagctaccttatcctcttgtagcctcgatgagccttcccatacatag

SEQ ID NO: 133558 - DNA, 609 bp, Artificial Sequence
  derived and/or modified sequence
atgtgcaggaccctggccgccttccccaccacctgcctggagcgggccaaggagttcaagacccggctgggcatcttcctgcacaagtctgagctgggctgtgacaccggcagcacaggcaagtttgagtggggcagcaagcacagcaaagaaaatagaaacttctctgaagatgtgctgggctggagggagagctttgacctgctgctgagcagcaagaatggagtggccgccttccacgccttcctgaagacagagttcagcgaggagaacctggagttctggctggcctgtgaggagttcaagaagatccgcagcgccaccaagctggccagccgggcccaccagatctttgaggagttcatctgcagcgaggcccccaaggaggtgaacatcgaccacgagacccatgagctgaccaggatgaacctgcagacagccacagccacctgctttgatgctgcccagggcaagaccaggaccctgatggagaaggacagctacccccgcttcctgaagagccctgcctacagagacctggccgcccaggccagcgctgccagcgccaccctgagcagctgcagcctggatgagcccagccacacctag

SEQ ID NO: 133559 - DNA, 609 bp, Artificial Sequence
  derived and/or modified sequence
atgtgccggaccctggccgccttccccaccacctgcctggagcgggcaaaagagttcaagactcgactaggcatttttctgcataaaagtgaacttgggtgtgataccggttccaccggaaaattcgaatgggggtctaagcatagtaaagaaaatcgaaatttcagcgaggatgtgttgggatggcgggaatcttttgatcttctcttgagctcgaagaatggcgtggcggcatttcacgccttcctgaagactgagttcagcgaggaaaatcttgaattttggctggcttgcgaggagttcaagaagattagaagcgccactaagcttgcctcaagggcgcaccagatctttgaggagtttatatgcagcgaggcaccgaaggaggtcaacatcgatcacgagacccacgagctcacaagaatgaacctccaaacggccacagccacatgttttgatgcagctcagggcaaaacacgtactcttatggagaaagattcttacccgcgatttttgaagtcaccggcctatagagacctagcagcgcaagcctctgctgcctcggctaccctgtcctcctgctccctggacgaacccagtcacacatag

SEQ ID NO: 133560 - DNA, 609 bp, Artificial Sequence
  derived and/or modified sequence
atgtgccgtacactggctgcgttccctaccacatgcctggaacgagccaaggagttcaaaacgcgtctcgggatctttctgcacaagtcagaacttggttgcgatacaggatcaaccggcaagttcgagtgggggtcaaagcacagtaaagaaaaccgcaattttagtgaagatgtgctgggctggcgggaaagcttcgacctgcttttaagttctaagaatggagtggctgccttccacgcttttctgaaaaccgaattcagcgaggagaacctcgagttctggttggcttgcgaagagttcaaaaagatccgctcagccacgaaactggcttcaagagctcaccaaatctttgaagagtttatctgcagcgaggcccctaaggaagtcaacattgatcatgagacgcacgaactaactcggatgaacctccagacagccactgccacttgtttcgatgctgcccaggggaagacgcgcactctgatggaaaaggacagttacccaaggtttttaaagtcccctgcttaccgagacctagctgctcaggccagcgccgcatcagccaccctgagcagctgcagtttggatgaacccagtcatacttag

SEQ ID NO: 133561 - DNA, 2427 bp, Artificial Sequence
  derived and/or modified sequence
gcggccgctcagtctgggcgcttgcaggctgctaaacccaaccgcagttgactagcacctgctaccgcgcctttgcttcctggcgcacgcggagcctcctggagcctgccaccatcctgcctactacgtgctgccctgcgcccgcagccatgtgccgcaccctggccgccttccccaccacctgcctggagagagccaaagagttcaagacacgtctggggatctttcttcacaaatcagagctgggctgcgatactgggagtactggcaagttcgagtggggcagtaaacacagcaaagagaatagaaacttctcagaagatgtgctggggtggagagagtcgttcgacctgctgctgagcagtaaaaatggagtggctgccttccacgctttcctgaagacagagttcagtgaggagaacctggagttctggctggcctgtgaggagttcaagaagatccgatcagctaccaagctggcctccagggcacaccagatctttgaggagttcatttgcagtgaggcccctaaagaggtcaacattgaccatgagacccacgagctgacgaggatgaacctgcagactgccacagccacatgctttgatgcggctcaggggaagacacgtaccctgatggagaaggactcctacccacgcttcctgaagtcgcctgcttaccgggacctggctgcccaagcctcagccgcctctgccactctgtccagctgcagcctggacgagccctcacacacctgagtctccacggcagtgaggaagccagccgggaagagaggttgagtcacccatccccgaggtggctgcccctgtgtgggaggcaggttctgcaaagcaagtgcaagaggacaaaaaaaaaaaaaaaaaaaaaaaaaatgcgctccagcagcctgtttgggaagcagcagtctctccttcagatactgtgggactcatgctggagaggagccgcccacttccaggacctgtgaataagggctaatgatgagggttggtggggctctctgtggggcaaaaaggtggtatgggggttagcactggctctcgttctcaccggagaaggaagtgttctagtgtggtttaggaaacatgtggataaagggaaccatgaaaatgagaggaggaaagacatccagatcagctgttttgcctgttgctcagttgactctgattgcatcctgttttcctaattcccagactgttctgggcacggaagggaccctggatgtggagtcttcccctttggccctcctcactggcctctgggctagcccagagtcccttagcttgtacctcgtaacactcctgtgtgtctgtccagccttgcagtcatgtcaaggccagcaagctgatgtgactcttgccccatgcgagatatttatacctcaaacactggcctgtgagccctttccaagtcagtggagagccctgaaaggaggctcacttgaatccagctcagtgctctgggtggccccctgcaggtggcccctgaccctgcgttgcagcagggtccacctgtgagcaggcccgccctggggcctcttcctggatgtgccctctctgagttctgtgctgtctcttggaggcagggcccaggagaacaaagtgtggaggcctcggggagtggcttttccagctctcatgccccgcagtgtggaacaaggcagaaaaggatcctaggaaataagtctcttggcggtccctgagagtcctgctgaaatccagccagtgttttttgtggtatgagaacaggcaaaaagagatgccccgagatagaaggggagccttgtgtttctttcctgcagacgtgagatgaacactggagtgggcagaggtggcccaggaccatggcacccttagagtgcagaagctggggggagaggctgcttcgaagggcaggactggggataatcagaacctgcctgtcacctcagggcatcactgaacaaacatttcctgatggcaactcctgcggcagagcccaggctggggaagtgaactacccagggcagcccctttgtggcccaggataatcaacactgttctctctgtaccatgagctcctccaggagattatttaagtgtattgtatcattggttttctgtgattgtcataacattgtttttgttattgttggtgctgttgttatttattattgtaatttcagtttgcctctactggagaatctcagcaggggtttcagcctgactgtctccctttctctaccagactctacctctgaatgtgctgggaacctcttggagcctgtcaggaactcctcactgtttaaatatttatttattgtgacaaatggagctggtttcctagatatgaatgatgtttgcaatccccattttcctgtttcagcatgttatattcttataaaataaaagcaaaagtcaaatatga

SEQ ID NO: 133562 - DNA, 609 bp, Artificial Sequence
  derived and/or modified sequence
atgtgcagaaccctggccgccttccccaccacctgcctggagagagccaaggagttcaagaccagactgggcatcttcctgcacaagagcgagctgggctgcgacaccggcagcaccggcaagttcgagtggggcagcaagcacagcaaggagaacagaaacttcagcgaggacgtgctgggctggagagagagcttcgacctgctgctgagcagcaagaacggcgtggccgccttccacgccttcctgaagaccgagttcagcgaggagaacctggagttctggctggcctgcgaggagttcaagaagatcagaagcgccaccaagctggccagcagagcccaccagatcttcgaggagttcatctgcagcgaggcccccaaggaggtgaacatcgaccacgagacccacgagctgaccagaatgaacctgcagaccgccaccgccacctgcttcgacgccgcccagggcaagaccagaaccctgatggagaaggacagctaccccagattcctgaagagccccgcctacagagacctggccgcccaggccagcgccgccagcgccaccctgagcagctgcagcctggacgagcccagccacacctag

SEQ ID NO: 133563 - protein, 563 aa, Artificial Sequence
  derived and/or modified sequence
MDFGSLETVVANSAFIAARGSFDGSSSQPSRDKKYLAKLKLPPLSKCESLRDSLSLEFESVCLEQPIGKKLFQQFLQSAEKHLPALELWKDIEDYDTADNDLQPQKAQTILAQYLDPQAKLFCSFLDEGIVAKFKEGPVEIQDGLFQPLLQATLAHLGQAPFQEYLGSLYFLRFLQWKWLEAQPMGEDWFLDFRVLGKGGFGEVSACQMKATGKLYACKKLNKKRLKKRKGYQGAMVEKKILMKVHSRFIVSLAYAFETKADLCLVMTIMNGGDIRYHIYNVNEENPGFPEPRALFYTAQIICGLEHLHQRRIVYRDLKPENVLLDNDGNVRISDLGLAVELLDGQSKTKGYAGTPGFMAPELLQGEEYDFSVDYFALGVTLYEMIAARGPFRARGEKVENKELKHRIISEPVKYPDKFSQASKDFCEALLEKDPEKRLGFRDETCDKLRAHPLFKDLNWRQLEAGMLMPPFIPDSKTVYAKDIQDVGAFSTVKGVAFDKTDTEFFQEFATGNCPIPWQEEMIETGIFGELNVWRSDGQMPDDMKGISGGSSSSSKSGMCLVS

SEQ ID NO: 133564 - protein, 94 aa, Artificial Sequence
  derived and/or modified sequence
MIAARGPFRARGEKVENKELKHRIISEPVKYPDKFSQASKDFCEALLEKDPEKRLGFRDETCDKLRAHPLFKDLNWRQLEAGMLMPPFIPDSKT

SEQ ID NO: 133565 - DNA, 2101 bp, Artificial Sequence
  derived and/or modified sequence
acgggccacaggccaagggcagcagtcaggcctgctctgtctgtgaacgctcccggcttggcctcggctgatgggccctcacgcctgaagcgggcaggaagctccgggatggatttcgggtctttggagaccgtggtggccaactctgccttcatcgccgcccgaggcagctttgacggcagcagctcccaaccctcccgggacaagaagtacctggccaagctcaagctgcccccgctgtccaagtgtgagtccctccgcgacagcctcagcctggagtttgagagtgtgtgcttggagcagcccatcggcaagaagctctttcagcagttcctacaatcggcagagaagcacctgccggccctggagctctggaaagacatcgaggactatgacacggcagacaatgacctccagccacagaaggcccagaccatcctggcccagtacctggacccccaggccaaactcttctgcagcttcctggatgaggggatagtggcgaagtttaaggaggggcctgtggagatccaggacgggctcttccagcccctgctgcaggccaccctggcacacctgggccaagcccccttccaggagtacctgggcagcctgtacttcctgaggttcctgcagtggaagtggctggaagcccagcccatgggggaggactggttcctggacttcagggtcctagggaaagggggcttcggggaggtgtcggcctgccagatgaaggcgaccggcaagctgtatgcctgcaagaagctgaacaagaagcggctgaagaagaggaagggctaccagggtgctatggtggagaagaagattctgatgaaagtacacagcaggttcatcgtgtctctggcctatgcgtttgaaaccaaagccgacctctgtctggtgatgaccatcatgaacggaggtgacatcaggtaccacatctacaacgtgaatgaggagaaccctggcttcccggagccgcgcgccctcttctacacggcgcagatcatctgcggcctggagcacctgcaccagaggcggatcgtctaccgcgacctcaagcccgagaacgtgctgctggacaatgacggcaatgtccggatctctgaccttgggctggccgtggagctgctggacggacagagcaagaccaagggctacgcagggaccccaggtttcatggcccccgagctcctgcagggcgaggagtacgacttctccgtggactactttgccctgggggtcaccctgtatgagatgattgcggccagaggacccttccgagcccgtggagagaaggtggagaacaaggagctgaagcaccggatcatctcagagcccgtgaagtaccctgataagttcagccaggccagcaaggacttctgcgaggcgctgctggagaaggacccggagaagcgcctggggttcagagatgagacctgcgacaagctccgtgcccaccccctcttcaaggaccttaactggaggcagctggaggctgggatgctgatgccccctttcatcccagactccaaaactgtctacgcaaaggatattcaggacgtgggtgccttttccaccgtcaaaggtgtggcctttgacaaaacagacacagaattctttcaggaatttgccactggcaactgccccatcccctggcaggaggagatgatcgagacgggcatctttggcgagctgaacgtgtggcgctcggacggtcagatgccggacgacatgaagggcatctccgggggctccagctcctcgtccaagtcagggatgtgtctggtttcctaggtgacgccccagagtccacgtggaggaaaaggacccatacggctcgatgggggccgcctgcctccgtggtgccagcctggggtctgctagcaaggggacacgtggttccctccacccaggtccccatcacgccatctccttgcggcccaaggaggagaaagcccacatcggcctgagccgccagacgcacatgctggtgccgtgagcccccgactgcatatttcacgtcttttgctccatctcactgagaagacataagatgctctccagagggagtaagccaaaaatctacaaactctta

SEQ ID NO: 133566 - DNA, 548 bp, Artificial Sequence
  derived and/or modified sequence
atgcgcggtcctagtttgagttcaggggcgggagaatttgtgaacagagcaggtttcatggcccccgagctcctgcagggcgaggagtacgacttctccgtggactactttgccctgggggtcaccctgtatgagatgattgcggccagaggacccttccgagcccgtggagagaaggtggagaacaaggagctgaagcaccggatcatctcagagcccgtgaagtaccctgataagttcagccaggccagcaaggacttctgcgaggcgctgctggagaaggacccggagaagcgcctggggttcagagatgagacctgcgacaagctccgtgcccaccccctcttcaaggaccttaactggaggcagctggaggctgggatgctgatgccccctttcatcccagactccaaaactgtctacgcaaaggatattcaggacgtgggtgccttttccaccgtcaaaggtgtggcctttgacaaaacagacacagaattctttcaggaatttgccactggcaactgccccatcccctggcaggaggagat

SEQ ID NO: 133567 - DNA, 1692 bp, Artificial Sequence
  derived and/or modified sequence
atggacttcggcagtctggagactgtcgtcgcgaacagtgcgttcatcgcagcacgaggttcgttcgatgggagctcttctcaaccatcaagggataagaagtacctagccaagctgaaactccctccgcttagcaaatgcgagtccctccgcgattctctgtctctggagtttgagagtgtttgcctcgagcagccaatcggaaaaaagctcttccagcagtttttacagtcagctgagaaacatctgcccgctttagagctgtggaaagatatcgaagattatgataccgctgacaatgacctgcaaccccagaaagcccaaaccatactagctcagtacttagacccccaggccaagctcttttgttcattcctcgacgaaggtattgtcgcaaagttcaaggagggaccagtagaaattcaggacggcctattccagccactcttgcaggccacccttgctcacttgggtcaggcaccattccaagagtacttaggatctctgtattttctcagattccttcagtggaaatggcttgaagcccaaccaatgggcgaggattggttcctagactttcgcgtactggggaaaggtgggttcggcgaagtctctgcctgccagatgaaggcaacaggaaaactctacgcttgtaagaaactaaacaagaagaggctcaaaaaaagaaagggataccagggcgccatggttgaaaagaaaatattaatgaaggtgcatagtagattcatagtaagcttggcttacgcctttgagactaaagctgatctgtgtctggtgatgacaattatgaatggaggggatatacgctaccacatctacaacgtcaacgaagagaatcccggcttcccagaaccccgagcgctcttctatactgcgcagataatatgcggtctagagcatctgcatcagcggcgaatcgtgtaccgagatctgaaacctgagaacgtccttcttgataacgatggcaatgtgcgcatttccgaccttggtctggctgttgaattgcttgatggccagagtaagactaaggggtatgcaggaacgccagggtttatggccccagagctgctccaaggagaagagtatgatttctccgtggattatttcgctctaggggtaaccctttatgagatgatagccgcacgagggccctttcgggctcgcggggaaaaggtggaaaataaagagctgaagcatcgtataatatctgagcctgtcaagtatcccgataaattcagccaagcttcaaaagatttctgtgaagctctgttggagaaggatcctgagaaaagactcggcttccgggatgaaacatgcgacaaacttcgggcgcaccccctgtttaaagatctgaattggaggcaactggaggccggaatgctgatgccccctttcattccagatagcaagaccgtttatgccaaagacatccaggacgtgggggcattcagtacggtaaagggggttgcgtttgataagaccgatacagagtttttccaggaattcgcaacggggaactgtccaatcccttggcaagaggagatgatcgagacgggcatctttggagaacttaacgtgtggcgttcagatggccagatgccggacgacatgaaagggattagcggcggctctagctccagctctaagagcggtatgtgccttgtttcttag

SEQ ID NO: 133568 - DNA, 285 bp, Artificial Sequence
  derived and/or modified sequence
atgattgctgccaggggccctttcagagcgcggggggagaaagtggagaacaaggagctgaagcatagaatcatctccgaacccgttaagtatcctgataagttttcacaagcaagtaaagacttttgcgaggctctcctggaaaaggatcctgagaaacgcttagggtttagagatgagacctgtgacaaactccgggcgcatccactctttaaagacctcaattggaggcaactggaagcaggaatgctgatgccaccctttatacctgattctaagacttag

SEQ ID NO: 133569 - DNA, 1692 bp, Artificial Sequence
  derived and/or modified sequence
atggactttggcagcctggagaccgtggtggccaacagcgccttcatcgccgcccggggcagctttgatggcagcagcagccagcccagccgggacaagaagtacctggccaagctgaagctgccccccctgagcaaatgtgagagcctgcgggacagcctgagcctggagtttgagagcgtgtgcctggagcagcccatcggcaagaagctgttccagcagttcctgcagagcgctgagaagcacctgcctgccctggagctgtggaaggacattgaagattatgacacagctgacaatgacctgcagccccagaaggcccagaccatcctggcccagtacctggacccccaggccaagctgttctgcagcttcctggatgagggcatcgtggccaagttcaaggagggccctgtggagatccaggacggcctcttccagcccctgctgcaggccaccctggcccacctgggccaggcccccttccaggagtacctgggcagcctgtacttcctgcgcttcctgcagtggaagtggctggaggcccagcccatgggagaggactggttcctggacttccgggtgctgggcaagggcggctttggagaggtgtctgcctgccagatgaaggccaccgggaagctgtatgcctgcaagaagctgaacaagaagaggctgaagaagaggaagggctaccagggcgccatggtggagaagaagatcctgatgaaggtgcacagccgcttcatcgtgtccctggcctatgcctttgagaccaaggctgacctgtgcctggtgatgaccatcatgaatggaggagacatccgctaccacatctacaacgtgaatgaagaaaatcctggcttccctgagccccgggccctcttctacacagcccagatcatctgtggcctggagcacctgcaccagaggagaattgtgtacagagacctgaagccagaaaatgtgctgctggacaatgatggaaatgtgcgcatcagtgacctgggcctggccgtggagctgctggatggccagagcaagaccaagggctacgccggcaccccaggcttcatggcccctgagctgctgcagggcgaggagtatgacttctctgtggactactttgccctgggcgtgaccctgtatgagatgattgctgcccggggccccttccgggcccggggggagaaggtggagaacaaggagctgaagcaccgcatcatcagcgagcctgtgaagtacccagacaagttcagccaggccagcaaggacttctgtgaggccctgctggagaaggaccctgagaagaggctgggcttcagagatgagacctgtgacaagctgcgggcccaccccctcttcaaggacctgaactggaggcagctggaggccggcatgctgatgccacccttcatcccagacagcaagacagtgtatgccaaggacatccaggatgtgggcgccttcagcacagtgaagggcgtggcctttgacaagacagacacagagttcttccaggagtttgccactggaaactgccccatcccctggcaggaggagatgattgaaacaggcatctttggagagctgaatgtgtggaggagtgatggccagatgccagatgacatgaagggcatcagcggcggcagcagcagcagcagcaagagcggcatgtgcctggtgtcctag

SEQ ID NO: 133570 - DNA, 285 bp, Artificial Sequence
  derived and/or modified sequence
atgattgctgcccggggccccttccgggcccggggggagaaggtggagaacaaggagctgaagcaccgcatcatcagcgagcctgtgaagtacccagacaagttcagccaggccagcaaggacttctgtgaggccctgctggagaaggaccctgagaagaggctgggcttcagagatgagacctgtgacaagctgcgggcccaccccctcttcaaggacctgaactggaggcagctggaggccggcatgctgatgccacccttcatcccagacagcaagacctag

SEQ ID NO: 133571 - DNA, 1692 bp, Artificial Sequence
  derived and/or modified sequence
atggacttcggcagcctggagaccgtggtggccaacagcgccttcatcgctgcaagggggagtttcgacgggtcttcatcacaaccaagccgagataagaaatacctggctaagctgaagttgcccccgctgagcaagtgcgagtctctgagagacagcctttctctggagttcgagtccgtctgtctggaacaacccattgggaagaaattgtttcaacagtttctacagagcgctgaaaagcatctacctgctctagagctctggaaggatattgaagactatgataccgctgacaatgacctgcaaccgcagaaagctcaaaccattttggcccaataccttgatccacaggccaagctgttctgctctttcctggatgagggtatcgtcgcgaagttcaaagagggcccagtcgaaatccaggatggtctgttccagcccctgctgcaggccacgctcgcacatcttgggcaagcccccttccaagagtacctgggctccttatactttcttcgcttcctgcagtggaagtggctggaagcccagcctatgggagaggactggttccttgatttcagggtactcggaaaaggcgggtttggagaagtctccgcgtgccaaatgaaggcaactggaaaactttacgcctgcaaaaagttaaataaaaaacgactgaagaaacgcaagggataccaaggtgcgatggtggagaaaaagattctaatgaaggtacatagcaggtttatcgtttccctcgcctacgctttcgaaacaaaggcagatctctgtcttgtcatgacaattatgaacggcggagacatccggtaccacatctacaatgtaaacgaggagaatccggggtttcctgagccccgtgctctgttctatacggcacagatcatttgcggacttgaacacctgcaccagcgaagaatcgtttaccgtgaccttaaaccggagaacgtcttgttagataacgacggaaacgtgcggatttcagacctagggctggccgtcgagctgttagatggccagtctaaaaccaagggctacgccgggacccctggcttcatggcaccggaactgttgcagggtgaggagtatgatttctctgtcgactacttcgcacttggcgtgaccctatacgagatgatagcagcacgaggaccgtttcgggcacgcggcgagaaagtcgaaaataaggaactgaaacatcggatcatctcagagcccgttaagtaccctgataaattttcgcaggcaagtaaggatttctgcgaagcactgctggaaaaggacccagaaaaacgattgggcttcagggatgaaacctgcgataaattgagggcacacccactgttcaaagatctgaactggcgccagttggaagccggaatgctcatgcccccctttatcccggacagcaagacagtgtacgccaaggacattcaagatgtgggggcgtttagtacggtgaagggagttgcctttgacaagacagacactgagttctttcaggaattcgcgaccgggaactgccccatcccttggcaagaagagatgatcgagacaggcatcttcggagagctgaacgtctggcggagcgatggacaaatgcctgacgacatgaagggcatcagtggcgggtccagttcatcctccaagagtggcatgtgtctggtttcctag

SEQ ID NO: 133572 - DNA, 285 bp, Artificial Sequence
  derived and/or modified sequence
atgatcgccgcccggggccccttccgggcccggggcgagaaggtggaaaacaaggagctgaaacatcgtattatctccgagcctgtgaagtatccagataagttctcccaggcttccaaggacttttgtgaggcgttgcttgagaaggaccctgagaagagattgggatttagggacgagacctgcgacaagttgcgcgcgcacccccttttcaaagacctcaattggcgccagcttgaagccggaatgttgatgccccccttcatcccagactctaaaacttag

SEQ ID NO: 133573 - DNA, 1692 bp, Artificial Sequence
  derived and/or modified sequence
atggacttcggttctctggagacggtagtggcaaattcggcattcatcgcagcccgtggcagtttcgacggctcatcttctcagccttccagagacaagaagtatttggctaagttgaaacttcctcctctgtccaagtgtgagagcctgcgggacagcctgtctcttgagtttgagtctgtttgtcttgagcagccaatcggtaagaagttgttccagcagtttctacaatctgcagagaagcatttgccagcactcgagctatggaaagatattgaggattacgacacggccgataatgacctgcagccgcagaaagcccaaacgatacttgcccaatatctggatcctcaggccaagttattctgttcctttctcgacgagggaatcgtcgcgaagtttaaggagggaccagtggaaatccaggatggccttttccagcctttacttcaagcgaccctggcacacctcggccaagctcccttccaggagtacctagggagtctgtactttctgcgctttctgcagtggaagtggcttgaggcacagcctatgggggaagactggtttctggactttcgggtgctgggaaagggaggctttggcgaggtgtcagcgtgtcaaatgaaagctacaggaaaattatacgcctgtaaaaagttgaataaaaaaaggcttaagaagcgtaaagggtatcagggcgcaatggtggaaaaaaaaatcctcatgaaagtgcacagcaggttcatcgtatccctcgcatacgctttcgagaccaaagctgacctttgtttggtaatgacgattatgaacggaggggacatcagataccatatttacaacgttaatgaagagaaccctggctttcctgaaccgagagctcttttttatacagcacagataatttgcgggctagaacacttgcaccaacgtcgcattgtttatcgcgacctcaagccagaaaatgtgctcctcgacaatgacgggaacgtaagaatctcggacttaggcctcgccgtggaactgctggacgggcagtccaaaactaagggatacgccggaaccccaggatttatggcgccagaacttcttcagggggaagagtatgatttcagtgtagactactttgcacttggtgtcactctctatgagatgatcgccgctaggggtccctttcgtgccagaggcgaaaaggtcgagaataaagagctaaagcaccgcattatttccgagccagtgaagtatccagacaaattttcccaggcaagcaaggatttctgcgaggctctcttagagaaagatcccgagaagaggctgggatttagagacgagacctgtgataagttgagagctcacccactgttcaaagatctgaattggagacagctcgaggcgggtatgctgatgcccccttttatacccgattctaagacggtgtacgccaaggatatccaggatgtgggggctttttctactgtgaagggggtcgcctttgataagacagacaccgaattcttccaggaattcgcaaccgggaattgtcccattccttggcaggaggagatgatcgagacaggcatttttggcgagctgaatgtttggagatctgacggccaaatgcccgatgacatgaaaggtatatccggcggttcgtcaagctccagtaagtctggtatgtgtcttgtgagctag

SEQ ID NO: 133574 - DNA, 285 bp, Artificial Sequence
  derived and/or modified sequence
atgatagccgctcgtggcccatttagagcacgcggagagaaagttgaaaataaggagctgaaacataggattatctcagagccggtgaaataccctgacaaattctctcaagcctctaaggatttttgcgaggctcttttagagaaagaccccgaaaagaggctcggctttcgcgatgagacttgtgacaaactgcgggctcacccactgttcaaggacctgaactggcgccagctggaagccggaatgctcatgcctcctttcatacccgattctaagacctag

SEQ ID NO: 133575 - DNA, 1692 bp, Artificial Sequence
  derived and/or modified sequence
atggacttcggcagcctggagaccgtggtggccaacagcgccttcatcgccgccagaggcagcttcgacggcagcagcagccagcccagcagagacaagaagtacctggccaagctgaagctgccccccctgagcaagtgcgagagcctgagagacagcctgagcctggagttcgagagcgtgtgcctggagcagcccatcggcaagaagctgttccagcagttcctgcagagcgccgagaagcacctgcccgccctggagctgtggaaggacatcgaggactacgacaccgccgacaacgacctgcagccccagaaggcccagaccatcctggcccagtacctggacccccaggccaagctgttctgcagcttcctggacgagggcatcgtggccaagttcaaggagggccccgtggagatccaggacggcctgttccagcccctgctgcaggccaccctggcccacctgggccaggcccccttccaggagtacctgggcagcctgtacttcctgagattcctgcagtggaagtggctggaggcccagcccatgggcgaggactggttcctggacttcagagtgctgggcaagggcggcttcggcgaggtgagcgcctgccagatgaaggccaccggcaagctgtacgcctgcaagaagctgaacaagaagagactgaagaagagaaagggctaccagggcgccatggtggagaagaagatcctgatgaaggtgcacagcagattcatcgtgagcctggcctacgccttcgagaccaaggccgacctgtgcctggtgatgaccatcatgaacggcggcgacatcagataccacatctacaacgtgaacgaggagaaccccggcttccccgagcccagagccctgttctacaccgcccagatcatctgcggcctggagcacctgcaccagagaagaatcgtgtacagagacctgaagcccgagaacgtgctgctggacaacgacggcaacgtgagaatcagcgacctgggcctggccgtggagctgctggacggccagagcaagaccaagggctacgccggcacccccggcttcatggcccccgagctgctgcagggcgaggagtacgacttcagcgtggactacttcgccctgggcgtgaccctgtacgagatgatcgccgccagaggccccttcagagccagaggcgagaaggtggagaacaaggagctgaagcacagaatcatcagcgagcccgtgaagtaccccgacaagttcagccaggccagcaaggacttctgcgaggccctgctggagaaggaccccgagaagagactgggcttcagagacgagacctgcgacaagctgagagcccaccccctgttcaaggacctgaactggagacagctggaggccggcatgctgatgccccccttcatccccgacagcaagaccgtgtacgccaaggacatccaggacgtgggcgccttcagcaccgtgaagggcgtggccttcgacaagaccgacaccgagttcttccaggagttcgccaccggcaactgccccatcccctggcaggaggagatgatcgagaccggcatcttcggcgagctgaacgtgtggagaagcgacggccagatgcccgacgacatgaagggcatcagcggcggcagcagcagcagcagcaagagcggcatgtgcctggtgagctag

SEQ ID NO: 133576 - DNA, 285 bp, Artificial Sequence
  derived and/or modified sequence
atgatcgccgccagaggccccttcagagccagaggcgagaaggtggagaacaaggagctgaagcacagaatcatcagcgagcccgtgaagtaccccgacaagttcagccaggccagcaaggacttctgcgaggccctgctggagaaggaccccgagaagagactgggcttcagagacgagacctgcgacaagctgagagcccaccccctgttcaaggacctgaactggagacagctggaggccggcatgctgatgccccccttcatccccgacagcaagacctag

SEQ ID NO: 133577 - protein, 217 aa, Artificial Sequence
  derived and/or modified sequence
MEVENEASCSPGSASGGSREYKVVMLGAGGVGKSAMTMQFISHQFPDYHDPTIEDAYKTQVRIDNEPAYLDILDTAGQAEFTAMREQYMRGGEGFIICYSVTDRQSFQEAAKFKELIFQVRHTYEIPLVLVGNKIDLEQFRQVSTEEGLSLAQEYNCGFFETSAALRFCIDDAFHGLVREIRKKESMPSLMEKKLKRKDSLWKKLKGSLKKKRENMT

SEQ ID NO: 133578 - DNA, 654 bp, Artificial Sequence
  derived and/or modified sequence
atggaggtggagaacgaggccagctgcagccccggcagcgccagcggcggcagcagagagtacaaggtggtgatgctgggcgccggcggcgtgggcaagagcgccatgaccatgcagttcatcagccaccagttccccgactaccacgaccccaccatcgaggacgcctacaagacccaggtgagaatcgacaacgagcccgcctacctggacatcctggacaccgccggccaggccgagttcaccgccatgagagagcagtacatgagaggcggcgagggcttcatcatctgctacagcgtgaccgacagacagagcttccaggaggccgccaagttcaaggagctgatcttccaggtgagacacacctacgagatccccctggtgctggtgggcaacaagatcgacctggagcagttcagacaggtgagcaccgaggagggcctgagcctggcccaggagtacaactgcggcttcttcgagaccagcgccgccctgagattctgcatcgacgacgccttccacggcctggtgagagagatcagaaagaaggagagcatgcccagcctgatggagaagaagctgaagagaaaggacagcctgtggaagaagctgaagggcagcctgaagaagaagagagagaacatgacctag

SEQ ID NO: 133579 - DNA, 654 bp, Artificial Sequence
  derived and/or modified sequence
atggaggtcgagaatgaggccagctgttcacccggtagcgcgagcgggggtagccgagaatacaaggtggtgatgctgggcgccggcggtgtgggtaagtccgctatgaccatgcagttcatctctcaccagtttcctgactaccacgatccaacgatcgaagatgcgtataagactcaagtccgaattgataacgagcccgcttacctggatatcttagacacagcaggacaggccgagttcactgccatgagggagcagtatatgcgtggcggggaggggttcatcatttgctactccgttacagaccgtcagtcttttcaagaggccgccaagtttaaggagcttattttccaggtgcgccatacctatgagattccgctggttttggtgggcaataaaattgaccttgagcagttccggcaggtgtctactgaggagggattatccctggcacaggaatacaactgcggtttttttgagacttctgcggctctaagattttgcattgacgacgctttccacgggctcgtgcgggagatcaggaaaaaggaaagcatgccttctctgatggagaagaagctgaaacggaaagattcactgtggaagaagcttaagggctcccttaagaagaagagggagaatatgacgtag

SEQ ID NO: 133580 - DNA, 654 bp, Artificial Sequence
  derived and/or modified sequence
atggaggtggagaatgaggccagctgcagccctggcagcgccagcggcggcagccgggagtacaaggtggtgatgctgggcgctgggggcgtgggcaagagcgccatgaccatgcagttcatcagccaccagttcccagactaccatgaccccaccattgaagatgcctacaagacccaggtgagaattgacaatgaaccagcctacctggacatcctggacacagctggccaggccgagttcaccgccatgagggagcagtacatgagaggaggagagggcttcatcatctgctacagcgtgacagaccggcagagcttccaggaggccgccaagttcaaggagctgatcttccaggtgcgccacacctatgagatccccctggtgctggtgggcaacaagattgacctggagcagttccggcaggtgtccacagaggagggcctgagcctggcccaggagtacaactgtggcttctttgagaccagcgctgccctgcgcttctgcattgatgatgccttccacggcctggtgcgggagatcaggaagaaggagagcatgcccagcctgatggagaagaagctgaagaggaaggacagcctgtggaagaagctgaagggcagcctgaagaagaagcgggagaacatgacctag

SEQ ID NO: 133581 - DNA, 654 bp, Artificial Sequence
  derived and/or modified sequence
atggaggtggagaacgaggccagctgcagccccggcagcgccagcggcggtagcagggagtataaggttgtcatgctgggggcaggcggcgtgggcaaatcggcaatgaccatgcagtttatatcccatcagttccccgactatcatgacccaaccatcgaggatgcatacaagacccaagtacggatcgataacgaaccagcctacctggacatactggataccgccggacaggcagaattcactgccatgagagagcagtatatgcggggaggagaaggctttatcatttgctattctgtaaccgataggcagagctttcaggaagccgctaagttcaaggagctaatcttccaggtccggcacacgtacgaaatcccattggttttggtgggcaacaagatagacttagagcagttccggcaggtttctacagaagagggtttaagcctagcacaggagtacaattgcgggttcttcgaaacgtccgctgctcttcgattctgcatcgatgatgcatttcatggccttgtacgcgagataaggaagaaggagtccatgccctctctgatggagaaaaaactcaaacgaaaggatagcttgtggaagaagctgaaaggctctctcaagaagaaacgagagaatatgacttag

SEQ ID NO: 133582 - DNA, 654 bp, Artificial Sequence
  derived and/or modified sequence
atggaagtggagaacgaggcatcgtgttctcccggatcagcttctggcggatctcgcgaatataaagtggtgatgttaggcgcagggggagtgggcaagtctgcaatgacgatgcagtttattagccaccagtttccagattatcacgacccaaccatcgaggatgcgtacaagactcaagttcgcatcgataacgagcccgcttacttggatattctagacaccgctgggcaggccgaattcacagctatgcgggagcagtacatgaggggaggggagggcttcatcatctgttacagcgtcactgaccgccaatccttccaggaggcagccaaatttaaggagctaatcttccaagtgcgccacacatacgaaatcccgctagtcctcgtaggcaataaaatcgaccttgaacagtttagacaggtttcgaccgaggagggactgtcattggcccaggaatacaactgtggattcttcgagacctctgccgcactgcgcttctgtattgatgacgcctttcacggcctggtcagggagattagaaagaaggaatcaatgccttctctgatggagaagaagctgaagagaaaggactcactgtggaaaaagttaaagggcagcttaaagaaaaaacgggagaacatgacatag

SEQ ID NO: 133583 - DNA, 1092 bp, Artificial Sequence
  derived and/or modified sequence
gttgctatgagacccgctcgagcggaggaccagcagccagcccgacgctgatggttcttacctcgtactaaaacctttgctttgacacagttttagagttgcttaatattcgagcaagcacctgacacgggtgactttctccttctttttttcctccggtccctcgggtaagatggaggtagaaaatgaagccagctgctccccgggcagcgcatcaggcgggtccagagagtacaaggtggtaatgctgggagcagggggagttggtaaaagcgcaatgacaatgcagtttattagtcatcagttccctgattatcatgaccctactatagaagatgcttataagacccaggtcaggattgacaatgagccagcttacttggacatcttggacactgctggccaggcagaattcacagccatgcgggagcagtacatgcgaggtggggaaggcttcatcatctgctactccgtcactgaccgtcaatcatttcaggaggctgccaagtttaaagagctcatttttcaggtccgccacacctatgaaattcccctggtgctggtgggtaacaaaattgatctggaacagttccgccaggtttctacagaagaaggcttgagtcttgcccaagaatataattgtggtttttttgagacctctgcagccctcagattctgtattgatgatgcttttcatggcttagtgagggaaattcgcaagaaggagtccatgccatccttgatggaaaagaaactgaagagaaaagacagcctgtggaagaagctcaaaggttctttgaagaagaagagagaaaatatgacatgatatctttgcttttgagttcctcacgctctctgaattttattagttggacaattccatatgtagcattctgcttcaatattatctctctatgtgtctctctctctttaaatatctgcctgtaggtaaaagcaagctctgcatatctgtacctcttgagatagttttgttttgcctttaacagttggatggattttgtcaatcagctggatatgctgtttagtttttacaacatagtactaaataaaattgacattccaattgcctca

SEQ ID NO: 133584 - protein, 406 aa, Artificial Sequence
  derived and/or modified sequence
MTTPANAQNASKTWELSLYELHRTPQEAIMDGTEIAVSPRSLHSELMCPICLDMLKNTMTTKECLHRFCSDCIVTALRSGNKECPTCRKKLVSKRSLRPDPNFDALISKIYPSREEYEAHQDRVLIRLSRLHNQQALSSSIEEGLRMQAMHRAQRVRRPIPGSDQTTTMSGGEGEPGEGEGDGEDVSSDSAPDSAPGPAPKRPRGGGAGGSSVGTGGGGTGGVGGGAGSEDSGDRGGTLGGGTLGPPSPPGAPSPPEPGGEIELVFRPHPLLVEKGEYCQTRYVKTTGNATVDHLSKYLALRIALERRQQQEAGEPGGPGGGASDTGGPDGCGGEGGGAGGGDGPEEPALPSLEGVSEKQYTIYIAPGGGAFTTLNGSLTLELVNEKFWKVSRPLELCYAPTKDPK

SEQ ID NO: 133585 - DNA, 1744 bp, Artificial Sequence
  derived and/or modified sequence
cagcgcccgggccatggcggcggcggtggcgggagctgctgtctgagcagcggttgcggaccgagcgaacttggcccaggagcccgggcctagggagaggcgcggcggcggcgggagcgcgaacggctggagctggccttcttcgccttctcctcggctgtggagccctggtggggggtctgcgcccggtcaccatgacgacgccggcgaatgcccagaatgccagcaaaacgtgggaactgagtctgtatgagctgcaccggaccccgcaggaagccataatggatggcacagagattgctgtttcccctcggtcactgcattcagaactcatgtgccctatctgcctggacatgctgaagaatacgatgaccaccaaggagtgcctccacagattctgctctgactgcattgtcacagccctacggagcgggaacaaggagtgtcctacctgccgaaagaagctggtgtccaagcgatccctacggccagaccccaactttgatgccctgatctctaagatctatcctagccgggaggaatacgaggcccatcaagaccgagtgcttatccgcctgagccgcctgcacaaccagcaggcattgagctccagcattgaggaggggctacgcatgcaggccatgcacagggcccagcgtgtgaggcggccgataccagggtcagatcagaccacaacgatgagtgggggggaaggagagcccggggagggagaaggggatggagaagatgtgagctcagactccgcccctgactctgccccaggccctgctcccaagcgaccccgtggagggggcgcaggggggagcagtgtagggacagggggaggcggcactggtggggtgggtgggggtgccggttcggaagactctggtgaccggggagggactctgggagggggaacgctgggccccccaagccctcctggggcccccagccccccagagccaggtggagaaattgagctcgtgttccggccccaccccctgctcgtggagaagggagaatactgccagacgaggtatgtgaagacaactgggaatgccacagtggaccacctctccaagtacttggccctgcgcattgccctcgagcggaggcaacagcaggaagcaggggagccaggagggcctggagggggcgcctctgacaccggaggacctgatgggtgtggcggggagggtgggggtgccggaggaggtgacggtcctgaggagcctgctttgcccagcctggagggcgtcagtgaaaagcagtacaccatctacatcgcacctggaggcggggcgttcacgacgttgaatggctcgctgaccctggagctggtgaatgagaaattctggaaggtgtcccggccactggagctgtgctatgctcccaccaaggatccaaagtgaccccaccaggggacagccagaggaaggggaccatggggtatccctgtgtcctggtctatcaccccagcttctttgtcccccagtacccccagcccagccagccaataagaggacacaaatgaggacacgtggcttttatacaaagtatctatatgagattcttctatattgtacagagtggggcaaaacacgcccccatctgctgccttttctattgccctgcaacgtcccatctatacgaggtgttggagaaggtgaagaaccctcccattcacgcccgcctaccaacaacaaacgtgcttttttcctctttgaaacctgcaaaaaaa

SEQ ID NO: 133586 - DNA, 1221 bp, Artificial Sequence
  derived and/or modified sequence
atgaccaccccagccaacgctcagaatgcgtccaagacctgggagctcagtctctatgagctccaccgaacacctcaagaggctattatggacggcaccgaaattgctgtctcccctcggtccttacactctgaactcatgtgtccaatctgtttggatatgctgaagaatactatgacaaccaaagaatgcttacaccggttctgcagcgactgtattgtgacagcccttcggagcggaaataaggaatgccccacatgccggaagaagttagtcagcaaacggagtttaaggcctgatcctaatttcgatgcgctgatttctaagatttatccaagtcgagaggagtatgaggcccaccaggatagggtactcatacgactcagtagactccacaaccagcaggctctctcgagcagcatcgaggaaggactccgaatgcaggcgatgcacagagctcagagggtgagaagaccgattccagggtctgatcaaacaaccactatgtcgggaggcgaaggcgaacctggggagggcgaaggggatggcgaggacgtatcttccgatagtgcacctgactctgcgcctggacctgcgcccaaacgaccccggggaggaggagccggaggaagttctgtgggcactgggggcggcggtaccggaggagtgggcggcggagctggttcggaagactcgggcgaccgaggaggcaccctgggtggcgggaccctgggaccccccagcccacctggagctccctctccgccagaacctggtggggaaatagagctcgtttttcgcccacaccccttactcgtggagaagggagagtactgccagactaggtatgtaaagaccacaggtaacgcaacggtggatcacttatccaagtacttggccctaaggattgccctggagaggagacagcagcaagaggccggtgagccggggggcccgggagggggagctagcgacactggagggcccgacggttgtggaggggagggaggaggagcgggaggcggggatggccctgaggagccggccctgccttcgcttgagggggttagcgaaaaacaatacacaatttacattgcccccgggggaggtgcctttaccacactgaacgggtccttaaccctggaacttgtgaatgaaaaattttggaaggtgtccaggcccctggaactatgctacgccccaaccaaggacccaaaatag

SEQ ID NO: 133587 - DNA, 1221 bp, Artificial Sequence
  derived and/or modified sequence
atgacgactcctgctaatgcccagaacgcctcaaagacttgggagctctcactatatgaactacatcggacacctcaggaggccattatggacggcaccgaaatcgctgtaagccccagaagcctgcactctgagctcatgtgcccgatctgcctggatatgctgaagaacaccatgaccactaaggaatgtctccataggttctgtagcgattgtattgttactgccctcagatccggaaacaaagaatgtcctacctgcagaaaaaaactggtcagcaagagatctttgcgtccagatcctaatttcgatgctctgatctcaaaaatatatcccagcagggaagagtacgaagcgcaccaagatagggtgctgattcgcttatcaaggctgcacaatcagcaggccctgtcatcctcgatcgaggagggcctgaggatgcaagcaatgcaccgcgcgcagagggtaagaagacccattccagggtctgaccagactacaactatgtcgggcggagaaggggaaccgggggagggggagggggacggggaggacgtgtcttctgatagcgcccctgactccgcccctggaccagccccaaaaaggcctagaggagggggcgccggggggagctccgtcgggaccgggggcggtgggacgggcggagtgggggggggtgctggatccgaagatagcggcgacagggggggaaccctggggggcggcactctcgggcccccaagcccacccggcgccccctcacccccagagcctggaggcgaaattgaactggtgttcagaccgcatccccttctcgtggagaaaggtgaatactgccaaacgaggtacgtcaagactacaggcaacgctactgtggaccacttgtctaaatatttagccctgcgcattgcccttgagaggcgacagcagcaggaggcaggggagcccggaggtcccggaggcggcgcatcggacaccggaggtcctgacggctgtggcggcgaagggggaggcgccgggggcggggacggacccgaagagccggccctgccttccttagagggggtcagtgagaagcagtataccatctacattgccccaggggggggggcatttacaacccttaatggcagcctgaccctcgaactcgttaatgagaagttttggaaggtcagtcggcctctggaactgtgctatgctccgaccaaagaccctaaatag

SEQ ID NO: 133588 - DNA, 1221 bp, Artificial Sequence
  derived and/or modified sequence
atgaccactcctgccaatgcccagaatgctagtaagacctgggaactgagcttgtacgagctgcatcgaacaccacaggaggccatcatggatgggacagaaattgcggtgtcgccccggagccttcattccgagctgatgtgccctatatgtctagacatgctaaaaaacaccatgacgaccaaggaatgccttcatcgcttttgttctgactgcatagttacagcacttcgatccggcaacaaagagtgtcctacctgccgcaagaaacttgtgtctaagcggtcgctaagacccgatccgaactttgacgctctgatttcaaagatctaccctagtagagaggagtatgaggcacatcaagatcgggtgctgatccgtctcagtcggttacacaaccagcaagccctctcctcaagcatcgaggagggattgagaatgcaagctatgcacagagcccagcgagtgcgccggccgatacccggctctgaccagactactacgatgtctggtggcgaaggggagccaggggaaggggaaggggacggagaggacgtgtccagtgattccgcccctgattcagcacctggtcctgcacccaagagaccccgagggggaggcgccggcggaagctctgtggggaccgggggtggcggaacagggggcgtgggcggcggcgcagggtccgaggatagcggagaccgtggaggtacccttggtggcggaaccttaggccctccatctccacccggagccccttcccctcctgagccagggggtgagattgagctggtgtttagaccacatccgctgctggtggaaaaaggggagtattgtcagaccagatatgtcaagacaacgggaaacgcgaccgtcgatcacctgtcaaaatacctggcattaaggatagccctggaacgtcggcagcagcaagaggccggtgagccagggggccccggcgggggcgccagtgataccgggggtcccgatggatgcgggggagaggggggtggtgccggcggcggggatgggcccgaagaacccgcactgcctagtctagaaggcgttagcgaaaagcagtacacaatttacatcgctccgggaggtggggcctttactactcttaatgggtcacttaccttggaactggtaaatgaaaaattttggaaagtttcccgaccactagaactgtgctatgctcccaccaaggatcctaagtag

SEQ ID NO: 133589 - DNA, 1221 bp, Artificial Sequence
  derived and/or modified sequence
atgactactcccgcgaacgcgcagaatgcctccaagacctgggagctttccctgtacgagttgcatcggacaccacaggaggccatcatggatgggactgaaattgccgtctcccccagatccctccacagcgagctaatgtgtcctatctgcctcgatatgctgaagaatacaatgacaaccaaggaatgtctgcatagattctgcagtgattgcatcgtgactgcactgcgttccggtaacaaggagtgtccaacatgtcggaaaaagctggtgagcaagcgatcattgagacccgatccaaattttgatgctctgatcagtaaaatatacccaagcagagaggagtacgaagcgcatcaagacagggtcttgatccgtctgtctcgcctgcacaaccagcaagctctctctagtagtattgaggagggattgcgaatgcaggcgatgcatagggcccagagagttcggcgccctattccgggcagtgaccagaccactactatgagtggtggagagggagagcctggagagggtgaaggcgatggcgaggacgtttcaagcgacagcgctcctgatagtgcccctggccctgctcccaagaggcccagaggaggcggcgcaggaggcagctctgtaggcactggtggtggagggacgggtggcgtagggggtggtgccggctcagaggattccggagacagaggtggtactctcggcggtggcactttgggcccgcccagccccccgggtgccccttctcctcctgagccggggggcgagatcgaattagttttccgtccgcacccgttgcttgtggaaaaaggcgagtactgtcaaacccgatatgtgaagacaacaggaaacgccacagtggaccacctgagcaagtatttggctttgaggatagcattggaacgccgccagcagcaggaggccggcgagcccggcggccccggtggtggtgcatccgataccggtggtccggatggctgcgggggcgagggagggggggcagggggaggtgatgggcctgaagagcccgcccttccatcgctcgagggcgtgtctgagaagcagtacacaatatatatcgcacctggggggggtgcttttacgaccctgaatggcagtctcacactcgagcttgtcaatgagaaattctggaaggtaagtcggcccctggagctgtgttatgcaccaacgaaagatcccaagtag

SEQ ID NO: 133590 - DNA, 1221 bp, Artificial Sequence
  derived and/or modified sequence
atgaccactcctgccaatgctcagaatgcaagcaagacctgggagctgagtttatacgagttgcaccggacaccacaagaagccattatggacgggacagagatcgccgtatcaccgagaagcctacacagcgagctgatgtgccctatctgcctagatatgcttaagaacaccatgacgacaaaggagtgtctgcatagattttgctctgattgtattgtcacggcgctgagaagtgggaacaaggaatgccccacgtgccgcaaaaagcttgtgtctaaacgcagcttgaggcccgatccgaactttgacgcccttattagtaaaatctatcccagccgcgaagagtacgaggcccaccaagatcgggtgcttatcaggttaagtagactgcataatcagcaggccttaagttcctccattgaggaaggccttaggatgcaggccatgcacagggctcagagggtgaggcggccgatacctggctccgatcaaacaactactatgtcggggggggaaggcgaacctggtgaaggtgaaggggatggggaggatgtttcctcagactccgccccagactctgcgcccggaccagccccgaaacgacctagaggcgggggcgccggcggatcaagtgtcggcactggagggggagggacggggggggttggcgggggggcgggctcggaggactccggcgaccgcgggggaacgcttggagggggtacgctaggccccccttctcccccgggcgccccctcaccacctgagcccgggggtgagatcgagttggtgttcaggccccaccccctcctagtggaaaagggcgagtattgccaaacacgatacgtgaagaccacaggaaacgccactgtggatcacctgagcaagtacttggcactgcgcattgctttagagcggaggcaacagcaggaagcgggagaacccggaggtccaggaggtggcgcttcagacactgggggacccgatgggtgtggcggtgaaggcggtggggctggaggcggcgatggccctgaagaaccggcactcccttcattggagggggtcagtgaaaagcaatacacgatctacattgcaccaggagggggggccttcactacgctgaacggaagccttacccttgagttagtcaatgagaagttttggaaagtgagccgacccctcgagctctgctacgcgcccactaaggatcctaagtag

SEQ ID NO: 133591 - DNA, 1221 bp, Artificial Sequence
  derived and/or modified sequence
atgacaacaccagcaaatgcccaaaacgctagcaagacatgggagcttagcctgtatgagctgcacaggacaccccaagaggccataatggatggaactgaaatcgctgtgagcccaagatcgttacactcagaactcatgtgccccatttgcctagatatgctaaagaacactatgacaacgaaggagtgcttgcacagattttgctctgattgtatcgtaacggcgcttagatccgggaataaggagtgccccacctgtcggaaaaaactcgtgtcaaaacgatcactgcggcctgatcctaattttgacgctctgattagtaagatatatcctagcagggaggagtacgaggcacatcaggatcgggttttgataagactcagtaggttacataaccagcaggctctcagctcctctatcgaagaaggcttgaggatgcaggcaatgcaccgcgcacagcgggtcaggcgccctatccccggcagcgatcagaccactactatgagcggcggcgagggtgagccaggcgagggagagggggatggcgaagatgtcagcagcgattctgcgcccgactccgcccccggacctgcccctaagcggcctcgaggcggaggtgctggaggctctagcgtaggcacaggaggaggcggtactggaggcgttgggggaggagcaggcagcgaagatagtggcgatagggggggcactctgggcggtggtacactcggtcctcctagtcctcctggtgcaccaagtcctcccgaacctggaggggagattgaactcgtttttagaccccatccccttttggtagaaaagggcgagtattgccagaccaggtatgtgaagacaaccggaaatgccacggtcgatcacttgagcaaatatctggcacttcgcatcgcactagagcgtaggcaacagcaggaagccggcgaaccagggggccctggcgggggggcaagtgacacaggaggccccgatgggtgtgggggcgaaggcggcggggcaggtgggggtgacgggcccgaagaacctgccctcccctcattagaaggggtgtctgagaaacaatatacaatctacattgcaccaggaggaggggctttcacaaccctgaatggctccctgaccctcgagcttgtgaacgagaagttttggaaggtttcgagaccacttgaattgtgctacgcccccaccaaagatcctaaatag

SEQ ID NO: 133592 - DNA, 1221 bp, Artificial Sequence
  derived and/or modified sequence
atgaccaccccagccaatgcccagaatgccagcaagacctgggagctgagcctgtatgagctgcacaggaccccccaggaggccatcatggatggaacagaaattgctgtgagccccaggagcctgcacagcgagctgatgtgccccatctgcctggacatgctgaagaacaccatgaccaccaaggaatgtctgcaccgcttctgcagcgactgcatcgtgacagccctgcggagcggcaacaaggaatgtcccacctgcaggaagaagctggtgtccaagaggagcctgcggccagaccccaactttgatgccctgatcagcaagatctaccccagccgggaggagtatgaggcccaccaggacagagtgctgatccggctgagccggctgcacaaccagcaggccctgagcagcagcattgaggagggcctgaggatgcaggccatgcaccgggcccagagggtgagaagacccatccctggcagtgaccagaccaccaccatgtctggaggagagggggagcccggggagggggagggagatggagaagatgtgtccagtgacagcgccccagacagcgcccctggccctgcccccaagaggccccggggcggcggggccggcggcagctctgtgggcactggaggcggcggcaccggcggcgtgggcggcggggccggcagcgaggacagcggggaccggggcggcaccctgggcggcggcaccctgggcccccccagccccccaggggcccccagccccccagagcccggcggggagattgagctggtgttccggccccaccccctgctggtggagaagggggagtactgccagaccaggtatgtgaagaccactggaaatgccaccgtggaccacctgagcaagtacctggccctgagaattgccctggagcggcggcagcagcaggaggccggggagcccggcggccctgggggcggggccagtgacaccggcggcccagatggctgcggcggggagggcggcggggccggcggcggagatggccctgaggagcccgccctgcccagcctggagggcgtgtctgagaagcagtacaccatctacatcgcccctgggggcggggccttcaccaccctgaatggcagcctgaccctggagctggtgaatgagaagttctggaaggtgtcccggcccctggagctgtgctacgcccccaccaaggaccccaagtag

SEQ ID NO: 133593 - DNA, 1221 bp, Artificial Sequence
  derived and/or modified sequence
atgaccacccccgccaacgcccagaacgccagcaagacctgggagttatctttgtacgaactccacagaaccccacaagaggcaattatggatggcacggagattgcagtgtcacctcggtctctgcactccgaactcatgtgccctatttgcttggacatgttgaaaaataccatgacaacaaaagagtgcttacatcgattctgttctgactgcatagtgaccgcacttaggagcggtaataaggaatgtccaacctgcaggaagaagctagtaagcaaacggtctttacgtcctgacccaaacttcgacgccctgattagcaaaatttacccctctcgcgaagaatacgaggcacaccaggatcgtgttttgatccggcttagtcgactgcacaatcagcaggctctatcctccagtattgaagagggcctcagaatgcaggccatgcatagggcacagcgggtgcggaggcctatcccaggaagcgaccagactaccaccatgtcagggggtgagggtgagcccggagagggagaaggagacggagaggatgtgtcgtcagattccgctccagattccgcccccggtccagcgccaaagcggccccgcggtgggggagcagggggtagcagcgtggggactgggggaggtggcactgggggtgtgggcggaggagctggaagcgaggattcaggggaccgcggagggaccctgggtggcgggaccctcggccctccaagtcctcctggtgccccttcgccgcctgaacccggtggggagatcgagctggtctttagaccacacccgctgctcgtagaaaagggtgagtactgccaaacccggtacgtcaagacaacaggaaacgcgactgtggaccatctctcaaagtacctcgctctaagaattgcgctggagcgcaggcagcaacaggaagcaggggagccaggcggccctggaggcggtgcgagtgataccggcggtccagacggttgcggcggcgaaggtggtggcgccggtggtggagacggtcctgaggagcccgccttacccagcctggagggtgtgtcagaaaaacagtataccatttacattgcccccggggggggagcattcacgactctgaacggtagcctgactctcgaactggtgaatgagaaattttggaaggtctctcggccgctggaactgtgctacgcccctactaaggatccaaagtag

SEQ ID NO: 133594 - DNA, 1221 bp, Artificial Sequence
  derived and/or modified sequence
atgaccacccccgccaacgcccagaacgccagcaagacctgggagctcagtctgtacgagctgcataggacaccccaagaagctatcatggatggcaccgaaatagctgtgtccccacgttctctgcattccgagcttatgtgtccgatttgccttgatatgctaaaaaacacaatgactactaaggaatgtctgcatcgcttctgcagcgactgtattgtcacagccttgagaagcgggaacaaggagtgtcccacatgccgcaaaaagctggtgagcaaacggagcctaagaccagatcccaactttgacgccctcatctccaaaatttatccatcaagagaagaatacgaggcccaccaggatagggtcctcattagacttagtagactgcataatcagcaggccttgagctctagcatagaagaaggccttcgcatgcaggccatgcaccgggcccagcgcgtccgccggccaattccgggtagtgaccaaaccaccaccatgagtgggggcgaaggggaaccaggggagggagaaggagatggggaagacgtgtcaagtgatagcgcccccgactccgccccaggccctgcccccaagcgcccgcggggcggaggggcaggaggatccagcgtcggtactggaggtggcgggaccggaggagtggggggcggcgccggctcagaagacagtggggacagaggggggactctgggggggggcactctgggcccaccatctccccccggtgccccttcgccgcctgaacccggcggtgaaattgagctggtttttagaccacatcccttgctcgttgagaaaggcgagtactgtcagacaaggtatgtgaagacaacaggtaatgctaccgtggaccacctgtctaagtatcttgctctgcgcatcgctctggagcgcaggcagcagcaggaagccggggagcccggcggccctggtgggggagcttctgacaccggtggccccgacggatgtggtggagagggaggcggagccggcggtggggatggaccagaggagcccgctctgcctagcttggagggagtgtcagaaaagcaatacaccatatacatcgctcccggagggggggcattcaccacactgaatggatcactgacgttagagctcgtgaatgagaagttctggaaggtgtcccgtccgcttgagttgtgctacgcaccaactaaagaccccaaatag

SEQ ID NO: 133595 - DNA, 1221 bp, Artificial Sequence
  derived and/or modified sequence
atgaccacccccgccaacgcccagaacgccagcaagacctgggagcttagcctttatgaattacataggactccgcaggaggccatcatggacggaaccgaaatcgcagtaagcccccgatctctccattctgaactgatgtgcccaatttgtctggatatgttgaagaacactatgaccaccaaggagtgccttcaccggttttgcagcgactgcattgttacagcgttgaggtctggcaacaaagagtgtcccacgtgcagaaaaaagctggtatcgaaaaggagcttgaggcccgaccctaactttgatgccctgatcagcaagatttatccttctagggaggagtacgaagctcaccaggatcgagtactgatcagactgagccggctgcacaatcagcaagcgctttcgtcaagtatcgaggagggtcttaggatgcaggcaatgcaccgcgcacaacgcgtgaggcggcccatcccgggctccgatcagaccactacgatgtctggtggggagggggaaccgggcgagggtgagggcgacggtgaagacgtgagcagtgatagtgcccccgatagcgcccccgggcccgctccgaagcggcctagaggcggaggagcaggaggcagttcagtagggacagggggcggaggaaccgggggggttgggggaggcgctgggtctgaggattcaggcgatagaggcgggaccctcggaggtggcaccttgggccctccatccccaccaggggccccttcacccccagagccaggcggagagatcgagctggtcttcaggcctcatcctctgctggtcgaaaagggagaatactgccagactagatacgtgaaaacaactggaaatgcaaccgtggatcacctatccaaatatctcgccctgagaatcgctctggagcggcggcagcagcaggaagctggggaacctggggggccaggaggcggcgccagcgacaccgggggccccgatggatgcggtggggaagggggaggagccgggggcggggatgggccggaagagccagcattgccctcactggaaggggtgtctgagaaacagtacacaatctatatcgctccaggcgggggagcctttactactttgaacggctccctaaccctcgaactggtgaacgagaagttctggaaggtgagtagaccgctggaactgtgctacgctccaacaaaggatcccaaatag

SEQ ID NO: 133596 - DNA, 1221 bp, Artificial Sequence
  derived and/or modified sequence
atgaccacccccgccaacgcccagaacgccagcaagacctgggagttaagtctttacgagctgcatcgcactccccaggaggccataatggatggaacagaaatcgctgtgagccccaggtctctgcattccgaattaatgtgcccaatatgtctggacatgctgaaaaacaccatgaccacgaaggaatgcctccatcgattctgctcggactgcattgtcaccgctctcagaagtgggaacaaagaatgccctacctgccggaaaaagctcgtgagcaagcgtagtttaaggcccgatcctaactttgatgccctaatctctaaaatttatcctagccgagaagagtatgaggcccatcaggaccgagtgcttattagattgtcacgtctacataatcagcaggctctaagtagcagtatcgaggaaggcctccggatgcaagcgatgcacagagcacagagagttaggcgcccgattcctggcagtgatcagacaacgactatgtccgggggtgaaggggagcccggtgaaggtgagggggatggcgaggacgttagctcagattcagccccagactccgccccagggccagcgcctaagcgtcctaggggaggaggggccggaggaagcagtgtcgggacaggaggcggtgggacagggggagtcggggggggggccgggtccgaggatagtggcgataggggaggcacactggggggcggtaccctggggcctccgtctccccctggcgcccccagccctccggaacccggaggtgaaatcgaactggttttcagaccacatcccctgttggtggagaagggcgaatactgtcaaacccgatatgtcaaaacaaccgggaatgctaccgtagaccatttgtccaagtatctggcgctccggattgcccttgaacgaaggcagcagcaggaggccggcgaacccggcggccccgggggcggtgcctcagacacagggggacccgacggatgtggaggcgaaggtggtggggccggaggcggagacggtcccgaggagcccgccctccctagtctcgagggagtcagcgagaagcagtacaccatttatattgccccgggtggcggcgctttcaccactcttaatggctcacttacactcgagctcgtgaacgagaagttctggaaagtgtctagacctctcgagctgtgttatgcgccaacaaaagatcccaagtag

SEQ ID NO: 133597 - DNA, 1221 bp, Artificial Sequence
  derived and/or modified sequence
atgaccacccccgccaacgcccagaacgccagcaagacctgggagctgagtttgtatgaactccaccgtacaccccaggaggcaataatggacggcacggaaatagctgtgtcccctaggtctctgcattccgaactgatgtgtccaatatgcttggacatgttaaaaaatacaatgaccaccaaggagtgtctgcacaggttttgtagtgactgtatcgtgaccgctctaaggagtggaaacaaggaatgtccgacatgtcgcaagaaacttgtttcaaagcgcagcttacggccagacccgaacttcgacgcactaatttcaaagatctatcccagccgcgaggagtacgaggctcatcaggaccgcgtccttattagattaagcagactccataaccaacaagctctctcgtccagcatcgaagagggtctgaggatgcaagccatgcaccgagcccagagagtgagacgaccaattccgggcagcgatcagacaaccacaatgagcgggggcgaaggcgaacccggcgaaggggagggggacggggaggatgtcagttcagacagtgccccggattctgcccctgggcctgctccaaagcgtccaagaggcgggggagctggcggttcttcagtaggtaccggaggcgggggtacggggggggtaggggggggagctggtagcgaagacagtggggacagaggcggaaccctggggggggggaccttgggcccaccgtcacctcctggggctccttcacctcctgagcctggaggcgagatcgagcttgtcttccgtccacatccgctgcttgtcgaaaagggggagtactgccagactaggtatgtaaagaccactggcaacgccaccgtggaccacctctcaaaataccttgcgttaagaatcgccctggagaggcgtcagcaacaggaagccggtgagccgggcggtcccgggggcggcgcttccgacacgggtggtcctgacggctgtgggggggagggtggtggagcaggaggcggggatggcccagaagagcccgccctgccctccctggagggagtctccgagaaacaatacacaatctatatcgcgccaggcggcggggccttcaccaccctcaatggctcactgacactggaattggtcaatgagaaattctggaaggtgtctcggcctctggaactgtgttacgctcccactaaagacccaaaatag

SEQ ID NO: 133598 - DNA, 1221 bp, Artificial Sequence
  derived and/or modified sequence
atgaccacccccgccaacgcccagaacgccagcaagacctgggagttatcactctacgagctccaccggacacctcaggaggcaataatggacggcacggagattgccgtgtccccgcgaagtcttcacagtgaactgatgtgccctatctgtctagatatgctgaaaaacacgatgaccaccaaagagtgcctgcacagattctgctctgattgcatcgtgaccgccctccgaagtggaaacaaggagtgcccgacttgtaggaaaaagctggtctccaagcggtcactccgtccagacccaaatttcgacgccttgatctcaaagatttatcccagcagggaggaatacgaagcacaccaagaccgcgtcctgattcggttaagcaggttgcacaatcagcaggctctgagtagcagtattgaggaaggattacgaatgcaggctatgcatagagctcagcgggtgcgccggcccatccccgggtccgaccagacaactaccatgtctggtggcgagggagaacccggcgagggcgagggcgacggggaggacgtatcttcagatagcgcccctgacagcgcccctggcccagccccgaagcgaccccgaggcggaggagcgggaggcagcagtgtcgggacaggtggtggcggcactggcggcgtaggcggaggggccggtagcgaggattctggcgataggggcggcactctgggcggcgggaccctgggccccccctcaccacccggtgccccctcaccgcctgaaccagggggggagatcgaactagtatttcgcccgcaccctctcttggtggagaagggggaatactgccagacacggtatgtgaaaaccactggaaatgccactgtcgaccatctctctaagtatctggccctgcgcattgccctcgaaaggcgacaacaacaggaggccggagaacctggagggccaggcgggggcgcctccgataccggaggacctgatggttgcggcggcgagggtgggggagcaggaggaggggacggtcctgaggagcctgcccttcctagtctcgagggcgtgtctgagaagcagtatacaatttatatagccccaggcggcggcgcctttaccaccctgaatggctccctcacgcttgagcttgtaaacgagaagttctggaaagttagccggccactggaactgtgttacgctcctaccaaagatccgaagtag

SEQ ID NO: 133599 - DNA, 1221 bp, Artificial Sequence
  derived and/or modified sequence
atgaccactccagctaacgcccaaaatgcatccaaaacatgggagctgtctttatatgaactgcatcgcacccctcaggaggcaatcatggatgggacagaaatagccgtcagcccaaggtctctccacagtgagctgatgtgtcctatatgtctcgatatgctcaaaaacactatgaccaccaaggagtgcctgcaccgattctgctctgactgcattgtcaccgctctgaggtcaggcaacaaggaatgtcccacctgcaggaaaaagctcgtcagcaaaaggagtctacggcctgatcctaattttgacgcccttataagtaaaatttatccttcccgtgaagagtatgaagctcaccaggacagagttctgatcagactgtccagactgcacaatcagcaggcactctcatcgtccatagaagagggccttcggatgcaggccatgcacagggcccagcgcgtacgcagacccattcccggatctgatcagacgaccactatgagcggtggggaaggggagccgggtgagggggaaggcgatggggaagacgtctcttccgacagtgctcccgattcggcacccggaccagcccctaagcgtccgaggggcggtggagcaggcggaagtagcgtgggcaccggaggcggtggaactggcggtgtcggaggcggagccggaagcgaggactctggcgatagggggggaacactgggcggagggaccctgggtcctccatcccccccaggagcaccttcccctcctgaacccggtggagagattgaactggtttttcggccacatcccttgttggtggaaaagggggagtactgccagaccaggtacgtgaaaacgacaggaaatgccaccgttgaccatctctccaagtatctggctcttcggattgccctggagagacgacagcagcaggaagccggagagcccggtggcccaggtgggggtgcgtctgataccggtgggcctgatgggtgcggcggagagggaggaggcgctgggggaggcgacggccctgaggagccagccttgccgtccctagaaggagtatctgaaaagcagtacacaatctacattgccccaggcggtggagcgttcaccacactcaatggaagcctcaccctggagttggtgaacgagaagttttggaaagtctcccgaccattggaattgtgctacgctccaaccaaagaccccaaatag

SEQ ID NO: 133600 - DNA, 1221 bp, Artificial Sequence
  derived and/or modified sequence
atgactacccctgctaatgctcagaatgccagcaagacttgggaactttccctgtacgaactacacaggacgcctcaggaggcaatcatggatggcacagagatcgccgtgagcccgaggtcactacactctgagctcatgtgccctatatgtcttgatatgctaaaaaacaccatgaccactaaggagtgtctgcataggttttgctccgactgcattgttacggcattgcgaagcggcaataaggaatgtccaacatgtcgtaagaaactcgtcagcaagcgttccctgcggccagacccaaactttgacgcactaatttctaagatttacccatctagggaagaatacgaagcacaccaggacagggtattaatcagattgagcagattgcacaatcagcaggccctgagctcgagtattgaagaaggattgcggatgcaagcaatgcatcgcgctcagagggttcgaaggcctatcccaggttccgaccagacaaccactatgtctgggggagagggggaaccaggggaaggggaaggcgatggtgaggacgtatccagcgacagcgctccagattccgcccctggacctgctcctaagcgcccaagaggaggtggagccggtgggtcctccgttggcacaggtggcggaggtacaggaggggtgggtggaggggcaggcagtgaagacagcggagaccgcggagggacactcgggggaggtactctggggcctccatcaccccctggggcaccatctccccctgagcctggtggagaaatcgaactcgtatttaggccccacccacttcttgttgagaaaggcgagtattgccaaacgcgatacgttaaaacaacaggaaacgccacagtcgatcacctatccaagtaccttgctctacggatcgcacttgaaaggcgccaacagcaagaagctggtgaacctggaggacctggcggaggtgcaagcgacactggcggacccgatggatgcggtggtgagggaggcggtgctggagggggtgatgggccagaggaacctgcattgccctccctcgagggagtctcagagaaacaatatacaatctacatcgcccctggaggcggtgcctttacaacacttaatggaagcctgaccttggaactcgtcaatgaaaagttctggaaggtaagccgcccactggaactgtgctacgcacctacaaaagaccctaagtag

SEQ ID NO: 133601 - DNA, 1221 bp, Artificial Sequence
  derived and/or modified sequence
atgactacccctgcgaacgcgcagaacgcaagtaaaacgtgggagctcagcctgtatgagttgcacagaacgccccaagaagccatcatggatggaacagaaattgcagtaagcccccgaagtttacacagcgagttaatgtgtcctatctgcctggacatgctgaaaaacactatgaccacaaaggagtgcttgcatagattctgctctgactgtatcgtcaccgccctcaggagtggcaataaagagtgtcccacatgccgaaagaaactggtgtctaaacgatctctgaggcccgatcctaactttgatgccctgattagcaaaatttacccttctcgtgaagagtacgaggcacatcaggacagggtacttataagactgagccgactgcataatcagcaggcccttagctcttctatcgaggaaggtctgaggatgcaggctatgcacagagctcagcgtgtccggagacctatccccggttccgaccagactactacaatgagcggcggagaaggcgagcctggggagggagagggggatggagaggacgtgagctccgattctgccccagactctgcgccagggcctgccccaaaacgcccacgtggaggtggcgctggaggttctagcgtgggaactggcggtggtggaaccggaggagttggtggcggagctggaagcgaggactccggggaccggggaggcaccctcggcggtggcacattaggcccaccttccccaccaggtgccccatccccgccagagccaggcggtgaaattgagctggtgtttagaccacacccacttctcgttgagaagggagaatattgccagacgcgctacgttaagacaacaggaaatgcaaccgtggatcacctgagtaagtacctagccctgaggatcgcgcttgaacggaggcagcagcaggaagcgggtgaacctgggggacccggtggcggagcctccgacacaggaggcccagatggatgcggcggagagggcggaggagcagggggaggtgacggccctgaagagccagctcttcctagtctggagggagtctccgaaaagcagtacactatatatattgcacccggtggcggtgccttcaccactctcaacgggtcgctgacactggaattggtgaatgagaagttttggaaggttagcaggcccctggagttgtgttacgctcctaccaaggacccaaaatag

SEQ ID NO: 133602 - DNA, 1221 bp, Artificial Sequence
  derived and/or modified sequence
atgacaacaccagctaacgcccagaacgcgagcaagacttgggagctgtccctgtatgagctgcatcgaaccccccaggaagccattatggatggcaccgaaatagctgtgagtccgcgaagtctgcacagtgagttaatgtgtccaatttgcctggacatgctgaagaacaccatgaccacaaaggagtgtttgcaccgcttctgtagcgattgcatcgttactgccctgcgctccgggaataaagaatgccctacgtgtagaaagaagttggtgtccaaaaggagtttgcggccagatcccaacttcgacgccttgatatctaagatctatccttcccgcgaagagtacgaagcccaccaagacagggttctgatccgcctgtctcggctgcataaccaacaggcccttagtagctcaatagaggagggactcagaatgcaggccatgcaccgggcacaacgtgtcagacgaccaattccaggctcagatcagaccactacaatgtccggcggagagggagaaccaggcgagggcgagggggacggggaggatgtctcgagcgattcagcacctgacagcgccccaggaccagctcctaagcgacctcgcggtgggggtgcaggaggctcttccgtagggaccggcggtgggggaactgggggagtgggcggtggtgccggatcagaagacagtggcgatagaggcggaaccctcgggggaggcacattaggcccaccctctcctccaggcgctccctccccacctgaacccggaggcgagatcgaactcgttttccggccacacccccttcttgttgagaagggcgagtactgtcagacccggtatgtgaagacaaccggtaatgctacagtggatcacttatccaaatacttagccctccggattgccctggagcgcaggcaacagcaggaggccggtgagcccggaggacctgggggaggtgccagcgataccggcggacctgatggttgcgggggagagggtggaggggcaggtgggggagatgggccagaggaacccgctctgccttccctagagggggtgtccgagaaacagtacacgatctacattgcccctgggggtggggcatttactacactgaacggttccttgactctggagctcgtcaacgaaaaattttggaaagtctcacgccctctggagctctgctatgcacccaccaaggatcctaagtag

SEQ ID NO: 133603 - DNA, 1221 bp, Artificial Sequence
  derived and/or modified sequence
atgaccaccccggcaaatgcccagaacgcctccaagacttgggagctgagcctatatgaattgcaccgcactccacaggaagccattatggacggaaccgagattgctgtgtccccaaggtcactgcactccgagctcatgtgccccatctgtttagacatgctgaagaatacaatgacgacaaaagaatgcctgcaccgcttctgctcagattgcatcgtgactgctctacgctccgggaataaggagtgtcctacctgtcgcaaaaaattggtcagtaagcgaagtctcagacctgaccccaatttcgatgccctcatcagcaagatctacccatctagggaggaatacgaggcccaccaggatcgtgttctgataagactgtcccgacttcacaatcagcaggctttgtcgtcctctatagaggagggactgaggatgcaggcaatgcatcgcgcacagagagtgcgcagaccgatacccggtagtgatcagactacgacgatgagcggtggcgaaggagagccaggcgagggggagggggacggggaggacgtgtccagcgattccgccccagacagcgccccaggtcccgcaccgaagaggcctaggggaggaggtgctgggggatcctccgtgggtacaggaggaggcggtaccggtggcgtgggaggcggagcgggatccgaggacagcggcgaccgcggtgggaccctgggcggaggtaccctgggcccacccagtccccctggcgctccatcaccgccagaaccaggcggagaaatcgagcttgtctttcgtccgcatcccctgctggtggaaaagggagagtactgtcaaacacgatatgtgaaaacaaccgggaacgctaccgtcgaccatttgtctaaatatttagccctgcggatagctcttgagcgccgacagcagcaggaagccggagaacccggtggtcctgggggtggagctagcgacacagggggtcctgatgggtgtgggggagagggtggtggcgcaggaggtggggatggcccagaagagcccgcactgccctcactggaaggagtctctgagaagcagtataccatctacatcgctccaggaggtggcgctttcacaactcttaacggcagcttgacccttgaactcgttaacgagaagttctggaaggtgtcaagacccctggagctctgttacgcacccacaaaagaccctaagtag

SEQ ID NO: 133604 - DNA, 1221 bp, Artificial Sequence
  derived and/or modified sequence
atgactacccccgcaaacgcgcaaaatgccagcaagacctgggagctgagtctgtacgaactgcacaggactcctcaggaagcgatcatggacggtactgagatagccgtatcccctcggagtctgcactctgaactgatgtgtccaatctgcttggacatgctcaagaacaccatgactacaaaggaatgtctccacagattctgtagcgactgcatagtcacagccctaagatccggcaataaggagtgccccacatgtcgaaagaagctcgtgtccaagcgctctctgcgcccagacccaaactttgatgctctgatcagcaaaatttatccttcccgcgaggagtatgaagcacatcaggaccgggtgctcattcgactgagtagattgcataaccaacaagccctttctagctctatcgaagaagggctgcgtatgcaggctatgcatcgggcacagagagtgaggcgaccaatacccggttccgatcagaccacaacaatgtcaggcggagagggcgagcccggtgagggagagggagatggagaggacgttagttctgacagcgctcccgattccgctcctggacccgcaccaaaacgaccccgagggggtggagccggtggctcgagtgtgggcacgggcggaggaggcactgggggtgtgggcggaggagccggtagcgaagattctggcgatcgaggtggcaccctggggggtggcacgctaggtccaccgtcaccacccggtgcaccaagcccgccagaacccggaggagaaattgagttagtatttcgcccacatccacttctagttgagaaaggagaatactgtcagacgcgctacgtgaaaacgacaggaaacgctactgtcgatcacttgtctaagtacctggcattaaggatcgctcttgaaaggcgccagcaacaggaagctggagaacccggagggccaggaggcggagcttcggacaccggaggaccagacggttgtggcggagagggaggaggcgctggtggaggggatgggcctgaagagcctgccttgccttccctggagggggtttctgaaaagcagtacaccatctatattgcccctggtggcggtgcgttcacaacactgaatggcagtttaacactggagctggttaatgaaaaattctggaaggtgtcacgaccgctcgagctgtgttacgcccctacaaaagatcctaaatag

SEQ ID NO: 133605 - DNA, 1752 bp, Artificial Sequence
  derived and/or modified sequence
gtgacgtagggccccagcgcccgggccatggcggcggcggtggcgggagctgctgtctgagcagcggttgcggaccgagcgaacttggcccaggagcccgggcctagggagaggcgcggcggcggcgggagcgcgaacggctggagctggccttcttcgccttctcctcggctgtggagccctggtggggggtctgcgcccggtcaccatgacgacgccggcgaatgcccagaatgccagcaaaacgtgggaactgagtctgtatgagctgcaccggaccccgcaggaagccataatggatggcacagagattgctgtttcccctcggtcactgcattcagaactcatgtgccctatctgcctggacatgctgaagaatacgatgaccaccaaggagtgcctccacagattctgctctgactgcattgtcacagccctacggagcgggaacaaggagtgtcctacctgccgaaagaagctggtgtccaagcgatccctacggccagaccccaactttgatgccctgatctctaagatctatcctagccgggaggaatacgaggcccatcaagaccgagtgcttatccgcctgagccgcctgcacaaccagcaggcattgagctccagcattgaggaggggctacgcatgcaggccatgcacagggcccagcgtgtgaggcggccgataccagggtcagatcagaccacaacgatgagtgggggggaaggagagcccggggagggagaaggggatggagaagatgtgagctcagactccgcccctgactctgccccaggccctgctcccaagcgaccccgtggagggggcgcaggggggagcagtgtagggacagggggaggcggcactggtggggtgggtgggggtgccggttcggaagactctggtgaccggggagggactctgggagggggaacgctgggccccccaagccctcctggggcccccagccccccagagccaggtggagaaattgagctcgtgttccggccccaccccctgctcgtggagaagggagaatactgccagacgaggtatgtgaagacaactgggaatgccacagtggaccacctctccaagtacttggccctgcgcattgccctcgagcggaggcaacagcaggaagcaggggagccaggagggcctggagggggcgcctctgacaccggaggacctgatgggtgtggcggggagggtgggggtgccggaggaggtgacggtcctgaggagcctgctttgcccagcctggagggcgtcagtgaaaagcagtacaccatctacatcgcacctggaggcggggcgttcacgacgttgaatggctcgctgaccctggagctggtgaatgagaaattctggaaggtgtcccggccactggagctgtgctatgctcccaccaaggatccaaagtgaccccaccaggggacagccagaggaaggggaccatggggtatccctgtgtcctggtctatcaccccagcttctttgtcccccagtacccccagcccagccagccaataagaggacacaaatgaggacacgtggcttttatacaaagtatctatatgagattcttctatattgtacagagtggggcaaaacacgcccccatctgctgccttttctattgccctgcaacgtcccatctatacgaggtgttggagaaggtgaagaaccctcccattcacgcccgcctaccaacaacaaacgtgcttttttcctctttgaaacctgca

SEQ ID NO: 133606 - DNA, 1752 bp, Artificial Sequence
  derived and/or modified sequence
gtgacgtagggccccagcgcccgggccatggcggcggcggtggcgggagctgctgtctgagcagcggttgcggaccgagcgaacttggcccaggagcccgggcctagggagaggcgcggcggcggcgggagcgcgaacggctggagctggccttcttcgccttctcctcggctgtggagccctggtggggggtctgcgcccggtcaccatgacgacgccggcgaatgcccagaatgccagcaaaacgtgggaactgagtctgtatgagctgcaccggaccccgcaggaagccataatggatggcacagagattgctgtttcccctcggtcactgcattcagaactcatgtgccctatctgcctggacatgctgaagaatacgatgaccaccaaggagtgcctccacagattctgctctgactgcattgtcacagccctacggagcgggaacaaggagtgtcctacctgccgaaagaagctggtgtccaagcgatccctacggccagaccccaactttgatgccctgatctctaagatctatcctagccgggaggaatacgaggcccatcaagaccgagtgcttatccgcctgagccgcctgcacaaccagcaggcattgagctccagcattgaggaggggctacgcatgcaggccatgcacagggcccagcgtgtgaggcggccgataccagggtcagatcagaccacaacgatgagtgggggggaaggagagcccggggagggagaaggggatggagaagatgtgagctcagactccgcccctgactctgccccaggccctgctcccaagcgaccccgtggagggggcgcaggggggagcagtgtagggacagggggaggcggcactggtggggtgggtgggggtgccggttcggaagactctggtgaccggggagggactctgggagggggaacgctgggccccccaagccctcctggggcccccagccccccagagccaggtggagaaattgagctcgtgttccggccccaccccctgctcgtggagaagggagaatactgccagacgaggtatgtgaagacaactgggaatgccacagtggaccacctctccaagtacttggccctgcgcattgccctcgagcggaggcaacagcaggaagcaggggagccaggagggcctggagggggcgcctctgacaccggaggacctgatgggtgtggcggggagggtgggggtgccggaggaggtgatggtcctgaggagcctgctttgcccagcctggagggcgtcagtgaaaagcagtacaccatctacatcgcacctggaggcggggcgttcacgacgttgaatggctcgctgaccctggagctggtgaatgagaaattctggaaggtgtcccggccactggagctgtgctatgctcccaccaaggatccaaagtgaccccaccaggggacagccagaggaaggggaccatggggtatccctgtgtcctggtctatcaccccagcttctttgtcccccagtacccccagcccagccagccaataagaggacacaaatgaggacacgtggcttttatacaaagtatctatatgagattcttctatattgtacagagtggggcaaaacacgcccccatctgctgccttttctattgccctgcaacgtcccatctatacgaggtgttggagaaggtgaagaaccctcccattcacgcccgcctaccaacaacaaacgtgcttttttcctctttgaaacctgca

SEQ ID NO: 133607 - DNA, 1750 bp, Artificial Sequence
  derived and/or modified sequence
gacgtagggccccagcgcccgggccatggcggcggcggtggcgggagctgctgtctgagcagcggttgcggaccgagcgaacttggcccaggagcccgggcctagggagaggcgcggcggcggcgggagcgcgaacggctggagctggccttcttcgccttctcctcggctgtggagccctggtggggggtctgcgcccggtcaccatgacgacgccggcgaatgcccagaatgccagcaaaacgtgggaactgagtctgtatgagctgcaccggaccccgcaggaagccataatggatggcacagagattgctgtttcccctcggtcactgcattcagaactcatgtgccctatctgcctggacatgctgaagaatacgatgaccaccaaggagtgcctccacagattctgctctgactgcattgtcacagccctacggagcgggaacaaggagtgtcctacctgccgaaagaagctggtgtccaagcgatccctacggccagaccccaactttgatgccctgatctctaagatctatcctagccgggaggaatacgaggcccatcaagaccgagtgcttatccgcctgagccgcctgcacaaccagcaggcattgagctccagcattgaggaggggctacgcatgcaggccatgcacagggcccagcgtgtgaggcggccgataccagggtcagatcagaccacaacgatgagtgggggggaaggagagcccggggagggagaaggggatggagaagatgtgagctcagactccgcccctgactctgccccaggccctgctcccaagcgaccccgtggagggggcgcaggggggagcagtgtagggacagggggaggcggcactggtggggtgggtgggggtgccggttcggaagactctggtgaccggggagggactctgggagggggaacgctgggccccccaagccctcctggggcccccagccccccagagccaggtggagaaattgagctcgtgttccggccccaccccctgctcgtggagaagggagaatactgccagacgaggtatgtgaagacaactgggaatgccacagtggaccacctctccaagtacttggccctgcgcattgccctcgagcggaggcaacagcaggaagcaggggagccaggagggcctggagggggcgcctctgacaccggaggacctgatgggtgtggcggggagggtgggggtgccggaggaggtgacggtcctgaggagcctgctttgcccagcctggagggcgtcagtgaaaagcagtacaccatctacatcgcacctggaggcggggcgttcacgacgttgaatggctcgctgaccctggagctggtgaatgagaaattctggaaggtgtcccggccactggagctgtgctatgctcccaccaaggatccaaagtgaccccaccaggggacagccagaggaaggggaccatggggtatccctgtgtcctggtctatcaccccagcttctttgtcccccagtacccccagcccagccagccaataagaggacacaaatgaggacacgtggcttttatacaaagtatctatatgagattcttctatattgtacagagtggggcaaaacacgcccccatctgctgccttttctattgccctgcaacgtcccatctatacgaggtgttggagaaggtgaagaaccctcccattcacgcccgcctaccaacaacaaacgtgcttttttcctctttgaaacctgca

SEQ ID NO: 133608 - DNA, 1221 bp, Artificial Sequence
  derived and/or modified sequence
atgaccacccccgccaacgcccagaacgccagcaagacctgggagctgagcctgtacgagctgcacagaaccccccaggaggccatcatggacggcaccgagatcgccgtgagccccagaagcctgcacagcgagctgatgtgccccatctgcctggacatgctgaagaacaccatgaccaccaaggagtgcctgcacagattctgcagcgactgcatcgtgaccgccctgagaagcggcaacaaggagtgccccacctgcagaaagaagctggtgagcaagagaagcctgagacccgaccccaacttcgacgccctgatcagcaagatctaccccagcagagaggagtacgaggcccaccaggacagagtgctgatcagactgagcagactgcacaaccagcaggccctgagcagcagcatcgaggagggcctgagaatgcaggccatgcacagagcccagagagtgagaagacccatccccggcagcgaccagaccaccaccatgagcggcggcgagggcgagcccggcgagggcgagggcgacggcgaggacgtgagcagcgacagcgcccccgacagcgcccccggccccgcccccaagagacccagaggcggcggcgccggcggcagcagcgtgggcaccggcggcggcggcaccggcggcgtgggcggcggcgccggcagcgaggacagcggcgacagaggcggcaccctgggcggcggcaccctgggcccccccagcccccccggcgcccccagcccccccgagcccggcggcgagatcgagctggtgttcagaccccaccccctgctggtggagaagggcgagtactgccagaccagatacgtgaagaccaccggcaacgccaccgtggaccacctgagcaagtacctggccctgagaatcgccctggagagaagacagcagcaggaggccggcgagcccggcggccccggcggcggcgccagcgacaccggcggccccgacggctgcggcggcgagggcggcggcgccggcggcggcgacggccccgaggagcccgccctgcccagcctggagggcgtgagcgagaagcagtacaccatctacatcgcccccggcggcggcgccttcaccaccctgaacggcagcctgaccctggagctggtgaacgagaagttctggaaggtgagcagacccctggagctgtgctacgcccccaccaaggaccccaagtag

SEQ ID NO: 133609 - protein, 161 aa, Artificial Sequence
  derived and/or modified sequence
MVPKLFTSQICLLLLLGLLAVEGSLHVKPPQFTWAQWFETQHINMTSQQCTNAMQVINNYQRRCKNQNTFLLTTFANVVNVCGNPNMTCPSNKTRKNCHHSGSQVPLIHCNLTTPSPQNISNCRYAQTPANMFYIVACDNRDQRRDPPQYPVVPVHLDRII

SEQ ID NO: 133610 - DNA, 486 bp, Artificial Sequence
  derived and/or modified sequence
atggtccccaaactgttcacatcccagatttgcctgctgctgttactgggcctgctggccgtggaggggtcccttcacgtgaagcctcctcagttcacgtgggctcagtggttcgaaacacagcatataaacatgacttctcagcagtgcactaatgccatgcaagttatcaataactaccaaagaagatgtaagaaccaaaacactttcctgcttaccacattcgcaaacgtggtaaacgtgtgtggaaaccctaatatgacttgtccttctaataagacgaggaagaactgccatcatagcggatcacaagtaccattaatacactgcaatttgacaactccttcaccacagaacatttcaaactgtcgctacgcccagacaccagccaacatgttttatatcgtggcttgcgacaatcgagatcagcgccgggaccccccgcaataccccgtcgtgccagtgcatctcgatagaataatctag

SEQ ID NO: 133611 - DNA, 486 bp, Artificial Sequence
  derived and/or modified sequence
atggtgcccaagctgttcaccagccagatctgcctgctgctgctgctgggcctgctggccgtggagggcagcctgcacgtgaagccaccccagttcacctgggcccagtggtttgagacccagcacatcaacatgaccagccagcagtgcaccaatgccatgcaggtgatcaacaactaccagaggcgctgcaagaaccagaacaccttcctgctgaccacctttgccaacgtggtgaatgtgtgtggcaaccccaacatgacctgccccagcaacaagaccaggaagaactgccaccacagcggcagccaggtgcccctcatccactgcaacctgaccacccccagcccccagaacatcagcaactgccgctatgcccagaccccagccaacatgttctacatcgtggcctgtgacaacagagaccagaggcgggaccccccccagtaccctgtggtgcctgtgcacctggaccgcatcatctag

SEQ ID NO: 133612 - DNA, 486 bp, Artificial Sequence
  derived and/or modified sequence
atggtgcccaagctgttcaccagccagatctgcctgctgctgctgctggggctgctcgccgtggaagggagcctacacgttaagcctccccagttcacttgggctcaatggttcgaaactcaacacataaatatgacttcccaacagtgtaccaatgccatgcaggtgattaacaattaccaacgcagatgtaaaaatcaaaatacattcctgctgacaacctttgccaacgtggtaaatgtgtgtgggaatccaaacatgacatgtccatctaataagacacggaaaaattgccaccattcaggaagccaggtcccactaatacactgtaacctgactacaccttcaccccagaacatatctaattgccgttacgctcagacacccgcaaacatgttttacattgtggcttgtgacaacagggatcagaggagagaccccccccaataccccgtggtgcccgtgcatctcgatcggatcatttag

SEQ ID NO: 133613 - DNA, 486 bp, Artificial Sequence
  derived and/or modified sequence
atggtgcctaagctatttacgtcccagatttgtttattgttactgctggggctactcgcagttgaagggtcactgcacgtgaaacctccccagtttacttgggcccagtggtttgaaacacagcacattaatatgacttcccagcagtgtacgaacgcgatgcaggtgattaacaactaccagcggagatgtaaaaaccaaaacacctttctgctgactacgtttgcaaatgttgtcaacgtgtgcgggaatcccaacatgacctgcccttcgaacaagacacggaaaaactgccatcattcggggtcccaggtgcctctcattcactgtaatttgaccacccccagtccacagaatatctctaactgtaggtacgcacagacccccgctaatatgttttacattgtagcttgcgacaacagggatcagaggagggatcctccccaatatcctgtggtgccagtccatctcgatcgcattatctag

SEQ ID NO: 133614 - DNA, 755 bp, Artificial Sequence
  derived and/or modified sequence
ttccaagtaggggagaccagctgcccctgaaccccagaacaaccagctggatcagttctcacaggagctacagcgcggagactgggaaacatggttccaaaactgttcacttcccaaatttgtctgcttcttctgttggggcttctggctgtggagggctcactccatgtcaaacctccacagtttacctgggctcaatggtttgaaacccagcacatcaatatgacctcccagcaatgcaccaatgcaatgcaggtcattaacaattatcaacggcgatgcaaaaaccaaaatactttccttcttacaacttttgctaacgtagttaatgtttgtggtaacccaaatatgacctgtcctagtaacaaaactcgcaaaaattgtcaccacagtggaagccaggtgcctttaatccactgtaacctcacaactccaagtccacagaatatttcaaactgcaggtatgcgcagacaccagcaaacatgttctatatagttgcatgtgacaacagagatcaacgacgagaccctccacagtatccggtggttccagttcacctggatagaatcatctaagctcctgtatcagcactcctcatcatcactcatctgccaagctcctcaatcatagccaagatcccatctctccatatactttgggtatcagcatctgtcctcatcagtctccataccccttcagctttcctgagctgaagtgccttgtgaaccctgcaataaactgctttgcaaattca

SEQ ID NO: 133615 - DNA, 486 bp, Artificial Sequence
  derived and/or modified sequence
atggtgcccaagctgttcaccagccagatctgcctgctgctgctgctgggcctgctggccgtggagggcagcctgcacgtgaagcccccccagttcacctgggcccagtggttcgagacccagcacatcaacatgaccagccagcagtgcaccaacgccatgcaggtgatcaacaactaccagagaagatgcaagaaccagaacaccttcctgctgaccaccttcgccaacgtggtgaacgtgtgcggcaaccccaacatgacctgccccagcaacaagaccagaaagaactgccaccacagcggcagccaggtgcccctgatccactgcaacctgaccacccccagcccccagaacatcagcaactgcagatacgcccagacccccgccaacatgttctacatcgtggcctgcgacaacagagaccagagaagagaccccccccagtaccccgtggtgcccgtgcacctggacagaatcatctag

SEQ ID NO: 133616 - protein, 133 aa, Artificial Sequence
  derived and/or modified sequence
RPPQFTRAQWFAIQHISLNPPRCTIAMRAINNYRWRCKNQNTFLRTTFANVVNVCGNQSIRCPHNRTLNNCHRSRFRVPLLHCDLINPGAQNISNCTYADRPGRRFYVVACDNRDPRDSPRYPVVPVHLDTTI

SEQ ID NO: 133617 - protein, 160 aa, Artificial Sequence
  derived and/or modified sequence
MVPKLFTSQICLLLLLGLMGVEGSLHARPPQFTRAQWFAIQHISLNPPRCTIAMRAINNYRWRCKNQNTFLRTTFANVVNVCGNQSIRCPHNRTLNNCHRSRFRVPLLHCDLINPGAQNISNCTYADRPGRRFYVVACDNRDPRDSPRYPVVPVHLDTTI

SEQ ID NO: 133618 - DNA, 483 bp, Artificial Sequence
  derived and/or modified sequence
atggttccaaagctgtttacaagtcagatttgtctgctgctgctgctagggttgatgggagttgaaggctccttgcacgctcgccctccacagttcactagagcccagtggttcgctatccagcatatcagcctgaatcccccaaggtgtacgatcgcaatgcgcgccatcaacaactaccgatggcgttgcaagaaccagaatacctttttgcgcacgaccttcgctaatgtggtgaatgtgtgtggtaatcagtccatccgatgcccacacaaccggaccctgaacaattgtcaccggagtaggtttcgggtccccctcctgcattgtgacctgataaaccctggtgcgcagaatatctcaaattgtacatacgcagatcgcccaggccgccgcttttacgtggtggcctgtgataaccgggacccccgggactcccccaggtatccagtggttccagtacatctggacaccactatatag

SEQ ID NO: 133619 - DNA, 483 bp, Artificial Sequence
  derived and/or modified sequence
atggtgcccaagctgttcaccagccagatctgcctgctgctgctgctgggcctgatgggcgtggagggcagcctgcacgcccggcccccccagttcacccgggcccagtggtttgccatccagcacatcagcctgaaccccccacgctgcaccatcgccatgagggccatcaacaactaccgctggcgctgcaagaaccagaacaccttcctgcggaccacctttgccaacgtggtgaatgtgtgtggcaaccagagcatccgctgcccccacaacagaaccctgaacaactgccacaggagccgcttccgggtgcccctgctgcactgtgacctgatcaaccctggggcccagaacatcagcaactgcacctacgccgacaggcctggaagacgcttctacgtggtggcctgtgacaacagagacccccgggacagcccccgctaccctgtggtgcctgtgcacctggacaccaccatctag

SEQ ID NO: 133620 - DNA, 483 bp, Artificial Sequence
  derived and/or modified sequence
atggtgcccaagctgttcaccagccagatctgcctgctgctgctgctgggactgatgggggtagaaggcagtctccatgcacgccccccacagtttacaagagcacaatggttcgcaattcagcatatcagcctgaaccctccgcgatgcactattgccatgagggccatcaataattacaggtggaggtgcaagaatcagaacacattcttgcgcaccactttcgccaatgtggtcaacgtctgtggaaaccagagcatcaggtgccctcacaatcggacactgaacaactgccatcggagcagattcagggttcctttgctacattgtgacctgatcaatccgggggctcaaaatatctcaaactgcacttatgcagataggcctggaaggcgattttacgtcgttgcttgtgataacagagatcctcgtgacagccctcgctatcccgtggttcctgtacaccttgacaccacaatttag

SEQ ID NO: 133621 - DNA, 483 bp, Artificial Sequence
  derived and/or modified sequence
atggttccaaagttattcacaagtcagatctgtttgctgctcctcctcggcctgatgggagtcgaggggtctctgcacgcacgacccccacagttcacccgagcgcagtggtttgccatccagcacattagcttgaaccccccaagatgcaccatcgcaatgagagccatcaacaattataggtggaggtgtaagaatcagaacacattcttacggactacattcgctaatgtcgttaacgtatgtggtaaccaatcaatcaggtgcccacacaatcgcactctgaataactgccatcggagtcggttccgggtacccctacttcactgcgacctgatcaatccgggagcccagaatatttcaaactgtacctacgcggacagacccggacggagattttacgtagtcgcctgtgacaaccgagaccctcgagatagtcctcgttatcccgtcgtcccggtccatctagacacaaccatttag

SEQ ID NO: 133622 - DNA, 720 bp, Artificial Sequence
  derived and/or modified sequence
cccagaacaaccagctggatcagttctcacaggagccacagctcagagactgggaaacatggttccaaaactgttcacttcccaaatttgtctgcttcttctgttggggcttatgggtgtggagggctcactccatgccagacccccacagtttacgagggctcagtggtttgccatccagcacatcagtctgaacccccctcgatgcaccattgcaatgcgggcaattaacaattatcgatggcgttgcaaaaaccaaaatacttttcttcgtacaacttttgctaatgtagttaatgtttgtggtaaccaaagtatacgctgccctcataacagaactctcaacaattgtcatcggagtagattccgggtgcctttactccactgtgacctcataaatccaggtgcacagaatatttcaaactgcacgtatgcagacagaccaggaaggaggttctatgtagttgcatgtgacaacagagatccacgggattctccacggtatcctgtggttccagttcacctggataccaccatctaagctcctgtatcagcagtcctcatcatcactcatctgccaagctcctcaatcatagccaagatcccatccctccatgtactctgggtatcagcaactgtcctcatcagtctccataccccttcagctttcctgagctgaagtcccttgtgaaccctgcaataaactgctttgcaaattca

SEQ ID NO: 133623 - DNA, 483 bp, Artificial Sequence
  derived and/or modified sequence
atggtgcccaagctgttcaccagccagatctgcctgctgctgctgctgggcctgatgggcgtggagggcagcctgcacgccagacccccccagttcaccagagcccagtggttcgccatccagcacatcagcctgaacccccccagatgcaccatcgccatgagagccatcaacaactacagatggagatgcaagaaccagaacaccttcctgagaaccaccttcgccaacgtggtgaacgtgtgcggcaaccagagcatcagatgcccccacaacagaaccctgaacaactgccacagaagcagattcagagtgcccctgctgcactgcgacctgatcaaccccggcgcccagaacatcagcaactgcacctacgccgacagacccggcagaagattctacgtggtggcctgcgacaacagagaccccagagacagccccagataccccgtggtgcccgtgcacctggacaccaccatctag

SEQ ID NO: 133624 - protein, 286 aa, Artificial Sequence
  derived and/or modified sequence
MSWLLFLAHRVALAALPCRRGSRGFGMFYAVRRGRKTGVFLTWNECRAQVDRFPAARFKKFATEDEAWAFVRKSASPEVSEGHENQHGQESEAKASKRLREPLDGDGHESAEPYAKHMKPSVEPAPPVSRDTFSYMGDFVVVYTDGCCSSNGRRRPRAGIGVYWGPGHPLNVGIRLPGRQTNQRAEIHAACKAIEQAKTQNINKLVLYTDSMFTINGITNWVQGWKKNGWKTSAGKEVINKEDFVALERLTQGMDIQWMHVPGHSGFIGNEEADRLAREGAKQSED

SEQ ID NO: 133625 - DNA, 861 bp, Artificial Sequence
  derived and/or modified sequence
atgagttggctcctctttctggctcacagggtcgccttagctgctctcccatgccgtcgtggtagtcgaggattcggtatgttctacgcagtgcggcgagggcgcaaaaccggagtctttctaacttggaacgagtgtagagcacaggtggatcgatttcctgccgcaaggtttaaaaaattcgctaccgaggacgaggcctgggcctttgttaggaaaagcgctagtccagaagtctccgaagggcacgaaaaccagcacggacaggaatccgaggcaaaggcgagcaagcgtctgcgggaaccacttgacggcgatggtcatgagtcggctgaaccctacgctaagcacatgaaaccctccgtcgagccagcacctccagtctcgagggacacattctcttatatgggagattttgtggtggtctatactgacggctgttgttcaagcaatggcagaaggcggccccgagccggtattggggtgtactggggccccgggcatcccttaaatgtggggatacgcctccccggacgccagaccaatcagcgggctgagatccatgcagcttgcaaggccatcgagcaggcgaagacacagaatataaataaactcgtactgtacacggattcgatgttcactatcaacgggattaccaattgggtccagggttggaaaaagaacggatggaaaactagcgcgggcaaggaagtgatcaataaggaggatttcgttgccctggagaggctcacccaaggaatggatattcaatggatgcatgtgcctggccattctggattcattggaaatgaagaagcagataggctggccagggaaggtgctaaacagtctgaggattag

SEQ ID NO: 133626 - DNA, 861 bp, Artificial Sequence
  derived and/or modified sequence
atgtcctggctgctcttcctggcccaccgggtggccctggccgccctgccctgcagaagaggcagccggggcttcggcatgttttatgctgtgcggcggggcaggaagacaggagtcttcctgacctggaatgaatgtcgggcccaggtggaccgcttccctgctgcccgcttcaagaagtttgccacagaagatgaggcctgggcctttgtgaggaagagcgccagccctgaggtgtctgagggccacgagaaccagcacggccaggagagcgaggccaaggccagcaagaggctgcgggagcccctggatggagatggccacgagagcgctgagccctatgccaagcacatgaagcccagcgtggagcccgcccctcctgtgtcccgggacaccttctcctacatgggagactttgtggtggtgtacacagatggctgctgcagcagcaatggaagaagaagaccccgggccggcatcggcgtgtactggggccctggccaccccctgaatgtgggcatccggctgcccggccggcagaccaaccagagagctgagatccatgctgcctgcaaggccatcgagcaggccaagacccagaacatcaacaagctggtgctgtacacagacagcatgttcaccatcaatggcatcaccaactgggtgcagggctggaagaagaatggctggaagaccagcgctgggaaggaggtgatcaacaaggaggactttgtggccctggagcggctgacccagggcatggacatccagtggatgcacgtgcccggccacagcggcttcatcggaaatgaggaggccgaccggctggcccgggagggcgccaagcagagtgaagattag

SEQ ID NO: 133627 - DNA, 861 bp, Artificial Sequence
  derived and/or modified sequence
atgagctggctgctgttcctggcccaccgggtggccctggccgccctgccttgtcggcgcgggtcaagagggttcggtatgttctacgcagtgaggagggggagaaaaaccggcgtctttctgacatggaatgagtgcagagcacaggttgaccgctttcctgccgcccgattcaaaaagttcgctactgaagacgaagcttgggcatttgtccgcaagtcagcgtcgcctgaggtttctgaaggccacgagaaccagcatggacaggagagcgaggcgaaagcctcaaagagattacgggagccacttgacggggatggacatgaatcagccgagccctacgcaaagcacatgaagccctccgtcgaacctgcacctccggtgagcagggacacattctcttacatgggggattttgtcgttgtgtataccgacggctgctgctcttccaacggcagacgcagacctcgggccggtattggcgtgtactggggaccaggacatcccttaaatgtggggattaggctcccgggacgccagaccaaccagagggccgaaatccacgccgcttgcaaggctatcgagcaggcaaaaacacaaaacattaataagctggtgctctatacagacagcatgttcactatcaatggtatcactaattgggtccagggctggaagaagaacggatggaagaccagtgcaggaaaagaggttattaacaaggaggactttgtggcactcgagcgcctgacccagggtatggatattcaatggatgcacgtgccagggcatagtgggttcatcggcaacgaagaggcggacaggctggccagagaaggtgctaagcagagtgaggattag

SEQ ID NO: 133628 - DNA, 861 bp, Artificial Sequence
  derived and/or modified sequence
atgagctggctcttatttcttgctcatagggtggccctggcggctttgccttgccgacgcggtagccgcggatttgggatgttttacgctgtccggcgaggacggaagacaggggtttttcttacctggaacgaatgtagggcacaggtagaccgctttcccgcagcacgctttaagaagttcgcaaccgaagacgaagcctgggccttcgtacgcaagtctgcctccccagaggtgagcgagggacatgagaaccagcacggccaggagtccgaggccaaagcatctaaacgcctccgtgagccactggacggagatgggcacgagtctgcagagccatacgctaagcacatgaagccgtcggtggaacctgcgccacctgtgtcgcgggacacatttagttacatgggcgacttcgttgtggtctatactgatggatgttgctcctcgaacggaaggcgtaggcctagggccggaattggtgtgtactggggacccggacaccctttgaatgtggggatccgactgcctggaagacagaccaatcagagagccgagatccacgccgcttgcaaggcaattgaacaggcgaagacacaaaatattaacaaactggtactgtacacagactcgatgttcactatcaacggaatcacgaattgggtccaaggctggaaaaaaaatggttggaaaaccagcgccggtaaggaggtcattaacaaggaagactttgtggcactggagagactgacccaggggatggacatccagtggatgcatgtgccaggccattccgggttcattggcaatgaggaggctgaccgactcgcgagagaaggcgctaaacagtctgaagattag

SEQ ID NO: 133629 - DNA, 1887 bp, Artificial Sequence
  derived and/or modified sequence
ggggagagaaggggcccaacatggtccatctcgaccttcctctgccgggcccagggcttcagccccgctcccataggccccgccccatcccagacctcgcccgccttcgggatctcagccctggctccgcttcttcaagtaccgacaggaagttgacgagttcgggctcgtcaggggccgagctccgggctccgccctacgacaccgcccctccctaggccccggccctcatcaggactccgcccagacgtgcgtcatcttcccgcgccggtgacggaagtgcggtgttgagcgccggcggctcgcgcccacgctgggccgggagtcgaaatgcttcccggtgccgggagtgagcgatgagctggcttctgttcctggcccacagagtcgccttggccgccttgccctgccgccgcggctctcgcgggttcgggatgttctatgccgtgaggaggggccgcaagaccggggtctttctgacctggaatgagtgcagagcacaggtggaccggtttcctgctgccagatttaagaagtttgccacagaggatgaggcctgggcctttgtcaggaaatctgcaagcccggaagtttcagaagggcatgaaaatcaacatggacaagaatcggaggcgaaagccagcaagcgactccgtgagccactggatggagatggacatgaaagcgcagagccgtatgcaaagcacatgaagccgagcgtggagccggcgcctccagttagcagagacacgttttcctacatgggagacttcgtcgtcgtctacactgatggctgctgctccagtaatgggcgtagaaggccgcgagcaggaatcggcgtttactgggggccaggccatcctttaaatgtaggcattagacttcctgggcggcagacaaaccaaagagcggaaattcatgcagcctgcaaagccattgaacaagcaaagactcaaaacatcaataaactggttctgtatacagacagtatgtttacgataaatggtataactaactgggttcaaggttggaagaaaaatgggtggaagacaagtgcagggaaagaggtgatcaacaaagaggactttgtggcactggagaggcttacccaggggatggacattcagtggatgcatgttcctggtcattcgggatttataggcaatgaagaagctgacagattagccagagaaggagctaaacaatcggaagactgagccatgtgactttagtccttgggagaacttgagccagcggctgtcttgctgcctgtacttactggtgtggaaaatagcctgcaggtaggaccattgcagtgatgggcagatgcgtctttcacacggaatcaggcacagtggccttctgtgacatgtgtttataaaaaatggttaagtatataataaattgaacatctttgagattggagaattatgtgagatttccacattatgtttactgggttcaatactgtccttgcttgttttattgcaggcaagcaaggcaaatggcctaaaatgctgtggcttatattttgataagaaatcaaaaaaccattggttaaaagatgcaactcagaagtctggaagtattctgaaagcatccatttaccgtccagttgacaggtttgagtctcctgcttgtataggtgacttgtgcccatgggtacattaaaggaacatgctgcccagggcctgggcggacagctcagtgggcaggatgtgtgctgggtctcagccccatgtgcctgcttgctgggcagttagtatagggcaaagcctgcctgcggcgaccctggctgctaggccattctctaggaacagctgcgactcataaagaccaagaagcataaataaactttcaaaaatttatttggctctttcgttaaaa

SEQ ID NO: 133630 - DNA, 861 bp, Artificial Sequence
  derived and/or modified sequence
atgagctggctgctgttcctggcccacagagtggccctggccgccctgccctgcagaagaggcagcagaggcttcggcatgttctacgccgtgagaagaggcagaaagaccggcgtgttcctgacctggaacgagtgcagagcccaggtggacagattccccgccgccagattcaagaagttcgccaccgaggacgaggcctgggccttcgtgagaaagagcgccagccccgaggtgagcgagggccacgagaaccagcacggccaggagagcgaggccaaggccagcaagagactgagagagcccctggacggcgacggccacgagagcgccgagccctacgccaagcacatgaagcccagcgtggagcccgccccccccgtgagcagagacaccttcagctacatgggcgacttcgtggtggtgtacaccgacggctgctgcagcagcaacggcagaagaagacccagagccggcatcggcgtgtactggggccccggccaccccctgaacgtgggcatcagactgcccggcagacagaccaaccagagagccgagatccacgccgcctgcaaggccatcgagcaggccaagacccagaacatcaacaagctggtgctgtacaccgacagcatgttcaccatcaacggcatcaccaactgggtgcagggctggaagaagaacggctggaagaccagcgccggcaaggaggtgatcaacaaggaggacttcgtggccctggagagactgacccagggcatggacatccagtggatgcacgtgcccggccacagcggcttcatcggcaacgaggaggccgacagactggccagagagggcgccaagcagagcgaggactag

SEQ ID NO: 133631 - protein, 147 aa, Artificial Sequence
  derived and/or modified sequence
MALQRTHSLLLLLLLTLLGLGLVQPSYGQDGMYQRFLRQHVHPEETGGSDRYCNLMMQRRKMTLYHCKRFNTFIHEDIWNIRSICSTTNIQCKNGKMNCHEGVVKVTDCRDTGSSRAPNCRYRAIASTRRVVIACEGNPQVPVHFDG

SEQ ID NO: 133632 - DNA, 444 bp, Artificial Sequence
  derived and/or modified sequence
atggccctgcagcggacccacagcctgctgctgctgctgctgctgaccctgctcggtctgggtctggtgcagccttcttacgggcaggacgggatgtatcaacgatttctacggcagcacgtccatcctgaggaaaccggtggatctgatcgatactgcaaccttatgatgcagagacgcaaaatgacactctaccactgtaagagattcaataccttcatacacgaagatatctggaacattcgttccatatgtagcacaacaaacatccagtgcaaaaacggtaagatgaactgccatgagggggtggtcaaggtcacggactgtcgcgacaccggtagctctcgggccccaaactgtcggtatcgtgccattgccagtactcggcgcgtggttattgcttgtgaagggaacccacaggtccccgtgcactttgacggttag

SEQ ID NO: 133633 - DNA, 444 bp, Artificial Sequence
  derived and/or modified sequence
atggccctgcagcggacccacagcctgctgctgctgctgctgctgactctgttgggattgggcctagtgcaacctagctacggccaagatggcatgtatcaacgctttctgcgccagcacgtgcatccagaggaaacaggcggctctgatcgctactgcaacctgatgatgcagagaagaaagatgaccctgtaccattgcaaacgatttaacacattcatccacgaggatatttggaacatcaggtcaatttgctccacgacgaacattcaatgtaagaatggcaagatgaattgtcatgagggcgtggttaaggttaccgactgtcgagacacagggtcctcccgtgctcccaactgccgatatcgagcaatcgcctccacaaggagggtggtgatcgcgtgcgaggggaaccctcaagtcccggttcattttgacggatag

SEQ ID NO: 133634 - DNA, 853 bp, Artificial Sequence
  derived and/or modified sequence
gtacacacactcacacaaggacgccaaccccacctagatgcaaagcaggattcaaaagaacatctttgcgttttctaccggctccccatcatcgtactagggaggaagaagcgggcacctctaagatactgatggctctgcagaggacccattcattgcttctgcttttgctgctgaccctgctggggctggggctggtccagccctcctatggccaggatggcatgtaccagcgattcctgcggcaacacgtgcaccctgaggagacaggtggcagtgatcgctactgcaacttgatgatgcaaagacggaagatgactttgtatcactgcaagcgcttcaacaccttcatccatgaagatatctggaacattcgtagtatctgcagcaccaccaatatccaatgcaagaacggcaagatgaactgccatgagggtgtagtgaaggtcacagattgcagggacacaggaagttccagggcacccaactgcagatatcgggccatagcgagcactagacgtgttgtcattgcctgtgagggtaacccacaggtgcctgtgcactttgacggttagatgccaccatgtagggattatcgcgagtggttgaccttacacttactccttaaatagcagtgagtaatgcatttgagctgtcccaggctctgtctcctcagctcatttcctactctttttctctatataactcattctattaaatacattgcaccaaagagatatggagacataaacctgtaatgaatgaggctgggcttttctgtaataagcttccttttataatactggtcagcttagctctctcagatcctatcctgtggaatttagttattatg

SEQ ID NO: 133635 - DNA, 444 bp, Artificial Sequence
  derived and/or modified sequence
atggccctccagaggacccactccctccttcttcttctcctgctgaccctcctcgggctggggctggtgcaaccgagctatggacaggacgggatgtatcagcgatttctgcgacaacatgtacatccagaggaaaccggcggttcagatcgttactgtaatctaatgatgcagcggagaaagatgactctgtatcactgcaagcgattcaacaccttcattcacgaggacatatggaatattaggtctatttgcagcaccacaaatatccagtgcaagaatggcaagatgaattgccacgagggagtcgtcaaagtgacagactgccgggatacaggcagctccagagctcccaattgtcgctaccgggctattgcttccaccaggagggtggttattgcatgcgagggcaacccccaggttccggtgcactttgatggttag

SEQ ID NO: 133636 - DNA, 444 bp, Artificial Sequence
  derived and/or modified sequence
atggcactgcagaggacacatagcctgctcctcctactcttgctcactctcctgggcctcggcctagtgcagccctcatacggacaggatggcatgtaccagcgcttcctgagacaacatgtgcatcctgaggagacgggcggaagtgataggtactgcaatctcatgatgcagaggcgaaagatgactttgtatcactgtaagcgatttaatactttcatacacgaagatatctggaatatccgctccatctgctcaaccaccaacattcaatgcaagaatggcaaaatgaactgccatgagggagtggtcaaggtcactgactgcagggatactggttcttcccgggctcccaattgccgatatcgagcaatcgctagcacgcgcagggtggttatcgcctgtgagggtaacccccaggtgcctgtccatttcgacggttag

SEQ ID NO: 133637 - DNA, 444 bp, Artificial Sequence
  derived and/or modified sequence
atggcactgcaaagaacccatagccttcttctcttactgttgctgacattgcttggacttggcttagtccagccctcctatggccaggacgggatgtatcagcgtttcctgagacagcacgtccaccctgaggagaccggaggtagcgacagatattgtaacctgatgatgcagcgcaggaagatgacactctatcattgcaagcggttcaataccttcatccacgaagatatatggaacatccgcagcatttgctcaaccacaaacatccagtgtaagaatggcaaaatgaattgccacgaaggggtggtcaaagtcacagactgccgcgacacagggtcctcccgggctcctaattgtcggtatagggctatcgctagcacccgtcgcgtagtaattgcatgtgaaggcaacccccaggttccggtacacttcgatgggtag

SEQ ID NO: 133638 - DNA, 444 bp, Artificial Sequence
  derived and/or modified sequence
atggccctacagagaactcatagcctactgcttctcttgcttctcactctccttggattggggttagttcaaccttcatatggccaagatggaatgtaccaacgctttcttagacagcacgtccatcctgaagagactggtgggagcgataggtattgcaatttaatgatgcagcgcaggaagatgactctataccactgcaagagattcaacaccttcattcatgaggatatctggaatatccgctccatttgctctactaccaatatccagtgtaagaacggaaaaatgaattgccacgagggcgtggtgaaagtaacagactgcagagatacaggcagttctcgggcccctaattgccgctatcgagctattgcatcaaccagaagggttgtcatcgcctgcgagggaaatcctcaagtgccagttcactttgatggttag

SEQ ID NO: 133639 - DNA, 444 bp, Artificial Sequence
  derived and/or modified sequence
atggcactccaaagaacccactcactgttgctgctgctgctgttgactctgctcggcttaggtctggtgcaaccgagctacggccaggatggcatgtaccaacgttttcttcgccagcacgttcaccctgaagaaaccggaggttctgacagatactgtaacctaatgatgcagcgtaggaaaatgaccctctaccattgcaagcgttttaacacattcatacacgaagacatttggaacattcgctccatctgctctacaacaaatatccagtgtaagaacggaaaaatgaattgtcatgagggggttgtgaaggtcaccgattgtagagatacgggctcctctcgggccccaaactgccgctaccgcgctattgcttcgactcgccgggtggtgattgcttgcgagggcaatccccaggtgcctgttcacttcgatggttag

SEQ ID NO: 133640 - DNA, 444 bp, Artificial Sequence
  derived and/or modified sequence
atggccttgcaaagaactcactctctactgcttctgctgctgttaactctattgggtctgggattagtgcagccctcatatgggcaggacgggatgtatcaaagattcctgcggcagcatgtacaccctgaagagactggcggcagcgataggtactgtaatcttatgatgcaacggcggaaaatgacattgtaccactgcaaaagatttaatacattcatccacgaagacatctggaatatcaggagtatatgcagtacaacaaatattcagtgcaagaacggcaaaatgaattgccatgagggagttgtgaaagtcactgattgtcgcgacacaggatcaagcagagcgccaaactgtaggtaccgggcgattgccagtacgcggagggtcgtgatcgcatgtgagggcaatccacaggtacccgtgcactttgacggttag

SEQ ID NO: 133641 - DNA, 444 bp, Artificial Sequence
  derived and/or modified sequence
atggccctacagagaactcatagcctactgcttctcttgcttctcactctccttggattggggttagttcaaccttcatatggccaagatggaatgtaccaacgctttcttagacagcacgtccatcctgaagagactggtgggagcgataggtattgcaatttaatgatgcagcgcaggaagatgactctataccactgcaagagattcaacaccttcattcatgaggatatctggaatatccgctccatttgctctactaccaatatccagtgtaagaacggaaaaatgaattgccacgaaggagttgtcaaggttacagactgcagggacaccggtagctcaagagcccccaattgccgctatagagccatagccagtactcggagagtcgtgatcgcatgcgaaggaaacccacaagtcccagtccatttcgacgggtag

SEQ ID NO: 133642 - DNA, 444 bp, Artificial Sequence
  derived and/or modified sequence
atggcactccaaagaacccactcactgttgctgctgctgctgttgactctgctcggcttaggtctggtgcaaccgagctacggccaggatggcatgtaccaacgttttcttcgccagcacgttcaccctgaagaaaccggaggttctgacagatactgtaacctaatgatgcagcgtaggaaaatgaccctctaccattgcaagcgttttaacacattcatacacgaagacatttggaacattcgctccatctgctctacaacaaatatccagtgtaagaacggaaaaatgaattgtcatgaaggagtagtcaaggttacagattgcagggatactggctcttcaagagcgccgaactgtagatatcgcgccatcgcatcaacacgcagggttgtgattgcttgtgaaggaaatccccaagtccccgtgcattttgatggttag

SEQ ID NO: 133643 - DNA, 444 bp, Artificial Sequence
  derived and/or modified sequence
atggctctacagagaacacactctctgttgctcctgctacttttgacccttctcggactgggactggtgcaacctagctacggacaggacggtatgtaccaacgctttctaaggcagcacgtgcacccagaagaaaccgggggcagcgataggtactgtaatctgatgatgcagcgtagaaagatgaccctatatcattgtaagcgctttaacacattcatccatgaggacatctggaacatacgttcgatctgctctacaacgaatatacaatgcaaaaatggtaagatgaactgtcatgaaggggttgttaaggtaacagactgccgagacaccggcagctcaagagcacctaactgccggtatagagccattgcatctacacgtcgagttgtgatcgcctgcgagggcaacccacaagttcctgtgcactttgatggatag

SEQ ID NO: 133644 - DNA, 1341 bp, Artificial Sequence
  derived and/or modified sequence
acacaactggaacccatctccaggaacaaacagctggaacccatctcccgttgaagggaaactgccagatttttgtaagattcttcctcctgggcacctctaagatactgatggctctgcagaggacccattcattgcttctgcttttgctgctgaccctgctggggctggggctggtccagccctcctatggccaggatggcatgtaccagcgattcctgcggcaacacgtgcaccctgaggagacaggtggcagtgatcgctactgcaacttgatgatgcaaagacggaagatgactttgtatcactgcaagcgcttcaacaccttcatccatgaagatatctggaacattcgtagtatctgcagcaccaccaatatccaatgcaagaacggcaagatgaactgccatgagggtgtagtgaaggtcacagattgcagggacacaggaagttccagggcacccaactgcagatatcgggccatagcgagcactagacgtgttgtcattgcctgtgagggtaacccacaggtgcctgtgcactttgacggttagatgccaccatgtagggattatcgcgagtggttgaccttacacttactccttaaatagcagtgagtaatgcatttgagctgtcccaggctctgtctcctcagctcatttcctactctttttctctatataactcattctattaaatacattgcaccaaagagatatggagacataaacctgtaatgaatgaggctgggcttttctgtaataagcttccttttataatactggtcagcttagctctctcagatcctatcctgtggaatttagttattatgtgtatttatgtagtatttcaaacatttcaaaatgctttcatctatgtttatcacattttaataccacagcacttataatgatgtcactacatatagaagctcaaagttaagggatttgctgaagactgtaaagttaatggaagaattgagacaaaaatccagtgtagctggccacttatccagggctttttctacttcatcacaaggaatgttttgaaagtgtctgctttttttatccttaaaattcacctgtcagggaggcattaaaaatttggaaatgtatgccagcaaaatgtgagctctgtattttttggcattcttatgtttgggtttaataagattaagaaaatgatactgggaattttctttttcctgaaactttgaatcaccctagtaagtcaaagtactaaaaaatgtactagatcattaagacttatgtgctcttactgattgaaagattttttatgttttccttgtaataaaggacctaaaccgaaggtacctgagaa

SEQ ID NO: 133645 - DNA, 1907 bp, Artificial Sequence
  derived and/or modified sequence
tttttccacccccttttgtcaactactgaaaaaaagtctccgttaaatttgaaacacaaactgtctcgcgatgggctgtcctgccaaagaaagcagcagcgaataagtacgtggcagatggtgctgtcgaccagtgtcaagaccaagtttcatgggttcctggacgctcagccaggggtagtctctgaagggccgcctggcaattgggagcagaagccagtttcccgccatctgctctccgtggaggcagtgctctcgcggctgctgcccgttggggtccagctgaggaaggagcgcggatcccaggctcgttctttgcctgggctgcccctgcggcccctggggcgggtgctgctgcggcgccagctccaagggcggatccaggcgggaggggcctcctcggagaagcggggcgcggtcccaactacgcagaggctggcacgccgaccctccacacctcaccacgcccccatctccgtccgtgtacacacactcacacaaggacgccaaccccacctagatgcaaagcaggattcaaaagaacatctttgcgttttctaccggctccccatcatcgtactagggaggaagaagcgggtgagaaacaaaacttctttccattgtcctgcccgtttctgcggacttgttctgaggccgaggcacctctaagatactgatggctctgcagaggacccattcattgcttctgcttttgctgctgaccctgctggggctggggctggtccagccctcctatggccaggatggcatgtaccagcgattcctgcggcaacacgtgcaccctgaggagacaggtggcagtgatcgctactgcaacttgatgatgcaaagacggaagatgactttgtatcactgcaagcgcttcaacaccttcatccatgaagatatctggaacattcgtagtatctgcagcaccaccaatatccaatgcaagaacggcaagatgaactgccatgagggtgtagtgaaggtcacagattgcagggacacaggaagttccagggcacccaactgcagatatcgggccatagcgagcactagacgtgttgtcattgcctgtgagggtaacccacaggtgcctgtgcactttgacggttagatgccaccatgtagggattatcgcgagtggttgaccttacacttactccttaaatagcagtgagtaatgcatttgagctgtcccaggctctgtctcctcagctcatttcctactctttttctctatataactcattctattaaatacattgcaccaaagagatatggagacataaacctgtaatgaatgaggctgggcttttctgtaataagcttccttttataatactggtcagcttagctctctcagatcctatcctgtggaatttagttattatgtgtatttatgtagtatttcaaacatttcaaaatgctttcatctatgtttatcacattttaataccacagcacttataatgatgtcactacatatagaagctcaaagttaagggatttgctgaagactgtaaagttaatggaagaattgagacaaaaatccagtgtagctggccacttatccagggctttttctacttcatcacaaggaatgttttgaaagtgtctgctttttttatccttaaaattcacctgtcagggaggcattaaaaatttggaaatgtatgccagcaaaatgtgagctctgtattttttggcattcttatgtttgggtttaataagattaagaaaatgatactgggaattttctttttcctgaaactttgaatcaccctagtaagtcaaagtactaaaaaatgtactagatcattaagacttatgtgctcttactgattgaaagattttttatgttttccttgtaataaaggacctaaaccgaaggtacctgagaa

SEQ ID NO: 133646 - DNA, 444 bp, Artificial Sequence
  derived and/or modified sequence
atggccctgcagagaacccacagcctgctgctgctgctgctgctgaccctgctgggcctgggcctggtgcagcccagctacggccaggacggcatgtaccagagattcctgagacagcacgtgcaccccgaggagaccggcggcagcgacagatactgcaacctgatgatgcagagaagaaagatgaccctgtaccactgcaagagattcaacaccttcatccacgaggacatctggaacatcagaagcatctgcagcaccaccaacatccagtgcaagaacggcaagatgaactgccacgagggcgtggtgaaggtgaccgactgcagagacaccggcagcagcagagcccccaactgcagatacagagccatcgccagcaccagaagagtggtgatcgcctgcgagggcaacccccaggtgcccgtgcacttcgacggctag

SEQ ID NO: 133647 - DNA, 444 bp, Artificial Sequence
  derived and/or modified sequence
atggccttacaacggacacatagcttgctactccttttgctcctcacgcttctgggtctcggcctggtacagcctagctatggacaggacggaatgtaccaacgattccttcgccagcatgtgcatcctgaggagaccggcggcagcgataggtactgtaacctaatgatgcagcgcagaaagatgacactttatcactgcaagaggttcaacacttttatccatgaagacatttggaacataaggtctatctgttcaacaaccaacatccagtgtaaaaacgggaagatgaactgccacgagggagtggtgaaggtcaccgattgcagggatacaggtagcagtcgcgccccaaactgtcggtacagagctatcgcctctacaaggcgagtggttatcgcatgcgaaggtaacccccaggtgcctgtccacttcgacggctag

SEQ ID NO: 133648 - DNA, 444 bp, Artificial Sequence
  derived and/or modified sequence
atggctctgcaaagaacacactccttgctcctactcttactgctgactttgcttggcctgggacttgttcagccatcctacggccaggatggtatgtaccagcgattcctcaggcagcacgtgcaccccgaggagactggcggaagtgacaggtattgtaacctcatgatgcaaagacgtaagatgactctataccactgtaaacggtttaacactttcatccatgaggatatctggaatatccgctctatctgttcaactacaaacatccaatgcaaaaatggcaagatgaattgccatgagggagtggtgaaagtgaccgattgccgtgacactgggagctctcgcgcccccaactgccgatacagggctattgcttctacgagaagggtggtgattgcctgtgaggggaatccccaggtccctgtgcactttgatggctag

SEQ ID NO: 133649 - DNA, 444 bp, Artificial Sequence
  derived and/or modified sequence
atggcactgcagcgaacacacagcctgctcttgctgctcctgctcactcttctcggcttagggcttgtgcagcccagttacggccaggatggcatgtaccagaggtttcttcgtcagcacgtgcatcccgaggagacaggaggatcggacaggtattgcaatttaatgatgcagagaagaaaaatgacactatatcattgcaaacgcttcaatacgttcattcacgaggatatttggaatatcaggagcatatgtagcaccaccaatattcagtgtaagaacgggaaaatgaactgccacgaaggggtagtgaaggtgaccgactgccgggatactgggagttccagagccccaaactgcagatatagagctatagcctccacccggcgcgtggtgatcgcttgcgaggggaatccacaagtccccgtgcatttcgacggttag

SEQ ID NO: 133650 - DNA, 444 bp, Artificial Sequence
  derived and/or modified sequence
atggccctgcagaggacccacagcctgctgctgctgctgctgctgaccctgctgggcctgggcctggtgcagcccagctatggccaggacggcatgtaccagcgcttcctgcggcagcacgtgcaccctgaggagaccggcggcagtgaccgctactgcaacctgatgatgcagaggaggaagatgaccctgtaccactgcaagcgcttcaacaccttcatccacgaggacatctggaacatccgcagcatctgcagcaccaccaacatccagtgcaagaatggcaagatgaactgccacgagggcgtggtgaaggtgacagactgccgggacaccggcagcagccgggcccccaactgccgctaccgggccatcgccagcaccaggagagtggtgattgcctgtgagggcaacccccaggtgcctgtgcactttgatggatag

SEQ ID NO: 133651 - DNA, 444 bp, Artificial Sequence
  derived and/or modified sequence
atggccctgcagcggacccacagcctgctgctgctgctgctgctgacactgcttggtctggggctggttcagccttcttacgggcaagacggcatgtaccaaaggtttttaaggcagcacgtgcatccggaagaaaccggaggttctgacagatactgtaatctaatgatgcagcggcggaaaatgaccctgtatcattgcaaacgttttaacacattcatccatgaggacatctggaatattcgatctatctgcagcaccacaaatattcaatgtaagaatggtaaaatgaattgccatgagggcgtggtgaaggtgactgactgcagagacaccggctcctctagggctcccaactgtcggtatagagcgatcgctagtactagacgagtggtcattgcctgcgaaggtaatcctcaagtgccagtccactttgatggttag

SEQ ID NO: 133652 - DNA, 444 bp, Artificial Sequence
  derived and/or modified sequence
atggccttgcagcgcacccatagcctgttgctgctgctcctgcttacgctgctcggccttggcctcgtccagcccagctacggacaggatggtatgtatcagaggttcctgcggcagcacgtgcatcccgaagagaccggagggagcgaccggtattgcaatctgatgatgcagcggcgcaaaatgacgctgtatcactgtaaaaggttcaacacatttatccacgaagatatttggaatattcggtctatttgctcgaccacgaatattcagtgcaaaaacggtaagatgaattgccacgagggtgtcgtgaaggtgaccgactgtcgagatacagggagcagccgcgctcctaactgcaggtatagggccatcgcttccactagacgtgtggtgatcgcatgcgagggtaatccccaggttccggtgcacttcgatggatag

SEQ ID NO: 133653 - DNA, 444 bp, Artificial Sequence
  derived and/or modified sequence
atggccttgcagcggacccatagtctcctcttattactacttttgactctgttaggcctgggcctcgtgcaaccaagttacgggcaggatggaatgtatcagagatttctgcggcagcatgtgcatcccgaggaaaccggaggttcggaccgctattgtaacttaatgatgcagagacgaaagatgactctatatcattgtaaacgctttaatactttcatacatgaggatatttggaatattcggagcatctgcagtaccaccaacatccagtgtaagaatgggaaaatgaattgtcatgagggtgttgtgaaggtcactgattgcagggacaccggatcgagtcgtgcccctaactgccgttaccgcgcgattgcttccacaagacgcgtagtgatcgcatgcgaaggcaatccccaggttccagttcactttgatggctag

SEQ ID NO: 133654 - DNA, 444 bp, Artificial Sequence
  derived and/or modified sequence
atggctctacagcggactcattcactgttgctgttattgttgcttacattgctcggtctgggtctcgttcagcctagttatggccaggacggcatgtatcagaggttcctacggcagcacgtgcatccggaggagaccggcggatccgaccgttactgtaacctgatgatgcaacgccggaagatgaccctgtaccattgcaaaaggttcaatacatttatccacgaagatatctggaacatacgctctatttgttctacaaccaatatccagtgtaagaatgggaagatgaattgccatgagggagtcgtcaaagtgaccgattgcagagacacaggttccagccgagcccccaattgcagataccgagctattgcttctaccagaagggtggtcatcgcctgtgaggggaacccccaggtccctgtccactttgacggctag

SEQ ID NO: 133655 - DNA, 444 bp, Artificial Sequence
  derived and/or modified sequence
atggccctgcagcggacccacagcctgctgctgctgctgctgctgaccctgctaggtctaggcttggtacagcctagctacgggcaggacggcatgtaccagagatttttaagacagcacgtgcaccccgaagagacaggcggctcggacagatattgcaacttaatgatgcagcgccgcaaaatgacactgtatcactgtaagcggtttaacacatttatacacgaagacatctggaacatacgcagcatttgcagtaccaccaacattcaatgtaaaaatggcaagatgaattgccacgagggtgttgtcaaggtgaccgattgccgggatacgggctccagcagggcacctaactgccgataccgggccattgccagcacccgccgggtggtgatagcctgtgaaggaaacccacaggtgcctgtccatttcgacggttag

SEQ ID NO: 133656 - DNA, 444 bp, Artificial Sequence
  derived and/or modified sequence
atggccctgcagcggacccacagcctgctgctgctgctgctgctgacattgttggggctgggcctcgtgcagccgtcatatggtcaggacgggatgtatcaaagatttcttaggcaacacgtacaccctgaagaaaccggcggaagtgaccgttattgcaacctcatgatgcagcgcaggaagatgaccctgtatcactgcaagagatttaatacgttcattcacgaggatatttggaatatccgctcaatttgctctacaaccaatatccagtgcaagaatgggaagatgaattgtcatgagggggtggtcaaggtcacagattgccgagatacagggtcttcccgcgctcccaattgccggtaccgtgccattgcaagcacccgacgggtggttattgcatgtgagggcaaccctcaagtgccagtgcattttgacggctag

SEQ ID NO: 133657 - DNA, 444 bp, Artificial Sequence
  derived and/or modified sequence
atggccctgcagcggacccacagcctgctgctgctgctgctgctgacattgctgggtctgggcttggtgcagcctagctatggacaggacggcatgtatcagagattcctcaggcaacatgtgcatcccgaggaaactggaggcagtgatcgatattgtaacctcatgatgcagcgccgaaagatgacgctctaccactgcaaacggtttaatactttcatccacgaagatatctggaatattagatccatctgttctacaaccaacatccaatgcaaaaacgggaaaatgaactgtcatgagggtgtcgttaaggtcacagattgccgtgacacaggttcctcccgcgcccccaactgccgatatcgggctatcgcaagcaccagacgcgttgtaattgcatgtgagggcaacccccaggtgcctgtacacttcgacggatag

SEQ ID NO: 133658 - DNA, 444 bp, Artificial Sequence
  derived and/or modified sequence
atggccctgcagcggacacatagtctactgcttcttctgctcctcaccctgcttggcctggggctggtccagccttcctacggacaagacggcatgtaccagaggtttctgcgccagcatgtacatcccgaagagaccggtgggtcggataggtactgcaatctaatgatgcagcgtagaaagatgactctctatcactgcaagcggttcaatacctttatccacgaagatatctggaatattagatcaatatgttctacaactaatatccaatgcaaaaacggtaagatgaactgtcatgaaggagtggtgaaggtcaccgattgccgagataccggttcatctcgtgctccaaactgccgctaccgggcaatcgcctcgacgagaagggtggtgattgcttgtgagggcaatccacaagtcccagtgcatttcgacgggtag

SEQ ID NO: 133659 - DNA, 444 bp, Artificial Sequence
  derived and/or modified sequence
atggccttgcagaggacccacagcttgttgctattacttctgttgactctactgggtctcgggcttgtgcagccttcatatggccaagacgggatgtaccagaggtttcttcgtcagcacgtgcaccccgaggaaactggaggaagcgacagatactgtaacctgatgatgcagcgtcggaaaatgactctctaccactgtaaaaggtttaacacattcatccacgaggatatttggaatattcggagcatctgtagtacaaccaatattcaatgcaaaaatgggaagatgaactgtcacgagggtgtcgtgaaggtaactgattgtcgtgatacaggatcctcccgtgccccaaattgcaggtacagggccatcgcatctacacggagagtagtcatcgcatgtgaaggtaacccacaggttcccgtccacttcgacggttag

SEQ ID NO: 133660 - DNA, 444 bp, Artificial Sequence
  derived and/or modified sequence
atggctctacaaaggactcatagtctgttgctccttttgctcctcacattgctgggcctgggactggtgcaaccgtcatacggacaggacggaatgtatcaaagattccttaggcagcacgttcatcccgaggaaacaggcggtagtgaccggtattgtaacctgatgatgcagcgacgtaagatgaccttgtaccactgcaagcggtttaacacttttatccatgaggatatttggaatattcggtccatttgttctactactaatatccagtgcaaaaacgggaaaatgaactgtcacgagggagtcgtgaaggttaccgattgcagggacaccgggtcctcccgcgcaccaaattgccgctaccgagccatcgcctccactaggagggtggtcattgcatgcgaggggaacccacaagtgcctgtgcattttgatggatag

SEQ ID NO: 133661 - DNA, 1401 bp, Artificial Sequence
  derived and/or modified sequence
accggctccccatcatcgtactagggaggaagaagcgggtgagaaacaaaacttctttccattgtcctgcccgtttctgcggacttgttctgaggccgaggagcctgtgttggaagagatggtgatgggcctgggcgttttgttgttggtcttcgtgctgggtctgggtctgaccccaccgaccctggctcaggataactccaggcacctctaagatactgatggctctgcagaggacccattcattgcttctgcttttgctgctgaccctgctggggctggggctggtccagccctcctatggccaggatggcatgtaccagcgattcctgcggcaacacgtgcaccctgaggagacaggtggcagtgatcgctactgcaacttgatgatgcaaagacggaagatgactttgtatcactgcaagcgcttcaacaccttcatccatgaagatatctggaacattcgtagtatctgcagcaccaccaatatccaatgcaagaacggcaagatgaactgccatgagggtgtagtgaaggtcacagattgcagggacacaggaagttccagggcacccaactgcagatatcgggccatagcgagcactagacgtgttgtcattgcctgtgagggtaacccacaggtgcctgtgcactttgacggttagatgccaccatgtagggattatcgcgagtggttgaccttacacttactccttaaatagcagtgagtaatgcatttgagctgtcccaggctctgtctcctcagctcatttcctactctttttctctatataactcattctattaaatacattgcaccaaagagatatggagacataaacctgtaatgaatgaggctgggcttttctgtaataagcttccttttataatactggtcagcttagctctctcagatcctatcctgtggaatttagttattatgtgtatttatgtagtatttcaaacatttcaaaatgctttcatctatgtttatcacattttaataccacagcacttataatgatgtcactacatatagaagctcaaagttaagggatttgctgaagactgtaaagttaatggaagaattgagacaaaaatccagtgtagctggccacttatccagggctttttctacttcatcacaaggaatgttttgaaagtgtctgctttttttatccttaaaattcacctgtcagggaggcattaaaaatttggaaatgtatgccagcaaaatgtgagctctgtattttttggcattcttatgtttgggtttaataagattaagaaaatgatactgggaattttctttttcctgaaactttgaatcaccctagtaagtcaaagtactaaaaaatgtactagatcattaagacttatgtgctcttactgattgaaaga

SEQ ID NO: 133662 - DNA, 1346 bp, Artificial Sequence
  derived and/or modified sequence
tccaggttcacacaactggaacccatctccaggaacaaacagctggaacccatctcccgttgaagggaaactgccagatttttgtaagattcttcctcctgggcacctctaagatactgatggctctgcagaggacccattcattgcttctgcttttgctgctgaccctgctggggctggggctggtccagccctcctatggccaggatggcatgtaccagcgattcctgcggcaacacgtgcaccctgaggagacaggtggcagtgatcgctactgcaacttgatgatgcaaagacggaagatgactttgtatcactgcaagcgcttcaacaccttcatccatgaagatatctggaacattcgtagtatctgcagcaccaccaatatccaatgcaagaacggcaagatgaactgccatgagggtgtagtgaaggtcacagattgcagggacacaggaagttccagggcacccaactgcagatatcgggccatagcgagcactagacgtgttgtcattgcctgtgagggtaacccacaggtgcctgtgcactttgacggttagatgccaccatgtagggattatcgcgagtggttgaccttacacttactccttaaatagcagtgagtaatgcatttgagctgtcccaggctctgtctcctcagctcatttcctactctttttctctatataactcattctattaaatacattgcaccaaagagatatggagacataaacctgtaatgaatgaggctgggcttttctgtaataagcttccttttataatactggtcagcttagctctctcagatcctatcctgtggaatttagttattatgtgtatttatgtagtatttcaaacatttcaaaatgctttcatctatgtttatcacattttaataccacagcacttataatgatgtcactacatatagaagctcaaagttaagggatttgctgaagactgtaaagttaatggaagaattgagacaaaaatccagtgtagctggccacttatccagggctttttctacttcatcacaaggaatgttttgaaagtgtctgctttttttatccttaaaattcacctgtcagggaggcattaaaaatttggaaatgtatgccagcaaaatgtgagctctgtattttttggcattcttatgtttgggtttaataagattaagaaaatgatactgggaattttctttttcctgaaactttgaatcaccctagtaagtcaaagtactaaaaaatgtactagatcattaagacttatgtgctcttactgattgaaagattttttatgttttccttgtaataaaggacctaaaccgaaggtacctg

SEQ ID NO: 133663 - DNA, 1790 bp, Artificial Sequence
  derived and/or modified sequence
gcagatggtgctgtcgaccagtgtcaagaccaagtttcatgggttcctggacgctcagccaggggtagtctctgaagggccgcctggcaattgggagcagaagccagtttcccgccatctgctctccgtggaggcagtgctctcgcggctgctgcccgttggggtccagctgaggaaggagcgcggatcccaggctcgttctttgcctgggctgcccctgcggcccctggggcgggtgctgctgcggcgccagctccaagggcggatccaggcgggaggggcctcctcggagaagcggggcgcggtcccaactacgcagaggctggcacgccgaccctccacacctcaccacgcccccatctccgtccgtgtacacacactcacacaaggacgccaaccccacctagatgcaaagcaggattcaaaagaacatctttgcgttttctaccggctccccatcatcgtactagggaggaagaagcgggtgagaaacaaaacttctttccattgtcctgcccgtttctgcggacttgttctgaggccgaggcacctctaagatactgatggctctgcagaggacccattcattgcttctgcttttgctgctgaccctgctggggctggggctggtccagccctcctatggccaggatggcatgtaccagcgattcctgcggcaacacgtgcaccctgaggagacaggtggcagtgatcgctactgcaacttgatgatgcaaagacggaagatgactttgtatcactgcaagcgcttcaacaccttcatccatgaagatatctggaacattcgtagtatctgcagcaccaccaatatccaatgcaagaacggcaagatgaactgccatgagggtgtagtgaaggtcacagattgcagggacacaggaagttccagggcacccaactgcagatatcgggccatagcgagcactagacgtgttgtcattgcctgtgagggtaacccacaggtgcctgtgcactttgacggttagatgccaccatgtagggattatcgcgagtggttgaccttacacttactccttaaatagcagtgagtaatgcatttgagctgtcccaggctctgtctcctcagctcatttcctactctttttctctatataactcattctattaaatacattgcaccaaagagatatggagacataaacctgtaatgaatgaggctgggcttttctgtaataagcttccttttataatactggtcagcttagctctctcagatcctatcctgtggaatttagttattatgtgtatttatgtagtatttcaaacatttcaaaatgctttcatctatgtttatcacattttaataccacagcacttataatgatgtcactacatatagaagctcaaagttaagggatttgctgaagactgtaaagttaatggaagaattgagacaaaaatccagtgtagctggccacttatccagggctttttctacttcatcacaaggaatgttttgaaagtgtctgctttttttatccttaaaattcacctgtcagggaggcattaaaaatttggaaatgtatgccagcaaaatgtgagctctgtattttttggcattcttatgtttgggtttaataagattaagaaaatgatactgggaattttctttttcctgaaactttgaatcaccctagtaagtcaaagtactaaaaaatgtactagatcattaagacttatgtgctcttactgattgaaagattttttatgttttccttgtaataaaggacctaaaccgaaggtacctg

SEQ ID NO: 133664 - RNA, 444 nt, Artificial Sequence
  derived and/or modified sequence
auggcccuacagagaacucauagccuacugcuucucuugcuucucacucuccuuggauugggguuaguucaaccuucauauggccaagauggaauguaccaacgcuuucuuagacagcacguccauccugaagagacuggugggagcgauagguauugcaauuuaaugaugcagcgcaggaagaugacucuauaccacugcaagagauucaacaccuucauucaugaggauaucuggaauauccgcuccauuugcucuacuaccaauauccaguguaagaacggaaaaaugaauugccacgagggcguggugaaaguaacagacugcagagauacaggcaguucucgggccccuaauugccgcuaucgagcuauugcaucaaccagaaggguugucaucgccugcgagggaaauccucaagugccaguucacuuugaugguuag

SEQ ID NO: 133665 - RNA, 444 nt, Artificial Sequence
  derived and/or modified sequence
auggcacuccaaagaacccacucacuguugcugcugcugcuguugacucugcucggcuuaggucuggugcaaccgagcuacggccaggauggcauguaccaacguuuucuucgccagcacguucacccugaagaaaccggagguucugacagauacuguaaccuaaugaugcagcguaggaaaaugacccucuaccauugcaagcguuuuaacacauucauacacgaagacauuuggaacauucgcuccaucugcucuacaacaaauauccaguguaagaacggaaaaaugaauugucaugaggggguugugaaggucaccgauuguagagauacgggcuccucucgggccccaaacugccgcuaccgcgcuauugcuucgacucgccggguggugauugcuugcgagggcaauccccaggugccuguucacuucgaugguuag

SEQ ID NO: 133666 - RNA, 444 nt, Artificial Sequence
  derived and/or modified sequence
auggccuugcaaagaacucacucucuacugcuucugcugcuguuaacucuauugggucugggauuagugcagcccucauaugggcaggacgggauguaucaaagauuccugcggcagcauguacacccugaagagacuggcggcagcgauagguacuguaaucuuaugaugcaacggcggaaaaugacauuguaccacugcaaaagauuuaauacauucauccacgaagacaucuggaauaucaggaguauaugcaguacaacaaauauucagugcaagaacggcaaaaugaauugccaugagggaguugugaaagucacugauugucgcgacacaggaucaagcagagcgccaaacuguagguaccgggcgauugccaguacgcggagggucgugaucgcaugugagggcaauccacagguacccgugcacuuugacgguuag

SEQ ID NO: 133667 - RNA, 444 nt, Artificial Sequence
  derived and/or modified sequence
auggcccuacagagaacucauagccuacugcuucucuugcuucucacucuccuuggauugggguuaguucaaccuucauauggccaagauggaauguaccaacgcuuucuuagacagcacguccauccugaagagacuggugggagcgauagguauugcaauuuaaugaugcagcgcaggaagaugacucuauaccacugcaagagauucaacaccuucauucaugaggauaucuggaauauccgcuccauuugcucuacuaccaauauccaguguaagaacggaaaaaugaauugccacgaaggaguugucaagguuacagacugcagggacaccgguagcucaagagcccccaauugccgcuauagagccauagccaguacucggagagucgugaucgcaugcgaaggaaacccacaagucccaguccauuucgacggguag

SEQ ID NO: 133668 - RNA, 444 nt, Artificial Sequence
  derived and/or modified sequence
auggcacuccaaagaacccacucacuguugcugcugcugcuguugacucugcucggcuuaggucuggugcaaccgagcuacggccaggauggcauguaccaacguuuucuucgccagcacguucacccugaagaaaccggagguucugacagauacuguaaccuaaugaugcagcguaggaaaaugacccucuaccauugcaagcguuuuaacacauucauacacgaagacauuuggaacauucgcuccaucugcucuacaacaaauauccaguguaagaacggaaaaaugaauugucaugaaggaguagucaagguuacagauugcagggauacuggcucuucaagagcgccgaacuguagauaucgcgccaucgcaucaacacgcaggguugugauugcuugugaaggaaauccccaaguccccgugcauuuugaugguuag

SEQ ID NO: 133669 - RNA, 444 nt, Artificial Sequence
  derived and/or modified sequence
auggcucuacagagaacacacucucuguugcuccugcuacuuuugacccuucucggacugggacuggugcaaccuagcuacggacaggacgguauguaccaacgcuuucuaaggcagcacgugcacccagaagaaaccgggggcagcgauagguacuguaaucugaugaugcagcguagaaagaugacccuauaucauuguaagcgcuuuaacacauucauccaugaggacaucuggaacauacguucgaucugcucuacaacgaauauacaaugcaaaaaugguaagaugaacugucaugaagggguuguuaagguaacagacugccgagacaccggcagcucaagagcaccuaacugccgguauagagccauugcaucuacacgucgaguugugaucgccugcgagggcaacccacaaguuccugugcacuuugauggauag

SEQ ID NO: 133670 - protein, 190 aa, Artificial Sequence
  derived and/or modified sequence
MSTRKRRGGAINSRQAQKRTREATSTPEISLEAEPIELVETAGDEIVDLTCESLEPVVVDLTHNDSVVIVDERRRPRRNARRLPQDHADSCVVSSDDEELSRDRDVYVTTHTPRNARDEGATGLRPSGTVSCPICMDGYSEIVQNGRLIVSTECGHVFCSQCLRDSLKNANTCPTCRKKINHKRYHPIYI

SEQ ID NO: 133671 - protein, 190 aa, Artificial Sequence
  derived and/or modified sequence
MSTRKRRGGAINSRQAQKRTREATSTPEISLEAEPIELVETAGDEIVDLTCESLEPVVVDLTHNDSVVVSDERRRPRRNARRLPQDHADSCVVSSDDEELSRDRDVYVTTHTPRNARDEGATGLRPSGTVSCPICMDGYSEIVQNGRLIVSTECGHVFCSQCLRDSLKNANTCPTCRKKINHKRYHPIYI

SEQ ID NO: 133672 - DNA, 2947 bp, Artificial Sequence
  derived and/or modified sequence
atggggggcggagccgaggcctccgaagcggaagtgggttgctgttgaggcggcggcatctttctcgaggagctctcctgggcggctgaagaaggagcttcttctccggagtgcgccggcggtggcgcctgcggacctaactagctccaggttaggccgagctttgcgggaaagcagcggacttgaaaatactggaaatctgtccggatccaaattattttgcaagccagatgagtaaccagagggcatgaaaggttgagaacatttgacttccctgcaaaccttggtatagatcacttccttttctgtaggaaaggaaaggcaccaaagagcacaatgagtacaagaaagcgtcgtggtggagcaataaattctagacaagctcagaagcgaactcgggaagcaacctccacccccgagatctccttggaagcagaacccatagaactcgtggaaactgctggagatgaaattgtggacctcacttgtgaatctttagagcctgtggtggttgatctgactcacaatgactctgttgtgattgttgacgaaagaagaagaccaaggaggaatgctaggaggctgccccaggaccatgctgacagctgtgtggtgagcagtgacgatgaggagttgtccagggacagagacgtatatgtgactacccatactcccagaaacgccagggatgagggcgctacaggcctcaggccctcaggtactgtcagttgtcccatctgcatggacggatactcagagatcgtgcagaatggacgtctcatcgtttccacagaatgcggccatgtcttctgtagccagtgcctccgtgattccctgaagaatgctaatacttgcccaacttgtaggaaaaagatcaaccacaaacggtaccaccccatttatatatgaagtattcagagccccccaggagagacggatggacagacagacagccaggttctccagtggtatctgcctccattttcctgagatcaaaaagactgtttcgaaaccaacatctgatatgtaaactgctcttttgtttccaaccccttccttttgttatctccagtttgatgctatggcgctggacccagggccctcccaggccatctctgttcctctggggtggtccagttctagagtgggagaaagggagtcaggcgcattgggaatcgtggttccagtctggttgcagaatctgcacatttgccaagaaattttccctgtttggaaagtttgccccagctttcccgggcacaccaccttttgtcccaagtgtctgccggtcgaccaatctgcctgccacacattgaccaagccagacccggttcacccagctcgaggatcccaggttgaagagtggccccttgaggccctggaaagaccaatcactggacttcttcccttgagagtcagaggtcacccgtgattctgcctgcaccttatcattgatctgcagtgatttctgcaaatcaagagaaactctgcagggcactcccctgtttcctaagaacgaaaaagtgcaataaaggccattcgttacctacttttcagcagcccacaagatgtagcactattagtgtccccctcagaggcttaatgttgcctgtggagcagtgcccatcccagcccgtttctgcccaccagttgttctcaggaaccttacccatgctccagcgtccttcacctggcacaggacatgcaagataaatagggcaggcacgtgtttgggtgtcctctcttttctgataaaatccatcccgtgtttgccacacgccctccagtcctcagttcccactgcctaacgtctgcccccgtgtagatactgagaggtggtggcagtaattgtggccttatcagccgctcagttccaggcttttgcccaggtcactgttgccccatgttcggagaacctggcccacctgtcttggctttctcatccttcccaacccagtgccgtttatttcagaagcttcctggccactgggcttggatgcttcgggcttctgactgctccataggttttgactggtgaaacaggggcccagatgacaacctctccttcgctccacaggtacgcgggagcctcaggttctctcaggggcagcaaagtggcccaagctgcccctgacagcacagggcctggggggtggctaacgagagaggccttacagtgccggcatgcctcctcttccactgtcgtccttcctcagagggcctcacgccaaacaaacggccttttcgtgtgaaacatcttcagggcgggaaaggggccacttctggctttgttagcaataactgaccttcagtttacccttctgaaggagcagggactcagcacagaattcactttagacggggctgaaggagtgtccctcctctatgtgaaaagaaaattgttttattcttcattctgactttttaactgtttggctcacttccagttagtttgaatgaaaataataattttctacttggagttgaagagggcagaatccgcagctctcatcattgtgatgtgtagcatgtctgccctctgactggacatcattgccattaactttcttctgggcatcacggcaatgtcacgatgcccagacttggagcaaggcaaccttggagtcagtccactcataaaatatggtaacacccattttaaaatttaagttttgtccttaaagacaacttcagtggttaattataaaagttgtgttacttcgtcctaaattaaattgatagaaagatttaaaaatgtgttttgtttctactattcagaaactgcgaactagggaaaggttggtatgaagaaatgtctttccttttttcaatgtacatagttcaactctttctttgttacatttaaactatatccatggatatcagtctgctttggactcctctgctagtgttacagatggaaataaaaccattaatttgaaccaaa

SEQ ID NO: 133673 - DNA, 573 bp, Artificial Sequence
  derived and/or modified sequence
atgagcactagaaaaagacgagggggcgcaatcaactccaggcaagcccagaaaagaacccgtgaagcaacctcaactcccgagatcagcctggaggcagaaccaattgagctcgtagagaccgccggcgacgagatcgtcgacttgacctgcgagagcctcgagccagttgtcgtggacctgacacacaatgactccgtggttatcgttgacgagcggcggcgcccacgcaggaatgcaagaaggcttccacaggaccacgccgacagttgtgtggtgtcttctgacgatgaagaactatcaagagatcgagatgtttacgtgacaactcacactccccgcaacgcaagagacgagggcgccactggcttgcgacctagtggcacagtgtcttgccccatttgtatggatgggtactcagagatcgtccaaaacgggaggctgatagtttcaacagagtgtgggcacgtgttctgtagccagtgcctgcgggactccctgaagaatgctaacacctgtccaacatgtcgcaagaagatcaaccataagaggtaccatccaatatacatttag

SEQ ID NO: 133674 - DNA, 573 bp, Artificial Sequence
  derived and/or modified sequence
atgtcaacacgtaaacgaagaggcggagcaatcaatagccgacaagcacagaagcgcacccgggaagccactagtacacccgagatttctctggaagctgagcccattgaactcgtcgagactgctggggacgaaattgtcgacctgacgtgtgagtcacttgagcctgtcgttgtggacctgacccataatgacagcgttgtgattgtggacgagcgccgcagacccagacgcaacgcacgccgactccctcaagaccacgccgattcgtgtgtcgtgagctcggacgatgaagagctgtcaagagacagagatgtgtatgtcacgacgcatacacccagaaatgccagagacgagggcgctaccggactgagaccaagtggtactgtgagctgtcctatttgcatggatggctattcagagatagtgcaaaatggccgactgatcgtcagcacagaatgtggccacgtgttctgcagccagtgcctgcgagatagcctcaaaaatgccaacacatgcccgacgtgtcggaaaaaaatcaatcacaagaggtatcatcctatctacatctag

SEQ ID NO: 133675 - DNA, 573 bp, Artificial Sequence
  derived and/or modified sequence
atgtccacgcggaaaaggcgagggggagcaattaattccagacaagcccagaagcgcacgcgggaagccacaagcactcccgagatctccctcgaggcagagccaatcgaattagtggaaaccgctggcgatgagatcgtggacctgacttgtgaaagcctggagcctgtggtggtagacctgacccacaatgatagcgttgtcatcgttgacgaacgtagacgccctcgtcggaacgcccgtaggctcccccaggaccacgcggactcctgcgtcgtctctagtgatgacgaagagctgagccgggaccgggacgtttatgtgacgactcacactccccgcaatgctcgggatgagggagccacaggactccggccctccgggaccgtctcttgcccgatctgcatggatggctattcggagatcgtccaaaacggacggctgattgtgtcaactgagtgtggacatgtgttctgctctcagtgccttcgcgatagtttgaagaatgccaacacttgccccacatgtcgcaagaagattaatcacaagagatatcatccaatttatatctag

SEQ ID NO: 133676 - DNA, 573 bp, Artificial Sequence
  derived and/or modified sequence
atgagtacacgaaaacgacgggggggagcgatcaattcaagacaggctcagaaaaggacaagggaagccacctctacacccgagatcagcttagaagcggagcctattgagcttgtggaaaccgctggcgacgagatcgtagatctgacatgtgaaagcctcgagcccgtggtggtggatctcacccataacgattctgttgtcgtgtctgacgaacggaggagaccacgccgcaacgctcgtagactaccacaggaccacgctgactcatgcgtggtatccagcgatgacgaggaactgagcagagatagagatgtgtacgttaccacccacactccacggaatgctcgggacgaaggtgcaaccgggctgcggccctcagggactgtcagttgtcctatctgcatggatggctactcagagatagtgcagaacgggagattgattgtatccactgagtgcggacatgtattttgttcccagtgcctgagagactcccttaaaaatgcgaatacgtgcccgacgtgccgcaagaaaattaaccacaaaaggtatcatccaatctacatttag

SEQ ID NO: 133677 - DNA, 573 bp, Artificial Sequence
  derived and/or modified sequence
atgagcaccaggaagaggcggggcggggccatcaacagccggcaggcccagaagaggacccgggaggccaccagcaccccagagatcagcctggaggccgagcccatcgagctggtggagacagctggagatgagatcgtggacctgacctgtgagagcctggagcctgtggtggtggacctgacccacaatgacagcgtggtgattgtggatgaaagaagaagaccaagaagaaatgcccggcggctgccccaggaccacgccgacagctgtgtggtgtccagtgatgatgaggagctgagccgggacagagatgtgtatgtgaccacccacaccccaagaaatgccagagatgagggcgccaccggcctgcggcccagcggcaccgtgtcctgccccatctgcatggatggctacagcgagatcgtgcagaatggccgcctgattgtgtccacagaatgtggccacgtgttctgcagccagtgcctgcgggacagcctgaagaatgccaacacctgccccacctgcaggaagaagatcaaccacaagcgctaccaccccatctacatctag

SEQ ID NO: 133678 - DNA, 573 bp, Artificial Sequence
  derived and/or modified sequence
atgagcaccaggaagaggcggggcggggccatcaacagccggcaggcccagaagaggacccgggaggccaccagcaccccagagatcagcctggaggccgagcccatcgagctggtggagacagctggagatgagatcgtggacctgacctgtgagagcctggagcctgtggtggtggacctgacccacaatgacagcgtggtggtgtctgatgaaagaagaagaccaagaagaaatgcccggcggctgccccaggaccacgccgacagctgtgtggtgtccagtgatgatgaggagctgagccgggacagagatgtgtatgtgaccacccacaccccaagaaatgccagagatgagggcgccaccggcctgcggcccagcggcaccgtgtcctgccccatctgcatggatggctacagcgagatcgtgcagaatggccgcctgattgtgtccacagaatgtggccacgtgttctgcagccagtgcctgcgggacagcctgaagaatgccaacacctgccccacctgcaggaagaagatcaaccacaagcgctaccaccccatctacatctag

SEQ ID NO: 133679 - DNA, 573 bp, Artificial Sequence
  derived and/or modified sequence
atgagcacccggaagcggcggggcggcgccatcaacagccggcaggcccagaagcgcacccgtgaggccaccagcacaccggaaattagcttggaagcagagcccattgagctggtcgagaccgccggagatgaaatcgttgatctgacctgcgaatccctagaaccagtggtggttgatctcacacataacgacagcgtggtaatagtggatgaacgccgccggccccgaagaaatgcgcgcagactgccccaagatcacgccgattcgtgcgtggtgtcatctgatgacgaagaactgagtagggatcgcgacgtgtacgtgacaacccatacaccaagaaacgcgcgcgatgagggggccacgggtttgcgccctagcggcactgtgagctgccctatttgcatggatggctattcagaaatagtccagaatgggcggctgattgtgtctactgagtgcgggcatgtattttgctctcagtgtttgcgcgacagcctgaagaacgctaacacctgcccgacatgtaggaagaaaatcaaccataagcggtaccatcctatttacatttag

SEQ ID NO: 133680 - DNA, 573 bp, Artificial Sequence
  derived and/or modified sequence
atgagcacccggaagcggcggggcggcgccatcaacagccggcaggctcagaagagaactcgggaggccacctcaacgccggaaatcagtctggaggccgaacctatcgagctggtggaaacagcgggcgatgagatcgtggatctaacatgtgagtcattagagcccgtggttgttgacctgacacataacgactctgtagttatcgtggacgagcggcgccgccctcgtcggaacgcccgtcgactgccacaagaccatgcggacagctgcgtagtgtcatcagacgacgaggagctgtctagggaccgagatgtatacgtgaccacacacacaccccggaatgccagagatgaaggggctacaggcctgaggccttctggtaccgtcagctgccctatttgcatggacggctactctgaaatcgtgcagaacggtagactgattgtgagcaccgagtgcggacatgtgttctgtagccagtgtttaagggactcactcaaaaacgcaaatacatgtcccacatgtagaaagaagattaaccacaagcgataccacccaatctatatctag

SEQ ID NO: 133681 - DNA, 573 bp, Artificial Sequence
  derived and/or modified sequence
atgagcacccggaagcggcggggcggcgccatcaacagccggcaggctcaaaagcgtacacgtgaggccacctctacacctgaaatttccctggaagccgagcccatcgagttggtggaaaccgctggagacgagatagttgatctaacatgtgaaagtttggagccagtagtagtcgacctgacccacaacgactccgtggtgattgtcgacgaaagacgcagaccaagaaggaatgcacgcaggttgcctcaggatcacgctgacagttgtgtcgtctctagtgacgacgaggaactgagccgggacagagatgtctacgtgacaacccatacgccccgaaacgcacgggatgagggtgctacgggcttgcgcccgtctggaacagttagttgcccgatctgcatggacggatactctgaaattgttcaaaacggcaggttgatcgtgtccaccgaatgcggccacgtgttctgctcccagtgtctgcgagattcactgaaaaatgccaatacctgtccaacttgcaggaaaaagattaaccataaacgctatcacccaatctacatctag

SEQ ID NO: 133682 - DNA, 573 bp, Artificial Sequence
  derived and/or modified sequence
atgagcacccggaagcggcggggcggcgccatcaacagccggcaggcccagaagaggaccagagaggcgacttcaacgcctgaaatttctttggaagccgagccaattgagctcgtcgaaacagcaggagatgaaatagtggacctgacatgcgagagtctggaaccggttgtggtggacctgacacataacgattctgtggtggttagtgacgagaggagacggccccggaggaacgcgcgccgtctcccacaggatcatgccgatagttgcgtggtctcttcagacgatgaagaattgagcagggatagagacgtgtatgtgaccacacacactccaaggaacgcgagagacgaaggcgcgacaggcttgcgtccatctggaactgtgagctgcccaatttgtatggatggttattctgaaatcgtccagaatggaaggttaatcgtgtctacagagtgcggacatgtgttctgctctcagtgtctgcgggatagcttaaagaacgctaacacatgccccacatgccgtaagaaaattaatcacaaacgataccatcctatctatatctag

SEQ ID NO: 133683 - DNA, 573 bp, Artificial Sequence
  derived and/or modified sequence
atgagtacccggaagcgaagaggaggagccatcaatagtcgccaggcacaaaaacgcacaagggaggcaacatccacccccgagatctctttggaggccgagcccatcgagctcgtggagaccgcaggagatgaaatagtggacctcacctgcgagagccttgagccagtcgtcgtcgacctgacacataatgattccgtggtaattgttgacgaacgcagacgtccacgcagaaacgccagaagactgccccaggatcatgccgacagttgtgtcgtttctagcgacgacgaggagttgtcacgcgatcgcgacgtttacgtcacgacacacacgccacgcaatgcacgggacgagggcgctacggggctgcggccatccggtactgtcagctgtcctatctgcatggatggatacagtgaaatcgtacaaaacgggagactgattgtgagcaccgaatgtggccacgtgttttgtagccagtgcctgagagattccctcaagaatgccaacacgtgtccgacatgtcgtaagaagattaaccacaagaggtaccatcccatctatatctag

SEQ ID NO: 133684 - DNA, 573 bp, Artificial Sequence
  derived and/or modified sequence
atgtccacgcggaagagacgaggaggagccattaattcccgtcaggcacaaaagcggactcgggaagctacaagcacgcctgagatctcattggaggctgagcctatcgagctcgtcgagacagccggagacgaaatagtagacttgacatgcgagtccttggagcccgtggtggtcgacttaactcacaacgacagtgtggtcatcgtggacgaacgcagacggcctagaaggaatgctagaagacttcctcaggaccatgccgacagttgcgttgtttctagcgacgatgaggaactgtctcgggatcgagatgtttatgtgacaacacatactccgcgaaatgcccgagatgaaggtgctacgggactgcgcccttccggtaccgtgtcctgccccatttgcatggatggatattctgaaattgtgcagaatggcagattgattgtgtctaccgagtgcgggcacgtcttttgctctcagtgtctgcgggacagcctgaagaatgctaacacttgtcccacctgccgaaagaaaatcaaccataaaaggtatcatcctatttacatttag

SEQ ID NO: 133685 - DNA, 573 bp, Artificial Sequence
  derived and/or modified sequence
atgtctaccaggaaaagacgtggcggagcgataaatagtagacaggcccaaaagcggacccgagaggcaacctcaacaccagagatctccttggaggctgagcctatagagctggtggaaaccgcaggcgatgaaatcgtggatctaacttgcgaaagtttagagccagtagtcgtggacctaacacataatgacagcgtcgttatcgttgacgaacgcagaaggcctaggaggaacgcgagacggttgccccaggatcatgccgactcttgcgtcgtctcctcagatgacgaagagttgagtagggaccgggacgtgtacgtgacaacccatacgccgaggaatgccagggatgagggagccacaggacttcgcccaagcggcaccgtgagctgtcccatctgtatggatggatattctgagatcgtgcagaatggtagactgattgtatcaacggaatgcggacacgtgttttgctcccagtgtttgcgcgatagcctgaaaaacgccaacacgtgccctacttgtcgcaaaaagattaaccacaaaaggtatcatcctatttacatctag

SEQ ID NO: 133686 - DNA, 573 bp, Artificial Sequence
  derived and/or modified sequence
atgtcgacccgaaagaggcgcggaggagcaatcaatagccggcaagcccaaaagcgaacccgagaagccacgtctacccctgagatttctctcgaggccgagcccattgagctcgtggagacggccggagacgaaatcgtggacctgacttgcgaatccctggaaccggtggtcgtagatctgacacacaatgactccgtggtggtgtccgatgaacgaagaagacccagacggaatgcccgaaggctgccccaagatcatgcggacagctgcgtggtctcttctgacgacgaagagcttagcagagacagggatgtatatgtgacgacacacactcctcggaatgcacgggatgagggggctactggcctgcgacccagtggaaccgtgtcttgcccgatttgtatggatggatactctgagattgtgcagaatggcaggctcatcgtttctacagaatgtggccacgtgttctgctctcaatgtctacgagactctctcaaaaacgccaacacatgtcctacctgtaggaagaaaattaaccacaaacggtaccatcccatttacatttag

SEQ ID NO: 133687 - DNA, 3088 bp, Artificial Sequence
  derived and/or modified sequence
agtgcgctcgattgtgggcgggggcggaaagaggcgcgttttaaagtggtaacagatggttttcttatccaataggattaaaaaatttgtccttacccggccgaccgcggaagtagagtaggcgggcggccaatggggacatgatggggggcggagccgaggcctccgaagcggaagtgggttgctgttgaggcggcggcatctttctcgaggagctctcctgggcggctgaagaaggagcttcttctccggagtgcgccggcggtggcgcctgcggacctaactagctccaggttaggccgagctttgcgggaaagcagcggacttgaaaatactggaaatctgtccggatccaaattattttgcaagccagatgagtaaccagagggcatgaaaggttgagaacatttgacttccctgcaaaccttggtatagatcacttccttttctgtaggaaaggaaaggcaccaaagagcacaatgagtacaagaaagcgtcgtggtggagcaataaattctagacaagctcagaagcgaactcgggaagcaacctccacccccgagatctccttggaagcagaacccatagaactcgtggaaactgctggagatgaaattgtggacctcacttgtgaatctttagagcctgtggtggttgatctgactcacaatgactctgttgtgattgttgacgaaagaagaagaccaaggaggaatgctaggaggctgccccaggaccatgctgacagctgtgtggtgagcagtgacgatgaggagttgtccagggacagagacgtatatgtgactacccatactcccagaaacgccagggatgagggcgctacaggcctcaggccctcaggtactgtcagttgtcccatctgcatggacggatactcagagatcgtgcagaatggacgtctcatcgtttccacagaatgcggccatgtcttctgtagccagtgcctccgtgattccctgaagaatgctaatacttgcccaacttgtaggaaaaagatcaaccacaaacggtaccaccccatttatatatgaagtattcagagccccccaggagagacggatggacagacagacagccaggttctccagtggtatctgcctccattttcctgagatcaaaaagactgtttcgaaaccaacatctgatatgtaaactgctcttttgtttccaaccccttccttttgttatctccagtttgatgctatggcgctggacccagggccctcccaggccatctctgttcctctggggtggtccagttctagagtgggagaaagggagtcaggcgcattgggaatcgtggttccagtctggttgcagaatctgcacatttgccaagaaattttccctgtttggaaagtttgccccagctttcccgggcacaccaccttttgtcccaagtgtctgccggtcgaccaatctgcctgccacacattgaccaagccagacccggttcacccagctcgaggatcccaggttgaagagtggccccttgaggccctggaaagaccaatcactggacttcttcccttgagagtcagaggtcacccgtgattctgcctgcaccttatcattgatctgcagtgatttctgcaaatcaagagaaactctgcagggcactcccctgtttcctaagaacgaaaaagtgcaataaaggccattcgttacctacttttcagcagcccacaagatgtagcactattagtgtccccctcagaggcttaatgttgcctgtggagcagtgcccatcccagcccgtttctgcccaccagttgttctcaggaaccttacccatgctccagcgtccttcacctggcacaggacatgcaagataaatagggcaggcacgtgtttgggtgtcctctcttttctgataaaatccatcccgtgtttgccacacgccctccagtcctcagttcccactgcctaacgtctgcccccgtgtagatactgagaggtggtggcagtaattgtggccttatcagccgctcagttccaggcttttgcccaggtcactgttgccccatgttcggagaacctggcccacctgtcttggctttctcatccttcccaacccagtgccgtttatttcagaagcttcctggccactgggcttggatgcttcgggcttctgactgctccataggttttgactggtgaaacaggggcccagatgacaacctctccttcgctccacaggtacgcgggagcctcaggttctctcaggggcagcaaagtggcccaagctgcccctgacagcacagggcctggggggtggctaacgagagaggccttacagtgccggcatgcctcctcttccactgtcgtccttcctcagagggcctcacgccaaacaaacggccttttcgtgtgaaacatcttcagggcgggaaaggggccacttctggctttgttagcaataactgaccttcagtttacccttctgaaggagcagggactcagcacagaattcactttagacggggctgaaggagtgtccctcctctatgtgaaaagaaaattgttttattcttcattctgactttttaactgtttggctcacttccagttagtttgaatgaaaataataattttctacttggagttgaagagggcagaatccgcagctctcatcattgtgatgtgtagcatgtctgccctctgactggacatcattgccattaactttcttctgggcatcacggcaatgtcacgatgcccagacttggagcaaggcaaccttggagtcagtccactcataaaatatggtaacacccattttaaaatttaagttttgtccttaaagacaacttcagtggttaattataaaagttgtgttacttcgtcctaaattaaattgatagaaagatttaaaaatgtgttttgtttctactattcagaaactgcgaactagggaaaggttggtatgaagaaatgtctttccttttttcaatgtacatagttcaactctttctttgttacatttaaactatatccatggatatcagtctgctttggactcctctgctagtgttacagatggaaataaaaccattaatttgaacca

SEQ ID NO: 133688 - DNA, 2098 bp, Artificial Sequence
  derived and/or modified sequence
agaagttaggaggtctgcgtctgggtctcggctcaccctggggggccgcggccatggggcttagttcctagcctaggaagggaaactgagactctgggaggggcaggaacgcccccaaggtcacttggaaagtcgggcaggatgtgctgttagggggaagacccgggcagggtttttgttccccgctgacgacgcctcctttgtgtgttcgcgccgccgccccgccatcgtggggcctgcgagtttgccggggtgcgtgggccgcgtggcggggccttttgtaggtcgggaggatctgagtacgggtgcgggcctgaccgtgggggcgccgaggtcgcagtctaaaacttagtagggcctcgatttccgggcgcgcttccgggccccggctggtggttggtggaacgtgcgactgtgaggcttgcggcccagccctgcaccgctcgggcccttcaccgctctggcgcgcctatagacaggtgtatgaagattctcacgacccgaaacagagttgctagtaaacaccgcttttccgcctttgatccatcgagggaagagggaaaaggatagagcttgggcaagccgttttggtggaatctcactctgtcacccaggatgcagtgcactggcgtgttctcggtctcactgtaacctctgccatctgggctcaagtgattctcctgcctcagcctccggagtagctgggattacaggacttgaaaatactggaaatctgtccggatccaaattattttgcaagccagatgagtaaccagagggcatgaaaggttgagaacatttgacttccctgcaaaccttggtatagatcacttccttttctgtaggaaaggaaaggcaccaaagagcacaatgagtacaagaaagcgtcgtggtggagcaataaattctagacaagctcagaagcgaactcgggaagcaacctccacccccgagatctccttggaagcagaacccatagaactcgtggaaactgctggagatgaaattgtggacctcacttgtgaatctttagagcctgtggtggttgatctgactcacaatgactctgttgtgattgttgacgaaagaagaagaccaaggaggaatgctaggaggctgccccaggaccatgctgacagctgtgtggtgagcagtgacgatgaggagttgtccagggacagagacgtatatgtgactacccatactcccagaaacgccagggatgagggcgctacaggcctcaggccctcaggtactgtcagttgtcccatctgcatggacggatactcagagatcgtgcagaatggacgtctcatcgtttccacagaatgcggccatgtcttctgtagccagtgcctccgtgattccctgaagaatgctaatacttgcccaacttgtaggaaaaagatcaaccacaaacggtaccaccccatttatatatgaagtattcagagccccccaggagagacggatggacagacagacagccaggttctccagtggtatctgcctccattttcctgagatcaaaaagactgtttcgaaaccaacatctgatatgtaaactgctcttttgtttccaaccccttccttttgttatctccagtttgatgctatggcgctggacccagggccctcccaggccatctctgttcctctggggtggtccagttctagagtgggagaaagggagtcaggcgcattgggaatcgtggttccagtctggttgcagaatctgcacatttgccaagaaattttccctgtttggaaagtttgccccagctttcccgggcacaccaccttttgtcccaagtgtctgccggtcgaccaatctgcctgccacacattgaccaagccagacccggttcacccagctcgaggatcccaggttgaagagtggccccttgaggccctggaaagaccaatcactggacttcttcccttgagagtcagaggtcacccgtgattctgcctgcaccttatcattgatctgcagtgatttctgcaaatcaagagaaactctgcagggcactcccctgtttcctaagaacgaaaaagtgcaataaaggccattcgttacctacttttcagcagccca

SEQ ID NO: 133689 - DNA, 4123 bp, Artificial Sequence
  derived and/or modified sequence
tttttctctttcaaaaacactctgccatcttttcaaggtatccgccatctctttcaagcatgtgaggagcttgataacttttgttgggggtcggtgttcagaatgacaagggtcttgcccaggctggagtgcagtagcacagtcataactcactctagcctcaacctcccagggcacaagcgatcctcccatcttagcctcctgagtaactgggactacaggcacgtgccaccacaccctgctaatttttttttttctttggtattaatattttgtagagaaggagtttcaccatgttgcccaggctggtccagaactcctgggctcaagcaatcctgccttggcttcccaaagtgctgggattacaggcatgagccaccatgcctggccctagagcttgataatttcattcattcattcttttttttttttttttttgagacaaagtctcagtctgtcacccaggttggagtgcaatggcgcaatcttggctcactgcaacttctgcctcccgagttcaaggggttctcctgcctcagcctcctgagtggcagggattacagatgcccaccaccatgcctggctaatttttgtatttttagtagaggtggggtttcaccatgttggccaggttggtctcaaactcccaacctcaggtaatctgcccaccttggcctcccagagtgctgggattacaggtgtgagctcagaccttgataatttcagtgaggaaaaaaaaaaaatctcatttacatgtttgtgccaagtgctgtgctagtgggtggggacaccatgataagtatttgataagttatgtttcttgatttaagggagtatagaagaaatggttaagtcaggactaggaggagtgagagaaatggaagcaacctttgaggtaggccctgaagaacgagcagaaattccctaaagcggggtgggagcggcaggaccaacctggccaacttcggaccttctttgaggtccaaagtcaggtactttgaactgacttccaggatacctggagtaaagtacagttctgtttgaagtgtttgtttggaaagatgagtttgttccagtgaggttgctgtattagagaaccacttgagagtttgctgcccacagtgtcatctgtgagaaatattaggtgaacgcaaaaagttgaggccagctgaaccaagccatgtaatatacacaccttccacatagatcagtcacctcagttgacttgtatgtgagccacatttgtgtccatctgatgttacagcattcactctctttgcctccacttctcaataactcacaatctgtaaactgactgaggcccgcttccacagagcaagcttcaggcctttttcaaggacttgaaaatactggaaatctgtccggatccaaattattttgcaagccagatgagtaaccagagggcatgaaaggttgagaacatttgacttccctgcaaaccttggtatagatcacttccttttctgtaggaaaggaaaggcaccaaagagcacaatgagtacaagaaagcgtcgtggtggagcaataaattctagacaagctcagaagcgaactcgggaagcaacctccacccccgagatctccttggaagcagaacccatagaactcgtggaaactgctggagatgaaattgtggacctcacttgtgaatctttagagcctgtggtggttgatctgactcacaatgactctgttgtgattgttgacgaaagaagaagaccaaggaggaatgctaggaggctgccccaggaccatgctgacagctgtgtggtgagcagtgacgatgaggagttgtccagggacagagacgtatatgtgactacccatactcccagaaacgccagggatgagggcgctacaggcctcaggccctcaggtactgtcagttgtcccatctgcatggacggatactcagagatcgtgcagaatggacgtctcatcgtttccacagaatgcggccatgtcttctgtagccagtgcctccgtgattccctgaagaatgctaatacttgcccaacttgtaggaaaaagatcaaccacaaacggtaccaccccatttatatatgaagtattcagagccccccaggagagacggatggacagacagacagccaggttctccagtggtatctgcctccattttcctgagatcaaaaagactgtttcgaaaccaacatctgatatgtaaactgctcttttgtttccaaccccttccttttgttatctccagtttgatgctatggcgctggacccagggccctcccaggccatctctgttcctctggggtggtccagttctagagtgggagaaagggagtcaggcgcattgggaatcgtggttccagtctggttgcagaatctgcacatttgccaagaaattttccctgtttggaaagtttgccccagctttcccgggcacaccaccttttgtcccaagtgtctgccggtcgaccaatctgcctgccacacattgaccaagccagacccggttcacccagctcgaggatcccaggttgaagagtggccccttgaggccctggaaagaccaatcactggacttcttcccttgagagtcagaggtcacccgtgattctgcctgcaccttatcattgatctgcagtgatttctgcaaatcaagagaaactctgcagggcactcccctgtttcctaagaacgaaaaagtgcaataaaggccattcgttacctacttttcagcagcccacaagatgtagcactattagtgtccccctcagaggcttaatgttgcctgtggagcagtgcccatcccagcccgtttctgcccaccagttgttctcaggaaccttacccatgctccagcgtccttcacctggcacaggacatgcaagataaatagggcaggcacgtgtttgggtgtcctctcttttctgataaaatccatcccgtgtttgccacacgccctccagtcctcagttcccactgcctaacgtctgcccccgtgtagatactgagaggtggtggcagtaattgtggccttatcagccgctcagttccaggcttttgcccaggtcactgttgccccatgttcggagaacctggcccacctgtcttggctttctcatccttcccaacccagtgccgtttatttcagaagcttcctggccactgggcttggatgcttcgggcttctgactgctccataggttttgactggtgaaacaggggcccagatgacaacctctccttcgctccacaggtacgcgggagcctcaggttctctcaggggcagcaaagtggcccaagctgcccctgacagcacagggcctggggggtggctaacgagagaggccttacagtgccggcatgcctcctcttccactgtcgtccttcctcagagggcctcacgccaaacaaacggccttttcgtgtgaaacatcttcagggcgggaaaggggccacttctggctttgttagcaataactgaccttcagtttacccttctgaaggagcagggactcagcacagaattcactttagacggggctgaaggagtgtccctcctctatgtgaaaagaaaattgttttattcttcattctgactttttaactgtttggctcacttccagttagtttgaatgaaaataataattttctacttggagttgaagagggcagaatccgcagctctcatcattgtgatgtgtagcatgtctgccctctgactggacatcattgccattaactttcttctgggcatcacggcaatgtcacgatgcccagacttggagcaaggcaaccttggagtcagtccactcataaaatatggtaacacccattttaaaatttaagttttgtccttaaagacaacttcagtggttaattataaaagttgtgttacttcgtcctaaattaaattgatagaaagatttaaaaatgtgttttgtttctactattcagaaactgcgaactagggaaaggttggtatgaagaaatgtctttccttttttcaatgtacatagttcaactctttctttgttacatttaaactatatccatggatatcagtctgctttggactcctctgctagtgttacagatggaaataaaaccattaatttgaacc

SEQ ID NO: 133690 - DNA, 2947 bp, Artificial Sequence
  derived and/or modified sequence
atggggggcggagccgaggcctccgaagcggaagtgggttgctgttgaggcggcggcatctttctcgaggagctctcctgggcggctgaagaaggagcttcttctccggagtgcgccggcggtggcgcctgcggacctaactagctccaggttaggccgagctttgcgggaaagcagcggacttgaaaatactggaaatctgtccggatccaaattattttgcaagccagatgagtaaccagagggcatgaaaggttgagaacatttgacttccctgcaaaccttggtatagatcacttccttttctgtaggaaaggaaaggcaccaaagagcacaatgagtacaagaaagcgtcgtggtggagcaataaattctagacaagctcagaagcgaactcgggaagcaacctccacccccgagatctccttggaagcagaacccatagaactcgtggaaactgctggagatgaaattgtggacctcacttgtgaatctttagagcctgtggtggttgatctgactcacaatgactctgttgtggtaagtgatgaaagaagaagaccaaggaggaatgctaggaggctgccccaggaccatgctgacagctgtgtggtgagcagtgacgatgaggagttgtccagggacagagacgtatatgtgactacccatactcccagaaacgccagggatgagggcgctacaggcctcaggccctcaggtactgtcagttgtcccatctgcatggacggatactcagagatcgtgcagaatggacgtctcatcgtttccacagaatgcggccatgtcttctgtagccagtgcctccgtgattccctgaagaatgctaatacttgcccaacttgtaggaaaaagatcaaccacaaacggtaccaccccatttatatatgaagtattcagagccccccaggagagacggatggacagacagacagccaggttctccagtggtatctgcctccattttcctgagatcaaaaagactgtttcgaaaccaacatctgatatgtaaactgctcttttgtttccaaccccttccttttgttatctccagtttgatgctatggcgctggacccagggccctcccaggccatctctgttcctctggggtggtccagttctagagtgggagaaagggagtcaggcgcattgggaatcgtggttccagtctggttgcagaatctgcacatttgccaagaaattttccctgtttggaaagtttgccccagctttcccgggcacaccaccttttgtcccaagtgtctgccggtcgaccaatctgcctgccacacattgaccaagccagacccggttcacccagctcgaggatcccaggttgaagagtggccccttgaggccctggaaagaccaatcactggacttcttcccttgagagtcagaggtcacccgtgattctgcctgcaccttatcattgatctgcagtgatttctgcaaatcaagagaaactctgcagggcactcccctgtttcctaagaacgaaaaagtgcaataaaggccattcgttacctacttttcagcagcccacaagatgtagcactattagtgtccccctcagaggcttaatgttgcctgtggagcagtgcccatcccagcccgtttctgcccaccagttgttctcaggaaccttacccatgctccagcgtccttcacctggcacaggacatgcaagataaatagggcaggcacgtgtttgggtgtcctctcttttctgataaaatccatcccgtgtttgccacacgccctccagtcctcagttcccactgcctaacgtctgcccccgtgtagatactgagaggtggtggcagtaattgtggccttatcagccgctcagttccaggcttttgcccaggtcactgttgccccatgttcggagaacctggcccacctgtcttggctttctcatccttcccaacccagtgccgtttatttcagaagcttcctggccactgggcttggatgcttcgggcttctgactgctccataggttttgactggtgaaacaggggcccagatgacaacctctccttcgctccacaggtacgcgggagcctcaggttctctcaggggcagcaaagtggcccaagctgcccctgacagcacagggcctggggggtggctaacgagagaggccttacagtgccggcatgcctcctcttccactgtcgtccttcctcagagggcctcacgccaaacaaacggccttttcgtgtgaaacatcttcagggcgggaaaggggccacttctggctttgttagcaataactgaccttcagtttacccttctgaaggagcagggactcagcacagaattcactttagacggggctgaaggagtgtccctcctctatgtgaaaagaaaattgttttattcttcattctgactttttaactgtttggctcacttccagttagtttgaatgaaaataataattttctacttggagttgaagagggcagaatccgcagctctcatcattgtgatgtgtagcatgtctgccctctgactggacatcattgccattaactttcttctgggcatcacggcaatgtcacgatgcccagacttggagcaaggcaaccttggagtcagtccactcataaaatatggtaacacccattttaaaatttaagttttgtccttaaagacaacttcagtggttaattataaaagttgtgttacttcgtcctaaattaaattgatagaaagatttaaaaatgtgttttgtttctactattcagaaactgcgaactagggaaaggttggtatgaagaaatgtctttccttttttcaatgtacatagttcaactctttctttgttacatttaaactatatccatggatatcagtctgctttggactcctctgctagtgttacagatggaaataaaaccattaatttgaaccaaa

SEQ ID NO: 133691 - DNA, 573 bp, Artificial Sequence
  derived and/or modified sequence
atgagcaccagaaagagaagaggcggcgccatcaacagcagacaggcccagaagagaaccagagaggccaccagcacccccgagatcagcctggaggccgagcccatcgagctggtggagaccgccggcgacgagatcgtggacctgacctgcgagagcctggagcccgtggtggtggacctgacccacaacgacagcgtggtgatcgtggacgagagaagaagacccagaagaaacgccagaagactgccccaggaccacgccgacagctgcgtggtgagcagcgacgacgaggagctgagcagagacagagacgtgtacgtgaccacccacacccccagaaacgccagagacgagggcgccaccggcctgagacccagcggcaccgtgagctgccccatctgcatggacggctacagcgagatcgtgcagaacggcagactgatcgtgagcaccgagtgcggccacgtgttctgcagccagtgcctgagagacagcctgaagaacgccaacacctgccccacctgcagaaagaagatcaaccacaagagataccaccccatctacatctag

SEQ ID NO: 133692 - DNA, 573 bp, Artificial Sequence
  derived and/or modified sequence
atgagcaccagaaagagaagaggcggcgccatcaacagcagacaggcccagaagagaaccagagaggccaccagcacccccgagatcagcctggaggccgagcccatcgagctggtggagaccgccggcgacgagatcgtggacctgacctgcgagagcctggagcccgtggtggtggacctgacccacaacgacagcgtggtggtgagcgacgagagaagaagacccagaagaaacgccagaagactgccccaggaccacgccgacagctgcgtggtgagcagcgacgacgaggagctgagcagagacagagacgtgtacgtgaccacccacacccccagaaacgccagagacgagggcgccaccggcctgagacccagcggcaccgtgagctgccccatctgcatggacggctacagcgagatcgtgcagaacggcagactgatcgtgagcaccgagtgcggccacgtgttctgcagccagtgcctgagagacagcctgaagaacgccaacacctgccccacctgcagaaagaagatcaaccacaagagataccaccccatctacatctag

SEQ ID NO: 133693 - protein, 599 aa, Artificial Sequence
  derived and/or modified sequence
MADKLTRIAIVNHDKCKPKKCRQECKKSCPVVRMGKLCIEVTPQSKIAWISETLCIGCGICIKKCPFGALSIVNLPSNLEKETTHRYCANAFKLHRLPIPRPGEVLGLVGTNGIGKSTALKILAGKQKPNLGKYDDPPDWQEILTYFRGSELQNYFTKILEDDLKAIIKPQYVDQIPKAAKGTVGSILDRKDETKTQAIVCQQLDLTHLKERNVEDLSGGELQRFACAVVCIQKADIFMFDEPSSYLDVKQRLKAAITIRSLINPDRYIIVVEHDLSVLDYLSDFICCLYGVPSAYGVVTMPFSVREGINIFLDGYVPTENLRFRDASLVFKVAETANEEEVKKMCMYKYPGMKKKMGEFELAIVAGEFTDSEIMVMLGENGTGKTTFIRMLAGRLKPDEGGEVPVLNVSYKPQKISPKSTGSVRQLLHEKIRDAYTHPQFVTDVMKPLQIENIIDQEVQTLSGGELQRVALALCLGKPADVYLIDEPSAYLDSEQRLMAARVVKRFILHAKKTAFVVEHDFIMATYLADRVIVFDGVPSKNTVANSPQTLLAGMNKFLSQLEITFRRDPNNYRPRINKLNSIKDVEQKKSGNYFFLDD

SEQ ID NO: 133694 - protein, 210 aa, Artificial Sequence
  derived and/or modified sequence
MADKLTRIAIVNHDKCKPKKCRQECKKSCPVVRMGKLCIEVTPQSKIAWISETLCIGCGICIKKCPFGALSIVNLPSNLEKETTHRYCANAFKLHRLPIPRPGEVLGLVGTNGIGKSTALKILAGKQKPNLGKYDDPPDWQEILTYFRGSELQNYFTKILEDDLKAIIKPQYVDQIPKAAKGTVGSILDRKDETKTQAIVCQQLDLTHLK

SEQ ID NO: 133695 - DNA, 1800 bp, Artificial Sequence
  derived and/or modified sequence
atggccgataaactaactagaatcgccattgtaaaccacgataaatgtaagccaaaaaagtgtcggcaagagtgcaaaaagtcttgtcctgtggtgaggatgggcaaactgtgcattgaggtgacccctcagtcaaagattgcatggatctctgaaacactgtgtattggctgtggcatttgcataaagaaatgcccatttggcgccctgtctattgttaatctgccttctaatctggaaaaggaaaccactcaccggtactgcgctaatgcattcaagcttcacaggctgccaattcctcgccccggggaagtactggggctggtaggaactaatggaattggaaagtcaactgccttaaaaattcttgcggggaaacagaaacctaatcttggcaagtatgacgacccacccgattggcaggagatactgacatattttcggggcagtgagctacagaactactttacgaagattctggaggacgatcttaaggcaattataaaaccgcagtacgtggatcaaattccaaaggccgccaagggtacagtgggttcaatcctcgacagaaaggatgagactaagactcaggctattgtatgccaacagttggatctgacccacctgaaggagcggaacgttgaagatcttagcggcggagagcttcagaggtttgcctgtgcggtcgtgtgtatccaaaaggctgacatctttatgtttgatgaaccatcctcctatctggatgttaaacaacgactcaaggcagcaattaccattcgaagcttgattaatcccgatcgctacattatcgtggtagaacacgatttgtcagtcttggattaccttagcgatttcatctgttgcctgtatggcgttcctagcgcttatggagttgtgaccatgccattttctgtcagagaagggattaatatatttctggacgggtatgtgccaacagaaaacctgaggttcagggatgctagtctggtctttaaagtagcagagacggccaacgaagaagaggtgaagaagatgtgtatgtataagtacccaggcatgaaaaaaaaaatgggggaatttgaactggccatcgtggccggggaattcacggatagcgagattatggtcatgttaggcgagaacggcacaggcaagacgacattcattcgaatgttggcaggacgtctgaaacccgacgaaggcggcgaagtgccggtccttaacgtgagctacaaaccgcagaagatatctcctaagagcaccggttccgtccgccagctgcttcatgagaagattcgggacgcctacacccatccacagttcgtgacagatgtgatgaaacctctgcagatagagaatatcatagatcaggaagttcagaccctctcaggaggtgaactgcagagagtggccctggctttatgcctggggaagccagcagatgtgtacttaatagacgagcctagcgcatacctagattccgaacagcgcctcatggctgctcgggtggttaagaggttcattctgcatgccaaaaaaactgcctttgtcgtggagcatgattttatcatggctacctacctagcagacagggttatcgtgttcgacggcgtgccgagcaaaaataccgtggccaactcgccacagacgctcctggccggaatgaacaagttcctatcgcagctggagatcacattccggcgtgaccccaacaattaccgcccacgcatcaataagttgaattcgatcaaagacgtggaacagaagaaatccggaaactactttttcttggatgactag

SEQ ID NO: 133696 - DNA, 633 bp, Artificial Sequence
  derived and/or modified sequence
atggcagataagttaacacggatcgcaatagtgaatcacgacaaatgcaagccaaaaaagtgcagacaggaatgtaaaaaaagttgtcctgtggtaagaatgggtaaattgtgtatcgaggtaacgccccagtcgaagatcgcctggatctcagagaccctgtgcatcggctgtggcatctgtatcaagaagtgccctttcggggctttgagtatcgttaacttgcccagtaatcttgaaaaagagactacccatagatactgtgccaatgcctttaagctgcaccggctgcctatacccaggcccggagaagttctgggcctagtgggcactaatggcatcgggaagtctacagccctgaaaatcctggctggcaaacaaaagccaaacttaggcaagtatgacgatcctccggattggcaggaaatcctgacatatttccggggcagtgagctccagaactatttcaccaaaattttggaagatgacctcaaagcgatcatcaagccacaatacgtggaccaaatacctaaggcggctaagggcaccgtgggctccattctggatcggaaggacgaaactaaaactcaggcgattgtctgtcagcaactggatttaacccaccttaagtag

SEQ ID NO: 133697 - DNA, 1800 bp, Artificial Sequence
  derived and/or modified sequence
atggctgacaagctgacccgcatcgccatcgtgaaccacgacaagtgcaagcccaagaagtgccggcaggagtgcaagaagagctgccctgtggtgaggatgggcaagctgtgcatcgaggtgaccccccagagcaagatcgcctggatcagcgagaccctgtgcatcggctgcggcatctgcatcaagaagtgcccctttggagccctgagcatcgtgaacctgcccagcaacctggagaaggagaccacccaccgctactgtgccaatgccttcaagctgcaccggctgcccatccccaggcctggagaggtgctgggcctggtgggcaccaacggcatcggcaagagcacagccctgaagatcctggccggcaagcagaagcccaacctgggcaagtatgatgatcctccagactggcaggagatcctgacctacttccggggcagcgagctgcagaactacttcaccaagatcctggaggatgacctgaaggccatcatcaagccccagtatgtggaccagatccccaaggccgccaagggcaccgtgggcagcatcctggacaggaaggatgagaccaagacccaggccatcgtgtgccagcagctggacctgacccacctgaaggagagaaatgtggaggacctgagcggcggggagctgcagagatttgcctgtgctgtggtgtgcatccagaaggctgacatcttcatgtttgatgagcccagcagctacctggatgtgaagcagaggctgaaggccgccatcaccatccgcagcctcatcaacccagaccgctacatcatcgtggtggagcatgacctgtctgtgctggactacctgagtgacttcatctgctgcctgtatggagtgcccagcgcctacggcgtggtgaccatgcccttctctgtgcgggagggcatcaacatcttcctggatggctacgtgcccacagagaacctgcgcttcagagatgccagcctggtgttcaaggtggccgagacagccaatgaggaggaggtgaagaagatgtgcatgtacaagtacccaggcatgaagaagaagatgggagaatttgagctggccatcgtggccggggagttcacagacagcgagatcatggtgatgctgggggagaatggaacaggcaagaccaccttcatccgcatgctggccggccgcctgaagccagatgaaggaggagaggtgcctgtgctgaatgtgtcctacaagccccagaagatcagccccaagagcactggatctgtgcggcagctgctgcacgagaagatcagagatgcctacacccacccccagtttgtgacagatgtgatgaagcccctgcagatcgagaacatcatcgaccaggaggtgcagaccctgtctggaggagagctgcagagggtggccctggccctgtgcctgggcaagccagcagatgtgtacctgattgatgagcccagcgcctacctggacagcgagcagaggctgatggccgcccgggtggtgaagcgcttcatcctgcacgccaagaagacagcctttgtggtggagcatgacttcatcatggccacctacctggccgacagagtgattgtgtttgatggagtgcccagcaagaacacagtggccaacagcccccagaccctgctggccggcatgaacaagttcctgagccagctggagatcaccttcagaagagaccccaacaactaccggccccgcatcaacaagctgaacagcatcaaggatgtggagcagaagaagagcggcaactacttcttcctggatgactag

SEQ ID NO: 133698 - DNA, 633 bp, Artificial Sequence
  derived and/or modified sequence
atggctgacaagctgacccgcatcgccatcgtgaaccacgacaagtgcaagcccaagaagtgccggcaggagtgcaagaagagctgccctgtggtgaggatgggcaagctgtgcatcgaggtgaccccccagagcaagatcgcctggatcagcgagaccctgtgcatcggctgcggcatctgcatcaagaagtgcccctttggagccctgagcatcgtgaacctgcccagcaacctggagaaggagaccacccaccgctactgtgccaatgccttcaagctgcaccggctgcccatccccaggcctggagaggtgctgggcctggtgggcaccaacggcatcggcaagagcacagccctgaagatcctggccggcaagcagaagcccaacctgggcaagtatgatgatcctccagactggcaggagatcctgacctacttccggggcagcgagctgcagaactacttcaccaagatcctggaggatgacctgaaggccatcatcaagccccagtatgtggaccagatccccaaggccgccaagggcaccgtgggcagcatcctggacaggaaggatgagaccaagacccaggccatcgtgtgccagcagctggacctgacccacctgaagtag

SEQ ID NO: 133699 - DNA, 1800 bp, Artificial Sequence
  derived and/or modified sequence
atggccgacaagctgacccggatcgccatcgtgaaccacgacaagtgtaaacccaagaagtgccgtcaagaatgcaagaagtcgtgtccagtcgtgagaatgggcaagctttgtatcgaagtgaccccacaatcaaagattgcctggattagcgaaacactatgcattggctgtggtatatgtatcaagaaatgccccttcggggcgctatcaatcgtgaacctgccttctaacctggaaaaagaaacgacacacagatattgcgctaatgcctttaagctccatagactgcctatccctcggccaggtgaggtgctcggactcgtcggtaccaatggcataggcaaatctactgctttgaagattctcgccgggaagcagaagcctaatcttggcaagtacgatgacccgccagactggcaggaaattctgacctattttcgcggttctgagctccagaactattttacgaagatccttgaggatgatctgaaagccataatcaaacctcagtatgtggaccagattcctaaagccgccaaagggaccgttggttcaatccttgataggaaggacgagacaaagacccaggctatcgtgtgccaacagctggatctcactcacctaaaagaacgaaatgtggaggacctctccggaggcgaactgcagaggttcgcatgcgccgtggtatgcatccagaaagccgacatattcatgtttgatgaacccagctcatatctggacgtgaaacagcggctgaaggctgctatcaccattagaagtttgattaatccagataggtatattatcgtcgtggagcacgacttgagcgtgctggattaccttagcgattttatttgctgtttgtacggggtcccatctgcatacggtgtggtaactatgccgttttctgtgagagagggtataaacattttcttagatgggtacgtgccaaccgagaatcttcgtttccgggacgcttccctcgtttttaaagtggcggaaaccgccaatgaggaggaggtcaagaaaatgtgcatgtataagtacccaggcatgaagaaaaaaatgggcgagtttgagctggccattgttgccggagaatttacagactccgagatcatggtgatgttgggcgagaatggcaccggcaaaacaacgtttatacggatgcttgccggccgcctaaagccagatgaaggcggagaagtgccagtcctcaatgtgagctataagccacagaagatcagtcccaaatccactggttccgtgagacagctcctccatgaaaaaattagggatgcatacacacatccccagtttgtgacagatgtgatgaagcctctgcagatcgagaatatcattgatcaggaagtgcagacactgagcggcggtgagctccagcgcgtcgcactggcgctttgtctcggcaagccagcggatgtctacctgatagatgaaccatctgcctatctggactctgagcagcggcttatggcagcccgtgtggtcaagaggttcattttgcatgcaaaaaagactgcattcgtggtggaacacgatttcataatggccacgtatctcgctgaccgcgtgatagttttcgacggtgtaccgagtaaaaatacagtggccaacagtccacagactcttctcgccggcatgaacaaattcctcagccagctagaaattactttccggcgcgacccgaacaactaccggcccaggatcaataagttaaattccatcaaggacgtcgagcagaaaaaatcaggcaattatttttttctggacgattag

SEQ ID NO: 133700 - DNA, 633 bp, Artificial Sequence
  derived and/or modified sequence
atggccgacaagctgacccggatcgccatcgtgaaccacgacaagtgcaagccaaagaaatgtcggcaggagtgcaaaaagtcatgcccagtcgtgaggatgggtaaattgtgcatcgaggttacgcctcaatctaagatcgcctggataagtgaaacactttgcatcgggtgcggaatctgcatcaagaagtgtccttttggggctctgagtatcgtgaatcttccatccaatctggaaaaagaaacaactcatcgctactgcgcaaacgccttcaagctgcaccgactgcccattccaaggccaggcgaggttctaggtctcgtgggaaccaatggtattggaaaatcaaccgctttgaaaatcctggctggtaagcagaaacctaacttggggaagtacgacgaccctcctgactggcaggagattttgacctactttcggggtagcgaactccagaactacttcaccaaaattctggaagatgacctgaaagccatcattaaaccccagtatgtggaccaaatccctaaggcagcaaaggggactgtaggatccatcctggacaggaaagatgaaaccaagacccaggcaatcgtgtgccagcagctggatctgacacatcttaaatag

SEQ ID NO: 133701 - DNA, 1800 bp, Artificial Sequence
  derived and/or modified sequence
atggccgataaactaactcgcattgccattgtaaaccacgacaagtgtaaacctaagaaatgccggcaggagtgcaagaagagttgccctgttgtgcgtatgggaaagttgtgcatcgaagtgactccccagtctaaaatcgcttggatcagcgagaccctctgcatcggatgtgggatttgcattaaaaaatgcccattcggtgctctgtcgattgtgaatctgccttcaaatctggaaaaggagaccacacaccgctattgcgcgaatgcatttaaactgcaccgactccctatcccgaggccgggagaagtgttggggctcgtcggcacgaatggtatcggcaagagcaccgccctcaagattttagcagggaaacagaaaccaaatctgggtaagtacgacgatccacctgactggcaagaaattcttacttactttcgcggttctgaactccagaattattttacgaagattctcgaggacgatttgaaagctatcattaaacctcagtacgtcgaccaaatccctaaggccgctaaggggacagtggggtccatcctggatcgaaaggacgaaaccaagacacaagccattgtatgccaacagctggatctgacgcatctgaaagaacgcaacgttgaggacctgtctggaggagaactacagcggtttgcatgcgcagtcgtgtgtatccagaaggccgacatctttatgtttgatgagccctccagttatttagacgtaaaacagcggctgaaggctgctatcacaattcgttcactgatcaaccctgatcgctacatcatcgtggtggaacacgacctgtcagttctcgattatctgagtgattttatctgttgcctgtatggcgtgccttcggcttacggcgtggtcacaatgcccttttctgtgagggaaggcattaatatattcctggatggctatgtgccaacagagaatctgcgatttcgtgacgccagcttagtgtttaaagtcgctgagacagcaaacgaggaggaggtgaagaagatgtgtatgtacaagtatcccggtatgaagaaaaagatgggcgagtttgagctcgctatcgtcgctggggagtttactgactccgaaatcatggtcatgctgggtgagaatggcactggaaaaacaacattcataagaatgctggcaggccgtctgaagcccgatgaggggggagaggtgccagtgctgaatgtctcctataagccccagaagatctctccgaaatctacgggatctgtccgccagctgttgcacgagaaaatacgagacgcttacacccatcctcagttcgtgacagacgtgatgaagccgttgcaaattgaaaacattattgatcaggaggtgcagacattaagcggtggagaactccaaagagtggcattagccctttgtctgggcaagccggctgacgtttacctcatcgacgagcccagtgcctacctggacagcgaacagaggctcatggcagccagagtagtgaaacgtttcattctgcacgctaagaagacagcatttgtggtagagcacgacttcataatggcaacctatctcgctgacagggttatcgtttttgatggggtcccttctaagaacacagtggcgaactccccacagacactgctcgcaggaatgaataagtttctaagtcagctcgaaatcactttcaggagggaccctaacaactatagacccagaattaacaaactgaactccattaaagatgtcgagcagaaaaagagcggtaattacttctttctggacgattag

SEQ ID NO: 133702 - DNA, 633 bp, Artificial Sequence
  derived and/or modified sequence
atggctgataaactaacccggattgcaatcgtaaaccacgacaaatgcaaaccaaagaagtgcagacaagaatgcaagaaatcctgcccagtggtccggatgggaaaactgtgtatcgaggtaacgcctcagagcaagatcgcctggataagcgaaacgctctgcataggatgtggcatatgcattaaaaaatgcccgtttggggctctgtcaattgtgaatctaccgtcaaatctcgagaaagaaaccactcaccggtattgcgctaacgcttttaaactgcatcgtctgcctatcccacgacctggagaagtcctcggcctggtcgggaccaacggaattggtaaatcaacagccctgaaaatcctcgctggcaagcagaagccaaatctgggcaagtatgatgatccccctgattggcaggagatactgacttatttccgaggcagtgaattgcagaattatttcaccaagatacttgaagatgacctgaaggctattatcaaaccgcaatacgtcgaccaaattcctaaagctgctaaaggcaccgttggatccatcctcgataggaaagatgagaccaagactcaggccattgtgtgccagcagctggacctcacccatctaaagtag

SEQ ID NO: 133703 - DNA, 3921 bp, Artificial Sequence
  derived and/or modified sequence
aagccgtgtcggcaccagactctgttggtcctactgacacctccagcgttagaatgactaaggctccactcctgacccaccggccttgaggaaagcgcaaacgtaaaaaaagattgaaaccggagaggcgaatgcatctgtttacgctaggaccacgctcgacgtcggagaaaagcccacacactcacagtttccagacctggctgcttgccgaaactcagattctcggcacctccagcagctggcttcgccaacggcgttgaacaagggtcgcagctcaatgacgtcatatctccctacctacctccagggttccgcctcacgctctatgtcgcgcgcgcgcactacgtcctatggcttgcgcgtgcggcggctgggcaccgccattttggccggtggccgtgagaacacgctgtgtggctgaaaagtgaaggcaagagctgatttggcctctgtgctcccctccgcaaggggatcgttttctccagaagagctggatattctttcgcccagttatggcagacaagttaacgagaattgctattgtcaaccatgacaaatgtaaacctaagaaatgtcgacaggaatgcaaaaagagttgtcctgtagttcgaatgggaaaattatgcatagaggttacaccccagagcaaaatagcatggatttccgaaactctttgtattggttgtggtatctgtattaagaaatgcccctttggcgccttatcaattgtcaatctaccaagcaacttggaaaaagaaaccacacatcgatattgtgccaatgccttcaaacttcacaggttgcctatccctcgtccaggtgaagttttgggattagttggaactaatggtattggaaagtcaactgctttaaaaattttagcaggaaaacaaaagccaaaccttggaaagtacgatgatcctcctgactggcaggagattttgacttatttccgtggatctgaattacaaaattactttacaaagattctagaagatgacctaaaagccatcatcaaacctcaatatgtagaccagattcctaaggctgcaaaggggacagtgggatctattttggaccgaaaagatgaaacaaagacacaggcaattgtatgtcagcagcttgatttaacccacctaaaagaacgaaatgttgaagatctttcaggaggagagttgcagagatttgcttgtgctgtcgtttgcatacagaaagctgatattttcatgtttgatgagccttctagttacctagatgtcaagcagcgtttaaaggctgctattactatacgatctctaataaatccagatagatatatcattgtggtggaacatgatctaagtgtattagactatctctccgacttcatctgctgtttatatggtgtaccaagcgcctatggagttgtcactatgccttttagtgtaagagaaggcataaacatttttttggatggctatgttccaacagaaaacttgagattcagagatgcatcacttgtttttaaagtggctgagacagcaaatgaagaagaagttaaaaagatgtgtatgtataaatatccaggaatgaagaaaaaaatgggagaatttgagctagcaattgtagctggagagtttacagattctgaaattatggtgatgctgggggaaaatggaacgggtaaaacgacatttatcagaatgcttgctggaagacttaaacctgatgaaggaggagaagtaccagttctaaatgtcagttataagccacagaaaattagtcccaaatcaactggaagtgttcgccagttactacatgaaaagataagagatgcttatactcacccacaatttgtgaccgatgtaatgaagcctctgcaaattgaaaacatcattgatcaagaggtgcagacattatctggtggtgaactacagcgagtagctttagccctttgcttgggcaaacctgctgatgtctatttaattgatgaaccatctgcatatttggattctgagcaaagactgatggcagctcgagttgtcaaacgtttcatactccatgcaaaaaagacagcctttgttgtggaacatgacttcatcatggccacctatctagcggatcgcgtcatcgtttttgatggtgttccatctaagaacacagttgcaaacagtcctcaaacccttttggctggcatgaataaatttttgtctcagcttgaaattacattcagaagagatccaaacaactataggccacgaataaacaaacttaattcaattaaggatgtagaacaaaagaagagtggaaactactttttcttggatgattagactgactctgagaatattgataagccatttattaaaaggagtatttactagaattttttgtcatataaaacttgaatcaggattttatgccccacatactctggaacttgaagtataatatacttaatataacataaaaagccagttgggttctaaattgtagttgaaacacagaaaatgccacttttctgttcctgaagaggctcttttgtgcataatattctaaaatgaagacatttcaagctatacaaattacttccaagttttcatgatgtatgggaagattttcagtaggtgtattatattcacggtaccaaatgctgaccagtgttgctccattttttaaatcttgaaaagggtttctgtacttacctggtttgccaagtatgccagtgtaatgaaactgcccttattttaaaagccagtcaaagattccactgattgacatttgataaataaacatcaggattatgtttattgtttgttttcagtctttgcactatattaccagtatatggtttccgaggaagattatctactgcaaaacaccactgttggaaaaataggtatttttaaattgtttttaatcttttttggtgcttttaaacatgtttagcaaaaaccaattcagttccattccccgcaaaaaacccctaactttactctgaactttttttgtttttgcattccatgaggttctgtattcagtcattctctaggtaatgtcatttttgtacacatatatttatataatcactgattgagatttaggaaaaagcatttctaaagaatatttgcttcccttagaactacagactcgaaatctttaaagatggtgcctaagcatctatgtattttttttaagttccacagatttttctgttgggcagccaaggattataaaccacttccctaaaggcaacattaatgcaaaagtccccagatggcaatacaaagtatcccctggtaccacatatattcatttgtgagtttggatatagagcacattatctaaaccattttgtagttccaaaaacccatctaaatttcttgagttcctgaattttgaacaggattacctggagcctggagccactttaagttgtacttctgactaaactggaattatgagtgaggaagagtgtttactaaataaatgactggggcaagcaaaattgaggaggaaattagaaactgtttgacaaactttaagagctacttgaaataacagaagtcttgattaatatgcaaataatggctagaaagtatggtttaactggaccctattatgccttttaaaaataatttcagtaacccataaatacatgttgtaaaaaattcaaatatacagaatggaataaaaaaatgatctccctttattaccctcccaaaggttaccagcgtttgaatttaataatgtatattctttcatgcttttttctgtgcacttacctaagtgtgaatatgtaaagggtttgttttgtatacaaatgggattatactaaaataagtaatgcctatttttaaggataggttaaatttgtgaatgatcatttcaaatatattgaataaaataagcaaaagctattgttatttactgatcctg

SEQ ID NO: 133704 - DNA, 786 bp, Artificial Sequence
  derived and/or modified sequence
gcttgcgcgtgcggcggctgggcaccgccattttggccggtggccgtgagaacacgctgtgtggctgaaaagtgaaggcaagagctgatttggcctctgtgctcccctccgcaaggggatcgttttctccagagctggatattctttcgcccagttatggcagacaagttaacgagaattgctattgtcaaccatgacaaatgtaaacctaagaaatgtcgacaggaatgcaaaaagagttgtcctgtagttcgaatgggaaaattatgcatagaggttacaccccagagcaaaatagcatggatttccgaaactctttgtattggttgtggtatctgtattaagaaatgcccctttggcgccttatcaattgtcaatctaccaagcaacttggaaaaagaaaccacacatcgatattgtgccaatgccttcaaacttcacaggttgcctatccctcgtccaggtgaagttttgggattagttggaactaatggtattggaaagtcaactgctttaaaaattttagcaggaaaacaaaagccaaaccttggaaagtacgatgatcctcctgactggcaggagattttgacttatttccgtggatctgaattacaaaattactttacaaagattctagaagatgacctaaaagccatcatcaaacctcaatatgtagaccagattcctaaggctgcaaaggggacagtgggatctattttggaccgaaaagatgaaacaaagacacaggcaattgtatgtcagcagcttgatttaacccacctaaaa

SEQ ID NO: 133705 - DNA, 1800 bp, Artificial Sequence
  derived and/or modified sequence
atggccgacaagctgaccagaatcgccatcgtgaaccacgacaagtgcaagcccaagaagtgcagacaggagtgcaagaagagctgccccgtggtgagaatgggcaagctgtgcatcgaggtgaccccccagagcaagatcgcctggatcagcgagaccctgtgcatcggctgcggcatctgcatcaagaagtgccccttcggcgccctgagcatcgtgaacctgcccagcaacctggagaaggagaccacccacagatactgcgccaacgccttcaagctgcacagactgcccatccccagacccggcgaggtgctgggcctggtgggcaccaacggcatcggcaagagcaccgccctgaagatcctggccggcaagcagaagcccaacctgggcaagtacgacgacccccccgactggcaggagatcctgacctacttcagaggcagcgagctgcagaactacttcaccaagatcctggaggacgacctgaaggccatcatcaagccccagtacgtggaccagatccccaaggccgccaagggcaccgtgggcagcatcctggacagaaaggacgagaccaagacccaggccatcgtgtgccagcagctggacctgacccacctgaaggagagaaacgtggaggacctgagcggcggcgagctgcagagattcgcctgcgccgtggtgtgcatccagaaggccgacatcttcatgttcgacgagcccagcagctacctggacgtgaagcagagactgaaggccgccatcaccatcagaagcctgatcaaccccgacagatacatcatcgtggtggagcacgacctgagcgtgctggactacctgagcgacttcatctgctgcctgtacggcgtgcccagcgcctacggcgtggtgaccatgcccttcagcgtgagagagggcatcaacatcttcctggacggctacgtgcccaccgagaacctgagattcagagacgccagcctggtgttcaaggtggccgagaccgccaacgaggaggaggtgaagaagatgtgcatgtacaagtaccccggcatgaagaagaagatgggcgagttcgagctggccatcgtggccggcgagttcaccgacagcgagatcatggtgatgctgggcgagaacggcaccggcaagaccaccttcatcagaatgctggccggcagactgaagcccgacgagggcggcgaggtgcccgtgctgaacgtgagctacaagccccagaagatcagccccaagagcaccggcagcgtgagacagctgctgcacgagaagatcagagacgcctacacccacccccagttcgtgaccgacgtgatgaagcccctgcagatcgagaacatcatcgaccaggaggtgcagaccctgagcggcggcgagctgcagagagtggccctggccctgtgcctgggcaagcccgccgacgtgtacctgatcgacgagcccagcgcctacctggacagcgagcagagactgatggccgccagagtggtgaagagattcatcctgcacgccaagaagaccgccttcgtggtggagcacgacttcatcatggccacctacctggccgacagagtgatcgtgttcgacggcgtgcccagcaagaacaccgtggccaacagcccccagaccctgctggccggcatgaacaagttcctgagccagctggagatcaccttcagaagagaccccaacaactacagacccagaatcaacaagctgaacagcatcaaggacgtggagcagaagaagagcggcaactacttcttcctggacgactag

SEQ ID NO: 133706 - DNA, 633 bp, Artificial Sequence
  derived and/or modified sequence
atggccgacaagctgaccagaatcgccatcgtgaaccacgacaagtgcaagcccaagaagtgcagacaggagtgcaagaagagctgccccgtggtgagaatgggcaagctgtgcatcgaggtgaccccccagagcaagatcgcctggatcagcgagaccctgtgcatcggctgcggcatctgcatcaagaagtgccccttcggcgccctgagcatcgtgaacctgcccagcaacctggagaaggagaccacccacagatactgcgccaacgccttcaagctgcacagactgcccatccccagacccggcgaggtgctgggcctggtgggcaccaacggcatcggcaagagcaccgccctgaagatcctggccggcaagcagaagcccaacctgggcaagtacgacgacccccccgactggcaggagatcctgacctacttcagaggcagcgagctgcagaactacttcaccaagatcctggaggacgacctgaaggccatcatcaagccccagtacgtggaccagatccccaaggccgccaagggcaccgtgggcagcatcctggacagaaaggacgagaccaagacccaggccatcgtgtgccagcagctggacctgacccacctgaagtag

SEQ ID NO: 133707 - protein, 1655 aa, Artificial Sequence
  derived and/or modified sequence
MKWKHVPFLVMISLLSLSPNHLFLAQLIPDPEDVERGNDHGTPIPTSDNDDNSLGYTGSRLRQEDFPPRIVEHPSDLIVSKGEPATLNCKAEGRPTPTIEWYKGGERVETDKDDPRSHRMLLPSGSLFFLRIVHGRKSRPDEGVYVCVARNYLGEAVSHNASLEVAILRDDFRQNPSDVMVAVGEPAVMECQPPRGHPEPTISWKKDGSPLDDKDERITIRGGKLMITYTRKSDAGKYVCVGTNMVGERESEVAELTVLERPSFVKRPSNLAVTVDDSAEFKCEARGDPVPTVRWRKDDGELPKSRYEIRDDHTLKIRKVTAGDMGSYTCVAENMVGKAEASATLTVQEPPHFVVKPRDQVVALGRTVTFQCEATGNPQPAIFWRREGSQNLLFSYQPPQSSSRFSVSQTGDLTITNVQRSDVGYYICQTLNVAGSIITKAYLEVTDVIADRPPPVIRQGPVNQTVAVDGTFVLSCVATGSPVPTILWRKDGVLVSTQDSRIKQLENGVLQIRYAKLGDTGRYTCIASTPSGEATWSAYIEVQGKVNEFGVPVQPPRPTDPNLIPSAPSKPEVTDVSRNTVTLSWQPNLNSGATPTSYIIEAFSHASGSSWQTVAENVKTETSAIKGLKPNAIYLFLVRAANAYGISDPSQISDPVKTQDVLPTSQGVDHKQVQRELGNAVLHLHNPTVLSSSSIEVHWTVDQQSQYIQGYKILYRPSGANHGESDWLVFEVRTPAKNSVVIPDLRKGVNYEIKARPFFNEFQGADSEIKFAKTLEEAPSAPPQGVTVSKNDGNGTAILVSWQPPPEDTQNGMVQEYKVWCLGNETRYHINKTVDGSTFSVVIPFLVPGIRYSVEVAASTGAGSGVKSEPQFIQLDAHGNPVSPEDQVSLAQQISDVVKQPAFIAGIGAACWIILMVFSIWLYRHRKKRNGLTSTYAGIRKVPSFTFTPTVTYQRGGEAVSSGGRPGLLNISEPAAQPWLADTWPNTGNNHNDCSISCCTAGNGNSDSNLTTYSRPADCIANYNNQLDNKQTNLMLPESTVYGDVDLSNKINEMKTFNSPNLKDGRFVNPSGQPTPYATTQLIQSNLSNNMNNGSGDSGEKHWKPLGQQKQEVAPVQYNIVEQNKLNKDYRANDTVPPTIPYNQSYDQNTGGSYNSSDRGSSTSGSQGHKKGARTPKVPKQGGMNWADLLPPPPAHPPPHSNSEEYNISVDESYDQEMPCPVPPARMYLQQDELEEEEDERGPTPPVRGAASSPAAVSYSHQSTATLTPSPQEELQPMLQDCPEETGHMQHQPDRRRQPVSPPPPPRPISPPHTYGYISGPLVSDMDTDAPEEEEDEADMEVAKMQTRRLLLRGLEQTPASSVGDLESSVTGSMINGWGSASEEDNISSGRSSVSSSDGSFFTDADFAQAVAAAAEYAGLKVARRQMQDAAGRRHFHASQCPRPTSPVSTDSNMSAAVMQKTRPAKKLKHQPGHLRRETYTDDLPPPPVPPPAIKSPTAQSKTQLEVRPVVVPKLPSMDARTDRSSDRKGSSYKGREVLDGRQVVDMRTNPGDPREAQEQQNDGKGRGNKAAKRDLPPAKTHLIQEDILPYCRPTFPTSNNPRDPSSSSSMSSRGSGSRQREQANVGRRNIAEMQVLGGYERGEDNNEELEEPSS

SEQ ID NO: 133708 - protein, 1612 aa, Artificial Sequence
  derived and/or modified sequence
MIAEPAHFYLFGLICLCSGSRLRQEDFPPRIVEHPSDLIVSKGEPATLNCKAEGRPTPTIEWYKGGERVETDKDDPRSHRMLLPSGSLFFLRIVHGRKSRPDEGVYVCVARNYLGEAVSHNASLEVAILRDDFRQNPSDVMVAVGEPAVMECQPPRGHPEPTISWKKDGSPLDDKDERITIRGGKLMITYTRKSDAGKYVCVGTNMVGERESEVAELTVLERPSFVKRPSNLAVTVDDSAEFKCEARGDPVPTVRWRKDDGELPKSRYEIRDDHTLKIRKVTAGDMGSYTCVAENMVGKAEASATLTVQEPPHFVVKPRDQVVALGRTVTFQCEATGNPQPAIFWRREGSQNLLFSYQPPQSSSRFSVSQTGDLTITNVQRSDVGYYICQTLNVAGSIITKAYLEVTDVIADRPPPVIRQGPVNQTVAVDGTFVLSCVATGSPVPTILWRKDGVLVSTQDSRIKQLENGVLQIRYAKLGDTGRYTCIASTPSGEATWSAYIEVQEFGVPVQPPRPTDPNLIPSAPSKPEVTDVSRNTVTLSWQPNLNSGATPTSYIIEAFSHASGSSWQTVAENVKTETSAIKGLKPNAIYLFLVRAANAYGISDPSQISDPVKTQDVLPTSQGVDHKQVQRELGNAVLHLHNPTVLSSSSIEVHWTVDQQSQYIQGYKILYRPSGANHGESDWLVFEVRTPAKNSVVIPDLRKGVNYEIKARPFFNEFQGADSEIKFAKTLEEAPSAPPQGVTVSKNDGNGTAILVSWQPPPEDTQNGMVQEYKVWCLGNETRYHINKTVDGSTFSVVIPFLVPGIRYSVEVAASTGAGSGVKSEPQFIQLDAHGNPVSPEDQVSLAQQISDVVKQPAFIAGIGAACWIILMVFSIWLYRHRKKRNGLTSTYAGIRKVPSFTFTPTVTYQRGGEAVSSGGRPGLLNISEPAAQPWLADTWPNTGNNHNDCSISCCTAGNGNSDSNLTTYSRPADCIANYNNQLDNKQTNLMLPESTVYGDVDLSNKINEMKTFNSPNLKDGRFVNPSGQPTPYATTQLIQSNLSNNMNNGSGDSGEKHWKPLGQQKQEVAPVQYNIVEQNKLNKDYRANDTVPPTIPYNQSYDQNTGGSYNSSDRGSSTSGSQGHKKGARTPKVPKQGGMNWADLLPPPPAHPPPHSNSEEYNISVDESYDQEMPCPVPPARMYLQQDELEEEEDERGPTPPVRGAASSPAAVSYSHQSTATLTPSPQEELQPMLQDCPEETGHMQHQPDRRRQPVSPPPPPRPISPPHTYGYISGPLVSDMDTDAPEEEEDEADMEVAKMQTRRLLLRGLEQTPASSVGDLESSVTGSMINGWGSASEEDNISSGRSSVSSSDGSFFTDADFAQAVAAAAEYAGLKVARRQMQDAAGRRHFHASQCPRPTSPVSTDSNMSAAVMQKTRPAKKLKHQPGHLRRETYTDDLPPPPVPPPAIKSPTAQSKTQLEVRPVVVPKLPSMDARTDRSSDRKGSSYKGREVLDGRQVVDMRTNPGDPREAQEQQNDGKGRGNKAAKRDLPPAKTHLIQEDILPYCRPTFPTSNNPRDPSSSSSMSSRGSGSRQREQANVGRRNIAEMQVLGGYERGEDNNEELEETES

SEQ ID NO: 133709 - protein, 1651 aa, Artificial Sequence
  derived and/or modified sequence
MKWKHVPFLVMISLLSLSPNHLFLAQLIPDPEDVERGNDHGTPIPTSDNDDNSLGYTGSRLRQEDFPPRIVEHPSDLIVSKGEPATLNCKAEGRPTPTIEWYKGGERVETDKDDPRSHRMLLPSGSLFFLRIVHGRKSRPDEGVYVCVARNYLGEAVSHNASLEVAILRDDFRQNPSDVMVAVGEPAVMECQPPRGHPEPTISWKKDGSPLDDKDERITIRGGKLMITYTRKSDAGKYVCVGTNMVGERESEVAELTVLERPSFVKRPSNLAVTVDDSAEFKCEARGDPVPTVRWRKDDGELPKSRYEIRDDHTLKIRKVTAGDMGSYTCVAENMVGKAEASATLTVQEPPHFVVKPRDQVVALGRTVTFQCEATGNPQPAIFWRREGSQNLLFSYQPPQSSSRFSVSQTGDLTITNVQRSDVGYYICQTLNVAGSIITKAYLEVTDVIADRPPPVIRQGPVNQTVAVDGTFVLSCVATGSPVPTILWRKDGVLVSTQDSRIKQLENGVLQIRYAKLGDTGRYTCIASTPSGEATWSAYIEVQEFGVPVQPPRPTDPNLIPSAPSKPEVTDVSRNTVTLSWQPNLNSGATPTSYIIEAFSHASGSSWQTVAENVKTETSAIKGLKPNAIYLFLVRAANAYGISDPSQISDPVKTQDVLPTSQGVDHKQVQRELGNAVLHLHNPTVLSSSSIEVHWTVDQQSQYIQGYKILYRPSGANHGESDWLVFEVRTPAKNSVVIPDLRKGVNYEIKARPFFNEFQGADSEIKFAKTLEEAPSAPPQGVTVSKNDGNGTAILVSWQPPPEDTQNGMVQEYKVWCLGNETRYHINKTVDGSTFSVVIPFLVPGIRYSVEVAASTGAGSGVKSEPQFIQLDAHGNPVSPEDQVSLAQQISDVVKQPAFIAGIGAACWIILMVFSIWLYRHRKKRNGLTSTYAGIRKVPSFTFTPTVTYQRGGEAVSSGGRPGLLNISEPAAQPWLADTWPNTGNNHNDCSISCCTAGNGNSDSNLTTYSRPADCIANYNNQLDNKQTNLMLPESTVYGDVDLSNKINEMKTFNSPNLKDGRFVNPSGQPTPYATTQLIQSNLSNNMNNGSGDSGEKHWKPLGQQKQEVAPVQYNIVEQNKLNKDYRANDTVPPTIPYNQSYDQNTGGSYNSSDRGSSTSGSQGHKKGARTPKVPKQGGMNWADLLPPPPAHPPPHSNSEEYNISVDESYDQEMPCPVPPARMYLQQDELEEEEDERGPTPPVRGAASSPAAVSYSHQSTATLTPSPQEELQPMLQDCPEETGHMQHQPDRRRQPVSPPPPPRPISPPHTYGYISGPLVSDMDTDAPEEEEDEADMEVAKMQTRRLLLRGLEQTPASSVGDLESSVTGSMINGWGSASEEDNISSGRSSVSSSDGSFFTDADFAQAVAAAAEYAGLKVARRQMQDAAGRRHFHASQCPRPTSPVSTDSNMSAAVMQKTRPAKKLKHQPGHLRRETYTDDLPPPPVPPPAIKSPTAQSKTQLEVRPVVVPKLPSMDARTDRSSDRKGSSYKGREVLDGRQVVDMRTNPGDPREAQEQQNDGKGRGNKAAKRDLPPAKTHLIQEDILPYCRPTFPTSNNPRDPSSSSSMSSRGSGSRQREQANVGRRNIAEMQVLGGYERGEDNNEELEETES

SEQ ID NO: 133710 - DNA, 4968 bp, Artificial Sequence
  derived and/or modified sequence
atgaagtggaaacacgtgccgttcttggtaatgatctccctgctaagtctgtccccaaatcacctttttctggcacagctaattcctgaccccgaggacgtagaacggggcaatgaccatggtacacctatacccacaagcgataacgatgacaactcacttggttatactggaagtcgcctccgccaggaagactttcctccacgcattgtagaacacccttcagacctgatcgtgagcaagggcgaaccagctacgttaaattgtaaagccgaggggaggcctaccccaacaatcgagtggtataaaggaggtgagagggtcgaaaccgacaaagacgacccacgttcacacaggatgctgctccccagcggatcactgttctttctgaggattgttcacggcagaaaatccagacctgacgagggggtctatgtgtgcgtggcccgaaactatttgggagaggcagtgagtcataatgcttcattagaagtagccatattacgcgatgattttcgccagaacccatccgacgtaatggtggccgtcggagagccagctgtaatggaatgccagccccctagggggcaccccgaacctactatttcctggaagaaggacggatcgcccctcgatgataaggatgaacggattaccatacgcgggggcaagctcatgataacctacacgcgcaagtcagacgcaggcaaatacgtctgcgtggggaccaacatggtgggggagcgagagtcagaagtggctgaactgaccgtgctcgagagaccctctttcgtgaaaaggccaagcaacctggccgtcaccgtggacgattcagctgaattcaaatgtgaggcacgcggagaccccgttccaaccgtccgatggcgaaaggacgacggcgagctgccgaagagcagatacgaaataagggacgaccataccctgaagatcaggaaagtaactgctggagatatgggatcctacacttgcgtagccgaaaacatggttgggaaagcggaagccagtgcaactcttaccgtgcaagagcctccccacttcgttgtgaagccacgagaccaggtggtggcgctcggcagaaccgtgacattccaatgcgaagccacagggaacccacaaccggccatcttctggagacgcgagggctctcagaatctcctattcagctaccaaccaccccaatccagcagtagattcagcgtgtcccagacaggcgacctgacaatcacgaatgtgcagaggtctgacgtgggatactacatctgccaaacattgaacgtggcaggttctatcattaccaaagcgtacctcgaagtgactgacgtgatagcagatcgccccccacccgtcatccgacagggtcctgtcaatcagacagtggccgtcgacggcacattcgtcttgtcctgtgtagccacaggcagcccagtgccgactatcctgtggaggaaggatggagtgttggttagcactcaggactccagaatcaagcagcttgaaaatggagttcttcagatacgctacgctaagttaggcgacactggcaggtacacatgcatcgcctcaacacctagcggtgaggccacctggagcgcttatattgaagtgcagggaaaggtgaacgaatttggtgtccccgtacagccaccgagacccaccgacccaaatctcatcccatccgcgccctccaagcccgaagtgacagacgtgtcccgcaacactgtaactctgtcatggcagcccaacctgaactcgggcgcaacgcccacttcctatattatcgaggccttcagtcacgcatctggctccagttggcagaccgtcgcagaaaacgtgaagacagagacctcagctatcaaggggctaaaaccaaatgcaatctacctgttcttagtgagggctgccaatgcctatgggatatctgatccatcgcagattagcgatccagtcaaaactcaggatgtgctgccaacctctcagggagtcgaccataagcaggtccagagggagttaggtaacgctgtcctccacttgcacaaccctacggtgctttccagctccagtatcgaagttcattggactgtggatcaacagagtcaatatatccagggatacaaaattctttacaggcctagcggcgctaatcatggagagtcggattggctggtctttgaggtcaggacccccgcgaaaaacagtgtggtcatccctgacttgcgcaagggagtcaactacgagatcaaagctaggcccttttttaacgaatttcaaggcgccgactcagagattaagttcgcaaaaactcttgaggaagccccctccgctccaccccagggagtgacagtaagtaagaatgatggcaacgggacagccatcctggtgtcttggcagccacctccagaggatactcaaaacggcatggtgcaggaatacaaagtctggtgcctcggcaacgaaactcgttaccacattaataaaacggtggatgggagtacattttcagttgtgatccccttccttgtccccggtattaggtattcggtggaagtggcggcatcaactggggcggggagcggcgtgaagagtgagccccaatttatccagctggatgcacatggcaaccccgtgtcgcctgaagaccaggtgtcactggcccagcagatctctgatgtggtgaaacagccagccttcattgcaggcatcggtgccgcttgctggatcatcttgatggtctttagtatctggctatacaggcaccggaagaagaggaatgggctgaccagcacttacgcagggatcaggaaggtgccatccttcacttttacacctactgtcacgtaccagagaggaggggaggcggtgtcatctggggggagaccgggccttctgaacattagtgaacccgccgcccagccctggctcgcagatacttggcccaacactgggaacaaccataacgattgttctatatcctgttgtactgccgggaacggaaattctgacagcaatctgacgacctattcaagacccgctgattgtatcgctaattacaataatcagctggataataagcagacgaatttgatgctgccggaatcgactgtttatggggacgttgacttgagtaacaaaatcaatgaaatgaaaactttcaactctccaaaccttaaagatggtagattcgttaacccctctggccagcccactccatatgccacgacccagctgatccaatcgaacttatccaataacatgaacaatggatctggagacagtggggagaaacactggaaaccgcttggccagcaaaagcaggaggtcgccccagtccaatataacatcgtagagcagaacaaactcaacaaagattacagggcaaatgacactgtgcctcctacaatcccctacaaccagtcctatgatcagaacactggtgggtcatacaactcctccgatcgcggatcatctacctcaggttcacagggacataaaaagggcgcacgaaccccaaaagtaccaaagcagggaggaatgaattgggccgatttgctgccccctccccccgctcaccctccgccacactcaaactcggaagaatacaacatttcagtggacgaaagttacgatcaagagatgccatgtcccgtgccacctgctcgaatgtatttgcagcaggacgagctcgaggaggaagaagacgaaagaggacccactcctcccgtgcgcggtgccgcctccagcccggcagctgtgtcttatagtcaccaatctaccgcgacactaactccctctcctcaggaggagctccagccaatgctccaggactgcccagaggagactggacatatgcaacatcagcccgacaggcggagacagcctgtctctcctccgccgccgccacgacccatcagtccaccccatacttatggctatatctctggccccctagtgtcggatatggatacagatgctccggaggaagaagaggatgaggctgatatggaagtggctaaaatgcaaacacggcggctgctgctcagagggttagagcaaactcccgcaagctctgtgggcgacctcgagagctctgtgaccgggtctatgatcaatgggtgggggagtgcgagtgaggaggataacatctctagcgggcggagttccgtgtcttcatccgatggctcattttttacagatgctgatttcgcacaggctgttgcagcagctgcggagtatgccggcttgaaggtcgcacgaagacaaatgcaagatgcagcagggcggagacacttccatgctagccagtgccccaggcccacctctcccgtctcaactgactccaacatgtctgccgccgtaatgcaaaagacacgacctgcgaaaaaactgaagcaccagccgggccacctccgcagggagacttacactgatgaccttccacctccacccgtgcctcctcctgccatcaagtcacctaccgcgcagagcaaaacgcaactggaagttcgaccggtggttgtgcctaaattacctagcatggatgctcggactgacagaagctccgaccgaaagggcagctcctacaaaggtagggaagtgcttgacggtagacaagtggttgatatgagaacaaaccccggggatcctcgagaggcccaggagcaacagaatgatgggaaaggcagggggaataaggcagctaagcgcgatctccccccagcaaaaacgcacctaattcaggaagacatactcccgtattgcagaccaactttccccacatcaaacaacccccgtgacccaagcagctctagctcaatgagcagtcgaggatctggtagcaggcaacgtgaacaagctaacgtcggccgaagaaatatagctgaaatgcaagtgctcggaggttacgaacggggagaggacaataatgaggaattggaagagccctcctcgtag

SEQ ID NO: 133711 - DNA, 4956 bp, Artificial Sequence
  derived and/or modified sequence
atgaaatggaagcacgtgcctttcctcgtgatgatctcacttctgagcctatcacccaaccatctcttcttagcacagctaattcccgatcctgaggacgttgagagaggaaatgatcacggtacgcctataccaacctcagataatgacgacaattccctgggctacaccggaagtcgcttgagacaggaagacttccctccaaggatcgttgagcacccgtccgatttgattgtttccaagggagagcccgcgaccttgaattgcaaggctgagggccgcccgacccccactatcgagtggtacaagggtggggagcgcgtggagacagataaggacgatccaaggagccataggatgctgttgccatccgggtccctgtttttcctgagaatcgtccatgggcgcaagtcacggccggatgagggcgtatacgtgtgtgttgcacggaattatctgggcgaggcagtgagtcacaatgcctctcttgaagttgccatcttgagggacgatttccgacagaatccttctgatgttatggtggccgttggagagccggcagtcatggagtgccagccacctcgcggacaccccgagccaacgatctcatggaagaaagacggcagcccgctggatgataaggatgagagaattacaattcgggggggcaagttgatgatcacatacacccggaagtcagacgccggaaagtacgtttgcgttgggaccaatatggtcggggagcgagagagtgaggtcgctgagttgacagtgcttgagaggccgagtttcgtcaagcgcccaagcaatctggcagttaccgttgatgactctgctgaatttaagtgcgaggcacggggggacccggtcccaactgtgcggtggcgaaaagatgatggagaacttcccaagtctcgctacgaaatccgagatgatcatacccttaaaatccggaaagtgaccgctggtgacatggggtcatacacgtgtgtggctgagaatatggtgggtaaagcagaagcaagtgcaaccctgactgtacaagaaccaccacacttcgtagttaagccgcgcgaccaggttgtggccctgggacggaccgtgacttttcaatgcgaggccaccggaaaccctcagcccgccattttctggcgcagggagggcagccagaatcttctgttctcttaccagcctcctcaatcttcttcaaggttctcggtgtcccagacgggggatctaaccatcaccaacgtgcagagaagtgacgttggctactatatatgccaaacactcaacgttgccggcagcataataactaaggcctacctggaggtgaccgacgttattgcggaccgcccgcctcccgtgattcgacagggcccagtgaaccaaactgtagccgtggacgggaccttcgtgctaagctgtgtcgcaaccgggagtccggtaccaaccattctgtggcgaaaagacggtgtgctcgtgtctacccaggactccagaatcaagcagctcgaaaatggcgtactgcagatccggtacgcaaaattaggcgatacaggtaggtatacatgcatagcgagcacaccaagtggggaggccacatggtccgcctatattgaagtccaagagttcggggtccctgtgcagccgccaaggcccaccgaccccaatttaataccttccgccccaagtaagccggaggttacggacgtgtctagaaataccgtgactctatcctggcagcccaacttgaattcaggcgctacgccaacttcgtacatcatcgaagcattctcacatgcttctggaagctcttggcaaaccgttgcagaaaacgtgaaaactgagactagtgccatcaaaggcctgaagccaaacgctatctacttgttcttagtccgagccgcaaacgcctacggtatttccgacccctcccagatttccgaccctgtgaaaactcaggatgttctaccaacatcccagggggtagatcataaacaagtgcagagggaattaggaaacgctgtgcttcacctgcataaccccacagtgctgagtagctcttccatcgaggtgcactggactgttgaccagcagagccagtacattcagggctacaaaattctgtatagaccttcgggcgccaaccacggggagagtgactggctggtatttgaggtgcgcactcccgctaagaacagcgtcgtgataccagacctgcggaaaggagttaattatgagattaaggcgcggccttttttcaacgaatttcagggcgccgatagtgagatcaagtttgccaaaacattagaggaggcaccctcggccccacctcagggcgtcaccgtgtccaagaacgatggcaatggcacagctatccttgtgagctggcagcctccgcccgaggacacacagaacggaatggtgcaggagtacaaagtgtggtgtcttgggaacgaaaccagataccacattaataagacagtagacgggtccacattttccgtggtgatccctttccttgtgccaggcattagatacagtgtggaggttgctgcatcaactggagccggctccggtgtgaaatccgaaccgcagttcatccagctggatgcgcatgggaaccctgtgtcccctgaggaccaggtctccttggcccagcagatttcagatgtcgtgaagcaaccagcctttattgccgggattggtgccgcttgctggatcattcttatggtatttagtatctggctgtatcgtcatcggaagaaacgcaacggtctgacatctacgtatgccggtattaggaaagttccctcgttcactttcactccaaccgtgacctaccagagaggaggagaggcggttagcagtggtgggcgtcccggccttctgaacattagtgagcccgccgctcagccatggctcgctgatacatggccaaatacaggaaacaatcacaatgactgttcaatctcttgttgcacagctgggaatggtaacagtgattcaaacctgacaacctattctaggccggccgattgcatagcaaattacaataatcagttggataataaacaaactaacctgatgctccctgaatcaacggtctacggcgatgtggatttgtctaacaagattaatgaaatgaagacgtttaacagcccaaatctgaaggacgggaggtttgtgaatccgtcagggcagccaacaccctatgcaactacacaacttatacagagtaatttgtcgaacaatatgaataatgggagcggcgactccggcgagaaacactggaaaccactgggccagcagaagcaggaagtcgcccctgtccagtacaacattgttgagcagaataagctgaacaaagattatagagcgaatgacactgtccctcccactataccatataaccagagctatgatcaaaataccggcggctcatacaactcttcagatagagggtcatctacgtctggatcccagggacataagaagggtgctcgcacgcctaaagttcccaagcagggtgggatgaattgggccgatcttttaccaccacctccggcacacccccccccccattccaacagcgaggaatataacatcagcgttgatgagtcttacgaccaggagatgccatgccctgtgcccccagctaggatgtacttacaacaagacgaattggaagaggaggaggatgagcggggaccaacccccccagtgcgtggggccgcttcctccccggccgccgtcagctattcccatcaaagcaccgccaccctgactccaagtccgcaggaagagctgcagccaatgctgcaggactgcccagaagaaacagggcatatgcaacaccagccggaccgcagacgccagcccgtgtccccacctccccctccacggccaatctctcctccccacacctacggatacatatccggacctctcgtttccgatatggacaccgacgcccccgaagaagaagaggatgaggctgatatggaagtggccaagatgcagacacgacggttgttactgcgtggtctcgagcaaacccccgcttctagcgtgggagacttagagtcctccgtgacaggctccatgatcaatgggtggggctctgcttccgaggaggataatattagttccggccgctcttccgtgtcaagctccgatggaagcttttttactgatgcggattttgcgcaggctgttgctgccgcggccgaatatgccggccttaaggtggccagaaggcagatgcaggatgctgcaggcagacggcatttccatgccagccagtgtccacggcctacaagccccgtttccactgattcgaacatgtctgctgccgttatgcagaaaaccaggcccgccaagaagttgaagcatcagcctgggcacctgaggagggaaacctacaccgacgatctgcctcccccacccgtaccaccgcccgccataaaaagccccaccgcccaaagcaaaacacaacttgaggtgaggcccgttgtagtgcctaagctgccctctatggatgccaggacggaccgctcttcagaccgcaaaggttcctcttataagggtcgggaagttctcgatgggcggcaggtggtggacatgcggactaaccccggtgaccctagagaagcccaagagcagcaaaatgacgggaagggccgcggaaataaggccgccaaacgggatctccctccagctaaaactcatctgattcaggaggacattctcccctattgccgccctacatttcctaccagcaacaatccgcgcgacccctcaagcagcagcagtatgagttcgcggggcagtggaagccggcagagagagcaggctaatgttgggcgtcgtaatattgctgaaatgcaggtcctaggcggctatgagcggggcgaggacaataacgaggaactggaagaaaccgagtcctag

SEQ ID NO: 133712 - DNA, 4968 bp, Artificial Sequence
  derived and/or modified sequence
atgaagtggaagcacgtgcccttcctggtgatgatcagcctgctgagcctgagccccaaccacctgttcctggcccagctgatcccagaccctgaagatgtggagagaggaaatgaccacggcacccccatccccaccagtgacaatgatgacaacagcctgggctacacaggcagccggctgcggcaggaggacttccccccacgcatcgtggagcaccccagcgacctgattgtgtccaaaggagagcccgccaccctgaactgcaaggccgagggccggcccacccccaccatcgagtggtacaagggcggggagcgggtggagacagacaaggatgaccccaggagccacaggatgctgctgcccagcggcagcctcttcttcctgcgcatcgtgcacggcaggaagagcaggccagatgaaggagtgtatgtgtgtgtggccaggaactacctgggggaggccgtgagccacaatgccagcctggaggtggccatcctgagagatgacttccggcagaaccccagtgatgtgatggtggccgtgggggagcctgctgtgatggagtgccagcccccccggggccaccctgagcccaccatctcctggaagaaggatggcagccccctggatgacaaggatgagcgcatcaccatccggggcggcaagctgatgatcacctacaccaggaagagtgatgctgggaagtatgtgtgtgtgggcaccaacatggtgggggagcgggagagcgaggtggccgagctgactgtgctggagcggcccagctttgtgaagaggcccagcaacctggccgtgacagtggatgacagcgctgagttcaagtgtgaggcccggggggaccctgtgcccaccgtgcgctggaggaaggatgatggagagctgcccaagagccgctatgagatcagagatgaccacaccctgaagatcaggaaggtgacagctggggacatgggcagctacacctgtgtggccgagaacatggtgggcaaggccgaggccagcgccaccctgactgtgcaggagcccccccactttgtggtgaagccccgggaccaggtggtggccctgggccgcacagtgaccttccagtgtgaggccactggaaacccccagcctgccatcttctggaggcgggagggcagccagaacctgctcttctcctaccagcccccccagagcagcagccgcttctctgtgtcccagacaggagacctgaccatcaccaacgtgcagaggagtgatgtgggctactacatctgccagaccctgaatgtggccggcagcatcatcaccaaggcctacctggaggtgacagatgtgattgctgacaggcctcctcctgtgatccggcagggccctgtgaaccagacagtggccgtggatggcacctttgtgctgagctgtgtggccaccggcagccctgtgcccaccatcctgtggaggaaggatggagtgctggtgtccacccaggacagccgcatcaagcagctggagaatggagtgctgcagatccgctatgccaagctgggggacaccggccgctacacctgcatcgccagcaccccatctggagaggccacctggagcgcctacatcgaggtgcagggcaaggtgaatgaatttggagtgcctgtgcagcccccccggcccacagaccccaacctgatccccagcgcccccagcaagccagaggtgacagatgtgtccaggaacacagtgaccctgtcctggcagcccaacctgaacagcggggccacccccaccagctacatcatcgaggccttcagccacgccagcggcagctcctggcagacagtggccgagaatgtgaagacagagaccagcgccatcaagggcctgaagcccaatgccatctacctgttcctggtgcgggccgccaatgcctacggcatcagtgaccccagccagatcagtgaccctgtgaagacccaggatgtgctgcccaccagccagggcgtggaccacaagcaggtgcagcgggagctgggcaatgctgtgctgcacctgcacaaccccaccgtgctgagcagcagcagcattgaggtgcactggacagtggaccagcagagccagtacatccagggctacaagatcctgtaccggcccagcggggccaaccacggggagagtgactggctggtgtttgaggtgaggaccccagccaagaacagcgtggtgatcccagacctgaggaaaggagtgaactatgagatcaaggcccggcccttcttcaatgagttccagggcgctgacagcgagatcaagtttgccaagaccctggaggaggcccccagcgccccaccccagggcgtgacagtgtccaagaatgatggaaatggaacagccatcctggtgtcctggcagcccccacctgaggacacccagaatggcatggtgcaggagtacaaggtgtggtgcctgggcaatgagacccgctaccacatcaacaagacagtggatggcagcaccttctctgtggtgatccccttcctggtgcccggcatccgctacagcgtggaggtggccgccagcactggagctggcagcggcgtgaagtctgagccccagttcatccagctggatgcccacggcaaccctgtgtccccagaggaccaggtgtccctggcccagcagatcagtgatgtggtgaagcagcctgccttcatcgccggcattggagctgcctgctggatcatcctgatggtgttcagcatctggctgtaccgccacaggaagaagagaaatggcctgaccagcacctacgccggcatcaggaaggtgcccagcttcaccttcacccccaccgtgacctaccagaggggcggggaggccgtgagcagcggcggccggcccggcctgctgaacatcagcgagcctgctgcccagccctggctggccgacacctggcccaacacaggcaacaaccacaatgactgcagcatcagctgctgcacagctggaaatggaaacagcgacagcaacctgaccacctacagcaggcctgctgactgcatcgccaactacaacaaccagctggacaacaagcagaccaacctgatgctgcctgagagcacagtgtatggagatgtggacctgagcaacaagatcaatgagatgaagaccttcaacagccccaacctgaaggatggccgctttgtgaaccccagcggccagcccaccccctatgccaccacccagctgatccagagcaacctgagcaacaacatgaacaatggaagtggggacagcggggagaagcactggaagcccctgggccagcagaagcaggaggtggcccctgtgcagtacaacatcgtggagcagaacaagctgaacaaggactaccgggccaatgacacagtgccccccaccatcccctacaaccagagctatgaccagaacacaggaggcagctacaacagcagtgaccggggcagcagcaccagcggcagccagggccacaagaagggggcccggacccccaaggtgcccaagcagggcggcatgaactgggccgacctgctgcccccacctccagcccaccccccaccccacagcaacagcgaggagtacaacatctctgtggatgagagctatgaccaggagatgccctgccctgtgcccccagccaggatgtacctgcagcaggatgagctggaggaggaggaggatgagcggggccccaccccacctgtgcggggggccgccagcagccctgctgctgtgtcctacagccaccagagcacagccaccctgacccccagcccccaggaggagctgcagcccatgctgcaggactgcccagaggagaccggccacatgcagcaccagcctgacagaagacggcagcctgtgagccccccacctccaccccggcccatcagccccccccacacctacggctacatcagcggccccctggtgtctgacatggacacagatgcccctgaggaggaggaggatgaggccgacatggaggtggccaagatgcagacccggcggctgctgctgcggggcctggagcagaccccagccagctctgtgggggacctggagagctctgtgacaggctccatgatcaatggctggggcagcgccagcgaggaggacaacatcagcagcggccgcagctctgtgagcagcagtgatggcagcttcttcacagatgctgactttgcccaggccgtggccgctgctgctgaatatgccggcctgaaggtggcccggcggcagatgcaggatgctgctggaagaagacacttccacgccagccagtgcccccggcccaccagccctgtgtccacagacagcaacatgtctgctgctgtgatgcagaagaccaggcctgccaagaagctgaagcaccagcccggccacctgcggcgggagacctacacagatgacctgcccccacctcctgtgcccccaccagccatcaagagccccacagcccagagcaagacccagctggaggtgcggcctgtggtggtgcccaagctgcccagcatggatgccaggacagacaggagcagtgacaggaagggcagcagctacaagggccgggaggtgctggatggccggcaggtggtggacatgaggaccaaccctggggacccccgggaggcccaggagcagcagaatgatggcaagggccggggcaacaaggccgccaagagggacctgcccccagccaagacccacctgatccaggaggacatcctgccctactgccggcccaccttccccaccagcaacaacccccgggaccccagcagcagcagctccatgagcagccggggcagcggcagccggcagcgggagcaggccaacgtgggcagaagaaatattgctgagatgcaggtgctgggcggctatgaaagaggagaggacaacaatgaggagctggaggagcccagcagctag

SEQ ID NO: 133713 - DNA, 4956 bp, Artificial Sequence
  derived and/or modified sequence
atgaagtggaagcacgtgcccttcctggtgatgatcagcctgctgagcctgagccccaaccacctgttcctggcccagctgatcccagaccctgaagatgtggagagaggaaatgaccacggcacccccatccccaccagtgacaatgatgacaacagcctgggctacacaggcagccggctgcggcaggaggacttccccccacgcatcgtggagcaccccagcgacctgattgtgtccaaaggagagcccgccaccctgaactgcaaggccgagggccggcccacccccaccatcgagtggtacaagggcggggagcgggtggagacagacaaggatgaccccaggagccacaggatgctgctgcccagcggcagcctcttcttcctgcgcatcgtgcacggcaggaagagcaggccagatgaaggagtgtatgtgtgtgtggccaggaactacctgggggaggccgtgagccacaatgccagcctggaggtggccatcctgagagatgacttccggcagaaccccagtgatgtgatggtggccgtgggggagcctgctgtgatggagtgccagcccccccggggccaccctgagcccaccatctcctggaagaaggatggcagccccctggatgacaaggatgagcgcatcaccatccggggcggcaagctgatgatcacctacaccaggaagagtgatgctgggaagtatgtgtgtgtgggcaccaacatggtgggggagcgggagagcgaggtggccgagctgactgtgctggagcggcccagctttgtgaagaggcccagcaacctggccgtgacagtggatgacagcgctgagttcaagtgtgaggcccggggggaccctgtgcccaccgtgcgctggaggaaggatgatggagagctgcccaagagccgctatgagatcagagatgaccacaccctgaagatcaggaaggtgacagctggggacatgggcagctacacctgtgtggccgagaacatggtgggcaaggccgaggccagcgccaccctgactgtgcaggagcccccccactttgtggtgaagccccgggaccaggtggtggccctgggccgcacagtgaccttccagtgtgaggccactggaaacccccagcctgccatcttctggaggcgggagggcagccagaacctgctcttctcctaccagcccccccagagcagcagccgcttctctgtgtcccagacaggagacctgaccatcaccaacgtgcagaggagtgatgtgggctactacatctgccagaccctgaatgtggccggcagcatcatcaccaaggcctacctggaggtgacagatgtgattgctgacaggcctcctcctgtgatccggcagggccctgtgaaccagacagtggccgtggatggcacctttgtgctgagctgtgtggccaccggcagccctgtgcccaccatcctgtggaggaaggatggagtgctggtgtccacccaggacagccgcatcaagcagctggagaatggagtgctgcagatccgctatgccaagctgggggacaccggccgctacacctgcatcgccagcaccccatctggagaggccacctggagcgcctacatcgaggtgcaggagtttggagtgcctgtgcagcccccccggcccacagaccccaacctgatccccagcgcccccagcaagccagaggtgacagatgtgtccaggaacacagtgaccctgtcctggcagcccaacctgaacagcggggccacccccaccagctacatcatcgaggccttcagccacgccagcggcagctcctggcagacagtggccgagaatgtgaagacagagaccagcgccatcaagggcctgaagcccaatgccatctacctgttcctggtgcgggccgccaatgcctacggcatcagtgaccccagccagatcagtgaccctgtgaagacccaggatgtgctgcccaccagccagggcgtggaccacaagcaggtgcagcgggagctgggcaatgctgtgctgcacctgcacaaccccaccgtgctgagcagcagcagcattgaggtgcactggacagtggaccagcagagccagtacatccagggctacaagatcctgtaccggcccagcggggccaaccacggggagagtgactggctggtgtttgaggtgaggaccccagccaagaacagcgtggtgatcccagacctgaggaaaggagtgaactatgagatcaaggcccggcccttcttcaatgagttccagggcgctgacagcgagatcaagtttgccaagaccctggaggaggcccccagcgccccaccccagggcgtgacagtgtccaagaatgatggaaatggaacagccatcctggtgtcctggcagcccccacctgaggacacccagaatggcatggtgcaggagtacaaggtgtggtgcctgggcaatgagacccgctaccacatcaacaagacagtggatggcagcaccttctctgtggtgatccccttcctggtgcccggcatccgctacagcgtggaggtggccgccagcactggagctggcagcggcgtgaagtctgagccccagttcatccagctggatgcccacggcaaccctgtgtccccagaggaccaggtgtccctggcccagcagatcagtgatgtggtgaagcagcctgccttcatcgccggcattggagctgcctgctggatcatcctgatggtgttcagcatctggctgtaccgccacaggaagaagagaaatggcctgaccagcacctacgccggcatcaggaaggtgcccagcttcaccttcacccccaccgtgacctaccagaggggcggggaggccgtgagcagcggcggccggcccggcctgctgaacatcagcgagcctgctgcccagccctggctggccgacacctggcccaacacaggcaacaaccacaatgactgcagcatcagctgctgcacagctggaaatggaaacagcgacagcaacctgaccacctacagcaggcctgctgactgcatcgccaactacaacaaccagctggacaacaagcagaccaacctgatgctgcctgagagcacagtgtatggagatgtggacctgagcaacaagatcaatgagatgaagaccttcaacagccccaacctgaaggatggccgctttgtgaaccccagcggccagcccaccccctatgccaccacccagctgatccagagcaacctgagcaacaacatgaacaatggaagtggggacagcggggagaagcactggaagcccctgggccagcagaagcaggaggtggcccctgtgcagtacaacatcgtggagcagaacaagctgaacaaggactaccgggccaatgacacagtgccccccaccatcccctacaaccagagctatgaccagaacacaggaggcagctacaacagcagtgaccggggcagcagcaccagcggcagccagggccacaagaagggggcccggacccccaaggtgcccaagcagggcggcatgaactgggccgacctgctgcccccacctccagcccaccccccaccccacagcaacagcgaggagtacaacatctctgtggatgagagctatgaccaggagatgccctgccctgtgcccccagccaggatgtacctgcagcaggatgagctggaggaggaggaggatgagcggggccccaccccacctgtgcggggggccgccagcagccctgctgctgtgtcctacagccaccagagcacagccaccctgacccccagcccccaggaggagctgcagcccatgctgcaggactgcccagaggagaccggccacatgcagcaccagcctgacagaagacggcagcctgtgagccccccacctccaccccggcccatcagccccccccacacctacggctacatcagcggccccctggtgtctgacatggacacagatgcccctgaggaggaggaggatgaggccgacatggaggtggccaagatgcagacccggcggctgctgctgcggggcctggagcagaccccagccagctctgtgggggacctggagagctctgtgacaggctccatgatcaatggctggggcagcgccagcgaggaggacaacatcagcagcggccgcagctctgtgagcagcagtgatggcagcttcttcacagatgctgactttgcccaggccgtggccgctgctgctgaatatgccggcctgaaggtggcccggcggcagatgcaggatgctgctggaagaagacacttccacgccagccagtgcccccggcccaccagccctgtgtccacagacagcaacatgtctgctgctgtgatgcagaagaccaggcctgccaagaagctgaagcaccagcccggccacctgcggcgggagacctacacagatgacctgcccccacctcctgtgcccccaccagccatcaagagccccacagcccagagcaagacccagctggaggtgcggcctgtggtggtgcccaagctgcccagcatggatgccaggacagacaggagcagtgacaggaagggcagcagctacaagggccgggaggtgctggatggccggcaggtggtggacatgaggaccaaccctggggacccccgggaggcccaggagcagcagaatgatggcaagggccggggcaacaaggccgccaagagggacctgcccccagccaagacccacctgatccaggaggacatcctgccctactgccggcccaccttccccaccagcaacaacccccgggaccccagcagcagcagctccatgagcagccggggcagcggcagccggcagcgggagcaggccaacgtgggcagaagaaatattgctgagatgcaggtgctgggcggctatgaaagaggagaggacaacaatgaggagctggaggagacagagagctag

SEQ ID NO: 133714 - DNA, 4968 bp, Artificial Sequence
  derived and/or modified sequence
atgaagtggaagcacgtgcccttcctggtgatgatcagcctgctgagcctttctcctaatcacctcttcttggctcagctgatcccagaccccgaggatgtggagagaggaaacgatcatggaacaccaattccaactagtgataacgacgataatagcctgggctataccggatctagactgcgtcaagaggactttcctcctcgcatagtggaacatccttctgaccttatcgtgagcaagggagagcctgctactctcaactgcaaagcagaaggcaggcctacacccactatcgagtggtacaagggtggagaaagggttgagactgataaagatgatccacgctctcaccgcatgttgctgcctagtggcagcctgttcttcctccgcatcgtgcacggtcgcaaatctaggccagacgaaggcgtgtacgtgtgtgtggctcgaaattatctgggggaggccgtctcgcataacgctagcctggaggtagctatccttcgtgacgattttcggcagaacccttcagatgtcatggtggccgttggcgagcccgccgtaatggagtgccagcccccacgtggacatcctgagcccactatttcctggaaaaaagacggtagcccgcttgacgacaaggacgagagaattaccatccggggcggaaagctgatgatcacatacacaaggaagtcggacgctgggaagtatgtatgtgtcggaacaaacatggtgggagaaagggagtccgaggtcgctgaattgaccgtgttggagcggcccagcttcgtgaagagaccaagcaacctggcagtaaccgtggatgactctgcagagtttaagtgcgaggctaggggggacccagtccccactgtccgttggagaaaggatgacggcgagctcccaaagagtaggtacgagattcgagacgaccatactctaaagattagaaaggtaactgcaggcgatatgggtagctatacttgtgtcgctgaaaacatggtgggcaaagcagaagcttccgcaacactgacagtgcaggaaccgccccacttcgttgtgaagccaagagatcaagtggtcgctctgggtcgtacggttacattccagtgtgaggccacgggaaatcctcagccggccatcttctggagacgggaaggcagccagaacctgctcttctcttatcagccccctcagagctcctcacggtttagtgtctcacagacaggagacctcacaatcacaaatgttcagcgctccgacgtaggctactacatttgtcagacactgaatgtcgcaggttcaatcataacgaaggcttatctggaggtaactgatgtgatcgccgataggcccccacctgtcatccgtcagggacctgttaatcaaaccgtggccgtcgacggtacattcgtgcttagttgtgtcgccactggcagccctgtgccgaccattttgtggaggaaggacggggttctggtttcaacgcaggactctcgtatcaagcagttagagaatggagtcctgcagatcagatatgccaagttgggggacacagggaggtacacctgcattgccagcacaccctccggcgaggccacatggagcgcctacatcgaagtgcagggtaaggttaatgagttcggcgttcccgtgcaacctcctcgacctactgatcccaatttgatcccctcggctcccagcaagcctgaagtgaccgacgtgagtcggaataccgttacgctgtcctggcagcccaatttgaatagtggtgcaacccctacatcttatataattgaggctttctcccacgcatccggatccagttggcagacggtggccgaaaacgtgaagaccgaaacaagcgcaattaagggactcaaacccaacgccatctacctgtttctcgtgcgcgccgccaacgcttatgggatctccgatccaagtcagatttcagatcccgtcaaaacacaggatgtgctacccacaagtcaaggcgtggaccataagcaagtccagcgcgagttgggaaatgccgtcctccacttacacaaccccaccgtgctgtcatccagttccatcgaagtgcactggaccgtggaccagcagagccagtacatccagggatacaaaattctctatagaccaagtggagctaatcacggagaaagcgattggcttgtcttcgaagtcaggaccccagccaagaattccgtggttataccagatctgagaaagggagtgaattatgagatcaaagccagacctttttttaatgagtttcaaggtgccgattccgaaattaagttcgccaagaccctggaggaagccccgagcgcccctccacagggcgtgaccgtgtccaagaacgacggaaatggaactgctatactcgtgtcatggcagccccccccagaagacacgcagaacggaatggtccaggagtataaagtctggtgtttaggcaatgagactcgataccacatcaataagacagtcgatggatctacattttctgtggtgataccttttttggtccctggtattagatactctgtggaggtggccgcctcaacgggagctgggagcggggtgaaaagtgaaccgcagtttatccagctggatgcccacggcaatcccgtaagccctgaagaccaggtgagccttgcccagcagattagcgatgtcgtcaaacagccagcattcattgctggcataggggcggcttgttggatcatcctgatggtgttctcaatctggctctaccgccacagaaagaagagaaacggtcttaccagtacatatgccgggataagaaaagtcccatcttttacatttacaccaaccgttacctaccagcgcggaggcgaggccgtgtcaagcggaggccgcccagggttgctgaatatctctgaaccagcggcccagccatggctggccgacacctggcctaatacaggtaataaccacaacgattgtagtatttcttgctgcacggccggtaacggaaacagcgactccaacttaacaacatactcacgacctgccgactgcatagctaactataataatcagctggataataagcaaaccaacctgatgctccccgagagcaccgtgtatggcgacgtggacttatccaacaagatcaacgagatgaaaaccttcaacagccctaacctgaaggacgggaggttcgtgaacccctcagggcaacctaccccctacgctaccacccagctgatccagtctaacctgagcaacaacatgaataacggaagtggtgacagcggtgagaaacactggaagccactgggacagcagaagcaggaggtagcaccagttcaatataacatcgtcgagcagaataagcttaacaaagactatagagctaatgacacagtgccgccaactattccctataaccaatcttatgaccagaataccgggggaagctataactcctccgacagagggagcagcactagcggcagtcaaggccacaagaaaggcgctcgcacacccaaagtccctaagcagggagggatgaattgggctgatctcctgcctcccccgcccgcacatcctcctccgcatagcaacagtgaggagtacaacatcagcgttgatgaaagttacgaccaagagatgccatgccctgtcccccccgctcgaatgtacttacagcaggacgaacttgaagaggaagaagatgagcgcggacccaccccacccgtacggggtgctgcttcttcacctgcagctgtgagctattctcaccagagtacagccactctgacgccatcaccccaagaggaactccaacccatgttacaagattgtcccgaggagacgggacatatgcagcaccagccggataggagaagacagccagtcagtcccccaccacctccaaggcctatctctcctcctcacacatacggatatatctctggtcccttggtgtccgacatggataccgatgcacccgaggaagaagaagacgaagctgatatggaagttgcaaaaatgcagactcggcggctcctactcagaggtctagagcagacgcccgcttctagcgtgggcgatctggagagcagtgttactggaagtatgattaatgggtgggggagcgcctctgaagaagataatatttcttctggcagatctagcgtcagcagcagtgacggctcatttttcaccgatgccgacttcgcccaggctgtggcggctgccgctgagtatgctgggctgaaagtggcaagacggcaaatgcaggatgcagcaggcagaagacattttcacgcctctcagtgtcccagaccaacatctcctgtgtccaccgattccaacatgtctgccgccgttatgcagaagacccgtcctgctaagaagcttaaacatcagcctggccatttacggagagagacctacaccgacgatctccccccacctcctgtccctcccccggccattaaatctcctaccgcccaatccaaaacacagcttgaagtgaggccggtcgtcgtgcccaaactgccgtcgatggatgcacgcactgacagaagtagcgatcggaaggggtcttcttataaaggacgagaagttcttgatggcaggcaggtggtcgatatgaggaccaacccaggcgaccctagagaggcccaggaacaacagaacgacggcaagggcagggggaacaaagctgcaaagcgggatctgcccccagcaaaaacacatctgatccaggaggacattctaccttactgccgcccaaccttcccaacgtccaataatccccgagatccttctagcagcagcagcatgagttccaggggcagcggttctagacagcgagaacaggccaacgtcgggcgccggaacatagctgaaatgcaggtgctgggagggtacgagcgcggagaggacaataacgaggagctcgaggaaccttccagctag

SEQ ID NO: 133715 - DNA, 4956 bp, Artificial Sequence
  derived and/or modified sequence
atgaagtggaagcacgtgcccttcctggtgatgatcagcctgctgtctctctccccgaaccatctatttctggcacagctcatccccgacccagaagacgttgagaggggaaacgaccacggaacaccaattccaacgtctgacaatgacgataattccctcggctacacaggctcaagactgagacaggaagactttccaccgcgcatcgtggagcacccaagcgacttaatcgtgagcaaaggcgaacctgctaccctcaattgtaaggcggagggccggccaactcctaccatcgagtggtacaaaggaggagaaagggtggaaactgacaaagacgatcctcggtcacaccgaatgttgttgccatccgggtcgctgttcttcctccgtatcgtgcacggacggaaatctcgcccggatgaaggtgtgtacgtttgcgtggctaggaattacctgggcgaggccgtgtcccataatgcttccttagaagtggctatcctcagagacgattttcgacaaaatccttctgatgtaatggtggcggtcggcgagccagctgtgatggaatgtcagcccccacgcggccatcccgaacccacaatctcctggaagaaggatgggagtccgcttgatgacaaggacgagcggattaccatcaggggcggtaaactgatgataacttacaccaggaagtctgacgctggcaagtacgtgtgtgtcggaacaaacatggtgggcgagcgtgaaagcgaggttgcagaactcactgtcctagaaagacccagttttgtcaaacggccatccaatctggcggtcactgtggatgattcagctgaatttaagtgtgaagcgcggggcgatccagttccaacggtgaggtggcgcaaggatgatggtgagttgccaaaaagcagatacgaaatccgcgacgaccatactctgaaaatccgtaaagtgactgcgggggacatgggctcatatacctgtgttgcagagaatatggtggggaaggcagaggccagtgccaccctgaccgtgcaggagcctccacactttgtcgtaaaaccccgcgaccaagtggtcgctctgggccgaacagtgacttttcaatgcgaggccactggcaacccccagccggcaatcttctggcgcagggagggatcccagaacctccttttcagctatcaaccaccacagagttcatctagattttctgtcagtcagaccggggacttgactattacgaatgtccaacgcagcgacgtggggtattacatttgccagacgctgaacgtggccggctctatcatcaccaaagcatacttggaggtgactgacgtcattgctgatcggcctcccccggtcatcaggcaaggacccgtgaatcagactgttgcagtggatggaacctttgtcctgtcatgcgtggcaaccggaagccctgtgcccaccatcctctggagaaaggacggagtcttagtcagtactcaagacagccgcatcaagcagttagaaaatggagtgctgcagataaggtacgccaaactgggcgacaccggtagatatacctgtatcgcgtctaccccgtcgggtgaagccacttggagcgcctacattgaggtacaggagttcggtgtgcctgtgcagccgcctcggcccaccgatccaaacctgatcccaagtgccccttcgaagcctgaggtgaccgacgtctcccgcaacactgttactctgagctggcagcctaatttgaattccggcgccactcccaccagctatatcatagaggccttttctcacgcaagcggctcatcatggcagacggtagcagaaaatgtgaagacggagaccagcgcaatcaaggggctgaagccgaacgctatatatttatttttagtgagagccgcgaacgcctacggtatcagcgatccatcccaaatcagcgacccagtcaagacccaggacgtcctcccaaccagccaaggggtcgaccacaaacaggtacagcgggagttggggaacgctgtgttacacctgcacaatcccacagtcctgtcttcctcttctatcgaggtccactggactgttgatcagcagtcacagtatatccagggatacaaaattctgtatcggccatccggtgcgaatcacggtgagtccgactggctcgtttttgaggttcggactcccgccaagaattccgtcgttatacccgacttacgaaagggcgtcaattatgagatcaaggccagaccatttttcaacgaattccagggtgccgattccgagatcaaattcgcaaagactttggaagaggctcccagcgcccctccccagggagtgacagttagcaaaaatgatggaaatggtactgccattcttgtgtcatggcaaccacctccagaagacactcagaatggcatggtgcaggagtataaggtatggtgcttgggaaacgaaacgaggtaccatatcaacaagaccgtggacgggtccacattctcagtcgttattccctttttggttcctggaatacggtactctgtggaggtggcagctagtactggtgctggctctggcgttaagagcgagccacaatttattcaactcgatgcccatgggaatcccgtatcgccagaggatcaagtttccctcgcccaacagatttccgacgttgtcaagcagccggcattcatagcaggcatcggggctgcctgttggatcattttgatggtgtttagtatctggttgtaccgacacagaaaaaagagaaacggactgacatcaacatatgcggggataaggaaagtgccgtcattcacgtttacccctaccgtgacataccagagaggcggggaagccgtgtctagtggtggtaggccaggcctgcttaacatcagcgaacctgcggcccaaccgtggctggccgatacctggccaaacaccgggaataaccataatgactgctctatctcctgctgtaccgccggtaacggcaacagtgacagtaacttgacaacatattcgcgtcctgctgactgtattgccaattataacaatcagcttgacaataagcagacgaacttgatgttacccgagagcaccgtatacggggacgtcgatctgtcaaacaagatcaacgagatgaaaacttttaactctcccaacctgaaggacggtaggttcgtgaatccttccggtcagcccactccatatgcaaccacacagctcattcagtcgaacctgtctaacaatatgaataatggaagcggagacagcggagagaagcattggaagccattaggacaacaaaaacaggaagtggccccagtgcaatataatatcgttgaacagaacaagctcaataaagactatcgcgctaatgatacagtcccacccactatcccctataatcagtcctatgaccagaacaccgggggttcctacaactcttccgaccgcgggtcttctacgagtgggtcccagggccacaagaaaggtgccaggacaccgaaggtgcccaagcagggcgggatgaattgggccgatctcctgccaccaccacccgctcatccgccaccccactcaaattctgaggagtataatatctccgtggacgaaagctatgaccaggagatgccctgcccggtgcctccggcacggatgtacctgcaacaggacgaacttgaagaggaagaggatgaaagaggcccgacacctccagtacgcggcgctgcatccagccctgctgcggtgtcttatagccaccagtcgaccgctacccttacaccctccccccaggaagagctccaaccaatgcttcaagactgccccgaggagacggggcacatgcagcaccagcccgataggcgcaggcaaccagtatctcctcccccgccacctcgacctatttcacccccacacacctacggatacatctccgggccccttgtgagcgatatggacacagatgccccggaggaggaggaggatgaagccgacatggaggtcgccaaaatgcaaacgagacggttactcttgagggggctcgagcaaactcccgcatccagcgtgggggatctggagtcctctgtgacggggtcgatgattaatgggtgggggagcgcaagcgaggaagataacatcagctctggtcgctcatcggtttcttcaagtgacgggtccttctttaccgacgcggattttgcccaagccgtcgcagccgctgcggagtacgctgggctcaaggtcgctcgccggcagatgcaagatgctgctgggcgccgccactttcacgcttcccaatgccctaggcctacctcaccagtgtcaactgatagcaacatgtcagccgcagtaatgcaaaagacaagaccagccaagaaactcaaacaccaaccgggtcaccttagacgggagacttataccgatgacctacccccacctccggtcccaccacccgcaatcaaatccccaactgctcagagtaaaacccagctcgaagtacggcccgtagtggtcccaaaactgccaagcatggacgctcgtaccgatcgatcttccgacaggaaggggtctagctataaaggtagagaggtgctggacggaagacaagtcgtggacatgcggaccaatcccggggatcctcgggaggcacaagagcagcagaatgatggtaaaggacgcggcaataaagctgcaaagcgcgacctgcccccggccaagacacacctcatccaggaggatatcttaccatactgtagacccacgtttccaacttctaataatccacgggatccgtcctctagttcaagcatgagctcgagggggagtggtagcaggcagagggaacaggctaacgtcgggcgccgtaatattgctgagatgcaggtcctgggcgggtatgagcgcggggaagataacaatgaggagctggaagaaaccgagagttag

SEQ ID NO: 133716 - DNA, 4968 bp, Artificial Sequence
  derived and/or modified sequence
atgaaatggaagcatgttccgttcctggtcatgatcagcctgcttagcctgtcacctaatcatctttttctggctcaattaatccctgatcctgaggacgtggaaagaggcaatgaccacgggacacccatcccaaccagcgataatgatgacaatagccttggctatactggaagtcggctgaggcaggaggatttccctccccgtatcgtcgagcacccatcagacttaatcgtgtccaagggtgagcccgcaaccctgaactgtaaagcagagggccgtccaacacctacaatagagtggtacaaagggggtgaacgtgtggagacggataaggatgacccacggtcacatagaatgctgctgccctctggctccctgtttttcttgcggattgtacacggtcgcaagtcaagaccagacgagggcgtgtatgtctgcgtggctcgcaactacctcggtgaagctgtgagccacaacgcttcgctggaagtcgcaatcctccgcgatgattttaggcaaaatccctccgacgttatggtggctgtaggtgaacctgccgtaatggagtgccagcctccacgcggtcatccagagcccactatctcttggaagaaggacggctctcccttggacgacaaggatgagcgcataacgatccgaggtggaaagctgatgatcacctacacaagaaaatcagacgccggtaaatatgtttgcgtgggcactaatatggttggtgagagggagagcgaagtagcggagctcacagttctggaaaggccctcattcgttaaacgccctagcaatctcgccgttactgtggacgattcagccgaattcaaatgtgaggccaggggtgaccctgtgcccaccgtgaggtggcgtaaggatgatggagagctgccaaagtccaggtacgagattcgcgatgatcatacattaaagatacgtaaggtaacagcgggagatatggggtcgtatacctgtgttgccgaaaatatggtgggcaaagccgaggcgtctgcgacactcactgtgcaggaaccaccacacttcgtagtgaagcctcgagatcaagtggtagctctgggtagaaccgtcactttccagtgtgaggccaccggtaatccccagcctgcaattttttggagacgcgagggtagtcagaaccttctgttctcgtatcagccgcctcagtctagctctaggttttccgtatcccagacgggagatctcactatcaccaacgttcagcgttctgacgttgggtattatatttgccagactctgaatgtggcaggttctatcattactaaggcctacctggaagttactgacgtgattgcagatcggcctcctccagttattcggcaaggacctgttaaccagaccgtggctgtcgatggcacctttgtgctttcgtgcgtcgctacaggctcccctgttccgactatcctgtggcgcaaagatggagttctagtatcaacccaggacagccggataaagcaactggaaaatggcgtcctgcagattagatacgccaagctgggggacaccgggaggtatacctgtatcgctagcaccccatctggtgaggctacatggagtgcatatatcgaggtgcagggcaaagtcaacgaattcggtgttccagtgcagcccccacgtcccactgacccaaatctgatcccttccgctcccagtaagccggaagtcaccgatgtgtcccggaacacagtgaccctttcttggcagcctaacctgaatagtggggctaccccaacttcttatattatcgaggcattctcccatgcatctggcagctcctggcagaccgtggccgagaatgtcaagaccgagactagcgcaatcaaggggctgaagccaaatgccatatacctgttcctagtgcgagccgctaatgcctacggcatcagcgatccctctcagatcagtgaccctgtgaagacccaggatgttctgcccacatcccagggggtggatcacaagcaggtgcagagagagctcgggaacgccgtgctgcatctacataatccaacagtgctgtcctcttcttccatcgaggtgcattggaccgtggaccagcagagccaatacattcagggatataagattctttatcggccatctggggcaaatcacggcgaatctgactggttagtgttcgaggtgagaacacccgctaagaactccgtggtgattcccgatctgagaaaaggcgtgaactacgagattaaagccagaccattttttaatgagtttcaaggagcagactcagagattaaattcgcaaaaaccttggaagaggccccatctgcccctccacagggagtcaccgtgtcaaaaaatgatggtaacggtaccgccatcttggtatcctggcaaccgcctcccgaagatactcaaaatggcatggtacaggagtacaaagtgtggtgcctcggaaacgagactcggtatcatattaataagaccgtggatggctccacttttagcgtggttattccttttctcgtgccaggcattcggtactcggttgaagttgcagccagcaccggggctggatcaggcgtgaagtcagaacctcagttcattcaactggacgctcacggcaaccctgttagtcctgaggatcaggtgtctcttgcccagcagatttctgatgttgtcaaacagccagcgttcatcgctggaatcggtgctgcttgttggatcatccttatggtgttttcaatctggctttatcgtcacaggaagaagcgaaatgggctgacgagcacatacgccggaattagaaaagtgccctccttcaccttcacaccgaccgtgacctatcagcgtggtggggaggcagtgagctcggggggacggccaggcctcttgaacattagcgaaccagctgcacaaccatggctagccgatacctggcctaacacaggtaataaccataacgactgctcaatatcatgctgcacagccggtaatggcaacagcgattccaatctgacgacctactcccgccctgcagactgcatcgcaaactataataaccagctggacaataaacaaactaacctgatgctgcctgaatcaaccgtgtacggagatgttgatctcagcaacaagattaatgaaatgaaaacgtttaatagtcctaacctgaaggacgggaggtttgtcaacccgagtggccagcctacgccctacgctaccacccagctgattcagagcaatctgagcaataacatgaataatggatccggtgatagtggcgaaaagcattggaaaccactgggccagcagaaacaggaggtggctccagttcagtataacatcgtcgagcagaataaactgaacaaggactacagggcaaatgacactgttccgcctaccatcccttataaccagtcctacgaccagaatacaggcggttcgtataatagctctgaccggggaagtagcacttccggttcccagggacacaaaaaaggcgcacgcactcctaaggtgccaaaacagggaggtatgaattgggctgatctcctgcccccaccacctgctcatccaccgccacattctaactctgaggagtacaatatttctgtggatgagtcatacgatcaggaaatgccttgtcctgtacctcctgcgagaatgtacttgcagcaggatgagctggaagaggaggaggacgagcgcggtccgacacccccagtacgcggagctgcttcatcgccagcggcagtgtcctattcccatcagagcaccgccactctgacccctagcccacaggaggaacttcaacccatgctgcaggattgccctgaagagaccggccacatgcagcatcaaccagacaggcggcgacagccggttagcccacccccaccccctaggccgattagcccccctcacacatacgggtatatctcaggccctctggtatctgacatggataccgacgctcctgaagaagaggaagacgaggccgatatggaagtcgcaaagatgcaaacccgtaggttactgctgcgcggactggaacagaccccagcgtctagcgtcggggatttggagtcttctgtgacaggctcaatgataaacggctgggggtccgcatcagaagaagacaacatctcctcgggacggtcctcagttagttccagcgatgggagtttcttcaccgatgcagattttgcgcaggctgtcgctgcagccgcagagtacgccggactcaaggtggctagacggcagatgcaggacgcggctgggcgtaggcactttcacgcaagccagtgcccaaggcccacttcccccgtcagcaccgattctaatatgagtgccgcagtgatgcagaagacaaggcccgcaaagaagctgaagcaccagcccggtcatttacgtcgtgaaacctacaccgacgacctgccacctccccctgttcctccccctgcgatcaagagccctaccgcccagtccaagactcaattggaagttcgaccagtggtagtgcccaagctgccctctatggacgccaggacagatcggagctccgacagaaaggggtcaagttataaaggtagagaggttttagatggacggcaggtggtcgatatgaggacaaaccccggtgatcccagagaggcccaggaacagcagaatgatgggaaaggcagaggtaataaggccgcaaaacgtgacctcccacccgctaagacacatctgattcaagaggatatactgccctactgtcgtcccacttttcctaccagtaacaatcctagggacccttcctcatcctcctccatgagcagccgcggtagcggctcccgtcagagagaacaggcgaacgtgggccgtaggaacattgcagagatgcaggtcttaggtggatatgagagaggagaggataacaacgaagagctggaggagccctcctcctag

SEQ ID NO: 133717 - DNA, 4955 bp, Artificial Sequence
  derived and/or modified sequence
atgaagtggaaacacgtccctttcttggtgatgatctccctgctgtcactgtctcctaatcatctcttcctggcccagctgatccccgatccagaagatgtggaaagaggaaatgatcacgggacacccataccgacctccgataacgacgacaattcattgggatataccggatccaggttacggcaggaagacttccctccccgtatcgttgaacatccttcagacctgatagtttctaaaggggagcccgctacattaaactgtaaagccgaaggaagaccgacacccacaatcgagtggtacaagggcggagagcgcgtcgaaactgacaaggacgaccctagatcccaccgcatgctactgcccagtggctccctttttttccttcggatcgtgcacggtcgaaaaagcaggcctgacgagggggtctatgtgtgtgtggcaagaaactacctgggcgaggccgtcagccacaatgcaagtcttgaagtggccatcttgcgagacgactttagacagaacccctctgatgtgatggtcgcagttggggaacctgccgtaatggagtgccagcctccacggggtcatcccgaacccacaataagctggaaaaaggatggtagtccgctagacgataaagacgagaggataacaattagaggaggaaagctgatgatcacttatacgcgtaagagcgacgccggaaagtacgtgtgcgtcggaaccaacatggtgggagagcgcgaatccgaggtagcagagctcactgtactcgagcggccttcttttgttaagagaccatcaaacctggctgtgactgtggatgattcagctgaattcaaatgcgaggctcggggagatccggtgccaaccgtaagatggagaaaagacgatggggaattgcccaagtcccggtatgagatcagagatgatcacacccttaagattagaaaggtcaccgccggagatatgggttcttacacatgcgtcgcagagaatatggtgggcaaagcagaggctagcgccacactgaccgttcaagagccacctcatttcgtcgtcaaaccaagagaccaagtcgtagccctagggcgaaccgtcaccttccagtgtgaagctacagggaacccacagccagctatattttggcgtagagagggctcgcaaaacctactgtttagctaccagccaccacagtcctcctctcgattttccgtatcccaaacaggggatctaacaatcaccaatgtacagaggtctgatgtgggatactatatctgccagacccttaatgtggccggatctataatcaccaaagcatatctcgaagtaactgatgtaattgccgaccggccacctcccgtcattaggcaaggccctgtcaaccagactgtagccgtggatgggacctttgtgctttcttgcgtggccaccggctcgcccgtgccaaccattctgtggagaaaagacggcgtgctggtttctacccaggactcaagaattaaacagctggagaatggtgtactccaaattagatacgcgaaactcggcgacactggtcggtacacctgcatcgcttctaccccctctggcgaagccacctggtctgcatatatagaggttcaggagtttggcgtacctgtgcagccgccacgccctaccgatccaaatctgattccctcagcaccatcgaaacctgaggttacagatgtcagccggaatactgtcacgctgtcttggcaaccaaatctgaactcgggggcaacgcctacgtcatatattattgaggcatttagccatgccagtggttcttcctggcaaacagtggcagagaacgtcaagaccgagacaagtgcgattaagggactgaagcccaacgccatttacttattcctcgtccgcgcagcaaacgcatatgggatttccgacccaagtcagattagtgatcctgtgaaaactcaagacgttctcccaacctctcagggggtggatcacaaacaagttcaacgtgaactcggaaatgcagttctccacctacataatcctaccgtgctgtccagttcatccatagaagtccactggactgtggaccaacagtcacagtatatccagggttataaaatactgtatcgaccatcaggcgcaaaccacggtgagtctgactggttggtgttcgaggtgcgaaccccagcaaagaattccgtagttataccagacctcaggaagggcgtgaactacgagataaaagccagaccatttttcaatgagttccagggcgcagatagtgaaataaaatttgctaaaacattggaagaggctccaagtgcacccccacagggcgttactgtgagtaagaacgatggtaacggcacggctattttggtgtcttggcagcccccacccgaagacacgcagaatgggatggtccaggagtataaggtatggtgcctcggtaacgagacaagatatcatataaacaagactgtcgatggcagtacattctctgtggtgatcccgttcctcgtgccaggtattcgatactctgtcgaagtggccgctagtacaggggctgggtcaggagtaaaatctgaacctcagtttatccagcttgacgcacatggaaacccagtgtcccccgaagatcaggtgagcctcgctcaacagatttctgacgtggtaaagcagcctgcgttcatcgctggcataggcgcagcatgttggatcatactgatggtcttcagcatctggctctaccgacatagaaaaaagcgtaacggcttaacttctacctatgctggaatccggaaggttccctcatttacattcacacccaccgtcacctatcagagggggggagaagctgttagctctggcggtcgcccaggcttacttaatataagtgagcctgctgcacaaccttggctggccgatacctggcctaacaccggaaacaatcacaatgactgcagcatctcctgttgtacagccggaaacggcaactctgactcaaatttgaccacgtattccaggcccgcagactgcatagctaactataataatcagctcgacaacaaacaaaccaatctgatgctcccagaatccaccgtgtatggggatgtagatctgtcaaataaaattaatgaaatgaagactttcaattcacccaatctcaaagacggtcgcttcgtgaatcctagtggccaacccaccccctatgcaacaacgcagctgattcagagtaacctctcgaacaacatgaacaacgggtccggggattctggtgaaaaacactggaaacccctggggcagcagaaacaggaggttgccccagtgcagtataatatagtggagcagaataaactaaataaggattaccgcgcaaatgatactgtgccacctactattccatataatcaatcctacgatcagaacacaggcggatcttataatagttctgacaggggctcttctacgtccggatcccagggtcacaaaaaaggcgcaaggactcctaaggtcccaaaacagggtggaatgaactgggcggacctgctccctcctccaccggctcacccccctcctcacagcaattccgaggagtataatatctcagtggatgagtcatacgaccaagaaatgccgtgccccgtgcctcccgcaaggatgtacctgcagcaggacgagctggaagaagaggaggatgagcgcggacctacaccacccgtacgcggagccgcatctagtcccgcagcagtgtcctatagccatcagtctaccgcaaccctgaccccctcacctcaggaggaattgcaacctatgcttcaagactgccccgaggagactggtcacatgcagcaccaaccagaccggagacgtcagcctgtctctcccccacctcctcccaggccgatctctcctccccacacctacgggtatatctctgggcctctggtcagcgacatggataccgacgctcccgaggaggaggaggatgaagctgacatggaggtggctaaaatgcagactcggcgactcctgttgcggggactggaacagacccctgctagtagcgtgggagacctcgagagtagtgtaacaggttccatgatcaacgggtggggttctgccagcgaggaagataatatctcctctggaagaagctccgtttcctcctccgacgggtcctttttcactgacgcagatttcgcccaagcagtggctgcggcagctgagtatgccggtctgaaggtagcaaggagacagatgcaggacgccgcagggaggcgccatttccacgcatcccagtgccccaggcctacaagtcccgtgtctacggactccaacatgtctgccgctgtgatgcaaaaaacacgccctgcgaagaagcttaagcatcagcccggacacctgcggagagaaacctatacggacgacctgcctccccctcctgtgcccccacccgctattaagagtccgaccgctcagtccaaaacacagttagaggtgaggcccgtcgtggtgcccaaactgccttccatggacgcaaggacggacagatcctccgatcgcaagggtagctcatacaaaggaagggaagtactggatgggaggcaggttgtcgacatgaggacaaacccaggcgatccacgcgaggcccaggagcagcagaacgacggaaagggtcggggtaacaaggcagcaaaacgggacctgcctccagcaaaaacccatctcatccaggaggatatcctgccatactgtaggcccactttcccgacttccaacaacccacgtgatccttcgtcaagcagctccatgtctagtagagggagcggctctagacagcgcgaacaggcaaacgtagggaggaggaatatcgccgaaatgcaggttctggggggttacgagcggggagaagacaataacgaggagctagaagagacagagtccta

SEQ ID NO: 133718 - DNA, 4965 bp, Artificial Sequence
  derived and/or modified sequence
atgaaatggaaacatgttccttttttggtcatgatatcactcctcagcttatccccaaatcacctgtttctggcccagcttattccagaccctgaagatgtagagagggggaacgaccacgggacgccaatccccacctctgataacgatgacaattcgctgggctatacaggctcccgtcttcgtcaggaagattttccacctcgcattgttgaacacccttcagacctgattgtctcaaaaggagaacctgcaactttgaactgcaaagctgaaggccgccccacacccactattgaatggtacaaagggggagagagagtggagacagacaaagatgaccctcgctcacaccgaatgttgctgccgagtggatctttatttttcttacgtatagtacatggacggaaaagtagacctgatgaaggagtctatgtctgtgtagcaaggaattaccttggagaggctgtgagccacaatgcatcgctggaagtagccatacttcgggatgacttcagacaaaacccttcggatgtcatggttgcagtaggagagcctgcagtaatggaatgccaacctccacgaggccatcctgagcccaccatttcatggaagaaagatggctctccactggatgataaagatgaaagaataactatacgaggaggaaagctcatgatcacttacacccgtaaaagtgacgctggcaaatatgtttgtgttggtaccaatatggttggggaacgtgagagtgaagtagccgagctgactgtcttagagagaccatcatttgtgaagagacccagtaacttggcagtaactgtggatgacagtgcagaatttaaatgtgaggcccgaggtgaccctgtacctacagtacgatggaggaaagatgatggagagctgcccaaatccagatatgaaatccgagatgatcataccttgaaaattaggaaggtgacagctggtgacatgggttcatacacttgtgttgcagaaaatatggtgggcaaagctgaagcatctgctactctgactgttcaagaacctccacattttgttgtgaaaccccgtgaccaggttgttgctttgggacggactgtaacttttcagtgtgaagcaaccggaaatcctcaaccagctattttctggaggagagaagggagtcagaatctacttttctcatatcaaccaccacagtcatccagccgattttcagtctcccagactggcgacctcacaattactaatgtccagcgatctgatgttggttattacatctgccagactttaaatgttgctggaagcatcatcacaaaggcatatttggaagttacagatgtgattgcagatcggcctcccccagttattcgacaaggtcctgtgaatcagactgtagccgtggatggcactttcgtcctcagctgtgtggccacaggcagtccagtgcccaccattctgtggagaaaggatggagtcctcgtttcaacccaagactctcgaatcaaacagttggagaatggagtactgcagatccgatatgctaagctgggtgatactggtcggtacacctgcattgcatcaacccccagtggtgaagcaacatggagtgcttacattgaagttcaaggtaaagtaaatgaatttggagttccagttcagcctccaagacctactgacccaaatttaatccctagtgccccatcaaaacctgaagtgacagatgtcagcagaaatacagtcacattatcgtggcaaccaaatttgaattcaggagcaactccaacatcttatattatagaagccttcagccatgcatctggtagcagctggcagaccgtagcagagaatgtgaaaacagaaacatctgccattaaaggactcaaacctaatgcaatttaccttttccttgtgagggcagctaatgcatatggaattagtgatccaagccaaatatcagatccagtgaaaacacaagatgtcctaccaacaagtcagggggtggaccacaagcaggtccagagagagctgggaaatgctgttctgcacctccacaaccccaccgtcctttcttcctcttccatcgaagtgcactggacagtagatcaacagtctcagtatatacaaggatataaaattctctatcggccatctggagccaaccacggagaatcagactggttagtttttgaagtgaggacgccagccaaaaacagtgtggtaatccctgatctcagaaagggagtcaactatgaaattaaggctcgccctttttttaatgaatttcaaggagcagatagtgaaatcaagtttgccaaaaccctggaagaagcacccagtgccccaccccaaggtgtaactgtatccaagaatgatggaaacggaactgcaattctagttagttggcagccacctccagaagacactcaaaatggaatggtccaagagtataaggtttggtgtctgggcaatgaaactcgataccacatcaacaaaacagtggatggttccaccttttccgtggtcattccctttcttgttcctggaatccgatacagtgtggaagtggcagccagcactggggctgggtctggggtaaagagtgagcctcagttcatccagctggatgcccatggaaaccctgtgtcacctgaggaccaagtcagcctcgctcagcagatttcagatgtggtgaagcagccggccttcatagcaggtattggagcagcctgttggatcatcctcatggtcttcagcatctggctttatcgacaccgcaagaagagaaacggacttactagtacctacgcgggtatcagaaaagtcccgtcttttaccttcacaccaacagtaacttaccagagaggaggcgaagctgtcagcagtggagggaggcctggacttctcaacatcagtgaacctgccgcgcagccatggctggcagacacgtggcctaatactggcaacaaccacaatgactgctccatcagctgctgcacggcaggcaatggaaacagcgacagcaacctcactacctacagtcgcccagctgattgtatagcaaattataacaaccaactggataacaaacaaacaaatctgatgctccctgagtcaactgtttatggtgatgtggaccttagtaacaaaatcaatgagatgaaaaccttcaatagcccaaatctgaaggatgggcgttttgtcaatccatcagggcagcctactccttacgccaccactcagctcatccagtcaaacctcagcaacaacatgaacaatggcagcggggactctggcgagaagcactggaaaccactgggacagcagaaacaagaagtggcaccagttcagtacaacatcgtggagcaaaacaagctgaacaaagattatcgagcaaatgacacagttcctccaactatcccatacaaccaatcatacgaccagaacacaggaggatcctacaacagctcagaccggggcagtagtacatctgggagtcaggggcacaagaaaggggcaagaacacccaaggtaccaaaacagggtggcatgaactgggcagacctgcttcctcctcccccagcacatcctcctccacacagcaatagcgaagagtacaacatttctgtagatgaaagctatgaccaagaaatgccatgtcccgtgccaccagcaaggatgtatttgcaacaagatgaattagaagaggaggaagatgaacgaggccccactccccctgttcggggagcagcttcttctccagctgccgtgtcctatagccatcagtccactgccactctgactccctccccacaggaagaactccagcccatgttacaggattgtccagaggagactggccacatgcagcaccagcccgacaggagacggcagcctgtgagtcctcctccaccaccacggccgatctcccctccacatacctatggctacatttcaggacccctggtctcagatatggatacggatgcgccagaagaggaagaagacgaagccgacatggaggtagccaagatgcaaaccagaaggcttttgttacgtgggcttgagcagacacctgcctccagtgttggggacctggagagctctgtcacggggtccatgatcaacggctggggctcagcctcagaggaggacaacatttccagcggacgctccagtgttagttcttcggacggctcctttttcactgatgctgactttgcccaggcagtcgcagcagcggcagagtatgctggtctgaaagtagcacgacggcaaatgcaggatgctgctggccgtcgacattttcatgcgtctcagtgccctaggcccacaagtcccgtgtctacagacagcaacatgagtgccgccgtaatgcagaaaaccagaccagccaagaaactgaaacaccagccaggacatctgcgcagagaaacctacacagatgatcttccaccacctcctgtgccgccacctgctataaagtcacctactgcccaatccaagacacagctggaagtacgacctgtagtggtgccaaaactcccttctatggatgcaagaacagacagatcatcagacagaaaaggaagcagttacaaggggagagaagtgttggatggaagacaggttgttgacatgcgaacaaatccaggtgatcccagagaagcacaggaacagcaaaatgacgggaaaggacgtggaaacaaggcagcaaaacgagaccttccaccagcaaagactcatctcatccaagaggatattctaccttattgtagacctacttttccaacatcaaataatcccagagatcccagttcctcaagctcaatgtcatcaagaggatcaggaagcagacaaagagaacaagcaaatgtaggtcgaagaaatattgcagaaatgcaggtacttggaggatatgaaagaggagaagataataatgaagaattagaggaaccttcatca

SEQ ID NO: 133719 - DNA, 6742 bp, Artificial Sequence
  derived and/or modified sequence
aaagttgcagggctgcgtctgcactacggagcctctagattgctgaaaacagtcttatggaaggataacacattgtctgtcactggctggttgtaatgcaaggaagggacaaagatgaaatggaaacatgttccttttttggtcatgatatcactcctcagcttatccccaaatcacctgtttctggcccagcttattccagaccctgaagatgtagagagggggaacgaccacgggacgccaatccccacctctgataacgatgacaattcgctgggctatacaggctcccgtcttcgtcaggaagattttccacctcgcattgttgaacacccttcagacctgattgtctcaaaaggagaacctgcaactttgaactgcaaagctgaaggccgccccacacccactattgaatggtacaaagggggagagagagtggagacagacaaagatgaccctcgctcacaccgaatgttgctgccgagtggatctttatttttcttacgtatagtacatggacggaaaagtagacctgatgaaggagtctatgtctgtgtagcaaggaattaccttggagaggctgtgagccacaatgcatcgctggaagtagccatacttcgggatgacttcagacaaaacccttcggatgtcatggttgcagtaggagagcctgcagtaatggaatgccaacctccacgaggccatcctgagcccaccatttcatggaagaaagatggctctccactggatgataaagatgaaagaataactatacgaggaggaaagctcatgatcacttacacccgtaaaagtgacgctggcaaatatgtttgtgttggtaccaatatggttggggaacgtgagagtgaagtagccgagctgactgtcttagagagaccatcatttgtgaagagacccagtaacttggcagtaactgtggatgacagtgcagaatttaaatgtgaggcccgaggtgaccctgtacctacagtacgatggaggaaagatgatggagagctgcccaaatccagatatgaaatccgagatgatcataccttgaaaattaggaaggtgacagctggtgacatgggttcatacacttgtgttgcagaaaatatggtgggcaaagctgaagcatctgctactctgactgttcaagaacctccacattttgttgtgaaaccccgtgaccaggttgttgctttgggacggactgtaacttttcagtgtgaagcaaccggaaatcctcaaccagctattttctggaggagagaagggagtcagaatctacttttctcatatcaaccaccacagtcatccagccgattttcagtctcccagactggcgacctcacaattactaatgtccagcgatctgatgttggttattacatctgccagactttaaatgttgctggaagcatcatcacaaaggcatatttggaagttacagatgtgattgcagatcggcctcccccagttattcgacaaggtcctgtgaatcagactgtagccgtggatggcactttcgtcctcagctgtgtggccacaggcagtccagtgcccaccattctgtggagaaaggatggagtcctcgtttcaacccaagactctcgaatcaaacagttggagaatggagtactgcagatccgatatgctaagctgggtgatactggtcggtacacctgcattgcatcaacccccagtggtgaagcaacatggagtgcttacattgaagttcaagaatttggagttccagttcagcctccaagacctactgacccaaatttaatccctagtgccccatcaaaacctgaagtgacagatgtcagcagaaatacagtcacattatcgtggcaaccaaatttgaattcaggagcaactccaacatcttatattatagaagccttcagccatgcatctggtagcagctggcagaccgtagcagagaatgtgaaaacagaaacatctgccattaaaggactcaaacctaatgcaatttaccttttccttgtgagggcagctaatgcatatggaattagtgatccaagccaaatatcagatccagtgaaaacacaagatgtcctaccaacaagtcagggggtggaccacaagcaggtccagagagagctgggaaatgctgttctgcacctccacaaccccaccgtcctttcttcctcttccatcgaagtgcactggacagtagatcaacagtctcagtatatacaaggatataaaattctctatcggccatctggagccaaccacggagaatcagactggttagtttttgaagtgaggacgccagccaaaaacagtgtggtaatccctgatctcagaaagggagtcaactatgaaattaaggctcgccctttttttaatgaatttcaaggagcagatagtgaaatcaagtttgccaaaaccctggaagaagcacccagtgccccaccccaaggtgtaactgtatccaagaatgatggaaacggaactgcaattctagttagttggcagccacctccagaagacactcaaaatggaatggtccaagagtataaggtttggtgtctgggcaatgaaactcgataccacatcaacaaaacagtggatggttccaccttttccgtggtcattccctttcttgttcctggaatccgatacagtgtggaagtggcagccagcactggggctgggtctggggtaaagagtgagcctcagttcatccagctggatgcccatggaaaccctgtgtcacctgaggaccaagtcagcctcgctcagcagatttcagatgtggtgaagcagccggccttcatagcaggtattggagcagcctgttggatcatcctcatggtcttcagcatctggctttatcgacaccgcaagaagagaaacggacttactagtacctacgcgggtatcagaaaagtcccgtcttttaccttcacaccaacagtaacttaccagagaggaggcgaagctgtcagcagtggagggaggcctggacttctcaacatcagtgaacctgccgcgcagccatggctggcagacacgtggcctaatactggcaacaaccacaatgactgctccatcagctgctgcacggcaggcaatggaaacagcgacagcaacctcactacctacagtcgcccagctgattgtatagcaaattataacaaccaactggataacaaacaaacaaatctgatgctccctgagtcaactgtttatggtgatgtggaccttagtaacaaaatcaatgagatgaaaaccttcaatagcccaaatctgaaggatgggcgttttgtcaatccatcagggcagcctactccttacgccaccactcagctcatccagtcaaacctcagcaacaacatgaacaatggcagcggggactctggcgagaagcactggaaaccactgggacagcagaaacaagaagtggcaccagttcagtacaacatcgtggagcaaaacaagctgaacaaagattatcgagcaaatgacacagttcctccaactatcccatacaaccaatcatacgaccagaacacaggaggatcctacaacagctcagaccggggcagtagtacatctgggagtcaggggcacaagaaaggggcaagaacacccaaggtaccaaaacagggtggcatgaactgggcagacctgcttcctcctcccccagcacatcctcctccacacagcaatagcgaagagtacaacatttctgtagatgaaagctatgaccaagaaatgccatgtcccgtgccaccagcaaggatgtatttgcaacaagatgaattagaagaggaggaagatgaacgaggccccactccccctgttcggggagcagcttcttctccagctgccgtgtcctatagccatcagtccactgccactctgactccctccccacaggaagaactccagcccatgttacaggattgtccagaggagactggccacatgcagcaccagcccgacaggagacggcagcctgtgagtcctcctccaccaccacggccgatctcccctccacatacctatggctacatttcaggacccctggtctcagatatggatacggatgcgccagaagaggaagaagacgaagccgacatggaggtagccaagatgcaaaccagaaggcttttgttacgtgggcttgagcagacacctgcctccagtgttggggacctggagagctctgtcacggggtccatgatcaacggctggggctcagcctcagaggaggacaacatttccagcggacgctccagtgttagttcttcggacggctcctttttcactgatgctgactttgcccaggcagtcgcagcagcggcagagtatgctggtctgaaagtagcacgacggcaaatgcaggatgctgctggccgtcgacattttcatgcgtctcagtgccctaggcccacaagtcccgtgtctacagacagcaacatgagtgccgccgtaatgcagaaaaccagaccagccaagaaactgaaacaccagccaggacatctgcgcagagaaacctacacagatgatcttccaccacctcctgtgccgccacctgctataaagtcacctactgcccaatccaagacacagctggaagtacgacctgtagtggtgccaaaactcccttctatggatgcaagaacagacagatcatcagacagaaaaggaagcagttacaaggggagagaagtgttggatggaagacaggttgttgacatgcgaacaaatccaggtgatcccagagaagcacaggaacagcaaaatgacgggaaaggacgtggaaacaaggcagcaaaacgagaccttccaccagcaaagactcatctcatccaagaggatattctaccttattgtagacctacttttccaacatcaaataatcccagagatcccagttcctcaagctcaatgtcatcaagaggatcaggaagcagacaaagagaacaagcaaatgtaggtcgaagaaatattgcagaaatgcaggtacttggaggatatgaaagaggagaagataataatgaagaattagaggaaactgaaagctgaagacaaccaagaggcttatgagatctaatgtgaaaatcatcactcaagatgcctcctgtcagatgacacatgacgccagataaaatgttcagtgcaatcagagtgtacaaattgtcgtttttattcctcttattgggatatcattttaaaaactttattgggtttttattgttgttgtttgatccctaaccctacaaagagccttcctattcccctcgctgttggagcaaaccattataccttacttccagcaagcaaagtgctttgacttcttgcttcagtcatcagccagcaagagggaacaaaactgttcttttgcattttgccgctgagatatggcattgcactgcttatatgccaagctaatttatagcaagatattgatcaaatatagaaagttgatattcaacctcacaagggctctcaaagtataatctttctatagccaactgctaatgcaaattaaaacatatttcattttaacatgatttcaaaatcagtttttcatactaccctttgctggaagaaactaaaaatatagcaaatgcagaaccacaaacaattcgaatggggtagaaacattgtaaatatttactctttgcaaaccctggtggtattttattttggcttcatttcaatcattgaagtatattcttattggaaatgtacttttggataagtagggctaagccagttggatctctggttgtctagtcattgtcataagtaaacctagtaaaaccttgttctatttttcaatcatcaaaaagtaattataaatacgtattacaaacaagtggatgtttttaatgaccaattgagtaagaacatccctgtcttaactggcctaaatttcttctggtagtgtcagttcaactttcagaagtgccacttaaggaagtttgatttttgtttttgtaatgcactgtttttaatctctctctctttttttttttttttttggttttaaaagcacaatcactaaactttatttgtaaaccattgtaactattaaccttttttgtcttattgaaaaaaaaaatgttgagaagcgtttttaacctgttttgttaatgctctatgtttgtatttggaatatttgaataatgacagatggtgaagtaacatgcatactttattgtgggccatgaaccaaatggttcttacttttcctggacttaaagaaaaaaagaggtttaagtttgttgtggccaatgtcgaaacctacaagatttccttaaaatctctaatagaggcattacttgctttcaattgacaaatgatgccctctgactagtagatttctatgatccttttttgtcattttatgaatatcattgattttataattggtgctatttgaagaaaaaaatgtacatttattcatagatagataagtatcaggtctgaccccagtggaaaacaaagccaaacaaaactgaaccacaaaaaaaaaggctggtgttcaccaaaaccaaacttgttcatttagataatttgaaaaagttccatagaaaaggcgtgcagtactaagggaacaatccatgtgattaatgttttcattatgttcatgtaagaagccccttatttttagccataattttgcatactgaaaatccaataatcagaaaagtaattttgtcacattatttattaaaaatgttctcaaata

SEQ ID NO: 133720 - DNA, 4968 bp, Artificial Sequence
  derived and/or modified sequence
atgaagtggaagcacgtgcccttcctggtgatgatcagcctgctgagcctgagccccaaccacctgttcctggcccagctgatccccgaccccgaggacgtggagagaggcaacgaccacggcacccccatccccaccagcgacaacgacgacaacagcctgggctacaccggcagcagactgagacaggaggacttcccccccagaatcgtggagcaccccagcgacctgatcgtgagcaagggcgagcccgccaccctgaactgcaaggccgagggcagacccacccccaccatcgagtggtacaagggcggcgagagagtggagaccgacaaggacgaccccagaagccacagaatgctgctgcccagcggcagcctgttcttcctgagaatcgtgcacggcagaaagagcagacccgacgagggcgtgtacgtgtgcgtggccagaaactacctgggcgaggccgtgagccacaacgccagcctggaggtggccatcctgagagacgacttcagacagaaccccagcgacgtgatggtggccgtgggcgagcccgccgtgatggagtgccagccccccagaggccaccccgagcccaccatcagctggaagaaggacggcagccccctggacgacaaggacgagagaatcaccatcagaggcggcaagctgatgatcacctacaccagaaagagcgacgccggcaagtacgtgtgcgtgggcaccaacatggtgggcgagagagagagcgaggtggccgagctgaccgtgctggagagacccagcttcgtgaagagacccagcaacctggccgtgaccgtggacgacagcgccgagttcaagtgcgaggccagaggcgaccccgtgcccaccgtgagatggagaaaggacgacggcgagctgcccaagagcagatacgagatcagagacgaccacaccctgaagatcagaaaggtgaccgccggcgacatgggcagctacacctgcgtggccgagaacatggtgggcaaggccgaggccagcgccaccctgaccgtgcaggagcccccccacttcgtggtgaagcccagagaccaggtggtggccctgggcagaaccgtgaccttccagtgcgaggccaccggcaacccccagcccgccatcttctggagaagagagggcagccagaacctgctgttcagctaccagcccccccagagcagcagcagattcagcgtgagccagaccggcgacctgaccatcaccaacgtgcagagaagcgacgtgggctactacatctgccagaccctgaacgtggccggcagcatcatcaccaaggcctacctggaggtgaccgacgtgatcgccgacagacccccccccgtgatcagacagggccccgtgaaccagaccgtggccgtggacggcaccttcgtgctgagctgcgtggccaccggcagccccgtgcccaccatcctgtggagaaaggacggcgtgctggtgagcacccaggacagcagaatcaagcagctggagaacggcgtgctgcagatcagatacgccaagctgggcgacaccggcagatacacctgcatcgccagcacccccagcggcgaggccacctggagcgcctacatcgaggtgcagggcaaggtgaacgagttcggcgtgcccgtgcagccccccagacccaccgaccccaacctgatccccagcgcccccagcaagcccgaggtgaccgacgtgagcagaaacaccgtgaccctgagctggcagcccaacctgaacagcggcgccacccccaccagctacatcatcgaggccttcagccacgccagcggcagcagctggcagaccgtggccgagaacgtgaagaccgagaccagcgccatcaagggcctgaagcccaacgccatctacctgttcctggtgagagccgccaacgcctacggcatcagcgaccccagccagatcagcgaccccgtgaagacccaggacgtgctgcccaccagccagggcgtggaccacaagcaggtgcagagagagctgggcaacgccgtgctgcacctgcacaaccccaccgtgctgagcagcagcagcatcgaggtgcactggaccgtggaccagcagagccagtacatccagggctacaagatcctgtacagacccagcggcgccaaccacggcgagagcgactggctggtgttcgaggtgagaacccccgccaagaacagcgtggtgatccccgacctgagaaagggcgtgaactacgagatcaaggccagacccttcttcaacgagttccagggcgccgacagcgagatcaagttcgccaagaccctggaggaggcccccagcgcccccccccagggcgtgaccgtgagcaagaacgacggcaacggcaccgccatcctggtgagctggcagcccccccccgaggacacccagaacggcatggtgcaggagtacaaggtgtggtgcctgggcaacgagaccagataccacatcaacaagaccgtggacggcagcaccttcagcgtggtgatccccttcctggtgcccggcatcagatacagcgtggaggtggccgccagcaccggcgccggcagcggcgtgaagagcgagccccagttcatccagctggacgcccacggcaaccccgtgagccccgaggaccaggtgagcctggcccagcagatcagcgacgtggtgaagcagcccgccttcatcgccggcatcggcgccgcctgctggatcatcctgatggtgttcagcatctggctgtacagacacagaaagaagagaaacggcctgaccagcacctacgccggcatcagaaaggtgcccagcttcaccttcacccccaccgtgacctaccagagaggcggcgaggccgtgagcagcggcggcagacccggcctgctgaacatcagcgagcccgccgcccagccctggctggccgacacctggcccaacaccggcaacaaccacaacgactgcagcatcagctgctgcaccgccggcaacggcaacagcgacagcaacctgaccacctacagcagacccgccgactgcatcgccaactacaacaaccagctggacaacaagcagaccaacctgatgctgcccgagagcaccgtgtacggcgacgtggacctgagcaacaagatcaacgagatgaagaccttcaacagccccaacctgaaggacggcagattcgtgaaccccagcggccagcccaccccctacgccaccacccagctgatccagagcaacctgagcaacaacatgaacaacggcagcggcgacagcggcgagaagcactggaagcccctgggccagcagaagcaggaggtggcccccgtgcagtacaacatcgtggagcagaacaagctgaacaaggactacagagccaacgacaccgtgccccccaccatcccctacaaccagagctacgaccagaacaccggcggcagctacaacagcagcgacagaggcagcagcaccagcggcagccagggccacaagaagggcgccagaacccccaaggtgcccaagcagggcggcatgaactgggccgacctgctgccccccccccccgcccacccccccccccacagcaacagcgaggagtacaacatcagcgtggacgagagctacgaccaggagatgccctgccccgtgccccccgccagaatgtacctgcagcaggacgagctggaggaggaggaggacgagagaggccccaccccccccgtgagaggcgccgccagcagccccgccgccgtgagctacagccaccagagcaccgccaccctgacccccagcccccaggaggagctgcagcccatgctgcaggactgccccgaggagaccggccacatgcagcaccagcccgacagaagaagacagcccgtgagccccccccccccccccagacccatcagccccccccacacctacggctacatcagcggccccctggtgagcgacatggacaccgacgcccccgaggaggaggaggacgaggccgacatggaggtggccaagatgcagaccagaagactgctgctgagaggcctggagcagacccccgccagcagcgtgggcgacctggagagcagcgtgaccggcagcatgatcaacggctggggcagcgccagcgaggaggacaacatcagcagcggcagaagcagcgtgagcagcagcgacggcagcttcttcaccgacgccgacttcgcccaggccgtggccgccgccgccgagtacgccggcctgaaggtggccagaagacagatgcaggacgccgccggcagaagacacttccacgccagccagtgccccagacccaccagccccgtgagcaccgacagcaacatgagcgccgccgtgatgcagaagaccagacccgccaagaagctgaagcaccagcccggccacctgagaagagagacctacaccgacgacctgccccccccccccgtgcccccccccgccatcaagagccccaccgcccagagcaagacccagctggaggtgagacccgtggtggtgcccaagctgcccagcatggacgccagaaccgacagaagcagcgacagaaagggcagcagctacaagggcagagaggtgctggacggcagacaggtggtggacatgagaaccaaccccggcgaccccagagaggcccaggagcagcagaacgacggcaagggcagaggcaacaaggccgccaagagagacctgccccccgccaagacccacctgatccaggaggacatcctgccctactgcagacccaccttccccaccagcaacaaccccagagaccccagcagcagcagcagcatgagcagcagaggcagcggcagcagacagagagagcaggccaacgtgggcagaagaaacatcgccgagatgcaggtgctgggcggctacgagagaggcgaggacaacaacgaggagctggaggagcccagcagctag

SEQ ID NO: 133721 - DNA, 4956 bp, Artificial Sequence
  derived and/or modified sequence
atgaagtggaagcacgtgcccttcctggtgatgatcagcctgctgagcctgagccccaaccacctgttcctggcccagctgatccccgaccccgaggacgtggagagaggcaacgaccacggcacccccatccccaccagcgacaacgacgacaacagcctgggctacaccggcagcagactgagacaggaggacttcccccccagaatcgtggagcaccccagcgacctgatcgtgagcaagggcgagcccgccaccctgaactgcaaggccgagggcagacccacccccaccatcgagtggtacaagggcggcgagagagtggagaccgacaaggacgaccccagaagccacagaatgctgctgcccagcggcagcctgttcttcctgagaatcgtgcacggcagaaagagcagacccgacgagggcgtgtacgtgtgcgtggccagaaactacctgggcgaggccgtgagccacaacgccagcctggaggtggccatcctgagagacgacttcagacagaaccccagcgacgtgatggtggccgtgggcgagcccgccgtgatggagtgccagccccccagaggccaccccgagcccaccatcagctggaagaaggacggcagccccctggacgacaaggacgagagaatcaccatcagaggcggcaagctgatgatcacctacaccagaaagagcgacgccggcaagtacgtgtgcgtgggcaccaacatggtgggcgagagagagagcgaggtggccgagctgaccgtgctggagagacccagcttcgtgaagagacccagcaacctggccgtgaccgtggacgacagcgccgagttcaagtgcgaggccagaggcgaccccgtgcccaccgtgagatggagaaaggacgacggcgagctgcccaagagcagatacgagatcagagacgaccacaccctgaagatcagaaaggtgaccgccggcgacatgggcagctacacctgcgtggccgagaacatggtgggcaaggccgaggccagcgccaccctgaccgtgcaggagcccccccacttcgtggtgaagcccagagaccaggtggtggccctgggcagaaccgtgaccttccagtgcgaggccaccggcaacccccagcccgccatcttctggagaagagagggcagccagaacctgctgttcagctaccagcccccccagagcagcagcagattcagcgtgagccagaccggcgacctgaccatcaccaacgtgcagagaagcgacgtgggctactacatctgccagaccctgaacgtggccggcagcatcatcaccaaggcctacctggaggtgaccgacgtgatcgccgacagacccccccccgtgatcagacagggccccgtgaaccagaccgtggccgtggacggcaccttcgtgctgagctgcgtggccaccggcagccccgtgcccaccatcctgtggagaaaggacggcgtgctggtgagcacccaggacagcagaatcaagcagctggagaacggcgtgctgcagatcagatacgccaagctgggcgacaccggcagatacacctgcatcgccagcacccccagcggcgaggccacctggagcgcctacatcgaggtgcaggagttcggcgtgcccgtgcagccccccagacccaccgaccccaacctgatccccagcgcccccagcaagcccgaggtgaccgacgtgagcagaaacaccgtgaccctgagctggcagcccaacctgaacagcggcgccacccccaccagctacatcatcgaggccttcagccacgccagcggcagcagctggcagaccgtggccgagaacgtgaagaccgagaccagcgccatcaagggcctgaagcccaacgccatctacctgttcctggtgagagccgccaacgcctacggcatcagcgaccccagccagatcagcgaccccgtgaagacccaggacgtgctgcccaccagccagggcgtggaccacaagcaggtgcagagagagctgggcaacgccgtgctgcacctgcacaaccccaccgtgctgagcagcagcagcatcgaggtgcactggaccgtggaccagcagagccagtacatccagggctacaagatcctgtacagacccagcggcgccaaccacggcgagagcgactggctggtgttcgaggtgagaacccccgccaagaacagcgtggtgatccccgacctgagaaagggcgtgaactacgagatcaaggccagacccttcttcaacgagttccagggcgccgacagcgagatcaagttcgccaagaccctggaggaggcccccagcgcccccccccagggcgtgaccgtgagcaagaacgacggcaacggcaccgccatcctggtgagctggcagcccccccccgaggacacccagaacggcatggtgcaggagtacaaggtgtggtgcctgggcaacgagaccagataccacatcaacaagaccgtggacggcagcaccttcagcgtggtgatccccttcctggtgcccggcatcagatacagcgtggaggtggccgccagcaccggcgccggcagcggcgtgaagagcgagccccagttcatccagctggacgcccacggcaaccccgtgagccccgaggaccaggtgagcctggcccagcagatcagcgacgtggtgaagcagcccgccttcatcgccggcatcggcgccgcctgctggatcatcctgatggtgttcagcatctggctgtacagacacagaaagaagagaaacggcctgaccagcacctacgccggcatcagaaaggtgcccagcttcaccttcacccccaccgtgacctaccagagaggcggcgaggccgtgagcagcggcggcagacccggcctgctgaacatcagcgagcccgccgcccagccctggctggccgacacctggcccaacaccggcaacaaccacaacgactgcagcatcagctgctgcaccgccggcaacggcaacagcgacagcaacctgaccacctacagcagacccgccgactgcatcgccaactacaacaaccagctggacaacaagcagaccaacctgatgctgcccgagagcaccgtgtacggcgacgtggacctgagcaacaagatcaacgagatgaagaccttcaacagccccaacctgaaggacggcagattcgtgaaccccagcggccagcccaccccctacgccaccacccagctgatccagagcaacctgagcaacaacatgaacaacggcagcggcgacagcggcgagaagcactggaagcccctgggccagcagaagcaggaggtggcccccgtgcagtacaacatcgtggagcagaacaagctgaacaaggactacagagccaacgacaccgtgccccccaccatcccctacaaccagagctacgaccagaacaccggcggcagctacaacagcagcgacagaggcagcagcaccagcggcagccagggccacaagaagggcgccagaacccccaaggtgcccaagcagggcggcatgaactgggccgacctgctgccccccccccccgcccacccccccccccacagcaacagcgaggagtacaacatcagcgtggacgagagctacgaccaggagatgccctgccccgtgccccccgccagaatgtacctgcagcaggacgagctggaggaggaggaggacgagagaggccccaccccccccgtgagaggcgccgccagcagccccgccgccgtgagctacagccaccagagcaccgccaccctgacccccagcccccaggaggagctgcagcccatgctgcaggactgccccgaggagaccggccacatgcagcaccagcccgacagaagaagacagcccgtgagccccccccccccccccagacccatcagccccccccacacctacggctacatcagcggccccctggtgagcgacatggacaccgacgcccccgaggaggaggaggacgaggccgacatggaggtggccaagatgcagaccagaagactgctgctgagaggcctggagcagacccccgccagcagcgtgggcgacctggagagcagcgtgaccggcagcatgatcaacggctggggcagcgccagcgaggaggacaacatcagcagcggcagaagcagcgtgagcagcagcgacggcagcttcttcaccgacgccgacttcgcccaggccgtggccgccgccgccgagtacgccggcctgaaggtggccagaagacagatgcaggacgccgccggcagaagacacttccacgccagccagtgccccagacccaccagccccgtgagcaccgacagcaacatgagcgccgccgtgatgcagaagaccagacccgccaagaagctgaagcaccagcccggccacctgagaagagagacctacaccgacgacctgccccccccccccgtgcccccccccgccatcaagagccccaccgcccagagcaagacccagctggaggtgagacccgtggtggtgcccaagctgcccagcatggacgccagaaccgacagaagcagcgacagaaagggcagcagctacaagggcagagaggtgctggacggcagacaggtggtggacatgagaaccaaccccggcgaccccagagaggcccaggagcagcagaacgacggcaagggcagaggcaacaaggccgccaagagagacctgccccccgccaagacccacctgatccaggaggacatcctgccctactgcagacccaccttccccaccagcaacaaccccagagaccccagcagcagcagcagcatgagcagcagaggcagcggcagcagacagagagagcaggccaacgtgggcagaagaaacatcgccgagatgcaggtgctgggcggctacgagagaggcgaggacaacaacgaggagctggaggagaccgagagctag

SEQ ID NO: 133722 - protein, 1378 aa, Artificial Sequence
  derived and/or modified sequence
MSLLMFTQLLLCGFLYVRVDGSRLRQEDFPPRIVEHPSDVIVSKGEPTTLNCKAEGRPTPTIEWYKDGERVETDKDDPRSHRMLLPSGSLFFLRIVHGRRSKPDEGSYVCVARNYLGEAVSRNASLEVALLRDDFRQNPTDVVVAAGEPAILECQPPRGHPEPTIYWKKDKVRIDDKEERISIRGGKLMISNTRKSDAGMYTCVGTNMVGERDSDPAELTVFERPTFLRRPINQVVLEEEAVEFRCQVQGDPQPTVRWKKDDADLPRGRYDIKDDYTLRIKKTMSTDEGTYMCIAENRVGKMEASATLTVRAPPQFVVRPRDQIVAQGRTVTFPCETKGNPQPAVFWQKEGSQNLLFPNQPQQPNSRCSVSPTGDLTITNIQRSDAGYYICQALTVAGSILAKAQLEVTDVLTDRPPPIILQGPANQTLAVDGTALLKCKATGDPLPVISWLKEGFTFPGRDPRATIQEQGTLQIKNLRISDTGTYTCVATSSSGETSWSAVLDVTESGATISKNYDLSDLPGPPSKPQVTDVTKNSVTLSWQPGTPGTLPASAYIIEAFSQSVSNSWQTVANHVKTTLYTVRGLRPNTIYLFMVRAINPQGLSDPSPMSDPVRTQDISPPAQGVDHRQVQKELGDVLVRLHNPVVLTPTTVQVTWTVDRQPQFIQGYRVMYRQTSGLQATSSWQNLDAKVPTERSAVLVNLKKGVTYEIKVRPYFNEFQGMDSESKTVRTTEEAPSAPPQSVTVLTVGSYNSTSISVSWDPPPPDHQNGIIQEYKIWCLGNETRFHINKTVDAAIRSVIIGGLFPGIQYRVEVAASTSAGVGVKSEPQPIIIGRRNEVVITENNNSITEQITDVVKQPAFIAGIGGACWVILMGFSIWLYWRRKKRKGLSNYAVTFQRGDGGLMSNGSRPGLLNAGDPSYPWLADSWPATSLPVNNSNSGPNEIGNFGRGDVLPPVPGQGDKTATMLSDGAIYSSIDFTTKTSYNSSSQITQATPYATTQILHSNSIHELAVDLPDPQWKSSIQQKTDLMGFGYSLPDQNKGNNGGKGGKKKKNKNSSKPQKNNGSTWANVPLPPPPVQPLPGTELEHYAVEQQENGYDSDSWCPPLPVQTYLHQGLEDELEEDDDRVPTPPVRGVASSPAISFGQQSTATLTPSPREEMQPMLQAHLDELTRAYQFDIAKQTWHIQSNNQPPQPPVPPLGYVSGALISDLETDVADDDADDEEEALEIPRPLRALDQTPGSSMDNLDSSVTGKAFTSSQRPRPTSPFSTDSNTSAALSQSQRPRPTKKHKGGRMDQQPALPHRREGMTDEEALVPYSKPSFPSPGGHSSSGTASSKGSTGPRKTEVLRAGHQRNASDLLDIGYMGSNSQGQFTGEL

SEQ ID NO: 133723 - DNA, 4137 bp, Artificial Sequence
  derived and/or modified sequence
atgtccctgctgatgttcacgcagctgctgctgtgcggattcctttacgtcagggtggatgggtccagactgagacaggaggattttcccccccggattgttgagcacccctccgacgtcatcgtgtccaaaggggagcccactactttgaactgcaaggctgaaggcaggcccacgccaactattgagtggtataaggatggggaacgagtggaaaccgataaggatgatcccaggtcccatcgaatgttactgcctagcggctccttgttcttcctgcggattgtgcatggaagacggtctaagccggatgagggatcatatgtgtgtgttgcccgcaactacctgggcgaagcagtctcccggaacgcctctttggaggtagctctgcttagggacgatttccgccagaatcctacagacgttgtagtggctgcaggcgagccagccattcttgagtgccaacctcctaggggtcatcccgaaccaactatctactggaagaaagataaagtccgcattgacgataaagaagagcgcattagcattagaggtgggaagctgatgatctccaatactaggaaatccgatgcagggatgtatacttgcgtgggtactaacatggtgggggagagagactctgaccccgctgaactcaccgttttcgaaaggcccacgtttctgcggcgcccgattaaccaggtggttcttgaagaagaagccgtggaattccgctgccaggtccagggcgatccccagccgactgtgagatggaagaaagatgatgccgatttaccccggggacgatacgatatcaaggacgattacacgctgagaattaaaaagacgatgtcaactgacgagggtacttacatgtgtatcgcagagaatagagtggggaagatggaagcatccgctacattaacagttcgcgctcctcctcaatttgtcgtgcgaccaagagaccagatcgtcgcacaaggacgtacagtcactttcccctgtgaaactaagggcaatcctcaacctgcagtgttttggcaaaaggaggggagtcagaatttgctgttcccaaaccagcctcaacagcctaacagtcgttgtagcgtcagtcccacaggtgatctgacaattaccaacatccagaggtctgacgctggctactatatctgccaggctttaacagtggcaggctccatcttggccaaagcccagcttgaagtgaccgacgtgctgactgaccgaccccctccaataatcctacaaggacctgccaaccagactctcgcagtcgatggcaccgccctgctgaagtgcaaggctacaggggatccgctgcctgtgatttcctggcttaaagagggtttcacttttcctgggcgagacccaagggccactattcaggagcaagggactctacagataaagaacttgcgaattagtgacaccggtacctacacttgcgtagcaaccagtagctccggcgagacaagctggtctgctgtgcttgacgtgactgagtctggtgcgaccatcagcaaaaactacgatttatcggatctgccagggcccccatcaaagccacaggtcactgatgttaccaagaactccgtcactctcagttggcagccaggcacaccgggaacgctgcctgccagtgcatatatcatcgaagctttctcccaaagcgtgagcaattcttggcaaacggttgccaaccacgtgaagaccaccctgtatactgtgcggggtctgaggcctaatactatttatctcttcatggtgagggccatcaatccccagggattgtccgacccctctccaatgtcggatcctgtgcggacacaagatatatctccacctgcacaaggcgtggaccaccggcaagtccaaaaggaactaggcgacgttttggtgcgcctgcacaaccctgtggtccttaccccaacgacagtgcaggtgacttggaccgtggaccgccaaccccagtttatacaagggtatcgagtgatgtatcggcagacctcagggcttcaggcaacttcctcttggcagaacctcgacgcaaaggttcctacagagcggagtgcggtgctcgtgaatcttaaaaagggggtgacttacgaaattaaggtacgaccttatttcaacgaattccaaggaatggattcggagtccaaaactgtcagaaccaccgaagaggccccttcagctccaccacagtctgtgacagtgcttactgtgggctcttacaacagcacttcgatttcggtatcctgggatccgcctccccctgatcaccagaatgggataatacaggaatataagatatggtgtctgggcaacgagacaagattccatatcaacaaaacagtggatgcagccatccggagtgttataattggcggccttttccctggcatccagtatcgggtcgaggtcgctgccagtaccagcgctggggtcggggtaaagtccgagcctcagcctatcataataggccgtcgaaatgaggtggtcatcaccgagaacaacaactctatcacagagcagatcaccgacgtagtaaaacagcccgcattcattgccggcattggaggggcctgttgggtgattctgatgggcttcagcatttggctgtattggagacgcaaaaagcgaaaggggctatccaactatgcagtgaccttccagcggggggatggaggcctcatgtctaacggaagccgaccaggtctgcttaatgctggggacccgtcctacccctggcttgccgacagctggccagccacatcccttcctgtgaacaactcaaattcaggccctaacgagatagggaacttcggaagaggtgacgttttaccccccgttcccggccaaggcgacaagaccgcaactatgctatcggacggcgccatctattcatccattgactttaccacaaagacatcctacaactccagctcgcagattacccaggcaactccttacgccactacacagatactccacagcaattctattcatgaattggcagtggacttgcccgatcctcaatggaagtctagtatccagcaaaagacagacctgatggggttcggctacagtctccctgatcagaacaagggaaacaatggcggcaagggcgggaaaaaaaagaagaataagaattccagcaaacctcagaaaaacaacggcagtacttgggcaaatgtgccgctgccacctcctccggtgcagcccttaccaggaaccgagctcgagcattacgccgtggaacagcaggagaatggctacgacagcgactcctggtgtcctccattacccgtgcagacatatttgcatcagggacttgaggacgaacttgaggaagacgatgacagggttcctacccccccagtgcgtggggtggcgtcttccccagctatctctttcggacaacagtccaccgccacactgacaccatctcccagagaggagatgcagccaatgctgcaagcccatctcgacgaactgacaagagcctaccagttcgatatagctaaacaaacatggcacattcagtctaataaccagccacctcagccgcccgttccacccttagggtatgtcagtggggccctaatatcagacctggaaacggatgttgccgacgacgatgccgacgatgaagaagaagccctggagatccctagacctttaagggcccttgatcagacgccaggtagctcgatggacaatctggactcttccgtcactggcaaagcctttacatcaagtcagaggccgaggcctacctcccccttcagcaccgacagcaatacttccgccgctctgtctcagtctcaaagacctaggccgacaaagaagcacaaaggaggcaggatggaccaacagcccgctctgccacatcggcgcgaggggatgaccgatgaagaggctcttgtgccctactcaaaacctagcttcccctcccccggaggtcattcgtcttcgggcacggcttcctcaaaagggagcacgggaccacgcaaaactgaggttttgcgtgccggacatcaacggaacgcgtcagatctgctagatattggttatatggggtcaaattcacaggggcagttcacaggagaactgtag

SEQ ID NO: 133724 - DNA, 4137 bp, Artificial Sequence
  derived and/or modified sequence
atgagcctgctgatgttcacccagctgctgctgtgtggcttcctgtatgtgcgggtggatggcagccggctgcggcaggaggacttccccccaagaattgtggagcaccccagtgatgtgattgtgtccaagggggagcccaccaccctgaactgcaaggccgagggccggcccacccccaccatcgagtggtacaaggatggagagcgggtggagacagacaaggatgaccccaggagccacaggatgctgctgcccagcggcagcctcttcttcctgagaattgtgcatggaagaagaagcaagccagatgagggcagctatgtgtgtgtggccaggaactacctgggggaggccgtgtccagaaatgccagcctggaggtggccctgctgagagatgacttccggcagaaccccacagatgtggtggtggccgccggggagcccgccatcctggagtgccagcccccccggggccaccctgagcccaccatctactggaagaaggacaaggtgagaattgatgacaaggaggagcgcatcagcatccggggcggcaagctgatgatcagcaacaccaggaagagtgatgctggcatgtacacctgtgtgggcaccaacatggtgggggagcgggacagcgaccctgctgagctgactgtgtttgagcggcccaccttcctgcggcggcccatcaaccaggtggtgctggaggaggaggccgtggagttccgctgccaggtgcagggcgacccccagcccaccgtgcgctggaagaaggatgatgctgacctgccccggggccgctatgacatcaaggatgactacaccctgcgcatcaagaagaccatgagcacagatgagggcacctacatgtgcatcgccgagaacagagtgggcaagatggaggccagcgccaccctgactgtgcgggccccaccccagtttgtggtgcggccccgggaccagatcgtggcccagggccgcacagtgaccttcccctgtgagaccaagggcaacccccagcctgctgtgttctggcagaaggagggcagccagaacctgctcttccccaaccagccccagcagcccaacagccgctgcagcgtgagccccactggagacctgaccatcaccaacatccagaggagtgatgctggctactacatctgccaggccctgactgtggccggcagcatcctggccaaggcccagctggaggtgacagatgtgctgacagaccggcccccacccatcatcctgcagggccctgccaaccagaccctggccgtggatggaacagccctgctgaagtgcaaggccaccggggaccccctgcctgtgatctcctggctgaaggagggcttcaccttccctggccgggacccccgggccaccatccaggagcagggcaccctgcagatcaagaacctgcgcatcagtgacaccggcacctacacctgtgtggccaccagcagcagcggggagacctcctggagcgctgtgctggatgtgacagagagcggggccaccatcagcaagaactatgacctgagtgacctgcccggcccccccagcaagccccaggtgacagatgtgaccaagaacagcgtgaccctgtcctggcagcccggcaccccaggcaccctgcctgccagcgcctacatcatcgaggccttcagccagagcgtgagcaacagctggcagacagtggccaaccacgtgaagaccaccctgtacacagtgcggggcctgcggcccaacaccatctacctgttcatggtgcgggccatcaacccccagggcctgagtgaccccagccccatgtctgaccctgtgaggacccaggacatcagccccccagcccagggcgtggaccaccggcaggtgcagaaggagctgggagatgtgctggtgcggctgcacaaccctgtggtgctgacccccaccaccgtgcaggtgacctggacagtggaccggcagccccagttcatccagggctacagagtgatgtaccggcagaccagcggcctgcaggccaccagctcctggcagaacctggatgccaaggtgcccacagagaggtctgctgtgctggtgaacctgaagaagggcgtgacctatgagatcaaggtgcggccctacttcaatgagttccagggcatggacagcgagagcaagacagtgaggaccacagaggaggcccccagcgccccaccccagagcgtgacagtgctgactgtgggcagctacaacagcaccagcatctctgtgtcctgggaccccccacctccagaccaccagaatggcatcatccaggagtacaagatctggtgcctgggcaatgagacccgcttccacatcaacaagacagtggatgctgccatccgcagcgtcatcattggaggcctcttccctggcatccagtacagagtggaggtggccgccagcaccagcgctggggtgggcgtgaagtctgagccccagcccatcatcattggaagaagaaatgaggtggtgatcacagagaacaacaacagcatcacagagcagatcacagatgtggtgaagcagcctgccttcatcgccggcattggaggagcctgctgggtgatcctgatgggcttcagcatctggctgtactggaggaggaagaagaggaagggcctgagcaactatgctgtgaccttccagagaggagatggcggcctgatgagcaatggcagcaggcctggcctgctgaatgctggggaccccagctacccctggctggccgacagctggccagccaccagcctgcctgtgaacaacagcaacagcggccccaatgaaattggcaactttggaagaggagatgtgctgccccctgtgcccggccagggcgacaagacagccaccatgctgagtgatggagccatctacagcagcattgacttcaccaccaagaccagctacaacagcagcagccagatcacccaggccaccccctatgccaccacccagatcctgcacagcaacagcatccacgagctggccgtggacctgcctgacccccagtggaagagcagcatccagcagaagacagacctgatgggcttcggctacagcctgcctgaccagaacaagggcaacaatggaggcaagggcggcaagaagaagaagaacaagaacagcagcaagccccagaagaacaacggcagcacctgggccaacgtgcccctgcccccacctcctgtgcagcccctgcctggaacagagctggagcactatgctgtggagcagcaggagaatggctatgacagcgacagctggtgcccccccctgcctgtgcagacctacctgcaccagggcctggaggatgagctggaggaggatgatgacagagtgcccaccccacctgtgcggggcgtggccagcagccctgccatcagctttggccagcagagcacagccaccctgacccccagcccccgggaggagatgcagcccatgctgcaggcccacctggatgagctgacccgggcctaccagtttgacatcgccaagcagacctggcacatccagagcaacaaccagcccccccagccccctgtgccccccctgggctacgtgtctggggccctgatcagtgacctggagacagatgtggctgatgatgatgctgatgatgaggaggaggccctggagatcccccggcccctgcgggccctggaccagaccccaggcagctccatggacaacctggacagctctgtgacaggcaaggccttcaccagcagccagaggccccggcccaccagccccttcagcacagacagcaacaccagcgctgccctgagccagagccagaggccccggcccaccaagaagcacaagggcggccgcatggaccagcagcctgccctgccccacagaagagagggcatgacagatgaggaggccctggtgccctacagcaagcccagcttccccagccctgggggccacagcagcagcggcacagccagcagcaagggcagcacaggccccaggaagacagaggtgctgcgggccggccaccagagaaatgccagtgacctgctggacatcggctacatgggcagcaacagccagggccagttcaccggggagctgtag

SEQ ID NO: 133725 - DNA, 4137 bp, Artificial Sequence
  derived and/or modified sequence
atgagcctgctgatgttcacccagctgctgctgtgcggcttcctgtacgtgagagttgatggcagcagactccggcaggaagatttcccaccaaggattgtcgagcatccctcggacgtaatagtatccaagggtgagcccacgaccctcaactgcaaagcagagggtaggccaacccctacaatagagtggtacaaggatggggagagggtggaaacggataaagacgatccaaggtcgcacaggatgttgctgccctccggctccctgtttttcctccgcatcgtgcacggtaggaggtccaagccagatgagggatcctacgtgtgcgtggcaagaaattatctgggcgaggcggtgtctcgcaacgccagcctggaggttgccctgctgcgggacgactttcgtcaaaaccccaccgacgtggtggtcgctgccggagagccggcaattttagaatgccaacctccgaggggtcaccctgaacccacaatctactggaagaaggataaggtccggattgacgataaagaggaacgcataagcattagaggaggcaagttgatgatatctaacaccagaaagtccgacgctgggatgtacacctgcgtgggtactaacatggtgggcgagcgggattccgatccagctgagctaaccgtgttcgagcgccctacattcctgaggcgccctatcaaccaggtggtgctagaagaagaggcagtcgaattcaggtgtcaggtccagggcgatccacagcctacagtccggtggaaaaaggatgatgctgacctgcctagaggaagatatgacataaaagatgattatacattgaggataaagaaaacgatgagcactgacgaaggaacatacatgtgcatcgccgaaaatcgagtcggaaagatggaagccagcgccaccttgaccgttagagccccacctcaatttgtggttaggccaagagatcaaattgttgcacagggcagaactgttactttcccatgtgagacaaaggggaatccccagccagctgtcttctggcagaaggaaggcagtcagaatctgctgtttccaaatcaaccacagcagcctaattctagatgctcagtatcaccaacaggggatctgaccatcactaatattcaacgcagcgacgctggatactatatttgtcaggcccttacagttgccgggtctatcctcgcaaaggctcaattagaagtgactgacgtgctgaccgatcgaccgccaccaatcatactgcaggggcctgctaatcaaacacttgctgtggatgggactgccctgttgaaatgcaaagcaaccggtgaccccctccctgtgatatcctggctgaaggagggcttcacctttcccggacgggatcctcgggctactattcaggagcagggcacacttcagatcaagaaccttaggattagcgacaccgggacatatacctgcgttgccacctcctctagtggagaaaccagctggtctgccgtattagatgtgactgagtccggcgctactatctctaagaactacgacctgtccgaccttcctggacctccttccaagccccaggtcaccgacgtgaccaaaaactcagtgaccctgagttggcaaccgggcacccctggcaccctccccgcgtcagcctacatcatagaggctttctctcagtccgtgtcaaactcatggcagacagtagccaaccacgtgaagaccacgctttacaccgtcagaggcctgagacctaataccatttacctcttcatggtgagggcaatcaatccccaggggctctccgacccaagtcccatgtcggatcccgttcggactcaagacatttctcctccagcgcagggcgtggaccaccgtcaggtccagaaagagctcggcgacgtgttagtgcgtttacataatcctgtagtgctgacccccactacagttcaggtgacttggaccgtagacaggcaacctcagttcatccaaggttatcgcgtaatgtatcgtcagacatcaggactgcaggccactagttcctggcagaatctggacgcaaaggtgccaacggagcgttctgccgtgctcgttaacctgaaaaagggcgtcacctatgaaattaaggtccgcccctattttaatgagttccaaggcatggacagcgagtcaaaaactgtccggaccactgaagaggcaccttcagcgcctccacagtcagtgacggtactgaccgtgggaagttataactctacaagtatatcagtgagctgggatcccccaccaccagaccaccagaacggaattattcaggaatataaaatatggtgtctcggaaatgagaccagattccacattaataaaacagtggacgctgcaatacgaagcgtcatcataggtgggctgttccctggtatacagtatagagttgaggtcgctgcctccacttctgccggcgtgggtgtgaagtccgagcctcagccgattattatagggagacgtaatgaggtggtgattactgagaataataactccattacagaacagattacagatgttgtgaaacaaccggcttttatagcaggtattgggggggcgtgctgggtgatcctgatgggcttttccatctggctatactggaggagaaaaaagaggaaggggcttagtaattacgcggtcacattccaaagaggggatggtggactgatgtcaaacggttcgagaccgggcttgctgaatgccggcgaccccagctatccttggctggcggacagctggccagctacatcattaccagtcaacaattccaattctggccccaacgaaattgggaacttcggtcggggagatgtgctccctcccgttcccggtcagggcgacaagacagcaacaatgctctctgatggagccatctattcctccatcgacttcactactaagacgagttacaactctagctcgcagataacacaggccaccccctatgctacgacacagatcttgcactctaacagcattcatgagctggcggtggacctccccgacccacagtggaagtccagcatacagcagaaaaccgacctgatgggattcgggtactctctgcccgaccaaaataaggggaacaacggtggaaaaggagggaaaaagaagaagaataagaacagcagcaagccgcaaaaaaataatggaagtacttgggctaatgtacctctgccgcctcctccagtccaaccgcttccaggcaccgaactggaacattacgccgtcgagcagcaggaaaacggatacgacagtgactcttggtgtcccccattaccagtgcagacttacctacatcagggcctcgaggatgagctggaagaagatgatgacagagtgccaacacctccagtgaggggggtggcgtcttcgcccgctatttcttttgggcaacagagtacggcaaccttaaccccaagcccccgagaggaaatgcagccaatgttacaggcccatctcgatgagctcacccgagcctaccagtttgacattgccaagcagacatggcacattcagagcaacaatcagccacctcagcctccagtgcctccactgggctatgtctccggagcgcttatttcagacttagaaactgatgtagccgatgatgacgctgatgatgaagaagaagccttagaaatccctaggcccctccgggcgcttgaccagaccccgggatccagtatggataatctagatagtagcgtgaccgggaaagctttcactagctctcagagaccacgacctacatctcctttctccactgattccaatacatccgcagcgctgagccagagtcaacgtcctaggcccactaagaaacacaaaggaggtagaatggatcagcagcccgcactgcctcacaggcgagagggaatgacggacgaagaagccttggtcccctatagcaaaccgtcctttccgagtcctggcgggcactcttcttcaggaacggcttcgagcaaaggctctaccggtcctcgcaaaaccgaggtgctgcgagcgggacaccagcgaaatgcttccgatcttctcgatattgggtatatgggctccaattcgcaaggtcagttcacgggagaactctag

SEQ ID NO: 133726 - DNA, 4137 bp, Artificial Sequence
  derived and/or modified sequence
atgtccttgttgatgttcactcagttattgctgtgcgggtttctctatgtacgggtcgatggttcccgtttgagacaggaggatttccctccaaggattgtggagcacccctccgatgtcattgtgtccaaaggagaacccaccacccttaattgtaaggccgagggacgccctacacccaccatcgagtggtacaaagacggtgaacgagtggagactgacaaggacgatccccgttcccataggatgctgttgcccagcggtagtctcttcttcctgcggatcgtccacggcagaaggtcaaaaccagatgaaggctcttatgtctgtgttgccaggaattatcttggtgaggctgtgtcccgtaatgcatctctggaggttgccctgctgagggatgacttcaggcagaacccaaccgatgtggttgtcgcagccggtgagcccgctatattggagtgtcaacccccacggggacatccggagcccaccatctactggaaaaaggacaaggtgcgaatcgatgataaggaggagcggattagtatccgcggaggaaagctgatgatcagtaacaccaggaaatcagatgccggaatgtatacttgcgtgggcaccaatatggtgggcgaacgagattctgatccagcagagttaacggtgttcgagcgccctactttcctgcgtaggcccataaaccaagtcgttctggaggaagaagcggtggagtttcgatgccaggtgcaaggagaccctcagccaactgtccggtggaagaaagacgacgctgatctgccacggggtcgctatgacatcaaagatgattatactcttaggattaaaaaaacgatgtccaccgacgaggggacatacatgtgtatcgctgagaaccgcgtgggcaagatggaagcctctgccacactcacagtccgcgcacctccacaattcgtagtccgccctcgagatcagattgtggcccagggtcgcacagtcactttcccctgtgagacaaaggggaacccccaacctgctgtgttttggcagaaggagggaagccaaaacctcctgtttcctaaccagccacagcagccaaattcccgatgcagtgtgtcaccaaccggggatttaactatcacgaatatccagagatctgatgccggttactatatctgccaagcactgacggtggcaggaagcatactggcaaaggcacaacttgaggttaccgatgttctgaccgaccgacctcctccgatcatccttcaaggaccggcaaatcagaccctggccgtcgatggtacggctttgctgaaatgtaaggccaccggcgaccccctccccgttatctcatggctgaaggaagggtttaccttccccggacgggacccacgagctactattcaggaacaagggacactccagattaaaaatctgcgaatttctgatactgggacctacacttgcgtcgccacctcaagttctggcgagacctcgtggtcagctgtcctggatgtgaccgaatctggggctacaatcagcaagaactacgacttatcagacctgccaggcccaccaagcaaacctcaggtgacggatgtgaccaagaactctgttactcttagctggcagcccggaaccccagggacactgccagccagtgcttacatcattgaagccttctcccagtccgttagcaattcctggcagactgtggcgaatcatgtgaagaccaccttatacaccgtgcgcggactgagacctaacacaatttacctgtttatggtgagggcgattaacccacagggcctgagtgacccaagccctatgtctgaccccgtaagaacgcaggacatttcaccgccagcgcagggagttgatcaccgacaagtgcagaaggaattaggtgatgtcctcgtccgacttcacaacccggtcgtgctgacaccaaccacagtgcaggtaacttggactgtggaccgacagccgcagtttatacagggctatcgggttatgtatcggcagacatccgggcttcaagccacatcctcttggcagaaccttgatgcaaaagtccctactgaacgatctgccgtattggtgaatctgaagaagggtgtgacttacgaaattaaggtgcgcccttatttcaatgagttccaggggatggactccgagtctaagacggtgagaacgaccgaagaagcgccaagtgctccaccacaaagcgttacagttctgaccgtgggttcctacaattccaccagcatctcagtttcatgggatcccccaccacccgatcatcagaatggcattatccaggaatataaaatttggtgcctaggcaacgaaacccgttttcacatcaataagactgtcgatgctgccattcgctcagtgattattggcggactctttcctggaattcagtatagggttgaggtagccgcaagcaccagcgccggagtgggggtcaaaagcgaacctcagcctattattattggccgaaggaacgaagtcgttataaccgagaacaataattccatcactgaacaaatcacggacgtcgtgaagcaaccggcatttatcgcgggaattgggggagcttgttgggtgatactgatgggcttttcgatctggctgtactggaggaggaagaaaaggaaggggctgagtaattacgcagttacattccagcgaggcgatggcggtctgatgtcgaacggctcgaggcctggcctgctgaatgccggagacccttcatacccttggctagccgactcctggccagcaacatccctgccagtgaacaatagcaattccggcccaaatgaaataggaaacttcggcaggggtgacgtgttgcccccagtgccaggccagggtgacaagaccgcaacgatgctgtctgatggggctatatatagctccattgacttcaccacgaagacatcgtataacagcagcagccagatcacccaggcaactccttatgccactacacagatcctacactctaactcaatccatgagctggcagttgacttaccagacccacagtggaagagttcaatccagcaaaagaccgatctaatggggttcgggtacagcctcccagatcagaacaagggaaataacggtggtaaaggcggaaagaagaaaaaaaataaaaatagttcaaaaccccaaaaaaacaacgggagtacctgggccaacgtgcctcttcccccaccccctgtgcagcccttacctggaactgagctggagcactacgccgtcgaacagcaggaaaacggctatgatagcgacagctggtgcccccctttgccggtgcagacttacctgcaccagggcttggaagacgagttggaggaagacgacgaccgagttccgacacctcctgttcgtggagtggcttccagtccagcaatctcattcggacagcagtcaaccgcaacattgaccccgagccctagggaagaaatgcagcctatgctccaggcacatttggacgaattaacacgggcatatcagttcgacatcgctaaacagacctggcatatccagtccaacaaccagccccctcagcccccagttccccctcttggttatgtgtcgggcgctctgatctcagacctggaaactgacgtggccgacgatgatgcagacgacgaggaggaagcgctggagattcctcggcctctgcgggcactggaccagacaccgggaagttctatggataatctggattcctccgttactggcaaggcttttacttctagccagcgcccacggcctaccagtcccttttcgacggatagcaatacgtcagcagccctgtcccagtcccagaggccaaggcccacgaaaaaacacaagggaggaagaatggatcagcagcccgcattaccacacaggcgcgaggggatgaccgacgaggaagcactggtgccatattcaaagccaagcttcccttctcctggaggacattcctcaagcggaacagcttcaagcaaagggtcaactggacccagaaaaacagaagtgctcagagctgggcatcagagaaacgcatccgaccttctggacatcgggtatatgggcagcaactcacagggtcagtttacgggcgaattgtag

SEQ ID NO: 133727 - DNA, 8946 bp, Artificial Sequence
  derived and/or modified sequence
ggcgaggggcctcagcgcgcctggcgctggactgagcgctccctttctccgccgcgcccgggctgggctctcacgcccgtctctgctcgcgcccgcagccgcctggtgcactatcctcagaggcggcaccgcgggggtgtctgcagcctcggcctccgcccggcccctccctccctccctccctccctcgctccttccctgcctccctcaccacgtaggagttcggattctccacccgaatcgtcctgatttcccttctcctctcttttggaaaccggagaggtggagggagggcaacaccgctgcaaaggagaggcccgccaagtctgcccgcctgcaaagtgttgctttgacacattcttattatggaagttaagtaaaaatatagacatattaaaaaataactccggacgtggagctgctacggagaaggaaaccgggggaaagaaaaccagtaggcaggccaatggtttttcggcagcgcgctggcaagtttgtggaacactttctaggaattaggtcttttcctcccccttcatcatcttgacttctgaaggaagaacttggctttggattgcagtggagcctaaggagagagggttagacacactcgaataatccctctggctgggctgaatttgtgggaatttaggaagccagagtgctggaaatacagcagcctttgaagtaccctctgttaatttggatggatctcagtgtgccccgttcgagacctctccaccaaccccttctgatcttgcgatttgctcttcttgactttaattagtatctaggaaagtctaaactttggacctacctctttttttgatactcatttttgtacttttgctctctgggattggtttcttaaagaatctggatcctttttaatatgtcaaaatgagtctgctgatgtttacacaactactgctctgtggatttttatatgttcgggttgatggatcgcgtcttcgccaggaggactttcccccgcggattgtggagcatccttccgatgtcatcgtctctaagggcgagcccacgactctgaactgcaaggcggagggccggccaacgcccaccattgagtggtacaaagatggggagcgagtggagactgacaaggacgatccccggtcccacaggatgcttctgcccagcggatccttattcttcttgcgcatcgtgcacgggcgcaggagtaaacctgatgaaggaagctacgtttgtgttgcgaggaactatcttggtgaagcagtgagtcgaaatgcgtctctggaagtggcattgttacgagatgacttccgacaaaaccccacagatgttgtagtggcagctggagagcctgcaatcctggagtgccagcctccccggggacacccagaacccaccatctactggaaaaaagacaaagttcgaattgatgacaaggaagaaagaataagtatccgtggtggaaaactgatgatctccaataccaggaaaagtgatgcagggatgtatacttgtgttggtaccaatatggtgggagaaagggacagtgacccagcagagctgactgtctttgaacgacccacatttctcaggaggccaattaaccaggtggtactggaggaagaagctgtagaatttcgttgtcaagtccaaggagatcctcaaccaactgtgaggtggaaaaaggatgatgcagacttgccaagaggaaggtatgacatcaaagacgattacacactaagaattaaaaagaccatgagtacagatgaaggcacctatatgtgtattgctgagaatcgggttggaaaaatggaagcctctgctacactcaccgtccgagctcccccacagtttgtggttcggccaagagatcagattgttgctcaaggtcgaacagtgacatttccctgtgaaactaaaggaaacccacagccagctgttttttggcagaaagaaggcagccagaacctacttttcccaaaccaaccccagcagcccaacagtagatgctcagtgtcaccaactggagacctcacaatcaccaacattcaacgttccgacgcgggttactacatctgccaggctttaactgtggcaggaagcattttagcaaaagctcaactggaggttactgatgttttgacagatagacctccacctataattctacaaggcccagccaaccaaacgctggcagtggatggtacagcgttactgaaatgtaaagccactggtgatcctcttcctgtaattagctggttaaaggagggatttacttttccgggtagagatccaagagcaacaattcaagagcaaggcacactgcagattaagaatttacggatttctgatactggcacttatacttgtgtggctacaagttcaagtggagagacttcctggagtgcagtgctggatgtgacagagtctggagcaacaatcagtaaaaactatgatttaagtgacctgccagggccaccatccaaaccgcaggtcactgatgttactaagaacagtgtcaccttgtcctggcagccaggtacccctggaacccttccagcaagtgcatatatcattgaggctttcagccaatcagtgagcaacagctggcagaccgtggcaaaccatgtaaagaccaccctctatactgtaagaggactgcggcccaatacaatctacttattcatggtcagagcgatcaacccccaaggtctcagtgacccaagtcccatgtcagatcctgtgcgcacacaagatatcagcccaccagcacaaggagtggaccacaggcaagtgcagaaagagctaggagatgtccttgtccgtcttcataatccagttgtgctgactcccaccacggttcaggtcacatggacggttgatcgccaaccccagtttatccaaggctaccgagtgatgtatcgtcagacttcaggtctgcaggcgacatcttcgtggcagaatttagatgccaaagtcccgactgaacgaagtgctgtcttagtcaacctgaaaaagggggtgacttatgaaattaaagtacggccatattttaatgagttccaaggaatggatagtgaatctaaaacggttcgtactactgaagaagccccaagtgccccaccacagtctgtcactgtactgacagttggaagctacaatagcacaagtattagtgtttcctgggatcctcctcctccagatcaccagaatggaattatccaagaatacaagatctggtgtctaggaaatgaaacgcgattccatatcaacaaaactgtggatgcagccattcggtccgtaataattggtggattattcccaggtattcaataccgggtagaggttgcagctagtaccagtgcaggggttggagtaaagagtgagccacagccaataataatcgggagacgcaatgaagttgtcattactgaaaacaataacagcataactgagcaaatcactgatgtggtgaagcaaccagcctttatagctggtattggtggtgcctgctgggtaattctgatgggttttagcatatggttgtattggcgaagaaagaagaggaagggactcagtaattatgctgttacgtttcaaagaggagatggaggactaatgagcaatggaagccgtccaggtcttctcaatgctggtgatcccagctatccatggcttgctgattcttggccagccacgagcttgccagtaaataatagcaacagtggcccaaatgagattggaaattttggccgtggagatgtgctgccaccagttccaggccaaggggataaaacagcaacgatgctctcagatggagccatttatagtagcattgacttcactaccaaaaccagttacaacagttccagccaaataacacaggctaccccatatgccacgacacagatcttgcattccaacagcatacatgaattggctgtcgatctgcctgatccacaatggaaaagctcaattcagcaaaaaacagatctgatgggatttggttattctctacctgatcagaacaaaggtaacaatggtgggaaaggtggaaaaaagaagaaaaataaaaactcttctaaaccacagaaaaacaatggatccacttgggccaatgtccctctacctccccccccagtccagccccttcctggcacggagctggaacactatgcagtggaacaacaagaaaatggctatgacagtgatagctggtgcccaccattgccagtacaaacttacttacaccaaggtctggaagatgaactggaagaagatgatgatagggtcccaacacctcctgttcgaggcgtggcttcttctcctgctatctcctttggacagcagtccactgcaactcttactccatccccacgggaagagatgcaacccatgctgcaggctcacctggatgagttgacaagagcctatcagtttgatatagcaaaacaaacatggcacattcaaagcaataatcaacctccacagcctccagttccaccgttaggttatgtgtctggagccttgatttctgatttggaaacggatgttgcagatgatgatgccgacgacgaagaggaagctttagaaatccccaggcccctgagagcactggaccagactcctggatccagcatggacaatctagacagctctgtgacaggaaaagcctttacctcctctcaaagacctcgacctaccagcccattttctactgacagtaacaccagtgcagccctgagtcaaagtcagaggcctcggcccactaaaaaacacaagggagggcggatggaccaacaaccagcattgcctcatcgaagggaaggaatgacagatgaggaggccttggtgccctatagcaagcccagtttcccatctccaggtggccacagctcatcaggaacagcttcttctaagggatccactggacctaggaaaaccgaggtgttgagagcaggccaccagcgcaatgccagcgaccttcttgacataggatatatgggctccaacagtcaaggacagtttacaggtgaattatagtaaatgagaggagacatacaaagctgctctgaaggaccatcaggtccggactcatggaagtgatgactctaaacagtgcaatgaacaatttatttatgtactattaaaagaactgtaaatgcaatgtaaagacacacagccacacatatcccacagatattttcattgtgttcttctcttaagtacaccacccaccttaactctttcttgtcaggagtatataaaaaagaaagaaaacaaaactcgccctacaggaagaaaaggattctcctctgtatataatttcttttgtgcattgctatgcaagctcactctttttagctctgctcatattattgtctgttcttattggtctgttgtactatatgtgaattaataggctgtggtgccatatattaacttttaattgtgtaacttttatgtttaaattttgcactgcaattttatttggtgataagcacaaatctctactcctcatgacatgaagaaaaagactgaatgtgaagggagtttctgtactgtaagctagattggataatgatggctgtaacaaatcatgttagatggttttcagttggggtgtagaaataggaagatgcaaaggaacaatggtgttggcaaagtcttctttgaatatcagggactgagtcaataaaaaaaatagtagaaaggtggcttttactattgacaaaagccggggtcaaaaaaagtagtttaagtcttaagactgaatatgcattaaagtatgcaggtagcaaagatgtaataaatttgcttaaaaaaagaaattaaagttttatttagaatcaattttacctgtcattgtaattgacccatctgagaattacaataagcaagaggaaattaaggtgttttgcaagagctgtatttatattacagttttttaaaaacattttctgaattatcgtaattaagctctccaactcgttaagtcagaatataatatgaagttccccaaggaaacgaacaaaatgaactctagaatatctagcaaatagttaaagaagcaatttattattagggcatactcgggctgtttccaaatataaactctattgcaatatcttatttcatctttctaatacatgtacagtgcacactagaggatagagctgcatcacttaaattcatgacttaaaaaataatacagtttatatacaacttgttttttatttgattaagaagtgaagtttacgccacccaatgtatagccaaattgtacgtgcttaaaaaacagtgccgagagtatgttcagttcgcagtaagtagatttattggaataaatattctatggtacattctcagaaattggcttccaactaaaatacgtttgacccattttgaataaggaaattgaaaagaaaaatttaaaaggagaaaaaaatgcatgtttataaactttttaaataaaaccagaccttgtaagtggacattaataattgtcctgcctcatttgttttcacgactttgacaacaagaagttcctgaacattagtcatgtatgctcagaataaatgtgactttgaaatatatgttagctactgtacatgtatagtcagtcaagtagaagaggaccttcctgaaattcccacttgtgacattttcccatgggtttcctacacaatcttaaattttatttctgtctatactttctcaaatttttcctatgataagttcagttgttggtactcttctaaaaatattcaacgtgattaggatcagttctaaaatacgggacccctttgagtgacaattcgcactccatgcattattggctcagtagccaatttttgtcacgtcgttataacaaggagatgacataattaaacatttccatcctttctattccctgagactgcatcagcacaggcaagtatagaatgtaatgttcttcatgggccccaccagctttttggtgccatgtaatttatttcttcgctgaagagaaaaagaattctgagacacagttattaaaccctttatcaactttctaccatcagtgcctgaattctaatgcagtgtgatttctctgggacaaagagactgaggaagatgaaaagtttcttcaaagagtgaatacatacttattcacaactctaggatgtgaggactttaaatatctctttatgaagttccctgcctaacctctttctatttaaaggcaaacaaatttcgaagaggttttgtgttccctctttatgtttctctatgacccagtttagtctaaaaccttagttcattacatatacaacacatagcctttgatccctggtaactggcaggtgttggtgattaataaaccaaggcttcaaagtgaagtatgtgtgtgcagatgacttttggaataacgtgggcatagcatcataccttcctgattgtcttcagcatataaaaattaactgttgtagttaaaattatgtcagtgcagagcttgtggttacttggaatgttctttcagaatagtccatgttgcctattaaacctagttttaaacacattgggcagtcaatttatgcacccaaaatatcaccctcaggtagattgagggcaagataaaatgctgtatgtagctatacaaaggaattcagaaacattactggaaagcaaagcctttgtcagcttgctactgacaaagtagtaaaaagctactaatcagtgttgagtcagatgtcaacagaaaaatacaaatacctatgagagccacagcagtttctcgtttcatagccgattcaatgaatatgattagaaattcactgagctcactcttgcaggtttaaatggaggcctgcataaggactgcaagaggaaatctgggtgggagagaatgtaatctgatcttgcactcataggcaatgctgcaatgcaatcatgtccaatacaagcacagcttcattcataacaggaaacgtcttctttgggaaaatagctctattggtgcccaaactcaggtatgccagtgtatgcaggtggagtcgccctacccctcttccaaacatgtcctgtgagatttttaaaataagatgggatagtacaggggcatgaaaagaattgattccttcacaggatttgaatccagttcaagggagaatgtagaaaattcaaaaccaacatataaggtatcacacaaccaagaaaagtaaaaccattgcaagtttacttgcgttgagtacaaaacagatttaatggtgttctatgtcatagtttaatgctctgggtatttaaatatgttttcaacaggatttgagttgaaagtttgtaatgtgctttgatggaacacctctcaatttctattcaataaacttatgtaattgtccattgacaatataatgataacagtaccattgaactctaaactgtggtttatcttcactactgggaagcaactgtgcatcagtattaaagatatgcagaaacataatattcactaatttgttcatctgcttctgtatattgtttatggaattacatggcaagaactgttctaaagcaacatgtctttccacattattttagaggtgaaattacttttgttttgcttctctataatgtgtacttcaaatgaaacaccatacttttttctaaaaaaagatgttcaatttactaatttttttaaatctcataatttaaaaagcatttgttgtgattttaaagtgttgcaagaaaagggattttgtggccgtgggtagactttttatactttgttttatagatggattttttttaactgtagtttgtttaagtcaccaagcagcatccaaaatcttaatgtgtttcatttgatgttgttagatcagagaagaaattggcataaaatcggttaatagtattgtcaaagaattgtgtattgtgtactcactgggaaaaaataaaatatattcacatttcaaa

SEQ ID NO: 133728 - DNA, 4137 bp, Artificial Sequence
  derived and/or modified sequence
atgagcctgctgatgttcacccagctgctgctgtgcggcttcctgtacgtgagagtggacggcagcagactgagacaggaggacttcccccccagaatcgtggagcaccccagcgacgtgatcgtgagcaagggcgagcccaccaccctgaactgcaaggccgagggcagacccacccccaccatcgagtggtacaaggacggcgagagagtggagaccgacaaggacgaccccagaagccacagaatgctgctgcccagcggcagcctgttcttcctgagaatcgtgcacggcagaagaagcaagcccgacgagggcagctacgtgtgcgtggccagaaactacctgggcgaggccgtgagcagaaacgccagcctggaggtggccctgctgagagacgacttcagacagaaccccaccgacgtggtggtggccgccggcgagcccgccatcctggagtgccagccccccagaggccaccccgagcccaccatctactggaagaaggacaaggtgagaatcgacgacaaggaggagagaatcagcatcagaggcggcaagctgatgatcagcaacaccagaaagagcgacgccggcatgtacacctgcgtgggcaccaacatggtgggcgagagagacagcgaccccgccgagctgaccgtgttcgagagacccaccttcctgagaagacccatcaaccaggtggtgctggaggaggaggccgtggagttcagatgccaggtgcagggcgacccccagcccaccgtgagatggaagaaggacgacgccgacctgcccagaggcagatacgacatcaaggacgactacaccctgagaatcaagaagaccatgagcaccgacgagggcacctacatgtgcatcgccgagaacagagtgggcaagatggaggccagcgccaccctgaccgtgagagcccccccccagttcgtggtgagacccagagaccagatcgtggcccagggcagaaccgtgaccttcccctgcgagaccaagggcaacccccagcccgccgtgttctggcagaaggagggcagccagaacctgctgttccccaaccagccccagcagcccaacagcagatgcagcgtgagccccaccggcgacctgaccatcaccaacatccagagaagcgacgccggctactacatctgccaggccctgaccgtggccggcagcatcctggccaaggcccagctggaggtgaccgacgtgctgaccgacagacccccccccatcatcctgcagggccccgccaaccagaccctggccgtggacggcaccgccctgctgaagtgcaaggccaccggcgaccccctgcccgtgatcagctggctgaaggagggcttcaccttccccggcagagaccccagagccaccatccaggagcagggcaccctgcagatcaagaacctgagaatcagcgacaccggcacctacacctgcgtggccaccagcagcagcggcgagaccagctggagcgccgtgctggacgtgaccgagagcggcgccaccatcagcaagaactacgacctgagcgacctgcccggcccccccagcaagccccaggtgaccgacgtgaccaagaacagcgtgaccctgagctggcagcccggcacccccggcaccctgcccgccagcgcctacatcatcgaggccttcagccagagcgtgagcaacagctggcagaccgtggccaaccacgtgaagaccaccctgtacaccgtgagaggcctgagacccaacaccatctacctgttcatggtgagagccatcaacccccagggcctgagcgaccccagccccatgagcgaccccgtgagaacccaggacatcagcccccccgcccagggcgtggaccacagacaggtgcagaaggagctgggcgacgtgctggtgagactgcacaaccccgtggtgctgacccccaccaccgtgcaggtgacctggaccgtggacagacagccccagttcatccagggctacagagtgatgtacagacagaccagcggcctgcaggccaccagcagctggcagaacctggacgccaaggtgcccaccgagagaagcgccgtgctggtgaacctgaagaagggcgtgacctacgagatcaaggtgagaccctacttcaacgagttccagggcatggacagcgagagcaagaccgtgagaaccaccgaggaggcccccagcgcccccccccagagcgtgaccgtgctgaccgtgggcagctacaacagcaccagcatcagcgtgagctgggacccccccccccccgaccaccagaacggcatcatccaggagtacaagatctggtgcctgggcaacgagaccagattccacatcaacaagaccgtggacgccgccatcagaagcgtgatcatcggcggcctgttccccggcatccagtacagagtggaggtggccgccagcaccagcgccggcgtgggcgtgaagagcgagccccagcccatcatcatcggcagaagaaacgaggtggtgatcaccgagaacaacaacagcatcaccgagcagatcaccgacgtggtgaagcagcccgccttcatcgccggcatcggcggcgcctgctgggtgatcctgatgggcttcagcatctggctgtactggagaagaaagaagagaaagggcctgagcaactacgccgtgaccttccagagaggcgacggcggcctgatgagcaacggcagcagacccggcctgctgaacgccggcgaccccagctacccctggctggccgacagctggcccgccaccagcctgcccgtgaacaacagcaacagcggccccaacgagatcggcaacttcggcagaggcgacgtgctgccccccgtgcccggccagggcgacaagaccgccaccatgctgagcgacggcgccatctacagcagcatcgacttcaccaccaagaccagctacaacagcagcagccagatcacccaggccaccccctacgccaccacccagatcctgcacagcaacagcatccacgagctggccgtggacctgcccgacccccagtggaagagcagcatccagcagaagaccgacctgatgggcttcggctacagcctgcccgaccagaacaagggcaacaacggcggcaagggcggcaagaagaagaagaacaagaacagcagcaagccccagaagaacaacggcagcacctgggccaacgtgcccctgccccccccccccgtgcagcccctgcccggcaccgagctggagcactacgccgtggagcagcaggagaacggctacgacagcgacagctggtgcccccccctgcccgtgcagacctacctgcaccagggcctggaggacgagctggaggaggacgacgacagagtgcccaccccccccgtgagaggcgtggccagcagccccgccatcagcttcggccagcagagcaccgccaccctgacccccagccccagagaggagatgcagcccatgctgcaggcccacctggacgagctgaccagagcctaccagttcgacatcgccaagcagacctggcacatccagagcaacaaccagcccccccagccccccgtgccccccctgggctacgtgagcggcgccctgatcagcgacctggagaccgacgtggccgacgacgacgccgacgacgaggaggaggccctggagatccccagacccctgagagccctggaccagacccccggcagcagcatggacaacctggacagcagcgtgaccggcaaggccttcaccagcagccagagacccagacccaccagccccttcagcaccgacagcaacaccagcgccgccctgagccagagccagagacccagacccaccaagaagcacaagggcggcagaatggaccagcagcccgccctgccccacagaagagagggcatgaccgacgaggaggccctggtgccctacagcaagcccagcttccccagccccggcggccacagcagcagcggcaccgccagcagcaagggcagcaccggccccagaaagaccgaggtgctgagagccggccaccagagaaacgccagcgacctgctggacatcggctacatgggcagcaacagccagggccagttcaccggcgagctgtag

SEQ ID NO: 133729 - protein, 548 aa, Artificial Sequence
  derived and/or modified sequence
MNEGAPGDSDLETEARVPWSIMGHCLRTGQARMSATPTPAGEGARSSSTCSSLSRLFWSQLEHINWDGATAKNFINLREFFSFLLPALRKAQIEIIPCKICGDKSSGIHYGVITCEGCKGFFRRSQQSNATYSCPRQKNCLIDRTSRNRCQHCRLQKCLAVGMSRDAVKFGRMSKKQRDSLYAEVQKHRMQQQQRDHQQQPGEAEPLTPTYNISANGLTELHDDLSNYIDGHTPEGSKADSAVSSFYLDIQPSPDQSGLDINGIKPEPICDYTPASGFFPYCSFTNGETSPTVSMAELEHLAQNISKSHLETCQYLREELQQITWQTFLQEEIENYQNKQREVMWQLCAIKITEAIQYVVEFAKRIDGFMELCQNDQIVLLKAGSLEVVFIRMCRAFDSQNNTVYFDGKYASPDVFKSLGCEDFISFVFEFGKSLCSMHLTEDEIALFSAFVLMSADRSWLQEKVKIEKLQQKIQLALQHVLQKNHREDGILTKLICKVSTLRALCGRHTEKLMAFKAIYPDIVRLHFPPLYKELFTSEFEPAMQIDG

SEQ ID NO: 133730 - DNA, 10974 bp, Artificial Sequence
  derived and/or modified sequence
gattcacagggcctctgagcattatcccccatactcctccccatcattctccacccagctgttggagccatctgtctgatcaccttggactccatagtacactggggcaaagcacagccccagtttctggaggcagatgggtaaccaggaaaaggcatgaatgagggggccccaggagacagtgacttagagactgaggcaagagtgccgtggtcaatcatgggtcattgtcttcgaactggacaggccagaatgtctgccacacccacacctgcaggtgaaggagccagaagctcttcaacctgtagctccctgagcaggctgttctggtctcaacttgagcacataaactgggatggagccacagccaagaactttattaatttaagggagttcttctcttttctgctccctgcattgagaaaagctcaaattgaaattattccatgcaagatctgtggagacaaatcatcaggaatccattatggtgtcattacatgtgaaggctgcaagggctttttcaggagaagtcagcaaagcaatgccacctactcctgtcctcgtcagaagaactgtttgattgatcgaaccagtagaaaccgctgccaacactgtcgattacagaaatgccttgccgtagggatgtctcgagatgctgtaaaatttggccgaatgtcaaaaaagcagagagacagcttgtatgcagaagtacagaaacaccggatgcagcagcagcagcgcgaccaccagcagcagcctggagaggctgagccgctgacgcccacctacaacatctcggccaacgggctgacggaacttcacgacgacctcagtaactacattgacgggcacacccctgaggggagtaaggcagactccgccgtcagcagcttctacctggacatacagccttccccagaccagtcaggtcttgatatcaatggaatcaaaccagaaccaatatgtgactacacaccagcatcaggcttctttccctactgttcgttcaccaacggcgagacttccccaactgtgtccatggcagaattagaacaccttgcacagaatatatctaaatcgcatctggaaacctgccaatacttgagagaagagctccagcagataacgtggcagacctttttacaggaagaaattgagaactatcaaaacaagcagcgggaggtgatgtggcaattgtgtgccatcaaaattacagaagctatacagtatgtggtggagtttgccaaacgcattgatggatttatggaactgtgtcaaaatgatcaaattgtgcttctaaaagcaggttctctagaggtggtgtttatcagaatgtgccgtgcctttgactctcagaacaacaccgtgtactttgatgggaagtatgccagccccgacgtcttcaaatccttaggttgtgaagactttattagctttgtgtttgaatttggaaagagtttatgttctatgcacctgactgaagatgaaattgcattattttctgcatttgtactgatgtcagcagatcgctcatggctgcaagaaaaggtaaaaattgaaaaactgcaacagaaaattcagctagctcttcaacacgtcctacagaagaatcaccgagaagatggaatactaacaaagttaatatgcaaggtgtctacattaagagccttatgtggacgacatacagaaaagctaatggcatttaaagcaatatacccagacattgtgcgacttcattttcctccattatacaaggagttgttcacttcagaatttgagccagcaatgcaaattgatgggtaaatgttatcacctaagcacttctagaatgtctgaagtacaaacatgaaaaacaaacaaaaaaattaaccgagacactttatatggccctgcacagacctggagcgccacacactgcacatcttttggtgatcggggtcaggcaaaggaggggaaacaatgaaaacaaataaaagttgaacttgtttttctcatgcatatgatttccattatgcctacagatatggaccctttttctgtcttgacttcttgatcattgacctctgtttacaacaggaggagggtactaaagtcggaggatttccttttcttgtagctcactgcccacagactttctacagagtcaccaatctgtcagtaacaacagagagtccagcaataatcggtgactggtgtgcatagcggaggttgcggcattactttgcacaactagctctttgtttcatgaaggaagtttttattttttcaccgattattgccagtccgcaggatggcatgaaaagggtccatagcagtagcaacaatagcattataatatattacagggtaaatgggcatgaagactatatatagctaaaagagatattgtttatatattgttttaagtaatataaaatgtagttactggtgtagcttttcctgttgaattgataaggcactttcattttgcacctttttctttaaattaaatgctagcgtgttcactgtcgtgtcgcatgtgcaccagaaacacaagtttaactgagaaggcttggaaggtacgttgggaggtatttatgctgctgtttacaaaattatttttaagagactggctggtcatatctagaaatcaccacgttggattttttttttaacatgtgaatttggaattagaaacggaactctccctaaattatactttgctttttggtaagtttaatgatagatgtgtttatgcttcatacaaagttgaatgattgattggcgtggtggacatataccatcatgctcattttttttttttaaagctttttaaaatgccacctcatggaggcgagggggaggagaagctcattttacacaattcagtagttaaatatggactcggtctcaacttggaattcttatgctttgagaacaaatcaacaaccagaatatttattggaatctagcttttattataagaaggacccaaagattatatcctgagcaaatgcacactccccatgtgaggacatgaagtatttactttgtgaatgtttatgttcttggtataatctaggaaccctatgagtttatctcagagtgaactaattctagatttgttgtcaatagatgctataattcaagaatgttgctctccatatttgaaaaacgatggataggagggtgagggaagcatacaatgttgaaccagtttctcttatttaaatattaaatactttaagcctttaaagtgaagttgatgctagctgcaaacatttactcttgtatttatcttcactaggaaactgtggactgtaatttattttattaaatatttagaagattatttggcttgtgtgttcaggtgagaaatactgagttgtttttgtttaatttcatggtttttttttttttaatgatccctagtgggggaaggggaaaggaatagtctgataaacagatgtgcatattttaaaaacaagtgaccttttgggaatgtaggcatttagacgatgattttagtcgcactaggggtgggattcaaactactggtcaaagaccattttgtacagaaaagggaacatctccgatgggtgttaaggtaggagtttccatgcagccctttatgtctgagaaatagtctcctctgccattggggtccctgcggaatcttctacaggaattgcagctcttcacgtcatgctaggttaccagcatgggcttcccagagcacttcactctgtttctaactccactgacttttctgacttgtttcttgagggacttggaaaaggggaaggtattattcacacagatgtgtgtatgaagcctaaataacatccaactttttttccaaaaacatagtaagagtttaaccataaatagaagagtaatattcctttaaatttcttacaggcatgtaaaattttatgtgtttatagagagatgctaactgtcagcatatagtatttatattggggcaagaagggttaaatcaaatctttaatttaagtaagcatagttcctttaaagatcagtagtatttatactctgaaaagagtaccaagcttagttcagttatttattcatccattttttttctattgtttctcctctggggggaaatggtgttttgtttttgtttgagttttgtgttttagttttttggttttggttttgttttgtttttttgtcattcagattcactaaatttggggatggttttattaaagtatattaacttctttttaaccaaagctttctgaatatgaccagcctcaggtgctagcgcattaaagagcaactaaacctaattccagtgtcgatttgtgaaataataaaagctaattgaatttctctaagggtgagagagaacataatgatgaacttaaaaagaaattccttttcccagaagggattctgcatgtacctacaaacaatcatgctctaaccacagtaatagtcatgccatggtgacattgcttttacggtaaaccaagataggtaatatgatgcttcttcccaggtgtttctgaaagaaaagcagcggtggagcttaagagccaagtccactgattgacataataggatggaattgtagacagagacatgctccatgaaacaaggaaacaactgactactatttggatctaagttgggatctgatgttaaacaataaattcagtttaaaaaaaatatggagctcagaaaaggatgtgaaaaactttgcattttcctttcttcattattacaaaaacacctatgtgatgacataaaatacttgggtgatatcagaacaattatccttaatagtttttataattaaagtttcctaaacttcagtctccaatagtcttttaaggattggaaccacatcactgtcagccccgctgctacaatgcctttgtacaatttttttacataaggcaaataaggcttttgtacaaagcctgaataccttctgttccaatggtgtccaaatggttattatattgtgaaaaacctggccttggtcacaatgcaaacaaaagtacagatgaaagtgctttttggacagtttgcaaattgtgttaaagctacggattttttttaaagtgttcagcatcttaacgtgtattaaagctatggatttttttttaaagtcttcagcatcctaattcaccctttctaacttaagaaaaacatgacttaagacactgcttctaagtttggttgttctttatagtgtggatacccagttatctgtgagcgtatgggggtgggctgagggtcaggtgaggaaggagtgtgtgtgtgtgtgtgtgtgtgtgtgtgtgtgtgtgtgatttgcatgtgtatgatgtgtgtgcgtcggaccgcttctaggctactaagtgtcaatggaaaagaaaatgtattcaaaatacttaaatcaaaactagaagatggggaaaaaaagatttattctatacaaagccttgtctggaccactttagagagacttctatttttttaacccttctataaatatttgatggcacttgaaatattcctgcaataaaatgtgatttgtgtaaagaaaaaaagattttgtaatgtgaaacaaagaaagaaagtaatgtaattttctaaaaaaaaaaatacaaacaaacaaactttgtattattttcttgatggaatttgtctatctgtctttggaaaactttttatttcattgaatgtgccatagtagaaatgtgtgtttttagttttagactaaggaatagctagttgttgtgttccgacattccaaaatgcaaaacaacctagtagtatctttcatgaaaaggtttaagtagtatgtaagcttctctcattgttgcttttttgcacatgttcttcattcctctctagtgcaatatgtacatagagcacttgcgggtgtaccttgatccctcagggaaaaatacatatttgtacagttttttggggtttttttgttttttggttttttttgttttgccttttgtttttggctaaggaatgtcgatcgaatcacttgttattgttgaggggcagccagataataatcctaaagccactgtttccaacattgattgtttaaatcatatgtccttccaatgctattattttaagataataataaaaagttattttctgacagttctttgtgctgactggtgaaaaacaagggtaaataagcaccttataattgacttactgtgaatgacaatccatcttggtatcaacgatagaagccctatcattttggagttggggttaagagtcagaaacaatgtgctcagggatctcctaaaactcttaaaacagggtggccagtactactgggacaaattgtgttttttattattaataataatgataataatactatccctccaaggcacaagtgaactatatagaactgcgtgtgtgtaaactctttactctcgtctcattttgttgagtttagaacttgatgtgctcgtcagtcttgtgtttcaaaacactgaataacttccaaagcaaagttatgccagtgtgttcaaaagataaattaataatgtaccagcaaagagcatcattcaaagtatagtccttgcatattccagttaccatttctctaataattaaaatattcatgataaatatatatatagcatcatatgttaaaaactatttcaaattctacatattaaggatgaaaattttaaaatccagtaataagaggagagacctgcctatcagtacagtgatataggtaaaagatgaaatatgtttttaaaataccagcaattaactattgttttcatgggttctcctctagaagcaaaccaaaaattccttcatggaaaacaattcttacttctacatgtgtagtttatatctgatgcattacaagagctaatgtttaaagacaaaacaaaacctgcctgtatgacagcagcaactcgagccaacatttagtgttacatgttatatttttgaaataccgttttgttatcatattccacatattactttccataaagtcagagaagttcaatgtaattgttggctctgattcttccaccttgggatacacattcacaagaagatttatatattttcttactatgatagaggaacataatctgggaaaacttcccatgtctgtaagatgaaaaggatacctttaccatgttgtttttgataataaagaatatggaaaatggtagaaatctctcctctctatgtgtatttgtatatgtgtgtatacacacacacgttgacatttttacataacatgtgattgccacttcttataaagttatgatatagaaccccatgaaaacaactttatattatagatcaaataatgtgcccagaaacgcaattgcaacagtaaatcttgatctattggtaagagtctatgatacaggtcttcattctatccctaaacataatgttagtaaagaggttccatcagattgtattatagagaccttcctattgctatttatttttaagagatgagaagactgactagcaatgtctccacagtgcaattggtttcacttctgggtctgtctgtctgtttgtgtaggtgagatcagtgttgtcaggctctcagaataatttttaaaagaatccagaagcctgacttcacaccaagtagccatcctagatgggcgggggggatctccatgttcaaccaaaccctcagaacttagagcaataaatacattcagtcatttatttataaatgaatgacagaatattcaatccaaatagaaacaaccttttgtcagtgatgcaacataacatggagtcttatattgagaaagtgaatatgaatattttaaatagatgcctaggaaatctgtgtttgctgtttacatttaatgtactttgccacattagcagtaccacacttcttttactttcatccttctaagaactaatgaaagatagcttgctattagctttgacatgttgcacatgccattatgttgttctctaagaacaactaaattctctccagtgttcatgtgtgattcctttttcatcattattactttaatgtggatgaatactatttctaggaacttgattatcactgaacagattgcatatgtaaatgcagataattcttgagcaatatagtgaaaatgatttcacaaaaaaaatccatatgtactgtatacatcttcctgaatccaaaattctcctgttatccacacagtttgaaatctcatattaaacagtggtaaatttttaaacattaggacattagctggctgcttctataaatgtacctgtattgtctgcctgctccttttgtggagatgtgtttttgtattggatgtttgggccaatgggaggcttcaagctacaacatattttcccactttaaataatatttaacatatgacaaaccccagacaaggcttttaatatgtataaagaactgcagtgttaggtggtttatttgcaaactgttttcagtgttgtccatttttatggcacctttaacaatattcttgtttccaaagtacaaaaaaaataggttaaataatctagccataactgaatgtcaagcaataaaacaaatgacttttgtgcatagacttaaaaaatacaaattttagacatctgcatgtaaatgcaatctcttgtttactgctttcttcaacttgagcaatcgattccttatttactattaacttaagaacttgtaacggcctgtaaacattttctctcttactcttctttcaaatttacctgtccctgcttttgagtcataatatttaatgttgttctgcacatctctatacagttaactttttggctttcattctgtatagataagaaaatgttatattataaacagcctactcagtgcaaatatttatctgtttatcaaatccacaatatgctgtataataccggttttactatataatctattttagacatagctgtttagaactagagtgtgctatttttgtgtttttctgatgtgtggtgctagacaagttacttttgtgaacaacaaaaattatcccttttattcctagacaataccacctttgggtcttgttaatttcactgagtataactatatatttgtatatatatacatatatatatatatctacctatgcccaactggcagctgtatcagagtgctggatttgggacatgcttttctctttaaatacataatatcattatataaattattctagagtgtatttaattaggataaaattacttccttagtatggatatttgacatctatagggtgaatttgtttataaatatggctatatggaaacttattagcatttactttatgtttgctacttggctttacagcatatctcctaagctgaaaaataatttgccaggccttcaagatcctaaagaaacttgtttaatggagtaatatacttttttttcttattaaggaattgtattactggcacctaacacagttgtattcttagctcctattatagataatgggcatttacataaaatatcctagatggcttgatggcagaataaacctttcccctcctacctgagtcatgagaaggatggagacgtcctctgccataacatgggccataaagcaaattcgacatgggatgttctgtttcagtatgacctcaaccagttccatgaactgagtgaaggaccttcattttcaaagttatttaataagtagcttaattaagcctttctacccattctcccaagatctactggcattattgaaaagcaaagtttatcaaatatctaactaaggatgtagttaaccttattaaatattgattagaattgttctgtaatattactgaatttgtaagatctttagcaaagatttttgagcaatttataaatgtagagcaaatgtttctgtttactgcactttttgtaactgaaggtgataaattctcaagccatgattattggcttccatgcactgcaatatttatccacaattctagacattttccatttttgtggaagagttgctgttaccttaattataaatgcaattgtgtggttaatgagagctaatgctagtagttaaccttttaaagtggattggctacagttgagggagaaatctcttttaatataaatcacatcattccttaactgcctctcttggaaagagattgaaaccttttttttaaagcacgatttagcatcctaagcttcctgagggtagagattgtatctttttgcgtctgcacaatggctagcacatgtcagcatttgacaattgttaaatgataacaagtgtgccccaattaaaacgtttttcctgggttgttttgttaaatttacaaagtaagccaagccttacggttaacattctcctctacaaccaagtattaaagccacatttaaaaagaccacatgaaatgctgattctaattgtgtgtaggtcttgaggattaagcacacaaatttcacaaacttctgtttgagtaaacaaactcagccttctgtaaatatacatgcaagtttggaaacagtaatactgtacctataaatatatgctgtctgttttgtgtacagtatgtaaaaactccttttctgccacactaaaaatgcaagccatttatgggaatcctaaaactagtattgaactaaaactttgctaatgatctttattagaggatcgtccaacttttcacttaccttgggttttcttttcaattcactcttacactagtctgcttatttccagctgtttattttattgagtcctgaatttaaaaaaaaaatattttgattcattttgtaaatacaagctgtacaaaaaagagagatttaatgttgtcttttaaatactccaattttcattctaatatgaatgttgttatattgtacttagaaactgtacctttaatattacattacctttattaaaagtgcattgaacacatcaattttagatgtgctttatgtactgttatcctataataaaacttcagcttctaatggaa

SEQ ID NO: 133731 - DNA, 1647 bp, Artificial Sequence
  derived and/or modified sequence
atgaatgagggtgcacctggtgacagcgatctggagacagaggccagagtcccatggtccataatggggcactgtttgcgcacagggcaagcacggatgtctgcaacacccacgcccgcaggcgagggagcccggtcttccagcacttgtagcagcctgagcaggttattttggagccagttggagcacattaattgggatggagcaacagccaagaattttattaacctgcgcgagttttttagcttcctgctacccgctttgaggaaagctcagatagaaattatcccctgtaagatctgtggcgataaatcctctggtatccattatggcgtgatcacctgcgaaggatgcaagggcttttttagacgatcccagcagagcaatgccacttactcttgccctagacaaaagaactgcttgatcgatcgcactagtcggaaccggtgccagcattgtcgcctgcaaaagtgcctagccgtgggaatgtcacgagacgccgtgaagtttggacggatgagtaagaaacagcgcgacagcctctacgctgaggtacaaaaacatagaatgcagcaacagcagagggaccaccagcagcaaccaggcgaggcggaacctctgacccctacctacaacatttcagcaaatgggctcactgaactccacgatgacctcagcaactatatcgatggccacaccccagagggctccaaggccgattcggccgtgtcttccttttacctggacattcagccgtctccagatcagtccggactcgacatcaatggtataaagcctgagccaatttgcgactatacacctgccagtggcttcttcccttactgttcctttactaatggcgagacttcccctacggtttccatggcggaactggagcaccttgcccagaacatttcaaagtcacaccttgagacctgtcagtaccttcgcgaagagttacagcaaattacatggcagacctttttgcaggaagagatcgaaaactaccagaataaacaaagggaagtcatgtggcagctttgcgccattaaaattactgaagccattcaatacgtggtcgagttcgccaagcggattgacggttttatggaactctgccagaacgatcagatagtgctccttaaagcaggttccttggaagtcgtcttcatccgaatgtgtagagccttcgactcccagaataatactgtgtatttcgatggcaaatacgcgtcaccagatgtgtttaagtcccttggttgtgaggatttcatttctttcgtttttgaattcggcaagtctctgtgctcgatgcacttaacggaggacgagattgccctgttcagtgcgtttgtcttgatgtcagccgatcgctcctggctccaggagaaggtgaagatcgaaaagctgcagcagaaaattcagctggcgctgcagcacgtcctgcagaaaaatcaccgtgaagacgggattctcactaagctcatttgtaaagtcagcacactgagggctctgtgcgggaggcataccgaaaaactgatggccttcaaagctatctatccagatatcgtcagacttcactttccgcccctttacaaggaactctttacctcggagttcgagccagcgatgcagatcgatgggtag

SEQ ID NO: 133732 - DNA, 1647 bp, Artificial Sequence
  derived and/or modified sequence
atgaatgaaggagcccctggggacagcgacctggagacagaggcccgggtgccctggagcatcatgggccactgcctgaggacaggccaggccaggatgtctgccacccccaccccagctggggagggcgcccggagcagcagcacctgcagcagcctgagccgcctcttctggagccagctggagcacatcaactgggatggagccacagccaagaacttcatcaacctgcgggagttcttctccttcctgctgcctgccctgaggaaggcccagatcgagatcatcccctgcaagatctgtggggacaagagcagcggcatccactacggcgtcatcacctgtgagggctgcaagggcttcttcagaagaagccagcagagcaatgccacctacagctgcccccggcagaagaactgcctgattgacaggaccagcaggaaccgctgccagcactgccgcctgcagaagtgcctggccgtgggcatgagcagagatgctgtgaagtttggccgcatgagcaagaagcagagggacagcctgtatgcagaggtgcagaagcacaggatgcagcagcagcagagggaccaccagcagcagcctggagaggccgagcccctgacccccacctacaacatcagcgccaacggcctgacagagctgcatgatgacctgagcaactacattgatggccacaccccagagggcagcaaggctgacagcgctgtgtcctccttctacctggacatccagcccagcccagaccagagcggcctggacatcaatggcatcaagccagagcccatctgtgactacaccccagccagcggcttcttcccctactgcagcttcaccaacggggagaccagccccaccgtgtccatggccgagctggagcacctggcccagaacatcagcaagagccacctggagacctgccagtacctgcgggaggagctgcagcagatcacctggcagaccttcctgcaggaggagattgagaactaccagaacaagcagcgggaggtgatgtggcagctgtgtgccatcaagatcacagaggccatccagtatgtggtggagtttgccaagagaattgatggcttcatggagctgtgccagaatgaccagatcgtgctgctgaaggccggcagcctggaggtggtgttcatccgcatgtgccgggcctttgacagccagaacaacacagtgtactttgatggcaagtatgccagcccagatgtgttcaagagcctgggctgtgaggacttcatcagctttgtgtttgaatttgggaagagcctgtgcagcatgcacctgacagaagatgaaattgccctcttcagcgcctttgtgctgatgtctgctgaccgctcctggctgcaggagaaggtgaagattgagaagctgcagcagaagatccagctggccctgcagcacgtgctgcagaagaaccaccgggaggatggcatcctgaccaagctgatctgcaaggtgtccaccctgcgggccctgtgtggccgccacacagagaagctgatggccttcaaggccatctacccagacatcgtgcggctgcacttcccccccctgtacaaggagctgttcaccagcgagtttgagcccgccatgcagattgatggatag

SEQ ID NO: 133733 - DNA, 1647 bp, Artificial Sequence
  derived and/or modified sequence
atgaacgagggcgcccccggcgacagcgacctggagaccgaggcccgagtgccctggagcataatgggccactgcctgagaacaggccaggcccggatgtccgcaacccccactccagcgggcgagggggcgaggagctcttccacctgttcgagcttgtctcgcctcttttggtctcagctggagcacatcaattgggacggggctacagctaagaatttcatcaatctaagagagttcttttcgtttctgctgcccgcccttaggaaagcccagattgagatcatcccctgtaagatatgtggggacaagtcctctggtattcactatggcgttatcacatgcgaggggtgtaaaggattctttcgcaggagccaacagtccaacgctacctattcgtgtccacgccagaaaaattgtttaatagatcgaacatccaggaataggtgtcagcactgcagactgcagaaatgcctggctgtgggaatgagccgcgacgcagtcaaattcggcaggatgtccaagaagcagcgggattccctatacgccgaggtgcaaaagcatcggatgcagcagcagcaaagagaccaccaacagcaaccaggcgaggccgagcccttgaccccgacttataacatctcagccaacggtttaactgagttgcacgatgacctcagcaattatatcgacgggcatacacctgaaggaagcaaagctgacagcgcggtatcatccttttatcttgatatccagccttcgccagaccaatctggcctcgatatcaacggtatcaagcccgagcctatctgtgattacactccagcgtctggttttttcccctattgcagttttaccaatggggagacctctcccactgtgtccatggcagagctagaacatctagcgcagaacattagcaagagccatttagaaacatgccagtatttgagggaggaactgcagcagatcacgtggcagacgttcctgcaggaagagattgagaattatcagaacaagcagcgggaagttatgtggcagctgtgtgccattaagatcaccgaagcaatccagtatgtcgtcgagttcgcaaagcgcatcgatggtttcatggagctgtgccagaacgaccagatcgtgctgcttaaagcgggctcattggaggtggtttttattcgtatgtgcagagcctttgattcccaaaacaataccgtatattttgacggcaagtacgcaagtcccgatgtgtttaagagcttgggctgtgaggacttcatctcctttgtgttcgagttcggaaagagcctctgttccatgcacttgacagaagacgagattgccctgttttctgcctttgtgctgatgtcagccgacaggagctggctgcaggaaaaggttaagatagagaagcttcagcagaagatccaactggcccttcaacacgttctgcagaagaaccatagagaggacggaatacttacaaagctgatttgtaaggtctcaacactgagggctctatgtggccgccacactgagaagctgatggcatttaaggcaatataccctgatatagtcagattgcatttccctcccctgtataaggagctcttcacctcagaattcgaacccgctatgcagatagacggatag

SEQ ID NO: 133734 - DNA, 1647 bp, Artificial Sequence
  derived and/or modified sequence
atgaacgaaggagctccaggtgactcagacttggagaccgaggctagagttccctggtcgatcatgggtcactgtctccggaccggccaggctcggatgagtgccaccccaaccccagcaggcgagggcgcaagaagctcctccacctgttccagcctgagccgtttgttctggtcacagctagagcacatcaactgggacggcgctactgctaagaacttcattaatttgcgcgaatttttcagtttcctgcttccggcacttagaaaggctcaaatcgaaatcatcccgtgtaaaatctgcggcgacaagtcttctggcatccactacggagttattacatgtgagggatgcaaaggattcttcagaaggtctcaacagtctaacgctacgtactcctgtcctagacagaagaactgcttaattgatcggacatcacggaatcgttgccagcattgcaggctccagaagtgcctcgcggtgggtatgagccgcgacgccgtgaaattcggacggatgtctaaaaagcagagagacagtctgtatgcggaggtgcagaaacatcgcatgcaacagcaacagcgggatcaccagcagcagcccggtgaagctgaaccacttaccccaacctacaatattagcgcaaatggcctcacggagctgcacgatgacctctctaattacattgacgggcacacccccgagggctccaaggccgacagcgccgtgtctagtttttacctcgacattcagccctcccctgatcagtcaggactggacataaacggcattaagcccgaacccatctgcgattatactcctgcctcaggcttcttcccttattgcagttttactaacggtgaaacttctcccacggtttccatggcggagctcgagcacctggctcagaatataagcaagtcacatcttgagacttgtcaatacttgcgcgaggagctgcagcagattacctggcaaacctttctccaggaggagatcgagaactatcagaacaaacagagggaagtgatgtggcagctttgcgctataaaaataactgaagccatccaatatgtggtggagtttgctaagaggatcgacggattcatggagctgtgtcagaatgaccaaatagtccttctgaaggctggttctctggaggttgtattcatacgaatgtgtagagctttcgactcacagaataataccgtttacttcgacgggaaatacgctagccctgatgtgtttaaaagcctaggctgcgaggatttcatcagttttgtttttgagttcggcaagtcactatgcagcatgcacctgaccgaggacgagatcgcgctcttcagtgcctttgtactcatgtcagccgaccgctcgtggttgcaagagaaggtaaaaattgagaagctgcagcagaagatccaactggcattacaacatgtcctgcagaagaatcaccgagaagatggcatactgacaaagttaatttgtaaggtcagcacattaagagcactgtgtggcagacacacggagaagctgatggccttcaaggccatttaccccgacatcgtgcggctgcactttccgccactatacaaggagctctttacctcagagttcgagcctgccatgcagattgatggctag

SEQ ID NO: 133735 - DNA, 1908 bp, Artificial Sequence
  derived and/or modified sequence
ggactccatagtacactggggcaaagcacagccccagtttctggaggcagatgggtaaccaggaaaaggcatgaatgagggggccccaggagacagtgacttagagactgaggcaagagtgccgtggtcaatcatgggtcattgtcttcgaactggacaggccagaatgtctgccacacccacacctgcaggtgaaggagccagaagctcttcaacctgtagctccctgagcaggctgttctggtctcaacttgagcacataaactgggatggagccacagccaagaactttattaatttaagggagttcttctcttttctgctccctgcattgagaaaagctcaaattgaaattattccatgcaagatctgtggagacaaatcatcaggaatccattatggtgtcattacatgtgaaggctgcaagggctttttcaggagaagtcagcaaagcaatgccacctactcctgtcctcgtcagaagaactgtttgattgatcgaaccagtagaaaccgctgccaacactgtcgattacagaaatgccttgccgtagggatgtctcgagatgctgtaaaatttggccgaatgtcaaaaaagcagagagacagcttgtatgcagaagtacagaaacaccggatgcagcagcagcagcgcgaccaccagcagcagcctggagaggctgagccgctgacgcccacctacaacatctcggccaacgggctgacggaacttcacgacgacctcagtaactacattgacgggcacacccctgaggggagtaaggcagactccgccgtcagcagcttctacctggacatacagccttccccagaccagtcaggtcttgatatcaatggaatcaaaccagaaccaatatgtgactacacaccagcatcaggcttctttccctactgttcgttcaccaacggcgagacttccccaactgtgtccatggcagaattagaacaccttgcacagaatatatctaaatcgcatctggaaacctgccaatacttgagagaagagctccagcagataacgtggcagacctttttacaggaagaaattgagaactatcaaaacaagcagcgggaggtgatgtggcaattgtgtgccatcaaaattacagaagctatacagtatgtggtggagtttgccaaacgcattgatggatttatggaactgtgtcaaaatgatcaaattgtgcttctaaaagcaggttctctagaggtggtgtttatcagaatgtgccgtgcctttgactctcagaacaacaccgtgtactttgatgggaagtatgccagccccgacgtcttcaaatccttaggttgtgaagactttattagctttgtgtttgaatttggaaagagtttatgttctatgcacctgactgaagatgaaattgcattattttctgcatttgtactgatgtcagcagatcgctcatggctgcaagaaaaggtaaaaattgaaaaactgcaacagaaaattcagctagctcttcaacacgtcctacagaagaatcaccgagaagatggaatactaacaaagttaatatgcaaggtgtctaccttaagagccttatgtggacgacatacagaaaagctaatggcatttaaagcaatatacccagacattgtgcgacttcattttcctccattatacaaggagttgttcacttcagaatttgagccagcaatgcaaattgatgggtaaatgttatcacctaagcacttctagaatgtctgaagtacaaacatgaaaaacaaacaaaaaaattaaccgagacactttatatggccctgcacagacctggagcgccacacactgcacatcttttggtgatcggggtcaggcaaaggaggggaaacaatgaaaacaaataaaagttgaacttgtttttctca

SEQ ID NO: 133736 - DNA, 1647 bp, Artificial Sequence
  derived and/or modified sequence
atgaacgagggcgcccccggcgacagcgacctggagaccgaggccagagtgccctggagcatcatgggccactgcctgagaaccggccaggccagaatgagcgccacccccacccccgccggcgagggcgccagaagcagcagcacctgcagcagcctgagcagactgttctggagccagctggagcacatcaactgggacggcgccaccgccaagaacttcatcaacctgagagagttcttcagcttcctgctgcccgccctgagaaaggcccagatcgagatcatcccctgcaagatctgcggcgacaagagcagcggcatccactacggcgtgatcacctgcgagggctgcaagggcttcttcagaagaagccagcagagcaacgccacctacagctgccccagacagaagaactgcctgatcgacagaaccagcagaaacagatgccagcactgcagactgcagaagtgcctggccgtgggcatgagcagagacgccgtgaagttcggcagaatgagcaagaagcagagagacagcctgtacgccgaggtgcagaagcacagaatgcagcagcagcagagagaccaccagcagcagcccggcgaggccgagcccctgacccccacctacaacatcagcgccaacggcctgaccgagctgcacgacgacctgagcaactacatcgacggccacacccccgagggcagcaaggccgacagcgccgtgagcagcttctacctggacatccagcccagccccgaccagagcggcctggacatcaacggcatcaagcccgagcccatctgcgactacacccccgccagcggcttcttcccctactgcagcttcaccaacggcgagaccagccccaccgtgagcatggccgagctggagcacctggcccagaacatcagcaagagccacctggagacctgccagtacctgagagaggagctgcagcagatcacctggcagaccttcctgcaggaggagatcgagaactaccagaacaagcagagagaggtgatgtggcagctgtgcgccatcaagatcaccgaggccatccagtacgtggtggagttcgccaagagaatcgacggcttcatggagctgtgccagaacgaccagatcgtgctgctgaaggccggcagcctggaggtggtgttcatcagaatgtgcagagccttcgacagccagaacaacaccgtgtacttcgacggcaagtacgccagccccgacgtgttcaagagcctgggctgcgaggacttcatcagcttcgtgttcgagttcggcaagagcctgtgcagcatgcacctgaccgaggacgagatcgccctgttcagcgccttcgtgctgatgagcgccgacagaagctggctgcaggagaaggtgaagatcgagaagctgcagcagaagatccagctggccctgcagcacgtgctgcagaagaaccacagagaggacggcatcctgaccaagctgatctgcaaggtgagcaccctgagagccctgtgcggcagacacaccgagaagctgatggccttcaaggccatctaccccgacatcgtgagactgcacttcccccccctgtacaaggagctgttcaccagcgagttcgagcccgccatgcagatcgacggctag

SEQ ID NO: 133737 - protein, 2347 aa, Artificial Sequence
  derived and/or modified sequence
MKNIYCLIPKLVNFATLGCLWISVVQCTVLNSCLKSCVTNLGQQLDLGTPHNLSEPCIQGCHFWNSVDQKNCALKCRESCEVGCSSAEGAYEEEVLENADLPTAPFASSIGSHNMTLRWKSANFSGVKYIIQWKYAQLLGSWTYTKTVSRPSYVVKPLHPFTEYIFRVVWIFTAQLQLYSPPSPSYRTHPHGVPETAPLIRNIESSSPDTVEVSWDPPQFPGGPILGYNLRLISKNQKLDAGTQRTSFQFYSTLPNTIYRFSIAAVNEVGEGPEAESSITTSSSAVQQEEQWLFLSRKTSLRKRSLKHLVDEAHCLRLDAIYHNITGISVDVHQQIVYFSEGTLIWAKKAANMSDVSDLRIFYRGSGLISSISIDWLYQRMYFIMDELVCVCDLENCSNIEEITPPSISAPQKIVADSYNGYVFYLLRDGIYRADLPVPSGRCAEAVRIVESCTLKDFAIKPQAKRIIYFNDTAQVFMSTFLDGSASHLILPRIPFADVKSFACENNDFLVTDGKVIFQQDALSFNEFIVGCDLSHIEEFGFGNLVIFGSSSQLHPLPGRPQELSVLFGSHQALVQWKPPALAIGANVILISDIIELFELGPSAWQNWTYEVKVSTQDPPEVTHIFLNISGTMLNVPELQSAMKYKVSVRASSPKRPGPWSEPSVGTTLVPASEPPFIMAVKEDGLWSKPLNSFGPGEFLSSDIGNVSDMDWYNNSLYYSDTKGDVFVWLLNGTDISENYHLPSIAGAGALAFEWLGHFLYWAGKTYVIQRQSVLTGHTDIVTHVKLLVNDMVVDSVGGYLYWTTLYSVESTRLNGESSLVLQTQPWFSGKKVIALTLDLSDGLLYWLVQDSQCIHLYTAVLRGQSTGDTTITEFAAWSTSEISQNALMYYSGRLFWINGFRIITTQEIGQKTSVSVLEPARFNQFTIIQTSLKPLPGNFSFTPKVIPDSVQESSFRIEGNASSFQILWNGPPAVDWGVVFYSVEFSAHSKFLASEQHSLPVFTVEGLEPYALFNLSVTPYTYWGKGPKTSLSLRAPETVPSAPENPRIFILPSGKCCNKNEVVVEFRWNKPKHENGVLTKFEIFYNISNQSITNKTCEDWIAVNVTPSVMSFQLEGMSPRCFIAFQVRAFTSKGPGPYADVVKSTTSEINPFPHLITLLGNKIVFLDMDQNQVVWTFSAERVISAVCYTADNEMGYYAEGDSLFLLHLHNRSSSELFQDSLVFDITVITIDWISRHLYFALKESQNGMQVFDVDLEHKVKYPREVKIHNRNSTIISFSVYPLLSRLYWTEVSNFGYQMFYYSIISHTLHRILQPTATNQQNKRNQCSCNVTEFELSGAMAIDTSNLEKPLIYFAKAQEIWAMDLEGCQCWRVITVPAMLAGKTLVSLTVDGDLIYWIITAKDSTQIYQAKKGNGAIVSQVKALRSRHILAYSSVMQPFPDKAFLSLASDTVEPTILNATNTSLTIRLPLAKTNLTWYGITSPTPTYLVYYAEVNDRKNSSDLKYRILEFQDSIALIEDLQPFSTYMIQIAVKNYYSDPLEHLPPGKEIWGKTKNGVPEAVQLINTTVRSDTSLIISWRESHKPNGPKESVRYQLAISHLALIPETPLRQSEFPNGRLTLLVTRLSGGNIYVLKVLACHSEEMWCTESHPVTVEMFNTPEKPYSLVPENTSLQFNWKAPLNVNLIRFWVELQKWKYNEFYHVKTSCSQGPAYVCNITNLQPYTSYNVRVVVVYKTGENSTSLPESFKTKAGVPNKPGIPKLLEGSKNSIQWEKAEDNGCRITYYILEIRKSTSNNLQNQNLRWKMTFNGSCSSVCTWKSKNLKGIFQFRVVAANNLGFGEYSGISENIILVGDDFWIPETSFILTIIVGIFLVVTIPLTFVWHRRLKNQKSAKEGVTVLINEDKELAELRGLAAGVGLANACYAIHTLPTQEEIENLPAFPREKLTLRLLLGSGAFGEVYEGTAVDILGVGSGEIKVAVKTLKKGSTDQEKIEFLKEAHLMSKFNHPNILKQLGVCLLNEPQYIILELMEGGDLLTYLRKARMATFYGPLLTLVDLVDLCVDISKGCVYLERMHFIHRDLAARNCLVSVKDYTSPRIVKIGDFGLARDIYKNDYYRKRGEGLLPVRWMAPESLMDGIFTTQSDVWSFGILIWEILTLGHQPYPAHSNLDVLNYVQTGGRLEPPRNCPDDLWNLMTQCWAQEPDQRPTFHRIQDQLQLFRNFFLNSIYKSRDEANNSGVINESFEGEDGDVICLNSDDIMPVALMETKNREGLNYMVLATECGQGEEKSEGPLGSQESESCGLRKEEKEPHADKDFCQEKQVAYCPSGKPEGLNYACLTHSGYGDGSD

SEQ ID NO: 133738 - DNA, 7044 bp, Artificial Sequence
  derived and/or modified sequence
atgaaaaatatttattgtctgataccaaaactcgtcaatttcgcgacactcggctgtctctggatttcagtcgtccagtgtacagtgcttaacagctgccttaagtcttgcgtgactaaccttgggcagcaactggacctggggacaccacacaacctctccgaaccgtgtatccagggctgccacttctggaattctgtagatcagaaaaattgtgcactgaaatgtcgggaatcttgcgaagttggatgctcttccgcggagggggcttacgaagaggaagttttagaaaatgcagacctacccacggctccttttgcgtcctcgattggtagccacaatatgacactaagatggaaatcagccaattttagcggggtgaaatacatcatccagtggaaatacgctcagttactgggctcttggacatacactaaaacggtgtcccgaccttcgtacgtcgtaaagccactacacccgttcacagagtacatctttcgggttgtctggatattcacagcccagttgcaactgtactcaccccccagcccaagttacaggactcatccgcatggggtacctgaaacggcccctcttattcgaaacatcgagtctagcagcccagatacagtcgaagtgtcatgggatcccccacagtttcctggtgggccaattcttgggtataaccttagacttatcagtaaaaaccaaaagttggacgccggtacccagcgaacctcgtttcaattttacagcactttgcccaatactatttaccgcttcagcattgctgccgtcaatgaggtgggcgagggaccagaggcagaaagctccattactacctcttctagtgctgtccagcaagaggaacagtggctgtttttaagtcggaagacttctttgcgaaagagatctttgaagcatctggtggacgaggcgcactgcctcaggcttgatgcgatctaccacaatatcaccggaatcagcgttgacgtgcaccagcagatcgtatatttcagcgagggaacactgatttgggccaagaaagcagcaaacatgtccgacgtcagtgatctccgcatcttctacagagggagcggcttaatcagtagcatctcaattgattggctgtatcagcggatgtactttatcatggacgaactcgtgtgcgtatgcgacctggaaaactgttctaacatcgaggaaattacaccacccagtatctccgccccacagaagattgtcgccgactcctataacggctacgttttctacctcctacgcgacggtatctaccgagccgacctgcctgtcccctccgggcggtgcgcggaagccgttagaatcgtggaatcatgcacccttaaggacttcgccatcaagccacaggccaagcgcatcatttattttaatgacacggcgcaggtgttcatgagtaccttcctagatggctctgcttcccatcttatacttcccaggataccattcgcggacgtcaagtcttttgcatgcgaaaacaatgatttcctcgtgacagacgggaaggtgatcttccagcaggacgccctaagcttcaacgagtttatagtggggtgtgatctgagccatatagaagagttcgggtttggaaatcttgttatatttgggtcttcatctcagctgcaccctctgccaggaaggccacaggaactcagcgtgctcttcggctcacaccaggccttggtccagtggaaaccccctgctctggccataggcgcaaatgtgattcttatctcggatatcatcgaattgtttgagctgggccccagcgcatggcagaattggacctacgaggtcaaggtaagtacacaggacccgccggaggtgacacacatttttctaaatatctccggcacaatgctgaacgtgcccgaattgcagtcagctatgaaatataaggtcagtgtcagagcttcaagccctaagaggcccggaccatggagcgaacctagtgttgggaccactttggtgccagcatccgagcccccttttatcatggccgtcaaggaagatgggctctggagcaaacctctgaactccttcggcccgggcgaatttttgagtagcgacatcggaaacgtgtcagatatggattggtacaacaattccctgtactacagtgacacaaagggagatgtcttcgtgtggttactcaacggtacagacattagcgagaattaccacctgccaagtatcgccggagcaggcgcactcgcgttcgagtggttgggccacttcctttattgggctgggaagacttacgttattcagagacagtcagtcttgactggccacacggatatcgtgactcacgtgaaactgttggtaaacgatatggtggtggactctgttggaggctatctgtactggacaacgctgtactccgtggagtcaacaagactgaatggtgaaagctccctggttctgcagactcagccctggttttcagggaagaaggttattgccctaactctggatttaagtgacggcttgttatattggcttgtccaggacagccagtgcattcacttgtacacagccgtgttgcgtggccagagcacaggcgatactactatcaccgagttcgcagcatggtcaacatcagagatatctcaaaatgccctgatgtactacagcggacggctcttttggattaatggatttagaattattaccacccaggagattggacaaaaaacctccgtgtctgttctggaacctgcccggttcaatcagtttactatcattcagaccagtctgaagcctctccctggaaacttctcattcacccctaaggtgatccctgacagtgtgcaagagagttccttccgcatcgagggtaatgcctcctcttttcagatcctgtggaatggtccccctgccgtggattggggcgtagtcttctattccgtggagttcagtgctcactcaaaatttctggcttccgagcagcacagtttgccagtttttaccgttgaaggtctcgaaccctacgccctcttcaacctgagcgtaaccccatatacttattggggcaagggtccgaagacctccctctctcttcgcgcccccgagactgtgccaagcgcgccggaaaaccctcggattttcattctgcctagcgggaaatgttgcaataaaaatgaagtggtcgtcgagttcaggtggaataaaccaaagcatgagaacggggttctaaccaagttcgagatattctacaacatatccaatcagagcattactaataaaacctgtgaggattggatagcagtaaatgtgaccccgtctgtgatgtcctttcagctggaggggatgtcaccccggtgcttcattgcattccaggtgagagcatttacatcaaagggtcccggaccttacgcagacgtcgtgaagagtactacatcagaaataaaccctttcccccacctgatcaccttgcttggaaataaaatcgtctttttggacatggaccaaaaccaggtcgtgtggactttcagcgcagagcgggtgatttcagcagtttgctatacagccgacaacgagatgggatattatgctgagggtgacagccttttcctgttgcatctgcataacaggagctcctccgagttattccaagacagtcttgtattcgatataactgtaatcacaatcgactggatatccagacacctatatttcgccttgaaagaatctcagaatgggatgcaggttttcgatgtggatttagagcacaaggtcaaatatccacgcgaggtgaagatacacaataggaactcaactattatctcattttcagtgtatcctctcctgtcccggctgtactggactgaggtgtctaacttcggataccagatgttttactacagtataatttcacacaccctacataggatacttcagcccacagccactaatcaacagaataagcgtaatcagtgcagctgtaacgtgaccgagttcgagttaagcggagccatggccattgatacgtccaatctcgaaaagcccctcatttactttgcgaaggcccaagaaatctgggcgatggacttggagggatgtcaatgttggagagtaatcaccgtccctgcaatgcttgctggtaagacactcgtgtctctcacagtcgatggcgatctgatctattggataatcacggccaaggactctacgcagatctaccaggctaaaaaaggcaacggagccatcgtctcacaagtcaaagccctgaggagcaggcatatattggcttactcaagtgtgatgcaacctttccccgataaggcctttcttagtcttgcctcagacacagtggaaccaactattctgaatgcgaccaataccagcctcactatccggctacctttggcaaaaacgaacctgacatggtatggaataacatccccaacccctacctatctggtgtattatgccgaggtgaatgaccgaaagaactcttctgacctgaagtatagaattcttgagtttcaggactcaattgcactgattgaggatctgcaaccttttagtacatatatgatacagattgcagttaagaactactactctgaccccttggagcacttgcctccgggaaaagagatctggggcaaaacgaaaaacggcgtccctgaggcagtgcaactgattaacaccactgtcaggtcggatacatcacttataatctcatggagagagtcacacaagcctaacggccccaaggaatccgtccgctatcaacttgcgatatctcatttggctttaatccctgaaacacccctgaggcagtcagagtttccaaatggcaggttgacgctcctggtcaccagattgtccggaggcaatatttacgtcctcaaggtattagcctgtcattccgaggagatgtggtgcactgaatcacatcctgtgactgttgagatgttcaacactccagaaaagccatattccctggtacccgagaacacatccctccagttcaactggaaagcacctctaaatgtcaatctaattaggttttgggtggagttgcagaagtggaaatacaatgaattttatcacgtgaaaactagttgttcccaaggcccagcatacgtgtgtaacatcactaacctacagccttacacatcttataacgtgagagtggtcgtcgtgtacaaaacaggggagaacagtaccagtctccccgagtcctttaagactaaagcgggagtcccaaataagcctggcatccccaagttactcgaagggagtaagaatagtattcaatgggaaaaggctgaggataatggatgtcgaatcacctattacatcctagagattaggaaaagcacatctaacaaccttcagaatcagaatctgaggtggaagatgacgtttaacggttcctgttccagtgtgtgcacatggaagtcaaagaatctcaaagggattttccaattccgggtggtcgccgctaataatctcggcttcggggagtacagcggaatctctgagaatataattcttgtgggggatgatttctggattccagagacgtctttcattctgaccataattgtcggcatttttcttgttgtgacaataccgttgaccttcgtttggcataggcgactgaaaaaccagaagtctgctaaggaaggcgtcacggtgttgatcaacgaggataaggaactggcagaactgcgaggcctagcagcaggcgtgggactcgctaacgcatgttatgcaatccacacgctgccaacccaggaggagatcgagaatctgccagcttttcctagggaaaaacttactcttaggctgctgctcgggtctggcgcattcggggaggtgtatgaaggaactgcggtggatatactaggcgtgggatccggagaaataaaagtggccgtcaagaccctgaaaaaggggagtacagatcaggagaaaatagagtttctgaaagaggcacacttgatgtcaaaatttaaccaccccaatatcctcaagcagctcggggtttgtttgctgaacgaaccccagtacattattctcgaactcatggaggggggtgacctacttacttatctgaggaaagctagaatggcaacattctacgggccgctcctcactctcgtcgatctcgttgatctgtgtgtggacatcagtaaaggctgtgtgtacctcgaacgaatgcatttcatccatagggacctggccgcgagaaactgcctggtctcagtgaaggactataccagcccccgaatcgtcaaaattggcgattttgggctggccagggatatctataaaaacgattactacaggaaaagaggcgaggggctcctcccagtacgatggatggccccagagagtctgatggatgggatattcactacccaatctgatgtgtggtcttttggaattctgatctgggaaattctgacccttggacatcagccatatccagcgcatagcaacttggacgtgcttaactacgtgcagacgggcggccgcctggagcccccccgaaattgtcctgatgatctctggaacctaatgactcagtgttgggctcaggagcccgaccaacggccaacctttcacagaattcaggatcagctgcagctattccgcaacttttttctgaactcaatctataagtcccgtgatgaggctaacaactctggcgtgatcaatgagagttttgagggagaagacggagacgtcatctgcctcaatagcgacgacatcatgcccgttgctctgatggagaccaagaatagagagggactgaactatatggtcttggcaacagagtgcggccagggcgaagagaagagcgagggaccccttggctcgcaggagagtgagagctgcggcctaagaaaggaggagaaagaaccccacgcagacaaagacttctgtcaggagaaacaagtggcctattgtccgtcgggcaaacctgaaggcctgaattatgcttgccttacccactctggctatggtgacgggagcgactag

SEQ ID NO: 133739 - DNA, 7044 bp, Artificial Sequence
  derived and/or modified sequence
atgaagaacatctactgcctgatccccaagctggtgaactttgccaccctgggctgcctgtggatctctgtggtgcagtgcaccgtgctgaacagctgcctgaagagctgtgtgaccaacctgggccagcagctggacctgggcaccccccacaacctgtctgagccctgcatccagggctgccacttctggaacagcgtggaccagaagaactgtgccctgaagtgccgggagagctgtgaggtgggctgcagcagcgctgagggcgcctatgaggaggaggtgctggagaatgctgacctgcccacagccccctttgccagcagcatcggcagccacaacatgaccctgcgctggaagagcgccaacttctctggagtgaagtacatcatccagtggaagtatgcccagctgctgggctcctggacctacaccaagacagtgtcccggcccagctatgtggtgaagcccctgcaccccttcacagagtacatcttccgggtggtgtggatcttcaccgcccagctgcagctgtacagcccccccagccccagctaccgcacccacccccatggagtgcctgagacagcccccctcatcagaaatattgagagcagcagcccagacacagtggaggtgtcctgggaccccccccagtttcctgggggccccatcctgggctacaacctgcggctcatcagcaagaaccagaagctggatgctggcacccagaggaccagcttccagttctacagcaccctgcccaacaccatctaccgcttcagcattgctgctgtgaatgaggtgggggagggccctgaggccgagagcagcatcaccaccagcagcagcgctgtgcagcaggaggagcagtggctgttcctgagcaggaagaccagcctgaggaagaggagcctgaagcacctggtggatgaggcccactgcctgcggctggatgccatctaccacaacatcaccggcatctctgtggatgtgcaccagcagatcgtgtacttcagcgagggcaccctcatctgggccaagaaggccgccaacatgtctgatgtgtctgacctgcgcatcttctaccggggcagcggcctcatcagcagcatcagcattgactggctgtaccagaggatgtacttcatcatggatgagctggtgtgtgtgtgtgacctggagaactgcagcaacatcgaggagatcaccccacccagcatcagcgccccccagaagatcgtggccgacagctacaacggctacgtgttctacctgctgagagatggcatctacagagctgacctgcctgtgcccagcggccgctgtgccgaggccgtgagaattgtggagagctgcaccctgaaggactttgccatcaagccccaggccaagaggatcatctacttcaatgacacagcccaggtgttcatgagcaccttcctggatggcagcgccagccacctgatcctgccccgcatcccctttgctgatgtgaagagctttgcctgtgaaaataatgacttcctggtgacagatggcaaggtgatcttccagcaggatgccctgtccttcaatgagttcatcgtgggctgtgacctgagccacatcgaggagtttggcttcggcaacctggtgatcttcggcagcagcagccagctgcaccccctgcccggccggccccaggagctgtctgtgctgtttggcagccaccaggccctggtgcagtggaagcccccagccctggccatcggggccaacgtcatcctgatcagtgacatcatcgagctgtttgagctgggccccagcgcctggcagaactggacctatgaggtgaaggtgtccacccaggaccccccagaggtgacccacatcttcctgaacatcagcggcaccatgctgaatgtgcctgagctgcagagcgccatgaagtacaaggtgtctgtgcgggccagcagccccaagaggcctggcccctggagcgagcccagcgtgggcaccaccctggtgcctgccagcgagccccccttcatcatggctgtgaaggaggatggcctgtggagcaagcccctgaacagctttggacctggagagttcctgagcagtgacattggaaatgtgtctgacatggactggtacaacaacagcctgtactacagcgacaccaagggagatgtgtttgtgtggctgctgaatggaacagacatcagcgagaactaccacctgcccagcattgctggggccggggccctggcctttgagtggctgggccacttcctgtactgggccggcaagacctacgtgatccagaggcagagcgtgctgaccggccacacagacatcgtgacccacgtgaagctgctggtgaatgacatggtggtggacagcgtgggcggctacctgtactggaccaccctgtacagcgtggagagcacccggctgaatggagagagcagcctggtgctgcagacccagccctggttcagcggcaagaaggtgattgccctgaccctggacctgagtgatggcctgctgtactggctggtgcaggacagccagtgcatccacctgtacacagctgtgctgcggggccagagcactggagacaccaccatcacagaatttgctgcctggagcaccagcgagatcagccagaatgccctgatgtactacagcggccgcctcttctggatcaatggcttccgcatcatcaccacccaggagatcggccagaagacctctgtgtctgtgctggagcccgcccgcttcaaccagttcaccatcatccagaccagcctgaagcccctgcccggcaacttctccttcacccccaaggtgatcccagacagcgtgcaggagagcagcttccgcatcgagggcaatgccagcagcttccagatcctgtggaatggccccccagctgtggactggggcgtggtgttctacagcgtggagttcagcgcccacagcaagttcctggccagcgagcagcacagcctgcctgtgttcaccgtggagggcctggagccctatgccctcttcaacctgtctgtgaccccctacacctactggggcaagggccccaagaccagcctgagcctgcgggcccctgagaccgtgcccagcgcccctgagaacccccgcatcttcatcctgcccagcggcaagtgctgcaacaagaatgaggtggtggtggagttccgctggaacaagcccaagcatgaaaatggagtgctgaccaagtttgagatcttctacaacatcagcaaccagagcatcaccaacaagacctgtgaggactggattgctgtgaatgtgaccccatctgtgatgtccttccagctggagggcatgagcccccgctgcttcatcgccttccaggtgcgggccttcaccagcaagggccctggcccctatgcagatgtggtgaagagcaccaccagcgagatcaaccccttcccccacctgatcaccctgctgggcaacaagatcgtgttcctggacatggaccagaaccaggtggtgtggaccttctctgctgagagggtcatctctgctgtgtgctacacagctgacaatgagatgggctactatgcagagggggacagcctcttcctgctgcacctgcacaacagaagcagcagcgagctgttccaggacagcctggtgtttgacatcaccgtcatcaccatcgactggatcagccgccacctgtactttgccctgaaggagagccagaatggcatgcaggtgtttgatgtggacctggagcacaaggtgaagtacccccgggaggtgaagatccacaacagaaacagcaccatcatctccttctctgtgtaccccctgctgagccggctgtactggacagaggtgagcaactttggctaccagatgttctactacagcatcatcagccacaccctgcaccgcatcctgcagcccacagccaccaaccagcagaacaagaggaaccagtgcagctgcaatgtgacagaatttgagctgagcggggccatggccatcgacaccagcaacctggagaagcccctcatctactttgccaaggcccaggagatctgggccatggacctggagggctgccagtgctggagggtcatcaccgtgcctgccatgctggccggcaagaccctggtgtccctgactgtggatggagacctgatctactggatcatcacagccaaggacagcacccagatctaccaggccaagaagggaaatggagccatcgtgtcccaggtgaaggccctgcggagccgccacatcctggcctacagctctgtgatgcagcccttcccagacaaggccttcctgagcctggccagtgacacagtggagcccaccatcctgaatgccaccaacaccagcctgaccatccggctgcccctggccaagaccaacctgacctggtacggcatcaccagccccacccccacctacctggtgtactatgcagaggtgaatgacaggaagaacagcagtgacctgaagtaccgcatcctggagttccaggacagcatcgccctgattgaggacctgcagcccttcagcacctacatgatccagattgctgtgaagaactactacagcgaccccctggagcacctgcccccaggcaaggagatctggggcaagaccaagaatggagtgcctgaggccgtgcagctgatcaacaccaccgtgcggagtgacaccagcctcatcatctcctggagggagagccacaagcccaacggccccaaggagagcgtgcgctaccagctggccatcagccacctggccctgatccctgagacccccctgcggcagagcgagttccccaacggccgcctgaccctgctggtgacccggctgagcggcggcaacatctacgtgctgaaggtgctggcctgccacagcgaggagatgtggtgcacagagagccaccctgtgacagtggagatgttcaacaccccagagaagccctacagcctggtgcctgagaacaccagcctgcagttcaactggaaggcccccctgaatgtgaacctgatccgcttctgggtggagctgcagaagtggaagtacaatgagttctaccacgtgaagaccagctgcagccagggccctgcctacgtgtgcaacatcaccaacctgcagccctacaccagctacaacgtgcgggtggtggtggtgtacaagacaggagagaacagcaccagcctgcctgagagcttcaagaccaaggccggcgtgcccaacaagccaggcatccccaagctgctggagggcagcaagaacagcatccagtgggagaaggcagaagataatggctgccgcatcacctactacatcctggagatcaggaagagcaccagcaacaacctgcagaaccagaacctgcgctggaagatgaccttcaacggcagctgcagctctgtgtgcacctggaagagcaagaacctgaagggcatcttccagttccgggtggtggccgccaacaacctgggctttggagagtacagcggcatcagcgagaacatcatcctggtgggagatgacttctggatccctgagaccagcttcatcctgaccatcatcgtgggcatcttcctggtggtgaccatccccctgacctttgtgtggcaccggcggctgaagaaccagaagagcgccaaggagggcgtgacagtgctgatcaatgaagacaaggagctggccgagctgcggggcctggccgccggcgtgggcctggccaatgcctgctacgccatccacaccctgcccacccaggaggagattgagaacctgcctgccttcccccgggagaagctgaccctgcggctgctgctgggcagcggggccttcggggaggtgtatgagggcacagctgtggacatcctgggcgtgggcagcggggagatcaaggtggccgtgaagaccctgaagaagggcagcacagaccaggagaagattgagttcctgaaggaggcccacctgatgagcaagttcaaccaccccaacatcctgaagcagctgggcgtgtgcctgctgaatgagccccagtacatcatcctggagctgatggagggcggggacctgctgacctacctgaggaaggccaggatggccaccttctacggccccctgctgaccctggtggacctggtggacctgtgtgtggacatcagcaagggctgtgtgtacctggagaggatgcacttcatccaccgggacctggccgccaggaactgcctggtgtctgtgaaggactacaccagccccagaattgtgaagatcggggactttggcctggcccgggacatctacaagaatgactactacaggaagagaggagagggcctgctgcctgtgcgctggatggcccctgagagcctgatggatggcatcttcaccacccagagtgatgtgtggagctttggcatcctgatctgggagatcctgaccctgggccaccagccctacccagcccacagcaacctggatgtgctgaactacgtgcagacaggaggccgcctggagccccccaggaactgcccagatgacctgtggaacctgatgacccagtgctgggcccaggagccagaccagaggcccaccttccaccgcatccaggaccagctgcagctgttcaggaacttcttcctgaacagcatctacaagagcagagatgaggccaacaacagcggggtcatcaatgaaagctttgaaggagaagatggagatgtgatctgcctgaacagtgatgacatcatgcctgtggccctgatggagaccaagaaccgggagggcctgaactacatggtgctggccacagaatgtggccagggcgaggagaagtctgagggccccctgggcagccaggagagcgagagctgtggcctgaggaaggaggagaaggagccccatgctgacaaggacttctgccaggagaagcaggtggcctactgccccagcggcaagccagagggcctgaactatgcctgcctgacccacagcggctatggagatggcagtgactag

SEQ ID NO: 133740 - DNA, 7044 bp, Artificial Sequence
  derived and/or modified sequence
atgaagaacatctactgcctgatccccaagctggtgaacttcgccacattggggtgcctgtggattagcgtagtccaatgcaccgttctgaattcgtgtctcaaaagctgcgtgacaaacttgggtcagcagctcgaccttggcacaccccataatctgtctgagccgtgtatacaaggttgtcacttctggaactctgtcgatcagaaaaactgcgctctcaaatgcagggagagctgcgaggtcgggtgctcatctgcagaaggcgcctatgaggaggaagttttagaaaatgcggacctacctactgcccctttcgcgtcaagcattggcagccacaatatgaccctgagatggaagagcgccaatttcagcggagtcaagtacatcattcagtggaagtacgcccagctgctcggcagctggacctatacaaagacagtcagtcgcccctcctacgttgtgaagcccctccatccatttaccgagtatatttttcgcgtggtgtggattttcacagcccaactgcaattatatagcccgccgagtcctagttatcgcacgcatccccacggggttccagagaccgcaccactgattcgcaatatcgagtctagctcgcccgatactgttgaggtcagctgggatcctccacagttcccgggaggccctattttaggctataatttgcgcttgatttccaaaaatcagaagctggacgcaggaacccagagaactagttttcagttttactcaacactgccgaatactatttaccggtttagtatagctgccgtgaacgaagtgggcgagggcccagaggcagaatcgagcattacaacatcatccagtgccgtgcagcaggaagaacagtggcttttcctgtcaagaaaaacctccctgcggaaacgctcccttaaacatctggtggacgaagcacactgcctgcgcctggacgctatctatcataatataacgggcatctcagtagatgtgcaccaacagattgtgtacttcagcgagggcacactcatctgggcgaaaaaagctgcgaatatgtccgatgtgtccgacctacgcatcttctacagaggtagcggtctgatcagcagtattagtattgactggctttatcagagaatgtatttcatcatggacgagctagtctgcgtgtgcgatcttgagaattgctctaatatcgaggaaatcacgcctccttccatctcggccccccagaagatcgtggcagattcttataacggttatgtcttttatcttctcagggatggcatctacagagctgacttacctgttccttccgggcggtgtgccgaggcagtcagaattgtggaaagctgtaccctcaaggacttcgcaattaaacctcaagctaagaggatcatctatttcaacgataccgctcaggtgtttatgagcactttcctggatggatcagcctctcacttgatacttccaaggatccctttcgccgacgtgaaatccttcgcctgtgagaataacgattttttggtaactgatggcaaggtaatttttcagcaggatgccctgagtttcaatgagttcatcgtaggttgcgacctctctcatattgaggagtttggatttggtaacctcgtgatctttgggagcagcagccagctgcacccacttcccggtagacctcaggagttgagcgtgctgtttggctcgcatcaagcgctcgtacagtggaagccaccagctctggctatcggtgctaacgttatcctgatctccgacatcatcgaacttttcgaactaggcccttccgcctggcaaaactggacatacgaggtcaaggtgtcaactcaggaccccccagaggtaacacacatttttctgaacatctctgggacaatgctgaacgttccagaattacagtccgccatgaaatacaaagtgtctgtgcgcgcatcaagcccaaaaaggcctggaccatggtcagaaccatcagtcgggaccactctggtgcccgcatctgaacccccgttcataatggcagtgaaagaggacggattatggtcaaaaccactcaactcattcggaccaggcgagttcctttcaagcgacattggaaatgtgagtgacatggattggtataacaatagcctctactattcagataccaagggggacgtgttcgtgtggctcctgaacggcaccgacatttctgagaattaccatctacctagcatagccggagctggtgccctggcctttgaatggctggggcactttttatactgggcaggcaaaacctatgtgattcagcgccagtcagtccttactggacatacggacattgttacacatgtgaagctcctggttaatgatatggttgtcgacagtgtgggcggttacctgtattggaccactttatactcagtcgagtctactcgactaaatggggagagcagcctggtcctccagacccaaccttggtttagcgggaaaaaggtcatcgctctgaccctggatctatccgatggtctgctttattggttggtgcaagactcacaatgcattcacctctacaccgcagttctgaggggccagtctacaggcgataccacaatcaccgaatttgccgcttggtctacatccgagatttcccagaacgcattgatgtactactctgggcgcctgttctggatcaatgggttcagaatcattacgactcaagaaattggccaaaaaacgtccgtcagcgtgctcgagcctgctcgattcaatcagtttacaataatccagacgagtctgaagcccctgcccggcaacttttcattcacccctaaggtgatcccggactctgtgcaggagtcaagcttcaggattgaaggtaatgcctcctccttccagattctctggaatggcccgcctgccgtggactggggcgtcgtcttctatagtgtggaattttctgcccacagtaagtttttggccagcgagcaacatagcctgccggtgttcacagtcgagggactcgagccatacgccttgttcaatctctcagtcactccttacacctactggggcaaaggccccaagacctctctgtccctccgagcccccgagactgtgcccagtgctcctgaaaaccccaggatctttattctgccctcagggaagtgctgcaacaaaaatgaagtagtcgtagagttcagatggaacaagccaaagcacgagaacggggtgctaacgaaatttgagatcttctataatatttccaatcagtctattaccaataagacttgcgaggattggatcgccgtgaacgtgacaccgtctgtgatgtcgttccagttggaaggcatgagcccgcgctgcttcatcgcctttcaggtccgggcctttacttctaaggggcccggaccatatgccgatgttgttaagagcacaacttctgaaattaatccattcccacacctgattacattgctgggcaataagatcgttttccttgatatggaccagaaccaggtggtatggaccttcagcgccgagagggtgatctcagctgtgtgctacacagccgacaatgaaatgggctattatgctgagggagacagcctctttctattacacttgcataaccgaagctcttcagaactgttccaagacagcctcgtgtttgacataaccgtaatcaccatcgattggatctccaggcacctgtatttcgctttaaaggaaagccagaacggaatgcaagtattcgacgtcgacctcgaacacaaggtgaaatatcccagagaggtcaagatccacaaccgcaacagtactattatcagtttttcggtgtatccgttgttatctcggctgtattggaccgaggtgtctaatttcggctatcagatgttctactattcgatcatatcacacacactgcacaggatccttcagccaacggccacgaatcagcagaataaacgtaaccagtgcagctgtaacgtgacagagtttgagctctctggagccatggctatagacacctcaaacctcgagaagcccctaatttactttgcaaaagctcaagagatctgggccatggatctggagggatgccagtgctggagagtgataaccgtccccgcaatgcttgcgggaaagactctggtgtcactaacggtggatggggatctgatctactggatcattactgccaaggattccactcagatctatcaggcaaaaaaaggcaacggggccattgtaagtcaggtgaaggcccttcgctccaggcatattctcgcctacagcagtgtaatgcagccgtttccagacaaggcctttctatctctggctagtgataccgtcgagccgactattttgaatgcaacaaacacgagcctaacaatacgactccccttagcaaagaccaacctaacctggtatggaattacctcccctacccctacttacttagtgtactacgccgaagtgaacgaccggaaaaactcgtcggatctgaaatacagaattctcgagttccaggattctatcgccctcattgaggatttgcagccattcagcacctatatgatacaaatcgcagtaaaaaactattatagcgatcccctggagcaccttccacccggcaaagagatctggggaaagaccaagaatggggtgccagaggcggtgcaattaatcaacactaccgtgaggagtgatacaagtcttatcattagctggagagagtcccacaagccgaatgggcccaaggagagtgttaggtaccagcttgcaattagtcacttagctctgatccctgagacacccttgcgacaaagtgaattccctaacggaaggctcacattgctcgttacaaggctctctggtggaaatatttatgtgctcaaggtactcgcgtgtcactctgaagagatgtggtgtactgaatcccaccccgtaaccgtcgaaatgtttaatactccagaaaaaccctactctctggtgcctgagaacacttcactccagtttaactggaaagctccgttaaatgtgaatctaatcaggttttgggtggagcttcaaaaatggaaatataacgaattctaccacgtgaagacgtcctgttcccagggtcccgcatacgtgtgcaacattactaatctgcagccttatacttcatacaacgtgcgcgtcgtcgtggtgtacaagacgggggagaactctacaagtctgcccgagagctttaaaaccaaggcgggtgtgccaaataagcccgggattcccaaactcctcgagggcagcaaaaactccatccagtgggagaaggctgaagataacggctgccgcattacttattatattctcgagattagaaagtccactagtaataacttgcagaaccagaacctaaggtggaaaatgacattcaatggaagttgtagctccgtctgtacttggaaatctaagaatctgaagggcatcttccaattcagggttgtagcggctaacaatctcggtttcggagaatatagcgggattagcgaaaatattattcttgttggagatgatttctggattcctgagacatcattcattctaactatcatcgttggcatatttctggtggtcacaatacctttgacgttcgtgtggcatcgccgcctcaagaatcagaagtctgccaaggagggggttacggtgctcattaacgaggataaagaattggcggaactgagaggtttagcagcaggggttggtctggccaacgcctgttatgcaattcacaccctccctacgcaggaagagatcgaaaatctgccagcctttccccgggaaaagctgactctgcggctcctccttggaagcggagcctttggcgaggtatacgagggaaccgccgtcgatatcctgggcgtggggagtggcgagattaaggtggccgtaaagacactgaagaagggctctacagaccaagaaaagatagagttcctgaaagaagctcatctaatgtccaaattcaatcatcctaacatcctaaagcagctcggtgtgtgtctgcttaacgagccccagtatattattttggagttaatggaggggggggacctgttaacctacctcagaaaggcacgcatggccaccttttatggacccttgctgacattggtggacctggtggatctctgtgttgatatctcaaagggatgcgtgtatctggaacgcatgcactttattcatagagatctggctgccaggaactgcctggtgagcgttaaggactacactagccctaggattgtgaagattggcgatttcggactagcacgggatatttataaaaacgattactaccgaaagagaggggaaggtctccttcctgtacgctggatggcccctgaatccctgatggacggaatctttactacccagagcgatgtctggtcatttggtatactgatctgggagattctgacacttggccaccagccctaccccgcccattctaatctggatgtgctcaattacgtgcagactggaggccgcttagaacctccgaggaactgccctgatgatctatggaatttaatgacccagtgctgggcacaggagccagaccagaggccaacatttcaccgtatccaagatcagctccagttgttccggaacttctttctgaattctatctacaaaagtcgtgacgaggcgaataactctggggttataaacgaaagcttcgaaggcgaggacggggacgtcatctgcctgaacagcgatgacatcatgccagtggcactcatggaaactaagaaccgcgagggtcttaattatatggtgctggcaaccgagtgcggtcagggtgaggagaagtccgaaggacctctgggtagccaggaatctgaatcatgcgggctgaggaaggaggagaaggaaccgcacgcagacaaggacttctgtcaggagaaacaagtcgcatattgtcctagcggtaagccagaaggcctcaactacgcttgcctgactcattctggctacggtgatggatctgattag

SEQ ID NO: 133741 - DNA, 7043 bp, Artificial Sequence
  derived and/or modified sequence
atgaaaaacatatactgcctaattcctaagctcgtgaattttgccacgttggggtgcctgtggataagtgttgtgcagtgcacagtgctgaacagctgcctgaagagctgtgtcactaatcttggccagcaactggatctgggaactccacacaacctgagcgagccatgtatccaaggctgccatttctggaactctgtggaccagaagaactgcgcactcaagtgccgagagagttgcgaagtcggctgctctagtgctgagggggcttacgaggaggaagtgctcgaaaacgcggatcttcctaccgccccattcgcttcttctatcggcagccacaacatgaccttgcgttggaaaagcgccaacttttccggcgtaaagtatatcatacagtggaaatatgcccagctgctcggaagttggacatacacaaagacggtgagtagaccatcatatgtcgtgaaacctctccatccatttactgaatatatatttagggttgtgtggattttcacggctcagctccagctctattcgcctccatccccgtcctatcgcactcatcctcacggtgttcccgagactgcacctcttattaggaatatcgaatcgtcatcccctgatactgtcgaagtcagttgggacccaccacagttcccaggagggccaatcctcggatacaacctcaggctgatctccaaaaaccaaaaattagatgctggcactcagcgcacctccttccagttctacagcactctgcccaatacaatctatcgctttagtattgctgctgttaacgaggtgggagagggtcctgaggctgagagctccatcacaacctcgagctcagcagtccagcaagaggagcagtggctcttcttatcacgcaagacttcactgcgtaagcgcagtctgaaacatttggttgatgaggctcattgccttcgcctggatgccatctatcacaacatcacggggatttcggtcgacgtgcatcagcaaattgtttattttagcgagggtacactgatttgggcaaagaaggccgcaaacatgagtgacgtttccgatctgcgcatcttttatagagggagcggcttgatcagctctatatccatagattggctgtaccagaggatgtactttatcatggacgaactcgtatgtgtatgcgacttagaaaactgtagcaacatcgaagagatcacaccccctagcatatctgccccacagaagatcgtggccgactcctataacggctatgtcttttatctgcttcgggacggcatctacagggcagacttgcccgtgccgtctgggcgatgcgccgaggcagtgcgaattgtggagtcctgcaccttgaaagacttcgccatcaagccccaagctaagcgaattatctattttaacgatacggcacaggttttcatgtccacgttcctggatggctccgcctctcacctgatcctgcccaggattccatttgctgacgtgaaatctttcgcctgtgagaacaatgactttctcgtaactgatggcaaagtgatctttcagcaagacgcactgagtttcaatgaattcatagtggggtgcgacctgtctcatattgaagaatttggcttcggtaatcttgtgattttcggaagcagcagtcaattgcacccactccccggtagaccgcaagagcttagcgtcctgtttggatcccaccaagctctggttcagtggaagcctcctgccttggctatcggagccaatgtgatcctgatttcggacattattgagcttttcgagttggggccttctgcctggcaaaactggacctacgaagttaaagttagtacccaggatcctcctgaggtgacacatatcttcctgaatatctctggaaccatgctgaatgtacctgagctacagagtgccatgaaatataaagtgtctgtgcgagcaagctctcccaaacgccctgggccttggagtgagcctagcgttggaacaaccctggtacccgcatcagagccgcctttcataatggcagtgaaagaagacggattgtggtcgaagccactcaattcctttggacccggagaattcttgagcagtgacattggaaatgtgtcagacatggactggtacaataactccctctattattcagatacaaaaggcgacgtgtttgtatggctgctcaatggaaccgacataagcgaaaattaccacttacccagcatcgctggcgcaggcgcattagcattcgaatggctggggcactttctgtattgggccggtaaaacctacgttattcaacggcagagcgttctcacgggccacacagacatcgtgacacacgtcaaactgctggtgaatgacatggtcgtcgacagtgtgggaggctacctttactggaccactctgtacagcgtggagtccactcgactcaacggcgagtcgtccttggtactacagacacaaccatggttttcaggcaaaaaggtgatcgctctcacactcgacctttctgacggtctcctttattggctggtacaagacagtcagtgtatccatctttacacagcagtgttgcgcggtcagtcaacaggagacacgaccatcacagagttcgcagcctggagtacctctgaaatctctcagaacgccctgatgtactattcagggaggcttttctggattaacggtttcagaataatcacgacacaggagatagggcagaaaacctcagtcagcgttctggagcctgccagatttaaccagttcacaattattcagacatctcttaaacctctacccggaaactttagctttacacccaaggtgataccggatagcgtacaggagagctcttttagaattgagggaaacgccagttctttccagattttgtggaatggaccccctgccgtggattggggcgtagtgttttactctgtggagttctctgcgcacagcaagtttctggctagtgagcagcacagcttgcccgtttttactgttgaaggactcgagccatacgctttgtttaacctgtctgtgaccccctatacatattggggtaaggggcctaaaacctcactcagcttgagagcacctgaaactgtgccatcagcccctgaaaatcccagaatcttcattctgccaagcggcaaatgttgtaacaagaatgaagtggtcgtggagtttaggtggaataagcctaagcacgaaaatggcgttttaacaaaatttgaaattttttataatatctcaaaccaatctatcacaaataagacatgtgaagactggatcgcagtcaatgtaacaccatctgttatgagctttcagctggaaggtatgtcccccaggtgtttcattgctttccaggtgagggctttcacttccaagggacctgggccttacgctgacgttgtcaaaagcactacgagcgagatcaacccgtttccccatctgatcacgcttctgggtaataagatcgtgttcctggacatggaccagaatcaagtggtatggacgttttctgccgaacgcgttatatctgcagtgtgctacacagcagataatgagatggggtactacgccgagggagacagccttttcctcctgcaccttcataaccgcagttcttcagagctcttccaggattctctagtcttcgatataacagtcatcactatcgattggatctcgaggcatctctactttgcgttaaaggaaagccagaatgggatgcaagtgtttgacgttgacctggaacacaaggtgaaatatcctagagaggttaagatacacaacaggaacagtaccatcatctcattcagcgtttacccacttctgtctcgcctctattggaccgaggtgtcgaattttggataccagatgttttattattcgattataagccacacgttacaccgaattcttcaaccaaccgcaactaaccagcagaataaacgcaaccaatgctcatgcaatgtcactgaattcgaactgagtggagcaatggccattgatacatcaaacctagaaaagccgctgatctattttgccaaggcgcaggagatctgggctatggatctggaaggctgccagtgttggagggttataaccgtgcctgctatgctggcaggcaagacactggtgagtctgacagtcgatggcgatctgatctactggataatcacagccaaggactcaacacaaatttaccaggctaaaaaggggaatggggctatcgtgagccaagtaaaagccttgcgatcacgccatattcttgcctattcatccgtcatgcagccttttcccgataaagcttttctttcgctcgcctccgacactgtggagccgactatccttaatgctaccaacactagcctaacaatacgtttgcctctggctaaaactaatctgacatggtacgggattacaagccccactcccacttatttagtgtattacgcagaggtcaacgatcggaagaacagctccgacctgaaatatcggatcttagaattccaggactcgatcgccctcattgaggacctccaaccattctctacttacatgatccagatagcagtaaaaaattattatagcgaccccctcgagcatctgcccccaggaaaagaaatctggggaaagaccaaaaacggggttcccgaagcagtgcagttaattaatacgacagtcagatcagatacctcactgattatctcatggcgggagtcacataagccaaacgggccaaaagaatcggttcggtaccaattggcaatttcccatttagctcttatccccgaaactccgttgcgccagtctgagtttcccaatggcaggcttaccctcctggtcacaaggctgtctggcggaaatatctacgttctcaaggtgctcgcctgccatagcgaagagatgtggtgcacggaatcacaccccgtaacagtcgagatgttcaacactcccgaaaaaccatatagtctggttcctgaaaatacctcactgcaattcaattggaaggccccactgaacgttaatttaattagattttgggtggagctgcagaaatggaaatacaacgaattttaccacgtgaaaacgtcctgtagccaaggtcccgcttacgtttgtaacattacaaaccttcagccctacacctcgtacaacgtccgggtggtggtggtgtacaagaccggcgaaaattccacttccttacctgagagtttcaaaaccaaagccggagtccctaacaagcccggaatccctaagttactggaaggttcaaagaacagcattcagtgggagaaagcagaggacaatggctgtcggatcacctattacattctggaaattcggaagagtactagcaataatctccagaatcagaatctccgatggaagatgacttttaacggcagctgttccagcgtgtgtacgtggaaatcgaaaaacttaaaaggcatctttcagtttcgtgtggtggcagcaaataacctaggttttggggagtatagtggtatctcggaaaatataatcctggtgggcgatgatttctggattccagagacaagcttcatactgactatcattgttgggatctttttggtggtcactattccgcttacatttgtctggcatcggcgattaaagaatcagaagagtgccaaagagggggtgacagttctcatcaacgaggacaaggaattggccgaactgagggggctcgccgcaggggtgggtctggccaatgcctgttacgcgattcatactttaccaactcaggaagaaattgaaaacttgccagccttccccagggaaaagctgactctgcgcctcctactcggatcaggcgcttttggcgaggtctatgagggtacggccgtggatatactgggcgttggctctggggagattaaggtcgctgtgaagacccttaaaaaagggagcactgatcaagagaaaattgaatttttgaaggaagcccacctaatgtcaaaattcaaccaccccaatattctcaagcagctcggggtctgtctgttgaatgagccacagtacatcatcctggaactgatggagggcggtgacttgctgacctacctgcggaaagcaagaatggccaccttttacgggccattgctgaccctcgtggatctggtggatttatgcgttgacatttccaagggatgcgtgtacctggagaggatgcatttcatacaccgagatctggccgcacgaaattgtctcgtttcggtaaaggattacacctcccctcgtattgttaaaattggtgattttggattggcaagagatatttacaagaacgattattacaggaagcgcggtgagggcttgctgcctgtgagatggatggcgcctgaatctctgatggacggcatcttcaccacacagtccgatgtgtggagcttcgggattctcatctgggaaatactgactctcggtcaccagccttatccagcgcacagcaatctagacgtgctgaattacgtgcagaccggcggtagactggagccacctcgtaattgccccgatgatctgtggaatctgatgacccagtgctgggcccaggagcccgatcagcggcctaccttccatcggatccaggatcagcttcaactgttccgcaactttttcctgaattccatatacaagagtcgcgatgaggctaataatagcggcgtgataaacgaatccttcgaaggtgaggatggggacgttatctgcctgaattcggatgatatcatgcctgtggcccttatggagacgaagaaccgcgagggactaaactacatggtgctggccaccgaatgtggccagggcgaggaaaaatcagagggcccactaggatcacaggaatcagagtcatgcggacttcggaaggaggagaaggaaccccacgcagacaaggacttttgccaggagaagcaggtcgcgtactgtccatccgggaagccagagggcctgaattacgcttgtcttacccactccggctacggggatggttcggatta

SEQ ID NO: 133742 - DNA, 7435 bp, Artificial Sequence
  derived and/or modified sequence
caagctttcaagcattcaaaggtctaaatgaaaaaggctaagtattatttcaaaaggcaagtatatcctaatatagcaaaacaaacaaagcaaaatccatcagctactcctccaattgaagtgatgaagcccaaataattcatatagcaaaatggagaaaattagaccggccatctaaaaatctgccattggtgaagtgatgaagaacatttactgtcttattccgaagcttgtcaattttgcaactcttggctgcctatggatttctgtggtgcagtgtacagttttaaatagctgcctaaagtcgtgtgtaactaatctgggccagcagcttgaccttggcacaccacataatctgagtgaaccgtgtatccaaggatgtcacttttggaactctgtagatcagaaaaactgtgctttaaagtgtcgggagtcgtgtgaggttggctgtagcagcgcggaaggtgcatatgaagaggaagtactggaaaatgcagacctaccaactgctccctttgcttcttccattggaagccacaatatgacattacgatggaaatctgcaaacttctctggagtaaaatacatcattcagtggaaatatgcacaacttctgggaagctggacttatactaagactgtgtccagaccgtcctatgtggtcaagcccctgcaccccttcactgagtacattttccgagtggtttggatcttcacagcgcagctgcagctctactcccctccaagtcccagttacaggactcatcctcatggagttcctgaaactgcacctttgattaggaatattgagagctcaagtcccgacactgtggaagtcagctgggatccacctcaattcccaggtggacctattttgggttataacttaaggctgatcagcaaaaatcaaaaattagatgcagggacacagagaaccagtttccagttttactccactttaccaaatactatctacaggttttctattgcagcagtaaatgaagttggtgagggtccagaagcagaatctagtattaccacttcatcttcagcagttcaacaagaggaacagtggctctttttatccagaaaaacttctctaagaaagagatctttaaaacatttagtagatgaagcacattgccttcggttggatgctatataccataatattacaggaatatctgttgatgtccaccagcaaattgtttatttctctgaaggaactctcatatgggcgaagaaggctgccaacatgtctgatgtatctgacctgagaattttttacagaggttcaggattaatttcttctatctccatagattggctttatcaaagaatgtatttcatcatggatgaactggtatgtgtctgtgatttagagaactgctcaaacatcgaggaaattactccaccctctattagtgcacctcaaaaaattgtggctgattcatacaatgggtatgtcttttacctcctgagagatggcatttatagagcagaccttcctgtaccatctggccggtgtgcagaagctgtgcgtattgtggagagttgcacgttaaaggactttgcaatcaagccacaagccaagcgaatcatttacttcaatgacactgcccaagtcttcatgtcaacatttctggatggctctgcttcccatctcatcctacctcgcatcccctttgctgatgtgaaaagttttgcttgtgaaaacaatgactttcttgtcacagatggcaaggtcattttccaacaggatgctttgtcttttaatgaattcatcgtgggatgtgacctgagtcacatagaagaatttgggtttggtaacttggtcatctttggctcatcctcccagctgcaccctctgccaggccgcccgcaggagctttcggtgctgtttggctctcaccaggctcttgttcaatggaagcctcctgcccttgccataggagccaatgtcatcctgatcagtgatattattgaactctttgaattaggcccttctgcctggcagaactggacctatgaggtgaaagtatccacccaagaccctcctgaagtcactcatattttcttgaacataagtggaaccatgctgaatgtacctgagctgcagagtgctatgaaatacaaggtttctgtgagagcaagttctccaaagaggccaggcccctggtcagagccctcagtgggtactaccctggtgccagctagtgaaccaccatttatcatggctgtgaaagaagatgggctttggagtaaaccattaaatagctttggcccaggagagttcttatcctctgatataggaaatgtgtcagacatggattggtataacaacagcctctactacagtgacacgaaaggcgacgtttttgtgtggctgctgaatgggacggatatctcagagaattatcacctacccagcattgcaggagcaggggctttagcttttgagtggctgggtcactttctctactgggctggaaagacatatgtgatacaaaggcagtctgtgttgacgggacacacagacattgttacccacgtgaagctattggtgaatgacatggtggtggattcagttggtggatatctctactggaccacactctattcagtggaaagcaccagactaaatggggaaagttcccttgtactacagacacagccttggttttctgggaaaaaggtaattgctctaactttagacctcagtgatgggctcctgtattggttggttcaagacagtcaatgtattcacctgtacacagctgttcttcggggacagagcactggggataccaccatcacagaatttgcagcctggagtacttctgaaatttcccagaatgcactgatgtactatagtggtcggctgttctggatcaatggctttaggattatcacaactcaagaaataggtcagaaaaccagtgtctctgttttggaaccagccagatttaatcagttcacaattattcagacatcccttaagcccctgccagggaacttttcctttacccctaaggttattccagattctgttcaagagtcttcatttaggattgaaggaaatgcttcaagttttcaaatcctgtggaatggtccccctgcggtagactggggtgtagttttctacagtgtagaatttagtgctcattctaagttcttggctagtgaacaacactctttacctgtatttactgtggaaggactggaaccttatgccttatttaatctttctgtcactccttatacctactggggaaagggccccaaaacatctctgtcacttcgagcacctgaaacagttccatcagcaccagagaaccccagaatatttatattaccaagtggaaaatgctgcaacaagaatgaagttgtggtggaatttaggtggaacaaacctaagcatgaaaatggggtgttaacaaaatttgaaattttctacaatatatccaatcaaagtattacaaacaaaacatgtgaagactggattgctgtcaatgtcactccctcagtgatgtcttttcaacttgaaggcatgagtcccagatgctttattgccttccaggttagggcctttacatctaaggggccaggaccatatgctgacgttgtaaagtctacaacatcagaaatcaacccatttcctcacctcataactcttcttggtaacaagatagtttttttagatatggatcaaaatcaagttgtgtggacgttttcagcagaaagagttatcagtgccgtttgctacacagctgataatgagatgggatattatgctgaaggggactcactctttcttctgcacttgcacaatcgctctagctctgagcttttccaagattcactggtttttgatatcacagttattacaattgactggatttcaaggcacctctactttgcactgaaagaatcacaaaatggaatgcaagtatttgatgttgatcttgaacacaaggtgaaatatcccagagaggtgaagattcacaataggaattcaacaataatttctttttctgtatatcctcttttaagtcgcttgtattggacagaagtttccaattttggctaccagatgttctactacagtattatcagtcacaccttgcaccgaattctgcaacccacagctacaaaccaacaaaacaaaaggaatcaatgttcttgtaatgtgactgaatttgagttaagtggagcaatggctattgatacctctaacctagagaaaccattgatatactttgccaaagcacaagagatctgggcaatggatctggaaggctgtcagtgttggagagttatcacagtacctgctatgctcgcaggaaaaacccttgttagcttaactgtggatggagatcttatatactggatcatcacagcaaaggacagcacacagatttatcaggcaaagaaaggaaatggggccatcgtttcccaggtgaaggccctaaggagtaggcatatcttggcttacagttcagttatgcagccttttccagataaagcgtttctgtctctagcttcagacactgtggaaccaactatacttaatgccactaacactagcctcacaatcagattacctctggccaagacaaacctcacatggtatggcatcaccagccctactccaacatacctggtttattatgcagaagttaatgacaggaaaaacagctctgacttgaaatatagaattctggaatttcaggacagtatagctcttattgaagatttacaaccattttcaacatacatgatacagatagctgtaaaaaattattattcagatcctttggaacatttaccaccaggaaaagagatttggggaaaaactaaaaatggagtaccagaggcagtgcagctcattaatacaactgtgcggtcagacaccagcctcattatatcttggagagaatctcacaagccaaatggacctaaagaatcagtccgttatcagttggcaatctcacacctggccctaattcctgaaactcctctaagacaaagtgaatttccaaatggaaggctcactctccttgttactagactgtctggtggaaatatttatgtgttaaaggttcttgcctgccactctgaggaaatgtggtgtacagagagtcatcctgtcactgtggaaatgtttaacacaccagagaaaccttattccttggttccagagaacactagtttgcaatttaattggaaggctccattgaatgttaacctcatcagattttgggttgagctacagaagtggaaatacaatgagttttaccatgttaaaacttcatgcagccaaggtcctgcttatgtctgtaatatcacaaatctacaaccttatacttcatataatgtcagagtagtggtggtttataagacgggagaaaatagcacctcacttccagaaagctttaagacaaaagctggagtcccaaataaaccaggcattcccaaattactagaagggagtaaaaattcaatacagtgggagaaagctgaagataatggatgtagaattacatactatatccttgagataagaaagagcacttcaaataatttacagaaccagaatttaaggtggaagatgacatttaatggatcctgcagtagtgtttgcacatggaagtccaaaaacctgaaaggaatatttcagttcagagtagtagctgcaaataatctagggtttggtgaatatagtggaatcagtgagaatattatattagttggagatgatttttggataccagaaacaagtttcatacttactattatagttggaatatttctggttgttacaatcccactgacctttgtctggcatagaagattaaagaatcaaaaaagtgccaaggaaggggtgacagtgcttataaacgaagacaaagagttggctgagctgcgaggtctggcagccggagtaggcctggctaatgcctgctatgcaatacatactcttccaacccaagaggagattgaaaatcttcctgccttccctcgggaaaaactgactctgcgtctcttgctgggaagtggagcctttggagaagtgtatgaaggaacagcagtggacatcttaggagttggaagtggagaaatcaaagtagcagtgaagactttgaagaagggttccacagaccaggagaagattgaattcctgaaggaggcacatctgatgagcaaatttaatcatcccaacattctgaagcagcttggagtttgtctgctgaatgaaccccaatacattatcctggaactgatggagggaggagaccttcttacttatttgcgtaaagcccggatggcaacgttttatggtcctttactcaccttggttgaccttgtagacctgtgtgtagatatttcaaaaggctgtgtctacttggaacggatgcatttcattcacagggatctggcagctagaaattgccttgtttccgtgaaagactataccagtccacggatagtgaagattggagactttggactcgccagagacatctataaaaatgattactatagaaagagaggggaaggcctgctcccagttcggtggatggctccagaaagtttgatggatggaatcttcactactcaatctgatgtatggtcttttggaattctgatttgggagattttaactcttggtcatcagccttatccagctcattccaaccttgatgtgttaaactatgtgcaaacaggagggagactggagccaccaagaaattgtcctgatgatctgtggaatttaatgacccagtgctgggctcaagaacccgaccaaagacctacttttcatagaattcaggaccaacttcagttattcagaaattttttcttaaatagcatttataagtccagagatgaagcaaacaacagtggagtcataaatgaaagctttgaaggtgaagatggcgatgtgatttgtttgaattcagatgacattatgccagttgctttaatggaaacgaagaaccgagaagggttaaactatatggtacttgctacagaatgtggccaaggtgaagaaaagtctgagggtcctctaggctcccaggaatctgaatcttgtggtctgaggaaagaagagaaggaaccacatgcagacaaagatttctgccaagaaaaacaagtggcttactgcccttctggcaagcctgaaggcctgaactatgcctgtctcactcacagtggatatggagatgggtctgattaatagcgttgtttgggaaatagagagttgagataaacactctcattcagtagttactgaaagaaaactctgctagaatgataaatgtcatggtggtctataactccaaataaacaatgcaacgttcctgatttctaatcttggttctgagagccatttggtttcagttgtagcaatccccataccagctgcctg

SEQ ID NO: 133743 - DNA, 7044 bp, Artificial Sequence
  derived and/or modified sequence
atgaagaacatctactgcctgatccccaagctggtgaacttcgccaccctgggctgcctgtggatcagcgtggtgcagtgcaccgtgctgaacagctgcctgaagagctgcgtgaccaacctgggccagcagctggacctgggcaccccccacaacctgagcgagccctgcatccagggctgccacttctggaacagcgtggaccagaagaactgcgccctgaagtgcagagagagctgcgaggtgggctgcagcagcgccgagggcgcctacgaggaggaggtgctggagaacgccgacctgcccaccgcccccttcgccagcagcatcggcagccacaacatgaccctgagatggaagagcgccaacttcagcggcgtgaagtacatcatccagtggaagtacgcccagctgctgggcagctggacctacaccaagaccgtgagcagacccagctacgtggtgaagcccctgcaccccttcaccgagtacatcttcagagtggtgtggatcttcaccgcccagctgcagctgtacagcccccccagccccagctacagaacccacccccacggcgtgcccgagaccgcccccctgatcagaaacatcgagagcagcagccccgacaccgtggaggtgagctgggaccccccccagttccccggcggccccatcctgggctacaacctgagactgatcagcaagaaccagaagctggacgccggcacccagagaaccagcttccagttctacagcaccctgcccaacaccatctacagattcagcatcgccgccgtgaacgaggtgggcgagggccccgaggccgagagcagcatcaccaccagcagcagcgccgtgcagcaggaggagcagtggctgttcctgagcagaaagaccagcctgagaaagagaagcctgaagcacctggtggacgaggcccactgcctgagactggacgccatctaccacaacatcaccggcatcagcgtggacgtgcaccagcagatcgtgtacttcagcgagggcaccctgatctgggccaagaaggccgccaacatgagcgacgtgagcgacctgagaatcttctacagaggcagcggcctgatcagcagcatcagcatcgactggctgtaccagagaatgtacttcatcatggacgagctggtgtgcgtgtgcgacctggagaactgcagcaacatcgaggagatcaccccccccagcatcagcgccccccagaagatcgtggccgacagctacaacggctacgtgttctacctgctgagagacggcatctacagagccgacctgcccgtgcccagcggcagatgcgccgaggccgtgagaatcgtggagagctgcaccctgaaggacttcgccatcaagccccaggccaagagaatcatctacttcaacgacaccgcccaggtgttcatgagcaccttcctggacggcagcgccagccacctgatcctgcccagaatccccttcgccgacgtgaagagcttcgcctgcgagaacaacgacttcctggtgaccgacggcaaggtgatcttccagcaggacgccctgagcttcaacgagttcatcgtgggctgcgacctgagccacatcgaggagttcggcttcggcaacctggtgatcttcggcagcagcagccagctgcaccccctgcccggcagaccccaggagctgagcgtgctgttcggcagccaccaggccctggtgcagtggaagccccccgccctggccatcggcgccaacgtgatcctgatcagcgacatcatcgagctgttcgagctgggccccagcgcctggcagaactggacctacgaggtgaaggtgagcacccaggacccccccgaggtgacccacatcttcctgaacatcagcggcaccatgctgaacgtgcccgagctgcagagcgccatgaagtacaaggtgagcgtgagagccagcagccccaagagacccggcccctggagcgagcccagcgtgggcaccaccctggtgcccgccagcgagccccccttcatcatggccgtgaaggaggacggcctgtggagcaagcccctgaacagcttcggccccggcgagttcctgagcagcgacatcggcaacgtgagcgacatggactggtacaacaacagcctgtactacagcgacaccaagggcgacgtgttcgtgtggctgctgaacggcaccgacatcagcgagaactaccacctgcccagcatcgccggcgccggcgccctggccttcgagtggctgggccacttcctgtactgggccggcaagacctacgtgatccagagacagagcgtgctgaccggccacaccgacatcgtgacccacgtgaagctgctggtgaacgacatggtggtggacagcgtgggcggctacctgtactggaccaccctgtacagcgtggagagcaccagactgaacggcgagagcagcctggtgctgcagacccagccctggttcagcggcaagaaggtgatcgccctgaccctggacctgagcgacggcctgctgtactggctggtgcaggacagccagtgcatccacctgtacaccgccgtgctgagaggccagagcaccggcgacaccaccatcaccgagttcgccgcctggagcaccagcgagatcagccagaacgccctgatgtactacagcggcagactgttctggatcaacggcttcagaatcatcaccacccaggagatcggccagaagaccagcgtgagcgtgctggagcccgccagattcaaccagttcaccatcatccagaccagcctgaagcccctgcccggcaacttcagcttcacccccaaggtgatccccgacagcgtgcaggagagcagcttcagaatcgagggcaacgccagcagcttccagatcctgtggaacggcccccccgccgtggactggggcgtggtgttctacagcgtggagttcagcgcccacagcaagttcctggccagcgagcagcacagcctgcccgtgttcaccgtggagggcctggagccctacgccctgttcaacctgagcgtgaccccctacacctactggggcaagggccccaagaccagcctgagcctgagagcccccgagaccgtgcccagcgcccccgagaaccccagaatcttcatcctgcccagcggcaagtgctgcaacaagaacgaggtggtggtggagttcagatggaacaagcccaagcacgagaacggcgtgctgaccaagttcgagatcttctacaacatcagcaaccagagcatcaccaacaagacctgcgaggactggatcgccgtgaacgtgacccccagcgtgatgagcttccagctggagggcatgagccccagatgcttcatcgccttccaggtgagagccttcaccagcaagggccccggcccctacgccgacgtggtgaagagcaccaccagcgagatcaaccccttcccccacctgatcaccctgctgggcaacaagatcgtgttcctggacatggaccagaaccaggtggtgtggaccttcagcgccgagagagtgatcagcgccgtgtgctacaccgccgacaacgagatgggctactacgccgagggcgacagcctgttcctgctgcacctgcacaacagaagcagcagcgagctgttccaggacagcctggtgttcgacatcaccgtgatcaccatcgactggatcagcagacacctgtacttcgccctgaaggagagccagaacggcatgcaggtgttcgacgtggacctggagcacaaggtgaagtaccccagagaggtgaagatccacaacagaaacagcaccatcatcagcttcagcgtgtaccccctgctgagcagactgtactggaccgaggtgagcaacttcggctaccagatgttctactacagcatcatcagccacaccctgcacagaatcctgcagcccaccgccaccaaccagcagaacaagagaaaccagtgcagctgcaacgtgaccgagttcgagctgagcggcgccatggccatcgacaccagcaacctggagaagcccctgatctacttcgccaaggcccaggagatctgggccatggacctggagggctgccagtgctggagagtgatcaccgtgcccgccatgctggccggcaagaccctggtgagcctgaccgtggacggcgacctgatctactggatcatcaccgccaaggacagcacccagatctaccaggccaagaagggcaacggcgccatcgtgagccaggtgaaggccctgagaagcagacacatcctggcctacagcagcgtgatgcagcccttccccgacaaggccttcctgagcctggccagcgacaccgtggagcccaccatcctgaacgccaccaacaccagcctgaccatcagactgcccctggccaagaccaacctgacctggtacggcatcaccagccccacccccacctacctggtgtactacgccgaggtgaacgacagaaagaacagcagcgacctgaagtacagaatcctggagttccaggacagcatcgccctgatcgaggacctgcagcccttcagcacctacatgatccagatcgccgtgaagaactactacagcgaccccctggagcacctgccccccggcaaggagatctggggcaagaccaagaacggcgtgcccgaggccgtgcagctgatcaacaccaccgtgagaagcgacaccagcctgatcatcagctggagagagagccacaagcccaacggccccaaggagagcgtgagataccagctggccatcagccacctggccctgatccccgagacccccctgagacagagcgagttccccaacggcagactgaccctgctggtgaccagactgagcggcggcaacatctacgtgctgaaggtgctggcctgccacagcgaggagatgtggtgcaccgagagccaccccgtgaccgtggagatgttcaacacccccgagaagccctacagcctggtgcccgagaacaccagcctgcagttcaactggaaggcccccctgaacgtgaacctgatcagattctgggtggagctgcagaagtggaagtacaacgagttctaccacgtgaagaccagctgcagccagggccccgcctacgtgtgcaacatcaccaacctgcagccctacaccagctacaacgtgagagtggtggtggtgtacaagaccggcgagaacagcaccagcctgcccgagagcttcaagaccaaggccggcgtgcccaacaagcccggcatccccaagctgctggagggcagcaagaacagcatccagtgggagaaggccgaggacaacggctgcagaatcacctactacatcctggagatcagaaagagcaccagcaacaacctgcagaaccagaacctgagatggaagatgaccttcaacggcagctgcagcagcgtgtgcacctggaagagcaagaacctgaagggcatcttccagttcagagtggtggccgccaacaacctgggcttcggcgagtacagcggcatcagcgagaacatcatcctggtgggcgacgacttctggatccccgagaccagcttcatcctgaccatcatcgtgggcatcttcctggtggtgaccatccccctgaccttcgtgtggcacagaagactgaagaaccagaagagcgccaaggagggcgtgaccgtgctgatcaacgaggacaaggagctggccgagctgagaggcctggccgccggcgtgggcctggccaacgcctgctacgccatccacaccctgcccacccaggaggagatcgagaacctgcccgccttccccagagagaagctgaccctgagactgctgctgggcagcggcgccttcggcgaggtgtacgagggcaccgccgtggacatcctgggcgtgggcagcggcgagatcaaggtggccgtgaagaccctgaagaagggcagcaccgaccaggagaagatcgagttcctgaaggaggcccacctgatgagcaagttcaaccaccccaacatcctgaagcagctgggcgtgtgcctgctgaacgagccccagtacatcatcctggagctgatggagggcggcgacctgctgacctacctgagaaaggccagaatggccaccttctacggccccctgctgaccctggtggacctggtggacctgtgcgtggacatcagcaagggctgcgtgtacctggagagaatgcacttcatccacagagacctggccgccagaaactgcctggtgagcgtgaaggactacaccagccccagaatcgtgaagatcggcgacttcggcctggccagagacatctacaagaacgactactacagaaagagaggcgagggcctgctgcccgtgagatggatggcccccgagagcctgatggacggcatcttcaccacccagagcgacgtgtggagcttcggcatcctgatctgggagatcctgaccctgggccaccagccctaccccgcccacagcaacctggacgtgctgaactacgtgcagaccggcggcagactggagccccccagaaactgccccgacgacctgtggaacctgatgacccagtgctgggcccaggagcccgaccagagacccaccttccacagaatccaggaccagctgcagctgttcagaaacttcttcctgaacagcatctacaagagcagagacgaggccaacaacagcggcgtgatcaacgagagcttcgagggcgaggacggcgacgtgatctgcctgaacagcgacgacatcatgcccgtggccctgatggagaccaagaacagagagggcctgaactacatggtgctggccaccgagtgcggccagggcgaggagaagagcgagggccccctgggcagccaggagagcgagagctgcggcctgagaaaggaggagaaggagccccacgccgacaaggacttctgccaggagaagcaggtggcctactgccccagcggcaagcccgagggcctgaactacgcctgcctgacccacagcggctacggcgacggcagcgactag

SEQ ID NO: 133744 - protein, 616 aa, Artificial Sequence
  derived and/or modified sequence
MVGQLSEGAIAAIMQKGDTNIKPILQVINIRPITTGNSPPRYRLLMSDGLNTLSSFMLATQLNPLVEEEQLSSNCVCQIHRFIVNTLKDGRRVVILMELEVLKSAEAVGVKIGNPVPYNEGLGQPQVAPPAPAASPAASSRPQPQNGSSGMGSTVSKAYGASKTFGKAAGPSLSHTSGGTQSKVVPIASLTPYQSKWTICARVTNKSQIRTWSNSRGEGKLFSLELVDESGEIRATAFNEQVDKFFPLIEVNKVYYFSKGTLKIANKQFTAVKNDYEMTFNNETSVMPCEDDHHLPTVQFDFTGIDDLENKSKDSLVDIIGICKSYEDATKITVRSNNREVAKRNIYLMDTSGKVVTATLWGEDADKFDGSRQPVLAIKGARVSDFGGRSLSVLSSSTIIANPDIPEAYKLRGWFDAEGQALDGVSISDLKSGGVGGSNTNWKTLYEVKSENLGQGDKPDYFSSVATVVYLRKENCMYQACPTQDCNKKVIDQQNGLYRCEKCDTEFPNFKYRMILSVNIADFQENQWVTCFQESAEAILGQNAAYLGELKDKNEQAFEEVFQNANFRSFIFRVRVKVETYNDESRIKATVMDVKPVDYREYGRRLVMSIRRSALM

SEQ ID NO: 133745 - DNA, 1851 bp, Artificial Sequence
  derived and/or modified sequence
atggtgggccagctgagcgagggcgccatcgccgccatcatgcagaagggcgacaccaacatcaagcccatcctgcaggtgatcaacatcagacccatcaccaccggcaacagcccccccagatacagactgctgatgagcgacggcctgaacaccctgagcagcttcatgctggccacccagctgaaccccctggtggaggaggagcagctgagcagcaactgcgtgtgccagatccacagattcatcgtgaacaccctgaaggacggcagaagagtggtgatcctgatggagctggaggtgctgaagagcgccgaggccgtgggcgtgaagatcggcaaccccgtgccctacaacgagggcctgggccagccccaggtggccccccccgcccccgccgccagccccgccgccagcagcagaccccagccccagaacggcagcagcggcatgggcagcaccgtgagcaaggcctacggcgccagcaagaccttcggcaaggccgccggccccagcctgagccacaccagcggcggcacccagagcaaggtggtgcccatcgccagcctgaccccctaccagagcaagtggaccatctgcgccagagtgaccaacaagagccagatcagaacctggagcaacagcagaggcgagggcaagctgttcagcctggagctggtggacgagagcggcgagatcagagccaccgccttcaacgagcaggtggacaagttcttccccctgatcgaggtgaacaaggtgtactacttcagcaagggcaccctgaagatcgccaacaagcagttcaccgccgtgaagaacgactacgagatgaccttcaacaacgagaccagcgtgatgccctgcgaggacgaccaccacctgcccaccgtgcagttcgacttcaccggcatcgacgacctggagaacaagagcaaggacagcctggtggacatcatcggcatctgcaagagctacgaggacgccaccaagatcaccgtgagaagcaacaacagagaggtggccaagagaaacatctacctgatggacaccagcggcaaggtggtgaccgccaccctgtggggcgaggacgccgacaagttcgacggcagcagacagcccgtgctggccatcaagggcgccagagtgagcgacttcggcggcagaagcctgagcgtgctgagcagcagcaccatcatcgccaaccccgacatccccgaggcctacaagctgagaggctggttcgacgccgagggccaggccctggacggcgtgagcatcagcgacctgaagagcggcggcgtgggcggcagcaacaccaactggaagaccctgtacgaggtgaagagcgagaacctgggccagggcgacaagcccgactacttcagcagcgtggccaccgtggtgtacctgagaaaggagaactgcatgtaccaggcctgccccacccaggactgcaacaagaaggtgatcgaccagcagaacggcctgtacagatgcgagaagtgcgacaccgagttccccaacttcaagtacagaatgatcctgagcgtgaacatcgccgacttccaggagaaccagtgggtgacctgcttccaggagagcgccgaggccatcctgggccagaacgccgcctacctgggcgagctgaaggacaagaacgagcaggccttcgaggaggtgttccagaacgccaacttcagaagcttcatcttcagagtgagagtgaaggtggagacctacaacgacgagagcagaatcaaggccaccgtgatggacgtgaagcccgtggactacagagagtacggcagaagactggtgatgagcatcagaagaagcgccctgatgtag

SEQ ID NO: 133746 - DNA, 1851 bp, Artificial Sequence
  derived and/or modified sequence
atggtgggccagctgtctgaaggcgcaattgcagccatcatgcagaagggtgatacgaatattaaaccaatcctccaggttataaatattcggccgataaccacagggaactctccaccgaggtaccgcttgcttatgtctgacggtctcaacactctgtcaagctttatgctcgccacacagctgaaccccttagtagaagaagagcaactcagctccaattgcgtctgccagatacacagattcatagtgaataccctcaaggacggcaggcgggtcgtgattctgatggaattggaggtgctgaagagcgccgaggccgttggtgttaagatcgggaaccctgtgccctacaacgaaggcttgggacagccacaggtggctccgcccgctccagctgcctctcccgcggcttcatctcggccacagccgcagaatggtagctccggcatgggctccacagtctctaaggcctacggtgcaagcaagacatttggcaaggccgctggaccgtcgctgagccatactagcggtgggacacagtcgaaggtggtgccaatcgcttccttgaccccctatcaatccaagtggaccatctgcgctcgggttaccaacaagtcacagattaggacctggtcaaactctaggggagaggggaagttattctccctcgaactcgtggacgagtctggcgagattagggcgacagcattcaacgaacaggtcgacaagttcttccctctaatcgaagttaataaagtatactacttcagtaagggcacactgaagatcgccaacaagcaattcaccgccgtcaaaaacgactatgagatgaccttcaataatgagacttctgtgatgccatgcgaggatgaccaccaccttccgaccgtccaattcgactttacaggcattgacgacctcgaaaacaaaagcaaagactccctcgtggacattatcggaatttgcaagtcttacgaagacgcgaccaaaatcactgtgagatccaacaatagggaagtggcaaagaggaacatttacctgatggacacttctggaaaggtggtgaccgcaaccctatggggcgaagatgctgacaaatttgacggctctaggcagcctgtgcttgcgatcaagggcgcaagagtgagtgacttcgggggacgcagcctgtccgtcttatcttccagcacgatcattgccaaccccgacattccagaggcctacaagttgcggggatggtttgatgccgagggccaggcacttgacggggtgagcatcagtgacctgaagtctggcggtgtgggaggctccaacactaattggaaaacgctttatgaagtcaagtcagagaatttagggcaaggtgacaagcctgactacttcagctccgttgcgacagtggtctatctgcgaaaagagaactgtatgtaccaagcctgcccaacacaggattgcaacaaaaaagtcatcgaccaacagaacgggctctataggtgcgagaaatgtgatactgagttcccaaatttcaagtataggatgatcctgagtgtgaatattgctgattttcaagagaaccagtgggtgacttgtttccaagaatccgcagaagccattctgggccaaaacgccgcttacttaggggagctgaaggacaagaacgaacaagcttttgaggaagtattccaaaacgcaaatttcaggtcttttatcttccgcgtgagggttaaagtggaaacatacaatgacgagagtagaattaaggcgacagttatggatgtcaagcctgttgactatcgagaatatggccgaagactagttatgtccatccgcagatcggcgctcatgtag

SEQ ID NO: 133747 - DNA, 1851 bp, Artificial Sequence
  derived and/or modified sequence
atggtgggccagctgtctgagggcgccatcgccgccatcatgcagaagggggacaccaacatcaagcccatcctgcaggtgatcaacatccggcccatcaccactggaaacagccccccacgctaccgcctgctgatgtctgatggcctgaacaccctgagcagcttcatgctggccacccagctgaaccccctggtggaggaggagcagctgagcagcaactgtgtgtgccagatccaccgcttcatcgtgaacaccctgaaggatggaagaagagtggtgatcctgatggagctggaggtgctgaagtctgctgaggccgtgggcgtgaagattggcaaccctgtgccctacaatgaaggcctgggccagccccaggtggcccccccagccccagctgccagccctgctgccagcagccggccccagccccagaatggcagcagcggcatgggcagcacagtgtccaaggcctatggagccagcaagaccttcggcaaggctgctggccccagcctgagccacaccagcggcggcacccagagcaaggtggtgcccatcgccagcctgaccccctaccagagcaagtggaccatctgtgcccgggtgaccaacaagagccagatccgcacctggagcaacagcagaggagagggcaagctgttcagcctggagctggtggatgagagcggggagatccgggccacagccttcaatgagcaggtggacaagttcttccccctgattgaggtgaacaaggtgtactacttcagcaagggcaccctgaagatcgccaacaagcagttcaccgctgtgaagaatgactatgagatgaccttcaacaatgagacctctgtgatgccctgtgaagatgaccaccacctgcccaccgtgcagtttgacttcaccggcattgatgacctggagaacaagagcaaggacagcctggtggacatcatcggcatctgcaagagctatgaagatgccaccaagatcaccgtgcgcagcaacaaccgggaggtggccaagaggaacatctacctgatggacaccagcggcaaggtggtgacagccaccctgtggggagaagatgctgacaagtttgatggcagccggcagcctgtgctggccatcaagggggcccgggtgtctgactttggaggccgcagcctgtctgtgctgagcagcagcaccatcatcgccaacccagacatccctgaggcctacaagctgcggggctggtttgatgctgagggccaggccctggatggagtgtccatcagtgacctgaagagcggcggcgtgggcggcagcaacaccaactggaagaccctgtatgaggtgaagtctgagaacctgggccagggcgacaagccagactacttcagctctgtggccaccgtggtgtacctgaggaaggagaactgcatgtaccaggcctgccccacccaggactgcaacaagaaggtgattgaccagcagaatggcctgtaccgctgtgagaagtgtgacacagagttccccaacttcaagtacaggatgatcctgtctgtgaacattgctgacttccaggagaaccagtgggtgacctgcttccaggagagcgctgaggccatcctgggccagaatgctgcctacctgggggagctgaaggacaagaatgagcaggcctttgaggaggtgttccagaatgccaacttccgctccttcatcttccgggtgcgggtgaaggtggagacctacaatgatgagagccgcatcaaggccaccgtgatggatgtgaagcctgtggactaccgggagtatggccggcggctggtgatgagcatcagaagaagtgccctgatgtag

SEQ ID NO: 133748 - DNA, 1851 bp, Artificial Sequence
  derived and/or modified sequence
atggtgggccagctgagcgagggcgccatcgccgccatcatgcagaagggggacacaaacattaagcccatcctccaggtgatcaacattaggcccatcacgactggcaatagtcctccccgctatcggttgctgatgagcgatggcttgaatacattgagctctttcatgctcgcgacacagctgaaccctcttgttgaagaagaacagctgagctccaattgtgtttgtcagatacatagatttatcgttaatactctgaaagatggcaggcgggttgtcatactgatggaactggaagtgttaaaatcagccgaagcggtgggagtgaaaataggtaatcctgtcccttataatgaaggtctcggccagccccaggttgcccctcccgcacccgcagcctcgcccgccgcatcatccaggccccagccacaaaacggtagttctggcatgggctccactgtgagcaaagcctacggtgccagcaagacattcggcaaggcagccggtcctagcctgagccacacctccggcggaacccaatccaaagttgtgccgatagcttccctgaccccctaccaatcgaagtggaccatctgcgctagggtgacaaataagtcacagatcagaacatggagtaactctcgtggcgagggaaagctgttttcactagagctggttgatgagtcaggagagatccgagcaaccgccttcaacgaacaggtggataagttttttcctctcattgaggttaataaagtatactacttttctaagggcacactcaaaatagccaacaagcagttcacagcagtgaagaacgactacgaaatgaccttcaacaatgaaacctccgtgatgccatgtgaagatgatcaccacttgcccacagtgcagtttgatttcaccggcattgacgatctcgagaacaagagcaaggactccctcgttgatataattggcatatgcaagagctacgaggacgccactaagattacagtccgcagcaacaaccgagaggtggcgaagagaaacatatatctaatggacacctccggaaaagtggtgactgctaccctctggggcgaggacgccgataagtttgacggcagcagacaacccgtgcttgcgattaagggagcgcgtgtgtccgatttcggtggacggagcctctctgtcttgtccagttccacaatcattgctaatcctgacattcccgaagcatacaagctgcgaggctggttcgatgccgaaggacaagctctcgacggtgtctcaattagcgatttgaagtctggaggggtagggggaagcaacacgaattggaaaaccttatacgaggtgaagtctgaaaacctagggcagggagacaagccagactacttttcgtccgtcgctacagtagtatatctgagaaaggaaaattgtatgtaccaggcatgccccacacaggattgcaataaaaaggtgattgaccaacagaatggcctgtaccgctgtgagaagtgcgataccgaattccccaatttcaagtatcgcatgatcctctcggtgaacatagctgattttcaggaaaatcagtgggtcacatgtttccaggagtcagctgaagccatcctaggccaaaacgctgcctatctgggtgagctgaaagataaaaacgagcaggcctttgaagaagtattccagaacgcaaattttaggagcttcattttccgcgttagggtcaaggtagagacatacaacgacgagtcacggatcaaagctacagtgatggatgtaaaacccgtggactatcgcgaatacggcagacgactcgtgatgagcataagacgatctgcacttatgtag

SEQ ID NO: 133749 - DNA, 1851 bp, Artificial Sequence
  derived and/or modified sequence
atggtgggtcagttgtcagagggcgcaattgctgccattatgcagaaaggggacacaaacattaagcccattcttcaggtcatcaatatcagaccaatcactactggcaacagccctccgcgttacagactgctgatgagcgatggactgaatacactgagctccttcatgcttgctacacagctgaacccactggtagaagaagaacaactcagcagtaactgcgtatgccaaattcaccggtttatcgtcaacacactgaaggatggacgccgagtagtgattctgatggaattggaggttctcaaaagcgcagaggctgttggcgtgaaaataggaaatccagtgccatataatgagggtctaggacagccccaggttgcaccacccgctcccgctgcaagcccagccgcttcatcccgtccgcagccccaaaatggtagctcaggaatggggtccaccgtctcaaaagcctacggagccagtaagaccttcggcaaagccgctggaccctcactgtcccacacgtctgggggtacacagtccaaggtagtgccgatcgcaagcctgacaccttaccaaagcaagtggaccatctgcgctcgagtgacaaacaagtcacaaattcggacatggagcaactcaaggggggagggcaagctgtttagcctggaacttgtggatgaaagcggggagattagagctactgccttcaatgagcaagtcgataaattctttccacttattgaagtcaataaagtttactacttctccaagggcacactgaagatcgccaataagcagtttaccgcagtgaaaaacgactacgagatgacttttaacaacgagacaagtgttatgccatgcgaggatgatcatcacttgccaactgttcagttcgatttcactggtattgatgatttggagaacaagagcaaagattcactggtggatatcatcgggatttgtaaatcatacgaagacgcgactaaaatcacagtcaggtcaaacaatcgggaggtggccaagcggaatatttatttaatggacaccagcggcaaagtggtgacagcaacgctctggggcgaggatgccgataaattcgacggatccaggcaaccggtcctggcaatcaagggagcaagagtctctgattttgggggtcggtcgttgtcagtcctgtccagctcgactataatcgccaatcctgatatccctgaggcttataaactgagagggtggttcgatgccgagggccaagcactggacggcgtttctatcagtgatttaaaaagcgggggtgtagggggttcaaataccaattggaagaccctgtacgaagtcaaaagcgagaacctcggccagggtgacaagcctgactatttcagcagcgttgctaccgtggtgtatttgagaaaggaaaactgtatgtaccaagcatgtcccacacaggattgtaacaagaaagtaatcgaccaacaaaacggattgtaccggtgtgaaaaatgtgatacagagttccccaactttaaatacaggatgatcttgtcagttaacatcgcggatttccaagagaaccagtgggtcacatgttttcaggaatccgccgaagccattctagggcagaacgcggcttacctgggggaactgaaagacaaaaacgaacaggccttcgaggaggtcttccagaacgcgaactttaggtcgtttatttttagagtgagggtgaaagtcgaaacttacaacgatgaatctcggatcaaggcaactgttatggacgtaaagcccgtggattaccgggaatacggaaggcgattggtgatgagcatcagacggtccgcactgatgtag

SEQ ID NO: 133750 - DNA, 4352 bp, Artificial Sequence
  derived and/or modified sequence
gcacgtcgggggcgggagcggtgcgcgcaacttctcgggccaataactgcgcagcgcgcgggacccgggtggggaagctggagctgttgcggggtccgcggggaagtcttggcggtggagccatggtcggccaactgagcgagggggccattgcggccatcatgcagaagggggatacaaacataaagcccatcctccaagtcatcaacatccgtcccattactacggggaatagtccgccgcgttatcgactgctcatgagtgatggattgaacactctatcctctttcatgttggcgacacagttgaaccctctcgtggaggaagaacaattgtccagcaactgtgtatgccagattcacagatttattgtgaacactctgaaagacggaaggagagtagttatcttgatggaattagaagttttgaagtcagctgaagcagttggagtgaagattggcaatccagtgccctataatgaaggactcgggcagccgcaagtagctcctccagcgccagcagccagcccagcagcaagcagcaggccccagccgcagaatggaagctcgggaatgggttctactgtttctaaggcttatggtgcttcaaagacatttggaaaagctgcaggtcccagcctgtcacacacttctgggggaacacagtccaaagtggtgcccattgccagcctcactccttaccagtccaagtggaccatttgtgctcgtgttaccaacaaaagtcagatccgtacctggagcaactcccgaggggaagggaagcttttctccctagaactggttgacgaaagtggtgaaatccgagctacagctttcaatgagcaagtggacaagttctttcctcttattgaagtgaacaaggtgtattatttctcgaaaggcaccctgaagattgctaacaagcagttcacagctgttaaaaatgactacgagatgaccttcaataacgagacttccgtcatgccctgtgaggacgaccatcatttacctacggttcagtttgatttcacggggattgatgacctcgagaacaagtcgaaagactcacttgtagacatcatcgggatctgcaagagctatgaagacgccactaaaatcacagtgaggtctaacaacagagaagttgccaagaggaatatctacttgatggacacatccgggaaggtggtgactgctacactgtggggggaagatgctgataaatttgatggttctagacagcccgtgttggctatcaaaggagcccgagtctctgatttcggtggacggagcctctccgtgctgtcttcaagcactatcattgcgaatcctgacatcccagaggcctataagcttcgtggatggtttgacgcagaaggacaagccttagatggtgtttccatctctgatctaaagagcggcggagtcggagggagtaacaccaactggaaaaccttgtatgaggtcaaatccgagaacctgggccaaggcgacaagccggactactttagttctgtggccacagtggtgtatcttcgcaaagagaactgcatgtaccaagcctgcccgactcaggactgcaataagaaagtgattgatcaacagaatggattgtaccgctgtgagaagtgcgacaccgaatttcccaatttcaagtaccgcatgatcctgtcagtaaatattgcagattttcaagagaatcagtgggtgacttgtttccaggagtctgctgaagctatccttggacaaaatgctgcttatcttggggaattaaaagacaagaatgaacaggcatttgaagaagttttccagaatgccaacttccgatctttcatattcagagtcagggtcaaagtggagacctacaacgacgagtctcgaattaaggccactgtgatggacgtgaagcccgtggactacagagagtatggccgaaggctggtcatgagcatcaggagaagtgcattgatgtgagaggagcagtgccaatcgggcagaagtttgcaaataggcagaatggaatcgatttcctcccacctccgtgtgacgatcccatgttagctacacagtgcagaggctcttgatggtggactaagcaatttcccccctcgtgcgcatctcagaacccatcggtaggcaaaggaaaatacgctcaggtggttgtggtgtagactgtgtcaggcctacggagtcagccagtggctagcgcaagaccagtcactccctctgccttcaggcttctgtcaatttcattatcatcaagcaggaattatgtcgtaagtcactgaccctaactgcagaccatgaagtaaattatgtaactaggtttttgcttctccagtggtgaccacccccccccatccccgctcacaacttgggttcttctcagcggggcgagctgagaagcggtcatgagcacctggggattttagtaagtgtgtcttcctagaattcgaaggctctctctttctagaggtgctacatagttggtaatgcttggaatggcaatagggtagaatgattaatcaaaggcatatcttctatatctgaagagtatccttccttcagggtttaatagactgagtcagatgggtctgatattaatcaaaattgtctcttctgaggaccgctgataagcattgacttgccgtcccctaaggaaatccgagcggctacaaagcgtttctttacttctcacttcaattaatgctgcgcttcgcttggtgagtgcgtactttttctacctgtacacattcctgcattcatgtattttgttttttttgactaaagctatgttacatggaaaggattttgaagccttttgtttcccttgctttgttttaataaacagtatattctttggttgtgaatcctactttctttgaatgcaaagagttcctataactggaaagcaattaattagccttcataataaatgttcacttgggggggatgttaactcattataaacccgaagattagtccaaggcatggagatccttcttcctagtgtttgcagccctgaaatgcatctttcaaagcatgaaaacactaaaaacaaaaagccattttgcctgaggatgctgatgatctggcacttgggattttattgatgtttacgcagcagtctaacaccaaccacgctttgaaatgtgtacagacagtgagctggtaagaaaacagtaattatgctagtgggcctttcagtcagcaaaagcatgctcgctctgtgtgttcctaatcatattaattatctatccggtggctgcaacacaccgcctgccattggccgcacatctcgccgtcgtaccccggcagtgcggcggtcactctgcagccagaggacctgctgttcatcactgcacatgccgcctgcggaggcttttggatatggggagtgatggtgtcctgtctgtctcccccctcggtgtctgccgttgacataggggccagccagccctagacgggatgacttccgttcctgaggacagacacagagggactcctgctcagcctcactaattgtttagacacattccttcctacccttctctagtctcaggagatggtaactgggtcgcatttcagtctctgactgaggcctcagccatttttacggaagttcttttctgtctgaccttgcttataaagcatcgacgagaaaattacagtcttcaaccctcttctggattgacaaattgtggctgggaagtggcgatctagctttcagcccagtaaccagtctttcatgcctactactcccagcattccctcctctccccacgtgtctgtccacacagtgaagaggcctgaccagccgtggtaccaggacaggacgtgtccagggaacgctgacacctgtcctcgcgccttctcagtggccagcgtgatgaaaccagcacgtctccgtggatgtgattgggaacccaggggcagtgccagggggagggctccctcgaggaggctgtttctaacagatttccccactcaaagatcagatcaccagcagaggagcatcagaaactggctccactgttgggcttttcagagattttggtccctgcgggttgcctaaatagattctggcccacagtttacctcgaaaggctgttgatgttgttctgtttctcctctttcacttagagatcaatgttgattttgcgtacaccatgacatcagcgttaggcaattaggagaaaaaaatctaatcatttcgcctttatttcaagtggttcttgaattccctccagtctcattgtgaaaggggcagggaaaaaaataaaagggtaataatctgatttctgtccatatttccagtgttttatgctttccattaaaaccttgctaatctct

SEQ ID NO: 133751 - protein, 121 aa, Artificial Sequence
  derived and/or modified sequence
MVDMMDLPRSRINAGMLAQFIDKPVCFVGRLEKIHPTGKMFILSDGEGKNGTIELMEPLDEEISGIVEVVGRVTAKATILCTSYVQFKEDSHPFDLGLYNEAVKIIHDFPQFYPLGIVQHD

SEQ ID NO: 133752 - DNA, 366 bp, Artificial Sequence
  derived and/or modified sequence
atggtggacatgatggacctgcccagaagcagaatcaacgccggcatgctggcccagttcatcgacaagcccgtgtgcttcgtgggcagactggagaagatccaccccaccggcaagatgttcatcctgagcgacggcgagggcaagaacggcaccatcgagctgatggagcccctggacgaggagatcagcggcatcgtggaggtggtgggcagagtgaccgccaaggccaccatcctgtgcaccagctacgtgcagttcaaggaggacagccaccccttcgacctgggcctgtacaacgaggccgtgaagatcatccacgacttcccccagttctaccccctgggcatcgtgcagcacgactag

SEQ ID NO: 133753 - DNA, 366 bp, Artificial Sequence
  derived and/or modified sequence
atggtggacatgatggatctgcccagatccaggatcaatgccggcatgctagcccagtttatcgataaaccagtctgttttgtgggccgcttggaaaagatccatcctacagggaaaatgtttattctgtccgatggcgagggtaagaacggtaccattgagcttatggagcctctggatgaagagatttctggaatcgtggaggtggttgggagggtgaccgccaaagccaccatcctctgtacgagttatgtccagttcaaagaggattctcaccctttcgacctgggtctgtacaatgaggcggtcaagataattcatgattttccgcagttttatcccctggggatagtccagcatgattag

SEQ ID NO: 133754 - DNA, 366 bp, Artificial Sequence
  derived and/or modified sequence
atggtggacatgatggacctgcccaggagccgcatcaatgccggcatgctggcccagttcatcgacaagcctgtgtgctttgtgggccgcctggagaagatccaccccaccgggaagatgttcatcctgagtgatggagagggcaagaatggcaccatcgagctgatggagcccctggatgaggagatcagcggcatcgtggaggtggtgggccgggtgacagccaaggccaccatcctgtgcaccagctatgtgcagttcaaggaggacagccacccctttgacctgggcctgtacaatgaggccgtgaagatcatccatgacttcccccagttctaccccctgggcatcgtgcagcacgactag

SEQ ID NO: 133755 - DNA, 366 bp, Artificial Sequence
  derived and/or modified sequence
atggtggacatgatggacctgccccggagccggatcaacgccggcatgctggcccaattcatcgacaagcccgtttgcttcgtcggacggctcgagaagatacatccaaccgggaagatgttcatactgtcagacggagaaggtaaaaatggaactatcgaacttatggagcccttggacgaggagatttcagggatcgtcgaggtggtcgggagagttaccgcaaaagcaaccattctttgtaccagttacgtgcagtttaaagaagattctcatccattcgatttgggcctgtacaacgaagctgtgaagattattcatgatttcccgcagttttatccccttggtattgtccagcacgactag

SEQ ID NO: 133756 - DNA, 366 bp, Artificial Sequence
  derived and/or modified sequence
atggtcgacatgatggatctgcctcggtcccgaatcaatgccggaatgctcgcccagttcatagataaacctgtttgttttgttggcaggcttgaaaagattcaccccaccggtaaaatgttcatcctttcggacggggaggggaagaatgggacaattgagttgatggaacccctagatgaagagatcagtggcatcgtcgaggttgtaggacgcgtgaccgccaaggccacaatcctttgcacctcttatgtgcagtttaaggaagatagccatcccttcgacctggggctctataacgaagccgtgaagattattcacgacttcccgcagttttacccattaggcattgtgcagcatgattag

SEQ ID NO: 133757 - DNA, 2020 bp, Artificial Sequence
  derived and/or modified sequence
aagctactcagataagaggctccaagaggacatttttggatgtgaaaaacaatgagaaggaggacaacacacatttacaatcgtcttaattttgtactcagaaaaaggatgtgaagacaatgcacagggaatacaatagtttcagatctgtgtacagtttccttttgcttcatctcctgcaacaatgtaatgaagacaccatgatatcattaacatttcacacaaaaggaaaatgaggctgaaatggtgtgggcaaggcccaggaatctggagcatccctaaccaagcaggagagcacctgggatagagaaagtgctcaagaatgttcacttactgattactacaatcaaaaaaagatacgacactaatttaccacattcttcttacttattttatgagatactattcttccaaggtggagaaagtggagaaagtagagtgacgcagctaagggagtaaatcgaccctcagccaacaagtggcaaaagcctgaagaaagtgatcaagatcactgatgaccccgctgcccatctccaagggggcgggtatcacaaccccgacgccacaccacgtatcattccgcaaaactcccgcgcctcccacgcagaactggcaagagggaaggcgagacagcagtgaacagctggtacgcagcacccacagcaccgcggcagcagctagtgccgactcccgcctagctcttttgactctgttcgcgggaagaatggggaaacagtaaggttgcggcgcctcccgcgagacgaggtacctgaggctggccccgcagtcccccgccgcaccagcaccggagcttcacaccccacttccggggtcaagtcaccgccgggaatcctgtgatcgcagaaaggtagtctcaggttccgcccctatccaagtcccgcctccactgcctctcgccctgtatctgtcaacttccgggacgccgcgcgtcactaagcagccaatctccacttccggactcatccagccccttctccacccctttcagagacagcgcgattgcgatttaggtttccgcgcatttaattggcgaagctggagcgctagtcttcgctgattggtgccgagaaatctgccccatagacacccgcggggcgcacagtttcagtcgtccgtgggtttcccgccagccgcagtcttggaccataatcatggtggacatgatggacttgcccaggtcgcgcatcaacgccggcatgctagctcaattcatcgacaagcctgtctgcttcgtagggaggctggaaaagattcatcccaccggaaaaatgtttattctttcagatggagaaggaaaaaatggaaccatcgagttgatggaaccccttgatgaagaaatctctggaattgtggaagtggttggaagagtaaccgccaaggccaccatcttgtgtacatcttatgtccagtttaaagaagatagccatccttttgatcttggactttacaatgaagctgtgaaaattatccatgacttccctcagttttatcctttagggattgtgcaacatgattgatcttgatggattttcatacgattgtaaatgagctatattaaagtctattaaaggaagcccttcttgtttgagggagagatttctgtgctttctcatatttaatttgctgtttttaagatattccaacctagagtttttgatggaactgatatattgacagttctcaccgaagtccttttataaagaattgctactccaatatatggtcagattagatgcaagaataaagcagttgtccgagtctaagtttctattttattaataaaaactaaaatggtacgtactatcggtcatttcattttcattcttttaatcatgtattcaagcacaaacttgaaatttcatagccataaggtcaagatttagacctaccaaataaaaccttgggccagctgtgttaaggatttgctcaccttttcccaaactataccttgataattatttccttgataccctacttacaaaatgaagtagatgacatt

SEQ ID NO: 133758 - DNA, 847 bp, Artificial Sequence
  derived and/or modified sequence
gggaaggcgagacagcagtgaacagctggtacgcagcacccacagcaccgcggcagcagctagtgccgactcccgcctagctcttttgactctgttcgcgggaagaatggggaaacagtaaggttgcggcgcctcccgcgagacgaggtacctgaggctggccccgcagtcccccgccgcaccagcaccggagcttcacaccccacttccggggtcaagtcaccgccgggaatcctgtgatcgcagaaagagacagcgcgattgcgatttaggtttccgcgcatttaattggcgaagctggagcgctagtcttcgctgattggtgccgagaaatctgccccatagacacccgcggggcgcacagtttcagtcgtccgtgggtttcccgccagccgcagtcttggaccataatcatggtggacatgatggacttgcccaggtcgcgcatcaacgccggcatgctagctcaattcatcgacaagcctgtctgcttcgtagggaggctggaaaagattcatcccaccggaaaaatgtttattctttcagatggagaaggaaaaaatggaaccatcgagttgatggaaccccttgatgaagaaatctctggaattgtggaagtggttggaagagtaaccgccaaggccaccatcttgtgtacatcttatgtccagtttaaagaagatagccatccttttgatcttggactttacaatgaagctgtgaaaattatccatgacttccctcagttttatcctttagggattgtgcaacatgattgatcttgatggattttcatacgattgtaaatgagctatattaaagtctattaaaggaagcccttcttgtt

SEQ ID NO: 133759 - DNA, 366 bp, Artificial Sequence
  derived and/or modified sequence
atggtagatatgatggaccttccaagatcaagaatcaacgctggaatgctggcacagttcatcgacaaacctgtgtgcttcgttggacgcctcgagaagattcatcccaccggtaaaatgttcattctgagtgatggggagggtaagaacgggactatcgagctgatggagcctctcgatgaggaaatttctggaatcgtggaggtcgtcggcagggttactgctaaggccaccattctgtgcacctcttatgtgcagtttaaggaggatagtcatccatttgacctgggtctgtataatgaagcagtcaagattatccacgacttcccacagttctaccccctggggatcgttcagcacgattag

SEQ ID NO: 133760 - DNA, 366 bp, Artificial Sequence
  derived and/or modified sequence
atggtggacatgatggacctgccccggagccggatcaacgccggcatgctggcccagtttatagacaagcccgtctgctttgtcggacggttagaaaaaattcacccgacaggtaagatgtttattctgtccgacggcgaggggaaaaatggcacgatagagcttatggaacctctggacgaagaaatcagtggaatcgtagaggtcgtgggacgtgtgacagctaaggctacaatcctgtgtaccagctacgttcagttcaaagaagattctcacccctttgacctgggcctgtataacgaagccgtgaaaattattcacgacttccctcagttttacccgctgggcatcgtgcagcatgattag

SEQ ID NO: 133761 - DNA, 366 bp, Artificial Sequence
  derived and/or modified sequence
atggtagacatgatggacctacctcggtctagaatcaatgccggaatgcttgcgcagtttatcgataagcctgtgtgctttgtcgggcgtttagaaaagattcatcccaccggcaaaatgtttatactgtccgatggagaaggtaaaaacggaactattgagctgatggaacctcttgacgaagagatcagcggtatcgttgaggtggtcggccgagtgaccgccaaggcgacgatcctctgtacgagttacgtccaattcaaagaggactcacacccattcgacctggggctttacaacgaagcagtgaaaatcattcacgactttccccagttttatccactgggcattgtgcagcacgactag

SEQ ID NO: 133762 - protein, 607 aa, Artificial Sequence
  derived and/or modified sequence
MEAPAAGLFLLLLLGTWAPAPGSASSEAPPLINEDVKRTVDLSSHLAKVTAEVVLAHLGGGSTSRATSFLLALEPELEARLAHLGVQVKGEDEEENNLEVRETKIKGKSGRFFTVKLPVALDPGAKISVIVETVYTHVLHPYPTQITQSEKQFVVFEGNHYFYSPYPTKTQTMRVKLASRNVESYTKLGNPTRSEDLLDYGPFRDVPAYSQDTFKVHYENNSPFLTITSMTRVIEVSHWGNIAVEENVDLKHTGAVLKGPFSRYDYQRQPDSGISSIRSFKTILPAAAQDVYYRDEIGNVSTSHLLILDDSVEMEIRPRFPLFGGWKTHYIVGYNLPSYEYLYNLGDQYALKMRFVDHVFDEQVIDSLTVKIILPEGAKNIEIDSPYEISRAPDELHYTYLDTFGRPVIVAYKKNLVEQHIQDIVVHYTFNKVLMLQEPLLVVAAFYILFFTVIIYVRLDFSITKDPAAEARMKVACITEQVLTLVNKRIGLYRHFDETVNRYKQSRDISTLNSGKKSLETEHKALTSEIALLQSRLKTEGSDLCDRVSEMQKLDAQVKELVLKSAVEAERLVAGKLKKDTYIENEKLISGKRQELVTKIDHILDAL

SEQ ID NO: 133763 - protein, 435 aa, Artificial Sequence
  derived and/or modified sequence
MRVKLASRNVESYTKLGNPTRSEDLLDYGPFRDVPAYSQDTFKVHYENNSPFLTITSMTRVIEVSHWGNIAVEENVDLKHTGAVLKGPFSRYDYQRQPDSGISSIRSFKTILPAAAQDVYYRDEIGNVSTSHLLILDDSVEMEIRPRFPLFGGWKTHYIVGYNLPSYEYLYNLGDQYALKMRFVDHVFDEQVIDSLTVKIILPEGAKNIEIDSPYEISRAPDELHYTYLDTFGRPVIVAYKKNLVEQHIQDIVVHYTFNKVLMLQEPLLVVAAFYILFFTVIIYVRLDFSITKDPAAEARMKVACITEQVLTLVNKRIGLYRHFDETVNRYKQSRDISTLNSGKKSLETEHKALTSEIALLQSRLKTEGSDLCDRVSEMQKLDAQVKELVLKSAVEAERLVAGKLKKDTYIENEKLISGKRQELVTKIDHILDAL

SEQ ID NO: 133764 - protein, 378 aa, Artificial Sequence
  derived and/or modified sequence
MTRVIEVSHWGNIAVEENVDLKHTGAVLKGPFSRYDYQRQPDSGISSIRSFKTILPAAAQDVYYRDEIGNVSTSHLLILDDSVEMEIRPRFPLFGGWKTHYIVGYNLPSYEYLYNLGDQYALKMRFVDHVFDEQVIDSLTVKIILPEGAKNIEIDSPYEISRAPDELHYTYLDTFGRPVIVAYKKNLVEQHIQDIVVHYTFNKVLMLQEPLLVVAAFYILFFTVIIYVRLDFSITKDPAAEARMKVACITEQVLTLVNKRIGLYRHFDETVNRYKQSRDISTLNSGKKSLETEHKALTSEIALLQSRLKTEGSDLCDRVSEMQKLDAQVKELVLKSAVEAERLVAGKLKKDTYIENEKLISGKRQELVTKIDHILDAL

SEQ ID NO: 133765 - protein, 581 aa, Artificial Sequence
  derived and/or modified sequence
MEAPAAGLFLLLLLGTWAPAPGSASSEAPPLINEDVKRTVDLSSHLAKVTAEVVLAHLGVQVKGEDEEENNLEVRETKIKGKSGRFFTVKLPVALDPGAKISVIVETVYTHVLHPYPTQITQSEKQFVVFEGNHYFYSPYPTKTQTMRVKLASRNVESYTKLGNPTRSEDLLDYGPFRDVPAYSQDTFKVHYENNSPFLTITSMTRVIEVSHWGNIAVEENVDLKHTGAVLKGPFSRYDYQRQPDSGISSIRSFKTILPAAAQDVYYRDEIGNVSTSHLLILDDSVEMEIRPRFPLFGGWKTHYIVGYNLPSYEYLYNLGDQYALKMRFVDHVFDEQVIDSLTVKIILPEGAKNIEIDSPYEISRAPDELHYTYLDTFGRPVIVAYKKNLVEQHIQDIVVHYTFNKVLMLQEPLLVVAAFYILFFTVIIYVRLDFSITKDPAAEARMKVACITEQVLTLVNKRIGLYRHFDETVNRYKQSRDISTLNSGKKSLETEHKALTSEIALLQSRLKTEGSDLCDRVSEMQKLDAQVKELVLKSAVEAERLVAGKLKKDTYIENEKLISGKRQELVTKIDHILDAL

SEQ ID NO: 133766 - DNA, 1824 bp, Artificial Sequence
  derived and/or modified sequence
atggaagcgccagcagccggtttatttctgttgctactcctaggcacgtgggcccctgctcctgggtccgctagcagcgaagccccacctctgatcaacgaggatgttaagagaacagtggaccttagcagccatctggcaaaagttaccgctgaagtcgtgctagctcacctcggagggggcagcacaagcagggcaacctccttcctgttagcattagaaccagagttggaagcccggctggcccacctaggagtgcaggttaagggcgaggacgaagaggaaaacaatttagaggtgagagagactaaaattaaggggaaaagtggacggtttttcaccgtcaaactgcccgtggctctggatccaggggccaagatttccgtcatagtcgagaccgtgtacacccatgttttacacccctatcctacccaaatcactcagagcgaaaaacagttcgttgtcttcgagggaaatcactatttttacagcccctatccaaccaagacgcagaccatgcgtgttaagctcgcttcccgcaacgtggaaagttacacgaagcttggcaatcccacaagatcagaagatttgctcgactacggtccttttcgcgatgtgcccgcatacagccaggatactttcaaggtacactacgaaaataattccccttttctcacaatcacgtctatgactcgggttatcgaagtcagccattggggaaatatcgccgtggaggagaatgtagacttgaagcacaccggtgcagtcttaaagggacctttcagtagatacgattatcagaggcagcccgatagtggcattagctctattaggagtttcaagactattttacccgcggccgcccaggacgtctattaccgtgacgaaattgggaacgtgtcaacttcacacctgctgatactagatgactccgtcgagatggagatcagacccaggttccctctctttgggggctggaagacccattatatcgttggttataaccttccgtcatatgaatatctgtataatcttggagaccaatacgctctgaagatgcgatttgtcgaccacgtgtttgacgagcaggtgatagactcactgacagtgaagattatacttccagaaggcgcgaagaatattgagatcgatagcccgtacgaaatttcccgcgcccctgacgagctccactatacgtacctggacacattcggccggccagtgattgttgcatacaagaagaacctcgttgagcagcacattcaggatatagttgtgcattacactttcaacaaagtgctcatgctccaagaaccgctgctggtcgttgccgctttttatatcttattcttcacagtcatcatctatgtgcggctggatttcagtattaccaaagaccctgccgccgaggcacggatgaaagttgcatgcatcaccgaacaggtgcttacactggtgaacaagcggattggcttatatagacatttcgatgaaaccgtcaataggtataagcagtcccgcgatatctctacattaaacagcggcaaaaagtcgttggagactgagcataaggcgctcactagcgaaatcgcgctgctccaaagccgtttaaaaaccgaagggagtgatctgtgcgaccgcgtgagcgaaatgcagaagttggacgctcaggtgaaagagcttgttctgaaaagtgcagtggaggccgagcggctggtcgcggggaagctcaagaaggacacttacatcgagaatgaaaagttgatcagtggaaaacgtcaggaattggtcaccaagattgaccatattctcgacgctctgtag

SEQ ID NO: 133767 - DNA, 1308 bp, Artificial Sequence
  derived and/or modified sequence
atgcgcgtgaagctggcctcccgcaacgtggaaagctataccaagttaggaaacccaacccgatccgaggatctcctcgactatggccctttccgcgatgtgcctgcctacagccaggatacgtttaaggtccactacgaaaataactccccattcttgacgatcacctccatgactcgggttatcgaagtatctcattggggaaacatcgctgtggaagagaatgtggatctaaaacatacgggggccgttcttaaaggccccttctcccgttatgattaccagcgacaacctgactcaggtatttcaagcatacgcagcttcaagacgatcctaccagccgcggcccaggatgtatactaccgggacgagataggcaacgtttccacatcccacctgctcatcttggacgacagtgtcgagatggaaatccggcctagattccccctcttcggcggatggaagacccactatattgtcggctacaacctccccagctacgagtatctgtataatcttggtgaccagtacgctctgaagatgaggttcgtggaccacgtattcgatgagcaagtgatcgactccttgactgtgaaaattattctgccagagggcgctaagaacattgagattgacagcccatacgaaataagtagagcccccgacgaactgcattacacctacctagacaccttcggaagacctgtgattgttgcgtacaagaaaaacttggtggagcagcacattcaagacattgtcgtgcactacactttcaataaagtgttgatgctgcaggaaccattgctcgtcgttgccgcattttacatcttattctttaccgtgatcatatacgttcgcttggacttttcaattacgaaggatcccgctgctgaagcaagaatgaaagtagcgtgtattacagagcaagtgctgactctggtgaacaagcgtatcggactgtatcgtcatttcgacgaaaccgtgaacagatacaaacagagcagggatatctccactcttaacagtggcaaaaaatccttggagacggagcacaaggccctcacaagcgagattgccctactgcagtcccgacttaaaaccgagggctccgatttgtgtgacagggtgtccgaaatgcagaagttggatgcacaggtgaaagagcttgttttgaaatcggccgtggaagctgagcgtctcgtagcaggaaagttgaaaaaggacacttacattgaaaacgagaaacttattagcggtaagaggcaggagctcgtgactaagatcgaccacatccttgatgctctgtag

SEQ ID NO: 133768 - DNA, 1137 bp, Artificial Sequence
  derived and/or modified sequence
atgacacgagtgattgaggtctcacactgggggaatattgccgtggaagaaaacgtggacctgaaacatacaggcgcagtgttaaaaggacccttcagtaggtacgactaccaacgccaaccagactcgggcatttcctccattagatcattcaaaaccattctccccgccgccgcgcaggacgtttattaccgcgacgagattggtaatgtgtctacatctcacctacttatcctagatgacagtgtggaaatggaaattcgtccgcgctttccactatttgggggctggaagacccactatattgtgggatacaatttgccaagctacgagtacctgtacaatttgggcgatcagtatgcacttaagatgcgtttcgttgatcacgtgttcgacgaacaggtgattgacagcctcacggtcaagatcatacttccagaaggagccaaaaatattgagattgactctccctacgagattagtcgggcacctgacgaactacactatacgtacctggacaccttcggacggccagtgatcgtggcctacaagaagaatttggtggagcagcatatccaggacatcgtagtgcactatacttttaataaggtgcttatgctgcaggaaccactgcttgtggtggctgctttttacatcctattcttcactgtgatcatctacgtccgccttgatttctccattactaaggaccccgccgctgaggctcgcatgaaggtagcctgcattactgagcaagtcctgacactcgtcaataagcgcattggtctgtataggcatttcgacgagacagtaaaccgctacaagcaatctagggatatctctacactgaacagcggaaagaagtctctggaaacagaacataaagctctgacttcagaaatcgctctgctgcagtcccgtcttaagaccgaaggatccgacctttgcgatagggtgtccgaaatgcaaaagttagatgcacaggtcaaggagctcgtgctgaaatccgctgttgaagcagagcgacttgtcgccggcaaactgaaaaaggacacctatatcgagaacgaaaagctgatcagcggtaaaaggcaggagctcgtgacaaagatcgatcacatccttgacgctctgtag

SEQ ID NO: 133769 - DNA, 1746 bp, Artificial Sequence
  derived and/or modified sequence
atggaagctccagcggccgggttgttccttctgctgttactggggacatgggccccagcccccggctcagcctcatctgaagctcctccactgatcaacgaagacgtgaaacgaactgttgacctgtcatctcatctggctaaggttaccgctgaggtggttcttgcccatcttggggttcaggtgaagggggaagacgaggaggagaataacttggaggtgcgggaaacaaagattaagggcaaatctgggagatttttcacggtgaaactgccagtcgccttagatccaggcgctaaaatttcagtgatcgtagaaacagtatacactcacgtgctgcatccctaccctactcagatcacacagagtgaaaaacagtttgtcgtcttcgagggcaatcactacttctactctccatacccgaccaagactcaaaccatgcgggtaaaacttgcttccaggaacgtggaatcctatactaagctcggcaaccctaccaggtccgaggaccttttggactacggcccgttcagagatgtcccggcttattcccaggacacattcaaggtccactacgagaacaacagtcctttcctgaccatcaccagtatgacccgggttattgaggtcagtcactgggggaatattgcagttgaagagaacgttgatttgaaacacacaggcgccgttctgaagggcccattcagcaggtacgattatcagagacaaccagattcgggcatcagcagtatccgatcattcaaaacaattctgccagctgcagcacaggacgtgtactaccgcgatgagatcgggaatgtgagcaccagtcacctgctgattctggacgattccgtggaaatggaaataaggccaaggttcccattatttggagggtggaaaacccactatattgtgggctataatctgccttcctatgagtacctctacaatctgggtgatcagtatgcccttaagatgcgattcgtcgatcacgtatttgacgaacaggtgattgactctctgactgtgaaaatcatcctgcctgaaggcgctaaaaacatcgagatcgacagcccctacgaaataagtagggcacccgatgaactgcattacacctacttggatacatttggtcgcccggtgatcgttgcctacaagaagaacctggtagaacagcacatccaggacatagtcgtgcactatacattcaacaaggttttgatgcttcaggagccactgctcgtggtagccgccttctacatattatttttcactgtgatcatctatgttcgtctggatttctcaattacgaaggatcctgccgccgaggcaaggatgaaagtggcatgtatcacagagcaagtccttacactggtgaacaagcgtattggtctgtaccgacacttcgacgagaccgtgaaccggtacaaacagagtcgagacattagcacactgaacagcggaaagaagagcctggagactgaacataaggccctgaccagcgaaattgccctgttacagtcaaggttgaaaacagaagggtccgacttgtgcgaccgcgtatcagagatgcaaaagctggatgcccaggttaaggagttagtcttaaagagtgccgtcgaggccgagcggctcgtagccggcaaattaaaaaaggacacttacatcgaaaacgaaaagctgattagcggaaagaggcaagagctggtgaccaagatagaccatatactcgacgccctgtag

SEQ ID NO: 133770 - DNA, 1824 bp, Artificial Sequence
  derived and/or modified sequence
atggaggccccagctgctggcctcttcctgctgctgctgctgggcacctgggccccagcccctggcagcgccagcagcgaggcccctcctctcatcaatgaagatgtgaagaggacagtggacctgagcagccacctggccaaggtgacagctgaggtggtgctggcccacctgggcggcggcagcaccagccgggccaccagcttcctgctggccctggagcctgagctggaggcccggctggcccacctgggcgtgcaggtgaagggagaagatgaggaggagaacaacctggaggtgcgggagaccaagatcaagggcaagagcggccgcttcttcaccgtgaagctgcctgtggccctggaccccggggccaagatcagcgtcatcgtggagaccgtgtacacccacgtgctgcacccctaccccacccagatcacccagagcgagaagcagtttgtggtgtttgagggcaaccactacttctacagcccctaccccaccaagacccagaccatgagggtgaagctggccagcagaaatgtggagagctacaccaagctgggcaaccccaccaggtctgaggacctgctggactatggccccttcagagatgtgcctgcctacagccaggacaccttcaaggtgcactatgagaacaacagccccttcctgaccatcacctccatgaccagggtcatcgaggtgagccactggggcaacattgctgtggaggagaatgtggacctgaagcacactggagctgtgctgaagggccccttcagccgctatgactaccagaggcagcctgacagcggcatcagcagcatccgctccttcaagaccatcctgcctgctgctgcccaggatgtgtactacagagatgaaattggaaatgtgtccaccagccacctgctgatcctggatgattctgtggagatggagatccggccccgcttccccctgtttggaggctggaagacccactacatcgtgggctacaacctgcccagctatgagtacctgtacaacctgggggaccagtatgccctgaagatgagatttgtggaccacgtgtttgatgagcaggtgattgacagcctgactgtgaagatcatcctgcctgagggcgccaagaacattgaaattgacagcccctatgagatcagccgggccccagatgagctgcactacacctacctggacaccttcggccggcctgtgattgtggcctacaagaagaacctggtggagcagcacatccaggacatcgtggtgcactacaccttcaacaaggtgctgatgctgcaggagcccctgctggtggtggccgccttctacatcctcttcttcaccgtcatcatctacgtgcggctggacttcagcatcaccaaggaccctgctgctgaggccaggatgaaggtggcctgcatcacagagcaggtgctgaccctggtgaacaagagaattggcctgtaccgccactttgatgaaacagtgaaccgctacaagcagagccgggacatcagcaccctgaacagcggcaagaagagcctggagacagagcacaaggccctgaccagcgagatcgccctgctgcagagccggctgaagacagagggcagtgacctgtgtgacagagtgtctgagatgcagaagctggatgcccaggtgaaggagctggtgctgaagtctgctgtggaggccgagcggctggtggccggcaagctgaagaaggacacctacattgaaaatgagaagctgatcagcggcaagaggcaggagctggtgaccaagattgaccacatcctggatgccctgtag

SEQ ID NO: 133771 - DNA, 1308 bp, Artificial Sequence
  derived and/or modified sequence
atgagggtgaagctggccagcagaaatgtggagagctacaccaagctgggcaaccccaccaggtctgaggacctgctggactatggccccttcagagatgtgcctgcctacagccaggacaccttcaaggtgcactatgagaacaacagccccttcctgaccatcacctccatgaccagggtcatcgaggtgagccactggggcaacattgctgtggaggagaatgtggacctgaagcacactggagctgtgctgaagggccccttcagccgctatgactaccagaggcagcctgacagcggcatcagcagcatccgctccttcaagaccatcctgcctgctgctgcccaggatgtgtactacagagatgaaattggaaatgtgtccaccagccacctgctgatcctggatgattctgtggagatggagatccggccccgcttccccctgtttggaggctggaagacccactacatcgtgggctacaacctgcccagctatgagtacctgtacaacctgggggaccagtatgccctgaagatgagatttgtggaccacgtgtttgatgagcaggtgattgacagcctgactgtgaagatcatcctgcctgagggcgccaagaacattgaaattgacagcccctatgagatcagccgggccccagatgagctgcactacacctacctggacaccttcggccggcctgtgattgtggcctacaagaagaacctggtggagcagcacatccaggacatcgtggtgcactacaccttcaacaaggtgctgatgctgcaggagcccctgctggtggtggccgccttctacatcctcttcttcaccgtcatcatctacgtgcggctggacttcagcatcaccaaggaccctgctgctgaggccaggatgaaggtggcctgcatcacagagcaggtgctgaccctggtgaacaagagaattggcctgtaccgccactttgatgaaacagtgaaccgctacaagcagagccgggacatcagcaccctgaacagcggcaagaagagcctggagacagagcacaaggccctgaccagcgagatcgccctgctgcagagccggctgaagacagagggcagtgacctgtgtgacagagtgtctgagatgcagaagctggatgcccaggtgaaggagctggtgctgaagtctgctgtggaggccgagcggctggtggccggcaagctgaagaaggacacctacattgaaaatgagaagctgatcagcggcaagaggcaggagctggtgaccaagattgaccacatcctggatgccctgtag

SEQ ID NO: 133772 - DNA, 1137 bp, Artificial Sequence
  derived and/or modified sequence
atgaccagggtgattgaggtgagccactggggcaacattgctgtggaggagaatgtggacctgaagcacactggagctgtgctgaagggccccttcagccgctatgactaccagaggcagccagattctggcatcagcagcatccgctccttcaagaccatcctgcctgctgctgcccaggatgtgtactacagagatgaaattggaaatgtgtccaccagccacctgctgatcctggatgacagcgtggagatggagatccggccccgcttccccctgtttggaggctggaagacccactacatcgtgggctacaacctgcccagctatgagtacctgtacaacctgggggaccagtatgccctgaagatgagatttgtggaccacgtgtttgatgagcaggtgattgacagcctgactgtgaagatcatcctgcctgagggcgccaagaacatcgagattgacagcccctatgagatcagccgggccccagatgagctgcactacacctacctggacaccttcggccggcctgtgattgtggcctacaagaagaacctggtggagcagcacatccaggacatcgtggtgcactacaccttcaacaaggtgctgatgctgcaggagcccctgctggtggtggccgccttctacatcctcttcttcaccgtcatcatctacgtgcggctggacttcagcatcaccaaggaccctgctgctgaggccaggatgaaggtggcctgcatcacagagcaggtgctgaccctggtgaacaagagaattggcctgtaccgccactttgatgagaccgtgaaccgctacaagcagagccgggacatcagcaccctgaacagcggcaagaagagcctggagacagagcacaaggccctgaccagcgagatcgccctgctgcagagccggctgaagacagagggcagtgacctgtgtgacagagtgtctgagatgcagaagctggatgcccaggtgaaggagctggtgctgaagtctgctgtggaggccgagcggctggtggccggcaagctgaagaaggacacctacattgaaaatgagaagctgatcagcggcaagaggcaggagctggtgaccaagattgaccacatcctggatgccctgtag

SEQ ID NO: 133773 - DNA, 1746 bp, Artificial Sequence
  derived and/or modified sequence
atggaggccccagctgctggcctcttcctgctgctgctgctgggcacctgggccccagcccctggcagcgccagcagcgaggcccctcctctcatcaatgaagatgtgaagaggacagtggacctgagcagccacctggccaaggtgacagctgaggtggtgctggcccacctgggcgtgcaggtgaagggagaagatgaggaggagaacaacctggaggtgcgggagaccaagatcaagggcaagagcggccgcttcttcaccgtgaagctgcctgtggccctggaccccggggccaagatcagcgtcatcgtggagaccgtgtacacccacgtgctgcacccctaccccacccagatcacccagagcgagaagcagtttgtggtgtttgagggcaaccactacttctacagcccctaccccaccaagacccagaccatgagggtgaagctggccagcagaaatgtggagagctacaccaagctgggcaaccccaccaggtctgaggacctgctggactatggccccttcagagatgtgcctgcctacagccaggacaccttcaaggtgcactatgagaacaacagccccttcctgaccatcacctccatgaccagggtcatcgaggtgagccactggggcaacattgctgtggaggagaatgtggacctgaagcacactggagctgtgctgaagggccccttcagccgctatgactaccagaggcagcctgacagcggcatcagcagcatccgctccttcaagaccatcctgcctgctgctgcccaggatgtgtactacagagatgaaattggaaatgtgtccaccagccacctgctgatcctggatgattctgtggagatggagatccggccccgcttccccctgtttggaggctggaagacccactacatcgtgggctacaacctgcccagctatgagtacctgtacaacctgggggaccagtatgccctgaagatgagatttgtggaccacgtgtttgatgagcaggtgattgacagcctgactgtgaagatcatcctgcctgagggcgccaagaacattgaaattgacagcccctatgagatcagccgggccccagatgagctgcactacacctacctggacaccttcggccggcctgtgattgtggcctacaagaagaacctggtggagcagcacatccaggacatcgtggtgcactacaccttcaacaaggtgctgatgctgcaggagcccctgctggtggtggccgccttctacatcctcttcttcaccgtcatcatctacgtgcggctggacttcagcatcaccaaggaccctgctgctgaggccaggatgaaggtggcctgcatcacagagcaggtgctgaccctggtgaacaagagaattggcctgtaccgccactttgatgaaacagtgaaccgctacaagcagagccgggacatcagcaccctgaacagcggcaagaagagcctggagacagagcacaaggccctgaccagcgagatcgccctgctgcagagccggctgaagacagagggcagtgacctgtgtgacagagtgtctgagatgcagaagctggatgcccaggtgaaggagctggtgctgaagtctgctgtggaggccgagcggctggtggccggcaagctgaagaaggacacctacattgaaaatgagaagctgatcagcggcaagaggcaggagctggtgaccaagattgaccacatcctggatgccctgtag

SEQ ID NO: 133774 - DNA, 1824 bp, Artificial Sequence
  derived and/or modified sequence
atggaggcccccgccgccggcctgttcctgctgctgctgctgggcacgtgggcaccggcccctggctcggcctcttccgaagcgccacccctgataaacgaggacgtcaagagaaccgtagatcttagtagccatctggccaaagttacagcagaggttgtgctggcacaccttggaggtggatcgacatctagggctactagttttctacttgccctggagcctgaactggaggctcgcctcgcccacctaggggtgcaggtcaagggcgaggacgaagaggagaacaatctggaagttagggaaacgaagatcaaaggaaagtccgggcggttcttcactgtgaaactcccggtggccctggacccaggggctaaaataagtgtaatcgttgagactgtctatacacacgtcctccacccttatccgacgcaaataactcaaagcgaaaagcaattcgtggtctttgaaggaaaccactacttctacagtccatacccaacaaagacacagactatgagagtgaaactggcgtcccgcaacgtggagagttacacaaaactaggcaatccaacccgaagcgaggatttgctggactatgggccgttcagagatgtgccggcctattcccaagatacgtttaaggtgcactatgaaaataattctcccttcttaacaatcacctccatgacccgggtgattgaggtgtctcattggggaaatattgcagtcgaagaaaatgtggatctgaagcataccggcgcagtgcttaaggggcccttctctagatatgactaccagaggcagcccgattccgggatctcttccatccgcagctttaagaccattctccctgccgcggcacaggacgtttactacagagacgagatcggaaacgtctctacaagccacctccttatcctagatgactccgtagagatggagatccggccgcggtttcctctgttcgggggttggaaaacccactatattgttgggtacaacctgccctcttatgagtatctgtacaacctcggtgaccaatatgctttaaaaatgcggttcgtggatcatgtcttcgacgaacaggtcatagactccctcacagtgaaaattatcctccctgaaggagcgaagaacattgagattgacagtccctacgaaatttcgcgtgctcccgacgaactgcactacacctatctcgatacatttggccggccagtcatcgtcgcctacaaaaaaaacctggttgaacaacatatccaggatatcgtggtgcactacacgttcaacaaggtcttgatgctgcaggaacctctgctcgttgtggctgccttctacatactatttttcaccgtcataatctatgtcagacttgatttcagcattaccaaagacccggccgcggaggcccggatgaaggtggcatgtattacagagcaggtgcttacactcgtaaataagaggatcggcctgtatcgtcacttcgatgagaccgttaaccgatataagcagagccgcgatatcagcacacttaatagcggcaagaagagcctggaaaccgagcacaaggcattgactagcgagatcgccctgctgcaaagtcgccttaagactgaggggagcgacctgtgtgatagagtttccgagatgcagaagcttgacgcccaggtgaaagaacttgtcttaaagagcgctgtggaagcagagcgcctcgtggcaggcaaactgaagaaggatacatatattgaaaacgagaagcttatttccggaaaacgccaggaattggtaacgaagatcgatcacatcctggatgcattgtag

SEQ ID NO: 133775 - DNA, 1308 bp, Artificial Sequence
  derived and/or modified sequence
atgcgggtgaagctggccagccggaacgtggagagctacaccaagctgggtaacccaacacgaagcgaagaccttttggactatggaccattcagagacgtgcccgcttatagtcaggatacttttaaagtgcactatgagaataactctcccttcttgacaattacttccatgacaagagtgatcgaagtttcgcactggggtaacattgccgttgaggaaaacgtggacttaaaacacacgggcgcagtgctgaaggggccatttagccgatacgactatcagcgacaacccgactctggtataagtagcatcaggtctttcaagacaattctacccgcagccgctcaagacgtgtattatcgggacgaaataggaaacgtgtcgacgtcccacctactgatacttgatgactctgtggaaatggagattagacctcggttcccactctttggcgggtggaaaactcactatattgtggggtacaatctgccctcctacgagtatctctacaacctcggagaccagtacgctctgaaaatgagatttgttgatcacgtattcgatgagcaggtgatagactccctgactgtaaagattatcttgcccgaaggggccaaaaatatagagatcgactcaccctacgaaatatcccgtgcaccggatgaactacactacacatacctagatacttttggtagacccgtcatcgtcgcgtataagaaaaatctagtggaacaacacatccaggatatcgtggttcactacaccttcaacaaggtcttgatgttgcaggaacctcttttggtggtagccgctttttatatacttttttttaccgtaattatttatgttcgactcgacttttcaattacgaaggatccagccgccgaggcacgcatgaaagtcgcctgcattactgaacaggtgctcaccttggtaaataaacgaatagggctgtacaggcacttcgacgaaacagttaataggtacaaacagagccgcgacatcagtaccctgaactcaggcaagaagagcctcgaaaccgaacacaaagccctgaccagcgaaatcgcactactgcagagtcgattgaaaactgagggttccgacttatgtgaccgcgtcagtgagatgcagaagctcgatgctcaagtaaaagagctagtgctcaagtcagctgttgaggccgaaaggctcgtggccggcaaacttaaaaaggatacttacatagagaacgaaaagctcattagcggaaaacggcaggagctcgtcacgaaaatagaccacatcttggatgccttgtag

SEQ ID NO: 133776 - DNA, 1137 bp, Artificial Sequence
  derived and/or modified sequence
atgacccgggtgatcgaggtgagccactggggcaacatcgccgtggaggagaacgtggacctcaagcatacaggggcagtactaaaaggaccattctcaaggtacgactaccagcgccagcccgattccgggatttcaagcattaggtcgttcaaaaccattctgccggctgcagcacaggatgtgtactacagagacgagattggcaatgtgtcaacctcgcacttgctaattctggatgactcagtggagatggagattcgtcctcgatttcccttgtttggcggatggaaaacccactacatcgtgggctacaacctgccctcttatgaatacctgtacaatttgggtgatcaatatgcgctgaagatgagattcgttgatcacgtttttgatgaacaggtaatcgacagcttgacggtcaaaattatactccccgaaggggctaaaaatatcgaaatagacagcccctatgaaatttccagggcaccagatgaactgcactatacatacttagacacgttcggaaggccagttatcgtagcctacaaaaagaacctcgtggaacagcatattcaggatatcgtcgtacactacaccttcaataaagtcttaatgctgcaggagcctttacttgttgtagcagcgttttatattctattcttcactgtgataatttacgtacgacttgactttagcatcacaaaggatcccgcagctgaggcccgaatgaaagtcgcctgcattaccgaacaagttctcactcttgtcaacaagaggatcgggctctaccgacacttcgatgagactgtgaatcgctataagcagtcccgggacatttcaacccttaattccggcaagaagtccctggagacggagcacaaggccctaaccagcgagatcgccctcctgcagtcgcgcctgaaaacagaaggatccgatctctgcgacagagtgtctgaaatgcaaaagctggatgcccaagtgaaggaacttgtgttaaagtctgctgtggaagctgagcgcctggtggccggcaaactgaaaaaagacacctacatcgagaatgaaaagttaatctcaggcaaacgtcaagaattagtgaccaaaatagatcatatcctcgatgccttatag

SEQ ID NO: 133777 - DNA, 1746 bp, Artificial Sequence
  derived and/or modified sequence
atggaggcccccgccgccggcctgttcctgctgctgctgctgggcacctgggcgcctgcaccaggaagtgctagtagcgaagctccgcctttgataaatgaagacgttaagcgtacggttgacttgagtagtcaccttgcaaaggtgacggccgaggtggtgcttgcccacctaggcgtgcaggttaaaggtgaagacgaagaggagaacaatctcgaggttcgcgagaccaaaatcaagggtaagagtggacggttcttcaccgtgaaactacccgtagctttggaccccggagccaaaatttccgtgatagtcgagacagtatacacacacgttcttcatccttaccccactcagattacccagagtgaaaagcaattcgtggtcttcgaaggaaaccactatttctacagtccttatccgaccaaaacccagactatgagagtgaagctcgcaagccgcaatgttgagtcttacaccaaacttggcaatcccacaagaagcgaggatcttctcgactatggtccttttagggacgtgcctgcatattcccaggatacttttaaagtccattacgagaacaacagcccctttctgacaatcacaagcatgacacgcgtcattgaagtctcccactggggaaatatcgcggtagaagaaaacgtggatcttaaacacactggagccgtgctcaaggggccattcagccgatatgattaccagcgccaacccgattctggaatttctagcataaggagtttcaagaccattttgcccgcagccgctcaggacgtttactaccgggacgagataggaaacgtatctacatcccacttactgatcctggacgatagtgtggaaatggagattcggccgaggtttccgctttttgggggatggaaaacccattatatcgtggggtacaatctaccatcatacgaatatctgtacaacctgggggaccagtacgcactgaagatgagatttgtcgatcatgtcttcgacgagcaggtcatcgatagcctgacagtaaagatcattctccctgagggggccaaaaatatcgaaatcgatagtccatacgagatttcacgggccccggatgaactgcattacacctatttggacacctttgggagaccagttatagtagcttacaagaagaatttagtggaacagcacatacaggacatcgtcgtccattacacttttaacaaagtccttatgctgcaagagcctctgctggtagtggcagcattttacatcctgttctttacagtgatcatttacgtgaggctggatttctcgataaccaaggaccctgccgcagaggctcgcatgaaggttgcctgtatcaccgagcaggtgcttaccctggtgaataagaggattggcctgtacagacacttcgacgaaacggtgaaccggtacaagcagagcagagatatctccactctgaacagtggaaagaaaagtttagagactgagcataaggcgctgaccagtgaaatcgccttgttgcaatctaggctgaagacggagggcagtgacctatgtgatcgggtctcagaaatgcagaagctggacgctcaagtaaaagagctggtgctgaagtccgccgtagaggcagagagactggtcgccgggaagctgaagaaagatacctacatagagaacgagaagcttatttccggaaagaggcaggaactcgtaacaaaaatcgaccacattctggatgctctgtag

SEQ ID NO: 133778 - DNA, 1824 bp, Artificial Sequence
  derived and/or modified sequence
atggaggcacctgcggcaggactgtttcttttgttactcctgggtacttgggccccagcacctggcagtgccagttctgaggcccctcctctcattaatgaggatgtgaagcgtacagtcgatttatccagccatctcgctaaggtgaccgcggaagtcgtgctggctcacctaggcggaggctctacaagccgtgccacatcttttctcctcgctcttgaacccgagctcgaagcgcgactggctcacctgggcgtgcaagtgaagggtgaagatgaggaagagaataatctggaagtcagggagactaagattaaaggaaaatctggaagattcttcactgttaagctgcctgtcgctttggaccctggcgcaaagatctcggtaattgtcgaaacggtgtatacgcacgtgctccatccttatccgactcagatcacccagagcgaaaagcaattcgtggtgtttgaaggaaaccactatttttattcgccttatcctaccaaaactcagaccatgcgggtcaaactggcttcccggaatgtagagtcatatactaagctcggcaatccaacgcggtccgaagacctcttggactatggtcctttcagggatgtgcccgcttatagccaggacacgttcaaggtccattacgagaacaactcccccttcctcaccatcacaagtatgacaagagtgattgaggtttcccattggggcaatatcgccgtggaggaaaacgtggatttgaaacacaccggggcagtgcttaagggcccatttagtcggtacgactatcagagacaaccagactccgggatctcttccattcgtagcttcaaaacgattttaccggcagctgctcaggacgtatattaccgggacgaaatcgggaatgtgtctacatcacacctcctgattctggacgactctgttgaaatggaaatccgcccacggtttcccttgtttgggggatggaaaacgcactatattgtgggatataacctgccctcctacgaatacctctacaacttaggcgaccagtatgccctcaagatgcgattcgttgaccatgtgttcgatgagcaagtcatagatagtctgaccgtgaaaatcatcctacctgagggagccaaaaacattgaaatcgatagcccctacgagatctcccgggcacccgacgagttgcattacacgtatctggacacattcggtcgcccagtgatcgtcgcttataaaaagaaccttgttgaacagcacattcaggacatagttgtccactacacatttaataaggtcctgatgctgcaggaacccctcctcgtggtagctgccttttacatcctgtttttcacagttatcatttacgtgaggctggatttttctattaccaaggacccggctgcagaagcgaggatgaaagtggcttgtattacggaacaggttttaactcttgtgaacaaaaggattggcctttacagacacttcgacgagaccgtcaataggtacaagcaatctagagatataagcacattgaactccggaaaaaaaagcttggaaacagaacataaagccctgacctcagagattgcactgctccagtctagacttaagacagaaggttccgatctgtgcgacagggtgtcagaaatgcaaaagctggatgctcaggttaaggagctggtgctcaaatccgccgtagaagctgaaagactggtagcaggcaagctcaagaaggacacctatatcgaaaacgaaaagctgatttcaggcaagaggcaggagctggtgaccaagatagaccacatcttggatgccttatag

SEQ ID NO: 133779 - DNA, 1308 bp, Artificial Sequence
  derived and/or modified sequence
atgcgggtcaaacttgctagcagaaacgtggaaagctacacgaagctgggcaaccctacccggagtgaggacctgctggattacggtccgttccgcgatgtgccagcttatagtcaggatacttttaaggtgcactatgagaacaactccccctttttgaccatcaccagtatgactagagtgatcgaagtctctcactggggaaacatcgcagttgaggagaacgtggatcttaagcacacgggcgcagtgctcaaagggccttttagtcgatatgactaccagcgtcagcctgactctgggatctctagtattcggagctttaaaacaatcctgccggcagcagctcaggatgtgtactacagggatgaaataggcaatgtgtccactagtcacctactcatcctggatgacagcgtcgaaatggagattcggccaagatttccactctttggcggttggaaaacccactatattgtagggtacaatctaccctcgtacgaatacctgtataacctgggcgatcagtacgcattgaagatgcgcttcgttgatcatgtttttgatgagcaggtgattgatagtcttacagtcaaaataatattgccagagggagcaaaaaatattgagatagactccccttatgaaatctcccgggcacccgatgaacttcactatacgtacctggatacttttggtcggccagtaatcgtggcctacaagaaaaacttggtagaacagcatatccaggatattgtcgtgcattatacttttaataaggtgttaatgttgcaggaacctttactcgtagtagcagcattctacatcctgttcttcacggtgatcatctatgtgagattggatttttctatcacaaaagatcctgccgctgaagcgagaatgaaagtggcatgcatcacagagcaggtgctgactctggttaacaagcgtatagggctgtatcggcactttgatgaaactgtgaatcgatataaacagtctagagacatctcgactctcaacagtggtaagaaatccctggagactgagcacaaggccctcaccagtgagatcgctctccttcaatctcgcttgaagacagagggtagcgacctgtgcgaccgcgtgagcgaaatgcaaaagctggatgctcaagtaaaggaacttgtattgaagtctgccgtcgaggctgaacgactcgtggcgggaaagttaaagaaggatacatatatcgaaaacgagaagctgatcagcggtaagcggcaggagctggtgactaagattgatcacatcctggacgctctctag

SEQ ID NO: 133780 - DNA, 1137 bp, Artificial Sequence
  derived and/or modified sequence
atgaccagggtgattgaggtttcccattggggaaatattgcagtggaagaaaacgtggatctcaagcatactggcgctgtcttgaaggggccattcagtagatacgactatcagaggcagcctgattctggtatcagtagtatcaggtcatttaaaacaatcctgcccgctgctgcgcaggacgtatactacagggatgagataggtaacgtctccaccagtcatctgctgattcttgacgactctgtagaaatggagatcaggcctcgctttcctcttttcgggggttggaaaacgcactacatcgtggggtacaacttgccgtcttacgaatatctgtataacctcggtgatcagtatgcgctgaagatgcgattcgtcgaccatgtttttgatgaacaggttatagacagcctgactgttaagatcattcttcccgagggtgccaaaaacatagaaatcgattccccatatgaaatttcaagagcccctgacgagctgcactatacgtatttagacactttcgggaggccagtcatcgtggcctacaagaaaaatctcgtcgaacagcacattcaggatatcgtggtccattataccttcaacaaggtgctcatgctgcaggagccattgttggttgttgctgccttctacatcttgttctttacagttatcatttatgttaggttagacttcagcattaccaaggaccccgcagcggaggctcgaatgaaggtggcatgtattacagaacaggtcctgactctggttaacaaacggatcggcctgtatcgacatttcgatgagaccgtgaatcgctacaagcagagcagggacatctcaaccctcaactctggcaaaaagagtctggaaactgaacacaaagccttgacctcagagatcgcactgctgcagagccggctcaagacagagggatccgacctctgcgatagggtgtccgaaatgcagaagctcgatgcccaggtgaaagaactagttctgaaaagcgccgttgaggccgaaagactcgtcgccggaaagcttaaaaaggacacttacatcgaaaatgaaaaactgattagtggaaagcgacaggaactggtcaccaagatcgatcatatactggacgctctctag

SEQ ID NO: 133781 - DNA, 1746 bp, Artificial Sequence
  derived and/or modified sequence
atggaggcccctgctgcaggtctgtttctccttcttctactagggacctgggcccctgcaccgggaagcgcctctagcgaggctcccccacttatcaacgaagacgtaaagcggacagtagacctgtcttcgcatcttgctaaagtcacggccgaggtggtgttagcccacctgggcgtgcaagtgaaaggagaggacgaggaggaaaataatctggaggtgagagaaactaagatcaaaggtaagagtggccgatttttcacagtgaaactcccagtagctcttgaccctggcgctaagatctctgttattgtggaaacggtctacactcacgtcctgcatccataccctacgcaaattacccagagtgagaaacagtttgtggtgtttgaggggaatcactacttctattccccttaccctacaaaaacgcaaactatgcgggtgaaactggccagtcgaaacgtagagtcctataccaaactgggaaatcccacaaggtcagaggaccttctggactatggcccatttcgagacgttcccgcatattctcaggatacgtttaaagtacactatgaaaataacagtcctttcctcacaatcacttcaatgaccagagtaatcgaggtgagccactggggcaacatcgcggtggaggagaacgttgatctaaagcacactggtgcggtgctgaagggtcccttctcccggtatgattatcagcgccagcccgatagcggtatatcatccatcaggtcttttaaaacaatacttccagcggcagctcaggacgtctactaccgtgatgagatcgggaacgtaagtacatcccacttgctgatattagacgacagtgtggagatggagattaggcccaggttcccacttttcggtggctggaagactcattacattgtcggatacaacttacccagctacgagtacctgtataatctgggggatcaatacgctctgaaaatgcggtttgtggatcatgttttcgatgaacaggtcattgactccctgacggtaaaaatcatactgcctgagggggcaaaaaatattgagatcgatagtccctacgagattagtagagcccctgatgagttgcattacacatacctcgatacttttggtcgccctgttatcgttgcctacaagaaaaatctggtggaacagcatatccaggatatcgtcgtgcactatacttttaataaagtgttgatgttgcaagagccgctgctggtcgtcgccgcattctatattttgttctttacagtcattatatacgtaagactggatttctccattacaaaagatccagccgcagaagccaggatgaaggtggcatgtataacagagcaggtgctgacccttgtcaacaaacggattggcctgtatcggcactttgacgagactgttaaccgttacaagcagtctcgggatatctcaacgctcaacagcgggaaaaaaagcctggaaaccgaacataaggctttgaccagtgagatcgcgcttcttcagtctcgattgaagactgaaggatcagatttgtgcgacagggtaagtgagatgcagaagttggacgctcaggtcaaggagctcgtgctgaagtccgctgtggaggcagagaggctagtagcaggcaaattgaagaaggacacgtatatagagaatgaaaagctcatcagcggaaaacgtcaggaacttgtcaccaaaatagatcatatcctggacgcattgtag

SEQ ID NO: 133782 - DNA, 2310 bp, Artificial Sequence
  derived and/or modified sequence
gctaccgcgcccgggccctacccgccctggcgcactgctcttcccggtcatggaggcgccagccgccggcttgtttctgctcctgttgcttgggacttgggccccggcgccgggcagcgcctcctccgaggcaccgccgctgatcaatgaggacgtgaagcgcacagtggacctaagcagccacctggctaaggtgacggccgaggtggtcctggcgcacctgggcggcggctccacgtcccgagctacctctttcctgctggctttggagcctgagctcgaggcccggctggcgcacctgggcgtgcaggtaaagggagaagatgaggaagagaacaatttggaagtacgtgaaaccaaaattaagggtaaaagtgggagattcttcacagtcaagctcccagttgctcttgatcctggggccaagatttcagtcattgtggaaacagtctacacccatgtgcttcatccgtatccaacccagatcacccagtcagagaaacagtttgtggtgtttgaggggaaccattatttctactctccctatccaacgaagacacaaaccatgcgtgtgaagcttgcctctcgaaatgtggagagctacaccaagctggggaaccccacgcgctctgaggacctactggattatgggcctttcagagatgtgcctgcctatagtcaggatacttttaaagtacattatgagaacaacagccctttcctgaccatcaccagcatgacccgagtcattgaagtctctcactggggtaatattgctgtggaagaaaatgtggacttaaagcacacaggagctgtgcttaaggggcctttctcacgctatgattaccagagacagccagatagtggaatatcctccatccgttcttttaagaccatccttcctgctgctgcccaggatgtttattaccgggatgagattggcaatgtttctaccagccacctccttattttggatgactctgtagagatggaaatccggcctcgcttccctctctttggcgggtggaagacccattacatcgttggctacaacctcccaagctatgagtacctctataatttgggtgaccagtatgcactgaagatgaggtttgtggaccatgtgtttgatgaacaagtgatagattctctgactgtgaagatcatcctgcctgaaggagccaagaacattgaaattgatagtccctatgaaatcagccgtgccccagatgagctgcactacacctatctggacacatttggccgccctgtgattgttgcctacaagaaaaatctggtagaacagcacattcaggacattgtggtccactacacgttcaacaaggtgctcatgctgcaggagcccctgctggtggtggcggccttctacatcctgttcttcaccgttatcatctatgttcggctggacttctccatcaccaaggatccagccgcagaagccaggatgaaggtagcctgcatcacagagcaggtcttgaccctggtcaacaagagaataggcctttaccgtcactttgacgagaccgtcaataggtacaagcaatcccgggacatctccaccctcaacagtggcaagaagagcctggagactgaacacaaggccttgaccagtgagattgcactgctgcagtccaggctgaagacagagggctctgatctgtgcgacagagtgagcgaaatgcagaagctggatgcacaggtcaaggagctggtgctgaagtcggcggtggaggctgagcgcctggtggctggcaagctcaagaaagacacgtacattgagaatgagaagctcatctcaggaaagcgccaggagctggtcaccaagatcgaccacatcctggatgccctgtagcccctgcccgcatcctccagggggcccagggtgcctgcactttgctgtggcaggcagattgggtggtagtgggaggttgtgcatggaggccagtgaaagctgacatctgtaaaaggccttcaaggaagagaaaccaggccctgcgtcaggcagtgtgagtttgccgtttgtccttaactttctttttttttttttttaaaaaaagaaaactttaaaaaaactcccattaaaaacaaaacatctttgtgttttgaacaaaggaattttcaatatttgattggtattctgttctgaagtctaagatatttttcagcctataaagccccctgttttatgcccttctaattctgatgtttgggtattgtgtgagtgcatgtgtttttttttttttttttaaagcgtgtgtgaacaaatggaaataaagcagggactgtgaa

SEQ ID NO: 133783 - DNA, 2137 bp, Artificial Sequence
  derived and/or modified sequence
catcttttacaagaaaccttcgctgcaaccgctgcgtcacatcaccgcgtctcccagggacaggaaagcctctccgtgtttggtgaagcttcaggggaagcagtcatcctgtcgtcgcatacggcaaaatcctccattgccgtagccgttcggctgacgtgacaagggaggtgcaggccaacacggcgactccgcgccctctggcggcagtgccggagcagcggcgctgtctttgacctatccggcattcggcttccgggaccgcttggcggctgtgaatgcagagctggggcgacgtggggctcgcttcctgggactgggtgtaaagggagaagatgaggaagagaacaatttggaagtacgtgaaaccaaaattaagggtaaaagtgggagattcttcacagtcaagctcccagttgctcttgatcctggggccaagatttcagtcattgtggaaacagtctacacccatgtgcttcatccgtatccaacccagatcacccagtcagagaaacagtttgtggtgtttgaggggaaccattatttctactctccctatccaacgaagacacaaaccatgcgtgtgaagcttgcctctcgaaatgtggagagctacaccaagctggggaaccccacgcgctctgaggacctactggattatgggcctttcagagatgtgcctgcctatagtcaggatacttttaaagtacattatgagaacaacagccctttcctgaccatcaccagcatgacccgagtcattgaagtctctcactggggtaatattgctgtggaagaaaatgtggacttaaagcacacaggagctgtgcttaaggggcctttctcacgctatgattaccagagacagccagatagtggaatatcctccatccgttcttttaagaccatccttcctgctgctgcccaggatgtttattaccgggatgagattggcaatgtttctaccagccacctccttattttggatgactctgtagagatggaaatccggcctcgcttccctctctttggcgggtggaagacccattacatcgttggctacaacctcccaagctatgagtacctctataatttgggtgaccagtatgcactgaagatgaggtttgtggaccatgtgtttgatgaacaagtgatagattctctgactgtgaagatcatcctgcctgaaggagccaagaacattgaaattgatagtccctatgaaatcagccgtgccccagatgagctgcactacacctatctggacacatttggccgccctgtgattgttgcctacaagaaaaatctggtagaacagcacattcaggacattgtggtccactacacgttcaacaaggtgctcatgctgcaggagcccctgctggtggtggcggccttctacatcctgttcttcaccgttatcatctatgttcggctggacttctccatcaccaaggatccagccgcagaagccaggatgaaggtagcctgcatcacagagcaggtcttgaccctggtcaacaagagaataggcctttaccgtcactttgacgagaccgtcaataggtacaagcaatcccgggacatctccaccctcaacagtggcaagaagagcctggagactgaacacaaggccttgaccagtgagattgcactgctgcagtccaggctgaagacagagggctctgatctgtgcgacagagtgagcgaaatgcagaagctggatgcacaggtcaaggagctggtgctgaagtcggcggtggaggctgagcgcctggtggctggcaagctcaagaaagacacgtacattgagaatgagaagctcatctcaggaaagcgccaggagctggtcaccaagatcgaccacatcctggatgccctgtagcccctgcccgcatcctccagggggcccagggtgcctgcactttgctgtggcaggcagattgggtggtagtgggaggttgtgcatggaggccagtgaaagctgacatctgtaaaaggccttcaaggaagagaaaccaggccctgcgtcaggcagtgtgagtttgccgtttgtccttaactttctttttttttttttttaaaaaaagaaaactttaaaaaaactcccattaaaaacaaaacatctttgtgtttt

SEQ ID NO: 133784 - DNA, 1824 bp, Artificial Sequence
  derived and/or modified sequence
gcactgctcttcccggtcatggaggcgccagccgccggcttgtttctgctcctgttgcttgggacttgggccccggcgccgggcagcgcctcctccgaggcaccgccgctgatcaatgaggacgtgaagcgcacagtggacctaagcagccacctggctaaggtgacggccgaggtggtcctggcgcacctgggcggcggctccacgtcccgagctacctctttcctgctggctttggagcctgagctcgaggcccggctggcgcacctgggcgtgcaggtaaagggagaagatgaggaagagaacaatttggaagtacgtgaaaccaaaattaagggtaaaagtgggagattcttcacagtcaagctcccagttgctcttgatcctggggccaagatttcagtcattgtggaaacagtctacacccatgtgcttcatccgtatccaacccagatcacccagtcagagaaacagtttgtggtgtttgaggggaaccattatttctactctccctatccaagcgctctgaggacctactggattatgggcctttcagagatgtgcctgcctatagtcaggatacttttaaagtacattatgagaacaacagccctttcctgaccatcaccagcatgacccgagtcattgaagtctctcactggggtaatattgctgtggaagaaaatgtggacttaaagcacacaggagctgtgcttaaggggcctttctcacgctatgattaccagagacagccagatagtggaatatcctccatccgttcttttaagaccatccttcctgctgctgcccaggatgtttattaccgggatgagattggcaatgtttctaccagccacctccttattttggatgactctgtagagatggaaatccggcctcgcttccctctctttggcgggtggaagacccattacatcgttggctacaacctcccaagctatgagtacctctataatttgggtgaccagtatgcactgaagatgaggtttgtggaccatgtgtttgatgaacaagtgatagattctctgactgtgaagatcatcctgcctgaaggagccaagaacattgaaattgatagtccctatgaaatcagccgtgccccagatgagctgcactacacctatctggacacatttggccgccctgtgattgttgcctacaagaaaaatctggtagaacagcacattcaggacattgtggtccactacacgttcaacaaggtgctcatgctgcaggagcccctgctggtggtggcggccttctacatcctgttcttcaccgttatcatctatgttcggctggacttctccatcaccaaggatccagccgcagaagccaggatgaaggtagcctgcatcacagagcaggtcttgaccctggtcaacaagagaataggcctttaccgtcactttgacgagaccgtcaataggtacaagcaatcccgggacatctccaccctcaacagtggcaagaagagcctggagactgaacacaaggccttgaccagtgagattgcactgctgcagtccaggctgaagacagagggctctgatctgtgcgacagagtgagcgaaatgcagaagctggatgcacaggtcaaggagctggtgctgaagtcggcggtggaggctgagcgcctggtggctggcaagctcaagaaagacacgtacattgagaatgagaagctcatctcaggaaagcgccaggagctggtcaccaagatcgaccacatcctggatgccctgtagcccctgcccgcatcctccagggggcccagggtgcctgcactttgctgtggcaggc

SEQ ID NO: 133785 - DNA, 1828 bp, Artificial Sequence
  derived and/or modified sequence
acccgccctggcgcactgctcttcccggtcatggaggcgccagccgccggcttgtttctgctcctgttgcttgggacttgggccccggcgccgggcagcgcctcctccgaggcaccgccgctgatcaatgaggacgtgaagcgcacagtggacctaagcagccacctggctaaggtgacggccgaggtggtcctggcgcacctgggcgtgcaggtaaagggagaagatgaggaagagaacaatttggaagtacgtgaaaccaaaattaagggtaaaagtgggagattcttcacagtcaagctcccagttgctcttgatcctggggccaagatttcagtcattgtggaaacagtctacacccatgtgcttcatccgtatccaacccagatcacccagtcagagaaacagtttgtggtgtttgaggggaaccattatttctactctccctatccaacgaagacacaaaccatgcgtgtgaagcttgcctctcgaaatgtggagagctacaccaagctggggaaccccacgcgctctgaggacctactggattatgggcctttcagagatgtgcctgcctatagtcaggatacttttaaagtacattatgagaacaacagccctttcctgaccatcaccagcatgacccgagtcattgaagtctctcactggggtaatattgctgtggaagaaaatgtggacttaaagcacacaggagctgtgcttaaggggcctttctcacgctatgattaccagagacagccagatagtggaatatcctccatccgttcttttaagaccatccttcctgctgctgcccaggatgtttattaccgggatgagattggcaatgtttctaccagccacctccttattttggatgactctgtagagatggaaatccggcctcgcttccctctctttggcgggtggaagacccattacatcgttggctacaacctcccaagctatgagtacctctataatttgggtgaccagtatgcactgaagatgaggtttgtggaccatgtgtttgatgaacaagtgatagattctctgactgtgaagatcatcctgcctgaaggagccaagaacattgaaattgatagtccctatgaaatcagccgtgccccagatgagctgcactacacctatctggacacatttggccgccctgtgattgttgcctacaagaaaaatctggtagaacagcacattcaggacattgtggtccactacacgttcaacaaggtgctcatgctgcaggagcccctgctggtggtggcggccttctacatcctgttcttcaccgttatcatctatgttcggctggacttctccatcaccaaggatccagccgcagaagccaggatgaaggtagcctgcatcacagagcaggtcttgaccctggtcaacaagagaataggcctttaccgtcactttgacgagaccgtcaataggtacaagcaatcccgggacatctccaccctcaacagtggcaagaagagcctggagactgaacacaaggccttgaccagtgagattgcactgctgcagtccaggctgaagacagagggctctgatctgtgcgacagagtgagcgaaatgcagaagctggatgcacaggtcaaggagctggtgctgaagtcggcggtggaggctgagcgcctggtggctggcaagctcaagaaagacacgtacattgagaatgagaagctcatctcaggaaagcgccaggagctggtcaccaagatcgaccacatcctggatgccctgtagcccctgcccgcatcctccagggggcccagggtgcctgcactttgctgtggca

SEQ ID NO: 133786 - DNA, 1824 bp, Artificial Sequence
  derived and/or modified sequence
atggaggcccccgccgccggcctgttcctgctgctgctgctgggcacctgggcccccgcccccggcagcgccagcagcgaggccccccccctgatcaacgaggacgtgaagagaaccgtggacctgagcagccacctggccaaggtgaccgccgaggtggtgctggcccacctgggcggcggcagcaccagcagagccaccagcttcctgctggccctggagcccgagctggaggccagactggcccacctgggcgtgcaggtgaagggcgaggacgaggaggagaacaacctggaggtgagagagaccaagatcaagggcaagagcggcagattcttcaccgtgaagctgcccgtggccctggaccccggcgccaagatcagcgtgatcgtggagaccgtgtacacccacgtgctgcacccctaccccacccagatcacccagagcgagaagcagttcgtggtgttcgagggcaaccactacttctacagcccctaccccaccaagacccagaccatgagagtgaagctggccagcagaaacgtggagagctacaccaagctgggcaaccccaccagaagcgaggacctgctggactacggccccttcagagacgtgcccgcctacagccaggacaccttcaaggtgcactacgagaacaacagccccttcctgaccatcaccagcatgaccagagtgatcgaggtgagccactggggcaacatcgccgtggaggagaacgtggacctgaagcacaccggcgccgtgctgaagggccccttcagcagatacgactaccagagacagcccgacagcggcatcagcagcatcagaagcttcaagaccatcctgcccgccgccgcccaggacgtgtactacagagacgagatcggcaacgtgagcaccagccacctgctgatcctggacgacagcgtggagatggagatcagacccagattccccctgttcggcggctggaagacccactacatcgtgggctacaacctgcccagctacgagtacctgtacaacctgggcgaccagtacgccctgaagatgagattcgtggaccacgtgttcgacgagcaggtgatcgacagcctgaccgtgaagatcatcctgcccgagggcgccaagaacatcgagatcgacagcccctacgagatcagcagagcccccgacgagctgcactacacctacctggacaccttcggcagacccgtgatcgtggcctacaagaagaacctggtggagcagcacatccaggacatcgtggtgcactacaccttcaacaaggtgctgatgctgcaggagcccctgctggtggtggccgccttctacatcctgttcttcaccgtgatcatctacgtgagactggacttcagcatcaccaaggaccccgccgccgaggccagaatgaaggtggcctgcatcaccgagcaggtgctgaccctggtgaacaagagaatcggcctgtacagacacttcgacgagaccgtgaacagatacaagcagagcagagacatcagcaccctgaacagcggcaagaagagcctggagaccgagcacaaggccctgaccagcgagatcgccctgctgcagagcagactgaagaccgagggcagcgacctgtgcgacagagtgagcgagatgcagaagctggacgcccaggtgaaggagctggtgctgaagagcgccgtggaggccgagagactggtggccggcaagctgaagaaggacacctacatcgagaacgagaagctgatcagcggcaagagacaggagctggtgaccaagatcgaccacatcctggacgccctgtag

SEQ ID NO: 133787 - DNA, 1308 bp, Artificial Sequence
  derived and/or modified sequence
atgagagtgaagctggccagcagaaacgtggagagctacaccaagctgggcaaccccaccagaagcgaggacctgctggactacggccccttcagagacgtgcccgcctacagccaggacaccttcaaggtgcactacgagaacaacagccccttcctgaccatcaccagcatgaccagagtgatcgaggtgagccactggggcaacatcgccgtggaggagaacgtggacctgaagcacaccggcgccgtgctgaagggccccttcagcagatacgactaccagagacagcccgacagcggcatcagcagcatcagaagcttcaagaccatcctgcccgccgccgcccaggacgtgtactacagagacgagatcggcaacgtgagcaccagccacctgctgatcctggacgacagcgtggagatggagatcagacccagattccccctgttcggcggctggaagacccactacatcgtgggctacaacctgcccagctacgagtacctgtacaacctgggcgaccagtacgccctgaagatgagattcgtggaccacgtgttcgacgagcaggtgatcgacagcctgaccgtgaagatcatcctgcccgagggcgccaagaacatcgagatcgacagcccctacgagatcagcagagcccccgacgagctgcactacacctacctggacaccttcggcagacccgtgatcgtggcctacaagaagaacctggtggagcagcacatccaggacatcgtggtgcactacaccttcaacaaggtgctgatgctgcaggagcccctgctggtggtggccgccttctacatcctgttcttcaccgtgatcatctacgtgagactggacttcagcatcaccaaggaccccgccgccgaggccagaatgaaggtggcctgcatcaccgagcaggtgctgaccctggtgaacaagagaatcggcctgtacagacacttcgacgagaccgtgaacagatacaagcagagcagagacatcagcaccctgaacagcggcaagaagagcctggagaccgagcacaaggccctgaccagcgagatcgccctgctgcagagcagactgaagaccgagggcagcgacctgtgcgacagagtgagcgagatgcagaagctggacgcccaggtgaaggagctggtgctgaagagcgccgtggaggccgagagactggtggccggcaagctgaagaaggacacctacatcgagaacgagaagctgatcagcggcaagagacaggagctggtgaccaagatcgaccacatcctggacgccctgtag

SEQ ID NO: 133788 - DNA, 1137 bp, Artificial Sequence
  derived and/or modified sequence
atgaccagagtgatcgaggtgagccactggggcaacatcgccgtggaggagaacgtggacctgaagcacaccggcgccgtgctgaagggccccttcagcagatacgactaccagagacagcccgacagcggcatcagcagcatcagaagcttcaagaccatcctgcccgccgccgcccaggacgtgtactacagagacgagatcggcaacgtgagcaccagccacctgctgatcctggacgacagcgtggagatggagatcagacccagattccccctgttcggcggctggaagacccactacatcgtgggctacaacctgcccagctacgagtacctgtacaacctgggcgaccagtacgccctgaagatgagattcgtggaccacgtgttcgacgagcaggtgatcgacagcctgaccgtgaagatcatcctgcccgagggcgccaagaacatcgagatcgacagcccctacgagatcagcagagcccccgacgagctgcactacacctacctggacaccttcggcagacccgtgatcgtggcctacaagaagaacctggtggagcagcacatccaggacatcgtggtgcactacaccttcaacaaggtgctgatgctgcaggagcccctgctggtggtggccgccttctacatcctgttcttcaccgtgatcatctacgtgagactggacttcagcatcaccaaggaccccgccgccgaggccagaatgaaggtggcctgcatcaccgagcaggtgctgaccctggtgaacaagagaatcggcctgtacagacacttcgacgagaccgtgaacagatacaagcagagcagagacatcagcaccctgaacagcggcaagaagagcctggagaccgagcacaaggccctgaccagcgagatcgccctgctgcagagcagactgaagaccgagggcagcgacctgtgcgacagagtgagcgagatgcagaagctggacgcccaggtgaaggagctggtgctgaagagcgccgtggaggccgagagactggtggccggcaagctgaagaaggacacctacatcgagaacgagaagctgatcagcggcaagagacaggagctggtgaccaagatcgaccacatcctggacgccctgtag

SEQ ID NO: 133789 - DNA, 1746 bp, Artificial Sequence
  derived and/or modified sequence
atggaggcccccgccgccggcctgttcctgctgctgctgctgggcacctgggcccccgcccccggcagcgccagcagcgaggccccccccctgatcaacgaggacgtgaagagaaccgtggacctgagcagccacctggccaaggtgaccgccgaggtggtgctggcccacctgggcgtgcaggtgaagggcgaggacgaggaggagaacaacctggaggtgagagagaccaagatcaagggcaagagcggcagattcttcaccgtgaagctgcccgtggccctggaccccggcgccaagatcagcgtgatcgtggagaccgtgtacacccacgtgctgcacccctaccccacccagatcacccagagcgagaagcagttcgtggtgttcgagggcaaccactacttctacagcccctaccccaccaagacccagaccatgagagtgaagctggccagcagaaacgtggagagctacaccaagctgggcaaccccaccagaagcgaggacctgctggactacggccccttcagagacgtgcccgcctacagccaggacaccttcaaggtgcactacgagaacaacagccccttcctgaccatcaccagcatgaccagagtgatcgaggtgagccactggggcaacatcgccgtggaggagaacgtggacctgaagcacaccggcgccgtgctgaagggccccttcagcagatacgactaccagagacagcccgacagcggcatcagcagcatcagaagcttcaagaccatcctgcccgccgccgcccaggacgtgtactacagagacgagatcggcaacgtgagcaccagccacctgctgatcctggacgacagcgtggagatggagatcagacccagattccccctgttcggcggctggaagacccactacatcgtgggctacaacctgcccagctacgagtacctgtacaacctgggcgaccagtacgccctgaagatgagattcgtggaccacgtgttcgacgagcaggtgatcgacagcctgaccgtgaagatcatcctgcccgagggcgccaagaacatcgagatcgacagcccctacgagatcagcagagcccccgacgagctgcactacacctacctggacaccttcggcagacccgtgatcgtggcctacaagaagaacctggtggagcagcacatccaggacatcgtggtgcactacaccttcaacaaggtgctgatgctgcaggagcccctgctggtggtggccgccttctacatcctgttcttcaccgtgatcatctacgtgagactggacttcagcatcaccaaggaccccgccgccgaggccagaatgaaggtggcctgcatcaccgagcaggtgctgaccctggtgaacaagagaatcggcctgtacagacacttcgacgagaccgtgaacagatacaagcagagcagagacatcagcaccctgaacagcggcaagaagagcctggagaccgagcacaaggccctgaccagcgagatcgccctgctgcagagcagactgaagaccgagggcagcgacctgtgcgacagagtgagcgagatgcagaagctggacgcccaggtgaaggagctggtgctgaagagcgccgtggaggccgagagactggtggccggcaagctgaagaaggacacctacatcgagaacgagaagctgatcagcggcaagagacaggagctggtgaccaagatcgaccacatcctggacgccctgtag

SEQ ID NO: 133790 - protein, 631 aa, Artificial Sequence
  derived and/or modified sequence
MAPPGSSTVFLLALTIIASTWALTPTHYLTKHDVERLKASLDRPFTNLESAFYSIVGLSSLGAQVPDAKKACTYIRSNLDPSNVDSLFYAAQASQALSGCEISISNETKDLLLAAVSEDSSVTQIYHAVAALSGFGLPLASQEALSALTARLSKEETVLATVQALQTASHLSQQADLRSIVEEIEDLVARLDELGGVYLQFEEGLETTALFVAATYKLMDHVGTEPSIKEDQVIQLMNAIFSKKNFESLSEAFSVASAAAVLSHNRYHVPVVVVPEGSASDTHEQAILRLQVTNVLSQPLTQATVKLEHAKSVASRATVLQKTSFTPVGDVFELNFMNVKFSSGYYDFLVEVEGDNRYIANTVELRVKISTEVGITNVDLSTVDKDQSIAPKTTRVTYPAKAKGTFIADSHQNFALFFQLVDVNTGAELTPHQTFVRLHNQKTGQEVVFVAEPDNKNVYKFELDTSERKIEFDSASGTYTLYLIIGDATLKNPILWNVADVVIKFPEEEAPSTVLSQNLFTPKQEIQHLFREPEKRPPTVVSNTFTALILSPLLLLFALWIRIGANVSNFTFAPSTIIFHLGHAAMLGLMYVYWTQLNMFQTLKYLAILGSVTFLAGNRMLAQQAVKRTAH

SEQ ID NO: 133791 - DNA, 1896 bp, Artificial Sequence
  derived and/or modified sequence
atggcacctcccggcagtagcactgtttttctgttagcactcacaatcattgcaagcacttgggctctgaccccaactcactatctgaccaagcacgacgtcgaacggcttaaagcctccttagataggccctttaccaacctggaatccgccttctactcaattgtaggcctgtctagcctgggggcacaggtgccagatgccaagaaggcatgcacttacatcagatcaaacctggacccttccaacgttgattccttgttctacgctgcgcaggccagccaggccctttctggttgcgaaatcagcatctccaacgaaactaaagacctattgcttgccgccgtttctgaagactcctctgttacacagatctaccatgcagtcgccgccctgtctgggttcggcctgccactggccagccaggaagctctgagtgcgctgacagcccggctgagcaaagaagaaacagtcttggccacagttcaggcacttcagactgcaagtcatctgtctcagcaagctgacctgcggagtatcgtggaagagatcgaagatctggtcgctcggctggacgagctcggaggagtttatctccagtttgaggagggactggagactacagccctatttgtggcagccacatacaagctaatggaccatgtgggcacagagccttccatcaaggaggaccaggtaatacagcttatgaacgccatatttagcaagaaaaattttgagtctctgtcagaggccttttccgtagcatctgcagcggccgtcttgtcccataatcggtaccacgtgcccgttgtggtcgtccccgagggttcagcatctgatactcacgaacaagctattctgaggttacaagtaactaatgtgctctcccagccgctgacgcaagccacagtgaagctggagcacgcaaagtccgtggccagtcgggctacagtacttcagaagactagtttcactcctgttggtgatgtatttgagctgaacttcatgaatgttaaattttcctccggctattatgactttcttgttgaagtggagggcgataaccggtatattgcaaatactgtagagctccgtgtgaagatctctacagaggtgggaattaccaatgttgacctatcaacggtcgacaaggaccaatcaattgcccctaaaaccacccgagtgacctatcccgcaaaagctaaggggacattcatcgctgactcacaccaaaattttgcccttttcttccagctggtcgatgtgaataccggcgccgaactgacgccccaccagacattcgtgcggctgcacaatcagaagactggccaggaggtagttttcgtggctgaacctgataacaagaatgtgtataaatttgaattggacacctcagagaggaaaatagagttcgattcggcctccggtacttacaccctttacctcatcattggcgacgccactctcaagaacccaattctctggaacgtggcagatgttgtgataaagttcccagaagaagaggcccccagcacagtcctgagccagaacttatttacccccaagcaagagattcaacacctgttcagagaacctgaaaagcgcccccctaccgttgtgtccaacactttcaccgccctcatattaagcccactgctgcttctgttcgccctgtggatccgaattggcgccaacgtatccaattttacttttgcgcctagcacaataatcttccacctcggccacgcagccatgctagggttgatgtatgtatattggacccaactcaatatgttccagactctaaagtatttagccatcttaggttccgtgacctttctggctggcaaccgaatgttggctcaacaggccgtgaagaggaccgcccactag

SEQ ID NO: 133792 - DNA, 1896 bp, Artificial Sequence
  derived and/or modified sequence
atggcccctcctggcagcagcaccgtcttcctgctggccctgaccatcatcgccagcacctgggccctgacccccacccactacctgaccaagcatgatgtggagcggctgaaggccagcctggaccggcccttcaccaacctggagagcgccttctacagcatcgtgggcctgagcagcctgggcgcccaggtgcctgatgccaagaaggcctgcacctacatccgcagcaacctggaccccagcaatgtggacagcctcttctacgccgcccaggccagccaggccctgagcggctgtgagatcagcatcagcaatgagaccaaggacctgctgctggccgctgtgtctgaggacagctctgtgacccagatctaccacgctgtggccgccctgagcggcttcggcctgcccctggccagccaggaggccctgagcgccctgacagcccggctgagcaaggaggagaccgtgctggccaccgtgcaggccctgcagacagccagccacctgagccagcaggccgacctgcggagcatcgtggaggagattgaggacctggtggcccggctggatgagctgggcggcgtgtacctgcagtttgaggagggcctggagaccacagccctgtttgtggccgccacctacaagctgatggaccacgtgggcacagagcccagcatcaaggaggaccaggtgatccagctgatgaatgccatcttcagcaagaagaactttgagagcctgtctgaggccttctctgtggccagcgctgctgctgtgctgagccacaaccgctaccacgtgcctgtggtggtggtgcctgagggcagcgccagtgacacccatgagcaggccatcctgcggctgcaggtgaccaacgtgctgagccagcccctgacccaggccaccgtgaagctggagcacgccaagtctgtggccagccgggccaccgtgctgcagaagaccagcttcacccctgtgggagatgtgtttgagctgaacttcatgaatgtgaagttcagcagcggctactatgacttcctggtggaggtggagggggacaaccgctacatcgccaacacagtggagctgcgggtgaagatcagcacagaggtgggcatcaccaacgtggacctgagcacagtggacaaggaccagagcatcgcccccaagaccaccagggtgacctacccagccaaggccaagggcaccttcatcgctgacagccaccagaactttgccctcttcttccagctggtggatgtgaacacaggagctgagctgaccccccaccagacctttgtgcggctgcacaaccagaagacaggccaggaggtggtgtttgtggccgagccagacaacaagaatgtgtacaagtttgagctggacaccagcgagaggaagattgaatttgacagcgccagcggcacctacaccctgtacctgatcattggagatgccaccctgaagaaccccatcctgtggaatgtggctgatgtggtgatcaagtttcctgaggaggaggcccccagcacagtgctgagccagaacctcttcacccccaagcaggagatccagcacctgttccgggagcctgagaagaggcccccaacagtggtgagcaacaccttcaccgccctgatcctgagccccctgctgctgctgtttgccctgtggatcagaattggagccaacgtgagcaacttcacctttgcccccagcaccatcatcttccacctgggccacgccgccatgctgggcctgatgtatgtgtactggacccagctgaacatgttccagaccctgaagtacctggccatcctgggctctgtgaccttcctggccggcaacaggatgctggcccagcaggccgtgaagaggacagcccactag

SEQ ID NO: 133793 - DNA, 1896 bp, Artificial Sequence
  derived and/or modified sequence
atggccccccccggcagcagcaccgtgttcctgctggccctgaccatcattgccagcacgtgggctctaactccaacacactacttgaccaagcatgacgtggaacgcctcaaagcatccctggataggccttttactaaccttgaaagtgctttttactccattgtaggcttatcttctctaggcgctcaggtgcctgacgcaaagaaggcctgcacttacatccgctccaacctggatccttctaacgtggatagcttgttttacgctgcccaagctagccaggccctgagcgggtgcgaaattagtatatccaacgagaccaaggacttgctattggccgctgtgtccgaagatagttcagtaactcagatctatcacgccgtggccgctctgtcagggtttggactccctctggcttcccaggaagccttatccgctctgaccgcgagactctcaaaagaagagacagtgttggctactgtccaggcactacagactgctagccacctctcgcaacaggccgaccttcggtctatcgtggaggagatcgaagacctcgtggcccgcctggacgaacttggaggggtgtatctgcagtttgaggaggggctggaaactacagctttgtttgtcgcagctacctataaactaatggatcatgtggggaccgagccttccatcaaggaggatcaggtcatccaactgatgaatgccattttcagtaaaaagaacttcgaatctctgtccgaggccttttctgtcgcctcagccgctgccgtcctgtctcataataggtaccacgtgcccgttgttgtcgtgcccgaaggtagcgcctcagatactcacgaacaggctatcctgcggctgcaggttactaatgtgttatcccaacccctcacccaggcaactgtgaaacttgaacatgccaaatccgtcgcgtcacgagccactgtcctgcagaagacatcattcacccctgtcggtgatgtgttcgagctcaattttatgaacgtgaagttttcatctggctactacgacttcctggtcgaagtggagggggataacaggtacatagccaacacagtggagctccgggttaaaatctctaccgaagtgggcataacaaatgtagacctctctacggtggataaagatcagagcatcgccccaaaaactacccgagtaacttacccagccaaagccaagggtaccttcatcgcagactctcaccaaaattttgccctctttttccaactggtagatgttaacaccggggcggagctgacgccccatcagaccttcgtccgtttgcacaatcaaaagaccggtcaagaggtggtttttgtagctgaacctgataacaagaacgtctataagttcgagctggacacgtccgaacggaaaatcgagtttgatagcgcatcgggcacatacaccctgtacctgattataggcgatgcaacactgaagaatccaattctgtggaatgtggccgatgtggtgattaaatttcccgaagaggaagcaccctctacagttctcagccaaaacctctttacccctaagcaagagattcaacatctcttccgggagccagagaaacggccaccaactgtggtgagcaacactttcacggcccttatattgtcccctctcctgctgctttttgccttatggattcgaatcggtgctaacgtcagtaatttcacgttcgcaccctcgaccattatctttcacctgggccacgcagccatgcttggcctgatgtatgtgtactggacccagctaaacatgtttcagactctgaagtacctcgcaatcttgggcagcgttacttttctggctggcaaccggatgctggcgcaacaggcagtgaagcgcacagcccactag

SEQ ID NO: 133794 - DNA, 1896 bp, Artificial Sequence
  derived and/or modified sequence
atggcacctccaggctcttctacagtgtttctgcttgctttgactattattgcatccacatgggcgttgacccctacacattatctcactaagcatgacgtggagaggctgaaagcttctctagataggccattcactaacctcgagagtgccttctatagtatagttggcctgtcttctctcggcgctcaggtgccagatgccaagaaggcctgcacgtatatccgttccaacctggacccttcaaacgttgactccttattctacgcagcccaggcttcccaggcgctctccggctgcgaaatcagcatcagcaatgagacgaaagaccttctcctggccgcagtgtccgaggactccagcgtgacgcagatttaccatgcggtggctgccctcagcgggtttggccttccgctcgctagtcaggaggccctgtccgcgttgacagcccgacttagcaaagaggaaacagtgctcgcaacagtgcaggcgctccaaaccgccagtcatctgagccagcaggccgatctgcgctcaatcgtcgaggaaatcgaggacctggtagccaggctcgacgaactggggggtgtttatttgcagtttgaagagggactggaaaccacggccttgttcgtcgccgctacttacaaactcatggatcacgtgggaacagagccaagtattaaagaagatcaagtgatccaactgatgaatgcaatttttagcaagaaaaattttgagtctttgtcagaggcatttagcgtcgcgtctgccgctgctgtactctcccacaataggtatcacgtgcctgtcgtcgtcgtgccagagggatcagcatcagatacccacgaacaagccatactgcgcctgcaggtaacaaatgtgttgtcccagcctctcacacaagcaacagttaagctcgagcacgcaaagagtgttgcttcacgtgccactgtgctgcagaagaccagcttcaccccagtgggggatgtgttcgagctcaatttcatgaatgtgaagttcagtagcgggtattacgactttcttgtggaggtagaaggcgataatagatatatcgccaatacagttgaacttagggtcaagatctctactgaagtgggcatcactaacgtcgacctcagcactgttgataaggatcagtctatcgcccctaaaacgaccagagtcacttaccctgctaaagcaaagggaacatttatcgccgattcccaccaaaatttcgccttgttttttcagctagtggacgttaataccggggctgagctgacaccccatcagacgttcgtaagattgcataatcagaagacggggcaggaagtggtattcgtggctgagcccgataacaagaacgtgtacaagtttgagttggacacgtccgaaagaaaaatcgagttcgactctgcctcgggcacatataccctgtacttaatcataggcgacgccaccttgaaaaaccctatcctgtggaacgttgctgatgttgtcataaagtttcctgaagaggaagctcccagcacggtcttgtcccagaacttatttacacctaagcaggaaattcagcacctattccgcgaacctgaaaaaaggccgccaactgtggtgagcaacacgtttaccgcactcatcttaagtccccttctgttgctctttgctctttggattcgcatcggagctaacgtgtccaatttcactttcgcaccaagtaccatcatcttccatttagggcatgctgcaatgttgggactgatgtatgtgtactggacccagttaaacatgttccaaacactgaagtacctggcgatcctgggctctgtcacttttctagctggcaataggatgctggcccagcaagccgtgaagagaacggcccactag

SEQ ID NO: 133795 - DNA, 2511 bp, Artificial Sequence
  derived and/or modified sequence
gcgtcccggtagctcccggaataggagcgttgcgagacggtcggttccaagtgggcctgggcgcgggggagaggcgggtctgtcctcgggaactgcaaggccctgtgagcgggaggactgggatcccggccgcggctgctggaagcgtcgaagctcagcggggccgcggacactgacctgtgcttagaactcatcctggcccgcagagcctgccgcgagtccctggcgtcccctgtggcgggctcttggagccactttcccgagcggaagtcagcccgcggctcggactccggcgggacctgctcggaggaatggcgccgccgggttcaagcactgtcttcctgttggccctgacaatcatagccagcacctgggctctgacgcccactcactacctcaccaagcatgacgtggagagactaaaagcctcgctggatcgccctttcacaaatttggaatctgccttctactccatcgtgggactcagcagccttggtgctcaggtgccagatgcaaagaaagcatgtacctacatcagatctaaccttgatcccagcaatgtggattccctcttctacgctgcccaggccagccaggccctctcaggatgtgagatctctatttcaaatgagaccaaagatctgcttctggcagctgtcagtgaggactcatctgttacccagatctaccatgcagttgcagctctaagtggctttggccttcccttggcatcccaagaagcactcagtgcccttactgctcgtctcagcaaggaggagactgtgctggcaacagtccaggctctgcagacagcatcccacctgtcccagcaggctgacctgaggagcatcgtggaggagattgaggaccttgttgctcgcctggatgaactcgggggcgtgtatctccagtttgaagaaggactggaaacaacagcgttatttgtggctgccacctacaagctcatggatcatgtggggactgagccatccattaaggaggatcaggtcatccagctgatgaacgcgatcttcagcaagaagaactttgagtccctctccgaagccttcagcgtggcctctgcagctgctgtgctctcgcataatcgctaccacgtgccagttgtggttgtgcctgagggctctgcttccgacactcatgaacaggctatcttgcggttgcaagtcaccaatgttctgtctcagcctctgactcaggccactgttaaactagaacatgctaaatctgttgcttccagagccactgtcctccagaagacatccttcacccctgtaggggatgtttttgaactaaatttcatgaacgtcaaattttccagtggttattatgacttccttgtcgaagttgaaggtgacaaccggtatattgcaaataccgtagagctcagagtcaagatctccactgaagttggcatcacaaatgttgatctttccaccgtggataaggatcagagcattgcacccaaaactacccgggtgacatacccagccaaagccaagggcacattcatcgcagacagccaccagaacttcgccttgttcttccagctggtagatgtgaacactggtgctgaactcactcctcaccagacatttgtccgactccataaccagaagactggccaggaagtggtgtttgttgccgagccagacaacaagaacgtgtacaagtttgaactggatacctctgaaagaaagattgaatttgactctgcctctggcacctacactctctacttaatcattggagatgccactttgaagaacccaatcctctggaatgtggctgatgtggtcatcaagttccctgaggaagaagctccctcgactgtcttgtcccagaaccttttcactccaaaacaggaaattcagcacctgttccgcgagcctgagaagaggccccccaccgtggtgtccaatacattcactgccctgatcctctcgccgttgcttctgctcttcgctctgtggatccggattggtgccaatgtctccaacttcacttttgctcctagcacgattatatttcacctgggacatgctgctatgctgggactcatgtatgtctactggactcagctcaacatgttccagaccttgaagtacctggccatcctgggcagtgtgacgtttctggctggcaatcggatgctggcccagcaggcagtcaagagaacagcacattagttccagaagaaagatggaaattctgaaaactgaatgtcaagaaaaggagtcaagaacaattcacagtatgagaagaaaaatggaaaaaaaaaactttatttaaaaaagaaaaaagtccagattgtagttatacttttgcttgtttttcagtttccccaacacacagcagatacctggtgagctcagatagtctctttctctgacactgtgtaagaagctgtgaatattcctaacttacccagatgttgcttttgaaaagttgaaatgtgtaattgttttggaataaagagggtaacaataggaa

SEQ ID NO: 133796 - DNA, 1896 bp, Artificial Sequence
  derived and/or modified sequence
atggccccccccggcagcagcaccgtgttcctgctggccctgaccatcatcgccagcacctgggccctgacccccacccactacctgaccaagcacgacgtggagagactgaaggccagcctggacagacccttcaccaacctggagagcgccttctacagcatcgtgggcctgagcagcctgggcgcccaggtgcccgacgccaagaaggcctgcacctacatcagaagcaacctggaccccagcaacgtggacagcctgttctacgccgcccaggccagccaggccctgagcggctgcgagatcagcatcagcaacgagaccaaggacctgctgctggccgccgtgagcgaggacagcagcgtgacccagatctaccacgccgtggccgccctgagcggcttcggcctgcccctggccagccaggaggccctgagcgccctgaccgccagactgagcaaggaggagaccgtgctggccaccgtgcaggccctgcagaccgccagccacctgagccagcaggccgacctgagaagcatcgtggaggagatcgaggacctggtggccagactggacgagctgggcggcgtgtacctgcagttcgaggagggcctggagaccaccgccctgttcgtggccgccacctacaagctgatggaccacgtgggcaccgagcccagcatcaaggaggaccaggtgatccagctgatgaacgccatcttcagcaagaagaacttcgagagcctgagcgaggccttcagcgtggccagcgccgccgccgtgctgagccacaacagataccacgtgcccgtggtggtggtgcccgagggcagcgccagcgacacccacgagcaggccatcctgagactgcaggtgaccaacgtgctgagccagcccctgacccaggccaccgtgaagctggagcacgccaagagcgtggccagcagagccaccgtgctgcagaagaccagcttcacccccgtgggcgacgtgttcgagctgaacttcatgaacgtgaagttcagcagcggctactacgacttcctggtggaggtggagggcgacaacagatacatcgccaacaccgtggagctgagagtgaagatcagcaccgaggtgggcatcaccaacgtggacctgagcaccgtggacaaggaccagagcatcgcccccaagaccaccagagtgacctaccccgccaaggccaagggcaccttcatcgccgacagccaccagaacttcgccctgttcttccagctggtggacgtgaacaccggcgccgagctgaccccccaccagaccttcgtgagactgcacaaccagaagaccggccaggaggtggtgttcgtggccgagcccgacaacaagaacgtgtacaagttcgagctggacaccagcgagagaaagatcgagttcgacagcgccagcggcacctacaccctgtacctgatcatcggcgacgccaccctgaagaaccccatcctgtggaacgtggccgacgtggtgatcaagttccccgaggaggaggcccccagcaccgtgctgagccagaacctgttcacccccaagcaggagatccagcacctgttcagagagcccgagaagagaccccccaccgtggtgagcaacaccttcaccgccctgatcctgagccccctgctgctgctgttcgccctgtggatcagaatcggcgccaacgtgagcaacttcaccttcgcccccagcaccatcatcttccacctgggccacgccgccatgctgggcctgatgtacgtgtactggacccagctgaacatgttccagaccctgaagtacctggccatcctgggcagcgtgaccttcctggccggcaacagaatgctggcccagcaggccgtgaagagaaccgcccactag

SEQ ID NO: 133797 - protein, 293 aa, Artificial Sequence [sequence omitted]

SEQ ID NO: 133798 - protein, 235 aa, Artificial Sequence
  derived and/or modified sequence
MADDAGAAGGPGGPGGPGMGNRGGFRGGFGSGIRGRGRGRGRGRGRGRGARGGKAEDKEWMPVTKLGRLVKDMKIKSLEEIYLFSLPIKESEIIDFFLGASLKDEVLKIMPVQKQTRAGQRTRFKVTGRCGSVLVRLIPAPRGTGIVSAPVPKKLLMMAGIDDCYTSARGCTATLGNFAKATFDAISKTYSYLTPDLWKETVFTKSPYQEFTDHLVKTHTRVSVQRTQAPAVATT

SEQ ID NO: 133799 - protein, 178 aa, Artificial Sequence [sequence omitted]

SEQ ID NO: 133800 - protein, 195 aa, Artificial Sequence
  derived and/or modified sequence
VTKLGRLVKDMKIKSLEEIYLFSLPIKAFVAIGDYNGHVGLGVKCSKEVATAIRGAIILAKLSIVPVRRGYWGNKIGKPHTVPCKVTGRCGSVLVRLIPAPRGTGIVSAPVPKKLLMMAGIDDCYTSARGCTATLGNFAKATFDAISKTYSYLTPDLWKETVFTKSPYQEFTDHLVKTHTRVSVQRTQAPAVATT

SEQ ID NO: 133801 - DNA, 882 bp, Artificial Sequence
  derived and/or modified sequence
atggccgatgatgcaggggcagccggagggcccggaggcccaggcgggcctggcatgggaaacaggggtggcttccgcggcggcttcggctcaggtattcgtggacgcggcaggggccgtggccggggccgaggacggggtagaggggctagaggcgggaaagctgaggacaaggagtggatgccagtcacgaaacttgggaggctggtcaaagacatgaaaattaagtcactcgaggaaatttatctattcagtttgcctataaaagagtcggagataattgacttcttcctgggcgctagcctgaaagacgaagtgctgaaaattatgccggtgcagaagcagacgcgtgcgggacagaggacaaggttcaaggcttttgtcgccatcggcgattacaatggacacgtgggactgggtgtgaaatgtagtaaggaagtagcaactgcaatccggggcgcaattatcctggccaagctgagcattgtgcccgtacgtagaggctattggggcaataagatcggcaaaccccataccgtgccctgtaaagtcacaggtcgctgtgggtccgtgttggtgcggctgatccccgccccccgtggtacaggaattgtatcagccccagttcctaaaaaactcctcatgatggccggcatagatgactgttacacatccgccagaggatgcaccgcaacactgggcaactttgccaaggcgactttcgacgccatttctaagacctattcctacctcaccccggatctgtggaaagagaccgtgtttacaaaaagcccttaccaggagttcaccgatcatctggtgaaaacccatactagggtgtctgtgcagcgaacacaggcgcctgcagttgctactacatag

SEQ ID NO: 133802 - DNA, 708 bp, Artificial Sequence
  derived and/or modified sequence
atggccgatgatgctggagcagccggaggccctggcggacccggcggcccaggcatgggtaaccgtgggggtttcagagggggattcgggtcaggaatcaggggcaggggacgcggcagaggccgcggaagaggccgcggacggggcgctaggggaggtaaggcggaggacaaggagtggatgccagtgacaaaacttgggcgtcttgtgaaggatatgaaaataaagtccctcgaggagatctatctgttttcgttgcctatcaaagaatcggagattatagacttcttcctgggcgcctccctcaaggatgaagtcctgaaaattatgccagtgcaaaagcagactagagcagggcagcggacacgctttaaagttaccggaaggtgcggcagcgtgttggtaagactgattcccgccccaaggggcacagggatcgtgagcgccccagtaccaaaaaagctcctcatgatggctgggatagatgattgctacactagcgcaagagggtgtacagcaacgttaggcaattttgctaaagctacctttgacgctatcagtaaaacgtatagctacctcacccctgacctctggaaggagaccgtgtttaccaagagcccttaccaggagttcaccgaccacctggtgaagacccacactcgagtgtcggttcagcggactcaggcacccgcagtggcaactacttag

SEQ ID NO: 133803 - DNA, 537 bp, Artificial Sequence
  derived and/or modified sequence
atggctgatgatgccggagcagcagggggtcccgggggaccaggaggtccgggaatgggcaataggggaggctttcgggggggattcggtagcggcatccgcggccggggaaggggccgcgggagaggccggggaagggggcgaggcgcgcgcggcggcaaggctgaggacaaggaatggatgcccgtgactaaactcggacgtctggtgaaggatatgaagataaagtcactggaagaaatctacctgttctctctgcccatcaaggaaagtgaaattatcgatttttttcttggagcaagcttgaaggatgaggtgctcaaaattatgccagttcaaaaacagacacgcgctgggcagcgtacacgattcaaagtaccagggtgtcccggcggtggctgcgcagggctagctgggaccttatccgctcttcattcttgcacatggttgcatccttgcgactttaggaatggggagagagagaaacgatcgcctcaggacctggggtgggctctgttgtggccacttttcccctag

SEQ ID NO: 133804 - DNA, 588 bp, Artificial Sequence
  derived and/or modified sequence
gttaccaagttggggagactcgtgaaagatatgaaaatcaagtctctagaggaaatatacctcttcagtctgccgatcaaggcatttgtagccataggggactataatgggcacgtcggactgggggttaagtgcagtaaggaggtcgccacggcgataaggggagcaataattctggcgaaactgtctattgtgccagtccggcggggttactggggcaataaaattggaaaacctcatacagtaccttgcaaggtgacagggaggtgtgggtcagtgctggtgagattaatacccgctccaaggggcacagggatcgtttcagcaccggtgccaaagaaactgctgatgatggcaggcattgatgactgttatacttctgcgcggggttgtaccgccaccttgggaaacttcgctaaagccaccttcgatgccatcagcaagacctattcctaccttacccctgatctttggaaggagactgtctttaccaaatcaccttaccaggagtttaccgatcaccttgtgaagactcacactagggtctccgtgcagcggacccaggcccctgcagttgcgaccacctag

SEQ ID NO: 133805 - DNA, 882 bp, Artificial Sequence
  derived and/or modified sequence
atggctgatgatgctggagctgctgggggccctgggggccctgggggccctggcatgggcaacagaggaggcttccggggcggctttggaagtggcatccggggccggggccggggccggggccggggccggggccggggccgcggggcccggggcggcaaggccgaggacaaggagtggatgcctgtgaccaagctgggccgcctggtgaaggacatgaagatcaagagcctggaggagatctacctgttcagcctgcccatcaaggagagcgagatcatcgacttcttcctgggcgccagcctgaaggatgaggtgctgaagatcatgcctgtgcagaagcagacccgggccggccagaggacccgcttcaaggcctttgtggccatcggggactacaacggccacgtgggcctgggcgtgaagtgcagcaaggaggtggccacagccatccggggggccatcatcctggccaagctgagcatcgtgcctgtgcggcggggctactggggcaacaagattggcaagccccacacagtgccctgcaaggtgacaggccgctgtggctctgtgctggtgcggctcatcccagccccccggggcaccggcatcgtgtctgcccctgtgcccaagaagctgctgatgatggccggcattgatgactgctacaccagcgcccggggctgcacagccaccctgggcaactttgccaaggccacctttgatgccatcagcaagacctacagctacctgaccccagacctgtggaaggagaccgtcttcaccaagagcccctaccaggagttcacagaccacctggtgaagacccacaccagggtgtctgtgcagaggacccaggccccagctgtggccaccacctag

SEQ ID NO: 133806 - DNA, 708 bp, Artificial Sequence
  derived and/or modified sequence
atggctgatgatgctggagctgctgggggccctgggggccctgggggccctggcatgggcaacagaggaggcttccggggcggctttggaagtggcatccggggccggggccggggccggggccggggccggggccggggccgcggggcccggggcggcaaggccgaggacaaggagtggatgcctgtgaccaagctgggccgcctggtgaaggacatgaagatcaagagcctggaggagatctacctgttcagcctgcccatcaaggagagcgagatcatcgacttcttcctgggcgccagcctgaaggatgaggtgctgaagatcatgcctgtgcagaagcagacccgggccggccagaggacccgcttcaaggtgacaggccgctgtggctctgtgctggtgcggctcatcccagccccccggggcaccggcatcgtgtctgcccctgtgcccaagaagctgctgatgatggccggcattgatgactgctacaccagcgcccggggctgcacagccaccctgggcaactttgccaaggccacctttgatgccatcagcaagacctacagctacctgaccccagacctgtggaaggagaccgtcttcaccaagagcccctaccaggagttcacagaccacctggtgaagacccacaccagggtgtctgtgcagaggacccaggccccagctgtggccaccacctag

SEQ ID NO: 133807 - DNA, 537 bp, Artificial Sequence
  derived and/or modified sequence
atggctgatgatgctggagctgctgggggccctgggggccctgggggccctggcatgggcaacagaggaggcttccggggcggctttggaagtggcatccggggccggggccggggccggggccggggccggggccggggccgcggggcccggggcggcaaggccgaggacaaggagtggatgcctgtgaccaagctgggccgcctggtgaaggacatgaagatcaagagcctggaggagatctacctgttcagcctgcccatcaaggagagcgagatcatcgacttcttcctgggcgccagcctgaaggatgaggtgctgaagatcatgcctgtgcagaagcagacccgggccggccagaggacccgcttcaaggtgcccggctgccctgggggcggctgtgccggcctggccggcaccctgagcgccctgcacagctgcacctggctgcacccctgtgacttcagaaatggagagcgggagaagaggagcccccaggacctgggctgggccctgctgtggcccctcttcccctag

SEQ ID NO: 133808 - DNA, 588 bp, Artificial Sequence
  derived and/or modified sequence
gtcaccaagctgggccgcctggtgaaggacatgaagatcaagagcctggaggagatctacctgttcagcctgcccatcaaggcctttgtggccatcggggactacaacggccacgtgggcctgggcgtgaagtgcagcaaggaggtggccacagccatccggggggccatcatcctggccaagctgagcatcgtgcctgtgcggcggggctactggggcaacaagattggcaagccccacacagtgccctgcaaggtgacaggccgctgtggctctgtgctggtgcggctcatcccagccccccggggcaccggcatcgtgtctgcccctgtgcccaagaagctgctgatgatggccggcattgatgactgctacaccagcgcccggggctgcacagccaccctgggcaactttgccaaggccacctttgatgccatcagcaagacctacagctacctgaccccagacctgtggaaggagaccgtcttcaccaagagcccctaccaggagttcacagaccacctggtgaagacccacaccagggtgtctgtgcagaggacccaggccccagctgtggccaccacctag

SEQ ID NO: 133809 - DNA, 882 bp, Artificial Sequence
  derived and/or modified sequence
atggccgacgacgccggcgccgccggcggccccggcggccccggcgggcccggaatgggaaatcgtgggggatttcggggtggtttcggcagcggcattagggggaggggacgcggacgggggagggggcgggggagggggcgtggagcaagaggtggaaaggccgaagataaggaatggatgcccgtcaccaagttaggtcgactggttaaggatatgaaaatcaagagcctcgaagaaatctatcttttcagtttgccgattaaggagagcgaaatcatcgacttttttctgggagccagcctcaaagacgaagtgctcaaaatcatgcccgtacaaaagcagaccagagcagggcaacgaacacgctttaaggctttcgtggcaattggcgactataatggccacgtggggctcggagtcaagtgctctaaggaggttgcaaccgccattaggggggctataatcctggctaagctcagtatcgtgccagtgagacgagggtactggggcaacaagattggtaagcctcataccgtaccctgtaaagtaaccgggcggtgtgggtccgtgttggttcgcctgatcccagcaccacgtgggacaggcattgtgtcagcacccgtgccaaaaaaattgttgatgatggcaggtatagatgactgctatacctccgctaggggctgcacagctacgctaggcaattttgccaaggctacattcgacgcaatcagcaagacctattcctacctgactccagatctttggaaagaaacagtgttcaccaaaagcccttaccaggagttcaccgaccacctcgtgaagacccacacacgagtgagtgtacagagaacccaggctcctgccgtggcaacgacatag

SEQ ID NO: 133810 - DNA, 708 bp, Artificial Sequence
  derived and/or modified sequence
atggccgacgacgccggcgccgccggcggccccggcggccccggcggccctggcatggggaatagagggggctttaggggaggattcggaagcggtatcaggggtaggggcagaggtcgtgggcgtggccgaggcagaggtcggggggcccggggggggaaagccgaggataaggaatggatgcccgttacaaagctgggtcgcctcgtgaaggacatgaaaattaagagcctcgaagaaatttatctgttcagtttgcctatcaaggagagcgagataattgatttttttctgggcgcctctctgaaagatgaggtcctcaaaatcatgcccgtccaaaagcagacgagagctggacagagaactcgcttcaaagtgactggacgctgtggcagtgtattggtccgattaatcccggcacctcgcggcactggaatagtttcggcgcctgtgcctaaaaaattgttgatgatggctggaattgacgactgttatacgtcggcgagaggttgtactgcaacactgggaaacttcgcaaaagccacatttgacgccatttccaagacatacagttacttaaccccggatttgtggaaagagactgtgttcactaaatctccctaccaagagtttacagaccacttagtgaagacgcatactagagtatctgtgcaacggactcaggcccccgcggttgccactacatag

SEQ ID NO: 133811 - DNA, 537 bp, Artificial Sequence
  derived and/or modified sequence
atggccgacgacgccggcgccgccggcggccccggcggccccggcggaccaggtatgggaaaccgcggtggcttcaggggcggatttggctctggaattagagggcgtggccgcggacgtggtcggggccgaggaaggggacgcggagcccggggcggaaaggctgaagataaagagtggatgccagtcacgaaactgggaagacttgttaaggatatgaaaatcaagtccctggaagaaatctatctgttctccttgccaattaaggaatccgaaattatagacttttttctcggagcttccctgaaagacgaagtgttgaagattatgccggtccaaaagcagaccagggctgggcagcgcacgaggttcaaagtgcccggctgtcccgggggaggatgtgctgggttagccgggactcttagcgccttgcactcgtgcacatggttgcacccatgtgacttccggaacggcgagcgcgagaagaggtctcctcaagaccttggctgggcacttctgtggcctctgtttccctag

SEQ ID NO: 133812 - DNA, 588 bp, Artificial Sequence
  derived and/or modified sequence
gtgaccaagctgggccggctggtgaaggacatgaagatcaagagcctcgaggagatctacctctttagcctgcctattaaggctttcgtggccattggcgattataacgggcacgtgggcttgggcgtgaagtgtagtaaggaagttgctaccgccataagaggggcaatcatcttggcaaagctatccattgtccctgtgcgacgcggttactggggaaacaagataggaaagccccacacggtcccctgtaaggtgaccggcagatgtggcagcgtgctggtcaggctaatacccgccccccgagggaccggtattgtgagtgccccggtgccaaaaaagctcctcatgatggctggcatcgacgactgctacacatccgcaagaggctgtacggctaccctggggaactttgctaaggctacattcgacgcgatttcaaagacatactcctacctcactcccgatctctggaaagagactgtgttcactaagtctccctaccaggaattcactgaccatctggtgaaaacacatacacgcgtctctgtacagaggacccaggcccctgccgtggccacgacgtag

SEQ ID NO: 133813 - DNA, 882 bp, Artificial Sequence
  derived and/or modified sequence
atggcggatgacgctggagctgctggcggtcctggaggccctggcggacccggaatgggcaatagaggcggatttcgaggtggcttcgggtctggcattcggggacggggtcgcggaagggggcgaggccgagggcgtggacgcggagcgagggggggtaaggctgaggataaggaatggatgcctgtgaccaagctaggccgtctggtgaaagatatgaagatcaaaagcttggaggaaatttacctgttttctttgcctatcaaagaatccgagattatcgatttctttttaggagctagtctgaaagacgaggtgttgaaaatcatgccagtgcaaaagcaaactcgagccggacaacgcactcgcttcaaggcgttcgtggcaataggtgactacaacggacacgtggggctcggtgtgaagtgctctaaagaagttgcgactgccatacgaggggcaattattctcgcaaagctctccatcgtgcctgtccgcagagggtactgggggaacaagattggaaagccacatacagtgccctgcaaggtgacaggaagatgcgggagcgtgttagtccggctgattcctgcaccgagaggtaccgggatagtcagtgctcccgtgcccaagaaattgctgatgatggccggtatagacgattgttacacctccgccaggggatgcacagccacactcggcaacttcgccaaggccacatttgacgcgatttccaaaacgtatagttatttaacacctgacctgtggaaggaaacggtgttcactaaatctccataccaagagtttacagaccacctcgtgaagacgcacactagagtctccgtgcagcgtacacaggcacccgctgtggccacaacgtag

SEQ ID NO: 133814 - DNA, 708 bp, Artificial Sequence
  derived and/or modified sequence
atggcagacgacgccggtgctgccggagggcctggtggacctggcggaccaggcatggggaatagggggggatttcgcggaggctttgggtcgggcattcggggtcggggacggggtagagggagaggcagaggacggggaagaggagctagggggggaaaagcagaagataaagaatggatgccagttacgaagctaggaaggctggttaaagatatgaaaatcaaatctttagaagagatttacctgttttcactgccaattaaggagtcagaaatcattgacttttttctcggagccagtctgaaggacgaagttctcaaaatcatgcctgtgcagaagcagacacgcgcaggccagagaaccaggttcaaggttactggccgatgcggatctgtgctggtacgattaattccggctccaagggggaccggaatcgtcagtgctcctgtcccaaaaaagctgctgatgatggctggcattgatgattgttatacctccgcccgtggctgcacagcaacgctgggcaattttgccaaagctacatttgacgccattagtaagacctatagctatctgaccccagatctttggaaagagacagtctttaccaagtcaccataccaagagttcaccgatcacctcgttaaaacacatactcgagtcagtgtgcagcggacgcaggctcccgctgtagccaccacctag

SEQ ID NO: 133815 - DNA, 537 bp, Artificial Sequence
  derived and/or modified sequence
atggcagatgacgctggtgccgcaggtggcccagggggtccagggggtccgggaatgggaaatagggggggatttcggggaggctttggttcaggcatcagaggcaggggaaggggtcggggacgcggaaggggaaggggtagaggcgctagggggggaaaagccgaggacaaagaatggatgccggtaaccaaacttgggagattggtcaaggacatgaaaattaagtctctagaagagatttatctgttcagtctgcctattaaagaatcggaaattatcgatttctttctgggcgcttcattgaaagacgaggtgcttaagatcatgccagtgcagaagcagacccgggcaggccagcgaacccgttttaaggtgcccggatgccccggaggaggctgcgcaggcctagctggcacactgtctgcccttcattcttgtacttggctgcacccttgcgactttcgtaatggcgagagagaaaagcggagtcctcaggatctgggatgggctctcttgtggcctttattcccttag

SEQ ID NO: 133816 - DNA, 588 bp, Artificial Sequence
  derived and/or modified sequence
gtgacaaagctgggcagattggtgaaggacatgaaaatcaagtccctcgaagaaatctatctttttagcctgcccataaaggctttcgtcgccatcggggactataacggtcatgtgggtcttggagtgaagtgctctaaggaggtggcaaccgccatccggggagctatcattctggccaaactgtcaatcgtcccagtcaggagggggtactgggggaataagattggaaaaccacacactgtgccatgcaaggttaccggtagatgtggtagtgttcttgtgaggctcatcccagcaccaaggggcactgggatcgtgtctgcccctgtgccaaaaaagctgctaatgatggccggtatcgatgactgctacacctctgctcgcggatgtacagccactttgggcaatttcgctaaagcgacttttgacgcaatctctaagacatatagctatctcacacctgatctgtggaaagagacagtattcactaagagcccataccaagagtttactgaccacctggttaagacacacacacgtgtatcagtgcaaaggactcaggcccctgcggtggccaccacttag

SEQ ID NO: 133817 - DNA, 976 bp, Artificial Sequence
  derived and/or modified sequence
gtgctataaaagctgcttcccagtaggtctcgttcttcttttccgacaaaacaccaaatggcggatgacgccggtgcagcgggggggcccgggggccctggtggccctgggatggggaaccgcggtggcttccgcggaggtttcggcagtggcatccggggccggggtcgcggccgtggacggggccggggccgaggccgcggagctcgcggaggcaaggccgaggataaggagtggatgcccgtcaccaagttgggccgcttggtcaaggacatgaagatcaagtccctggaggagatctatctcttctccctgcctattaaggaatcagagatcattgatttcttcctgggggcctctctcaaggatgaggttttgaagattatgccagtgcagaagcagacccgtgccggccagcgcaccaggttcaaggcatttgttgctatcggggactacaatggccacgtcggtctgggtgttaagtgctccaaggaggtggccaccgccatccgtggggccatcatcctggccaagctctccatcgtccccgtgcgcagaggctactgggggaacaagatcggcaagccccacactgtcccttgcaaggtgacaggccgctgcggctctgtgctggtacgcctcatccctgcacccaggggcactggcatcgtctccgcacctgtgcctaagaagctgctcatgatggctggtatcgatgactgctacacctcagcccggggctgcactgccaccctgggcaacttcgccaaggccacctttgatgccatttctaagacctacagctacctgacccccgacctctggaaggagactgtattcaccaagtctccctatcaggagttcactgaccacctcgtcaagacccacaccagagtctccgtgcagcggactcaggctccagctgtggctacaacatagggtttttatacaagaaaaataaagtgaattaagcgtg

SEQ ID NO: 133818 - DNA, 924 bp, Artificial Sequence
  derived and/or modified sequence
agtcctgttggtcgctgcagcgggcctctgcgtgggcggcgggaatccgcggacatcgggtcgggtctaggctcccgagtccgcgctcctgggcgggagcccttgtctgggtctcgcggggggctgccagatgcgtaggccacactgactagttccttcttgtcgcttttcccagcaaatggcggatgacgccggtgcagcgggggggcccgggggccctggtggccctgggatggggaaccgcggtggcttccgcggaggtttcggcagtggcatccggggccggggtcgcggccgtggacggggccggggccgaggccgcggagctcgcggaggcaaggccgaggataaggagtggatgcccgtcaccaagttgggccgcttggtcaaggacatgaagatcaagtccctggaggagatctatctcttctccctgcctattaaggaatcagagatcattgatttcttcctgggggcctctctcaaggatgaggttttgaagattatgccagtgcagaagcagacccgtgccggccagcgcaccaggttcaaggtgacaggccgctgcggctctgtgctggtacgcctcatccctgcacccaggggcactggcatcgtctccgcacctgtgcctaagaagctgctcatgatggctggtatcgatgactgctacacctcagcccggggctgcactgccaccctgggcaacttcgccaaggccacctttgatgccatttctaagacctacagctacctgacccccgacctctggaaggagactgtattcaccaagtctccctatcaggagttcactgaccacctcgtcaagacccacaccagagtctccgtgcagcggactcaggctccagctgtggctacaacatagggtttttatacaagaaaaataaagtgaattaagcgtgt

SEQ ID NO: 133819 - DNA, 1030 bp, Artificial Sequence
  derived and/or modified sequence
agcaaatggcggatgacgccggtgcagcgggggggcccgggggccctggtggccctgggatggggaaccgcggtggcttccgcggaggtttcggcagtggcatccggggccggggtcgcggccgtggacggggccggggccgaggccgcggagctcgcggaggcaaggccgaggataaggagtggatgcccgtcaccaagttgggccgcttggtcaaggacatgaagatcaagtccctggaggagatctatctcttctccctgcctattaaggaatcagagatcattgatttcttcctgggggcctctctcaaggatgaggttttgaagattatgccagtgcagaagcagacccgtgccggccagcgcaccaggttcaaggtacccggctgtcctggagggggctgcgctgggcttgccgggactctctcggctctgcatagttgcacttggcttcacccgtgtgactttcgtaacggggagagagagaaaagatctcctcaggacctcggatgggccttactgtggcctctctttccttgaggggtgcaacaggccctgggcggtgggcagtgattgggtgtagggccaccagctgcctcacacacatcttttcgcaggctccctcgggcccccgtctcctgactccttccctcaccaggtgacaggccgctgcggctctgtgctggtacgcctcatccctgcacccaggggcactggcatcgtctccgcacctgtgcctaagaagctgctcatgatggctggtatcgatgactgctacacctcagcccggggctgcactgccaccctgggcaacttcgccaaggccacctttgatgccatttctaagacctacagctacctgacccccgacctctggaaggagactgtattcaccaagtctccctatcaggagttcactgaccacctcgtcaagacccacaccagagtctccgtgcagcggactcaggctccagctgtggctacaacatagggtttttatacaagaaaaataaagtgaattaagcgtg

SEQ ID NO: 133820 - DNA, 625 bp, Artificial Sequence
  derived and/or modified sequence
gtcaccaagttgggccgcttggtcaaggacatgaagatcaagtccctggaggagatctatctcttctccctgcctattaaggcatttgttgctatcggggactacaatggccacgtcggtctgggtgttaagtgctccaaggaggtggccaccgccatccgtggggccatcatcctggccaagctctccatcgtccccgtgcgcagaggctactgggggaacaagatcggcaagccccacactgtcccttgcaaggtgacaggccgctgcggctctgtgctggtacgcctcatccctgcacccaggggcactggcatcgtctccgcacctgtgcctaagaagctgctcatgatggctggtatcgatgactgctacacctcagcccggggctgcactgccaccctgggcaacttcgccaaggccacctttgatgccatttctaagacctacagctacctgacccccgacctctggaaggagactgtattcaccaagtctccctatcaggagttcactgaccacctcgtcaagacccacaccagagtctccgtgcagcggactcaggctccagctgtggctacaacatagggtttttatacaagaaaaataaagtgaattaagcgtg

SEQ ID NO: 133821 - DNA, 882 bp, Artificial Sequence
  derived and/or modified sequence
atggccgacgacgccggcgccgccggcggccccggcggccccggcggccccggcatgggcaacagaggcggcttcagaggcggcttcggcagcggcatcagaggcagaggcagaggcagaggcagaggcagaggcagaggcagaggcgccagaggcggcaaggccgaggacaaggagtggatgcccgtgaccaagctgggcagactggtgaaggacatgaagatcaagagcctggaggagatctacctgttcagcctgcccatcaaggagagcgagatcatcgacttcttcctgggcgccagcctgaaggacgaggtgctgaagatcatgcccgtgcagaagcagaccagagccggccagagaaccagattcaaggccttcgtggccatcggcgactacaacggccacgtgggcctgggcgtgaagtgcagcaaggaggtggccaccgccatcagaggcgccatcatcctggccaagctgagcatcgtgcccgtgagaagaggctactggggcaacaagatcggcaagccccacaccgtgccctgcaaggtgaccggcagatgcggcagcgtgctggtgagactgatccccgcccccagaggcaccggcatcgtgagcgcccccgtgcccaagaagctgctgatgatggccggcatcgacgactgctacaccagcgccagaggctgcaccgccaccctgggcaacttcgccaaggccaccttcgacgccatcagcaagacctacagctacctgacccccgacctgtggaaggagaccgtgttcaccaagagcccctaccaggagttcaccgaccacctggtgaagacccacaccagagtgagcgtgcagagaacccaggcccccgccgtggccaccacctag

SEQ ID NO: 133822 - DNA, 708 bp, Artificial Sequence
  derived and/or modified sequence
atggccgacgacgccggcgccgccggcggccccggcggccccggcggccccggcatgggcaacagaggcggcttcagaggcggcttcggcagcggcatcagaggcagaggcagaggcagaggcagaggcagaggcagaggcagaggcgccagaggcggcaaggccgaggacaaggagtggatgcccgtgaccaagctgggcagactggtgaaggacatgaagatcaagagcctggaggagatctacctgttcagcctgcccatcaaggagagcgagatcatcgacttcttcctgggcgccagcctgaaggacgaggtgctgaagatcatgcccgtgcagaagcagaccagagccggccagagaaccagattcaaggtgaccggcagatgcggcagcgtgctggtgagactgatccccgcccccagaggcaccggcatcgtgagcgcccccgtgcccaagaagctgctgatgatggccggcatcgacgactgctacaccagcgccagaggctgcaccgccaccctgggcaacttcgccaaggccaccttcgacgccatcagcaagacctacagctacctgacccccgacctgtggaaggagaccgtgttcaccaagagcccctaccaggagttcaccgaccacctggtgaagacccacaccagagtgagcgtgcagagaacccaggcccccgccgtggccaccacctag

SEQ ID NO: 133823 - DNA, 537 bp, Artificial Sequence
  derived and/or modified sequence
atggccgacgacgccggcgccgccggcggccccggcggccccggcggccccggcatgggcaacagaggcggcttcagaggcggcttcggcagcggcatcagaggcagaggcagaggcagaggcagaggcagaggcagaggcagaggcgccagaggcggcaaggccgaggacaaggagtggatgcccgtgaccaagctgggcagactggtgaaggacatgaagatcaagagcctggaggagatctacctgttcagcctgcccatcaaggagagcgagatcatcgacttcttcctgggcgccagcctgaaggacgaggtgctgaagatcatgcccgtgcagaagcagaccagagccggccagagaaccagattcaaggtgcccggctgccccggcggcggctgcgccggcctggccggcaccctgagcgccctgcacagctgcacctggctgcacccctgcgacttcagaaacggcgagagagagaagagaagcccccaggacctgggctgggccctgctgtggcccctgttcccctag

SEQ ID NO: 133824 - DNA, 588 bp, Artificial Sequence
  derived and/or modified sequence
gtgaccaagctgggcagactggtgaaggacatgaagatcaagagcctggaggagatctacctgttcagcctgcccatcaaggccttcgtggccatcggcgactacaacggccacgtgggcctgggcgtgaagtgcagcaaggaggtggccaccgccatcagaggcgccatcatcctggccaagctgagcatcgtgcccgtgagaagaggctactggggcaacaagatcggcaagccccacaccgtgccctgcaaggtgaccggcagatgcggcagcgtgctggtgagactgatccccgcccccagaggcaccggcatcgtgagcgcccccgtgcccaagaagctgctgatgatggccggcatcgacgactgctacaccagcgccagaggctgcaccgccaccctgggcaacttcgccaaggccaccttcgacgccatcagcaagacctacagctacctgacccccgacctgtggaaggagaccgtgttcaccaagagcccctaccaggagttcaccgaccacctggtgaagacccacaccagagtgagcgtgcagagaacccaggcccccgccgtggccaccacctag

SEQ ID NO: 133825 - protein, 1427 aa, Artificial Sequence
  derived and/or modified sequence
MSMLKPSGLKAPTKILKPGSTALKTPTAVVAPVEKTISSEKASSTPSSETQEEFVDDFRVGERVWVNGNKPGFIQFLGETQFAPGQWAGIVLDEPIGKNDGSVAGVRYFQCEPLKGIFTRPSKLTRKVQAEDEANGLQTTPASRATSPLCTSTASMVSSSPSTPSNIPQKPSQPAAKEPSATPPISNLTKTASESISNLSEAGSIKKGERELKIGDRVLVGGTKAGVVRFLGETDFAKGEWCGVELDEPLGKNDGAVAGTRYFQCQPKYGLFAPVHKVTKIGFPSTTPAKAKANAVRRVMATTSASLKRSPSASSLSSMSSVASSVSSRPSRTGLLTETSSRYARKISGTTALQEALKEKQQHIEQLLAERDLERAEVAKATSHVGEIEQELALARDGHDQHVLELEAKMDQLRTMVEAADREKVELLNQLEEEKRKVEDLQFRVEEESITKGDLETQTKLEHARIKELEQSLLFEKTKADKLQRELEDTRVATVSEKSRIMELEKDLALRVQEVAELRRRLESNKPAGDVDMSLSLLQEISSLQEKLEVTRTDHQREITSLKEHFGAREETHQKEIKALYTATEKLSKENESLKSKLEHANKENSDVIALWKSKLETAIASHQQAMEELKVSFSKGLGTETAEFAELKTQIEKMRLDYQHEIENLQNQQDSERAAHAKEMEALRAKLMKVIKEKENSLEAIRSKLDKAEDQHLVEMEDTLNKLQEAEIKVKELEVLQAKCNEQTKVIDNFTSQLKATEEKLLDLDALRKASSEGKSEMKKLRQQLEAAEKQIKHLEIEKNAESSKASSITRELQGRELKLTNLQENLSEVSQVKETLEKELQILKEKFAEASEEAVSVQRSMQETVNKLHQKEEQFNMLSSDLEKLRENLADMEAKFREKDEREEQLIKAKEKLENDIAEIMKMSGDNSSQLTKMNDELRLKERDVEELQLKLTKANENASFLQKSIEDMTVKAEQSQQEAAKKHEEEKKELERKLSDLEKKMETSHNQCQELKARYERATSETKTKHEEILQNLQKTLLDTEDKLKGAREENSGLLQELEELRKQADKAKAAQTAEDAMQIMEQMTKEKTETLASLEDTKQTNAKLQNELDTLKENNLKNVEELNKSKELLTVENQKMEEFRKEIETLKQAAAQKSQQLSALQEENVKLAEELGRSRDEVTSHQKLEEERSVLNNQLLEMKKRESKFIKDADEEKASLQKSISITSALLTEKDAELEKLRNEVTVLRGENASAKSLHSVVQTLESDKVKLELKVKNLELQLKENKRQLSSSSGNTDTQADEDERAQESQIDFLNSVIVDLQRKNQDLKMKVEMMSEAALNGNGDDLNNYDSDDQEKQSKKKPRLFCDICDCFDLHDTEDCPTQAQMSEDPPHSTHHGSRGEERPYCEICEMFGHWATNCNDDETF

SEQ ID NO: 133826 - protein, 108 aa, Artificial Sequence
  derived and/or modified sequence
MSMLKPSGLKAPTKILKPGSTALKTPTAVVAPVEKTISSEKASSTPSSETQEEFVDDFRVGERVWVNGNKPGFIQFLGETQFAPGQWAGIVLDEPIGKNDGSVAGVRY

SEQ ID NO: 133827 - DNA, 4284 bp, Artificial Sequence
  derived and/or modified sequence
atgtcaatgctaaaacctagcggactcaaggctcccacaaagatcctgaagccaggttctaccgcccttaagacccccacagctgttgtggcacctgtggaaaaaaccattagtagcgaaaaggccagctccactcctagttctgagacacaagaggagttcgtagacgattttcgtgttggtgaacgggtctgggtcaacggaaataagcctggatttatccagttccttggcgaaactcagtttgcaccagggcagtgggccggaatcgtgttggatgaacccattggaaagaatgacggtagcgttgccggagttcgatattttcagtgcgaacccctgaaagggatttttacaagaccatcaaagctaacaaggaaggttcaagccgaggatgaagccaatggactgcagaccacacccgccagccgagcgacatcccccttgtgcaccagtactgcgtcgatggtttcttcttcccccagcacaccttcaaacatcccgcaaaaaccgtcccagccagctgccaaggagcccagcgctacccccccaatctctaatcttaccaagaccgcttcagagtctatcagcaatttgtccgaagccgggagcattaaaaaaggggaacgagaacttaagatcggcgaccgtgtgcttgttggcggcacgaaggcaggcgttgtcaggttcttaggggagaccgacttcgccaagggagaatggtgtggtgttgagctggatgagccgctgggcaaaaatgatggagctgtcgccggtaccaggtactttcagtgtcaacccaaatacggactttttgcccctgttcacaaagttactaagatcggctttcccagcaccactcctgccaaagcaaaagcgaacgcagtgcgtcgcgtgatggccaccactagtgcatcccttaaacgaagtccctctgccagcagcttgagctctatgagtagcgtcgcgtctagcgtatcgtcgcgtcctagtcgcactggtctactgacggaaacctcatcgaggtacgctaggaagatcagcgggactaccgctcttcaggaggcactcaaagaaaaacagcaacatatcgagcagctgttagccgaaagggatctggaacgagcggaggttgcaaaagccacttcccatgtgggcgaaatcgagcaggagctggcccttgcacgagatggccacgatcaacatgtgctggagctggaggctaagatggaccagctccggacaatggtggaagcggcggaccgggagaaggttgaattactgaaccagctggaagaggagaagaggaaagtggaggacctgcagtttagagtggaggaggaaagcatcactaagggcgacctagaaactcagacaaagcttgaacacgcccgcataaaagagcttgagcagagcttactttttgagaaaaccaaggcagacaaactccagagagagctggaggatacaagagtggcaaccgtttcagagaagtctagaatcatggagctggaaaaagacctggcacttagagtgcaggaggtggcagaattgagacggagattggaaagcaacaagcctgccggcgacgtagatatgtctctcagcttgctgcaggagatcagttctctgcaagaaaagctcgaggtgactcgtaccgaccaccagcgtgagatcaccagcctcaaagagcattttggcgctcgcgaggaaacccaccaaaaggaaattaaagctctatatacggccactgaaaaactttctaaggaaaacgaaagcctaaaatcaaagctcgagcacgcgaacaaagagaacagtgacgtgatcgccctgtggaagtccaagctagaaacagccatcgcctctcaccagcaggcgatggaggagctgaaagtctccttctcgaaaggactggggaccgaaaccgctgagttcgctgagctcaagacccagattgagaagatgcggctagactatcagcacgaaatcgagaacctgcaaaaccaacaggattctgagagggccgcccacgcaaaggaaatggaagcactgcgagcgaagctcatgaaagtaattaaggagaaagagaacagccttgaggccatcaggagcaagctcgataaggccgaagaccaacacttagtggagatggaagataccctcaacaagctccaagaggcagaaattaaagtaaaggagctagaagtgctgcaggccaagtgtaacgaacaaacaaaggttattgataattttaccagccagctgaaagccactgaagaaaaactactcgatcttgatgctctccgcaaggccagctccgagggcaaatcagaaatgaaaaaacttcggcagcagctggaggccgcagaaaaacagataaagcacctggaaatcgaaaagaatgcggagagcagtaaggccagctcaatcacccgcgagcttcaaggaagagagttgaagttgacaaatctgcaagagaacctgagcgaggtgtcccaggtgaaggagacactagaaaaagaactccagatcctgaaggagaaattcgccgaggcaagtgaggaggcagtttcggtgcagaggtccatgcaggaaaccgtaaacaagctccaccagaaagaagaacagttcaacatgttgtcctccgacctggagaagctgcgtgagaatctcgccgatatggaagcaaagttcagagaaaaggacgagagggaggagcaactaattaaggccaaagagaaactcgaaaatgatatcgcagagattatgaagatgagtggcgataattctagccagctgacaaagatgaacgatgagctgcgcctgaaagagagagacgtcgaggaattgcagcttaaactgactaaggcaaatgagaacgcaagcttcttacagaaaagcatcgaggacatgaccgtaaaagctgaacagagtcaacaggaggctgccaagaaacatgaggaagaaaaaaaagaactggagaggaaactctccgacctagagaagaaaatggaaacatcccataaccagtgtcaggagctcaaagcacgctacgaaagagctacttctgaaacaaagactaagcacgaggaaatcttacaaaatttgcaaaaaacactcctggatacagaggataagctgaaaggtgcacgagaagagaattcaggattgctgcaagaattagaggagctccgcaaacaggctgacaaggctaaggccgcccagactgccgaagatgccatgcagatcatggagcagatgaccaaagaaaagacggagactttagccagtcttgaagacacaaagcagaccaacgccaaactgcagaatgagctagacaccctcaaggaaaataatttgaagaatgtagaagagttgaataagagtaaagagcttttaactgtggagaaccagaaaatggaagagttcagaaaggagatcgagactctcaaacaggccgccgctcaaaaatctcagcagctcagtgccctgcaggaagaaaatgtgaagctcgccgaagaactggggcgctcccgggacgaagtgaccagccaccagaaactcgaggaagaacgcagtgtgctgaacaatcagcttctcgaaatgaagaagcgagagtctaagtttatcaaggacgcagacgaggagaaggcctctttacagaaatccattagcatcacatccgccttgcttaccgagaaggacgcagagctggaaaagctgcggaacgaggttaccgtgcttcgtggagagaatgcttctgccaagagcctacactcagtcgtgcagactttggaaagtgataaggttaaactggaattaaaggtcaagaacctggaattgcagttaaaagaaaacaagagacagctgtcctcgagctctggtaacaccgatactcaggcagacgaggatgaacgggcgcaggaatcccagattgatttcttgaactctgtaattgtcgacttgcaacgcaagaatcaggaccttaaaatgaaagtagaaatgatgtccgaagcagctctaaatggaaacggtgatgacctcaacaactacgattctgatgaccaggagaaacaatctaagaaaaagccaaggttgttttgtgacatttgtgactgtttcgaccttcacgataccgaggattgtcccacgcaggctcagatgagcgaggaccccccccattcaacccaccatggttcccgtggcgaagagcggccctactgcgaaatctgcgaaatgttcggccactgggccactaactgcaacgacgatgagaccttctag

SEQ ID NO: 133828 - DNA, 5880 bp, Artificial Sequence
  derived and/or modified sequence
gctgctgctgcagtgggacaggtggcggcgaccggcggcgtccgaggagatttaatccagagactgacttcactatagaacccacagttgtatcaatggttggggaaagatagtggcaacaggcaaaggagaaacagctctgacatacaaagaaaatgagtatgctaaagccaagtgggcttaaggcccccaccaagatcctgaagcctggaagcacagctctgaagacacctacggctgttgtagctccagtagaaaaaaccatatccagtgaaaaagcatcaagcactccatcatctgagactcaggaggaatttgtggatgactttcgagttggggagcgagtttgggtgaatggaaataagcctggatttatccagtttcttggagaaacccagtttgcaccaggccagtgggctggaattgttttagatgaacccataggcaagaacgatggttcggtggcaggagttcggtatttccagtgtgaacctttaaagggcatatttacccgaccttcaaagttaacaaggaaggtgcaagcagaagatgaagctaatggcctgcagacaacgcccgcctcccgagctacttcaccgctgtgcacttctacggccagcatggtgtcttcctccccctccaccccttcaaacatccctcagaaaccatcacagccagcagcaaaggaaccttcagctacgcctccgatcagcaaccttacaaaaactgccagtgaatctatctccaacctttcagaggctggctcaatcaagaaaggagaaagagagctcaaaatcggagacagagtattggttggtggcactaaggctggtgtagtccggtttcttggggagaccgactttgccaagggggagtggtgtggcgtggagttagatgagccacttgggaagaatgatggcgctgttgctggaacaaggtattttcagtgtcaacccaaatatggcttgttcgctcctgtccacaaagttaccaagattggcttcccttccactacaccagccaaagccaaggccaacgcagtgaggcgagtgatggcgaccacgtccgccagcctgaagcgcagcccttctgcctcttccctcagctccatgagctcagtggcctcctctgtgagcagcaggcccagtcggacaggactattgactgaaacctcctcccgttacgccaggaagatctccggtaccactgccctccaggaggccctgaaggagaagcagcagcacattgagcagctgctggcggaacgggatctggagagggcggaggtggccaaggccacgagccacgtgggggagatagagcaggagctagctctggcccgggacggacatgaccagcatgtcctggaattggaagccaaaatggaccagctgcgaacaatggtggaagctgctgacagggagaaggtggagcttctcaaccagcttgaagaggagaaaaggaaggttgaggaccttcagttccgggttgaagaagaatcaattaccaaaggtgatcttgagacgcagaccaaactggagcatgcccgcattaaggagcttgaacagagcctgctctttgaaaagaccaaagctgacaaactccagagggagttagaagacactagggtggctacagtttcagaaaagtcacgtataatggaactggagaaagacctagcattgagagtacaggaagtagctgagctccgaagaaggctagagtccaataagcctgctggggatgtggacatgtcactttcccttttgcaagagataagctctttgcaagaaaagttagaagtcacccgtactgaccaccagagagaaataacttctctgaaggagcattttggagcccgggaagaaactcatcagaaggagataaaggctctgtataccgccacggaaaagctttccaaagagaacgagtcattgaaaagcaagctggagcatgccaacaaagagaactcagatgtgatagctctatggaagtccaaactggagactgccatcgcatcccaccagcaggcgatggaagaactgaaggtatctttcagcaaagggcttggaacagagacggcagaatttgctgaactaaaaacacaaatagagaaaatgagactagattaccaacacgaaatagaaaatttgcagaatcaacaagactctgaacgggctgcccatgctaaagagatggaagccttgagggctaaactgatgaaagttattaaagaaaaggaaaacagtctggaagccatcaggtcgaaactggacaaagcagaagaccagcatctcgtagaaatggaagacacgttaaacaaattacaggaagctgaaataaaggtaaaggagctagaggtactgcaagccaaatgcaatgaacaaaccaaggttattgataattttacatcacagctcaaggctactgaagaaaagctcttggatcttgatgcacttcggaaagccagttccgaaggtaaatcggaaatgaagaaacttagacagcagcttgaggcagctgagaaacagattaaacatttagagattgaaaagaatgctgaaagtagcaaggctagtagcattaccagagagctccaggggagagagctaaagcttactaaccttcaggaaaatttgagtgaagtcagtcaagtgaaagagactttggaaaaagaacttcagattttgaaagaaaagtttgctgaagcttcagaggaggcagtctctgttcagagaagtatgcaagaaactgtaaataagttacaccaaaaggaggaacagtttaacatgctgtcttctgacttggagaagctgagagaaaacttagcagatatggaggcaaaatttagagagaaagatgagagagaagagcagctgataaaggcaaaggaaaaactggaaaatgacattgcagaaataatgaagatgtcaggagataactcttctcagctgacaaaaatgaacgatgaattacgtctgaaagaaagagatgtagaagaattacagctaaaacttacaaaggctaatgaaaatgcaagttttctgcaaaaaagtattgaggacatgactgtcaaagctgaacagagccagcaagaagcagctaaaaagcatgaggaagaaaagaaagaattggagaggaaattgtcggacctggaaaagaaaatggaaacaagccacaaccagtgtcaggagctgaaagccaggtatgagagagccacttctgagacaaaaaccaagcatgaagaaatcctacagaacctccagaagacgctgctggacacagaggacaagctgaagggcgcacgggaggagaacagtggcttgctgcaggagctggaggagctgagaaagcaagccgacaaagccaaagctgctcaaacagcggaagatgccatgcagataatggaacagatgaccaaagagaagactgagactctggcctccttggaggacaccaagcaaacaaatgcaaaactacagaatgaattggacacacttaaagaaaacaacttgaaaaatgtggaagagctgaacaaatcaaaagaactcctgactgtagagaatcaaaaaatggaagaatttaggaaagaaatagaaaccctaaagcaggcagcagctcagaagtcccagcagctttcagcgttgcaagaagagaacgttaaacttgctgaggagctggggagaagcagggacgaagtcacaagtcatcaaaagctggaagaagaaagatctgtgctcaataatcagttgttagaaatgaaaaaaagagaatccaagttcataaaagacgcagatgaagagaaagcttccttgcagaaatccatcagtataactagtgccttactcacagaaaaggatgccgagctggagaaactgagaaatgaggtcacagtgctcaggggagaaaacgcctctgccaagtccttgcattcagttgttcagactctagagtctgataaggtgaagctcgagctcaaggtaaagaacttggagcttcaactcaaagaaaacaagaggcagctcagcagctcctcaggtaatacagacactcaggcagacgaggatgaaagagcccaggagagtcagattgatttcctaaattcagtaatagtggaccttcaaaggaagaatcaagacctcaagatgaaggtggagatgatgtcagaagcagccctgaatgggaacggggatgacctaaacaattatgacagtgatgatcaggagaaacagtccaagaagaaacctcgcctcttctgtgacatttgtgactgctttgatctccacgacacagaggattgtcctacccaggcacagatgtcagaggaccctccccattccacacaccatggcagtcggggtgaggaacgcccatactgtgaaatctgtgagatgtttggacactgggccaccaactgcaatgacgacgaaaccttctgatgaagcctccagtggagaactgggcttgctcagacgcactcgcattgacacaacgtaacaccagcattgtgtgtgcagacttcaggagaactcatgttattttttaaccccgtcaacaaatctaggaaaatattttgatcttcaacaaattgccctttagtctccccgtatgagttagaataataaatatttagtaggtgagttttcacctcgaattttgttttcttgatttttacgtttgaagacattgcaccagatgccattacatttattggccccccgaccttgtagaaaaacccctaccctcacaataccttatttaagtaactttaaattatgccgttacttttcatatttgcactaagatatttccaggctgcatttgtatatttagattttttggttaagctttgacactggaatgagttgaaaaaatgtgccattttgcattttcatctactcatttaaagtattttattcttattcaaagaaatatctgagctctttgcactacctgttatcagtagtgcctttacttcaggcttgataatacttaggtgtgattataaaatcatgaagcaggtaaagggaggggcaagcccccaaactgctgtggggacattttataatctatatgctgcacccacttaatctactgtggtgttttgtttattagttttgcataatttcagcttctatatattgtatgtatatattttttaaaaatctatattttgggaaaaaaacatacacaatgtgtctttctttttggacatttacctttttgaaaaagaaaacacttaaaatgatcattaggacataacagactaggccagacatagcatcttgtggctttgcaaccattttcatttgtttgttttccttttatttcttcaccagatttaaataactggaggaattttctccaatttttttttccttctctggcaggtatccccagcagtcaattaacaataagccagtataaaacacctaaataaccaatctacaatctcccttcacaagtttttttactgtttttagatgaatgtacgatgagaaattcaacgttaataattctggattttcttatcacaaaaaagaaaatgaaggacctcaaagcacctgaacagtttatcgaccagtttgaatctatttatcttcatttgaatgtcttctagaatatgtaaaaagtcataaaatgtatcttccatgctacatgtacaataagaacttctataattgtatatatgcctttgatgtattttcccctcaagattatcaactgtgtgttcgacagtgaatattcaatctggtaccagttgaaatttttggttataaatgtaatacgaattgtttcacaaacagaaaacatgtaaagcagtattaaaatttggccaaacaagtgttctgtatctactttaataaatggttattcttt

SEQ ID NO: 133829 - DNA, 4284 bp, Artificial Sequence
  derived and/or modified sequence
atgtcgatgcttaaaccatcaggactcaaggcccccacaaagatcttaaagcctggctcaactgccctgaagacccccacagctgtagtggcgccagtcgagaaaactattagcagtgagaaggcgtcttccactcccagttccgagacacaagaggagttcgtagacgacttccgcgtgggcgaacgggtttgggtaaatggcaataaacctggatttattcagttcctcggggagacacaatttgctcctggccagtgggcaggcatcgtcctagatgagcctattgggaaaaacgatggctctgtggctggggtaagatacttccagtgcgagccgctgaaaggcatcttcactaggccaagtaaacttacaagaaaagtccaggcagaggacgaagcaaacggtctgcagaccacaccagctagccgggcaaccagtcccttgtgcacttccactgcctctatggtaagttcatccccgtccacaccctctaacatcccgcagaagcccagccagcccgcagccaaggaaccgagtgcaaccccaccgatctccaacctgactaagaccgccagtgaatcaatatcaaatctgtccgaagctgggagcatcaagaagggggagagagagctaaaaattggggaccgcgtacttgtggggggcaccaaggccggcgttgtcaggtttctcggagaaacagatttcgctaaaggtgagtggtgcggggtcgagctggacgagccgctgggcaaaaacgatggagcagtggcggggacgcgctactttcagtgtcagcccaaatacgggctctttgccccggtgcacaaagtgacaaagatcggtttcccatccactactccagctaaagccaaggcaaacgctgtaaggcgggtcatggccactaccagtgcctctttaaaacgtagcccttctgcttccagccttagctcaatgtcctccgtggcctcatcggtgagtagccgcccctcaaggaccggactgctcacagagacctcctcacgatacgcccggaagatttccgggacaacggcgctgcaggaggccctcaaagagaagcagcagcacatcgaacagctgttagctgaacgagatcttgaacgggctgaggtggctaaggccacctcgcatgtcggcgaaatcgagcaggagctcgcattggcaagggacggacacgatcagcacgttctcgagctggaagctaagatggatcagctgaggaccatggtggaggcagccgaccgagagaaggttgagctacttaatcagctggaggaggaaaaaagaaaggtggaggaccttcaatttagagtggaagaagaatcaattacaaaaggagatttagaaactcagaccaagctcgagcacgctcggattaaagaacttgaacaatctctactgttcgagaagactaaggccgacaaactccagcgcgaactggaggacacccgagtggccacggtgtctgaaaaaagtcggatcatggaactagaaaaagacttggccctgagggttcaggaggttgcagagttgagacggagacttgaaagtaataaaccggccggagacgtagatatgtccctgagcctcctgcaggagattagctcactccaagagaaactagaggttacaagaacggaccatcaaagggagattacaagcttgaaggaacactttggcgcccgggaggagacacatcaaaaagagatcaaggccttatatactgctactgagaagctcagcaaggagaacgagagtctcaagtccaaactcgagcacgcaaataaggagaattccgacgtcatcgccctctggaagtccaaactggaaaccgccattgcatcacaccagcaggctatggaagagttgaaggtgagcttctcaaaagggctcggaacagagaccgccgaattcgccgagctgaagacacaaattgagaagatgaggctagactaccagcacgagatcgagaacctccagaaccagcaggattccgaacgcgcagcccacgcgaaggagatggaggcactccgcgccaaattgatgaaagtcatcaaagagaaagagaactcactcgaagctattcggtctaaactggataaagccgaggatcagcatctggtagagatggaagatacactgaataaattgcaggaggctgagatcaaagtgaaggagctggaggtcctgcaggctaagtgtaatgaacagacgaaagtcatcgataacttcacgtcccaactgaaggctaccgaggaaaaactgctggacttagacgccttacgcaaggctagcagtgaagggaaaagtgagatgaagaagcttcgacagcaactggaagccgctgagaaacagattaagcacctggaaattgagaaaaacgccgaatcgagcaaggcttcaagcataacccgcgagctccaggggcgagagctcaaactgacaaacctgcaggaaaacttgagtgaggtctctcaggtgaaggagacccttgagaaagagctgcaaattctcaaggagaagtttgcagaggcatctgaggaggctgtctcagttcagcgttcgatgcaggagacggtgaataaactgcaccagaaggaggagcaattcaacatgctgtctagtgatctcgagaaattgcgcgaaaacctggccgatatggaagccaaattccgggaaaaggacgagcgagaagagcagcttattaaagctaaagaaaaactggaaaacgacatcgcagaaattatgaaaatgtccggggataacagcagccagttaaccaagatgaacgatgagcttagactcaaggagagggacgtggaggaacttcaactcaagttgactaaggccaatgagaacgcttccttcttacagaaatccattgaggacatgacagtgaaagctgaacagtcccagcaggaagctgccaaaaagcatgaggaggagaaaaaggaactggagagaaaattaagtgatttagaaaaaaaaatggagacctctcataatcagtgtcaggagctcaaggcccggtatgaacgcgccacaagtgaaaccaaaacaaaacatgaggaaatccttcaaaatctgcagaagacactgttggacacagaagataagctgaaaggggcacgggaagaaaattctggcctattgcaagagctcgaggagctgagaaaacaggctgataaggccaaagctgctcagacagccgaagatgctatgcagatcatggaacagatgacaaaagagaaaacagagaccctcgcatcactcgaggacaccaagcagactaacgccaaactccagaacgagctcgacacacttaaagaaaataacctcaaaaatgtggaagagctcaacaaatccaaggaactgctcacagtagagaatcagaagatggaggaattccggaaggagattgaaactttgaagcaggcggcggcccagaaaagtcagcagctatccgcactccaggaagagaacgtaaagttggcagaggagttgggacggagtcgtgatgaggtaaccagccaccaaaaactggaggaggaaagatctgtccttaataatcaactccttgagatgaagaaaagggagagcaagttcataaaggacgcggacgaagagaaggcaagccttcagaaatctataagcataacatcagccctactgactgagaaagatgccgaactggaaaaactcagaaacgaggtaacggtactgcgcggtgagaacgctagcgcaaagtctcttcacagcgtcgtccagactctggagtctgacaaggtgaagctggagctaaaggttaaaaatcttgaactgcagcttaaagaaaacaaacgccagttgagcagttccagcggcaacactgacacccaggccgacgaggacgagagggcacaagagtctcagattgactttctcaatagcgtaatagtggacctgcagaggaagaatcaggaccttaaaatgaaagtggaaatgatgtccgaggcagccctgaatggcaacggggatgacttgaataactacgattccgatgaccaggaaaagcagagtaaaaagaagccaagattgttttgtgacatctgtgactgtttcgatctgcatgacaccgaggactgcccaacacaagcccagatgagcgaagatccaccccattcgacacatcacggttcgcgcggagaggagcgcccctattgtgagatatgcgaaatgttcggacattgggctaccaactgcaatgatgatgagaccttttag

SEQ ID NO: 133830 - DNA, 4284 bp, Artificial Sequence
  derived and/or modified sequence
atgtccatgctgaagcccagcggcctgaaggcccccaccaagatcctgaagccaggcagcacagccctgaagacccccacagctgtggtggcccctgtggagaagaccatcagcagcgagaaggccagcagcacccccagcagcgagacccaggaggagtttgtggatgacttccgggtgggggagcgggtgtgggtgaatggaaacaagccaggcttcatccagttcctgggggagacccagtttgcccctggccagtgggccggcatcgtgctggatgagcccatcggcaagaatgatggctctgtggccggcgtgcgctacttccagtgtgagcccctgaagggcatcttcacccggcccagcaagctgaccaggaaggtgcaggctgaagatgaggccaacggcctgcagaccaccccagccagccgggccaccagccccctgtgcaccagcacagcctccatggtgagcagcagccccagcacccccagcaacatcccccagaagcccagccagcctgctgccaaggagcccagcgccaccccacccatcagcaacctgaccaagacagccagcgagagcatcagcaacctgtctgaggccggcagcatcaagaagggggagcgggagctgaagatcggggacagagtgctggtgggcggcaccaaggccggcgtggtgcgcttcctgggggagacagactttgccaagggggagtggtgtggggtggagctggatgagcccctgggcaagaatgatggagctgtggccggcacccgctacttccagtgccagcccaagtatggcctgtttgcccctgtgcacaaggtgaccaagattggcttccccagcaccaccccagccaaggccaaggccaatgctgtgagaagagtgatggccaccaccagcgccagcctgaagaggagccccagcgccagcagcctgagctccatgagctctgtggccagctctgtgagcagccggcccagcaggacaggcctgctgacagagaccagcagccgctatgccaggaagatcagcggcaccacagccctgcaggaggccctgaaggagaagcagcagcacatcgagcagctgctggccgagcgggacctggagcgggcagaggtggccaaggccaccagccacgtgggggagattgagcaggagctggccctggccagagatggccatgaccagcacgtgctggagctggaggccaagatggaccagctgcggaccatggtggaggccgctgaccgggagaaggtggagctgctgaaccagctggaggaggagaagaggaaggtggaggacctgcagttccgggtggaggaggagagcatcaccaagggggacctggagacccagaccaagctggagcacgcccgcatcaaggagctggagcagagcctgctgtttgagaagaccaaggctgacaagctgcagcgggagctggaggacaccagggtggccaccgtgtctgagaagagccgcatcatggagctggagaaggacctggccctgcgggtgcaggaggtggccgagctgcggcggcggctggagagcaacaagccagctggagatgtggacatgagcctgagcctgctgcaggagatcagcagcctgcaggagaagctggaggtgaccaggacagaccaccagcgggagatcaccagcctgaaggagcactttggagcccgggaggagacccaccagaaggagatcaaggccctgtacacagccacagagaagctgagcaaagaaaatgaaagcctgaagagcaagctggagcacgccaacaaggagaacagtgatgtgattgccctgtggaagagcaagctggagacagccatcgccagccaccagcaggccatggaggagctgaaggtgtccttcagcaagggcctgggcacagaaacagctgagtttgctgagctgaagacccagatcgagaagatgaggctggactaccagcatgaaattgagaacctgcagaaccagcaggacagcgagagagctgcccacgccaaggagatggaggccctgcgggccaagctgatgaaggtgatcaaggagaaggagaacagcctggaggccatccgcagcaagctggacaaggccgaggaccagcacctggtggagatggaggacaccctgaacaagctgcaggaggccgagatcaaggtgaaggagctggaggtgctgcaggccaagtgcaatgagcagaccaaggtgattgacaacttcaccagccagctgaaggccacagaggagaagctgctggacctggatgccctgaggaaggccagcagcgagggcaagtctgagatgaagaagctgcggcagcagctggaggccgctgagaagcagatcaagcacctggagattgagaagaatgctgagagcagcaaggccagcagcatcacccgggagctgcagggccgggagctgaagctgaccaacctgcaggagaacctgtctgaggtgtcccaggtgaaggagaccctggagaaggagctgcagatcctgaaggagaagtttgctgaggccagcgaggaggccgtgtctgtgcagaggtccatgcaggagaccgtgaacaagctgcaccagaaggaggagcagttcaacatgctgagcagtgacctggagaagctgcgggagaacctggccgacatggaggccaagttccgggagaaggatgagcgggaggagcagctgatcaaggccaaggagaagctggagaatgacattgctgagatcatgaagatgtctggggacaacagcagccagctgaccaagatgaatgatgagctgcggctgaaggagagagatgtggaggagctgcagctgaagctgaccaaggccaatgaaaatgccagcttcctgcagaagagcattgaggacatgacagtgaaggccgagcagagccagcaggaggccgccaagaagcatgaggaggagaagaaggagctggagaggaagctgagtgacctggagaagaagatggagaccagccacaaccagtgccaggagctgaaggcccgctatgaaagagccaccagcgagaccaagaccaagcatgaggagatcctgcagaacctgcagaagaccctgctggacacagaggacaagctgaagggggcccgggaggagaacagcggcctgctgcaggagctggaggagctgaggaagcaggccgacaaggccaaggccgcccagacagcagaagatgccatgcagatcatggagcagatgaccaaggagaagacagagaccctggccagcctggaggacaccaagcagaccaatgccaagctgcagaatgagctggacaccctgaaggagaacaacctgaagaatgtggaggagctgaacaagagcaaggagctgctgactgtggagaaccagaagatggaggagttcaggaaggagattgagaccctgaagcaggccgccgcccagaagagccagcagctgagcgccctgcaggaggagaatgtgaagctggccgaggagctgggccgcagcagagatgaggtgaccagccaccagaagctggaggaggagaggtctgtgctgaacaaccagctgctggagatgaagaagcgggagagcaagttcatcaaggatgctgatgaggagaaggccagcctgcagaagagcatcagcatcaccagcgccctgctgacagagaaggatgctgagctggagaagctgagaaatgaggtgacagtgctgcggggagaaaatgccagcgccaagagcctgcacagcgtggtgcagaccctggagagtgacaaggtgaagctggagctgaaggtgaagaacctggagctgcagctgaaggagaacaagaggcagctgagcagcagcagcggcaacacagacacccaggctgatgaagatgagcgggcccaggagagccagattgacttcctgaacagcgtgattgtggacctgcagaggaagaaccaggacctgaagatgaaggtggagatgatgtctgaggccgccctgaatggaaatggagatgacctgaacaactatgacagtgatgaccaggagaagcagagcaagaagaagcccaggctcttctgtgacatctgtgactgctttgacctgcatgacacagaggactgccccacccaggcccagatgtctgaggaccccccccacagcacccaccacggcagcagaggagaggagcggccctactgtgagatctgtgagatgtttggccactgggccaccaactgcaatgatgatgagaccttctag

SEQ ID NO: 133831 - DNA, 4284 bp, Artificial Sequence
  derived and/or modified sequence
atgagcatgctgaagcccagcggcctgaaggcccccaccaagatcttgaaaccgggcagcactgccctgaagactcctacagcggttgtcgccccagtcgaaaaaacaatcagcagtgaaaaagcatcatcaacgccgtcctcggagacacaggaggagttcgtggacgacttccgcgtaggcgaacgcgtctgggtgaacggcaacaagccaggtttcattcagtttctgggcgagacacagtttgcccctggacagtgggccggcattgtgttagacgagccgattgggaaaaatgacggatcagtagccggagttaggtatttccagtgtgaaccgctcaaggggatctttacccgcccatcaaaactcacccggaaagtccaggcagaagacgaagctaatggcctacagacaactcctgcctctcgggccaccagtcccctctgcacaagcaccgcttccatggtaagctcttccccaagtacaccaagcaacattcctcaaaagccctctcaaccagctgctaaagagccatctgcaactcctcccatctctaacttgacaaagacagcttcggaatccatctccaacctgagcgaagccgggagcatcaagaaaggtgaacgagaacttaaaattggggatcgggttctggtcgggggaacaaaggcaggggtcgtacgctttttaggagagacagatttcgctaaaggtgaatggtgtggagtggagctagatgaacctttgggaaaaaacgacggagctgtggcaggaaccagatatttccagtgccaacctaagtacggtctgttcgctcctgtgcataaagtgaccaagatcgggttccccagcacaactcctgctaaggcaaaggccaatgcagtacggagggtgatggccacaacttcagcatccctgaagcgtagccccagtgcttcgtccctgagcagcatgtcttccgttgctagtagcgtgagctcaagaccctccaggacaggcctgctaaccgaaacctcctctcgatacgcccgcaagataagcggtacaacggctcttcaagaggcactcaaagaaaagcaacagcacatcgagcagttactggccgaacgcgacctggagcgagctgaagtagcaaaggccacctcccacgtcggggagatcgagcaggagctcgcactcgcacgtgatggccacgaccagcacgtgctcgaactcgaggcaaagatggaccaattacggactatggtggaggctgccgatagggagaaagtggagcttctgaaccaactggaggaggagaagagaaaggtggaagatcttcaattccgcgtagaagaggaaagtattaccaaaggggacctggagacccagacgaagctggaacatgctagaatcaaagagctcgagcaaagccttttatttgagaagacaaaggccgacaagctgcagcgtgagttagaagatactcgcgtggccactgtgtctgaaaaatctagaattatggagctggaaaaggacctggcactgcgggtccaagaagtggctgagctccggagaagactcgaaagtaacaaaccagcaggcgatgtggacatgtcattaagtcttctgcaggagattagctccttgcaggaaaagcttgaagtgaccagaacagatcatcaaagagagatcactagcctgaaggaacatttcggggctagagaggagacacaccagaaggagatcaaagctttgtacaccgcgacagaaaaactgtctaaggagaatgagagtctgaagtctaagctcgaacatgccaataaggaaaactctgatgtgattgctctctggaagtcaaagctggagaccgctatcgcctctcaccagcaggcaatggaggaactaaaggtgtccttcagtaagggcctggggaccgaaacagccgagttcgcagagctgaaaacacaaatcgaaaagatgcggctggattaccagcacgagatcgaaaacttgcagaatcaacaggacagcgaacgggctgctcacgcgaaagagatggaggctttaagggctaaactcatgaaggtgatcaaagagaaggagaactcccttgaggcaattcgttctaaactcgacaaagcggaagatcaacacctggtagagatggaagacacattgaataaattgcaggaggcggagataaaagtgaaagagctggaagtactgcaggcaaagtgcaatgagcaaacaaaggtaattgataacttcacttcacagttgaaggcaaccgaagagaaattgctggatctggacgccctgcgaaaagcttcctcagagggaaaatcagagatgaagaagctccgacagcagctcgaggccgccgaaaaacagatcaagcatcttgagatagagaaaaatgcggaatcatcaaaagcgtcttcaatcaccagagaattgcagggccgggaactcaaattgacaaacctgcaagagaacttatcagaggtatcccaggtcaaagagaccctggagaaagaactgcagattttgaaggaaaaattcgctgaagcatctgaggaggccgtgtccgtacaaagaagtatgcaggagactgttaacaagcttcaccaaaaggaagagcagttcaacatgctgtccagcgatctagagaagttgcgggaaaatctcgcagacatggaggcaaaattccgcgaaaaggacgagagagaggagcagctcatcaaagccaaggaaaaactagagaatgatatcgcagagattatgaaaatgtccggagacaactcctcccagcttactaagatgaatgatgagttgcgcctgaaagaaagagacgtggaggaactccaactgaaactcactaaggctaatgagaatgcttcctttcttcagaagagcatagaggatatgacagttaaagcggagcagtcgcagcaggaggccgcaaagaagcatgaagaggaaaagaaagaacttgagagaaaactgtctgacctggagaagaaaatggaaacaagccacaatcagtgccaggaacttaaagcacgctacgagagggctacatctgagactaaaaccaagcacgaggaaattctgcagaatttacagaagaccctgctggacaccgaggacaaattgaaaggcgctcgtgaagagaattccggcctgctgcaggagctcgaagagctgcgaaagcaagctgacaaggcaaaggctgcccagacggctgaggatgccatgcaaattatggagcagatgactaaagaaaagacagagactcttgcaagcctagaggatacgaagcagacaaacgcgaagttgcagaacgagctcgatacacttaaggagaataacctgaagaatgtggaagagttgaacaaaagcaaagaactgctcaccgtggagaatcaaaagatggaggagttccgcaaggaaatcgaaacccttaagcaggctgccgcacagaagtcacagcaactgtctgctctccaggaggagaatgttaagctggcagaggagctcgggcgctctagagacgaggtgacgagtcatcaaaaacttgaggaagaacgctcagtgttgaacaaccaactattggagatgaagaagagggagtcaaaatttatcaaggatgctgacgaggagaaagcgagtctgcagaaatctatatctattacctccgccctgctgaccgagaaagacgcagagctggaaaagctgcggaacgaggtaaccgttttgaggggtgaaaatgcaagcgctaaaagcttgcactcagtggtccagaccctcgaaagtgataaagtgaaactcgagctgaaggtgaaaaacctcgaactgcagttgaaagaaaataagcgccagctcagctctagcagcggcaataccgacacgcaagctgatgaagatgaacgggcacaggagtcacagattgattttctgaatagtgtgattgtcgacttacaacgcaaaaaccaggatctcaagatgaaagtcgagatgatgtccgaggccgccttgaacggaaatggcgacgatttgaacaactacgatagcgatgaccaagagaagcagtcaaagaagaaaccacgcctgttctgtgatatctgcgattgctttgaccttcacgacactgaggattgtccaacccaagcccaaatgtccgaagatcctccacactcaacacaccacggctctcgaggtgaggagcgcccctactgtgagatctgtgagatgttcggacattgggcaacaaactgcaacgatgacgagacattctag

SEQ ID NO: 133832 - DNA, 4284 bp, Artificial Sequence
  derived and/or modified sequence
atgagcatgctgaagcccagcggcctgaaggcccccaccaagatccttaagccgggcagcacagctttgaaaacgccaacagccgttgtggctcctgtggaaaagactatctcctctgagaaggccagtagtactccatcctccgaaacacaggaagagttcgtcgatgacttccgggtgggcgaaagggtctgggtgaatgggaataagcccggctttatccagttcctcggggagacacaattcgcccccggtcagtgggccggtattgttctcgatgagcccatcggtaaaaacgatggcagcgtcgcaggggtcagatactttcagtgtgagccgctcaagggcatcttcacacggccctcaaagttgacacggaaggtccaggctgaggatgaagccaacggactccaaactaccccagctagccgcgcgacatcccccctatgtactagtactgcctccatggttagctcctcaccatccaccccatctaatataccacaaaaaccatcccaaccagccgccaaagagcctagtgccacccccccaatcagtaacctgaccaaaacagccagcgaatcaatcagcaacctaagcgaggcagggtcaatcaagaagggggagcgtgaactgaagataggggacagagtgctagtgggtggaaccaaggctggtgtggtgcggtttctgggcgaaacagattttgcaaaaggtgaatggtgcggggttgaactcgacgagcctttgggaaaaaacgatggagccgtggcaggaacaagatatttccagtgtcagcctaagtacgggctcttcgctcctgtacacaaggtaacaaaaatcggcttcccaagtacaacccctgccaaggcaaaggccaatgctgtccgaagggttatggctaccacttctgctagcctaaagcgaagtccaagtgccagtagcctttccagtatgtcctcagtggcatcatcggtgagctccaggccaagtcgaacagggctcttaaccgaaacctctagcagatacgctcgcaaaatctccgggacaactgcactccaggaggccctcaaagaaaagcagcagcatattgagcagctccttgccgagagagacctcgagagggcagaggtggccaaagctactagccatgtaggtgagattgagcaagaacttgctctggccagagacggacatgatcagcacgtgttagaattggaagctaaaatggaccagctgcgaacaatggttgaagccgcagacagagaaaaagtggaactgctcaatcagctggaggaagaaaaaaggaaagtcgaggacctccagtttcgtgtggaggaggagtctataactaaaggcgacctggaaactcaaactaaactggagcacgctcggattaaggagctagagcaatcattattgttcgaaaaaaccaaagctgataaactgcagcgggagctggaggacactagagtggccaccgtgtctgaaaagtcgcgcattatggagcttgagaaggatctcgctctccgggtgcaggaggtcgccgaattgcggcggaggctggaaagcaataaacccgctggagacgtagatatgagcctgtccctcctgcaagaaatctcttcattgcaggaaaaattggaagtgacccgtacagatcatcagcgggaaatcactagtcttaaagagcacttcggggcccgggaagaaactcatcagaaggaaattaaagctctgtacaccgccaccgagaagcttagcaaggaaaatgaatccctgaaaagtaagctcgagcacgccaacaaggagaactcagacgtgatagccctctggaagtccaaattagaaactgccatcgcaagccaccagcaggctatggaggagctgaaggtgagtttctctaaggggctgggcacagaaaccgcagagttcgctgaattaaagacacagattgaaaagatgcgactggattaccagcatgagatagaaaacctacagaatcaacaggatagcgaacgggccgcgcacgcaaaggagatggaagctctgcgcgctaagttaatgaaagttataaaggaaaaagaaaacagcttagaggctatacggtccaagttggacaaagccgaggatcagcatttggttgagatggaagacacactgaataaacttcaggaggcggagatcaaagtgaaggaactagaggtcctgcaggcaaagtgcaatgagcagaccaaagttattgataattttacaagccagctgaaagccaccgaggagaaattactggatctggatgcactgcgaaaagcctcgtccgaaggaaagagcgagatgaagaaactgcgccagcaactggaagctgccgagaaacaaataaaacatctggaaattgagaaaaatgcggaatcatcaaaagcttcttccatcactagggagcttcagggccgcgagctgaagttgacaaacctccaggaaaatctttctgaggtctctcaggtaaaagaaaccttggaaaaagagctgcagatcctaaaagagaagtttgcagaggcctccgaagaggctgtgtcagtgcagcggagtatgcaggaaacagtaaacaaactacatcaaaaggaggagcaatttaatatgttatcaagcgatctcgaaaaacttagagagaacttggctgacatggaggccaaattccgcgagaaggacgagagggaggagcaacttattaaggcaaaagaaaagctcgagaacgatattgcagagattatgaaaatgtcaggggacaattcctcccagctaacgaaaatgaatgacgagctgcggctcaaggagcgcgacgtggaagaactgcagctgaaactcacaaaggcaaacgagaatgcgtcattccttcagaaatctattgaggacatgacagtgaaggctgagcagagtcaacaagaggctgctaagaagcacgaagaagagaagaaagagctcgaaagaaaactgtccgacctggagaaaaaaatggaaacttcacacaatcagtgccaggaattgaaggcacgttacgaacgcgcaacttccgagacaaagactaagcacgaggagatactgcaaaacctgcagaaaactttgctggatactgaagacaagctgaagggtgcccgtgaggaaaatagcggcctccttcaggaactggaagagcttaggaagcaggccgacaaagcaaaggccgcacagacagccgaagacgcaatgcagatcatggaacagatgactaaggaaaagaccgaaactctggcaagtctagaagatacaaaacagacgaacgctaaactgcagaatgagctggacactttgaaggagaacaatctgaaaaatgtagaagaacttaacaaatcaaaggagctcttaaccgtcgagaatcagaagatggaggagttccgcaaagaaatcgagacccttaagcaggccgccgcccagaagtcacagcagctgtcggccctccaggaggagaatgtgaagcttgcagaggaactcggacggtctcgggatgaagttacatcgcaccaaaagcttgaggaggaacggtcagttctgaataaccagcttctggaaatgaagaaacgggaatctaagttcattaaggacgccgacgaggagaaggcttccttacaaaaaagcatcagcataacctcagccttattgacggagaaggatgccgagctggaaaagcttcggaacgaagtgaccgtccttaggggcgagaatgcttcggctaaaagccttcattccgtggtacaaacacttgagtccgacaaggttaagctagaactgaaagttaagaatctggagctgcagttaaaggaaaataagagacaattgagttcctccagcggtaataccgacactcaagctgatgaagatgagcgagcccaagagagtcaaattgacttcctgaacagcgtcatcgtggacctacagcgaaaaaaccaggatttgaagatgaaagtcgagatgatgagcgaagccgccctgaatggtaatggggatgatttaaataactacgattccgacgatcaggagaagcagtccaaaaagaagccaagactcttctgcgacatctgtgactgtttcgatcttcacgatacggaagactgcccaacccaggcgcagatgtccgaagaccccccccactcgactcaccatggatctaggggtgaggagcggccttattgtgaaatttgcgagatgttcggtcactgggcgacaaattgcaatgatgatgagactttctag

SEQ ID NO: 133833 - DNA, 4284 bp, Artificial Sequence
  derived and/or modified sequence
atgtcgatgcttaaaccctcaggcctcaaggcacctaccaagattctgaaacctgggagcacagccctgaaaacccccacagccgtcgtggcacctgtggagaaaaccatctcttctgagaaggcatctagtacaccttccagcgaaacccaagaggagttcgtcgatgatttccgggttggggaacgagtgtgggtcaatggaaataaaccaggcttcattcagttcctcggtgaaacacagtttgccccaggccagtgggcgggtattgtcttggatgaacccataggaaaaaatgatgggtcagtggccggtgtccggtactttcaatgtgaacctctcaagggcattttcacaagaccatcaaaactcactaggaaagtccaggccgaagatgaggccaatggactgcagacgactccggctagccgggcaacttcccctctgtgcacctcgaccgctagcatggtatcatcttctcccagtacacctagcaatattccccaaaaaccatcccagccagccgctaaagaaccctctgccacacctcctatatctaatctcaccaagaccgcatccgaaagcatcagtaatctgtcggaggcaggcagcataaagaaaggcgaacgggagctgaagataggggatcgcgtcctcgtcggaggtactaaggccggtgtcgtgagatttttaggggagaccgactttgcgaagggggagtggtgtggagtagaactggacgagcccctgggaaaaaacgacggcgcagtcgctgggactagatactttcagtgccaaccaaaatatggcctgttcgcccctgtgcacaaggtaacgaaaataggattccccagcactactccagctaaagccaaagctaatgccgtgaggagagtgatggcgaccacatccgccagtctgaaaaggagcccgagcgcttcctccctaagctccatgtcctctgttgcatcctcagtctccagtcgaccctctagaacagggttgcttacggagacctcaagccggtatgcgagaaaaatttctggaacaacagccctccaggaggcactgaaagagaagcaacagcatattgagcaactgttggccgaacgggacctcgagcgtgctgaggtagcgaaggcaacatctcatgtcggtgagatagagcaggagctcgccttggcacgcgacggtcatgatcagcatgtgttagaactggaggctaaaatggaccagctgcgcacaatggttgaagctgctgatcgggagaaggtcgagttactgaatcagttggaagaagaaaagaggaaagtcgaggacctacaatttagagttgaggaggaatccatcaccaagggcgatctggaaactcaaacgaaactagaacatgcccgtataaaagagctggagcagagcctgctgtttgaaaaaacaaaggccgataagctccagagagaactcgaggacacgagggtggcgacggtatctgagaagtcgagaattatggaactagaaaaggacctagcactaagggtgcaggaagtggcggagctccgacgaaggctagaaagcaacaagcctgccggagacgtggacatgtccctgtcactccttcaggaaattagctcactgcaggagaaactggaggttacaaggacagaccaccagcgcgaaataacctctctcaaagagcacttcggcgcacgggaggagacgcaccagaaggagattaaagcactttatacggccacagagaagttatccaaggaaaatgaaagtctcaagtctaagttggaacatgctaataaggaaaatagcgacgttatcgcgctgtggaagtctaagctagagactgcaatcgcatcacaccagcaggctatggaggagcttaaagtctctttctccaaaggcctgggtactgaaactgccgagtttgccgaactcaaaactcaaatcgagaaaatgcgattggactatcagcacgaaatcgagaatctgcagaaccagcaagactccgagagagccgctcacgctaaagaaatggaagctctcagagctaaacttatgaaggtaatcaaggagaaggaaaattctctggaagctatccggagtaagctcgacaaagccgaagaccaacatctggtggaaatggaggacacgctcaacaaactccaggaggcagagattaaagtaaaagaactggaggtattacaggctaagtgcaatgagcaaacaaaagttatcgacaattttacctctcagctaaaggccactgaggaaaagcttctggatttggacgcactacgaaaagcctcctccgagggaaagtcggagatgaaaaagttgcggcaacagctggaagctgccgaaaagcagattaagcatctggagatcgagaagaacgcagaaagcagtaaggcctcaagcataaccagggagctccaggggagggagttgaaactcaccaatttacaggaaaatctctctgaggtgtcgcaggtgaaggagaccctggagaaggagctacagattctgaaggagaaatttgccgaagcctctgaagaagccgtgagtgtccagcgctccatgcaggaaaccgtcaacaagttgcaccaaaaagaagagcagttcaacatgttatcctccgacctggaaaaactgagagaaaatctagcagacatggaagctaaattccgcgagaaagatgagagagaggagcagcttataaaagccaaagagaagctcgagaacgacatcgcggagattatgaagatgtccggcgacaacagttcacaactcaccaagatgaatgacgagctccgactgaaggagcgggatgtggaggagctccaactgaagctcaccaaagccaatgaaaacgcctcattcctccaaaagtctatcgaagacatgactgtgaaagccgaacaatcacagcaggaagccgcaaagaagcacgaggaggagaagaaggagttggagcgtaagctgtccgacttagagaaaaagatggagacttcacacaatcaatgccaggagctgaaggccagatatgagcgagccacctcggagactaaaactaaacacgaggagattctccagaacttgcagaagactctgctggacactgaggacaaattaaaaggcgcacgcgaagaaaactccggtctgttgcaggaactggaggaacttcgcaaacaggctgataaggctaaggcagctcagacggccgaggatgccatgcagattatggaacagatgacaaaggaaaagactgaaaccctggcgtctctggaagataccaagcagaccaatgccaagctgcaaaatgaattggacaccctcaaggagaacaaccttaagaatgtggaggagctcaacaaaagtaaagaactgctgactgtagagaatcaaaaaatggaggagtttcgcaaggaaattgagacccttaagcaggccgctgctcagaagtcacagcagttgtctgccctgcaagaggaaaatgttaaattggccgaagaactcggtcgctctagggacgaggtgacatcacatcaaaagctcgaggaggagcgctcggtcttgaataaccaactactggagatgaaaaagagggagtccaaatttattaaggatgcggacgaggaaaaggcttccctgcagaaaagtatttccatcacttccgctttacttaccgaaaaggacgccgagctggagaaactcaggaacgaagtgaccgttctgcgcggtgagaacgcatccgctaaatctctacactccgtggtgcagacgctcgaatccgacaaagtcaagctggaactgaaggtgaaaaacctagaactacaactgaaggagaacaaaagacagctgagtagctccagcggaaatacagatacacaggccgatgaagacgagcgggctcaggaaagccagatagacttcctcaattcagttatcgtggatctccaacgcaaaaatcaggatttaaagatgaaggtagaaatgatgtccgaagcagccttgaatggtaatggtgatgacttgaacaactacgacagcgacgatcaggaaaagcagagcaagaagaagcctaggctgttctgtgacatctgcgattgtttcgatcttcatgatactgaagattgccccacacaggcacagatgagcgaggatccacctcattctacacaccacgggtctcggggagaggagcgcccttattgcgagatatgtgaaatgttcggtcactgggcgactaattgcaacgatgatgagactttttag

SEQ ID NO: 133834 - DNA, 4284 bp, Artificial Sequence
  derived and/or modified sequence
atgtcaatgctgaagccatctgggttaaaagcccctacaaagattctcaaacctggaagcactgctttgaagactcctactgccgtggtggcacctgtggagaagactatctcatcagagaaagcttcatccacgccaagtagcgaaacccaggaggagtttgtggatgacttccgcgtgggcgagagggtgtgggtcaacggcaataagccgggttttatacagttcttgggcgagacacagttcgccccaggccaatgggcaggaatcgttctggatgagcctatcgggaaaaatgacggcagcgttgctggtgtgcgatacttccagtgtgaaccgcttaagggcatcttcaccagaccatcgaaactgacgagaaaagttcaagcagaagacgaggccaatggccttcagaccaccccggcaagccgcgcaacttcacccctctgcacatccactgcatccatggtgagtagcagcccatccactccctccaacatcccgcagaagccttctcagcccgctgccaaagagccaagcgccacacccccaataagtaatctcacgaaaaccgcttctgaaagcatcagtaatctgtcagaggccggaagtattaaaaaaggtgagcgcgagctgaaaattggcgatcgcgtgttagtaggtggaaccaaggcaggtgtagtaaggttcctgggggagacggacttcgctaagggagaatggtgcggcgtggagctcgatgaacccctcgggaagaatgatggggcagtggcaggcaccaggtattttcagtgtcagccaaagtatggattattcgcgcctgtgcacaaggtgaccaagataggttttccatccaccacccctgccaaggccaaagccaacgcagtccgcagggtgatggccactaccagtgctagtttaaaacgttccccaagcgcttctagtttatcctccatgagtagtgttgcctctagcgtttcctcaaggccaagccggactggcctgctcacggaaacatcgtccagatatgcacggaagatctccggcacaacggccctgcaggaagccctgaaggaaaaacagcagcatattgagcagcttctggcagagagagatttggagcgggctgaagttgcaaaggctacttctcatgttggggagattgagcaggagctggccttggcccgagacggccacgatcagcatgtgctggaattagaggctaagatggatcagctgaggaccatggtggaagcagctgatagggaaaaggtggaactcctgaatcagttggaggaagagaaaagaaaggtggaagacctgcagttccgggtcgaagaagaaagtattaccaagggggacctcgaaacacagactaagttagagcacgccaggatcaaggaattggaacagtccctactgtttgaaaaaaccaaagctgacaaattgcaacgcgagctggaggatacccgcgttgcaacggtgagcgaaaaatcacgaattatggaattggaaaaagatctcgcccttcgtgtgcaagaagtcgcagaactcagaaggcgccttgagtcaaataaacccgcaggtgatgtggatatgtccctttcactgctgcaggaaataagcagtttgcaggaaaaacttgaggtcactcgaactgatcaccagcgcgagataacgagcctgaaggagcattttggcgctagagaagagactcaccagaaggagatcaaggccctctataccgccactgagaaactgtctaaagaaaacgaaagtcttaagtcaaaattagagcatgcaaataaagagaactcagatgtgatcgccctttggaagtccaagttggaaactgccattgccagtcaccagcaggccatggaggaacttaaggtgagttttagcaagggacttggaaccgaaactgccgaattcgccgaactaaagacccagatcgagaagatgcgcctcgattaccagcacgaaatagaaaatttacaaaaccagcaggacagcgaaagggctgctcacgcgaaggaaatggaggcccttcgagcaaaattaatgaaggtcatcaaggaaaaggaaaattcactcgaagctattaggtcaaaacttgataaagcggaggaccagcatttggtggagatggaagatacactgaataagctccaggaggcagaaattaaggtaaaggagctggaggtcttacaggctaagtgtaacgagcaaactaaggtcatcgataactttacatcacaattgaaagcaactgaggaaaagctgctggatctcgacgcgctgcgaaaagcctcaagcgagggtaagtctgaaatgaaaaagctgcgacaacagctggaagcagcagagaagcagataaagcacctggaaatcgagaagaatgcagagtctagcaaggcctcgtccatcacccgggagctccagggacgcgagctcaaactgacgaacctccaggaaaacctgtcagaggtatctcaggtcaaggagaccctggaaaaggagttgcagatccttaaggagaagtttgctgaggccagtgaagaagctgtgtctgtgcagcgcagtatgcaggagaccgtgaataaacttcatcagaaggaagagcaatttaatatgctgtcctccgatctggagaaacttagggagaacctagcggatatggaagctaagtttagagagaaggacgagagagaagaacagctgattaaggctaaggaaaagctagagaatgatatcgcggagattatgaagatgtctggtgacaacagttcccagttgacaaagatgaatgatgaactcagactgaaggagcgggacgtggaggagcttcaactgaaacttacgaaagcgaatgaaaacgcgtcatttctccagaaaagcatcgaagacatgacagtaaaagccgagcaaagccagcaggaggctgctaaaaaacacgaggaagagaagaaagagctcgagagaaaactatccgatctggagaagaaaatggaaacaagccataaccaatgccaggagctaaaggctaggtacgagcgcgcaacatcagagacaaagactaaacacgaagaaattctgcagaacctgcagaagactctccttgataccgaagataagctcaagggtgccagggaggagaactccggacttctccaggaattagaggaactgcgtaaacaggccgacaaggctaaggcggcacagacagctgaggatgcaatgcagattatggaacagatgactaaggagaaaacagaaacactagccagcctggaggacactaagcagaccaacgcaaaactgcagaatgagctcgacaccctgaaagaaaacaatctcaagaatgtcgaagagctaaataagtctaaagagctgctcactgtagagaaccagaaaatggaagaatttagaaaggagatcgagactctgaaacaggcagccgctcagaagagtcaacaactctcagcgctgcaggaagaaaatgtcaaacttgccgaggaactgggccgttctagggatgaggttaccagccaccagaagctggaggaagagagatccgtccttaataaccaactcctggaaatgaagaagcgcgagagcaaattcattaaggatgcggacgaagagaaagcttcactgcagaagagtattagtattaccagtgccttattgacggaaaaagatgctgagctcgagaaactgcggaatgaagtgactgtactccgtggcgaaaatgcgagcgccaaatcgctacactccgttgtgcagaccctcgagtctgataaggtgaaactagagctcaaggtgaagaatctggagctgcagctgaaggaaaacaagcggcagctgtcttcgtcctcgggaaacacagatacgcaggctgatgaggatgagagggcacaggagagtcagatcgacttcctcaactccgtaattgtggacctacagagaaagaaccaggacctcaaaatgaaagtggaaatgatgagcgaagcagctctgaacggcaatggggacgatttgaacaattacgacagtgatgaccaggagaaacagtccaaaaaaaagcccaggctgttttgtgatatttgtgattgtttcgatctgcacgacaccgaggattgcccaacgcaagctcagatgagcgaagaccctccccactccactcaccatgggagccggggtgaggaacgaccctactgcgaaatctgtgagatgtttggtcactgggctacaaattgcaacgacgatgaaacgttctag

SEQ ID NO: 133835 - DNA, 5833 bp, Artificial Sequence
  derived and/or modified sequence
agatttaatccagagactgacttcactatagaacccacagttgtatcaatggttggggaaagatagtggcaacaggcaaaggagaaacagctctgacatacaaagaaaatgagtatgctaaagccaagtgggcttaaggcccccaccaagatcctgaagcctggaagcacagctctgaagacacctacggctgttgtagctccagtagaaaaaaccatatccagtgaaaaagcatcaagcactccatcatctgagactcaggaggaatttgtggatgactttcgagttggggagcgagtttgggtgaatggaaataagcctggatttatccagtttcttggagaaacccagtttgcaccaggccagtgggctggaattgttttagatgaacccataggcaagaacgatggttcggtggcaggagttcggtatttccagtgtgaacctttaaagggcatatttacccgaccttcaaagttaacaaggaaggtgcaagcagaagatgaagctaatggcctgcagacaacgcccgcctcccgagctacttcaccgctgtgcacttctacggccagcatggtgtcttcctccccctccaccccttcaaacatccctcagaaaccatcacagccagcagcaaaggaaccttcagctacgcctccgatcagcaaccttacaaaaactgccagtgaatctatctccaacctttcagaggctggctcaatcaagaaaggagaaagagagctcaaaatcggagacagagtattggttggtggcactaaggctggtgtagtccggtttcttggggagaccgactttgccaagggggagtggtgtggcgtggagttagatgagccacttgggaagaatgatggcgctgttgctggaacaaggtattttcagtgtcaacccaaatatggcttgttcgctcctgtccacaaagttaccaagattggcttcccttccactacaccagccaaagccaaggccaacgcagtgaggcgagtgatggcgaccacgtccgccagcctgaagcgcagcccttctgcctcttccctcagctccatgagctcagtggcctcctctgtgagcagcaggcccagtcggacaggactattgactgaaacctcctcccgttacgccaggaagatctccggtaccactgccctccaggaggccctgaaggagaagcagcagcacattgagcagctgctggcggaacgggatctggagagggcggaggtggccaaggccacgagccacgtgggggagatagagcaggagctagctctggcccgggacggacatgaccagcatgtcctggaattggaagccaaaatggaccagctgcgaacaatggtggaagctgctgacagggagaaggtggagcttctcaaccagcttgaagaggagaaaaggaaggttgaggaccttcagttccgggttgaagaagaatcaattaccaaaggtgatcttgagacgcagaccaaactggagcatgcccgcattaaggagcttgaacagagcctgctctttgaaaagaccaaagctgacaaactccagagggagttagaagacactagggtggctacagtttcagaaaagtcacgtataatggaactggagaaagacctagcattgagagtacaggaagtagctgagctccgaagaaggctagagtccaataagcctgctggggatgtggacatgtcactttcccttttgcaagagataagctctttgcaagaaaagttagaagtcacccgtactgaccaccagagagaaataacttctctgaaggagcattttggagcccgggaagaaactcatcagaaggagataaaggctctgtataccgccacggaaaagctttccaaagagaacgagtcattgaaaagcaagctggagcatgccaacaaagagaactcagatgtgatagctctatggaagtccaaactggagactgccatcgcatcccaccagcaggcgatggaagaactgaaggtatctttcagcaaagggcttggaacagagacggcagaatttgctgaactaaaaacacaaatagagaaaatgagactagattaccaacacgaaatagaaaatttgcagaatcaacaagactctgaacgggctgcccatgctaaagagatggaagccttgagggctaaactgatgaaagttattaaagaaaaggaaaacagtctggaagccatcaggtcgaaactggacaaagcagaagaccagcatctcgtagaaatggaagacacgttaaacaaattacaggaagctgaaataaaggtaaaggagctagaggtactgcaagccaaatgcaatgaacaaaccaaggttattgataattttacatcacagctcaaggctactgaagaaaagctcttggatcttgatgcacttcggaaagccagttccgaaggtaaatcggaaatgaagaaacttagacagcagcttgaggcagctgagaaacagattaaacatttagagattgaaaagaatgctgaaagtagcaaggctagtagcattaccagagagctccaggggagagagctaaagcttactaaccttcaggaaaatttgagtgaagtcagtcaagtgaaagagactttggaaaaagaacttcagattttgaaagaaaagtttgctgaagcttcagaggaggcagtctctgttcagagaagtatgcaagaaactgtaaataagttacaccaaaaggaggaacagtttaacatgctgtcttctgacttggagaagctgagagaaaacttagcagatatggaggcaaaatttagagagaaagatgagagagaagagcagctgataaaggcaaaggaaaaactggaaaatgacattgcagaaataatgaagatgtcaggagataactcttctcagctgacaaaaatgaacgatgaattacgtctgaaagaaagagatgtagaagaattacagctaaaacttacaaaggctaatgaaaatgcaagttttctgcaaaaaagtattgaggacatgactgtcaaagctgaacagagccagcaagaagcagctaaaaagcatgaggaagaaaagaaagaattggagaggaaattgtcggacctggaaaagaaaatggaaacaagccacaaccagtgtcaggagctgaaagccaggtatgagagagccacttctgagacaaaaaccaagcatgaagaaatcctacagaacctccagaagacgctgctggacacagaggacaagctgaagggcgcacgggaggagaacagtggcttgctgcaggagctggaggagctgagaaagcaagccgacaaagccaaagctgctcaaacagcggaagatgccatgcagataatggaacagatgaccaaagagaagactgagactctggcctccttggaggacaccaagcaaacaaatgcaaaactacagaatgaattggacacacttaaagaaaacaacttgaaaaatgtggaagagctgaacaaatcaaaagaactcctgactgtagagaatcaaaaaatggaagaatttaggaaagaaatagaaaccctaaagcaggcagcagctcagaagtcccagcagctttcagcgttgcaagaagagaacgttaaacttgctgaggagctggggagaagcagggacgaagtcacaagtcatcaaaagctggaagaagaaagatctgtgctcaataatcagttgttagaaatgaaaaaaagagaatccaagttcataaaagacgcagatgaagagaaagcttccttgcagaaatccatcagtataactagtgccttactcacagaaaaggatgccgagctggagaaactgagaaatgaggtcacagtgctcaggggagaaaacgcctctgccaagtccttgcattcagttgttcagactctagagtctgataaggtgaagctcgagctcaaggtaaagaacttggagcttcaactcaaagaaaacaagaggcagctcagcagctcctcaggtaatacagacactcaggcagacgaggatgaaagagcccaggagagtcagattgatttcctaaattcagtaatagtggaccttcaaaggaagaatcaagacctcaagatgaaggtggagatgatgtcagaagcagccctgaatgggaacggggatgacctaaacaattatgacagtgatgatcaggagaaacagtccaagaagaaacctcgcctcttctgtgacatttgtgactgctttgatctccacgacacagaggattgtcctacccaggcacagatgtcagaggaccctccccattccacacaccatggcagtcggggtgaggaacgcccatactgtgaaatctgtgagatgtttggacactgggccaccaactgcaatgacgacgaaaccttctgatgaagcctccagtggagaactgggcttgctcagacgcactcgcattgacacaacgtaacaccagcattgtgtgtgcagacttcaggagaactcatgttattttttaaccccgtcaacaaatctaggaaaatattttgatcttcaacaaattgccctttagtctccccgtatgagttagaataataaatatttagtaggtgagttttcacctcgaattttgttttcttgatttttacgtttgaagacattgcaccagatgccattacatttattggccccccgaccttgtagaaaaacccctaccctcacaataccttatttaagtaactttaaattatgccgttacttttcatatttgcactaagatatttccaggctgcatttgtatatttagattttttggttaagctttgacactggaatgagttgaaaaaatgtgccattttgcattttcatctactcatttaaagtattttattcttattcaaagaaatatctgagctctttgcactacctgttatcagtagtgcctttacttcaggcttgataatacttaggtgtgattataaaatcatgaagcaggtaaagggaggggcaagcccccaaactgctgtggggacattttataatctatatgctgcacccacttaatctactgtggtgttttgtttattagttttgcataatttcagcttctatatattgtatgtatatattttttaaaaatctatattttgggaaaaaaacatacacaatgtgtctttctttttggacatttacctttttgaaaaagaaaacacttaaaatgatcattaggacataacagactaggccagacatagcatcttgtggctttgcaaccattttcatttgtttgttttccttttatttcttcaccagatttaaataactggaggaattttctccaatttttttttccttctctggcaggtatccccagcagtcaattaacaataagccagtataaaacacctaaataaccaatctacaatctcccttcacaagtttttttactgtttttagatgaatgtacgatgagaaattcaacgttaataattctggattttcttatcacaaaaaagaaaatgaaggacctcaaagcacctgaacagtttatcgaccagtttgaatctatttatcttcatttgaatgtcttctagaatatgtaaaaagtcataaaatgtatcttccatgctacatgtacaataagaacttctataattgtatatatgcctttgatgtattttcccctcaagattatcaactgtgtgttcgacagtgaatattcaatctggtaccagttgaaatttttggttataaatgtaatacgaattgtttcacaaacagaaaacatgtaaagcagtattaaaatttggccaaacaagtgttctgtatctactttaataaatggttattcttt

SEQ ID NO: 133836 - DNA, 4284 bp, Artificial Sequence
  derived and/or modified sequence
atgagcatgctgaagcccagcggcctgaaggcccccaccaagatcctgaagcccggcagcaccgccctgaagacccccaccgccgtggtggcccccgtggagaagaccatcagcagcgagaaggccagcagcacccccagcagcgagacccaggaggagttcgtggacgacttcagagtgggcgagagagtgtgggtgaacggcaacaagcccggcttcatccagttcctgggcgagacccagttcgcccccggccagtgggccggcatcgtgctggacgagcccatcggcaagaacgacggcagcgtggccggcgtgagatacttccagtgcgagcccctgaagggcatcttcaccagacccagcaagctgaccagaaaggtgcaggccgaggacgaggccaacggcctgcagaccacccccgccagcagagccaccagccccctgtgcaccagcaccgccagcatggtgagcagcagccccagcacccccagcaacatcccccagaagcccagccagcccgccgccaaggagcccagcgccaccccccccatcagcaacctgaccaagaccgccagcgagagcatcagcaacctgagcgaggccggcagcatcaagaagggcgagagagagctgaagatcggcgacagagtgctggtgggcggcaccaaggccggcgtggtgagattcctgggcgagaccgacttcgccaagggcgagtggtgcggcgtggagctggacgagcccctgggcaagaacgacggcgccgtggccggcaccagatacttccagtgccagcccaagtacggcctgttcgcccccgtgcacaaggtgaccaagatcggcttccccagcaccacccccgccaaggccaaggccaacgccgtgagaagagtgatggccaccaccagcgccagcctgaagagaagccccagcgccagcagcctgagcagcatgagcagcgtggccagcagcgtgagcagcagacccagcagaaccggcctgctgaccgagaccagcagcagatacgccagaaagatcagcggcaccaccgccctgcaggaggccctgaaggagaagcagcagcacatcgagcagctgctggccgagagagacctggagagagccgaggtggccaaggccaccagccacgtgggcgagatcgagcaggagctggccctggccagagacggccacgaccagcacgtgctggagctggaggccaagatggaccagctgagaaccatggtggaggccgccgacagagagaaggtggagctgctgaaccagctggaggaggagaagagaaaggtggaggacctgcagttcagagtggaggaggagagcatcaccaagggcgacctggagacccagaccaagctggagcacgccagaatcaaggagctggagcagagcctgctgttcgagaagaccaaggccgacaagctgcagagagagctggaggacaccagagtggccaccgtgagcgagaagagcagaatcatggagctggagaaggacctggccctgagagtgcaggaggtggccgagctgagaagaagactggagagcaacaagcccgccggcgacgtggacatgagcctgagcctgctgcaggagatcagcagcctgcaggagaagctggaggtgaccagaaccgaccaccagagagagatcaccagcctgaaggagcacttcggcgccagagaggagacccaccagaaggagatcaaggccctgtacaccgccaccgagaagctgagcaaggagaacgagagcctgaagagcaagctggagcacgccaacaaggagaacagcgacgtgatcgccctgtggaagagcaagctggagaccgccatcgccagccaccagcaggccatggaggagctgaaggtgagcttcagcaagggcctgggcaccgagaccgccgagttcgccgagctgaagacccagatcgagaagatgagactggactaccagcacgagatcgagaacctgcagaaccagcaggacagcgagagagccgcccacgccaaggagatggaggccctgagagccaagctgatgaaggtgatcaaggagaaggagaacagcctggaggccatcagaagcaagctggacaaggccgaggaccagcacctggtggagatggaggacaccctgaacaagctgcaggaggccgagatcaaggtgaaggagctggaggtgctgcaggccaagtgcaacgagcagaccaaggtgatcgacaacttcaccagccagctgaaggccaccgaggagaagctgctggacctggacgccctgagaaaggccagcagcgagggcaagagcgagatgaagaagctgagacagcagctggaggccgccgagaagcagatcaagcacctggagatcgagaagaacgccgagagcagcaaggccagcagcatcaccagagagctgcagggcagagagctgaagctgaccaacctgcaggagaacctgagcgaggtgagccaggtgaaggagaccctggagaaggagctgcagatcctgaaggagaagttcgccgaggccagcgaggaggccgtgagcgtgcagagaagcatgcaggagaccgtgaacaagctgcaccagaaggaggagcagttcaacatgctgagcagcgacctggagaagctgagagagaacctggccgacatggaggccaagttcagagagaaggacgagagagaggagcagctgatcaaggccaaggagaagctggagaacgacatcgccgagatcatgaagatgagcggcgacaacagcagccagctgaccaagatgaacgacgagctgagactgaaggagagagacgtggaggagctgcagctgaagctgaccaaggccaacgagaacgccagcttcctgcagaagagcatcgaggacatgaccgtgaaggccgagcagagccagcaggaggccgccaagaagcacgaggaggagaagaaggagctggagagaaagctgagcgacctggagaagaagatggagaccagccacaaccagtgccaggagctgaaggccagatacgagagagccaccagcgagaccaagaccaagcacgaggagatcctgcagaacctgcagaagaccctgctggacaccgaggacaagctgaagggcgccagagaggagaacagcggcctgctgcaggagctggaggagctgagaaagcaggccgacaaggccaaggccgcccagaccgccgaggacgccatgcagatcatggagcagatgaccaaggagaagaccgagaccctggccagcctggaggacaccaagcagaccaacgccaagctgcagaacgagctggacaccctgaaggagaacaacctgaagaacgtggaggagctgaacaagagcaaggagctgctgaccgtggagaaccagaagatggaggagttcagaaaggagatcgagaccctgaagcaggccgccgcccagaagagccagcagctgagcgccctgcaggaggagaacgtgaagctggccgaggagctgggcagaagcagagacgaggtgaccagccaccagaagctggaggaggagagaagcgtgctgaacaaccagctgctggagatgaagaagagagagagcaagttcatcaaggacgccgacgaggagaaggccagcctgcagaagagcatcagcatcaccagcgccctgctgaccgagaaggacgccgagctggagaagctgagaaacgaggtgaccgtgctgagaggcgagaacgccagcgccaagagcctgcacagcgtggtgcagaccctggagagcgacaaggtgaagctggagctgaaggtgaagaacctggagctgcagctgaaggagaacaagagacagctgagcagcagcagcggcaacaccgacacccaggccgacgaggacgagagagcccaggagagccagatcgacttcctgaacagcgtgatcgtggacctgcagagaaagaaccaggacctgaagatgaaggtggagatgatgagcgaggccgccctgaacggcaacggcgacgacctgaacaactacgacagcgacgaccaggagaagcagagcaagaagaagcccagactgttctgcgacatctgcgactgcttcgacctgcacgacaccgaggactgccccacccaggcccagatgagcgaggaccccccccacagcacccaccacggcagcagaggcgaggagagaccctactgcgagatctgcgagatgttcggccactgggccaccaactgcaacgacgacgagaccttctag

SEQ ID NO: 133837 - protein, 462 aa, Artificial Sequence
  derived and/or modified sequence
MDTKHFLPLDFSTQVNSSLTSPTGRGSMAAPSLHPSLGPGIGSPGQLHSPISTLSSPINGMGPPFSVISSPMGPHSMSVPTTPTLGFSTGSPQLSSPMNPVSSSEDIKPPLGLNGVLKVPAHPSGNMASFTKHICAICGDRSSGKHYGVYSCEGCKGFFKRTVRKDLTYTCRDNKDCLIDKRQRNRCQYCRYQKCLAMGMKREAVQEERQRGKDRNENEVESTSSANEDMPVERILEAELAVEPKTETYVEANMGLNPSSPNDPVTNICQAADKQLFTLVEWAKRIPHFSELPLDDQVILLRAGWNELLIASFSHRSIAVKDGILLATGLHVHRNSAHSAGVGAIFDRVLTELVSKMRDMQMDKTELGCLRAIVLFNPDSKGLSNPAEVEALREKVYASLEAYCKHKYPEQPGRFAKLLLRLPALRSIGLKCLEHLFFFKLIGDTPIDTFLMEMLEAPHQMT

SEQ ID NO: 133838 - protein, 365 aa, Artificial Sequence
  derived and/or modified sequence
MNPVSSSEDIKPPLGLNGVLKVPAHPSGNMASFTKHICAICGDRSSGKHYGVYSCEGCKGFFKRTVRKDLTYTCRDNKDCLIDKRQRNRCQYCRYQKCLAMGMKREAVQEERQRGKDRNENEVESTSSANEDMPVERILEAELAVEPKTETYVEANMGLNPSSPNDPVTNICQAADKQLFTLVEWAKRIPHFSELPLDDQVILLRAGWNELLIASFSHRSIAVKDGILLATGLHVHRNSAHSAGVGAIFDRVLTELVSKMRDMQMDKTELGCLRAIVLFNPDSKGLSNPAEVEALREKVYASLEAYCKHKYPEQPGRFAKLLLRLPALRSIGLKCLEHLFFFKLIGDTPIDTFLMEMLEAPHQMT

SEQ ID NO: 133839 - DNA, 5547 bp, Artificial Sequence
  derived and/or modified sequence
gcgacttttgcaacaactcgccgcgccgcggcctccgcgcgccgccgccgccaccgcagccgccggctccccgccgcccgggcccgggccggccgcgccgggggccgccgcgcccgccgcccgctgcctgcgccgccggccgggcatgagttagtcgcagacatggacaccaaacatttcctgccgctcgatttctccacccaggtgaactcctccctcacctccccgacggggcgaggctccatggctgccccctcgctgcacccgtccctggggcctggcatcggctccccgggacagctgcattctcccatcagcaccctgagctcccccatcaacggcatgggcccgcctttctcggtcatcagctcccccatgggcccccactccatgtcggtgcccaccacacccaccctgggcttcagcactggcagcccccagctcagctcacctatgaaccccgtcagcagcagcgaggacatcaagccccccctgggcctcaatggcgtcctcaaggtccccgcccacccctcaggaaacatggcttccttcaccaagcacatctgcgccatctgcggggaccgctcctcaggcaagcactatggagtgtacagctgcgaggggtgcaagggcttcttcaagcggacggtgcgcaaggacctgacctacacctgccgcgacaacaaggactgcctgattgacaagcggcagcggaaccggtgccagtactgccgctaccagaagtgcctggccatgggcatgaagcgggaagccgtgcaggaggagcggcagcgtggcaaggaccggaacgagaatgaggtggagtcgaccagcagcgccaacgaggacatgccggtggagaggatcctggaggctgagctggccgtggagcccaagaccgagacctacgtggaggcaaacatggggctgaaccccagctcgccgaacgaccctgtcaccaacatttgccaagcagccgacaaacagcttttcaccctggtggagtgggccaagcggatcccacacttctcagagctgcccctggacgaccaggtcatcctgctgcgggcaggctggaatgagctgctcatcgcctccttctcccaccgctccatcgccgtgaaggacgggatcctcctggccaccgggctgcacgtccaccggaacagcgcccacagcgcaggggtgggcgccatctttgacagggtgctgacggagcttgtgtccaagatgcgggacatgcagatggacaagacggagctgggctgcctgcgcgccatcgtcctctttaaccctgactccaaggggctctcgaacccggccgaggtggaggcgctgagggagaaggtctatgcgtccttggaggcctactgcaagcacaagtacccagagcagccgggaaggttcgctaagctcttgctccgcctgccggctctgcgctccatcgggctcaaatgcctggaacatctcttcttcttcaagctcatcggggacacacccattgacaccttccttatggagatgctggaggcgccgcaccaaatgacttaggcctgcgggcccatcctttgtgcccacccgttctggccaccctgcctggacgccagctgttcttctcagcctgagccctgtccctgcccttctctgcctggcctgtttggactttggggcacagcctgtcactgctctgcctaagagatgtgttgtcaccctccttatttctgttactacttgtctgtggcccagggcagtggctttcctgaggcagcagccttcgtggcaagaactagcgtgagcccagccaggcgcctccccaccgggctctcaggacaccctgccacaccccacggggcttgggcgactacagggtcttcgggccccagccctggagctgcaggagttgggaacggggcttttgtttccgttgctgtttatcgatgctggttttcagaattcctgtgtggccctcctgtctggagtgacatcttcatctgctctgaatactggtgcccagccagcccgtgacagcttccccctaatcaggaggggacagctgggggcgcaagctggtgtgtcatcagcaaagacctcagccgcctcggggatgagaggggactcgtggggcaagcaagctgccctgtgctctgagtgagggggaaggtagcccctttttccaaagataactcacagttttgccctcgagccaatgagaacatgagctgccctctgtgcaaggtttcggggccacctccaggctgcaggggcgggtcactcacccccctgttttctctctgccttggtgttctggtttcagactcccgactccccgttcagaccagagtgccccggcccctccccagcctgagtcttctccttgctctgcggggtgggctgaggcttgtccttgtttcctgcagggctggccctggctcgggcagggtggggcatcaccacctcactggccttgctggaggcacagggctctgcggacctgcagccatctgtgaggcccgcggggatgggaggggaggagggtggcctgttggtttccctcagagggggcaggtggcctggagagagaggggctcaggaactgggagcctcgtgggtggggcagatgctccgcggcctggagtggctctgccggggcattggtgggacccctgctcaggccttctctctggctgccagttgtgtctaaaagactcttggaatctgagaacccggagtcgcagcgccctcgggcctgggccacacgcaggccctggtgggaccacccagcctggtattgtccacggacagcgttgttcacccagagccttacttgggagcctcactgaacgcctgctctggttgaaggtggggtgggggcggggcttggggcctccctggctcagcccagtgcggcctggcgctcctcccgcaggctctgcccccgggctccggtggtgcggggccctctcaggttgaactcgcctcttttgcactggaaggccctccctttggcctgagtacttttcccgttcacgcctcagtcccgtggacccagcctttgtcagtggcaggtgcctgaacagagggtggatgggggggataccggagggggtcttgtcttcccagccgcagtctaggaatgatgcgggggggtggacgccttctccatagtctttccccacctggagcaggggcttcctcagtggtgaggggagctgcctacaggttggaccgggaggcagtggcttggagaggcagctttccagccttggtggggaagaaagtgtccattctttgccttcctggagctcccagccagagctgagcttaggcacccgagtggagcctgcagctgagtctgtgcccgagacaggctgtcagagattccagaagcctctcctccccgccgccctccacccctgcctttcagcgttgtggatccctagaggtggccccctgcccgatccaccgtcctgaggcagagtgttgagcctcatacctgtaccaggtccccggccagctgggcccctcccaggcactgccaggaagccccagctgcccctggcgggtgtggtggaaatggcaggagggtgcaggtactcttggggccccagcggtgggagtgcaaaagacccaacgccaacacctggtgccttctgcagccagcgcccacccatccgtgcccggacccttgggaatgcccgcggctccagaggaaaaagcccagggacggggcctccgttgcggggggtcggctgcttcttgggaactttgtcgtttccggcgctggctggctggctggctggctgtaaagcactgaagccccccggccgccaacccctgaaagcagaacctggcctccctggccacagcagccttacccaccgctctacgtgtcccgggcacttcccgcagccttcccgtccctttctcatcggccttgtagttgtacagtgctgttggtttgaaaaggtgatgtgtggggagtgcggctcatcactgagtagagaggtagaatttctatttaaccagacctgtagtagtattaccaatccagttcaattaaggtgattttttgtaattattattattttggtgggacaatctttaattttctaaagatagcactaacatcagctcattagccacctgtgcctgtccccgccttggcccggctggatgaagcggcttccccgcagggcccccacttcccagtggctgcttcctggggacccagggcaccccggcaccttcaggcacgctcctcagctggtcacctcccggctttgccgttcagatggggctcctgaggctcaggagtgaagatgccacagagccgggctcccctaggctgcgtcgggcatgcttggaagctggcctgccaggaccttccaccctggggcctgtgtcagccgccggccctccgcaccctggaagcacacggcctctgggaaggacagccctgaccttcggttttccgagcacggtgtttcccaagaattctgggctggcggcctggtggcagtgctggagatgaccccgagcccctccccgtggggcacccaggagggccctgccggaatgtgcagcctgtgggtagtcggctggtgtccctgtcgtggagctggggtgcgtgatctggtgctcgtccacgcaggtgtgtggtgtaaacatgtatgtgctgtacagagagacgcgtgtggagagagccgcacaccagcgccacccaggaaaggcggagcggttaccagtgttttgtgtttatttttaatcaagacgtttcccctgttttcctataaatttgcttcgtgtaagcaagtacataaggaccctcctttggtgaaatccgggttcgaatgaatatctcaaggcaggagatgcatctattttaagatgctttggagcagacagctttagccgttcccaatccttagcaatgccttagctgggacgcatagctaatactttagagaggatgacagatccataaagagagtaaagataagagaaaatgtctaaagcatctggaaaggtaaaaaaaaaaaatctatttttgtacaaatgtaattttatccctcatgtatacttggatatggcggggggagggctgggactgtttcgtttctgcttctagagattgaggtgaaagcttcgtccgagaaacgccaggacagacgatggcagaggagagggctcctgtgacggcggcgaggcttgggaggaaaccgccgcaatgggggtgtcttccctcggggcaggagggtgggcctgaggctttcaagggttttcttccctttcgagtaatttttaaagccttgctctgttgtgtcctgttgccggctctggccttcctgtgactgactgtgaagtggcttctccgtacgattgtctctgaaacatcgtggcctcaggtgccagggtttgatggacagtagcattagaattgtggaaaaggaacacgcaaagggagaagtgtgagaggagaaacaaaatatgagcgtttaaaatacatcgccattcagttcgttaaaaaaaaaaaaaaaaaaaaaaaaa

SEQ ID NO: 133840 - DNA, 1389 bp, Artificial Sequence
  derived and/or modified sequence
atggacaccaagcacttcttgccactggatttcagtactcaggtcaattctagcttgacaagcccgaccggtagaggttcaatggcagccccttccctccacccctctttggggccaggtatcggttctccaggacagttgcactcccccatatccactctcagctccccgatcaacggcatgggcccccccttttctgtgatcagtagtcccatgggaccccactccatgtccgtgccaacgaccccaacactggggttcagcaccggatccccccagcttagctcacccatgaacccagtgagcagctcggaggacattaagcccccactcggtcttaacggagtgttgaaagtgccggcacacccatccggtaacatggccagttttaccaagcacatatgtgccatctgcggagacagaagtagtggcaaacactatggagtctattcctgcgaaggctgcaagggcttttttaagaggaccgtgaggaaggacctcacctacacttgccgagacaataaagattgcttgattgataagcggcagaggaatcgctgccaatactgtaggtatcagaagtgtttagctatgggcatgaaaagggaggctgtgcaggaagaacgccaaagaggcaaggatcgaaacgaaaatgaggtcgagtctacctccagtgccaatgaagatatgccagtcgagagaatactcgaagccgagttggcagtcgaacctaagacagagacatatgtcgaggctaacatgggcctcaacccttcgtcccccaatgatccggtcactaacatatgccaggccgctgataaacaactgtttactttagtcgagtgggccaagcgaattccccacttctctgagctacccctcgatgaccaggttatcttgctgagagcggggtggaacgaactgctgatcgcatcttttagtcatcggtccatcgctgtaaaagatggcattcttctagctaccggcctgcatgttcatcgcaatagcgcccattcagccggcgtaggcgcaatattcgatcgggtactgacagaactggtgtctaagatgcgcgatatgcagatggacaaaactgagctcggttgcttacgagcgatcgtgctgttcaacccggatagcaaggggctcagtaaccctgcggaagtcgaggctctgcgggagaaagtttacgcatcccttgaggcttattgtaaacacaaatacccagagcaacccgggagatttgcaaagctgctgctgcggctccccgccctccgatccatcggattgaagtgtctcgagcacctcttcttcttcaaattaatcggggacacgcctatcgacaccttcctaatggaaatgctggaggctccccatcaaatgacttag

SEQ ID NO: 133841 - DNA, 1389 bp, Artificial Sequence
  derived and/or modified sequence
atggacaccaagcacttcctgcccctggacttcagcacccaggtgaacagcagcctgaccagccccaccggccggggctccatggccgcccccagcctgcaccccagcctgggccctggcatcggcagccctggccagctgcacagccccatcagcaccctgagcagccccatcaatggcatgggcccccccttcagcgtcatcagcagccccatgggcccccacagcatgtctgtgcccaccacccccaccctgggcttcagcacaggcagcccccagctgagcagccccatgaaccctgtgagcagcagcgaggacatcaagccacccctgggcctgaatggagtgctgaaggtgcctgcccaccccagcggcaacatggccagcttcaccaagcacatctgtgccatctgtggggacaggagcagcggcaagcactatggagtgtacagctgtgagggctgcaagggcttcttcaagaggacagtgaggaaggacctgacctacacctgccgggacaacaaggactgcctgattgacaagaggcagaggaaccgctgccagtactgccgctaccagaagtgcctggccatgggcatgaagcgggaggccgtgcaggaggagcggcagaggggcaaggacagaaatgaaaatgaggtggagagcaccagcagcgccaatgaagacatgcctgtggagcgcatcctggaggccgagctggccgtggagcccaagacagagacctacgtggaggccaacatgggcctgaaccccagcagccccaatgaccctgtgaccaacatctgccaggccgctgacaagcagctgttcaccctggtggagtgggccaagaggatcccccacttcagcgagctgcccctggatgaccaggtgatcctgctgcgggccggctggaatgagctgctgattgccagcttcagccacaggagcattgctgtgaaggatggcatcctgctggccaccggcctgcacgtgcacaggaacagcgcccacagcgctggggtgggcgccatctttgacagagtgctgacagagctggtgtccaagatgagggacatgcagatggacaagacagagctgggctgcctgcgggccatcgtgctcttcaacccagacagcaagggcctgagcaacccagctgaggtggaggccctgcgggagaaggtgtatgccagcctggaggcctactgcaagcacaagtacccagagcagcccggccgctttgccaagctgctgctgcggctgcctgccctgcggagcatcggcctgaagtgcctggagcacctgttcttcttcaagctgattggagacacccccatcgacaccttcctgatggagatgctggaggccccccaccagatgacctag

SEQ ID NO: 133842 - DNA, 1389 bp, Artificial Sequence
  derived and/or modified sequence
atggacaccaagcacttcctgcccctggacttcagcacccaggtgaacagctccctgacatctcctacggggaggggatccatggccgccccaagtctgcacccgtccctgggtcccggtatcggtagcccaggtcaactgcactcacctattagcactcttagcagccctatcaatggcatggggccacccttttccgtgatatccagcccaatggggccacactcaatgtctgtccctaccactcccaccctgggatttagtaccggctccccccaattgagttcccccatgaatccagtgtcatcgtcagaggatatcaaaccaccccttgggctgaatggtgttcttaaagtgccggcacacccctccgggaatatggcaagtttcacaaagcacatctgcgccatttgtggcgaccggtcatccggaaaacattacggggtctatagctgcgaggggtgcaaaggcttctttaaaaggaccgtacgcaaggacttaacctacacctgcagggacaacaaggactgtctgatcgacaagcggcaacgtaataggtgtcagtactgcagatatcagaaatgtctcgctatgggcatgaagagggaggccgtacaagaagagaggcagcgcggtaaggaccgtaacgaaaacgaagtggaatcaacaagctcagccaatgaggacatgcccgtggagaggattctcgaagcagagctcgccgtggaacctaagacagaaacttacgtcgaagccaacatggggctgaatcctagttctcccaacgatcctgtgaccaatatatgccaagcggcagataagcagctgtttacacttgtggaatgggcaaaacggattccacatttcagcgagctgcccctggacgaccaggttattctcctgcgggccggttggaatgagcttctgattgcttcattttctcatcggtcgatcgcagtcaaagacgggatcctgcttgccacagggcttcatgttcacaggaatagtgcgcatagcgcaggggtcggggccatcttcgacagagtgctaaccgaactagtatcaaaaatgcgggatatgcagatggacaagactgagctgggatgcctgcgcgcaattgtcttatttaacccagactcaaagggtctgagcaaccctgcagaggttgaggctctgagagagaaggtctacgcctccctggaggcctattgcaagcacaagtaccccgaacagcctggccgtttcgctaagttacttctaaggcttccagcattacggagcataggcctaaaatgtttagaacatcttttcttttttaaactcatcggagacactccaatagatacctttctgatggagatgctagaggccccacatcagatgacctag

SEQ ID NO: 133843 - DNA, 1389 bp, Artificial Sequence
  derived and/or modified sequence
atggataccaagcactttctacccctggatttcagtacccaggtgaatagctctctaacctccccaactggacgcggatccatggcagccccttcgttgcacccctcactaggtcctggcatcggttcacccggacagttgcacagcccgataagcaccctctcatcccctatcaacgggatggggccaccgttctccgtcatctccagccctatgggccctcacagcatgagtgtaccaacaacgcctactcttggcttctccacaggaagcccccagctttcctcgccaatgaaccctgtgagttcatcggaggatattaaacccccactggggttgaatggggtccttaaagtacccgcacaccccagcggtaatatggccagttttacaaagcatatttgcgccatctgcggtgataggtcatcaggcaaacattatggagtttatagctgcgagggctgtaaaggcttctttaaacgcacagttcgcaaagatctaacttatacatgtcgggacaacaaggattgcttgatcgacaagcgacagcgtaatcgctgtcaatactgcagataccagaagtgtctagcgatggggatgaagcgggaggctgtgcaggaggaaaggcagcgtggcaaagatcggaatgagaatgaggtggaatccaccagttctgctaacgaagacatgcccgtcgagaggatcctagaggccgaactagcagttgagcctaagactgaaacctacgttgaggcgaatatgggtctgaatccatcttctccgaatgatccagtgactaacatctgccaggcagcagataagcagctgtttacactggtcgaatgggccaagcgcattccacacttctccgaacttcctctggacgaccaggtgatccttcttagagcaggctggaacgaacttctgattgcttcctttagtcatcgctctattgcggtcaaggatgggatcctgctggctaccggtctgcatgtgcaccgaaatagtgcacacagcgccggtgtcggcgctattttcgaccgcgtgttaaccgaactggtgtcgaagatgagagatatgcaaatggacaagactgagttaggatgcctccgcgcaatcgtcctgttcaatcccgattccaaagggctgagcaatccagccgaagtggaggccctaagggaaaaggtttatgccagcctggaagcctactgcaaacacaaataccccgagcagcctgggaggtttgccaagttactgcttaggctgcctgccctcagaagcatcggcctcaagtgtttggagcatctgtttttttttaagctaataggcgatacccccatcgatacgtttctgatggagatgctagaagcaccacaccagatgacatag

SEQ ID NO: 133844 - DNA, 1846 bp, Artificial Sequence
  derived and/or modified sequence
cgcccgccgcccgctgcctgcgccgccggccgggcatgagttagtcgcagacatggacaccaaacatttcctgccgctcgatttctccacccaggtgaactcctccctcacctccccgacggggcgaggctccatggctgccccctcgctgcacccgtccctggggcctggcatcggctccccgggacagctgcattctcccatcagcaccctgagctcccccatcaacggcatgggcccgcctttctcggtcatcagctcccccatgggcccccactccatgtcggtgcccaccacacccaccctgggcttcagcactggcagcccccagctcagctcacctatgaaccccgtcagcagcagcgaggacatcaagccccccctgggcctcaatggcgtcctcaaggtccccgcccacccctcaggaaacatggcttccttcaccaagcacatctgcgccatctgcggggaccgctcctcaggcaagcactatggagtgtacagctgcgaggggtgcaagggcttcttcaagcggacggtgcgcaaggacctgacctacacctgccgcgacaacaaggactgcctgattgacaagcggcagcggaaccggtgccagtactgccgctaccagaagtgcctggccatgggcatgaagcgggaagccgtgcaggaggagcggcagcgtggcaaggaccggaacgagaatgaggtggagtcgaccagcagcgccaacgaggacatgccggtggagaggatcctggaggctgagctggccgtggagcccaagaccgagacctacgtggaggcaaacatggggctgaaccccagctcgccgaacgaccctgtcaccaacatttgccaagcagccgacaaacagcttttcaccctggtggagtgggccaagcggatcccacacttctcagagctgcccctggacgaccaggtcatcctgctgcgggcaggctggaatgagctgctcatcgcctccttctcccaccgctccatcgccgtgaaggacgggatcctcctggccaccgggctgcacgtccaccggaacagcgcccacagcgcaggggtgggcgccatctttgacagggtgctgacggagcttgtgtccaagatgcgggacatgcagatggacaagacggagctgggctgcctgcgcgccatcgtcctctttaaccctgactccaaggggctctcgaacccggccgaggtggaggcgctgagggagaaggtctatgcgtccttggaggcctactgcaagcacaagtacccagagcagccgggaaggttcgctaagctcttgctccgcctgccggctctgcgctccatcgggctcaaatgcctggaacatctcttcttcttcaagctcatcggggacacacccattgacaccttccttatggagatgctggaggcgccgcaccaaatgacttaggcctgcgggcccatcctttgtgcccacccgttctggccaccctgcctggacgccagctgttcttctcagcctgagccctgtccctgcccttctctgcctggcctgtttggactttggggcacagcctgtcactgctctgcctaagagatgtgttgtcaccctccttatttctgttactacttgtctgtggcccagggcagtggctttcctgaggcagcagccttcgtggcaagaactagcgtgagcccagccaggcgcctccccaccgggctctcaggacaccctgccacaccccacggggcttgggcgactacagggtcttcgggccccagccctggagctgcaggagttgggaacggggcttttgtttccgttgctgtttatcgatgctggttttcagaattc

SEQ ID NO: 133845 - DNA, 1389 bp, Artificial Sequence
  derived and/or modified sequence
atggacaccaagcacttcctgcccctggacttcagcacccaggtgaacagcagcctgaccagccccaccggcagaggcagcatggccgcccccagcctgcaccccagcctgggccccggcatcggcagccccggccagctgcacagccccatcagcaccctgagcagccccatcaacggcatgggcccccccttcagcgtgatcagcagccccatgggcccccacagcatgagcgtgcccaccacccccaccctgggcttcagcaccggcagcccccagctgagcagccccatgaaccccgtgagcagcagcgaggacatcaagccccccctgggcctgaacggcgtgctgaaggtgcccgcccaccccagcggcaacatggccagcttcaccaagcacatctgcgccatctgcggcgacagaagcagcggcaagcactacggcgtgtacagctgcgagggctgcaagggcttcttcaagagaaccgtgagaaaggacctgacctacacctgcagagacaacaaggactgcctgatcgacaagagacagagaaacagatgccagtactgcagataccagaagtgcctggccatgggcatgaagagagaggccgtgcaggaggagagacagagaggcaaggacagaaacgagaacgaggtggagagcaccagcagcgccaacgaggacatgcccgtggagagaatcctggaggccgagctggccgtggagcccaagaccgagacctacgtggaggccaacatgggcctgaaccccagcagccccaacgaccccgtgaccaacatctgccaggccgccgacaagcagctgttcaccctggtggagtgggccaagagaatcccccacttcagcgagctgcccctggacgaccaggtgatcctgctgagagccggctggaacgagctgctgatcgccagcttcagccacagaagcatcgccgtgaaggacggcatcctgctggccaccggcctgcacgtgcacagaaacagcgcccacagcgccggcgtgggcgccatcttcgacagagtgctgaccgagctggtgagcaagatgagagacatgcagatggacaagaccgagctgggctgcctgagagccatcgtgctgttcaaccccgacagcaagggcctgagcaaccccgccgaggtggaggccctgagagagaaggtgtacgccagcctggaggcctactgcaagcacaagtaccccgagcagcccggcagattcgccaagctgctgctgagactgcccgccctgagaagcatcggcctgaagtgcctggagcacctgttcttcttcaagctgatcggcgacacccccatcgacaccttcctgatggagatgctggaggccccccaccagatgacctag

SEQ ID NO: 133846 - protein, 587 aa, Artificial Sequence
  derived and/or modified sequence
  misc_feature (1)..(1): Xaa can be any naturally occurring amino acid
XRAPPPPPLLLLLALLPLLPAPGAAAAPAPRPPELQSASAGPSVSLYLSEDEVRRLIGLDAELYYVRNDLISHYALSFSLLVPSETNFLHFTWHAKSKVEYKLGFQVDNVLAMDMPQVNISVQGEVPRTLSVFRVELSCTGKVDSEVMILMQLNLTVNSSKNFTVLNFKRRKMCYKKLEEVKTSALDKNTSRTIYDPVHAAPTTSTRVFYISVGVCCAVIFLVAIILAVLHLHSMKRIELDDSISASSSSQGLSQPSTQTTQYLRADTPNNATPITSYPTLRIEKNDLRSVTLLEAKGKVKDIAISRERITLKDVLQEGTFGRIFHGILIDEKDPNKEKQAFVKTVKDQASEIQVTMMLTESCKLRGLHHRNLLPITHVCIEEGEKPMVILPYMNWGNLKLFLRQCKLVEANNPQAISQQDLVHMAIQIACGMSYLARREVIHKDLAARNCVIDDTLQVKITDNALSRDLFPMDYHCLGDNENRPVRWMALESLVNNEFSSASDVWAFGVTLWELMTLGQTPYVDIDPFEMAAYLKDGYRIAQPINCPDELFAVMACCWALDPEERPKFQQLVQCLTEFHAALGAYV

SEQ ID NO: 133847 - DNA, 1764 bp, Artificial Sequence
  derived and/or modified sequence
tgaagagcccccccccccccccccctgctgctgctgctggccctgctgcccctgctgcccgcccccggcgccgccgccgcccccgcccccagaccccccgagctgcagagcgccagcgccggccccagcgtgagcctgtacctgagcgaggacgaggtgagaagactgatcggcctggacgccgagctgtactacgtgagaaacgacctgatcagccactacgccctgagcttcagcctgctggtgcccagcgagaccaacttcctgcacttcacctggcacgccaagagcaaggtggagtacaagctgggcttccaggtggacaacgtgctggccatggacatgccccaggtgaacatcagcgtgcagggcgaggtgcccagaaccctgagcgtgttcagagtggagctgagctgcaccggcaaggtggacagcgaggtgatgatcctgatgcagctgaacctgaccgtgaacagcagcaagaacttcaccgtgctgaacttcaagagaagaaagatgtgctacaagaagctggaggaggtgaagaccagcgccctggacaagaacaccagcagaaccatctacgaccccgtgcacgccgcccccaccaccagcaccagagtgttctacatcagcgtgggcgtgtgctgcgccgtgatcttcctggtggccatcatcctggccgtgctgcacctgcacagcatgaagagaatcgagctggacgacagcatcagcgccagcagcagcagccagggcctgagccagcccagcacccagaccacccagtacctgagagccgacacccccaacaacgccacccccatcaccagctaccccaccctgagaatcgagaagaacgacctgagaagcgtgaccctgctggaggccaagggcaaggtgaaggacatcgccatcagcagagagagaatcaccctgaaggacgtgctgcaggagggcaccttcggcagaatcttccacggcatcctgatcgacgagaaggaccccaacaaggagaagcaggccttcgtgaagaccgtgaaggaccaggccagcgagatccaggtgaccatgatgctgaccgagagctgcaagctgagaggcctgcaccacagaaacctgctgcccatcacccacgtgtgcatcgaggagggcgagaagcccatggtgatcctgccctacatgaactggggcaacctgaagctgttcctgagacagtgcaagctggtggaggccaacaacccccaggccatcagccagcaggacctggtgcacatggccatccagatcgcctgcggcatgagctacctggccagaagagaggtgatccacaaggacctggccgccagaaactgcgtgatcgacgacaccctgcaggtgaagatcaccgacaacgccctgagcagagacctgttccccatggactaccactgcctgggcgacaacgagaacagacccgtgagatggatggccctggagagcctggtgaacaacgagttcagcagcgccagcgacgtgtgggccttcggcgtgaccctgtgggagctgatgaccctgggccagaccccctacgtggacatcgaccccttcgagatggccgcctacctgaaggacggctacagaatcgcccagcccatcaactgccccgacgagctgttcgccgtgatggcctgctgctgggccctggaccccgaggagagacccaagttccagcagctggtgcagtgcctgaccgagttccacgccgccctgggcgcctacgtgtag

SEQ ID NO: 133848 - DNA, 1764 bp, Artificial Sequence
  derived and/or modified sequence
taaagagccccgcccccacccccgctgctactgttgctggctctactgccactgctgcccgcacccggtgccgcagccgcccccgcgccccggccaccggagctacagtccgccagcgcgggcccgtcagtatcactgtacttgtcagaggatgaggtcaggcgactcatcggcctggacgccgaactctactatgtcagaaatgatctgatttcccactatgcactctctttctccctgctcgttccgtctgaaaccaacttccttcacttcacttggcacgctaaatctaaggtggagtacaagttggggtttcaggtggataatgtactcgctatggacatgccacaggtcaatatctccgtgcaaggcgaggtcccccggactttgtccgtgttcagagtggagttgtcctgcacaggcaaggtggattccgaggtgatgattcttatgcagctgaacctgactgtcaacagcagtaagaacttcaccgtgttaaacttcaaacgacgtaaaatgtgctacaaaaaactggaagaggtaaagaccagtgctttggataagaacacatcacgcaccatctacgacccagtgcatgccgccccaacaactagtacccgagtattctacatttccgtgggtgtgtgttgtgctgtgatcttcctcgtagccatcattttggccgtccttcatctccactctatgaagcgaattgaactggacgatagcatttctgcctcttcatcttcccaggggctgagccagccttccacccagacaacccagtatttacgcgcagatacccctaataacgccaccccaattacaagctaccccacactgcgcatagagaaaaatgacctgagaagcgttaccttgttggaagccaaaggaaaggtgaaagacatagcgatatctcgggagaggatcactctgaaagacgtgctgcaggaagggaccttcggcaggatatttcacggtatactgatcgatgagaaggacccaaacaaggaaaagcaggcttttgtcaagaccgtgaaggaccaagccagtgaaatccaggtcaccatgatgcttacagagagttgtaagctgaggggacttcatcatcgaaacctgcttccaattactcacgtttgtatagaagaaggagagaagcctatggtgattctgccctacatgaactggggcaacctgaagcttttcctccgccagtgtaagctcgtggaagctaataaccctcaagcgatcagtcaacaagatctggtgcacatggccattcagattgcctgcgggatgagctacttggctcgacgcgaggtgatccacaaggatctggccgcccggaattgtgtcatcgatgatacactccaggtgaagatcaccgacaacgctctgtctagggatcttttcccgatggactaccattgcttgggcgacaatgagaaccgtcccgtgaggtggatggccctagaaagtttggtgaataacgaatttagtagcgcttcggacgtctgggctttcggcgtcacgctttgggagctgatgacactaggacagacaccttacgttgatatcgatcccttcgagatggcagcctacctcaaggacgggtatcgcatcgctcagccaattaattgtcctgacgaactcttcgcggtgatggcatgctgctgggccctcgatccagaggagcggcccaagttccaacagttggtgcagtgcctcaccgaattccacgcagccttaggagcatacgtgtag

SEQ ID NO: 133849 - DNA, 1764 bp, Artificial Sequence
  derived and/or modified sequence
tgaagagcccctcctcctccacccctgctgctgctgctggccctgctgcccctgctgcctgcccctggagctgctgctgccccagccccccggcccccagagctgcagagcgccagcgctggccccagcgtgtccctgtacctgtctgaagatgaggtgcggcggctgattggcctggatgctgagctgtactacgtgagaaatgacctgatcagccactacgccctgtccttcagcctgctggtgcccagcgagaccaacttcctgcacttcacctggcacgccaagagcaaggtggagtacaagctgggcttccaggtggacaacgtgctggccatggacatgccccaggtgaacatctctgtgcagggcgaggtgcccaggaccctgtctgtgttccgggtggagctgagctgcaccgggaaggtggacagcgaggtgatgatcctgatgcagctgaacctgactgtgaacagcagcaagaacttcaccgtgctgaacttcaagaggaggaagatgtgctacaagaagctggaggaggtgaagaccagcgccctggacaagaacaccagcaggaccatctatgaccctgtgcacgccgcccccaccaccagcaccagggtcttctacatctctgtgggcgtgtgctgtgccgtcatcttcctggtggccatcatcctggccgtgctgcacctgcacagcatgaagagaattgagctggatgacagcatcagcgccagcagcagcagccagggcctgagccagcccagcacccagaccacccagtacctgcgggctgacacccccaacaatgccacccccatcaccagctaccccaccctgagaattgagaagaatgacctgcggtctgtgaccctgctggaggccaagggcaaggtgaaggacatcgccatcagccgggagcgcatcaccctgaaggatgtgctgcaggagggcaccttcggccgcatcttccacggcatcctgattgatgagaaggaccccaacaaggagaagcaggcctttgtgaagacagtgaaggaccaggccagcgagatccaggtgaccatgatgctgacagagagctgcaagctgcggggcctgcaccacaggaacctgctgcccatcacccacgtgtgcatcgaggagggggagaagcccatggtgatcctgccctacatgaactggggcaacctgaagctgttcctgcggcagtgcaagctggtggaggccaacaacccccaggccatcagccagcaggacctggtgcacatggccatccagatcgcctgtggcatgagctacctggcccggcgggaggtgatccacaaggacctggccgccaggaactgtgtgattgatgacaccctgcaggtgaagatcacagacaatgccctgagccgggacctcttccccatggactaccactgcctgggggacaatgaaaatagacctgtgcgctggatggccctggagagcctggtgaacaatgagttcagcagcgccagtgatgtgtgggccttcggcgtgaccctgtgggagctgatgaccctgggccagaccccctacgtggacatcgacccctttgagatggccgcctacctgaaggatggctacagaattgcccagcccatcaactgcccagatgagctgtttgctgtgatggcctgctgctgggccctggaccctgaggagcggcccaagttccagcagctggtgcagtgcctgacagagttccacgccgccctgggcgcctacgtgtag

SEQ ID NO: 133850 - DNA, 1764 bp, Artificial Sequence
  derived and/or modified sequence
tgacgggcccccccccccccccccctgctgctgctgctggccctgttgcctctgctgcccgcccccggagccgcagctgcacctgctccacggcctcccgagctgcagtctgcttcggctggaccctcagtcagtctgtacctcagcgaagacgaagtacgccgcttgatcggactggacgctgaactgtactatgtgcgcaacgatctaatctcccactatgctctgagcttcagtctgttggtcccctcggagaccaatttcctacacttcacgtggcacgcgaaaagtaaggtcgaatataaactgggctttcaggttgataatgtgttggccatggatatgccacaggtcaatattagcgttcaaggggaagttccaaggaccctctccgtgttccgggtggaattgtcctgcactggcaaagttgattctgaggtcatgatcctgatgcaactcaatctgaccgtcaactcaagtaaaaattttacggtgctcaatttcaagaggaggaaaatgtgctataaaaagttagaagaggtgaaaacctcagcactcgacaagaatacttctagaacgatatatgaccctgtccatgctgctccaaccacctccaccagagttttctacatctccgttggtgtatgttgcgccgtgattttcctggtggctataatactggccgtcctacatctgcatagcatgaagcggatcgagctagatgatagcatcagtgccagttcctcctctcaggggttgtcacagccttcgacccagactacacagtacctaagggcggatacccccaataatgcgacaccaatcacgagctatcctacactgcgaatagaaaaaaacgatctgagaagcgtgacactgctagaggcaaaaggaaaggtgaaggatatcgccataagccgagaacggattacccttaaagacgttctgcaggaaggaacatttggcagaatcttccatgggatccttattgacgaaaaggaccctaataaggagaaacaggcttttgtgaagacggttaaggaccaggcttcagaaatccaggtcacaatgatgctcaccgagtcctgtaagctgcgcggactccaccaccgcaacctgcttcccattacacatgtttgcattgaagagggtgagaaaccgatggtcatcttgccatacatgaattggggcaatctgaaactcttcctcagacagtgcaaactcgtggaagccaataatccacaggctatatcacaacaagatctcgtacatatggctatccagattgcctgtggcatgagttatcttgcccggagagaggtgatccataaggacctggccgctcggaattgtgtgatcgacgacacactgcaggtgaaaattacagacaatgctttgtcccgcgacctgttccctatggactaccattgcctgggggataacgaaaacagacccgttcggtggatggccctagagtcactggtgaataatgaattctctagcgcaagtgacgtgtgggcgttcggtgtaacgctgtgggaacttatgacgctgggccagacgccgtatgtggacatcgacccctttgagatggcagcatacctgaaagacggctacagaattgctcagcctatcaactgtcccgacgagctctttgctgttatggcttgttgttgggccctggatccggaagagcgacccaagttccaacagttggtgcagtgcctgacagagtttcacgccgctctgggggcctacgtgtag

SEQ ID NO: 133851 - DNA, 1764 bp, Artificial Sequence
  derived and/or modified sequence
tgacgggctccacccccaccccctctgctgttgctactagcacttctccctctactccccgcacccggagcagccgcagcccctgcacctcgccctcctgagctgcagtcagccagtgccggtccatccgtttctctttacctgtccgaggacgaagtacgaaggcttatcggcttagacgccgagctgtactacgtgcgcaacgaccttatctctcattacgccttaagttttagcctccttgtgccttcagagaccaactttcttcactttacatggcacgccaagtcaaaggtggaatataaactggggttccaagtagataatgtgctagctatggacatgcctcaagtgaatataagtgtgcagggtgaggtacctagaaccctgtctgtgttcagagttgagctgtcctgtactggcaaggtcgactctgaggtcatgattttgatgcaactcaacctgactgtaaactctagcaaaaactttacagtcctgaattttaaacgcagaaaaatgtgctacaaaaaactcgaggaggtaaaaaccagtgcgttggataaaaacacatctcgaactatctatgacccggtacatgccgcacctaccactagcaccagggtcttctacatttctgtaggggtctgttgcgccgtgatattcctcgtagctattattctcgctgttttgcatctccatagcatgaaacgtatcgagctggatgattcaatttcagcgagcagtagctcacaaggcctgtcccagccatccactcagacgacgcagtatctaagggccgacactcctaacaacgccacgcccattacatcttatccaacactcagaatcgaaaaaaacgacctgcggagtgtcacactccttgaagccaaaggtaaagtaaaagatatcgccattagtcgggaacggattactctgaaagatgttctgcaggaaggcacctttggtaggatatttcatggaattttgattgatgaaaaggatcctaacaaggagaagcaggcctttgtgaagactgtaaaggatcaggcatccgaaatccaggtcacgatgatgttgacagaatcatgcaaattacgtgggctgcatcataggaatctgttgcccatcacccatgtgtgcatagaggagggagaaaagcccatggtgattctcccgtacatgaattgggggaacctaaagcttttcttgcgccagtgtaagttagtggaagccaataatccacaagcaatttcacagcaggacctcgttcatatggccatacaaatcgcttgtggcatgtcttacctcgccaggcgtgaggtcatccataaggatttggcggctcgaaactgcgtaatcgacgacacactgcaggttaagatcaccgataacgcattgagtagagatctgtttccgatggattatcattgccttggagataacgaaaatcgtcccgtcagatggatggcactcgagtctctggtgaacaacgaattctctagcgcaagcgacgtgtgggccttcggagtgaccctgtgggagctgatgacgttaggacagaccccctatgtcgatattgatccgttcgaaatggccgcatatctcaaagatggttatcgcatcgcccagcctataaactgtcctgacgaactcttcgcagtcatggcctgctgctgggctctggatcccgaagagcgacccaagtttcagcagctggtgcagtgcctaactgaatttcacgccgctttgggcgcatacgtctag

SEQ ID NO: 133852 - DNA, 2783 bp, Artificial Sequence
  derived and/or modified sequence
tgagggccccgccgccgccgccgctgctgcttctgcttgcgctgttgccgctgctgcccgcgcctggcgctgccgccgcccccgccccgcggcccccggagctgcagtcggcttccgcggggcccagcgtgagtctctacctgagcgaggacgaggtgcgccggctgatcggtcttgatgcagaactttattatgtgagaaatgaccttattagtcactacgctctatcctttagtctgttagtacccagtgagacaaatttcctgcacttcacctggcatgcgaagtccaaggttgaatataagctgggattccaagtggacaatgttttggcaatggatatgccccaggtcaacatttctgttcagggggaagttccacgcactttatcagtgtttcgggtagagctttcctgtactggcaaagtagattctgaagttatgatactaatgcagctcaacttgacagtaaattcttcaaaaaattttaccgtcttaaattttaaacgaaggaaaatgtgctacaaaaaacttgaagaagtaaaaacttcagccttggacaaaaacactagcagaactatttatgatcctgtacatgcagctccaaccacttctacgcgtgtgttttatattagtgtaggggtttgttgtgcagtaatatttctcgtagcaataatattagctgttttgcaccttcatagtatgaaaaggattgaactggatgacagcattagtgccagcagtagttcccaagggctgtctcagccatccacccagacgactcagtatctgagagcagacacgcccaacaatgcaactcctatcaccagttatcctaccttgcggatagagaagaacgacttgagaagtgtcactcttttggaggccaaaggcaaggtgaaggatatagcaatatccagagagaggataactctaaaagatgtactccaagaaggtacttttgggcgtattttccatgggattttaatagatgaaaaagatccaaataaagaaaaacaagcatttgtcaaaacagttaaagatcaagcttctgaaattcaggtgacaatgatgctcactgaaagttgtaagctgcgaggtcttcatcacagaaatcttcttcctattactcatgtgtgtatagaagaaggagaaaagcccatggtgatattgccttacatgaattgggggaatcttaaattgtttttacgacagtgcaagttagtagaggccaataatccacaggcaatttctcagcaagacctggtacacatggctattcagattgcctgtggaatgagctacctggccagaagggaagtcatccacaaagacctggctgccaggaactgtgtcattgatgacacacttcaagttaagatcacagacaatgccctctccagagacttgttccccatggactatcactgtctgggggacaatgaaaacaggccagttcgttggatggctcttgaaagtctggttaataacgagttctctagcgctagtgatgtgtgggcctttggagtgacgctgtgggaactcatgactctgggccagactccctacgtggacattgaccccttcgagatggccgcatacctgaaagatggttaccgaatagcccagccaatcaactgtcctgatgaattatttgctgtgatggcctgttgctgggccttagatccagaggagaggcccaagtttcagcagctggtacagtgcctaacagagtttcatgcagccctgggggcctacgtctgactcctctccaatcccacaccatcaggaagaaggtgcctgtcggggctcacttgaagcctgtcagggatgctttgtatctaacacaacgccaacagaagcacatttgtcttccagaacaccgtgccttagaaatgctttagaatctgaactttttaagacagacttaataatgtggcatattttctagatatcacttttattaggttgaactgaaagggtttttgtaaattttttggccaaaattttttaaaacatacttactttggactaggggtacattcttacaaaataaataaacagtttttaaaattgtttagacacagatatttggaattagctatcttagtgccaactgctttttatttttttacttcatcaaggtgatgtaagtgactcacctttaaagtttttttagtgttattttttatcactactctgggaaatggtttgtcttcaagatgcaatacttttcttagtaaaggaaaaacagcataaaaagatacctggtctgccttgtacaagaaaaggcaatattagaggaagaaaatttaaagaaaagctagaggaaaaaaaaatttttttaaaaatacttattagaagcaaactgcccttgcatggaaaactgtttatttttttcagtgaaaaggaattctgctttcgtgtttttgggaaagcaggaactgagttcattacatctttaatttggcagaaattagcctttctgtgaaccagatgtggtttggggcagatctgtagtaaacaatggtgattttatttatttttactctctggaaaaggagataatacaattccagaaagtgaactcatatttctaaggttaagattcccttttattgcacctagaatagtgctatgcacagagcgggtgcttgagttgttgtcgttttttgtttgttttttaaatgtaaactggtaaattttgtgcttatcttcaaggctggcttaagtataaaattgttttttaaacacttgaaaaattaaaggatttgttttatatta

SEQ ID NO: 133853 - protein, 101 aa, Artificial Sequence
  derived and/or modified sequence
MARPLEQAVAAIVCTFQEYAGRCGDKYKLCQAELKELLQKELATWTPTEFRECDYNKFMSVLDTNKDCEVDFVEYVRSLACLCLYCHEYFKDCPSEPPCSQ

SEQ ID NO: 133854 - DNA, 306 bp, Artificial Sequence
  derived and/or modified sequence
atggctcggccactagagcaggccgtagccgccatcgtgtgcaccttccaagagtacgcgggacgttgcggggacaagtacaagttgtgccaagccgagctaaaagagctccttcagaaggagctcgccacatggacccccacagagttcagggaatgcgattataacaagtttatgagtgtgctcgacacgaacaaggactgtgaagttgactttgtggagtacgttcgctccctcgcctgtctgtgtctctactgccatgagtactttaaggactgcccaagcgaacccccctgttctcagtag

SEQ ID NO: 133855 - DNA, 306 bp, Artificial Sequence
  derived and/or modified sequence
atggctcgccccctggaacaggcggttgctgctatcgtctgtacattccaagaatacgctggccggtgtggtgacaaatacaaactatgccaagccgagctgaaggagctcctgcagaaggagctcgccacatggaccccaacggaattccgagagtgtgattacaataagtttatgtccgttctggatactaacaaggactgcgaagtcgactttgtggagtacgtgagatccctcgcttgtttgtgcctgtattgtcacgagtattttaaagactgtccttccgaacccccttgcagtcaatag

SEQ ID NO: 133856 - DNA, 306 bp, Artificial Sequence
  derived and/or modified sequence
atggcccggcccctggagcaggccgtggccgccatcgtgtgcaccttccaggagtatgccggccgctgtggggacaagtacaagctgtgccaggccgagctgaaggagctgctgcagaaggagctggccacctggacccccacagagttccgggagtgtgactacaacaagttcatgtctgtgctggacaccaacaaggactgtgaggtggactttgtggagtatgtgcgcagcctggcctgcctgtgcctgtactgccacgagtacttcaaggactgccccagcgagcccccctgcagccagtag

SEQ ID NO: 133857 - DNA, 306 bp, Artificial Sequence
  derived and/or modified sequence
atggcccggcccctggagcaggccgtggccgccatcgtgtgcaccttccaggaatacgccggaagatgtggagacaagtataagctttgccaggccgagctaaaggagctgctgcagaaggaactggcaacttggacacccaccgaattccgagagtgtgactacaataagttcatgtccgtgcttgacacaaataaagactgcgaagttgatttcgtggagtatgtgagatccctggcgtgtctatgcctctattgccatgaatactttaaggactgtccaagtgaaccaccttgctcacagtag

SEQ ID NO: 133858 - DNA, 306 bp, Artificial Sequence
  derived and/or modified sequence
atggcccggcccctggagcaggccgtggccgccatcgtgtgcaccttccaggaatacgccggacgatgtggagacaagtacaaactgtgccaggctgagctcaaagagctcctgcagaaagaactggcaacatggaccccaaccgagtttagggagtgtgattataataaattcatgagcgtcctggacacaaacaaggattgcgaggtggactttgtagagtacgtgcggagcctggcgtgcttatgtttgtactgccacgaatattttaaagattgcccaagcgaacccccttgctcacagtag

SEQ ID NO: 133859 - DNA, 306 bp, Artificial Sequence
  derived and/or modified sequence
atggcgcgtcccttggaacaggctgtcgctgctatcgtgtgtaccttccaggaatatgcaggacggtgtggggacaaatataaattgtgtcaagccgaactgaaagagcttctgcaaaaagagcttgcaacctggacacccactgagtttcgtgagtgtgactataacaagttcatgtccgttctggatactaacaaagactgcgaggtcgacttcgtagaatatgtcagatcgctggcctgtctgtgcttgtattgtcatgaatactttaaagattgcccgtctgagccaccctgtagccagtag

SEQ ID NO: 133860 - DNA, 306 bp, Artificial Sequence
  derived and/or modified sequence
atggctaggccccttgagcaggccgtggcagcgatcgtatgtacctttcaggaatatgctggtagatgcggagacaaatataagctgtgccaagccgagttaaaagaactactgcagaaggagttggctacctggactcccaccgagttccgtgaatgcgactataacaaatttatgagtgttctggacacaaacaaagattgtgaggtagatttcgttgagtacgtgagatctctcgcttgtctttgcctgtactgtcacgagtattttaaggattgtcctagcgagcctccatgctcacagtag

SEQ ID NO: 133861 - DNA, 579 bp, Artificial Sequence
  derived and/or modified sequence
aaatggctcaccaaggttgcacagctggcgacaggcagagaggatcccacaagtttttcttctgggtgcagcttcctcgagttcagggcaggaggcaggtgaggatggccaggcctctggagcaggcggtagctgccatcgtgtgcaccttccaggaatacgcagggcgctgtggggacaaatacaagctctgccaggcggagctcaaggagctgctgcagaaggagctggccacctggaccccgactgagtttcgggaatgtgactacaacaaattcatgagtgttctggacaccaacaaggactgcgaggtggactttgtggagtatgtgcgctcacttgcctgcctctgtctctactgccacgagtacttcaaggactgcccctcagagcccccctgctcccagtagcctctgctccagggggtgcgctggctgtcgggggctgggcatgtctcccacaccccctcctaccctctctcctgtacccctttcaatctggacttgcccaggtcttctgcgatcagttaacccattttacctaggaggcccagagatgtgagggctccttcctcaggat

SEQ ID NO: 133862 - DNA, 856 bp, Artificial Sequence
  derived and/or modified sequence
ggggaggtgagcaattccaggaagggcttcccctccaatagaacagagtatccctatacagaacctccctgctcaaaacccccaggggtcgggagggtaacctcaggggaggccagtctcagattggtaaacacccgaactggtcaactctcaagagaccatctggttcaggttcctgactgggccagcgagtgaggatggccaggcctctggagcaggcggtagctgccatcgtgtgcaccttccaggaatacgcagggcgctgtggggacaaatacaagctctgccaggcggagctcaaggagctgctgcagaaggagctggccacctggaccccgactgagtttcgggaatgtgactacaacaaattcatgagtgttctggacaccaacaaggactgcgaggtggactttgtggagtatgtgcgctcacttgcctgcctctgtctctactgccacgagtacttcaaggactgcccctcagagcccccctgctcccagtagcctctgctccagggggtgcgctggctgtcgggggctgggcatgtctcccacaccccctcctaccctctctcctgtacccctttcaatctggacttgcccaggtcttctgcgatcagttaacccattttacctaggaggcccagagatgtgagggctccttcctcaggatgcccagcgaatgaggggtagagccactctggggcccagcctgcctgccgcacccctgtggcctcccttgtggatgggaggaggcgggatctgctctgaggccctcgaggctcagcagagcgtgcaccaatgagaccacgatgggaaagggcctatttaactcctaataaaaaactggcatcagc

SEQ ID NO: 133863 - DNA, 306 bp, Artificial Sequence
  derived and/or modified sequence
atggccagacccctggagcaggccgtggccgccatcgtgtgcaccttccaggagtacgccggcagatgcggcgacaagtacaagctgtgccaggccgagctgaaggagctgctgcagaaggagctggccacctggacccccaccgagttcagagagtgcgactacaacaagttcatgagcgtgctggacaccaacaaggactgcgaggtggacttcgtggagtacgtgagaagcctggcctgcctgtgcctgtactgccacgagtacttcaaggactgccccagcgagcccccctgcagccagtag

SEQ ID NO: 133864 - protein, 101 aa, Artificial Sequence
  derived and/or modified sequence
MACPLEKALDVMVSTFHKYSGKEGDKFKLNKSELKELLTRELPSFLGKRTDEAAFQKLMSNLDSNRDNEVDFQEYCVFLSCIAMMCNEFFEGFPDKQPRKK

SEQ ID NO: 133865 - protein, 90 aa, Artificial Sequence [sequence omitted]

SEQ ID NO: 133866 - DNA, 306 bp, Artificial Sequence
  derived and/or modified sequence
atggcatgccctttagagaaagctctcgatgtgatggtttctacctttcacaagtactccgggaaagagggagacaagttcaagctgaacaagagcgagcttaaggagcttctcacgcgcgagcttccgagtttcttaggtaagaggacagacgaagcagcctttcagaaactgatgagcaatttggatagcaaccgagacaatgaagtcgattttcaggagtactgtgtctttctcagctgtatcgccatgatgtgtaacgaatttttcgaaggatttccggataagcagcccagaaaaaaatag

SEQ ID NO: 133867 - DNA, 306 bp, Artificial Sequence
  derived and/or modified sequence
atggcctgccctcttgaaaaagccctggatgtcatggttagtacctttcacaagtacagcggaaaagagggcgacaagtttaagttgaacaagagcgagttaaaggagctgctcaccagggaactcccttcgtttctgggaaaaagaactgatgaagcagcttttcagaagctgatgtcaaacttggatagcaatcgagacaacgaggtggacttccaagagtactgtgtcttcttaagttgcatcgccatgatgtgtaatgagttctttgagggttttcccgacaaacagccacgcaagaagtag

SEQ ID NO: 133868 - DNA, 306 bp, Artificial Sequence
  derived and/or modified sequence
atggcgtgccccctggagaaggccttggatgtaatggtgtcgacctttcataagtactccggaaaagaaggcgataaattcaaactgaataaatctgaattgaaggaattactcacgagagagctgccgtctttcctcggaaagaggacggacgaggctgctttccagaagcttatgagtaaccttgattccaatcgggataacgaagtagattttcaagaatactgcgtgttccttagttgtatcgcaatgatgtgtaacgagtttttcgaaggatttcccgacaaacagccccggaagaaatag

SEQ ID NO: 133869 - DNA, 306 bp, Artificial Sequence
  derived and/or modified sequence
atggcttgtcccttagagaaggcgctggacgtaatggtgtctacttttcataagtatagcgggaaagagggagataagtttaagctaaacaaatccgagctgaaagagctgctgaccagagagcttccctcattcttgggcaaacgaactgacgaggctgcgttccagaaactgatgtcaaatcttgactcaaaccgggataacgaggttgacttccaggagtattgcgtgtttttgagctgcatagctatgatgtgcaatgaattctttgaagggtttcctgacaagcagcctaggaagaagtag

SEQ ID NO: 133870 - DNA, 273 bp, Artificial Sequence
  derived and/or modified sequence
atggtgtccacattccacaaatactctgggaaagagggagacaaatttaaactgaacaaaagcgagttaaaagagttgcttactcgggaattgccatcttttctcggaaagagaacagacgaagccgcgtttcagaagctcatgtccaaccttgatagtaatcgcgataacgaggttgacttccaggagtactgtgtgttcctgtcctgtattgcaatgatgtgcaatgagttttttgaaggttttcccgataaacagccgcggaaaaagtag

SEQ ID NO: 133871 - DNA, 306 bp, Artificial Sequence
  derived and/or modified sequence
atggcctgccccctggagaaggccctggatgtgatggtgtccaccttccacaagtacagcggcaaggagggggacaagttcaagctgaacaagtctgagctgaaggagctgctgacccgggagctgcccagcttcctgggcaagaggacagatgaagctgccttccagaagctgatgagcaacctggacagcaacagagacaatgaggtggacttccaggagtactgtgtgttcctgagctgcatcgccatgatgtgcaatgagttctttgagggcttcccagacaagcagcccaggaagaagtag

SEQ ID NO: 133872 - DNA, 273 bp, Artificial Sequence
  derived and/or modified sequence
atggtgtccaccttccacaagtacagcggcaaggagggggacaagttcaagctgaacaagtctgagctgaaggagctgctgacccgggagctgcccagcttcctgggcaagaggacagatgaggccgccttccagaagctgatgagcaacctggacagcaacagagacaatgaggtggacttccaggagtactgtgtgttcctgagctgcatcgccatgatgtgcaatgagttctttgagggcttcccagacaagcagcccaggaagaagtag

SEQ ID NO: 133873 - DNA, 306 bp, Artificial Sequence
  derived and/or modified sequence
atggcctgccccctggagaaggccctggacgtgatggtgagcaccttccataagtactctggtaaggaaggagataagtttaagttaaacaagtccgagcttaaggaactcctcactcgcgagctgcctagttttcttggcaagaggacagacgaggcggctttccaaaaactaatgtccaatctcgatagtaatagagataatgaagtggacttccaggagtactgcgtgttcctcagttgtattgccatgatgtgtaatgaatttttcgagggcttcccagataagcaaccgcgaaagaaatag

SEQ ID NO: 133874 - DNA, 306 bp, Artificial Sequence
  derived and/or modified sequence
atggcctgccccctggagaaggccctggacgtgatggtgagcaccttccacaaatacagcggcaaggaaggcgataagttcaaattgaataagtcagagctgaaagagctacttactcgcgagttgcctagcttcctaggcaagaggacagatgaagcagcatttcagaagctcatgtctaatttagattcaaatcgagataacgaggtcgatttccaggaatattgcgttttcctttcttgtattgcgatgatgtgtaacgaatttttcgaggggtttcccgacaagcagccaaggaaaaagtag

SEQ ID NO: 133875 - DNA, 306 bp, Artificial Sequence
  derived and/or modified sequence
atggcctgccccctggagaaggccctggacgtgatggtgagcaccttccataagtacagcgggaaggagggcgataagttcaaactgaataagtctgagctgaaggagttacttaccagggagctcccaagctttttagggaaaaggaccgacgaggctgcttttcaaaagctgatgagcaacctggactcgaatcgagataacgaagtggatttccaggaatactgcgtattcctgagctgtatcgcaatgatgtgtaacgaattttttgaagggttcccagataaacagccccgaaagaaatag

SEQ ID NO: 133876 - DNA, 306 bp, Artificial Sequence
  derived and/or modified sequence
atggcctgccccctggagaaggccctggacgtgatggtgagcacctttcacaaatatagtggaaaagaaggggacaagtttaaattgaataagagcgagcttaaagagctgctcactagagaacttccatcctttctaggcaagcgcacggatgaagcggcttttcagaaacttatgtctaatttggatagcaatagggataacgaggtcgatttccaggaatactgcgtgttcctgagttgcattgccatgatgtgcaacgagttctttgaaggctttccagataaacagcctcgaaaaaagtag

SEQ ID NO: 133877 - DNA, 273 bp, Artificial Sequence
  derived and/or modified sequence
atggtgagcaccttccacaagtacagcggcaaggagggcgacaagtttaagctcaacaagtctgagcttaaggaattgttgactcgcgagcttccttcgtttcttggcaagaggactgacgaagctgcctttcagaagctcatgtccaatttggattcgaacagagataatgaggtagacttccaggaatattgcgtttttttaagttgcatagccatgatgtgtaacgagttctttgagggcttccctgataagcagccccgaaagaaatag

SEQ ID NO: 133878 - DNA, 306 bp, Artificial Sequence
  derived and/or modified sequence
atggcctgcccacttgagaaggccctggatgtgatggtgtcaactttccataaatacagcgggaaggaaggcgataagtttaagctgaataagtcagaacttaaagagctcctcacccgggagctgcccagtttcctgggtaaaaggactgatgaggcggctttccaaaagctgatgtccaacctggattctaatcgtgacaacgaggtggacttccaggagtactgcgtgttcctaagctgcattgcaatgatgtgcaacgaattttttgaaggtttccctgacaagcagcccagaaagaagtag

SEQ ID NO: 133879 - DNA, 306 bp, Artificial Sequence
  derived and/or modified sequence
atggcatgcccactggaaaaagcactggatgtgatggtgtccacctttcacaaatatagcggaaaggagggtgataagtttaagctaaacaaatcagagctgaaggagttgttaactagggaacttccctcctttctcggcaaacgaacagatgaggctgcattccagaagcttatgagtaatctggattccaaccgtgataacgaagtggattttcaagagtactgtgtattcctctcatgtattgctatgatgtgcaacgagttctttgagggatttccggataaacaaccaaggaaaaagtag

SEQ ID NO: 133880 - DNA, 306 bp, Artificial Sequence
  derived and/or modified sequence
atggcatgccctttggagaaagcacttgatgtcatggtgtctaccttccataagtattccgggaaggagggggacaaatttaagctgaataagagcgaactcaaagagctgcttaccagagagctgcccagtttcctgggtaaaagaactgatgaggccgcattccaaaaacttatgtcaaaccttgactcaaaccgcgacaacgaagtggatttccaggagtactgcgttttcctgtcatgtattgctatgatgtgtaatgagttctttgagggcttccctgacaaacagcccaggaaaaaatag

SEQ ID NO: 133881 - DNA, 306 bp, Artificial Sequence
  derived and/or modified sequence
atggcttgcccgctggagaaggccctggacgtgatggtttccacattccacaaatactcaggcaaggagggggataagttcaagctcaacaagtctgagctaaaggagcttctgacacgagaactcccctcttttctcggtaaaaggaccgacgaggctgcctttcagaagctgatgagtaacctggactctaatcgcgacaacgaggtcgatttccaggagtactgtgtgttcctttcctgcatagccatgatgtgcaacgaattctttgaaggatttccagacaagcagccaagaaagaagtag

SEQ ID NO: 133882 - DNA, 273 bp, Artificial Sequence
  derived and/or modified sequence
atggttagtacttttcacaaatatagtgggaaggaaggcgacaagttcaagctaaacaagtctgagcttaaagagttgcttacacgcgagttaccatcgtttctgggaaagcgtacagacgaagcagcattccagaaactcatgagtaatttggattccaaccgggataacgaggtcgactttcaggaatactgcgtatttctctcatgtatcgcaatgatgtgtaacgagttctttgaggggtttcctgataagcagccacgaaaaaagtag

SEQ ID NO: 133883 - DNA, 566 bp, Artificial Sequence
  derived and/or modified sequence
ttcccctctctacaaccctctctcctcagcgcttcttctttcttggtttggtgcttctgagatgtgggcttgcacacgctgttgctatagtacgtgttgatcctgactgctgtcatggcgtgccctctggagaaggccctggatgtgatggtgtccaccttccacaagtactcgggcaaagagggtgacaagttcaagctcaacaagtcagaactaaaggagctgctgacccgggagctgcccagcttcttggggaaaaggacagatgaagctgctttccagaagctgatgagcaacttggacagcaacagggacaacgaggtggacttccaagagtactgtgtcttcctgtcctgcatcgccatgatgtgtaacgaattctttgaaggcttcccagataagcagcccaggaagaaatgaaaactcctctgatgtggttggggggtctgccagctggggccctccctgtcgccagtgggcacttttttttttccaccctggctccttcagacacgtgcttgatgctgagcaagttcaataaagattcttggaagttttgaggctga

SEQ ID NO: 133884 - DNA, 531 bp, Artificial Sequence
  derived and/or modified sequence
tcctttcttgggaggctacaaatagtgacgccctgtctctaagctcctacagctgaaacgccagcaccagtgatcctgactgctgtcatggcgtgccctctggagaaggccctggatgtgatggtgtccaccttccacaagtactcgggcaaagagggtgacaagttcaagctcaacaagtcagaactaaaggagctgctgacccgggagctgcccagcttcttggggaaaaggacagatgaagctgctttccagaagctgatgagcaacttggacagcaacagggacaacgaggtggacttccaagagtactgtgtcttcctgtcctgcatcgccatgatgtgtaacgaattctttgaaggcttcccagataagcagcccaggaagaaatgaaaactcctctgatgtggttggggggtctgccagctggggccctccctgtcgccagtgggcacttttttttttccaccctggctccttcagacacgtgcttgatgctgagcaagttcaataaagattcttggaagtttt

SEQ ID NO: 133885 - DNA, 573 bp, Artificial Sequence
  derived and/or modified sequence
ggccctgggagtttgctgcccgaatctccagagcttgcgcagcggatcttgcaaatgttcactgcccagagcatgtgttccccactgtgcacaccctcccagccagatcctgactgctgtcatggcgtgccctctggagaaggccctggatgtgatggtgtccaccttccacaagtactcgggcaaagagggtgacaagttcaagctcaacaagtcagaactaaaggagctgctgacccgggagctgcccagcttcttggggaaaaggacagatgaagctgctttccagaagctgatgagcaacttggacagcaacagggacaacgaggtggacttccaagagtactgtgtcttcctgtcctgcatcgccatgatgtgtaacgaattctttgaaggcttcccagataagcagcccaggaagaaatgaaaactcctctgatgtggttggggggtctgccagctggggccctccctgtcgccagtgggcacttttttttttccaccctggctccttcagacacgtgcttgatgctgagcaagttcaataaagattcttggaagttttgaggctga

SEQ ID NO: 133886 - DNA, 600 bp, Artificial Sequence
  derived and/or modified sequence
agtatccgctctcccctgtcccctgctatgggcagggcctggctggggtataaataggtcagacctctgggccgtccccattcttcccctctctacaaccctctctcctcagcgcttcttctttcttggtttgatcctgactgctgtcatggcgtgccctctggagaaggccctggatgtgatggtgtccaccttccacaagtactcgggcaaagagggtgacaagttcaagctcaacaagtcagaactaaaggagctgctgacccgggagctgcccagcttcttggggaaaaggacagatgaagctgctttccagaagctgatgagcaacttggacagcaacagggacaacgaggtggacttccaagagtactgtgtcttcctgtcctgcatcgccatgatgtgtaacgaattctttgaaggcttcccagataagcagcccaggaagaaatgaaaactcctctgatgtggttggggggtctgccagctggggccctccctgtcgccagtgggcacttttttttttccaccctggctccttcagacacgtgcttgatgctgagcaagttcaataaagattcttggaagttttgaggctga

SEQ ID NO: 133887 - DNA, 513 bp, Artificial Sequence
  derived and/or modified sequence
attcttcccctctctacaaccctctctcctcagcgcttcttctttcttggtttgatcctgactgctgtcatggcgtgccctctggagaaggccctggatgtgatggtgtccaccttccacaagtactcgggcaaagagggtgacaagttcaagctcaacaagtcagaactaaaggagctgctgacccgggagctgcccagcttcttggggaaaaggacagatgaagctgctttccagaagctgatgagcaacttggacagcaacagggacaacgaggtggacttccaagagtactgtgtcttcctgtcctgcatcgccatgatgtgtaacgaattctttgaaggcttcccagataagcagcccaggaagaaatgaaaactcctctgatgtggttggggggtctgccagctggggccctccctgtcgccagtgggcacttttttttttccaccctggctccttcagacacgtgcttgatgctgagcaagttcaataaagattcttggaagtttt

SEQ ID NO: 133888 - DNA, 306 bp, Artificial Sequence
  derived and/or modified sequence
atggcctgccccctggagaaggccctggacgtgatggtgagcaccttccacaagtacagcggcaaggagggcgacaagttcaagctgaacaagagcgagctgaaggagctgctgaccagagagctgcccagcttcctgggcaagagaaccgacgaggccgccttccagaagctgatgagcaacctggacagcaacagagacaacgaggtggacttccaggagtactgcgtgttcctgagctgcatcgccatgatgtgcaacgagttcttcgagggcttccccgacaagcagcccagaaagaagtag

SEQ ID NO: 133889 - DNA, 273 bp, Artificial Sequence
  derived and/or modified sequence
atggtgagcaccttccacaagtacagcggcaaggagggcgacaagttcaagctgaacaagagcgagctgaaggagctgctgaccagagagctgcccagcttcctgggcaagagaaccgacgaggccgccttccagaagctgatgagcaacctggacagcaacagagacaacgaggtggacttccaggagtactgcgtgttcctgagctgcatcgccatgatgtgcaacgagttcttcgagggcttccccgacaagcagcccagaaagaagtag

SEQ ID NO: 133890 - DNA, 279 bp, Artificial Sequence
  derived and/or modified sequence
atggagacaccgctcgaaaaggccctcacaaccatggtgactacctttcataagtactccggacgagagggctccaaattgaccctgagtagaaaggaactcaaagagttgatcaagaaggagctttgcctgggggagatgaaggagtcgagcattgatgatctcatgaaatccttagataagaatagcgaccaggaaatcgattttaaagagtactcagtgttcctcacaatgctttgtatggcgtacaacgatttcttcttggaagacaataaatag

SEQ ID NO: 133891 - DNA, 279 bp, Artificial Sequence
  derived and/or modified sequence
atggaaacccctctggaaaaagcccttacaaccatggttaccacattccacaaatatagtgggagggagggaagcaaattgacactcagtcgaaaagagctcaaagaactgattaagaaggaattatgtctgggcgaaatgaaagaatccagcatcgacgatttgatgaaatctctggacaaaaactctgatcaggagatcgactttaaagaatattccgtgtttctgaccatgctctgcatggcttacaacgacttttttctggaagataacaagtag

SEQ ID NO: 133892 - DNA, 279 bp, Artificial Sequence
  derived and/or modified sequence
atggagacccccctggagaaggccctgaccaccatggtgaccaccttccacaagtacagcggccgggagggcagcaagctgaccctgagcaggaaggagctgaaggagctgatcaagaaggagctgtgcctgggggagatgaaggagagcagcattgatgacctgatgaagagcctggacaagaacagcgaccaggagattgacttcaaggagtacagcgtcttcctgaccatgctgtgcatggcctacaatgacttcttcctggaggacaacaagtag

SEQ ID NO: 133893 - DNA, 279 bp, Artificial Sequence
  derived and/or modified sequence
atggagacccccctggagaaggccctgaccaccatggtgaccaccttccacaagtactctggccgcgagggctcaaaactgaccttgtccaggaaagagctgaaagaactgataaagaaagagctctgtctgggcgaaatgaaggagtctagcattgatgacctcatgaagtctctcgacaaaaactcagatcaggaaattgacttcaaggagtactcagtgttcctcaccatgctctgtatggcctataatgatttctttctagaagataacaaatag

SEQ ID NO: 133894 - DNA, 279 bp, Artificial Sequence
  derived and/or modified sequence
atggagacccccctggagaaggccctgaccaccatggtgaccacctttcacaagtacagtggacgcgaggggtccaagttgacactgtctcgcaaagagttaaaagaactgatcaagaaagagttatgcttgggagaaatgaaggagtcttctatcgatgacttgatgaagtcattggacaagaacagtgatcaagaaatcgactttaaggagtattccgtgttcctgacaatgctgtgcatggcatacaacgattttttcctcgaggataacaaatag

SEQ ID NO: 133895 - DNA, 279 bp, Artificial Sequence
  derived and/or modified sequence
atggagacgccactggaaaaagctttaacgaccatggttacaacattccataaatattcagggagagaaggaagcaaactgacgctaagccggaaggagctgaaagaactcattaagaaggagctctgcctcggcgaaatgaaagaatccagcatagatgaccttatgaaatcactggacaagaattcggaccaagaaattgatttcaaggagtacagcgtgttcctcacaatgttgtgtatggcctataatgattttttcttagaagacaataagtag

SEQ ID NO: 133896 - DNA, 279 bp, Artificial Sequence
  derived and/or modified sequence
atggagacacccctcgaaaaagctctgaccacaatggtcaccacattccacaaatactccgggcgtgaaggatccaagctgacactttctcgaaaagagttgaaagagttgattaagaaagagttgtgccttggagaaatgaaggaaagtagcattgacgacctcatgaaaagtctcgacaagaattctgaccaagaaatcgattttaaagagtactccgtgttcttgacgatgctgtgcatggcttataacgatttcttcctggaggataacaaatag

SEQ ID NO: 133897 - DNA, 279 bp, Artificial Sequence
  derived and/or modified sequence
atggagacccccctggagaaggccctgaccaccatggtgaccaccttccacaagtacagcggcagagagggcagcaagctgaccctgagcagaaaggagctgaaggagctgatcaagaaggagctgtgcctgggcgagatgaaggagagcagcatcgacgacctgatgaagagcctggacaagaacagcgaccaggagatcgacttcaaggagtacagcgtgttcctgaccatgctgtgcatggcctacaacgacttcttcctggaggacaacaagtag

SEQ ID NO: 133898 - protein, 101 aa, Artificial Sequence
  derived and/or modified sequence
MSETEAEASVIGIIELFHKYTGRDDMIDKPGLLKMLQDNFPNFLAACDKKGTDYLANVFEKKDKNRDKKIDFSEFLSLLGDIATDYHKQSHGAPACSEGDQ

SEQ ID NO: 133899 - protein, 101 aa, Artificial Sequence
  derived and/or modified sequence
MSNTQAERSIIGMIDMFHKYTRRDDKIEKPSLLTMMKENFPNFLSACDKKGTNYLADVFEKKDKNEDKKIDFSEFLSLLGDIATDYHKQSHGAAPCSGGSQ

SEQ ID NO: 133900 - DNA, 306 bp, Artificial Sequence
  derived and/or modified sequence
atgtctaatacgcaggccgaacggtccataatcggaatgatcgacatgttccataagtatactcgaagggatgataagattgagaagcccagccttctgactatgatgaaagaaaactttcctaactttctgtctgcatgcgacaagaaagggaccaattatttggcagacgttttcgaaaagaaggacaagaatgaggataaaaagatcgatttttcagagttcctgtctctgctgggagatattgctactgattaccataaacagtcccatggagcggccccctgtagcgggggtagccagtag

SEQ ID NO: 133901 - DNA, 306 bp, Artificial Sequence
  derived and/or modified sequence
atgtccaacactcaagctgagaggtccatcattgggatgatcgacatgtttcacaagtatacacgtagggatgacaaaatagaaaaacctagtctgctcacaatgatgaaagaaaacttcccaaacttcctgtcagcctgcgacaagaagggtacaaattatcttgctgatgtgttcgagaagaaagataagaacgaagacaagaagattgacttctctgagtttcttagtctgctcggtgatattgctaccgactatcacaagcaatcacacggggctgctccttgcagtggaggcagccagtag

SEQ ID NO: 133902 - DNA, 306 bp, Artificial Sequence
  derived and/or modified sequence
atgagcaacacccaggccgagaggagcatcatcggcatgattgacatgttccacaagtacaccaggagagatgacaagattgagaagcccagcctgctgaccatgatgaaggagaacttccccaacttcctgagcgcctgtgacaagaagggcaccaactacctggctgatgtgtttgagaagaaggacaagaatgaagacaagaagattgacttcagcgagttcctgagcctgctgggggacatcgccacagactaccacaagcagagccatggagctgccccctgcagcggcggcagccagtag

SEQ ID NO: 133903 - DNA, 306 bp, Artificial Sequence
  derived and/or modified sequence
atgagcaacacccaggccgagcggagcatcatcggcatgatcgacatgttccataagtatacaagacgggatgataaaattgaaaaaccttctctgctcaccatgatgaaagaaaattttcccaatttcctcagcgcttgtgataaaaaaggaacaaactatcttgccgatgtgtttgagaaaaaagataaaaacgaggataagaaaattgacttttctgagttcctgtcacttctaggcgatatagcaactgactaccataagcagtctcacggagctgctccttgttcgggaggtagccagtag

SEQ ID NO: 133904 - DNA, 306 bp, Artificial Sequence
  derived and/or modified sequence
atgagcaacacccaggccgagcggagcatcatcggcatgatcgacatgttccacaagtacacccgtcgagatgacaaaattgaaaagccgtccttgctgacgatgatgaaggaaaatttcccaaattttcttagcgcctgcgacaaaaagggaactaattacttagcagacgtgttcgaaaaaaaggacaaaaatgaggacaaaaaaatagattttagcgaattcctctctctgcttggcgatatagccactgattaccacaagcagagccacggggccgctccttgttctggtggctcgcagtag

SEQ ID NO: 133905 - DNA, 306 bp, Artificial Sequence
  derived and/or modified sequence
atgtcaaacacccaggccgaaagatctatcatcggcatgatcgacatgtttcacaagtacacaaggagggacgataaaatcgaaaagcctagtttacttactatgatgaaagagaattttcctaattttctcagcgcctgtgacaagaagggcaccaactacttggcagatgtattcgaaaaaaaggacaaaaatgaagacaagaagattgatttttccgaatttctgagtcttctaggagatattgcgacggattatcataaacagtcccacggggctgcaccatgcagcgggggtagtcagtag

SEQ ID NO: 133906 - DNA, 306 bp, Artificial Sequence
  derived and/or modified sequence
atgagcaacacacaggcggagcgatcaatcatagggatgatagatatgtttcacaagtatacgcgcagggatgataagattgagaaaccctcactgctcacaatgatgaaggaaaatttccccaacttcctgtcagcctgtgacaaaaagggtactaattatctcgctgacgtctttgagaaaaaagataagaatgaggacaaaaaaatcgacttctccgaattcttatccttattaggcgatatagctacagactaccacaaacaaagccatggagccgctccttgctccggcggatcacaatag

SEQ ID NO: 133907 - DNA, 442 bp, Artificial Sequence
  derived and/or modified sequence
ggcttggggtgcaggccagcccagactgactactggctgaaagatctgctttgggaagctttttgaaagcaaagatgagcaacactcaagctgagaggtccataataggcatgatcgacatgtttcacaaatacaccagacgtgatgacaagattgagaagccaagcctgctgacgatgatgaaggagaacttccccaacttccttagtgcctgtgacaaaaagggcacaaattacctcgccgatgtctttgagaaaaaggacaagaatgaggataagaagattgatttttctgagtttctgtccttgctgggagacatagccacagactaccacaagcagagccatggagcagcgccctgttccgggggcagccagtgacccagccccaccaatgggcctccagagaccccaggaacaataaaatgtcttctcccaccaga

SEQ ID NO: 133908 - DNA, 479 bp, Artificial Sequence
  derived and/or modified sequence
tgggaagagccaggctgagccttataaaggactgctctttgtccaaacacacacatctcactcatccttctactcgtgacgcttcccagctctggctttttgaaagcaaagatgagcaacactcaagctgagaggtccataataggcatgatcgacatgtttcacaaatacaccagacgtgatgacaagattgagaagccaagcctgctgacgatgatgaaggagaacttccccaacttccttagtgcctgtgacaaaaagggcacaaattacctcgccgatgtctttgagaaaaaggacaagaatgaggataagaagattgatttttctgagtttctgtccttgctgggagacatagccacagactaccacaagcagagccatggagcagcgccctgttccgggggcagccagtgacccagccccaccaatgggcctccagagaccccaggaacaataaaatgtcttctcccaccaga

SEQ ID NO: 133909 - DNA, 306 bp, Artificial Sequence
  derived and/or modified sequence
atgagcaacacccaggccgagagaagcatcatcggcatgatcgacatgttccacaagtacaccagaagagacgacaagatcgagaagcccagcctgctgaccatgatgaaggagaacttccccaacttcctgagcgcctgcgacaagaagggcaccaactacctggccgacgtgttcgagaagaaggacaagaacgaggacaagaagatcgacttcagcgagttcctgagcctgctgggcgacatcgccaccgactaccacaagcagagccacggcgccgccccctgcagcggcggcagccagtag

SEQ ID NO: 133910 - protein, 93 aa, Artificial Sequence
  derived and/or modified sequence
MLTELEKALNSIIDVYHKYSLIKGNFHAVYRDDLKKLLETECPQYIRKKGADVWFKELDINTDGAVNFQEFLILVIKMGVAAHKKSHEESHKE

SEQ ID NO: 133911 - DNA, 282 bp, Artificial Sequence
  derived and/or modified sequence
atgctgacagaattagaaaaggcccttaatagcattatcgacgtgtatcataaatactccttgatcaaaggaaacttccatgccgtctaccgagacgatttgaaaaaactccttgaaacggagtgcccgcagtacattagaaagaaaggagcagatgtgtggttcaaagagctcgacatcaatacggacggggcggtgaacttccaggaattcctgattctggtcattaagatgggagtggctgctcataaaaaaagccatgaggagagtcataaggagtag

SEQ ID NO: 133912 - DNA, 282 bp, Artificial Sequence
  derived and/or modified sequence
atgctcactgagctggaaaaagccctcaactcaatcatagacgtgtaccataagtacagtctgatcaagggcaattttcatgcagtctacagggacgatttaaagaagctgctggaaacagaatgtcctcagtacatccggaagaagggagccgacgtatggttcaaagagcttgacatcaacacagatggggcagtcaactttcaggagttcctgatactcgtcattaaaatgggtgtcgccgcacataagaaatcccatgaagaaagtcataaagagtag

SEQ ID NO: 133913 - DNA, 282 bp, Artificial Sequence
  derived and/or modified sequence
atgctgacagagctggagaaggccctgaacagcatcattgatgtgtaccacaagtacagcctcatcaagggcaacttccacgctgtgtacagagatgacctgaagaagctgctggagacagaatgtccccagtacatcaggaagaagggagcagatgtgtggttcaaggagctggacatcaacacagatggagctgtgaacttccaggagttcctgatcctggtgatcaagatgggcgtggccgcccacaagaagagccatgaggagagccacaaggagtag

SEQ ID NO: 133914 - DNA, 282 bp, Artificial Sequence
  derived and/or modified sequence
atgctgaccgagctggagaaggccctgaacagcatcatcgacgtgtatcataaatactccctgatcaaaggaaactttcacgcagtctaccgtgacgacctgaagaaattgctcgaaaccgagtgtccccagtatattcgaaaaaaaggcgctgatgtgtggtttaaagagctggatattaatacggacggagcagttaactttcaggagtttctcatcctcgtcataaaaatgggcgtggctgcccataaaaagtcgcacgaggaatcacataaggaatag

SEQ ID NO: 133915 - DNA, 282 bp, Artificial Sequence
  derived and/or modified sequence
atgctgaccgagctggagaaggccctgaacagcatcatcgacgtgtatcacaagtattctctcataaaggggaacttccacgcggtgtaccgagatgacctgaaaaaactactggagacagaatgcccacaatacatcagaaagaagggggcggacgtttggttcaaagagttagacatcaatacagatggcgccgttaacttccaggagtttcttatcttagtgataaagatgggagtggcggcccacaagaaaagccacgaggaaagtcataaggagtag

SEQ ID NO: 133916 - DNA, 282 bp, Artificial Sequence
  derived and/or modified sequence
atgctcaccgaactggagaaagcattaaacagtatcatcgatgtgtaccacaaatactctctgattaagggcaattttcacgccgtgtaccgggacgacctgaagaaactgctggagactgagtgcccacagtatataaggaagaagggggctgatgtgtggtttaaggagctggacatcaacactgacggtgccgtcaatttccaggagtttttgatcctggtaattaaaatgggagtcgctgctcataaaaaaagtcatgaagaatcgcataaagaatag

SEQ ID NO: 133917 - DNA, 282 bp, Artificial Sequence
  derived and/or modified sequence
atgctcacagagcttgagaaggccctgaattcgattatcgacgtgtaccacaagtattctttaattaaagggaatttccacgccgtgtacagagacgatcttaagaagttgcttgaaactgaatgcccacagtacattaggaagaagggagctgatgtgtggttcaaagagttggatattaatacagacggcgcagtaaacttccaggaattcctcattcttgtgatcaagatgggcgtggcagcccacaaaaagtcccacgaagagtctcacaaagagtag

SEQ ID NO: 133918 - DNA, 282 bp, Artificial Sequence
  derived and/or modified sequence
atgctgaccgagctggagaaggccctgaacagcatcatcgacgtgtaccacaagtacagcctgatcaagggcaacttccacgccgtgtacagagacgacctgaagaagctgctggagaccgagtgcccccagtacatcagaaagaagggcgccgacgtgtggttcaaggagctggacatcaacaccgacggcgccgtgaacttccaggagttcctgatcctggtgatcaagatgggcgtggccgcccacaagaagagccacgaggagagccacaaggagtag

SEQ ID NO: 133919 - protein, 114 aa, Artificial Sequence
  derived and/or modified sequence
MTCKMSQLERNIETIINTFHQYSVKLGHPDTLNQGEFKELVRKDLQNFLKKENKNEKVIEHIMEDLDTNADKQLSFEEFIMLMARLTWASHEKMHEGDEGPGHHHKPGLGEGTP

SEQ ID NO: 133920 - DNA, 345 bp, Artificial Sequence
  derived and/or modified sequence
atgacatgtaaaatgagccagcttgagcggaatatcgaaacaattattaacaccttccaccagtacagcgtcaagttaggtcacccggacactctgaaccagggagaattcaaagaactggtcagaaaagacctgcagaatttcctcaagaaggaaaataagaatgagaaggtcatcgagcacattatggaagacctggatacgaatgcagataagcagttgagctttgaggaatttatcatgctaatggcccgattaacttgggcttcacatgagaaaatgcacgagggagacgaggggcctggccaccaccacaagcctggcctgggggagggaacaccatag

SEQ ID NO: 133921 - DNA, 345 bp, Artificial Sequence
  derived and/or modified sequence
atgacctgcaagatgagccagctggagaggaacatcgagaccatcatcaacaccttccaccagtacagcgtgaagctgggccacccagacaccctgaaccagggcgagttcaaggagctggtgaggaaggacctgcagaacttcctgaagaaggagaacaagaatgagaaggtgattgagcacatcatggaggacctggacaccaatgctgacaagcagctgagctttgaggagttcatcatgctgatggcccggctgacctgggccagccatgagaagatgcatgaaggagatgagggccctggccaccaccacaagccaggcctgggggagggcaccccctag

SEQ ID NO: 133922 - DNA, 345 bp, Artificial Sequence
  derived and/or modified sequence
atgacctgcaagatgagccagctggagcggaacatcgagaccatcatcaacaccttccaccagtactctgtgaagttgggccatcccgacacgctcaatcagggggaattcaaggaactggtcaggaaagacttgcagaatttccttaaaaaagagaacaaaaacgaaaaagtaatagagcatataatggaggatctcgacaccaacgccgacaaacaattaagcttcgaggaattcattatgttgatggcccgtctcacttgggcctcccacgagaagatgcatgagggagacgaaggcccgggtcaccaccataagcccggattgggggagggaaccccctag

SEQ ID NO: 133923 - DNA, 345 bp, Artificial Sequence
  derived and/or modified sequence
atgacgtgtaagatgtcccagttggagaggaatatagagacaattattaatacattccaccaatacagcgttaagctggggcacccagatacactaaatcagggcgagtttaaggagctggtcaggaaagatttgcagaattttttgaaaaaggagaataagaacgagaaagtgatagaacacatcatggaggatctggacacaaatgctgataagcagctcagtttcgaagagttcattatgctgatggcacgcctgacatgggcctcgcatgagaaaatgcatgagggggacgaaggtccagggcaccatcacaagcccggtctcggcgaagggaccccgtag

SEQ ID NO: 133924 - DNA, 577 bp, Artificial Sequence
  derived and/or modified sequence
aaacactctgtgtggctcctcggctttgacagagtgcaagacgatgacttgcaaaatgtcgcagctggaacgcaacatagagaccatcatcaacaccttccaccaatactctgtgaagctggggcacccagacaccctgaaccagggggaattcaaagagctggtgcgaaaagatctgcaaaattttctcaagaaggagaataagaatgaaaaggtcatagaacacatcatggaggacctggacacaaatgcagacaagcagctgagcttcgaggagttcatcatgctgatggcgaggctaacctgggcctcccacgagaagatgcacgagggtgacgagggccctggccaccaccataagccaggcctcggggagggcaccccctaagaccacagtggccaagatcacagtggccacggccacggccacagtcatggtggccacggccacagccactaatcaggaggccaggccaccctgcctctacccaaccagggccccggggcctgttatgtcaaactgtcttggctgtggggctaggggctggggccaaataaagtctcttcctccaagtca

SEQ ID NO: 133925 - DNA, 345 bp, Artificial Sequence
  derived and/or modified sequence
atgacctgcaagatgagccagctggagagaaacatcgagaccatcatcaacaccttccaccagtacagcgtgaagctgggccaccccgacaccctgaaccagggcgagttcaaggagctggtgagaaaggacctgcagaacttcctgaagaaggagaacaagaacgagaaggtgatcgagcacatcatggaggacctggacaccaacgccgacaagcagctgagcttcgaggagttcatcatgctgatggccagactgacctgggccagccacgagaagatgcacgagggcgacgagggccccggccaccaccacaagcccggcctgggcgagggcaccccctag

SEQ ID NO: 133926 - protein, 97 aa, Artificial Sequence
  derived and/or modified sequence
MPSQMEHAMETMMFTFHKFAGDKGYLTKEDLRVLMEKEFPGFLENQKDPLAVDKIMKDLDQCRDGKVGFQSFFSLIAGLTIACNDYFVVHMKQKGKK

SEQ ID NO: 133927 - DNA, 294 bp, Artificial Sequence
  derived and/or modified sequence
atgcctagccagatggaacatgccatggagacaatgatgttcacattccacaagtttgccggtgacaaaggatatttgacaaaggaagacctgcgagtgttaatggagaaggagttcccaggtttcctcgagaaccagaaggacccattggcagtggacaagattatgaaagacctagaccaatgtagagatggcaaggtcggattccaatccttctttagtttaatcgccgggttgacaatcgcctgcaatgattacttcgtcgtgcatatgaagcagaaaggaaaaaagtag

SEQ ID NO: 133928 - DNA, 294 bp, Artificial Sequence
  derived and/or modified sequence
atgccctctcagatggagcacgcaatggagacaatgatgttcacgttccataaatttgctggtgacaagggatacttgacaaaagaagacctgcgagtattaatggagaaggagttcccaggatttctggaaaatcagaaagatcctcttgccgtggacaaaattatgaaagatctcgaccaatgtagagatggaaaggtaggcttccagagttttttctcacttatcgccggtttgacaatcgcctgtaacgattacttcgtggtccacatgaaacagaaaggcaaaaaatag

SEQ ID NO: 133929 - DNA, 294 bp, Artificial Sequence
  derived and/or modified sequence
atgcccagccagatggagcacgccatggagaccatgatgttcaccttccacaagtttgctggggacaagggctacctgaccaaggaggacctgcgggtgctgatggagaaggagttccctggcttcctggagaaccagaaggaccccctggccgtggacaagatcatgaaggacctggaccagtgcagagatggcaaggtgggcttccagagcttcttcagcctgattgctggcctgaccatcgcctgcaatgactactttgtggtgcacatgaagcagaagggcaagaagtag

SEQ ID NO: 133930 - DNA, 294 bp, Artificial Sequence
  derived and/or modified sequence
atgcccagccagatggagcacgccatggagaccatgatgttcaccttccacaaattcgctggggacaagggttatcttactaaggaggaccttcgcgtgctgatggagaaggagtttccaggattcctggaaaatcagaaggaccctcttgctgtggataaaattatgaaggacctggaccagtgtagagacggaaaagtggggttccaatccttttttagtcttattgccggtctcacaatagcttgcaacgactacttcgttgtgcacatgaagcagaaaggcaaaaagtag

SEQ ID NO: 133931 - DNA, 294 bp, Artificial Sequence
  derived and/or modified sequence
atgcccagccagatggagcacgccatggagaccatgatgttcaccttccacaagtttgctggcgacaaaggctatttgaccaaagaagacctgagggtgctcatggagaaggaattccccggctttctggaaaaccagaaggatccactcgccgtggacaaaatcatgaaggacttagaccagtgccgagacggcaaggtgggcttccagtcatttttctctctgattgcaggcctgacaattgcctgtaacgattactttgtcgtacacatgaaacagaagggcaaaaagtag

SEQ ID NO: 133932 - DNA, 294 bp, Artificial Sequence
  derived and/or modified sequence
atgccctcacagatggagcatgccatggaaacaatgatgtttaccttccacaaattcgccggtgacaagggctacctgaccaaagaagatctgcgagtcctcatggagaaagagtttcccggattcctagagaaccagaaggaccctcttgccgttgacaaaatcatgaaggatcttgaccagtgcagggacggtaaagttggttttcagtcctttttttctctgatcgctggcttaaccatcgcttgcaacgactattttgtggtccacatgaaacaaaaaggtaagaagtag

SEQ ID NO: 133933 - DNA, 294 bp, Artificial Sequence
  derived and/or modified sequence
atgccatctcagatggaacacgcaatggaaactatgatgttcacttttcacaagttcgccggagataagggatacctcactaaggaggacctgcgcgtcttgatggagaaggagttccctggttttctcgaaaatcagaaggatcctttagccgtggacaagataatgaaggacctggatcagtgtagagacggcaaagtggggttccagtcatttttcagtctgatagccggattaactattgcctgtaatgattatttcgtggtgcacatgaagcagaaaggtaaaaagtag

SEQ ID NO: 133934 - DNA, 616 bp, Artificial Sequence
  derived and/or modified sequence
actccctgaaggaaaaggagaactgtgccatctcagagggcattttccaagaggaagcttcaacggaccacaccaaaatgccatctcaaatggaacacgccatggaaaccatgatgtttacatttcacaaattcgctggggataaaggctacttaacaaaggaggacctgagagtactcatggaaaaggagttccctggatttttggaaaatcaaaaagaccctctggctgtggacaaaataatgaaggacctggaccagtgtagagatggcaaagtgggcttccagagcttcttttccctaattgcgggcctcaccattgcatgcaatgactattttgtagtacacatgaagcagaagggaaagaagtaggcagaaatgagcagttcgctcctccctgataagagttgtcccaaagggtcgcttaaggaatctgccccacagcttcccccatagaaggatttcatgagcagatcaggacacttagcaaatgtaaaaataaaatctaactctcatttgacaagcagagaaagaaaagttaaataccagataagcttttgatttttgtattgtttgcatccccttgccctcaataaataaagttcttttttagttcc

SEQ ID NO: 133935 - DNA, 1202 bp, Artificial Sequence
  derived and/or modified sequence
ccggtggggcgggaagcccggcttctggggaggtgccgcccctccactggcgcaggccgccgagacccccagacggacctcctagggctaatctgatagtgcctctgaggtcgataggactccacgtgccactccctgcagggtcatccagcaagtaattcctagacccgtaggtggccgcagagccggttacctctggttctgcgccagcgtgccccacccgcaggacggccgggttctttgatttgtacactttctaaaaccaaacccgagaggaagggcaggctcagggtggggatgccctgaaatattcgagagcaggaccgtttctactgaagagaagtttacaagaacgctctgtctggggcgggcgaggcctctgcgaggcgggtccgggagcgagggcagggcgtgggccgcgcgcccggggtcgggggagtcgggggcaggaagagggggaggagacagggctgggggagcgccctgccgagcgcccgccaggctcctcccgctcccgcgccgcctccctctacccacccgccgcacgtactaaggaaggcgcacagcccgccgcgctcgcctctccgccccgcgtccagctcgcccagctcgcccagcgtccgccgcgcctcggccaaggcttcaacggaccacaccaaaatgccatctcaaatggaacacgccatggaaaccatgatgtttacatttcacaaattcgctggggataaaggctacttaacaaaggaggacctgagagtactcatggaaaaggagttccctggatttttggaaaatcaaaaagaccctctggctgtggacaaaataatgaaggacctggaccagtgtagagatggcaaagtgggcttccagagcttcttttccctaattgcgggcctcaccattgcatgcaatgactattttgtagtacacatgaagcagaagggaaagaagtaggcagaaatgagcagttcgctcctccctgataagagttgtcccaaagggtcgcttaaggaatctgccccacagcttcccccatagaaggatttcatgagcagatcaggacacttagcaaatgtaaaaataaaatctaactctcatttgacaagcagagaaagaaaagttaaataccagataagcttttgatttttgtattgtttgcatccccttgccctcaataaataaagttcttttttagttccaaa

SEQ ID NO: 133936 - DNA, 294 bp, Artificial Sequence
  derived and/or modified sequence
atgcccagccagatggagcacgccatggagaccatgatgttcaccttccacaagttcgccggcgacaagggctacctgaccaaggaggacctgagagtgctgatggagaaggagttccccggcttcctggagaaccagaaggaccccctggccgtggacaagatcatgaaggacctggaccagtgcagagacggcaaggtgggcttccagagcttcttcagcctgatcgccggcctgaccatcgcctgcaacgactacttcgtggtgcacatgaagcagaagggcaagaagtag

SEQ ID NO: 133937 - protein, 915 aa, Artificial Sequence
  derived and/or modified sequence
MAETLSGLGDSGAAGAAALSSASSETGTRRLSDLRVIDLRAELRKRNVDSSGNKSVLMERLKKAIEDEGGNPDEIEITSEGNKKTSKRSSKGRKPEEEGVEDNGLEENSGDGQEDVETSLENLQDIDIMDISVLDEAEIDNGSVADCVEDDDADNLQESLSDSRELVEGEMKELPEQLQEHAIEDKETINNLDTSSSDFTILQEIEEPSLEPENEKILDILGETCKSEPVKEESSELEQPFAQDTSSVGPDRKLAEEEDLFDSAHPEEGDLDLASESTAHAQSSKADSLLAVVKREPAEQPGDGERTDCEPVGLEPAVEQSSAASELAEASSEELAEAPTEAPSPEARDSKEDGRKFDFDACNEVPPAPKESSTSEGADQKMSSPEDDSDTKRLSKEEKGRSSCGRNFWVSGLSSTTRATDLKNLFSKYGKVVGAKVVTNARSPGARCYGFVTMSTAEEATKCINHLHKTELHGKMISVEKAKNEPVGKKTSDKRDSDGKKEKSSNSDRSTNLKRDDKCDRKDDAKKGDDGSGEKSKDQDDQKPGPSERSRATKSGSRGTERTVVMDKSKGVPVISVKTSGSKERASKSQDRKSASREKRSVVSFDKVKEPRKSRDSESHSRVRERSEREQRMQAQWEREERERLEIARERLAFQRQRLERERMERERLERERMHVEHERRREQERIHREREELRRQQELRYEQERRPAVRRPYDLDRRDDAYWPEAKRAALDERYHSDFNRQDRFHDFDHRDRGRYPDHSVDRREGSRSMMGEREGQHYPERHGGPERHGRDSRDGWGGYGSDKRMSEGRGLPPPPRRDWGDHGRREDDRSWQGTADGGMMDRDHKRWQGGERSMSGHSGPGHMMNRGGMSGRGSFAPGGASRGHPIPHGGMQGGFGGQSRGSRPSDARFTRRY

SEQ ID NO: 133938 - protein, 367 aa, Artificial Sequence
  derived and/or modified sequence
MSSPPPARSGFYRQEVTKTAWEVRAVYRDLQPVGSGAYGAVCSAVDGRTGAKVAIKKLYRPFQSELFAKRAYRELRLLKHMRHENVIGLLDVFTPDETLDDFTDFYLVMPFMGTDLGKLMKHEKLGEDRIQFLVYQMLKGLRYIHAAGIIHRDLKPGNLAVNEDCELKILDFGLARQADSEMTGYVVTRWYRAPEVILNWMRYTQTVDIWSVGCIMAEMITGKTLFKGSDHLDQLKEIMKVTGTPPAEFVQRLQSDEAKNYMKGLPELEKKDFASILTNASPLAVNLLEKMLVLDAEQRVTAGEALAHPYFESLHDTEDEPQVQKYDDSFDDVDRTLDEWKRVTYKEVLSFKPPRQLGARVSKETPL

SEQ ID NO: 133939 - DNA, 1918 bp, Artificial Sequence
  derived and/or modified sequence
cggcggcggccgcctcgggtttccggaggggccggagggcgggcgagggcgtcacgtgcgcgccgcccgcgggccggttggtccccgggcgggggaggggccgtgcgcagcctgggtcggggtcgggccggggtcggcacctgggacatccctgagggaagggccgggagcgggagcgccccagcggccggcgggcgggcgggcgagcggacgagcggcgcggagccggcccgaggcgcgcgccgagggagccccgtccccggtcgtgggggcaccgcccgcaggctctgcggggtgggcagctcccgggcctgccatgagctctccgccgcccgcccgcagtggcttttaccgccaggaggtgaccaagacggcctgggaggtgcgcgccgtgtaccgggacctgcagcccgtgggctcgggcgcctacggcgcggtgtgctcggccgtggacggccgcaccggcgctaaggtggccatcaagaagctgtatcggcctttccagtccgagctgttcgccaagcgcgcctaccgcgagctgcgcctgctcaagcacatgcgccacgagaacgtgatcgggctgctggacgtattcactcctgatgagaccctggatgacttcacggacttttacctggtgatgccgttcatgggcaccgacctgggcaagctcatgaaacatgagaagctaggcgaggaccggatccagttcctcgtgtaccagatgctgaaggggctgaggtatatccacgctgccggcatcatccacagagacctgaagcccggcaacctggctgtgaacgaagactgtgagctgaagatcctggacttcggcctggccaggcaggcagacagtgagatgactgggtacgtggtgacccggtggtaccgggctcccgaggtcatcttgaattggatgcgctacacgcagacggtggacatctggtctgtgggctgcatcatggcggagatgatcacaggcaagacgctgttcaagggcagcgaccacctggaccagctgaaggagatcatgaaggtgacggggacgcctccggctgagtttgtgcagcggctgcagagcgatgaggccaagaactacatgaagggcctccccgaattggagaagaaggattttgcctctatcctgaccaatgcaagccctctggctgtgaacctcctggagaagatgctggtgctggacgcggagcagcgggtgacggcaggcgaggcgctggcccatccctacttcgagtccctgcacgacacggaagatgagccccaggtccagaagtatgatgactcctttgacgacgttgaccgcacactggatgaatggaagcgtgttacttacaaagaggtgctcagcttcaagcctccccggcagctgggggccagggtctccaaggagacgcctctgtgaagatctctgggctccggggtggcagtgaggaccaccttcaccttccacctgagaggggactctcgttgccaccttgaccttggctggggcttgcatcccaaggcatccatcagagcagacgcccgggttccatggaccctcctccccacggccatgcctctgctcttgggcgcccatcatggaggagcacctgaactttctggacaagacctctggccgacctggggatggcctctgatccctggagcagtggcccacttgcccggtgctctcagaaacctcagagctggtggggctccagatcaggccttggcctctgagccctgcctgctctgggccatgcagaggaaggacagagggtgggcgcagggcaccaactcagggacatcccctctcctgggcgacgtcagtggaccttcctgcacccccagcctggaatgtaaatcagctgtgtggtgcccgcgtggctggaaggaaatagacccttttgtagctccc

SEQ ID NO: 133940 - DNA, 1104 bp, Artificial Sequence
  derived and/or modified sequence
atgagctccccccctcctgcccgctcggggttctaccggcaggaagtgacaaagaccgcttgggaggtcagagctgtataccgagacttacagcctgtgggcagtggtgcttacggagctgtatgttccgccgtggacgggaggacgggcgccaaggtggctatcaagaagctgtataggccttttcagagcgagctgtttgccaaacgcgcataccgagagctgcggttgttgaagcatatgcgccacgaaaatgtgattggcttactcgatgtgttcacacccgatgagaccctggatgattttactgatttctacctggtgatgccatttatgggaactgacctcggcaaattgatgaaacacgagaaactaggtgaagaccgcattcagttcctggtgtaccagatgctcaaaggactgcggtacattcatgctgccggtattattcacagagatctgaagccggggaacttggcagtcaatgaggattgcgagttaaagatattggactttggcttggctagacaagccgactcagagatgaccggatatgttgtgacacggtggtatcgggcccccgaggtcattttaaactggatgaggtatacgcagactgtggacatctggagcgtggggtgcattatggccgagatgattactgggaagaccctctttaaaggctctgatcacctggaccagctcaaagaaatcatgaaggttacaggaaccccgcctgccgagtttgtccagcggttacaatccgatgaagccaagaactacatgaagggtctcccggagctggaaaagaaagacttcgcttccatcttgacgaatgctagcccattggctgttaatcttttggagaagatgctcgtcctggatgccgaacagcgggtgacggctggagaagccctcgcccacccctatttcgagtcgttgcatgacaccgaagatgagcctcaggtccagaaatacgacgattcctttgatgatgtggatcgcacactcgacgaatggaagcgcgtcacctacaaggaggtactgtcatttaaacccccccggcagctgggagccagggtgtccaaagagacccctctgtag

SEQ ID NO: 133941 - DNA, 1104 bp, Artificial Sequence
  derived and/or modified sequence
atgagcagccccccaccagcccggagcggcttctaccggcaggaggtgaccaagacagcctgggaggtgcgggctgtgtacagagacctgcagcctgtgggcagcggggcctacggggctgtgtgcagcgctgtggatggccgcactggagccaaggtggccatcaagaagctgtaccggcccttccagagcgagctgtttgccaagagggcctaccgggagctgcggctgctgaagcacatgagacatgaaaatgtgattggcctgctggatgtgttcaccccagatgagaccctggatgacttcacagacttctacctggtgatgcccttcatgggcacagacctgggcaagctgatgaagcatgagaagctgggagaagatcgcatccagttcctggtgtaccagatgctgaagggcctgcgctacatccacgccgccggcatcatccaccgggacctgaagccaggcaacctggccgtgaatgaagactgtgagctgaagatcctggactttggcctggcccggcaggccgacagcgagatgacaggctacgtggtgacccgctggtaccgggcccctgaggtgatcctgaactggatgagatacacccagacagtggacatctggagcgtgggctgcatcatggccgagatgatcaccgggaagaccctcttcaagggcagtgaccacctggaccagctgaaggagatcatgaaggtgacaggcaccccacctgctgagtttgtgcagaggctgcagagtgatgaggccaagaactacatgaagggcctgcctgagctggagaagaaggactttgccagcatcctgaccaatgccagccccctggccgtgaacctgctggagaagatgctggtgctggatgctgagcagagggtgacagctggggaggccctggcccacccctactttgagagcctgcatgacacagaagatgagccccaggtgcagaagtatgatgacagctttgatgatgtggacaggaccctggatgagtggaagagggtgacctacaaggaggtgctgtccttcaagccaccccggcagctgggcgcccgggtgtccaaggagacccccctgtag

SEQ ID NO: 133942 - DNA, 1104 bp, Artificial Sequence
  derived and/or modified sequence
atgagcagccccccccccgcccggagcggcttctaccggcaggaggtcacaaagaccgcgtgggaagttagagccgtctatcgggatctgcaacccgtaggctcgggcgcgtatggtgcagtctgcagtgcagtggacggacgcacgggtgcaaaagtagcaatcaagaagttgtacaggcccttccaaagcgagctgtttgcaaaacgtgcttacagagaacttcgcctcctgaagcacatgcgtcatgaaaacgtgataggcttacttgatgtgttcacaccagacgagaccctggatgactttactgatttttacctagtaatgccttttatggggacagatctgggcaaactgatgaaacacgagaagttgggagaagatcgtatccagtttctggtgtatcagatgctcaagggactccggtacatacatgcggcaggcattatccatagagatctgaaaccaggtaatctggcagtgaatgaagattgcgagctcaagatactcgactttggtttggcacgccaggcagactccgagatgacaggctatgtggtaacccggtggtacagagcccctgaggttatccttaattggatgcgctacacacagacagtggacatttggagcgtgggctgcataatggcggaaatgattacgggcaagactctcttcaaagggagcgatcacctggaccagttgaaggagattatgaaggtgacaggcaccccacctgccgagtttgtgcaacgtctgcaaagcgacgaagctaagaattacatgaagggcttacccgaactggagaagaaagacttcgccagtatcctgacgaacgcaagccccctggctgtcaatctcctcgaaaaaatgctggtcctagacgccgaacagcgtgttacggcaggtgaggctcttgctcacccctattttgaatctttgcacgatacagaggacgagccacaggtgcagaaatacgatgactcctttgacgatgtcgacaggactctagatgaatggaagagggtgacctataaagaggtactgtcttttaagcctcccagacagttaggtgcccgtgtttccaaggagacccccctgtag

SEQ ID NO: 133943 - DNA, 1104 bp, Artificial Sequence
  derived and/or modified sequence
atgtcctccccccctcccgcacgaagtggcttttaccggcaggaggtgacgaagaccgcatgggaagtgcgggctgtctatagggaccttcaacctgtcggtagcggcgcttacggcgctgtatgttccgccgttgacggcaggacaggggcaaaagtcgctatcaagaaactctacaggccctttcagagcgagcttttcgctaaacgggcataccgggaactccggctgcttaagcatatgcgccatgagaacgttatcggccttttagatgtgtttactccagatgagacactggacgatttcacagacttttacctagttatgccattcatgggtaccgacttagggaagttaatgaagcacgagaaactaggggaggatcgcatccaattcttagtgtatcagatgcttaagggcctgcgctatatccacgccgcaggcatcattcaccgggacttaaagccagggaacctcgccgtgaacgaggactgtgagttaaagattttggacttcggactagcaaggcaagccgattctgagatgacaggctacgtggtcacacgctggtacagagccccagaggtgattctaaattggatgcggtatacgcagaccgtggacatatggtccgtgggctgtatcatggccgagatgatcaccggtaaaaccctatttaagggttcggaccacctggaccagctgaaagagattatgaaggtgaccggtactcctcctgcggaattcgtccagcgcctgcaatcggacgaggccaagaactatatgaagggtcttcccgaattagagaaaaaagatttcgctagtattctgaccaacgcctctccgctggccgtgaacttgcttgagaaaatgttggtgctggacgctgagcagcgggtgactgccggagaggcactggcccacccttatttcgaatccctgcacgatactgaagatgagccacaagtgcagaagtatgatgattccttcgacgacgttgacaggactctggatgaatggaagcgggtcacatacaaggaggtgctgtcctttaagcctcctagacaactgggagctcgtgtatctaaggagacacccctgtag

SEQ ID NO: 133944 - DNA, 1104 bp, Artificial Sequence
  derived and/or modified sequence
atgagcagccccccccccgccagaagcggcttctacagacaggaggtgaccaagaccgcctgggaggtgagagccgtgtacagagacctgcagcccgtgggcagcggcgcctacggcgccgtgtgcagcgccgtggacggcagaaccggcgccaaggtggccatcaagaagctgtacagacccttccagagcgagctgttcgccaagagagcctacagagagctgagactgctgaagcacatgagacacgagaacgtgatcggcctgctggacgtgttcacccccgacgagaccctggacgacttcaccgacttctacctggtgatgcccttcatgggcaccgacctgggcaagctgatgaagcacgagaagctgggcgaggacagaatccagttcctggtgtaccagatgctgaagggcctgagatacatccacgccgccggcatcatccacagagacctgaagcccggcaacctggccgtgaacgaggactgcgagctgaagatcctggacttcggcctggccagacaggccgacagcgagatgaccggctacgtggtgaccagatggtacagagcccccgaggtgatcctgaactggatgagatacacccagaccgtggacatctggagcgtgggctgcatcatggccgagatgatcaccggcaagaccctgttcaagggcagcgaccacctggaccagctgaaggagatcatgaaggtgaccggcaccccccccgccgagttcgtgcagagactgcagagcgacgaggccaagaactacatgaagggcctgcccgagctggagaagaaggacttcgccagcatcctgaccaacgccagccccctggccgtgaacctgctggagaagatgctggtgctggacgccgagcagagagtgaccgccggcgaggccctggcccacccctacttcgagagcctgcacgacaccgaggacgagccccaggtgcagaagtacgacgacagcttcgacgacgtggacagaaccctggacgagtggaagagagtgacctacaaggaggtgctgagcttcaagccccccagacagctgggcgccagagtgagcaaggagacccccctgtag

SEQ ID NO: 133945 - protein, 13 aa, Artificial Sequence
  derived and/or modified sequence
NEPSINFYKRRGA

SEQ ID NO: 133946 - protein, 20 aa, Artificial Sequence
  derived and/or modified sequence
LEDFFVMSDYRGFGIGSEIL

SEQ ID NO: 133947 - protein, 199 aa, Artificial Sequence
  derived and/or modified sequence
EEPPPPTVQVQGPGPQREEKQKTKMAKFVIRPATAADCSDILRLIKELAKYEYMEEQVILTEKDLLEDGFGEHPFYHCLVAEVPKEHWTPEGNPSPFPEARETKCYYFTYDPWIGKLLYLEDFFVMSDYRGLWHRIRNSEESKPGCNEVSLAACTSWAEWNEPSINFYKRRGASDLSSEEGWRLFKIDKEYLLKMATEE

SEQ ID NO: 133948 - protein, 150 aa, Artificial Sequence
  derived and/or modified sequence
MAKFVIRPATAADCSDILRLIKELAKYEYMEEQVILTEKGNSTVAGRGTSVRCLSPSPRPLPPLLPLLADLLEDGFGEHPFYHCLVAEVPKEHWTPEGNPSPFPEARETKCYVRSSVGCVEPLTTQAEVTENLDRKNSQQVFKLLRKKKN

SEQ ID NO: 133949 - protein, 120 aa, Artificial Sequence
  derived and/or modified sequence
MAKFVIRPATAADCSDILRLIKELAKYEYMEEQVILTEKDLLEDGFGEHPFYHCLVAEVPKEHWTPEGNPSPFPEARETKCYVRSSVGCVEPLTTQAEVTENLDRKNSQQVFKLLRKKKN

SEQ ID NO: 133950 - protein, 143 aa, Artificial Sequence
  derived and/or modified sequence
MAKFVIRPATAADCSDILRLIKELAKYEYMEEQVILTEKGHSIVGFAMYYFTYDPWIGKLLYLEDFFVMSDYRGFGIGSEILKNLSQVAMRCRCSSMHFLVAEWNEPSINFYKRRGASDLSSEEGWRLFKIDKEYLLKMATEE

SEQ ID NO: 133951 - protein, 171 aa, Artificial Sequence
  derived and/or modified sequence
MAKFVIRPATAADCSDILRLIKELAKYEYMEEQVILTEKDLLEDGFGEHPFYHCLVAEVPKEHWTPEGHSIVGFAMYYFTYDPWIGKLLYLEDFFVMSDYRGFGIGSEILKNLSQVAMRCRCSSMHFLVAEWNEPSINFYKRRGASDLSSEEGWRLFKIDKEYLLKMATEE

SEQ ID NO: 133952 - DNA, 600 bp, Artificial Sequence
  derived and/or modified sequence
gaggagccccccccccccaccgtgcaggtgcagggccccggcccccagagagaggagaagcagaagaccaagatggccaagttcgtgatcagacccgccaccgccgccgactgcagcgacatcctgagactgatcaaggagctggccaagtacgagtacatggaggagcaggtgatcctgaccgagaaggacctgctggaggacggcttcggcgagcaccccttctaccactgcctggtggccgaggtgcccaaggagcactggacccccgagggcaaccccagccccttccccgaggccagagagaccaagtgctactacttcacctacgacccctggatcggcaagctgctgtacctggaggacttcttcgtgatgagcgactacagaggcctgtggcacagaatcagaaacagcgaggagagcaagcccggctgcaacgaggtgagcctggccgcctgcaccagctgggccgagtggaacgagcccagcatcaacttctacaagagaagaggcgccagcgacctgagcagcgaggagggctggagactgttcaagatcgacaaggagtacctgctgaagatggccaccgaggagtag

SEQ ID NO: 133953 - DNA, 453 bp, Artificial Sequence
  derived and/or modified sequence
atggccaagttcgtgatcagacccgccaccgccgccgactgcagcgacatcctgagactgatcaaggagctggccaagtacgagtacatggaggagcaggtgatcctgaccgagaagggcaacagcaccgtggccggcagaggcaccagcgtgagatgcctgagccccagccccagacccctgccccccctgctgcccctgctggccgacctgctggaggacggcttcggcgagcaccccttctaccactgcctggtggccgaggtgcccaaggagcactggacccccgagggcaaccccagccccttccccgaggccagagagaccaagtgctacgtgagaagcagcgtgggctgcgtggagcccctgaccacccaggccgaggtgaccgagaacctggacagaaagaacagccagcaggtgttcaagctgctgagaaagaagaagaactag

SEQ ID NO: 133954 - DNA, 363 bp, Artificial Sequence
  derived and/or modified sequence
atggccaagttcgtgatcagacccgccaccgccgccgactgcagcgacatcctgagactgatcaaggagctggccaagtacgagtacatggaggagcaggtgatcctgaccgagaaggacctgctggaggacggcttcggcgagcaccccttctaccactgcctggtggccgaggtgcccaaggagcactggacccccgagggcaaccccagccccttccccgaggccagagagaccaagtgctacgtgagaagcagcgtgggctgcgtggagcccctgaccacccaggccgaggtgaccgagaacctggacagaaagaacagccagcaggtgttcaagctgctgagaaagaagaagaactag

SEQ ID NO: 133955 - DNA, 432 bp, Artificial Sequence
  derived and/or modified sequence
atggccaagttcgtgatcagacccgccaccgccgccgactgcagcgacatcctgagactgatcaaggagctggccaagtacgagtacatggaggagcaggtgatcctgaccgagaagggccacagcatcgtgggcttcgccatgtactacttcacctacgacccctggatcggcaagctgctgtacctggaggacttcttcgtgatgagcgactacagaggcttcggcatcggcagcgagatcctgaagaacctgagccaggtggccatgagatgcagatgcagcagcatgcacttcctggtggccgagtggaacgagcccagcatcaacttctacaagagaagaggcgccagcgacctgagcagcgaggagggctggagactgttcaagatcgacaaggagtacctgctgaagatggccaccgaggagtag

SEQ ID NO: 133956 - DNA, 516 bp, Artificial Sequence
  derived and/or modified sequence
atggccaagttcgtgatcagacccgccaccgccgccgactgcagcgacatcctgagactgatcaaggagctggccaagtacgagtacatggaggagcaggtgatcctgaccgagaaggacctgctggaggacggcttcggcgagcaccccttctaccactgcctggtggccgaggtgcccaaggagcactggacccccgagggccacagcatcgtgggcttcgccatgtactacttcacctacgacccctggatcggcaagctgctgtacctggaggacttcttcgtgatgagcgactacagaggcttcggcatcggcagcgagatcctgaagaacctgagccaggtggccatgagatgcagatgcagcagcatgcacttcctggtggccgagtggaacgagcccagcatcaacttctacaagagaagaggcgccagcgacctgagcagcgaggagggctggagactgttcaagatcgacaaggagtacctgctgaagatggccaccgaggagtag

SEQ ID NO: 133957 - DNA, 600 bp, Artificial Sequence
  derived and/or modified sequence
gaggagcccccgcccccaacagtccaagttcagggccccggccctcaacgggaggagaaacagaaaacaaagatggccaagttcgttattagacccgctaccgcagcagactgctccgacatccttagacttatcaaagaacttgccaaatacgaatatatggaagagcaggtgatactcacagaaaaggacttactcgaggacgggttcggggagcatcctttctatcattgcctggtggctgaggtgcccaaagagcactggacgcctgagggcaatccctcccccttccccgaggcccgcgaaaccaaatgctattattttacttatgacccctggataggcaagctgctgtatctcgaagacttcttcgtcatgtctgattacagaggtctttggcaccgcattagaaatagcgaggagagcaagcctgggtgtaatgaggtttccctcgcagcctgcactagttgggctgagtggaatgagccgtccattaatttttataaacggcgcggcgcaagcgacctaagtagcgaggaaggatggcgtctgtttaaaatagacaaagagtacctgttaaaaatggccactgaagagtag

SEQ ID NO: 133958 - DNA, 453 bp, Artificial Sequence
  derived and/or modified sequence
atggctaaatttgtgattcggcccgccaccgccgcggattgttctgacattctacgtcttatcaaagagctggcaaagtatgagtatatggaggaacaagtcatactgactgagaaaggcaattctactgttgctggccgaggaacttcagttagatgtctatcacccagtccccgcccgctgcccccactgctcccactgctcgctgacttgctggaggatgggtttggtgagcatcctttctaccactgtttggtcgccgaagttccaaaggaacactggactccagaggggaatccttccccctttccagaggcccgcgaaactaagtgctacgtgaggagctcagtcgggtgcgtggaacccctgactacacaggcagaggttactgaaaaccttgaccggaagaactcacagcaggtgtttaagctcttaagaaaaaagaagaactag

SEQ ID NO: 133959 - DNA, 363 bp, Artificial Sequence
  derived and/or modified sequence
atggcaaagttcgtgatacgccccgccacagccgccgactgttcagatatcctcaggctcattaaggaactggctaaatatgagtacatggaggaacaagtgattctcaccgaaaaagacctgctcgaagatgggttcggcgaacatccattttatcactgcctagtcgccgaagtgcccaaagagcactggacccccgagggaaatccctccccttttcccgaggcccgcgagaccaagtgctatgttcgcagcagtgtgggctgtgtagagcctcttaccactcaggcagaagtgaccgaaaatctggataggaagaattcccagcaggtgttcaagctgctccgcaagaaaaagaactag

SEQ ID NO: 133960 - DNA, 432 bp, Artificial Sequence
  derived and/or modified sequence
atggctaagtttgtcattcgtccagcaaccgccgccgattgttcagacattttgaggcttatcaaagaacttgccaaatacgaatatatggaggagcaggtgatattgactgagaaaggacactctattgtgggattcgccatgtactattttacctatgatccgtggatcggtaagcttttatatctagaggattttttcgtaatgagcgattaccgaggcttcggtattgggagcgaaatcttgaagaatctaagccaagtggccatgagatgcaggtgctcgtcaatgcatttcctcgtggccgaatggaacgagccctctattaacttctataagagaaggggagccagcgatctgtctagtgaggagggctggcgcttgttcaagatcgataaagaatacctgctgaagatggcaactgaggagtag

SEQ ID NO: 133961 - DNA, 516 bp, Artificial Sequence
  derived and/or modified sequence
atggcaaagtttgtcataaggcccgcaaccgctgctgactgcagcgacatccttcgtcttatcaaggagctggctaagtatgaatatatggaagaacaggtaattttgacagaaaaagacttgctggaggacgggtttggcgagcatcccttctatcactgtcttgtcgccgaggtgcctaaggagcattggacacccgagggccattccattgtggggttcgccatgtactatttcacatatgatccatggataggcaaactgctctacttggaggactttttcgtgatgagtgactatagagggttcggcatcggttccgaaattctgaaaaacctatctcaggtggcaatgagatgccgctgctcctcaatgcattttctggtggcagagtggaacgagccttctattaacttctataagaggcgcggagccagcgatctcagtagcgaggagggctggcgactattcaagatcgacaaggaatatctcttgaagatggccactgaagaatag

SEQ ID NO: 133962 - DNA, 600 bp, Artificial Sequence
  derived and/or modified sequence
gaggagcccccaccacccaccgtgcaggtgcagggccctggcccccagcgggaggagaagcagaagaccaagatggccaagtttgtgatccggcctgccacagctgctgactgcagcgacatcctgcggctcatcaaggagctggccaagtatgagtacatggaggagcaggtgatcctgacagagaaggacctgctggaggatggctttggagagcaccccttctaccactgcctggtggccgaggtgcccaaggagcactggaccccagagggcaaccccagccccttccctgaggcccgggagaccaagtgctactacttcacctatgacccctggattggcaagctgctgtacctggaggacttctttgtgatgtctgactaccggggcctgtggcaccgcatcagaaattctgaggagagcaagccaggctgcaatgaggtgtccctggccgcctgcacctcctgggccgagtggaatgagcccagcatcaacttctacaagagaagaggagccagtgacctgagcagcgaggagggctggaggctcttcaagattgacaaggagtacctgctgaagatggccacagaggagtag

SEQ ID NO: 133963 - DNA, 453 bp, Artificial Sequence
  derived and/or modified sequence
atggccaagtttgtgatccggcctgccacagctgctgactgcagcgacatcctgcggctcatcaaggagctggccaagtatgagtacatggaggagcaggtgatcctgacagagaagggcaacagcacagtggccggccggggcacctctgtgcgctgcctgagccccagcccccggcccctgccccccctgctgcccctgctggccgacctgctggaggatggctttggagagcaccccttctaccactgcctggtggccgaggtgcccaaggagcactggaccccagagggcaaccccagccccttccctgaggcccgggagaccaagtgctacgtgcgcagctctgtgggctgtgtggagcccctgaccacccaggccgaggtgacagagaacctggacaggaagaacagccagcaggtgttcaagctgctgaggaagaagaagaactag

SEQ ID NO: 133964 - DNA, 363 bp, Artificial Sequence
  derived and/or modified sequence
atggccaagtttgtgatccggcctgccacagctgctgactgcagcgacatcctgcggctcatcaaggagctggccaagtatgagtacatggaggagcaggtgatcctgacagagaaggacctgctggaggatggctttggagagcaccccttctaccactgcctggtggccgaggtgcccaaggagcactggaccccagagggcaaccccagccccttccctgaggcccgggagaccaagtgctacgtgcgcagctctgtgggctgtgtggagcccctgaccacccaggccgaggtgacagagaacctggacaggaagaacagccagcaggtgttcaagctgctgaggaagaagaagaactag

SEQ ID NO: 133965 - DNA, 432 bp, Artificial Sequence
  derived and/or modified sequence
atggccaagtttgtgatccggcctgccacagctgctgactgcagcgacatcctgcggctcatcaaggagctggccaagtatgagtacatggaggagcaggtgatcctgacagagaagggccacagcatcgtgggctttgccatgtactacttcacctatgacccctggattggcaagctgctgtacctggaggacttctttgtgatgtctgactaccggggctttggaattggcagcgagatcctgaagaacctgagccaggtggccatgcgctgccgctgcagctccatgcacttcctggtggccgagtggaatgagcccagcatcaacttctacaagagaagaggagccagtgacctgagcagcgaggagggctggaggctcttcaagattgacaaggagtacctgctgaagatggccacagaggagtag

SEQ ID NO: 133966 - DNA, 516 bp, Artificial Sequence
  derived and/or modified sequence
atggccaagtttgtgatccggcctgccacagctgctgactgcagcgacatcctgcggctcatcaaggagctggccaagtatgagtacatggaggagcaggtgatcctgacagagaaggacctgctggaggatggctttggagagcaccccttctaccactgcctggtggccgaggtgcccaaggagcactggaccccagagggccacagcatcgtgggctttgccatgtactacttcacctatgacccctggattggcaagctgctgtacctggaggacttctttgtgatgtctgactaccggggctttggaattggcagcgagatcctgaagaacctgagccaggtggccatgcgctgccgctgcagctccatgcacttcctggtggccgagtggaatgagcccagcatcaacttctacaagagaagaggagccagtgacctgagcagcgaggagggctggaggctcttcaagattgacaaggagtacctgctgaagatggccacagaggagtag

SEQ ID NO: 133967 - DNA, 600 bp, Artificial Sequence
  derived and/or modified sequence
gaggagccccccccccccaccgtgcaggtgcagggccccggcccccaacgcgaggagaaacagaaaactaagatggcaaaattcgtcatccggcccgctaccgccgctgattgctccgatatcttacgcctcattaaggagctggccaaatacgaatacatggaagaacaggtgatcctcaccgagaaggatcttctggaagacggattcggggagcaccccttttatcattgcctggtggcagaagttccaaaggaacactggacgcctgagggaaatccatccccatttcctgaggcccgggaaaccaaatgttactactttacttatgatccctggatcgggaaattgctctaccttgaggatttcttcgtcatgagcgattacaggggactgtggcatcggatcaggaactccgaggaaagtaaaccgggctgtaatgaagtgtctctggctgcttgcacctcttgggctgagtggaacgaaccaagcatcaacttctacaagcggcggggtgcctccgacttgtcttctgaagaggggtggaggctatttaaaatagacaaggaatacttactgaagatggccactgaggaatag

SEQ ID NO: 133968 - DNA, 453 bp, Artificial Sequence
  derived and/or modified sequence
atggccaagttcgtgatccggcccgccaccgccgccgactgcagcgatatcctccggctgataaaagagcttgcaaaatacgaatatatggaggaacaggtaatcctgaccgaaaagggcaacagtaccgtcgccgggcggggcacctctgtccgatgtctgagcccctccccgcggccgttacctcccctgctgcccctgctcgccgacttgttggaagacgggttcggagagcatccattctatcattgtctggtggccgaagtgccaaaagagcactggactccagaaggaaacccatccccgttccccgaagctagagaaaccaagtgttacgtgcgtagcagcgtgggatgtgtcgagcctctgacaacccaggccgaggtgactgagaacttggataggaagaatagccagcaggttttcaaactgctcaggaagaagaaaaactag

SEQ ID NO: 133969 - DNA, 363 bp, Artificial Sequence
  derived and/or modified sequence
atggccaagttcgtgatccggcccgccaccgccgccgactgcagcgacatcctgagactgatcaaagaactcgctaagtacgagtacatggaagagcaggtgatacttactgaaaaggatctgctcgaggacggatttggagagcatcctttctaccattgtctggtggccgaggtgcccaaagaacactggacccccgagggcaacccgagccctttcccagaggcccgcgagactaagtgctacgtgcgctcatctgttggatgcgtggaacctcttacaacgcaagcggaggtgacagagaacttggataggaagaatagccagcaggtttttaagctgctgcgcaagaagaaaaactag

SEQ ID NO: 133970 - DNA, 432 bp, Artificial Sequence
  derived and/or modified sequence
atggccaagttcgtgatccggcccgccaccgccgccgactgcagcgacattctaagactaatcaaggagttagccaaatatgaatacatggaggagcaagtgatattaacagaaaagggccactctattgttggatttgctatgtactactttacttatgacccttggatcggcaaactcctctaccttgaggacttttttgtcatgtcagactataggggctttggtattggcagcgaaatcctgaagaaccttagccaagttgctatgcggtgcagatgctctagcatgcattttctcgtcgcggaatggaacgaaccttctatcaatttctataaaaggcggggggccagtgacttgagcagcgaagaagggtggcggctgtttaagattgataaggagtatctcctcaagatggccaccgaagagtag

SEQ ID NO: 133971 - DNA, 516 bp, Artificial Sequence
  derived and/or modified sequence
atggccaagttcgtgatccggcccgccaccgccgccgactgcagcgacattctccgtctgattaaagagctggctaagtacgaatacatggaggaacaggtaatactcaccgagaaggatcttctcgaggacggatttggcgagcatcctttttaccattgtctcgtggccgaggtccccaaggagcactggaccccagaggggcactcgatagtgggctttgcgatgtattattttacctatgacccctggatcggtaaattgctgtatctagaggacttcttcgtgatgtccgattacaggggcttcggaatcgggtcagagatcctgaagaacctgagccaagttgcaatgcgttgccgttgcagctccatgcacttcctggtcgccgagtggaatgagccctcaataaatttctataaaaggcgcggtgctagtgacctgtctagcgaggagggctggcgcttgtttaaaatcgacaaagaatacctgctcaaaatggccacggaagagtag

SEQ ID NO: 133972 - DNA, 600 bp, Artificial Sequence
  derived and/or modified sequence
gaggagcctccaccacccaccgtgcaagtgcaggggcctgggcctcagcgtgaagaaaagcagaagacaaaaatggccaaatttgtgattaggcccgcaactgccgcagactgcagcgacatcctgcggctgataaaagagcttgctaaatacgaatatatggaagagcaggttatcctgacagagaaagatctgctggaggacggatttggcgagcacccattctatcattgtctagtagcagaagtcccaaaggaacactggacacccgagggaaatccctctcccttcccggaagctagagagaccaaatgttactactttacatatgatccgtggattgggaaactgctctatttagaggatttttttgtcatgagcgactaccggggtctgtggcacagaatccgaaacagcgaagagtctaaaccgggatgcaatgaggtttctctggccgcatgcaccagctgggccgagtggaatgagccctccatcaatttctacaagaggaggggagcatctgatctttcctcggaggagggctggcggctgttcaaaatcgacaaagaatacctcctgaaaatggccaccgaagagtag

SEQ ID NO: 133973 - DNA, 453 bp, Artificial Sequence
  derived and/or modified sequence
atggccaaattcgtcatccgacctgccacggccgcagattgctcagacatcctgcggctcatcaaagagctggctaaatacgagtatatggaagagcaagtaatattgactgagaaaggcaacagtacagtcgcaggccgtggcacctctgttcgctgcctgtcaccttctcctaggcctttgccacctctgttgcccctgctggctgacctcctggaagatggtttcggagagcacccattctatcactgtctggtggctgaagtgcccaaggagcattggactcccgaaggaaacccctcacccttcccagaggcacgcgagaccaaatgttacgtgcgtagttccgtgggttgcgtggagccgctgacaactcaggctgaggtgaccgagaatctggaccggaagaacagccagcaggtgttcaagctgctccggaagaagaagaactag

SEQ ID NO: 133974 - DNA, 363 bp, Artificial Sequence
  derived and/or modified sequence
atggctaaatttgtcataaggcctgcaactgcagcagactgttcagacatactgcggctgatcaaggagctagccaagtatgaatacatggaagagcaagtcatcctcacagaaaaggaccttttggaggatggcttcggcgaacacccattttatcactgtttggtggccgaagtgcccaaggagcactggaccccagagggaaacccttcaccgtttccagaggctagggagaccaaatgttatgtgcggagtagcgttggctgcgttgagcccctcacgacccaggccgaggtgaccgagaacctcgaccgtaagaattcccagcaagtgtttaaactcttgaggaagaaaaaaaactag

SEQ ID NO: 133975 - DNA, 432 bp, Artificial Sequence
  derived and/or modified sequence
atggccaaatttgtaatcagaccagctacagctgccgattgctcggacatcctgaggctgatcaaagagttggcaaaatacgagtatatggaagagcaggtcatccttaccgagaaagggcatagtattgtcggcttcgccatgtattactttacatatgacccgtggattggcaaactcctatacctcgaggatttcttcgtgatgagcgattatcgcggattcgggattgggtccgagatcttaaaaaatctatctcaggtggcaatgcgttgcagatgttcaagcatgcactttctagtcgcagaatggaacgaaccctctataaatttttataaacggagaggagccagcgatttgtcttcagaagaagggtggagattgttcaagatcgataaagagtatctgctcaagatggcaaccgaagaatag

SEQ ID NO: 133976 - DNA, 516 bp, Artificial Sequence
  derived and/or modified sequence
atggctaaattcgtgataaggccagccactgccgctgattgctccgacattcttaggctgatcaaagagctcgccaagtatgagtacatggaagaacaggtcattcttacagaaaaggatctgctcgaagatggtttcggcgagcaccccttctatcattgcctggtggccgaagtgcctaaggagcattggactcccgaagggcacagcatcgtgggatttgccatgtattactttacctacgacccttggatcggaaaattgttgtacctagaggattttttcgtgatgtccgactatagggggttcgggatcgggtccgaaatcttaaagaacctgtcccaggtggccatgagatgccgctgctctagcatgcatttcctagtggccgagtggaacgaaccttcgattaatttctacaagagaagaggggcttccgatctctccagtgaggaagggtggcggctatttaaaatcgacaaggagtatctgcttaaaatggcaacggaggaatag

SEQ ID NO: 133977 - DNA, 1057 bp, Artificial Sequence
  derived and/or modified sequence
gcgcagctcttagtcgcgggccgactggtgtttatccgtcactcgccgaggttccttgggtcatggtgccagcctgactgagaagaggacgctcccgggagacgaatgaggaaccacctcctcctactgttcaagtacaggggcctggtccgcaaagggaagaaaagcaaaagacgaaaatggctaaattcgtgatccgcccagccactgccgccgactgcagtgacatactgcggctgatcaaggagctggctaaatatgaatacatggaagaacaagtaatcttaactgaaaaagatctgctagaagatggttttggagagcaccccttttaccactgcctggttgcagaagtgccgaaagagcactggactccggaaggtaacccctcgccctttccagaagccagagagaccaagtgttattattttacctatgacccgtggattggcaagttattgtatcttgaggacttcttcgtgatgagtgattatagagggctttggcataggatcagaaattctgaagaatctaagccaggttgcaatgaggtgtcgctggcagcatgcacttcttgggcagaatggaatgaaccatccatcaacttctataaaagaagaggtgcttctgatctgtccagtgaagagggttggagactgttcaagatcgacaaggagtacttgctaaaaatggcaacagaggagtgaggagtgctgctgtagatgacaacctccattctattttagaataaattcccaacttctcttgctttctatgctgtttgtagtgaaataatagaatgagcacccattccaaagctttattaccagtggcgttgttgcatgtttgaaatgaggtctgtttaaagtggcaatctcagatgcagtttggagagtcagatctttctccttgaatatctttcgataaacaacaaggtggtgtgatcttaatatatttgaaaaaaacttcattctcgtgagtcatttaaatgtgtacaatgtacacactggtacttagagtttctgtttgattcttttttaataaactactctttgat

SEQ ID NO: 133978 - DNA, 801 bp, Artificial Sequence
  derived and/or modified sequence
gcgcagctcttagtcgcgggccgactggtgtttatccgtcactcgccgaggttccttgggtcatggtgccagcctgactgagaagaggacgctcccgggagacgaatgaggaaccacctcctcctactgttcaagtacaggggcctggtccgcaaagggaagaaaagcaaaagacgaaaatggctaaattcgtgatccgcccagccactgccgccgactgcagtgacatactgcggctgatcaaggagctggctaaatatgaatacatggaagaacaagtaatcttaactgaaaaaggtaattcaacagtggcgggacgggggacaagcgttcggtgcctgtcaccttcgccaaggccattaccgcccctgctcccccttcttgcagatctgctagaagatggttttggagagcaccccttttaccactgcctggttgcagaagtgccgaaagagcactggactccggaaggtaacccctcgccctttccagaagccagagagaccaagtgttatgtaagaagtagtgtcggctgtgtagaaccactgactacacaggccgaagttactgagaacttggacagaaaaaatagccagcaagtgttcaaactactgaggaaaaaaaaaaattagatatgctgcacttaagaatactagggcaggttaaaagagctgtttaagtaagtatcagagtgctgtggagactcggaagtgtttaagctgcttaagtaagtataagtgctgtggagacccggaagagttagatataatgtcatttgttgtaattcagtttcataaaatg

SEQ ID NO: 133979 - DNA, 909 bp, Artificial Sequence
  derived and/or modified sequence
gcgcagctcttagtcgcgggccgactggtgtttatccgtcactcgccgaggttccttgggtcatggtgccagcctgactgagaagaggacgctcccgggagacgaatgaggaaccacctcctcctactgttcaagtacaggggcctggtccgcaaagggaagaaaagcaaaagacgaaaatggctaaattcgtgatccgcccagccactgccgccgactgcagtgacatactgcggctgatcaaggagctggctaaatatgaatacatggaagaacaagtaatcttaactgaaaaagatctgctagaagatggttttggagagcaccccttttaccactgcctggttgcagaagtgccgaaagagcactggactccggaaggtaacccctcgccctttccagaagccagagagaccaagtgttatgtaagaagtagtgtcggctgtgtagaaccactgactacacaggccgaagttactgagaacttggacagaaaaaatagccagcaagtgttcaaactactgaggaaaaaaaaaaattagatatgctgcacttaagaatactagggcaggttaaaagagctgtttaagtaagtatcagagtgctgtggagactcggaagtgtttaagctgcttaagtaagtataagtgctgtggagacccggaagagttagatataatgtcatttgttgtaattcagtttcataaaatggttcttgtttgaccctaacgtaacagtttttgtaattgtgttaaatcacatttttttctttaatttgtcccaatcttcaggttacagtctctagcttcgccatgtacatggcccttccgtgtacatggatgggcggggaggtaactaaaagatcctttacacaataaagtagatgatcatgataaatgaggtaaggtc

SEQ ID NO: 133980 - DNA, 868 bp, Artificial Sequence
  derived and/or modified sequence
gcgcagctcttagtcgcgggccgactggtgtttatccgtcactcgccgaggttccttgggtcatggtgccagcctgactgagaagaggacgctcccgggagacgaatgaggaaccacctcctcctactgttcaagtacaggggcctggtccgcaaagggaagaaaagcaaaagacgaaaatggctaaattcgtgatccgcccagccactgccgccgactgcagtgacatactgcggctgatcaaggagctggctaaatatgaatacatggaagaacaagtaatcttaactgaaaaaggacacagcattgttggttttgccatgtactattttacctatgacccgtggattggcaagttattgtatcttgaggacttcttcgtgatgagtgattatagaggctttggcataggatcagaaattctgaagaatctaagccaggttgcaatgaggtgtcgctgcagcagcatgcacttcttggtagcagaatggaatgaaccatccatcaacttctataaaagaagaggtgcttctgatctgtccagtgaagagggttggagactgttcaagatcgacaaggagtacttgctaaaaatggcaacagaggagtgaggagtgctgctgtagatgacaacctccattctattttagaataaattcccaacttctcttgctttctatgctgtttgtagtgaaataatagaatgagcacccattccaaagctttattaccagtggcgttgttgcatgtttgaaatgaggtctgtttaaagtggcaatctcagatgcagtttggagagtcagatctttctccttgaatatctttcgataaacaacaaggtggtgtgatcttaatatatttgaaaaaa

SEQ ID NO: 133981 - DNA, 1065 bp, Artificial Sequence
  derived and/or modified sequence
gcgcagctcttagtcgcgggccgactggtgtttatccgtcactcgccgaggttccttgggtcatggtgccagcctgactgagaagaggacgctcccgggagacgaatgaggaaccacctcctcctactgttcaagtacaggggcctggtccgcaaagggaagaaaagcaaaagacgaaaatggctaaattcgtgatccgcccagccactgccgccgactgcagtgacatactgcggctgatcaaggagctggctaaatatgaatacatggaagaacaagtaatcttaactgaaaaagatctgctagaagatggttttggagagcaccccttttaccactgcctggttgcagaagtgccgaaagagcactggactccggaaggacacagcattgttggttttgccatgtactattttacctatgacccgtggattggcaagttattgtatcttgaggacttcttcgtgatgagtgattatagaggctttggcataggatcagaaattctgaagaatctaagccaggttgcaatgaggtgtcgctgcagcagcatgcacttcttggtagcagaatggaatgaaccatccatcaacttctataaaagaagaggtgcttctgatctgtccagtgaagagggttggagactgttcaagatcgacaaggagtacttgctaaaaatggcaacagaggagtgaggagtgctgctgtagatgacaacctccattctattttagaataaattcccaacttctcttgctttctatgctgtttgtagtgaaataatagaatgagcacccattccaaagctttattaccagtggcgttgttgcatgtttgaaatgaggtctgtttaaagtggcaatctcagatgcagtttggagagtcagatctttctccttgaatatctttcgataaacaacaaggtggtgtgatcttaatatatttgaaaaaaacttcattctcgtgagtcatttaaatgtgtacaatgtacacactggtacttagagtttctgtttgattcttttttaataaactactctttgatttaattgtttggtgtaagca

SEQ ID NO: 133982 - protein, 763 aa, Artificial Sequence
  derived and/or modified sequence
MDHLNEATQGKEHSEMSNNVSDPKGPPAKIARLEQNGSPLGRGRLGSTGAKMQGVPLKHSGHLMKTNLRKGTMLPVFCVVEHYENAIEYDCKEEHAEFVLVRKDMLFNQLIEMALLSLGYSHSSAAQAKGLIQVGKWNPVPLSYVTDAPDATVADMLQDVYHVVTLKIQLHSCPKLEDLPPEQWSHTTVRNALKDLLKDMNQSSLAKECPLSQSMISSIVNSTYYANVSAAKCQEFGRWYKHFKKTKDMMVEMDSLSELSQQGANHVNFGQQPVPGNTAEQPPSPAQLSHGSQPSVRTPLPNLHPGLVSTPISPQLVNQQLVMAQLLNQQYAVNRLLAQQSLNQQYLNHPPPVSRSMNKPLEQQVSTNTEVSSEIYQWVRDELKRAGISQAVFARVAFNRTQGLLSEILRKEEDPKTASQSLLVNLRAMQNFLQLPEAERDRIYQDERERSLNAASAMGPAPLISTPPSRPPQVKTATIATERNGKPENNTMNINASIYDEIQQEMKRAKVSQALFAKVAATKSQGWLCELLRWKEDPSPENRTLWENLSMIRRFLSLPQPERDAIYEQESNAVHHHGDRPPHIIHVPAEQIQQQQQQQQQQQQQQQAPPPPQPQQQPQTGPRLPPRQPTVASPAESDEENRQKTRPRTKISVEALGILQSFIQDVGLYPDEEAIQTLSAQLDLPKYTIIKFFQNQRYYLKHHGKLKDNSGLEVDVAEYKEEELLKDLEESVQDKNTNTLFSVKLEEELSVEGNTDINTDLKD

SEQ ID NO: 133983 - protein, 116 aa, Artificial Sequence
  derived and/or modified sequence
MDHLNEATQGKEHSEMSNNVSDPKGPPAKIARLEQNGSPLGRGRLGSTGAKMQGVPLKHSGHLMKTNLRKGTMLPVFCVVEHYENAIEYDCKEEHAEFVLVRKDMLFNQLIEMALL

SEQ ID NO: 133984 - protein, 224 aa, Artificial Sequence
  derived and/or modified sequence
MDHLNEATQGKEHSEMSNNVSDPKGPPAKIARLEQNGSPLGRGRLGSTGAKMQGVPLKHSGHLMKTNLRKGTMLPVFCVVEHYENAIEYDCKEEHAEFVLVRKDMLFNQLIEMALLSLGYSHSSAAQAKGLIQVGKWNPVPLSYVTDAPDATVADMLQDVYHVVTLKIQLHSCPKLEDLPPEQWSHTTVRNALKDLLKDMNQSSLAKECPLSQSMISSIVNSTY

SEQ ID NO: 133985 - protein, 71 aa, Artificial Sequence
  derived and/or modified sequence
MDHLNEATQGKEHSEMSNNVSDPKGPPAKIARLEQNGSPLGRGRLGSTGAKMQGVPLKHSGHLMKTNLRKG

SEQ ID NO: 133986 - protein, 172 aa, Artificial Sequence
  derived and/or modified sequence
MDHLNEATQGKEHSEMSNNVSDPKGPPAKIARLEQNGSPLGRGRLGSTGAKMQGVPLKHSGHLMKTNLRKGTMLPVFCVVEHYENAIEYDCKEEHAEFVLVRKDMLFNQLIEMALLSLGYSHSSAAQAKGLIQVGKWNPVPLSYVTDAPDATVADMLQDVYHVVTLKIQLHR

SEQ ID NO: 133987 - DNA, 5423 bp, Artificial Sequence
  derived and/or modified sequence
tttctcgctcgctcccgttccccggacgcggcggatgagccggccccgctggggaaggctccgggcggcggcgggcggccgggaggaggctgcgtgctcggggctggggctgcgagcggggtgattttgtattaaaatgaggaggaggaagaagaggcacccacagcggcagcggcggcggcggcggcagcagcagcaggagcagcggcggagagggctgcagcccgggcggacgcgcggagccgagcggggcacggcggcggcagcgacagcggccgggatgagtcaactaataatttaatgggggcagagacggcagcgaggggtagagctagcgagggagagagcgagagaagcagccccgtccggggactcgcgctcacactcacgcacacacacaaacacacacacacctctccctgtgccacccagcaacacccggcctcgtcacaacaacaacagccgcggccgccctctatcctgcccgggggcccagccgaaagccagggcgactctagaggacgctgcccgcccccctctttcatttcgggaaactcctgatcagttttgtcggggtttctgggtttcttttcccccaaagtcctagtgccattgtggtgctcgttgtttacctcggactctggacgagtgagagcttggcgactttttggggggagggggcggggagtttgtcgctgcctaggcggtggaggtggctgggggtgccttctgatcttcctcctcctccccctccccccgaacctcttctctcctcacttgctgggaccccagacgctcacagccccgcgtcaatgggcagggagagggtccttgcggctgttgtcagcgagggcagaatcaaaagtggcattttagtgcctttccggggcttttctcgcgaccccctgccccccaccctcgctgtcccccgctagatgccctcgttgggggtgcgaggctgtggggaaaagtttaaggtttgttaatattagtcgcgattgttggcgaggggggtgggggtgattggaagggaggcgaggtggccttcccaatgcgcgttattcggggttattgaagaataatattgcaagtgacagccagaagtagactttctgtcctcacaccgaagaacccgagtgagcaggagggagggagagacgcgaagagaccttttttcctttttggagaccttgtccgcagtgatttttttttttttaagagaatcctcagtcaccacgtcgtttccccagcaccatcacagtgtacagctcataacgggttttgctttgtttttacgatttccccccaacgaatcacttgtcagatcaattttatcttcttcctcctccctgcttcccactctcccctcctccccatcgcaaaccctgttctctgaggttagacattttacaaacccctatatgttggttttcgaattgtgattttttttttaaacccctttctcatggctactcttctagacgtttatttctgcccttcccccgcttaggggggcgggggtaggggaaaggaaaataatacaatttcaggggaagtcgccttcaggtctgctgcttttttatttttttttttttaattaaaaaaaaaaaggacatagaaaacatcagtcttgaacttctcttcaagaacccgggctgcaaaggaaatctcctttgtttttgttatttatgtgctgtcaagttttgaagtggtgatctttagacagtgactgagtatggatcatttgaacgaggcaactcaggggaaagaacattcagaaatgtctaacaatgtgagtgatccgaagggtccaccagccaagattgcccgcctggagcagaacgggagcccgctaggaagaggaaggcttgggagtacaggtgcaaaaatgcagggagtgcctttaaaacactcgggccatctgatgaaaaccaaccttaggaaaggaaccatgctgccagttttctgtgtggtggaacattatgaaaacgccattgaatatgattgcaaggaggagcatgcagaatttgtgctggtgagaaaggatatgcttttcaaccagctgatcgaaatggcattgctgtctctaggttattcacatagctctgctgcccaggccaaagggctaatccaggttggaaagtggaatccagttccactgtcttacgtgacagatgcccctgatgctacagtagcagatatgcttcaagatgtgtatcatgtggtcacattgaaaattcagttacacagttgccccaaactagaagacttgcctcccgaacaatggtcgcacaccacagtgaggaatgctctgaaggacttactgaaagatatgaatcagagttcattggccaaggagtgccccctttcacagagtatgatttcttccattgtgaacagtacttactatgcaaatgtctcagcagcaaaatgtcaagaatttggaaggtggtacaaacatttcaagaagacaaaagatatgatggttgaaatggatagtctttctgagctatcccagcaaggcgccaatcatgtcaattttggccagcaaccagttccagggaacacagccgagcagcctccatcccctgcgcagctctcccatggcagccagccctctgtccggacacctcttccaaacctgcaccctgggctcgtatcaacacctatcagtcctcaattggtcaaccagcagctggtgatggctcagctgctgaaccagcagtatgcagtgaatagacttttagcccagcagtccttaaaccaacaatacttgaaccaccctccccctgtcagtagatctatgaataagcctttggagcaacaggtttcgaccaacacagaggtgtcttccgaaatctaccagtgggtacgcgatgaactgaaacgagcaggaatctcccaggcggtatttgcacgtgtggcttttaacagaactcagggcttgctttcagaaatcctccgaaaggaagaggaccccaagactgcatcccagtctttgctggtaaaccttcgggctatgcagaatttcttgcagttaccggaagctgaaagagaccgaatataccaggacgaaagggaaaggagcttgaatgctgcctcggccatgggtcctgcccccctcatcagcacaccacccagccgtcctccccaggtgaaaacagctactattgccactgaaaggaatgggaaaccagagaacaataccatgaacattaatgcttccatttatgatgagattcagcaggaaatgaagcgtgctaaagtgtctcaagcactgtttgcaaaggttgcagcaaccaaaagccagggatggttgtgcgagctgttacgctggaaagaagatccttctccagaaaacagaaccctgtgggagaacctctccatgatccgaaggttcctcagtcttcctcagccagaacgtgatgccatttatgaacaggagagcaacgcggtgcatcaccatggcgacaggccgccccacattatccatgttccagcagagcagattcagcaacagcagcagcaacagcaacagcagcagcagcagcagcaggcaccgccgcctccacagccacagcagcagccacagacaggccctcggctccccccacggcaacccacggtggcctctccagcagagtcagatgaggaaaaccgacagaagacccggccacgaacaaaaatttcagtggaagccttgggaatcctccagagtttcatacaagacgtgggcctgtaccctgacgaagaggccatccagactctgtctgcccagctcgaccttcccaagtacaccatcatcaagttctttcagaaccagcggtactatctcaagcaccacggcaaactgaaggacaattccggtttagaggtcgatgtggcagaatataaagaagaggagctgctgaaggatttggaagagagtgtccaagataaaaatactaacacccttttttcagtgaaactagaagaagagctgtcagtggaaggaaacacagacattaatactgatttgaaagactgagataaaagtatttgtttcgttcaacagtgccactggtatttactaacaaaatgaaaagtccaccttgtcttctctcagaaaacctttgttgttcattgtttggccaatgaatcttcaaaaacttgcacaaacagaaaagttggaaaaggataatacagactgcactaaatgttttcctctgttttacaaactgcttggcagccccaggtgaagcatcaaggattgtttggtattaaaatttgtgttcacgggatgcaccaaagtgtgtaccccgtaagcatgaaaccagtgttttttgttttttttttagttcttattccggagcctcaaacaagcattataccttctgtgattatgatttcctctcctataattatttctgtagcactccacactgatctttggaaacttgccccttatttaaaaaaaaaaaagaaaaaaaagagtttgttactctattgtatgttacaaaagaactatagactgtggaatgcagtttaaagatgacatatgccaacaaatgccttgtattatatggcactgccgtaattcaaatttgtttttattttggaaataaaagttcactgtacttttttttcattctcattgttacatgattttttaaaaaaaggaaaagaaaatgtgaaacacaatttagtcctcattatttatttgtagatcctgcagcatcatgttgtaattaattttttggaagtttccgttaaatgtaatattgcttctcttgttaccatactgattcttttctatttataaatgtattttgatgggcagtaaaacaaagtgtcttaaaagttttaaatagagaaaatgtgctttacacagttgcctataaaaagtgctctatgttatccaagcaattcatactataagcttcactcttattgttgtatgcaatttttactatcatgcaaataagcttaggtaaataaaactaatagatcaccttagaaaattatgcaattaatgtgaaaataattgatgtttgcaatgtgtcttcctttggtttacaatcaattttaaagctacatctgtataaaatttctgtataaaggtgtatttcttttttatgagtttatggctatgaaaacagctattttgttacagctggctgtttttataagtgtatcacaattttctttatgcagaaatgttctgactaggagtggttattgactgtaactacacaattaaaattgtttgtatcgtatgacatggtagggtttgtctgcttatgtgaagtaactaaaggagtcaaaggatggccctctcatttaggtgcatgttaataacttgttatttcactgattttaaaaagagcaattgacaagttacttgaaacactgtaaatttaaatcacaaacacatgctcattttt

SEQ ID NO: 133988 - DNA, 2292 bp, Artificial Sequence
  derived and/or modified sequence
atggatcacctgaatgaagcaacacagggcaaggaacactctgaaatgtcgaataatgtctctgaccctaagggccctcccgccaaaatcgctcggctggagcaaaatgggtccccactgggtagaggcaggctcgggagcaccggagccaagatgcagggtgtccctttgaagcattccggccatttgatgaaaactaaccttcggaaggggacaatgttgcccgtgttctgcgtggtggagcattatgagaacgccattgagtatgattgcaaggaggagcatgctgagttcgtccttgtccgaaaagatatgctgttcaatcagctcatcgagatggccctgctcagtctaggttatagccactcatcagcggcacaagccaaaggccttattcaggtagggaaatggaacccagtcccgctgtcctacgtcactgatgccccagacgccactgtggccgatatgctgcaggatgtgtaccatgtggttaccctgaaaattcaactacactcttgccctaaattagaggatttgccacctgagcagtggtcacataccactgtgcgaaacgcccttaaagacctcctcaaagacatgaaccagagctccctggccaaggaatgccctctgtcacagtctatgatcagctctatcgtaaactccacgtattacgctaacgtgagcgcagccaaatgtcaggagtttggccggtggtacaagcatttcaaaaagacaaaagatatgatggtcgagatggatagcctatctgaattgtcacagcaaggggcaaatcacgttaacttcggacagcagcccgttccaggcaatacggccgaacagccaccgagtcctgctcagctgtcacatgggtcgcagccatcagtgcgcacacccctgccgaatctgcatcctggactagtgagtacaccaattagtccccagctggtcaaccaacagctggtcatggctcaactgttaaaccagcagtatgccgtgaaccggctacttgcgcaacagtctttaaaccaacagtacttaaaccaccccccccctgtctcccgttctatgaacaagcctctggagcagcaggtcagcaccaacacagaagtatccagcgagatataccaatgggtgagagatgaactgaaaagagccggcatcagccaggccgtgttcgcacgcgtcgcgtttaataggactcagggcctgctgtccgaaatcttgcgaaaggaggaggacccgaagacggcctctcagagcctactggtgaatctgcgggccatgcaaaattttctacagctgcctgaagccgagagggaccgcatctatcaagatgaacgagaaagatcactcaatgctgcctcagctatgggtcccgccccccttatcagcacacctcctagtaggccgcctcaggtcaaaaccgccactatagccaccgagcgcaatggcaaacctgagaataacacaatgaacattaacgcttctatttacgacgaaattcagcaggagatgaaacgcgccaaggtcagccaagctctgttcgctaaggttgcagcaacaaaatcccaaggttggctgtgtgaacttctacgctggaaggaagaccccagccctgagaatagaaccctctgggagaatctgtctatgataagaagattcctcagcctcccccagcccgaaagagacgctatatacgaacaggagtcaaacgccgtgcatcatcatggagacagaccaccccacatcattcatgtgcctgccgaacagatccagcagcaacaacagcagcagcaacagcagcagcagcagcaacaggcgcccccacccccacagccccaacagcagccacagacgggacctaggctcccaccacgccagcccaccgtggcgtctcccgcagagagcgacgaagagaatagacaaaagacccggccgcggacgaagattagcgtggaggccctcgggattttgcagagtttcatacaggatgtaggtctatatcctgacgaggaggccatacagacgctgtctgcacagctggacctgcccaaatacaccataatcaagtttttccagaatcagcgatactacctgaagcaccacggcaaacttaaggataacagtggcttggaggtggacgtcgctgaatataaagaggaagagctgctcaaggatctggaagaaagcgttcaagacaaaaacaccaatacactgtttagcgtgaaactggaggaggagctctcagtcgaaggaaatacagatatcaatactgatcttaaagattag

SEQ ID NO: 133989 - DNA, 2292 bp, Artificial Sequence
  derived and/or modified sequence
atggatcacttgaacgaagcgactcaaggaaaagagcattcagagatgtctaacaacgtttcagatcccaagggcccccccgcaaagatcgccaggcttgagcagaacggctctcctctgggacggggtcggttgggctccacaggagctaaaatgcaaggagtgcccttgaaacattccggacacttgatgaagaccaatctccgaaaggggaccatgctgcctgtgttctgtgtggttgaacattatgagaatgcaatcgagtatgattgtaaagaggaacacgccgagttcgtgttagttaggaaagacatgttgtttaaccagttaatcgagatggctttgctgtcactgggttactcgcacagtagtgcagcgcaagccaagggcctgattcaggtgggcaaatggaatccggtccccttatcctacgtgaccgacgccccagatgccacggtggcggacatgctgcaggatgtgtatcacgtggtgaccctgaagattcagctacactcatgccctaagctagaggacctgcctcctgagcagtggagtcacacgacagttaggaatgcactgaaggacctcctcaaggatatgaatcagtcctccttggccaaagagtgtcctttaagccagagcatgatctcctcgattgtcaacagcacttattacgcaaacgtgtccgccgcaaagtgtcaggaattcggacgctggtataagcactttaagaaaacaaaggacatgatggttgaaatggatagtctttcagaactgtctcagcaaggagctaaccacgtcaacttcggacagcagccggtccccggcaatacagccgagcaaccccctagtccagcccagctttcacatgggagccagccttctgtccgcaccccacttccaaatttacaccccggccttgtgagtacccccatttccccacaactagtgaatcagcagctagtgatggcgcagctcctgaatcagcagtacgccgtgaatcgcctacttgcccagcagagtcttaatcagcagtacctgaatcaccccccacctgtatcaaggagtatgaacaagcccttggaacagcaggtgtccacaaacaccgaggtatccagtgagatttatcagtgggtgcgcgacgagctcaagcgcgccggcataagccaggccgtgtttgctcgtgtcgcattcaacaggacacagggtttactgtctgagatattgaggaaagaggaagatccgaaaaccgcttcacagtctctcttggttaacctgcgtgccatgcaaaactttttgcaacttccggaggccgagagggatcgcatctaccaggacgagcgggagaggtccctgaatgctgcctctgctatgggtcctgcccccctgatctcaactccgccttccagaccccctcaagtgaagaccgcgaccatagcgactgaacgcaatgggaagcccgagaataacaccatgaacatcaacgccagcatttacgacgagatccagcaggaaatgaaacgggctaaagtcagccaggccctgttcgcaaaagtggcagctacgaagtctcagggctggctgtgcgagcttctcagatggaaggaggatccttcgcccgagaatcggacgctttgggagaatctcagtatgatcagaagatttctgtcacttccacagccagaacgggacgccatttatgaacaggaaagtaatgctgtgcatcatcatggcgatcgtcctccacacattattcatgtgccagccgagcagatccagcagcagcagcaacaacagcagcagcaacagcagcagcagcaggccccgccacccccgcagccacagcagcagccgcagacgggaccccgcctcccccctcgacaaccaactgtcgctagtcctgccgagagcgacgaggagaacagacagaagacacgcccacgcacaaagattagcgtggaagcactcggcatactgcagtcattcattcaagatgtgggtttgtacccagatgaggaggcaatccagacgctctccgctcagctcgaccttccaaaatacaccattattaagttttttcagaaccaaaggtactacctaaaacaccatggcaaattgaaggataactcaggcctggaggtcgatgtggcagaatacaaggaagaagaacttctgaaggatttggaggagtcggtgcaggacaagaacactaacactctgtttagcgtgaagctggaggaggaactcagcgttgaggggaataccgatattaatactgacctaaaggattag

SEQ ID NO: 133990 - DNA, 2292 bp, Artificial Sequence
  derived and/or modified sequence
atggaccacctgaatgaggccacccagggcaaggagcacagcgagatgagcaacaacgtgtctgaccccaagggccccccagccaagatcgcccggctggagcagaatggcagccccctgggccggggccgcctgggcagcactggagccaagatgcagggcgtgcccctgaagcacagcggccacctgatgaagaccaacctgaggaagggcaccatgctgcctgtgttctgtgtggtggagcactatgaaaatgccattgaatatgactgcaaggaggagcacgccgagtttgtgctggtgaggaaggacatgctgttcaaccagctgattgagatggccctgctgagcctgggctacagccacagcagcgctgcccaggccaagggcctcatccaggtgggcaagtggaaccctgtgcccctgtcctatgtgacagatgccccagatgccaccgtggccgacatgctgcaggatgtgtaccacgtggtgaccctgaagatccagctgcacagctgccccaagctggaggacctgcccccagagcagtggagccacaccaccgtgagaaatgccctgaaggacctgctgaaggacatgaaccagagcagcctggccaaggagtgccccctgagccagagcatgatcagcagcatcgtgaacagcacctactatgccaacgtgtctgctgccaagtgccaggagtttggccgctggtacaagcacttcaagaagaccaaggacatgatggtggagatggacagcctgtctgagctgagccagcagggcgccaaccacgtgaactttggccagcagcctgtgcccggcaacacagctgagcagccccccagccctgcccagctgagccacggcagccagcccagcgtgaggacccccctgcccaacctgcaccctggcctggtgtccacccccatcagcccccagctggtgaaccagcagctggtgatggcccagctgctgaaccagcagtatgctgtgaaccggctgctggcccagcagagcctgaaccagcagtacctgaaccaccccccacctgtgagccgctccatgaacaagcccctggagcagcaggtgtccaccaacacagaggtgtcctctgagatctaccagtgggtgagagatgagctgaagagagctggcatcagccaggccgtgtttgcccgggtggccttcaacagaacccagggcctgctgtctgagatcctgaggaaggaggaggaccccaagacagccagccagagcctgctggtgaacctgcgggccatgcagaacttcctgcagctgcctgaggccgagcgggaccgcatctaccaggatgagcgggagaggagcctgaatgctgccagcgccatgggccctgcccccctcatcagcaccccacccagcaggcctccccaggtgaagacagccaccatcgccacagaaagaaatggcaagccagagaacaacaccatgaacatcaatgccagcatctatgatgagatccagcaggagatgaagagggccaaggtgtcccaggccctgtttgccaaggtggccgccaccaagagccagggctggctgtgtgagctgctgcgctggaaggaggaccccagcccagaaaatagaaccctgtgggagaacctgtccatgatccgccgcttcctgagcctgccccagcctgagagagatgccatctatgagcaggagagcaatgctgtgcaccaccacggggacaggcctccccacatcatccacgtgcctgctgagcagatccagcagcagcagcagcagcagcagcagcagcagcagcagcagcaggcccctcctccaccccagccccagcagcagccccagacaggcccccggctgcccccccggcagcccaccgtggccagccctgctgagagtgatgaggagaaccggcagaagacccggcccaggaccaagatctctgtggaggccctgggcatcctgcagagcttcatccaggatgtgggcctgtacccagatgaggaggccatccagaccctgagcgcccagctggacctgcccaagtacaccatcatcaagttcttccagaaccagcgctactacctgaagcaccacggcaagctgaaggacaacagcggcctggaggtggatgtggccgagtacaaggaggaggagctgctgaaggacctggaggagagcgtgcaggacaagaacaccaacaccctcttctctgtgaagctggaggaggagctgtctgtggagggcaacacagacatcaacacagacctgaaggactag

SEQ ID NO: 133991 - DNA, 2292 bp, Artificial Sequence
  derived and/or modified sequence
atggaccacctgaacgaggccacccagggcaaggagcacagcgagatgtcaaataacgtgagcgatccaaaaggacctcccgccaaaatagctcgcctggagcagaatggcagtcccctgggacgcggaaggctgggcagtactggagccaagatgcagggtgtccctctcaagcattccggacacctgatgaagacaaatttacggaaaggtacgatgctgccagtgttctgcgtggtggaacattacgaaaatgcaattgagtacgactgtaaagaggagcatgcagaatttgttcttgtgcgcaaggatatgctatttaaccagctcatcgagatggcactcttatctctggggtactcgcattcttcagctgcacaggctaaggggctcatacaggtgggcaagtggaatccagttccactgtcctatgttacagatgcccctgatgctactgtggcggatatgctccaggatgtgtatcacgtggtgacacttaagattcagttgcatagctgtccgaaactagaagacctgccaccggaacagtggtcccacacaaccgtccggaacgccctgaaagatctgttgaaggatatgaaccagtcttctctggcaaaggagtgcccactctcccagagcatgatcagttctatcgtgaactctacctactatgctaatgtttcagccgccaaatgccaggagttcggaaggtggtacaagcacttcaagaaaactaaggacatgatggtagagatggacagtcttagtgagcttagccagcagggcgccaaccacgttaacttcgggcaacagccagtccccggaaacactgcagagcagcctcctagccctgcccagctgtcccacggctcccagccgtcggtgcgaacccccctaccaaaccttcaccctggactcgtgtctactcccatcagtcctcagttagtgaaccagcagcttgtgatggcccagcttcttaaccaacagtacgctgtgaatcgtttgctggcccagcaatccctgaatcagcaatacctcaatcacccccccccagtgtctagaagtatgaacaagccactggaacagcaggtgtcaacaaataccgaggtttcgagcgagatataccaatgggtgcgcgatgaactcaaacgggccggcatttctcaggccgtgttcgccagagtggcgttcaataggactcagggacttctgagtgagatcctgcgtaaggaggaagacccaaaaacagctagccagtcactgctggtcaacctgcgcgccatgcagaacttccttcagttgccagaagccgaacgggacaggatctaccaagatgagcgcgaacgatccctgaacgcagcctctgccatggggcctgcccctctgatcagcaccccaccaagcagaccacctcaggtgaaaaccgcgacaatcgctaccgaaaggaatggaaaacctgagaataataccatgaatataaacgcgtcaatatacgatgaaattcaacaggaaatgaagcgggcgaaagtctcacaggctctgttcgcaaaagtcgcagcaactaaatcccaggggtggctatgtgaactcctccggtggaaggaggatccgagtcctgaaaataggacactatgggagaacctgtctatgattaggaggttcctctcactaccccagcctgagcgagacgccatttatgagcaagaaagcaatgcagtacatcaccacggcgaccgaccacctcacatcatccatgtgccggccgagcagatccagcagcaacagcagcagcaacagcagcagcagcagcagcagcaggctccaccccccccccagccgcagcaacagccccagactggccctaggctcccaccacggcagccaactgtcgcatctcctgcggagtcggacgaggaaaatcgacagaagacgagacctagaacaaaaattagcgtagaagctctcggcatcttgcagtccttcattcaagatgtgggtttataccctgatgaagaggctatccagaccctcagcgcacagttggatctcccaaagtacaccatcatcaaatttttccaaaaccaacggtattacctaaaacatcatgggaagctcaaagataattcaggactagaggtggatgtcgctgaatataaggaagaggaactcctgaaagatttagaagaaagtgtgcaggacaaaaacactaataccttattctccgtgaagttggaggaagagttgagcgttgagggcaataccgacattaacacggacttgaaggattag

SEQ ID NO: 133992 - DNA, 2292 bp, Artificial Sequence
  derived and/or modified sequence
atggaccacctgaacgaggccacccagggcaaggagcacagcgagatgtcgaacaatgtgagtgaccccaagggaccccctgctaaaattgcacgacttgagcagaacggatcccctctgggtcgcgggagactgggatcaaccggagctaagatgcagggggtgcccctgaagcacagcggccatcttatgaaaaccaatctgcgaaaaggaacaatgctgcccgttttttgcgtggtggagcattatgaaaatgctatcgaatatgactgcaaggaggagcatgccgaattcgtgttggtccggaaagatatgctattcaaccagctcattgagatggccctgctgtccctggggtattcacatagctcggcagcccaggccaagggattgattcaagtggggaaatggaaccccgtgccgctgagttacgtcaccgacgcccccgacgcgacagtcgctgatatgttgcaggacgtgtaccacgtagtcacattaaaaatccagctgcacagttgccccaagctagaagatttgccacccgagcagtggtctcacacaaccgttcggaatgccctaaaagatctgcttaaggacatgaatcaatcctccttggctaaagagtgcccactgtcccaatccatgatttccagtattgtcaacagcacgtattatgcgaatgtgtccgcagccaaatgccaagagtttgggagatggtataagcatttcaaaaagaccaaggacatgatggtcgagatggatagcttaagtgagctgtcacagcagggggcgaatcacgtaaattttggccagcaaccggtccccggcaatacagccgagcaacccccgagccctgcacagctgtcccacggttcccagccatccgtgcggaccccgctgcccaacctgcatcctgggctggtgtcaaccccaatatccccgcagttggtaaaccaacaactggtcatggcccagcttttgaaccaacagtatgctgttaacagacttttggcccaacaatcactgaatcagcagtacctgaaccatccacctcccgtcagccgctccatgaacaaacccctcgaacaacaagtttcaactaataccgaggtgtcttctgagatttatcagtgggtgcgggacgagctaaagcgcgccggtatcagtcaggcagtttttgcgcgggtcgcgtttaaccgaacccaggggctcctgtccgagattttacgcaaagaggaggatccaaagactgccagccagagcctactggtgaatctgcgggccatgcagaacttccttcagctgcccgaagccgagcgggaccgaatttatcaagacgaaagggaacgttctcttaatgctgcgtccgcaatggggcccgccccactaatttcaacacctccatctaggccccctcaggtaaagaccgcaacgatcgccacagaacgaaacggaaagcccgagaataacactatgaatatcaatgcttcgatttacgacgagatccaacaggagatgaagcgcgcaaaagtgtcccaagccctgttcgctaaagttgctgctactaaaagccaaggctggctttgtgaactcttgaggtggaaggaagatccctctcctgagaaccgaacactatgggaaaaccttagtatgatacgccgattcctctctcttcctcagcccgaacgggacgccatctatgagcaagagtcgaacgcagtccaccaccatggtgacaggccacctcacatcatccatgtgcccgcagagcagatccagcagcagcaacagcaacagcagcagcagcagcaacaacagcaagccccccctcccccccaaccacagcagcaaccgcagaccggtccacgcctacccccacgccagcctacagtcgccagccccgctgagagcgatgaggagaatcggcaaaaaacccggcctaggacgaaaatcagtgtcgaggctttaggtattctgcagagctttatccaagatgtgggcctgtatccggatgaagaggccattcagacgttgagcgcgcagctcgacttgccaaagtataccattatcaagttcttccagaatcaaaggtattacctcaagcatcacggcaagttgaaagataacagcgggcttgaggtggatgtggctgaatataaagaagaggagttactgaaggaccttgaagagtcggttcaggacaaaaataccaacacactgttcagcgtcaagcttgaggaggagctttcagtggaaggcaatacagacataaataccgatctgaaggactag

SEQ ID NO: 133993 - DNA, 2292 bp, Artificial Sequence
  derived and/or modified sequence
atggaccacctcaacgaggcaacccaaggaaaggagcacagtgagatgagcaacaacgtctccgaccctaaggggccaccagccaaaatcgccaggcttgaacagaatgggagccccctcggcagggggaggctaggctcaactggggcaaagatgcagggagtaccgctaaagcacagcgggcaccttatgaaaaccaatctgcgcaagggcaccatgcttcccgtgttctgtgtcgtggaacactatgaaaatgccattgagtatgattgcaaggaggaacatgcagaattcgttctggtacgtaaggatatgttgttcaatcagctcatagaaatggccctgctgtcgctgggctacagccactcatccgccgcacaggcaaaaggtctgatccaggtcgggaagtggaatcctgtgcctcttagctacgtgactgatgcaccggatgcaacagtcgcagatatgctccaggacgtgtaccacgtggtaactctcaaaatacaattgcactcttgcccgaaactggaagacctgcccccagagcagtggagccacaccacagtgcgaaatgcacttaaggacctcctgaaggacatgaatcagtcatcgcttgccaaagagtgtcccctcagccagtccatgatctcctccattgtcaattccacctactacgccaacgtatcagccgcaaagtgccaggagtttggaaggtggtacaaacacttcaagaagacaaaggatatgatggttgagatggacagtctgagtgagttatcccagcagggcgctaaccacgtaaatttcgggcagcagccggttcctggaaacaccgcagagcagcctccttcaccagctcagctttctcacggaagccagccatctgtgcgcacccccttgcccaacctgcatcctggattagtgtccacaccgatctctccccagctagtcaaccagcaactggttatggcacagttattgaaccagcagtatgctgtgaacagactgctcgctcagcagagtctgaatcagcagtacctgaatcaccccccacctgtgagcagaagtatgaataaacctttggaacaacaggtcagcacaaacactgaagtctcttccgaaatttatcagtgggttcgcgacgaattgaagcgggctggaatctcccaggcggtgttcgcacgggtcgcgttcaaccggacccaggggctgttgagtgaaatcttgcgtaaggaagaggatcccaagaccgcatcccagtcactgttggtgaacctgagagctatgcagaactttctacagctgcccgaggccgagcgcgacaggatttaccaagacgagcgggaaaggagccttaatgctgcatctgctatggggcctgctcctctgatctccacccccccatctcgaccaccccaggtgaaaacagccacgattgctaccgaaaggaacgggaagcccgagaacaatactatgaacattaatgcatccatttatgatgagattcagcaagagatgaaaagggctaaggtttcacaggctttattcgctaaagtcgccgctactaaatcacagggctggttgtgtgaattactgcgctggaaggaagaccccagtcctgagaaccgaacattatgggagaacctgtccatgataagacgctttctgagtcttccacagcctgagcgtgacgccatctatgagcaggaatccaacgcagttcatcaccacggcgataggcctcctcacataattcacgtcccagcagagcagatacaacagcaacagcagcagcagcagcagcagcaacagcagcagcaagcccctccacctccacaacctcagcaacagccccagacagggccacgactccctccacggcagcctaccgtcgcttcccccgctgaatctgatgaggagaacagacagaaaactcggccaagaactaaaatatcagtcgaggccctcgggatactgcagtcctttattcaggatgtgggcttataccctgatgaggaagccattcagacgctctctgctcagctcgatctgccaaaatataccatcatcaagttttttcagaatcagcgctattacctgaagcatcatggcaagttgaaagacaatagcggcttggaagttgacgtggccgaatacaaagaggaagagcttctgaaagatctggaagaatccgttcaggacaagaacacaaatactcttttttcggttaaattggaggaagaactgagtgtggaaggaaacacggatataaacacagatctcaaggactag

SEQ ID NO: 133994 - DNA, 2292 bp, Artificial Sequence
  derived and/or modified sequence
atggatcaccttaatgaggctacccagggaaaagaacattctgagatgtcaaataacgtaagtgaccctaaggggcctcctgctaagattgcgaggctggagcagaatggctcgcccctggggagggggaggctgggctctaccggggctaaaatgcagggggtcccactcaaacattctggacatctcatgaaaacgaacctgaggaagggaactatgctgcctgtattctgcgttgtggaacactacgaaaacgcaattgagtacgattgcaaggaagagcacgcggagttcgttttggtgagaaaagacatgctgtttaaccagctcatagaaatggcattgcttagcctggggtattcgcattcgtctgcagcacaggccaaaggcctgatccaagtgggcaagtggaatcctgtgccgcttagctacgttacagatgcaccagacgcaaccgtagccgacatgctgcaggatgtgtatcacgtggtgaccctgaagatccagctccattcctgtcccaagttagaggacctccctccagagcaatggtctcacactactgtcaggaacgcccttaaagatttgttaaaggatatgaatcagagcagcctagctaaggagtgcccattgtcacagagtatgataagtagcatagtgaacagcacttattacgctaatgtgtccgctgctaagtgccaagaatttggacggtggtacaagcacttcaagaagacgaaggatatgatggtcgaaatggactcattgagcgagctcagtcagcagggcgcaaatcacgtgaacttcggccagcaacctgtgcccggtaacaccgctgaacaacccccatctcctgcccagctgtcacacgggagccagccctccgtgcggacacctctacccaatttgcatcccggactcgtaagcacccccatttctccccagctggtgaaccagcagctggtaatggcccagcttctgaaccagcaatatgctgtgaaccggctgttagctcagcagagtctaaatcaacagtatcttaaccaccctccacccgtgtctcgctccatgaataagcctctggaacagcaggtcagcacaaatactgaggtgtcttcagaaatctatcaatgggtgagggatgagctgaagagggctggtatttctcaagctgtgttcgcacgcgtcgccttcaatagaacccagggactgctctctgagatcctcagaaaggaggaagatccaaaaaccgcaagccagagcctactggttaatctgagggctatgcagaattttctacagctgcccgaagcagagcgggatcgcatttaccaggatgaacgggagagaagtcttaacgcggcaagcgcaatgggtccagcgcctcttatttccacacccccatctcgtcctccccaggtgaagaccgcaaccatcgccaccgaacgcaatgggaaaccagaaaataatactatgaacattaacgcctcgatatatgacgaaattcaacaagagatgaagagagcaaaggtcagccaggccctgtttgctaaggtggccgctactaagagccagggttggttatgcgagttgctccggtggaaagaagacccaagtcccgaaaaccgaaccctgtgggagaacctgagtatgatccgcagatttcttagtcttccacaaccagagcgcgacgctatttacgaacaggagagtaatgctgtgcatcatcatggtgaccggccaccccacattattcacgtgccagctgagcaaatccaacagcagcaacagcagcaacagcagcaacaacagcagcaacaggcacctcccccacctcaaccgcagcagcagccccagacgggtccaaggctccctcctcgccaacccacagtagcatcaccggcagagtctgatgaggaaaaccggcagaaaacccgccctcgcaccaaaattagcgtggaggccctggggatactgcagagctttatacaggatgtaggactgtatccggatgaagaggctattcagactctcagcgcgcagctcgatctgcccaagtacaccatcatcaaattcttccagaaccaacgctattacctgaaacatcacggcaagctcaaggacaactccggtctagaggtggacgtagccgaatacaaggaggaggaactactcaaggatttggaggaatccgtacaggataagaacacgaatactctgttcagtgtgaagctagaggaagaattgagcgttgagggtaacacggacatcaacacggacctgaaagattag

SEQ ID NO: 133995 - DNA, 7825 bp, Artificial Sequence
  derived and/or modified sequence
tttctcgctcgctcccgttccccggacgcggcggatgagccggccccgctggggaaggctccgggcggcggcgggcggccgggaggaggctgcgtgctcggggctggggctgcgagcggggtgattttgtattaaaatgaggaggaggaagaagaggcacccacagcggcagcggcggcggcggcggcagcagcagcaggagcagcggcggagagggctgcagcccgggcggacgcgcggagccgagcggggcacggcggcggcagcgacagcggccgggatgagtcaactaataatttaatgggggcagagacggcagcgaggggtagagctagcgagggagagagcgagagaagcagccccgtccggggactcgcgctcacactcacgcacacacacaaacacacacacacctctccctgtgccacccagcaacacccggcctcgtcacaacaacaacagccgcggccgccctctatcctgcccgggggcccagccgaaagccagggcgactctagaggacgctgcccgcccccctctttcatttcgggaaactcctgatcagttttgtcggggtttctgggtttcttttcccccaaagtcctagtgccattgtggtgctcgttgtttacctcggactctggacgagtgagagcttggcgactttttggggggagggggcggggagtttgtcgctgcctaggcggtggaggtggctgggggtgccttctgatcttcctcctcctccccctccccccgaacctcttctctcctcacttgctgggaccccagacgctcacagccccgcgtcaatgggcagggagagggtccttgcggctgttgtcagcgagggcagaatcaaaagtggcattttagtgcctttccggggcttttctcgcgaccccctgccccccaccctcgctgtcccccgctagatgccctcgttgggggtgcgaggctgtggggaaaagtttaaggtttgttaatattagtcgcgattgttggcgaggggggtgggggtgattggaagggaggcgaggtggccttcccaatgcgcgttattcggggttattgaagaataatattgcaagtgacagccagaagtagactttctgtcctcacaccgaagaacccgagtgagcaggagggagggagagacgcgaagagaccttttttcctttttggagaccttgtccgcagtgatttttttttttttaagagaatcctcagtcaccacgtcgtttccccagcaccatcacagtgtacagctcataacgggttttgctttgtttttacgatttccccccaacgaatcacttgtcagatcaattttatcttcttcctcctccctgcttcccactctcccctcctccccatcgcaaaccctgttctctgaggttagacattttacaaacccctatatgttggttttcgaattgtgattttttttttaaacccctttctcatggctactcttctagacgtttatttctgcccttcccccgcttaggggggcgggggtaggggaaaggaaaataatacaatttcaggggaagtcgccttcaggtctgctgcttttttatttttttttttttaattaaaaaaaaaaaggacatagaaaacatcagtcttgaacttctcttcaagaacccgggctgcaaaggaaatctcctttgtttttgttatttatgtgctgtcaagttttgaagtggtgatctttagacagtgactgagtatggatcatttgaacgaggcaactcaggggaaagaacattcagaaatgtctaacaatgtgagtgatccgaagggtccaccagccaagattgcccgcctggagcagaacgggagcccgctaggaagaggaaggcttgggagtacaggtgcaaaaatgcagggagtgcctttaaaacactcgggccatctgatgaaaaccaaccttaggaaaggaaccatgctgccagttttctgtgtggtggaacattatgaaaacgccattgaatatgattgcaaggaggagcatgcagaatttgtgctggtgagaaaggatatgcttttcaaccagctgatcgaaatggcattgctgtctctaggttattcacatagctctgctgcccaggccaaagggctaatccaggttggaaagtggaatccagttccactgtcttacgtgacagatgcccctgatgctacagtagcagatatgcttcaagatgtgtatcatgtggtcacattgaaaattcagttacacagttgccccaaactagaagacttgcctcccgaacaatggtcgcacaccacagtgaggaatgctctgaaggacttactgaaagatatgaatcagagttcattggccaaggagtgccccctttcacagagtatgatttcttccattgtgaacagtacttactatgcaaatgtctcagcagcaaaatgtcaagaatttggaaggtggtacaaacatttcaagaagacaaaagatatgatggttgaaatggatagtctttctgagctatcccagcaaggcgccaatcatgtcaattttggccagcaaccagttccagggaacacagccgagcagcctccatcccctgcgcagctctcccatggcagccagccctctgtccggacacctcttccaaacctgcaccctgggctcgtatcaacacctatcagtcctcaattggtcaaccagcagctggtgatggctcagctgctgaaccagcagtatgcagtgaatagacttttagcccagcagtccttaaaccaacaatacttgaaccaccctccccctgtcagtagatctatgaataagcctttggagcaacaggtttcgaccaacacagaggtgtcttccgaaatctaccagtgggtacgcgatgaactgaaacgagcaggaatctcccaggcggtatttgcacgtgtggcttttaacagaactcagggcttgctttcagaaatcctccgaaaggaagaggaccccaagactgcatcccagtctttgctggtaaaccttcgggctatgcagaatttcttgcagttaccggaagctgaaagagaccgaatataccaggacgaaagggaaaggagcttgaatgctgcctcggccatgggtcctgcccccctcatcagcacaccacccagccgtcctccccaggtgaaaacagctactattgccactgaaaggaatgggaaaccagagaacaataccatgaacattaatgcttccatttatgatgagattcagcaggaaatgaagcgtgctaaagtgtctcaagcactgtttgcaaaggttgcagcaaccaaaagccagggatggttgtgcgagctgttacgctggaaagaagatccttctccagaaaacagaaccctgtgggagaacctctccatgatccgaaggttcctcagtcttcctcagccagaacgtgatgccatttatgaacaggagagcaacgcggtgcatcaccatggcgacaggccgccccacattatccatgttccagcagagcagattcagcaacagcagcagcaacagcaacagcagcagcagcagcagcaggcaccgccgcctccacagccacagcagcagccacagacaggccctcggctccccccacggcaacccacggtggcctctccagcagagtcagatgaggaaaaccgacagaagacccggccacgaacaaaaatttcagtggaagccttgggaatcctccagagtttcatacaagacgtgggcctgtaccctgacgaagaggccatccagactctgtctgcccagctcgaccttcccaagtacaccatcatcaagttctttcagaaccagcggtactatctcaagcaccacggcaaactgaaggacaattccggtttagaggtcgatgtggcagaatataaagaagaggagctgctgaaggatttggaagagagtgtccaagataaaaatactaacacccttttttcagtgaaactagaagaagagctgtcagtggaaggaaacacagacattaatactgatttgaaagactgagataaaagtatttgtttcgttcaacagtgccactggtatttactaacaaaatgaaaagtccaccttgtcttctctcagaaaacctttgttgttcattgtttggccaatgaatcttcaaaaacttgcacaaacagaaaagttggaaaaggataatacagactgcactaaatgttttcctctgttttacaaactgcttggcagccccaggtgaagcatcaaggattgtttggtattaaaatttgtgttcacgggatgcaccaaagtgtgtaccccgtaagcatgaaaccagtgttttttgttttttttttagttcttattccggagcctcaaacaagcattataccttctgtgattatgatttcctctcctataattatttctgtagcactccacactgatctttggaaacttgccccttatttaaaaaaaaaaaagaaaaaaaagagtttgttactctattgtatgttacaaaagaactatagactgtggaatgcagtttaaagatgacatatgccaacaaatgccttgtattatatggcactgccgtaattcaaatttgtttttattttggaaataaaagttcactgtacttttttttcattctcattgttacatgattttttaaaaaaaggaaaagaaaatgtgaaacacaatttagtcctcattatttatttgtagatcctgcagcatcatgttgtaattaattttttggaagtttccgttaaatgtaatattgcttctcttgttaccatactgattcttttctatttataaatgtattttgatgggcagtaaaacaaagtgtcttaaaagttttaaatagagaaaatgtgctttacacagttgcctataaaaagtgctctatgttatccaagcaattcatactataagcttcactcttattgttgtatgcaatttttactatcatgcaaataagcttaggtaaataaaactaatagatcaccttagaaaattatgcaattaatgtgaaaataattgatgtttgcaatgtgtcttcctttggtttacaatcaattttaaagctacatctgtataaaatttctgtataaaggtgtatttcttttttatgagtttatggctatgaaaacagctattttgttacagctggctgtttttataagtgtatcacaattttctttatgcagaaatgttctgactaggagtggttattgactgtaactacacaattaaaattgtttgtatcgtatgacatggtagggtttgtctgcttatgtgaagtaactaaaggagtcaaaggatggccctctcatttaggtgcatgttaataacttgttatttcactgattttaaaaagagcaattgacaagttacttgaaacactgtaaatttaaatcacaaacacatgctcatttttaaataggtatgaaatttcacaatgaaaataacctgtttggttaacattttgcttaataagtagagataggatggtcaaaagactctccgacaaaaacaaatccagtctctagcagttatgttgttagaatggattcatctgtgcttatttcacaatacttcatttatagcaatgcttttccttaagctaatgtataaatatttctaaaggccattaatagtaacaaaataagtaggggaaaaaatggaccttctgtataaaaaccccttagcttttttttttcacaagttataagtggaataagttaataactgagctcgtaagtgtatctcataactataagagctacatgaagaaaataggaataacacacctggtatttaaacacaatcttcaaaattcttgcaacattaaacatagtaaaatgccagaatataaaatgaggtgtgctaatggtcacaggattgaggccagcattacagtttggggtgatttttcttttatttgctccctcactttgtttcctagatgctagtaggggtatctgggttgcttgagataccattttgcaattgccccttctctttctgcctaccatcttctcaggccctgatgagcttattggtaggcaactgggctgctttagtgttgaacttgtactttagaaactgaagtggaatcattgaaaactttcaataaagctttaaagttccatttacttttgaagcacagctaagctcctctgaaggcagctggtttgttgcaaacttaaaattgtactgaaaagttgccactttttatttagtaagaaaacaaacattctggctcactagagttcagaaaagtaataatttgagccaaaggaatttgaattaagaaaatagaaactaggtttcatgtatttaaaaaataggaaataaaatagaaactcaaatgccatgaagttatcttcctcttccttatatcccctaagtttgggttgcaaataactttccaattcctaataacctaaattattttgaaatagtgttttcagtgaaatgatgaatgtttgaatgtttgtttggtaatcaacataacaatgctaacaaaattcccacttagattttttaacttttaaaagtcagcgtggttttgataatttgatattttaaatgcccacacatacacacacacacacacacacacacacacaagcacatgttaataaactgataggatggagtgagcaaaattgttttcagggaagatggcacattttagaaaagacttgcccagatgatcttccatattgctcccccaatgtcatttatcgctcatgccaatcctcctcttgttacctgtggctatggtaaaattcctttaacaagcttcattgtgtccaagtatttcagagacttttaaaagctgggcatgacatagcgttttgtgctgttaagaccttagcagagtcaggtagtttacgggtaatattcaaccttgtgcatctgaatctgtcatggattcccttcactcagcactttgccactaatttgtattacactctgtggccatataatacttgcacattatgcaaaaaaaaatgttgatagtatctccttgccacacaatatgcagagttgacaacctttgaaaaccaaggtaactaatatgtatgtcctagttgtgtggcgcttggtaacaaagtctgtacatattatgtataaaatgtgtattggttagcatttagtactaagaaattctgagtttaaaataagtgatttttttcaaagtagcgatatctatatctgtgtttatctaaaaatactggcttgaatagaaaacattctcagatgattcaagattgagtaaaaatgagaatcccatacattccattattaaattctgccctattcccaattgttagcatctggctgatattaaggtctttgattgtcacaatattctcaataaatgagacattctgaactgcctggtgatattttcaaaaagagcaattaaaatgtgtattccctctaatacagctgatagaactgttgtgttaaagcaagttggaaatttgcatgatagtgtggaaaccaatggaggtccaaaatattaatcatatctaaaatatcagaaaatatcaatactagtcttctttatgcatatttttgactttttaagagggcttatgaattcaatgtttcttctgaggcaatccttttaatgtaaatactaaatacttgcatgtcttttgacaaaggctaaactacaatctattaatatgcacatttttgataaaatataaagtaccctaattaaagaaattgtggtagaaggtgtatgtcctgaatactatacctgtttaacaataccaaatgttaaataaaaatagtttgaaattaatgtttaaaagatga

SEQ ID NO: 133996 - DNA, 2968 bp, Artificial Sequence
  derived and/or modified sequence
agagctatgacctgatttgtgacgcaccctcagaactgcagtaatggtccagctgcttcacaggcaactggtaaccacctcatttggggatgtttctgccttgctagcagtgccagagagaacttcatcattgtcacctcatcaaagactactttttcagacatctcctgtagggctagattcagagagcagcttctgatatttggagggtgatctttagacagtgactgagtatggatcatttgaacgaggcaactcaggggaaagaacattcagaaatgtctaacaatgtgagtgatccgaagggtccaccagccaagattgcccgcctggagcagaacgggagcccgctaggaagaggaaggcttgggagtacaggtgcaaaaatgcagggagtgcctttaaaacactcgggccatctgatgaaaaccaaccttaggaaaggaaccatgctgccagttttctgtgtggtggaacattatgaaaacgccattgaatatgattgcaaggaggagcatgcagaatttgtgctggtgagaaaggatatgcttttcaaccagctgatcgaaatggcattgctgtctctaggttattcacatagctctgctgcccaggccaaagggctaatccaggttggaaagtggaatccagttccactgtcttacgtgacagatgcccctgatgctacagtagcagatatgcttcaagatgtgtatcatgtggtcacattgaaaattcagttacacagttgccccaaactagaagacttgcctcccgaacaatggtcgcacaccacagtgaggaatgctctgaaggacttactgaaagatatgaatcagagttcattggccaaggagtgccccctttcacagagtatgatttcttccattgtgaacagtacttactatgcaaatgtctcagcagcaaaatgtcaagaatttggaaggtggtacaaacatttcaagaagacaaaagatatgatggttgaaatggatagtctttctgagctatcccagcaaggcgccaatcatgtcaattttggccagcaaccagttccagggaacacagccgagcagcctccatcccctgcgcagctctcccatggcagccagccctctgtccggacacctcttccaaacctgcaccctgggctcgtatcaacacctatcagtcctcaattggtcaaccagcagctggtgatggctcagctgctgaaccagcagtatgcagtgaatagacttttagcccagcagtccttaaaccaacaatacttgaaccaccctccccctgtcagtagatctatgaataagcctttggagcaacaggtttcgaccaacacagaggtgtcttccgaaatctaccagtgggtacgcgatgaactgaaacgagcaggaatctcccaggcggtatttgcacgtgtggcttttaacagaactcagggcttgctttcagaaatcctccgaaaggaagaggaccccaagactgcatcccagtctttgctggtaaaccttcgggctatgcagaatttcttgcagttaccggaagctgaaagagaccgaatataccaggacgaaagggaaaggagcttgaatgctgcctcggccatgggtcctgcccccctcatcagcacaccacccagccgtcctccccaggtgaaaacagctactattgccactgaaaggaatgggaaaccagagaacaataccatgaacattaatgcttccatttatgatgagattcagcaggaaatgaagcgtgctaaagtgtctcaagcactgtttgcaaaggttgcagcaaccaaaagccagggatggttgtgcgagctgttacgctggaaagaagatccttctccagaaaacagaaccctgtgggagaacctctccatgatccgaaggttcctcagtcttcctcagccagaacgtgatgccatttatgaacaggagagcaacgcggtgcatcaccatggcgacaggccgccccacattatccatgttccagcagagcagattcagcaacagcagcagcaacagcaacagcagcagcagcagcagcaggcaccgccgcctccacagccacagcagcagccacagacaggccctcggctccccccacggcaacccacggtggcctctccagcagagtcagatgaggaaaaccgacagaagacccggccacgaacaaaaatttcagtggaagccttgggaatcctccagagtttcatacaagacgtgggcctgtaccctgacgaagaggccatccagactctgtctgcccagctcgaccttcccaagtacaccatcatcaagttctttcagaaccagcggtactatctcaagcaccacggcaaactgaaggacaattccggtttagaggtcgatgtggcagaatataaagaagaggagctgctgaaggatttggaagagagtgtccaagataaaaatactaacacccttttttcagtgaaactagaagaagagctgtcagtggaaggaaacacagacattaatactgatttgaaagactgagataaaagtatttgtttcgttcaacagtgccactggtatttactaacaaaatgaaaagtccaccttgtcttctctcagaaaacctttgttgttcattgtttggccaatgaatcttcaaaaacttgcacaaacagaaaagttggaaaaggataatacagactgcactaaatgttttcctctgttttacaaactgcttggcagccccaggtgaagcatcaaggattgtttggtattaaaatttgtgttcacgggatgcaccaaagtgtgtaccccgtaagcatgaaaccagtgttttttgttttttttttagttcttattccggagcctcaaacaagcattataccttctgtgattatgatttcctctcctataattatttctgtagcactccacactgatctttggaaacttgccccttatttaaaaaaaaaaaagaaaaaaaa

SEQ ID NO: 133997 - DNA, 2292 bp, Artificial Sequence
  derived and/or modified sequence
atggaccacctgaacgaggccacccagggcaaggagcacagcgagatgagcaacaacgtgagcgaccccaagggcccccccgccaagatcgccagactggagcagaacggcagccccctgggcagaggcagactgggcagcaccggcgccaagatgcagggcgtgcccctgaagcacagcggccacctgatgaagaccaacctgagaaagggcaccatgctgcccgtgttctgcgtggtggagcactacgagaacgccatcgagtacgactgcaaggaggagcacgccgagttcgtgctggtgagaaaggacatgctgttcaaccagctgatcgagatggccctgctgagcctgggctacagccacagcagcgccgcccaggccaagggcctgatccaggtgggcaagtggaaccccgtgcccctgagctacgtgaccgacgcccccgacgccaccgtggccgacatgctgcaggacgtgtaccacgtggtgaccctgaagatccagctgcacagctgccccaagctggaggacctgccccccgagcagtggagccacaccaccgtgagaaacgccctgaaggacctgctgaaggacatgaaccagagcagcctggccaaggagtgccccctgagccagagcatgatcagcagcatcgtgaacagcacctactacgccaacgtgagcgccgccaagtgccaggagttcggcagatggtacaagcacttcaagaagaccaaggacatgatggtggagatggacagcctgagcgagctgagccagcagggcgccaaccacgtgaacttcggccagcagcccgtgcccggcaacaccgccgagcagccccccagccccgcccagctgagccacggcagccagcccagcgtgagaacccccctgcccaacctgcaccccggcctggtgagcacccccatcagcccccagctggtgaaccagcagctggtgatggcccagctgctgaaccagcagtacgccgtgaacagactgctggcccagcagagcctgaaccagcagtacctgaaccaccccccccccgtgagcagaagcatgaacaagcccctggagcagcaggtgagcaccaacaccgaggtgagcagcgagatctaccagtgggtgagagacgagctgaagagagccggcatcagccaggccgtgttcgccagagtggccttcaacagaacccagggcctgctgagcgagatcctgagaaaggaggaggaccccaagaccgccagccagagcctgctggtgaacctgagagccatgcagaacttcctgcagctgcccgaggccgagagagacagaatctaccaggacgagagagagagaagcctgaacgccgccagcgccatgggccccgcccccctgatcagcaccccccccagcagacccccccaggtgaagaccgccaccatcgccaccgagagaaacggcaagcccgagaacaacaccatgaacatcaacgccagcatctacgacgagatccagcaggagatgaagagagccaaggtgagccaggccctgttcgccaaggtggccgccaccaagagccagggctggctgtgcgagctgctgagatggaaggaggaccccagccccgagaacagaaccctgtgggagaacctgagcatgatcagaagattcctgagcctgccccagcccgagagagacgccatctacgagcaggagagcaacgccgtgcaccaccacggcgacagacccccccacatcatccacgtgcccgccgagcagatccagcagcagcagcagcagcagcagcagcagcagcagcagcagcaggcccccccccccccccagccccagcagcagccccagaccggccccagactgccccccagacagcccaccgtggccagccccgccgagagcgacgaggagaacagacagaagaccagacccagaaccaagatcagcgtggaggccctgggcatcctgcagagcttcatccaggacgtgggcctgtaccccgacgaggaggccatccagaccctgagcgcccagctggacctgcccaagtacaccatcatcaagttcttccagaaccagagatactacctgaagcaccacggcaagctgaaggacaacagcggcctggaggtggacgtggccgagtacaaggaggaggagctgctgaaggacctggaggagagcgtgcaggacaagaacaccaacaccctgttcagcgtgaagctggaggaggagctgagcgtggagggcaacaccgacatcaacaccgacctgaaggactag

SEQ ID NO: 133998 - protein, 1903 aa, Artificial Sequence
  derived and/or modified sequence
MAAGTWAAAAAAAAADYFVLVAFGPHPRGSGEGQGQILQRFPEKDWEDNPFPQGIELFCQPSGWQLCPERNPPTFFVAVLTDINSERHYCACLTFWEPAEPSQETTRVEDATEREEEGDEGGQTHLSPTAPAPSAQLFAPKTLVLVSRLDHTEVFRNSLGLIYAIHVEGLNVCLENVIGNLLTCTVPLAGGSQRTISLGAGDRQVIQTPLADSLPVSRCSVALLFRQLGITNVLSLFCAALTEHKVLFLSRSYQRLADACRGLLALLFPLRYSFTYVPILPAQLLEVLSTPTPFIIGVNAAFQAETQELLDVIVADLDGGTVTIPECVHIPPLPEPLQSQTHSVLSMVLDPELELADLAFPPPTTSTSSLKMQDKELRAVFLRLFAQLLQGYRWCLHVVRIHPEPVIRFHKAAFLGQRGLVEDDFLMKVLEGMAFAGFVSERGVPYRPTDLFDELVAHEVARMRADENHPQRVLRHVQELAEQLYKNENPYPAVAMHKVQRPGESSHLRRVPRPFPRLDEGTVQWIVDQAAAKMQGAPPAVKAERRTTVPSGPPMTAILERCSGLHVNSARRLEVVRNCISYVFEGKMLEAKKLLPAVLRALKGRAARRCLAQELHLHVQQNRAVLDHQQFDFVVRMMNCCLQDCTSLDEHGIAAALLPLVTAFCRKLSPGVTQFAYSCVQEHVVWSTPQFWEAMFYGDVQTHIRALYLEPTEDLAPAQEVGEAPSQEDERSALDVASEQRRLWPTLSREKQQELVQKEESTVFSQAIHYANRMSYLLLPLDSSKSRLLRERAGLGDLESASNSLVTNSMAGSVAESYDTESGFEDAETCDVAGAVVRFINRFVDKVCTESGVTSDHLKGLHVMVPDIVQMHIETLEAVQRESRRLPPIQKPKLLRPRLLPGEECVLDGLRVYLLPDGREEGAGGSAGGPALLPAEGAVFLTTYRVIFTGMPTDPLVGEQVVVRSFPVAALTKEKRISVQTPVDQLLQDGLQLRSCTFQLLKMAFDEEVGSDSAELFRKQLHKLRYPPDIRATFAFTLGSAHTPGRPPRVTKDKGPSLRTLSRNLVKNAKKTIGRQHVTRKKYNPPSWEHRGQPPPEDQEDEISVSEELEPSTLTPSSALKPSDRMTMSSLVERACCRDYQRLGLGTLSSSLSRAKSEPFRISPVNRMYAICRSYPGLLIVPQSVQDNALQRVSRCYRQNRFPVVCWRSGRSKAVLLRSGGLHGKGVVGLFKAQNAPSPGQSQADSSSLEQEKYLQAVVSSMPRYADASGRNTLSGFSSAHMGSHVPSPRARVTTLSNPMAASASRRTAPRGKWGSVRTSGRSSGLGTDVGSRLAGRDALAPPQANGGPPDPGFLRPQRAALYILGDKAQLKGVRSDPLQQWELVPIEVFEARQVKASFKKLLKACVPGCPAAEPSPASFLRSLEDSEWLIQIHKLLQVSVLVVELLDSGSSVLVGLEDGWDITTQVVSLVQLLSDPFYRTLEGFRLLVEKEWLSFGHRFSHRGAHTLAGQSSGFTPVFLQFLDCVHQVHLQFPMEFEFSQFYLKFLGYHHVSRRFRTFLLDSDYERIELGLLYEEKGERRGQVPCRSVWEYVDRLSKRTPVFHNYMYAPEDAEVLRPYSNVSNLKVWDFYTEETLAEGPPYDWELAQGPPEPPEEERSDGGAPQSRRRVVWPCYDSCPRAQPDAISRLLEELQRLETELGQPAERWKDTWDRVKAAQRLEGRPDGRGTPSSLLVSTAPHHRRSLGVYLQEGPVGSTLSLSLDSDQSSGSTTSGSRQAARRSTSTLYSQFQTAESENRSYEGTLYKKGAFMKPWKARWFVLDKTKHQLRYYDHRVDTECKGVIDLAEVEAVAPGTPTMGAPKTVDEKAFFDVKTTRRVYNFCAQDVPSAQQWVDRIQSCLSDA

SEQ ID NO: 133999 - protein, 1893 aa, Artificial Sequence
  derived and/or modified sequence
MARLADYFVLVAFGPHPRGSGEGQGQILQRFPEKDWEDNPFPQGIELFCQPSGWQLCPERNPPTFFVAVLTDINSERHYCACLTFWEPAEPSQETTRVEDATEREEEGDEGGQTHLSPTAPAPSAQLFAPKTLVLVSRLDHTEVFRNSLGLIYAIHVEGLNVCLENVIGNLLTCTVPLAGGSQRTISLGAGDRQVIQTPLADSLPVSRCSVALLFRQLGITNVLSLFCAALTEHKVLFLSRSYQRLADACRGLLALLFPLRYSFTYVPILPAQLLEVLSTPTPFIIGVNAAFQAETQELLDVIVADLDGGTVTIPECVHIPPLPEPLQSQTHSVLSMVLDPELELADLAFPPPTTSTSSLKMQDKELRAVFLRLFAQLLQGYRWCLHVVRIHPEPVIRFHKAAFLGQRGLVEDDFLMKVLEGMAFAGFVSERGVPYRPTDLFDELVAHEVARMRADENHPQRVLRHVQELAEQLYKNENPYPAVAMHKVQRPGESSHLRRVPRPFPRLDEGTVQWIVDQAAAKMQGAPPAVKAERRTTVPSGPPMTAILERCSGLHVNSARRLEVVRNCISYVFEGKMLEAKKLLPAVLRALKGRAARRCLAQELHLHVQQNRAVLDHQQFDFVVRMMNCCLQDCTSLDEHGIAAALLPLVTAFCRKLSPGVTQFAYSCVQEHVVWSTPQFWEAMFYGDVQTHIRALYLEPTEDLAPAQEVGEAPSQEDERSALDVASEQRRLWPTLSREKQQELVQKEESTVFSQAIHYANRMSYLLLPLDSSKSRLLRERAGLGDLESASNSLVTNSMAGSVAESYDTESGFEDAETCDVAGAVVRFINRFVDKVCTESGVTSDHLKGLHVMVPDIVQMHIETLEAVQRESRRLPPIQKPKLLRPRLLPGEECVLDGLRVYLLPDGREEGAGGSAGGPALLPAEGAVFLTTYRVIFTGMPTDPLVGEQVVVRSFPVAALTKEKRISVQTPVDQLLQDGLQLRSCTFQLLKMAFDEEVGSDSAELFRKQLHKLRYPPDIRATFAFTLGSAHTPGRPPRVTKDKGPSLRTLSRNLVKNAKKTIGRQHVTRKKYNPPSWEHRGQPPPEDQEDEISVSEELEPSTLTPSSALKPSDRMTMSSLVERACCRDYQRLGLGTLSSSLSRAKSEPFRISPVNRMYAICRSYPGLLIVPQSVQDNALQRVSRCYRQNRFPVVCWRSGRSKAVLLRSGGLHGKGVVGLFKAQNAPSPGQSQADSSSLEQEKYLQAVVSSMPRYADASGRNTLSGFSSAHMGSHVPSPRARVTTLSNPMAASASRRTAPRGKWGSVRTSGRSSGLGTDVGSRLAGRDALAPPQANGGPPDPGFLRPQRAALYILGDKAQLKGVRSDPLQQWELVPIEVFEARQVKASFKKLLKACVPGCPAAEPSPASFLRSLEDSEWLIQIHKLLQVSVLVVELLDSGSSVLVGLEDGWDITTQVVSLVQLLSDPFYRTLEGFRLLVEKEWLSFGHRFSHRGAHTLAGQSSGFTPVFLQFLDCVHQVHLQFPMEFEFSQFYLKFLGYHHVSRRFRTFLLDSDYERIELGLLYEEKGERRGQVPCRSVWEYVDRLSKRTPVFHNYMYAPEDAEVLRPYSNVSNLKVWDFYTEETLAEGPPYDWELAQGPPEPPEEERSDGGAPQSRRRVVWPCYDSCPRAQPDAISRLLEELQRLETELGQPAERWKDTWDRVKAAQRLEGRPDGRGTPSSLLVSTAPHHRRSLGVYLQEGPVGSTLSLSLDSDQSSGSTTSGSRQAARRSTSTLYSQFQTAESENRSYEGTLYKKGAFMKPWKARWFVLDKTKHQLRYYDHRVDTECKGVIDLAEVEAVAPGTPTMGAPKTVDEKAFFDVKTTRRVYNFCAQDVPSAQQWVDRIQSCLSDA

SEQ ID NO: 134000 - DNA, 5712 bp, Artificial Sequence
  derived and/or modified sequence
atggccgccgggacctgggcagcagcagccgccgccgccgcggccgattatttcgtcttggttgcgtttggaccacatcctcgtgggtctggcgagggccaaggccagatccttcagaggtttccagagaaagactgggaagataatccctttcctcagggaattgagcttttctgccagccatccggctggcagctctgtccagaaaggaaccccccgactttttttgtggcggtgttaaccgacatcaattcagaaagacattactgcgcctgtctaaccttctgggagccagcagagccaagtcaagaaaccacccgagtggaggacgcgaccgaacgcgaagaggagggcgatgagggtggacaaactcacctgagtccgaccgcacctgctccttccgcccagctgtttgcccctaagactcttgttctggtatcccggctcgatcatacagaggtgttccggaatagcctgggactgatctacgccatccacgttgagggtctcaatgtgtgcctggagaacgtcataggaaatctccttacctgcactgtgcccctggccggggggtctcagcgtacaatcagcttgggggctggggatcgtcaggtcatccaaacacccctggccgattcactgccagtttcacgctgctcagtcgcgttactgttcagacaattgggcatcaccaacgtgctgagcctgttctgtgccgcgctgacagagcacaaagtgctctttttgtcaaggtcctaccagcggctggcagatgcatgccggggtctcctagccctcttgtttcctcttagatactctttcacttacgttcccatactgcccgctcagctgctcgaagtgctgagcacacctactcctttcatcataggggtgaacgccgcctttcaggctgagacacaggagttacttgacgtcatcgttgccgatttggacggaggaacagtgactattcctgagtgtgtgcatatccccccacttcccgaacctctccagtctcagacacatagtgtcctcagtatggtgttggatcccgagctcgagctcgcggacctcgcattcccacctccaaccacttccacaagttctctaaaaatgcaggataaggagctgcgtgctgttttcctacggctgtttgctcagctccttcagggctaccgttggtgccttcacgtcgtacgcattcatccggaacctgttattaggttccacaaagccgcatttctgggacagaggggtctggtagaggatgacttcctgatgaaagtactcgaaggaatggcctttgcaggcttcgtcagcgaaagaggcgtgccatatcgacctaccgaccttttcgatgagttggttgctcacgaggtcgcccgtatgagagccgatgaaaaccacccccagagagtcctgcgccatgttcaggagctagctgaacaattgtataagaacgagaacccataccccgcagttgcaatgcacaaggtccagcggcccggcgagagttctcacctgcgaagagttcctaggccctttccgcgactggatgagggcaccgtgcagtggatcgtggatcaggcagcagccaaaatgcaaggagccccccctgcagtaaaagccgagaggcgcaccactgtgcccagcggaccccccatgaccgcgatcttggagcgctgtagcggactgcatgttaatagtgcaaggagactcgaagttgtgcgcaattgcatttcctacgtgttcgagggcaagatgctggaggctaagaaattgctccctgcagttctccgcgcgctgaagggacgcgctgccagacggtgtctggcacaggaactgcacctgcacgtccagcagaatcgcgcagtcctcgatcatcagcaattcgactttgtggtccggatgatgaattgttgcctacaggattgcacgtcactggacgaacatggaatcgctgccgcactgctccccttagtgacagcgttttgtaggaagctctcgcccggagttacccagtttgcctattcatgcgttcaggagcatgtcgtctggagcactccacaattttgggaggcaatgttttatggggatgtgcagacacatataagggccctttacctggagcccacggaggatttagctcccgcgcaagaggttggagaggcgcccagccaggaggacgaaagaagtgcactggacgtcgcatctgagcaacgtaggctgtggcctacactcagtagggagaagcagcaggagctggtgcagaaggaggaatctaccgtgttctcgcaggcaatacattacgcaaaccgaatgagctatctcctgctcccccttgattcttccaagagcaggttactgcgcgaaagggccgggctaggtgacttagagagtgcttccaattctctggtaaccaattctatggccgggtccgttgccgagagttacgacacagagtcaggatttgaagacgcagaaacttgcgatgtggccggagctgtcgtgagattcatcaataggtttgtagataaggtatgcacagaatccggggtgacatcagatcatctaaaaggtcttcacgtgatggtcccagatatcgtgcagatgcatatcgagacactggaagccgtccagcgcgagtctaggcgtctgcctcccatccagaaacctaaattgttgcgtccaaggctattacccggagaagaatgtgtgctcgacggtctccgcgtatacctgctgccggacggccgggaggagggcgcggggggctctgctgggggcccagcactgctgcccgccgagggtgcggtcttcctgaccacttacagggtaatcttcaccggaatgcctaccgaccctctcgtcggggagcaggtcgtggttagaagcttccctgttgctgctctcacaaaagaaaaacggatctctgtacagacccccgtggatcagttactgcaggacggtctgcaactacggagttgtacattccaactgctgaaaatggcgtttgacgaagaggtggggtctgactcagccgagctgttccgtaagcaactacacaaactgagataccctcccgatatcagggccacattcgcctttactctgggcagcgctcatactccaggccgaccacctcgggtgaccaaggataagggtccctcgctgaggaccctgagcagaaacttagtgaaaaacgcaaaaaagacaataggacgtcagcacgtgacgcgcaaaaaatacaatccacctagctgggagcatagaggccagcctccacccgaggaccaagaggacgagatttcagtgtccgaggaactggaaccttcaacactcacgccatcctctgctcttaagcctagtgatcgtatgaccatgtcttctcttgttgaacgcgcgtgttgtcgagactaccaaaggctcggcctgggaactttgtcttcaagtttaagtagggcaaaatcagaacccttcagaattagccccgtcaaccgaatgtacgctatctgccgatcctacccagggcttctgatcgtgcctcagagcgtgcaagacaatgcactacagagggttagtaggtgctaccgccaaaaccgcttccccgtagtgtgctggcgctccggcaggagcaaagcagtcctcctcagaagcgggggccttcatggtaagggtgttgtcggactgtttaaggcacaaaatgccccatcgccgggacaatcccaggctgacagctcaagcctggagcaagaaaagtacctgcaggcagtggtctccagcatgcctaggtatgctgacgcgtccgggcgaaacaccctgagcggtttctctagtgcccacatgggaagccatgtgcccagcccaagagcacgggttaccaccctcagcaaccctatggcagcctcggcgagccgtcgaaccgcaccccggggaaaatggggtagtgtcaggacgtctggcagaagctctggactgggaaccgatgtgggctctaggttggctggacgagacgccttggcgccgcctcaagcgaacggagggcctcccgaccctggcttccttaggccccagagagcagccctgtacattctgggtgataaggcccagctcaaaggcgtgagatccgatccactccaacaatgggagctggtcccaatagaggttttcgaagcacgccaggtcaaagcctcattcaagaagctccttaaggcatgcgtccctggttgcccagcagcagagcctagtcccgctagcttcctgagatctctggaagattctgaatggctcattcaaatccataaactgcttcaggttagcgtgttagtggtggaattactggattcggggtcttccgtgttggtaggcttggaggatggctgggatattaccacccaggtcgtgtccctggtacagctcttgtcggatcctttttaccggactttggagggctttaggttgttagtggagaaagaatggctgtccttcggtcaccgcttttcacacagaggcgcccacactctcgccggccagtcttctggattcacccctgtgttcctccagtttttggattgtgtccaccaggtccacttgcagttccccatggagtttgaattctctcagttttatctgaaatttctggggtaccaccatgttagtcggcgtttccgtaccttcttgctggactctgactatgagcgcatcgaattaggcctgctgtatgaagagaaaggagagcgcagagggcaggtgccttgcaggtccgtgtgggagtacgtagatagattgagcaagcgaacccccgtgttccacaattacatgtatgcaccagaggatgccgaagtcctgcgaccgtattcaaatgtgagcaacctgaaggtgtgggatttttatacagaggagaccttggcagaaggacccccttacgactgggagctcgcacaagggcctccagagcctcccgaggaggagcgcagcgatggtggggcaccacagtccaggcgaagggtggtctggccttgttatgacagctgtccacgggctcagcccgacgctatatccagactgctggaagagcttcagcggctggagaccgaactgggacaacccgctgaaagatggaaggacacatgggaccgggtgaaggcagcccagaggcttgaagggcggcctgacggcaggggcaccccgtctagcctgctggtgtctacagcccctcaccatcgcaggtcattgggcgtatacctgcaggaggggcccgtcggtagtacactgtctttatcgctggacagtgaccagtccagtgggtccaccacaagcggatcaagacaggctgcgagacggagtacctccaccctctattctcagtttcagaccgccgaatctgaaaacagatcttatgaaggcacattatacaaaaaaggtgccttcatgaagccgtggaaggccagatggtttgtgttggacaagacaaaacaccagctcaggtactatgatcaccgagtcgataccgagtgcaaaggagtcatcgatctcgcagaggtggaagccgttgcacccggcaccccgactatgggggctccaaagaccgttgacgaaaaagccttttttgatgtgaagaccactaggcgcgtgtacaacttctgtgcccaagatgtgcctagcgcccagcaatgggtggacagaattcagagctgcctgagtgacgcctag

SEQ ID NO: 134001 - DNA, 5682 bp, Artificial Sequence
  derived and/or modified sequence
atggctaggttggctgactattttgttctggtggccttcggtccccacccgagggggagcggggagggccaggggcagatcctgcaacgcttccctgagaaagactgggaggacaatcccttccctcagggaattgaattgttttgtcagccaagtggttggcaactttgtccggaacggaaccctccaaccttcttcgtcgctgtcctcacagacataaattcagagcgccactattgtgcgtgtctgacattttgggagccggcagagcctagccaagagaccacgcgtgtcgaggacgcgaccgaacgtgaggaggagggggatgaagggggtcagacacatctttccccaaccgcgccggcaccatccgcccagctgttcgctcctaagaccctggtgttggtctctagactggaccacaccgaagtcttccggaacagcctgggccttatttacgctatacacgtagaggggctcaacgtttgtctagaaaacgttattgggaacctgcttacgtgcaccgtccccttagctggcgggtcacagcgcaccatatcactcggtgccggggatcggcaggttatccaaactcctttggctgattcgctccccgtatctcgttgcagcgttgccctactcttcaggcagcttggtatcaccaacgtgctgagcctcttctgtgccgcccttacagaacacaaggtattatttctcagcaggtcctaccagagactggcggatgcctgtagagggcttctcgctctgctgtttccactgcgctattccttcacctatgtgcccattcttcctgcccagctgctggaggtactgagtacccctacacctttcatcatcggggtgaacgccgcctttcaggccgaaactcaagaactgttagatgtaattgtggcggatctggatggtgggaccgtgacgattcccgaatgcgtccacatcccaccactgccagagccacttcagtcacagacacactccgtgttatctatggtgctcgaccccgagcttgaactggcggaccttgcattccctccccccacaacttcaacgagcagcctgaagatgcaggataaggaactccgggccgtgtttcttaggctgttcgcccagctcctgcagggctaccggtggtgccttcatgtagtcaggatccaccctgaacccgttattaggttccacaaggccgcattcctaggccagcggggactggtcgaagacgattttctaatgaaagtgcttgagggtatggcattcgctgggtttgtgagtgagcgcggggttccttacaggcctactgacctgttcgacgaactcgtcgcccacgaagtagccagaatgcgagccgatgagaatcatcctcagagagtactcaggcacgtgcaagaactagccgagcaactttacaaaaacgaaaacccatatcccgctgtggctatgcacaaagttcagcggccgggagaatcaagtcacctgagacgggttcctaggccgttcccccggttggatgaagggactgtccagtggatcgtggaccaggccgccgctaaaatgcagggagctccccctgctgtcaaggcagagaggcgcactaccgtcccttccggtcctcccatgaccgctatcctggaacgatgctcagggctgcacgttaattctgcgcggcggttagaagttgtgcgaaattgcatttcttacgtctttgaggggaagatgctcgaggcgaaaaagctgctaccagccgtcctgcgagctctcaaaggacgtgctgcccggcgatgcctggcgcaggaactccatcttcatgtacagcagaacagagcagtgctagatcaccagcaattcgacttcgtcgtccgcatgatgaactgttgtctccaggattgcacgtcattggacgagcatgggattgctgccgctctccttccgctcgtaaccgccttctgcagaaagttgagccctggagtcacacaattcgcctacagttgtgtccaggagcatgtggtgtggagtacaccccaattctgggaggctatgttctatggcgatgtccaaacccacatccgagcactgtatctggaacccaccgaggatttggctcctgcacaggaggttggcgaggccccttctcaggaagatgagcggtctgccttggacgttgcttccgaacagagacgtctctggcccaccctttcaagggaaaaacaacaagaattagttcaaaaagaagaatctacagtgttttctcaggcaattcactacgccaacagaatgtcatacctcctgttaccccttgactcaagcaaatcgcgtctattgagggagagggcaggactcggcgaccttgagagtgcgtcaaattctctagtgacaaatagtatggcaggctctgttgccgagtcctacgatactgaaagcggcttcgaagatgctgagacatgtgacgtagccggagccgtcgtgcggtttataaatcgctttgtagacaaggtctgtacggaaagcggggtgacctccgaccacttgaagggcttacacgtcatggtcccagatatcgtccagatgcatatcgaaactctcgaggcagtccagcgcgaaagccggcgtctaccacccattcagaaaccgaagttgttgagaccgaggctcctgcctggggaggaatgcgtactggacggccttcgtgtctatctgctcccagacggacgggaagagggagcaggcgggtctgccggcggtcccgcccttcttcctgctgaaggcgcggtcttcttgacaacgtacagagtgatatttaccggtatgccaactgatccactggtgggagagcaggtggtcgtgaggagcttcccggttgccgcactaaccaaagagaaaagaatctccgtgcagacacctgtggatcagctgctgcaggatggcctgcaactgcgttcttgcacctttcaactcttgaagatggctttcgacgaggaagtagggagtgatagtgccgagctgtttcgcaaacagctgcataagctgcgctatcctcctgacatccgggccacatttgcttttacattaggcagcgcgcataccccaggcagaccccctcgcgtgacaaaagacaaagggccttcactccgcaccctgagccgcaaccttgttaaaaacgctaagaaaaccattggacggcagcacgtgacaagaaagaaatataatccgccctcatgggagcacaggggccaacctcccccagaagaccaggaagacgagatatctgtgtctgaagaactggagccttcaaccttgaccccttcctctgccctaaagcctagtgatcggatgactatgagctcattagtggagcgagcatgttgtcgtgactatcagcggctgggactggggactttaagctcttccctttccagagctaagtctgaaccgtttcgaatttctcctgtaaatcgcatgtacgccatatgcaggtcgtatccaggcctgctgattgtcccccaatcggtgcaggacaacgccctgcagcgggtatccaggtgctaccgccagaacaggtttccggtcgtctgctggcgcagcggccggagcaaagccgtactcctacggtctggtggccttcatggaaaaggcgttgtaggcctttttaaggctcagaatgcgccgtctcccggccagagtcaggccgactccagttctttggagcaggaaaagtatttgcaagccgtggtgtctagcatgccacgatacgctgacgcgagcggccgaaatactctgtcaggcttctcaagtgctcatatggggtcacatgtgcctagcccaagagccagagtgaccacgctaagtaatcccatggccgcaagtgcaagccgtcgcacggcacccaggggtaagtggggtagtgtgcgcacctccgggaggtctagcggtttaggtacggatgtggggtctaggttagccgggagggacgccctggctcccccacaggccaacggaggaccacccgatcctggatttctcagacctcagcgcgccgcactctacatcctgggagataaagcccagctcaagggagtccggagcgaccctttgcagcagtgggaactagtacctattgaggttttcgaagcccgacaggtgaaagcctcgtttaaaaagcttttaaaggcctgtgttccaggatgtccagcagccgagccatctccagcaagttttttgcgcagccttgaggacagcgaatggcttatacaaattcacaaacttctccaggtttctgttctagtcgtggaactgcttgactcgggaagctcagtgcttgttggactcgaggacggatgggacatcactactcaggtggtaagcttggtccaacttttaagcgatcccttctaccggaccctggaggggttccgcctgctggtggaaaaggaatggctctccttcggacacagattcagccatcggggcgcacatacccttgcaggtcaatcttcaggcttcacgcctgtatttctccagtttcttgactgcgttcaccaggttcaccttcagttccccatggaatttgaatttagtcagttctatttgaaattcctgggttatcatcacgtgtcacgcagattcaggaccttcttattagacagcgactacgaacgcattgaacttggattactgtatgaagagaaaggcgaacggcgcggtcaggttccatgccgctccgtctgggaatatgttgacagattaagcaagcggacccccgtgtttcataattatatgtacgcaccggaggacgcggaggtgcttcgtccctattccaacgtgtcgaatctgaaagtgtgggacttctataccgaagaaacattggcggaagggcctccatatgactgggaactggcccagggaccccccgaaccaccagaagaagagagaagcgatggaggggccccccagtcccgacgccgcgtcgtttggccttgctacgactcatgtcctcgcgcacagcccgatgcaattagccgcctcctcgaagagctgcagaggctcgaaactgagctcggccagcctgccgaaagatggaaggatacctgggaccgagtgaaggcagcccagagactggagggacgtcctgacggccggggaacaccatcaagcctactcgtgtctacagccccccaccacagacgatctctgggtgtgtacctgcaggagggtccagttggctccaccctgtctctgtcattggattcagatcagagttcagggagtacgacctctgggtcccgtcaggctgcccggcgatcaacttccaccctgtacagccagtttcagacggctgagagcgagaaccggagttatgaaggtactttatataagaaaggggctttcatgaaaccatggaaagcccggtggttcgttctcgacaagacgaaacatcaactgcgttactacgaccacagggtagacacggagtgtaaaggtgttatcgacctggctgaagtggaagctgtggccccgggcacccccacaatgggggcgcccaagaccgtcgacgaaaaagcgttttttgacgtcaagacaaccagaagggtttacaatttctgtgctcaggacgtgcccagcgctcagcaatgggtcgatagaatccaatcgtgcctctcagatgcttag

SEQ ID NO: 134002 - DNA, 5712 bp, Artificial Sequence
  derived and/or modified sequence
atggctgctggcacctgggccgctgctgctgctgctgctgctgctgactactttgtgctggtggccttcggcccccacccccggggcagcggggagggccagggccagatcctgcagcgcttccctgagaaggactgggaggacaaccccttcccccagggcatcgagctgttctgccagcccagcggctggcagctgtgcccagagaggaacccccccaccttctttgtggccgtgctgacagacatcaacagcgagcggcactactgtgcctgcctgaccttctgggagcctgctgagcccagccaggagaccaccagggtggaggatgccacagagcgggaggaggagggagatgaaggaggccagacccacctgagccccacagccccagcccccagcgcccagctgtttgcccccaagaccctggtgctggtgtcccggctggaccacacagaggtgttcaggaacagcctgggcctcatctatgccatccacgtggagggcctgaatgtgtgcctggagaatgtcatcggcaacctgctgacctgcaccgtgcccctggccggcggcagccagaggaccatcagcctgggcgctggggaccggcaggtgatccagacccccctggccgacagcctgcctgtgagccgctgcagcgtggccctgctcttccggcagctgggcatcaccaacgtgctgagcctcttctgtgccgccctgacagagcacaaggtgctcttcctgagccgcagctaccagaggctggctgatgcctgccggggcctgctggccctgctcttccccctgcgctacagcttcacctacgtgcccatcctgcctgcccagctgctggaggtgctgagcacccccacccccttcatcatcggcgtgaatgctgccttccaggccgagacccaggagctgctggatgtgattgtggccgacctggatggcggcaccgtgaccatcccagaatgtgtgcacatcccccccctgcctgagcccctgcagagccagacccacagcgtgctgtccatggtgctggaccctgagctggagctggccgacctggccttccccccacccaccaccagcaccagcagcctgaagatgcaggacaaggagctgcgggctgtgttcctgcggctgtttgcccagctgctgcagggctaccgctggtgcctgcacgtggtgcgcatccaccctgagcctgtgatccgcttccacaaggccgccttcctgggccagaggggcctggtggaggatgacttcctgatgaaggtgctggagggcatggcctttgctggctttgtgtctgagcggggcgtgccctaccggcccacagacctgtttgatgagctggtggcccacgaggtggccaggatgagagcagatgagaaccacccccagagggtgctgcggcacgtgcaggagctggccgagcagctgtacaagaatgaaaacccctacccagctgtggccatgcacaaggtgcagaggcctggagagagcagccacctgcggcgggtgccccggcccttcccccggctggatgagggcaccgtgcagtggatcgtggaccaggccgccgccaagatgcagggcgcccccccagctgtgaaggccgagaggaggaccaccgtgcccagcggcccccccatgacagccatcctggagcgctgcagcggcctgcacgtgaacagcgcccggcggctggaggtggtgaggaactgcatctcctatgtgtttgagggcaagatgctggaggccaagaagctgctgcctgctgtgctgcgggccctgaagggccgggccgcccggcgctgcctggcccaggagctgcacctgcacgtgcagcagaacagagctgtgctggaccaccagcagtttgattttgtggtgaggatgatgaactgctgcctgcaggactgcaccagcctggatgaacatggaattgctgctgccctgctgcccctggtgacagccttctgcaggaagctgagccctggggtgacccagtttgcctacagctgtgtgcaggagcacgtggtgtggagcaccccccagttctgggaggccatgttttatggagatgtgcagacccacatccgggccctgtacctggagcccacagaggacctggccccagcccaggaggtgggggaggcccccagccaggaggatgagaggtctgccctggatgtggccagcgagcagaggcggctgtggcccaccctgagccgggagaagcagcaggagctggtgcagaaggaggagagcaccgtcttcagccaggccatccactacgccaacaggatgagctacctgctgctgcccctggacagcagcaagagccggctgctgcgggagagagctggcctgggggacctggagagcgccagcaacagcctggtgaccaacagcatggccggctctgtggccgagagctatgacacagagagcggctttgaagatgctgagacctgtgatgtggccggggctgtggtgcgcttcatcaacagatttgtggacaaggtgtgcacagaaagtggagtgaccagtgaccacctgaagggcctgcacgtgatggtgcctgacatcgtgcagatgcacatcgagaccctggaggccgtgcagcgggagagccggcggctgccccccatccagaagcccaagctgctgcggccccggctgctgcctggagaggagtgtgtgctggatggcctgcgggtgtacctgctgcctgatggccgggaggagggcgccggcggcagcgctgggggccctgccctgctgcctgctgagggcgctgtgttcctgaccacctacagagtcatcttcaccggcatgcccacagaccccctggtgggggagcaggtggtggtgcgctccttccctgtggccgccctgaccaaggagaagaggatctctgtgcagacccctgtggaccagctgctgcaggacggcctgcagctgcggagctgcaccttccagctgctgaagatggcctttgatgaggaggtgggcagtgacagcgctgagctgttcaggaagcagctgcacaagctgcgctaccccccagacatccgggccacctttgccttcaccctgggcagcgcccacaccccaggccggcccccccgggtgaccaaggacaagggccccagcctgcggaccctgagcaggaacctggtgaagaatgccaagaagaccatcggccggcagcacgtgaccaggaagaagtacaaccccccatcctgggagcaccggggccagcccccacctgaggaccaggaggatgagatctctgtgtctgaggagctggagcccagcaccctgacccccagcagcgccctgaagcccagcgacaggatgaccatgagcagcctggtggagcgggcctgctgccgggactaccagaggctgggcctgggcaccctgagcagcagcctgagccgggccaagtctgagcccttccgcatcagccctgtgaacaggatgtatgccatctgccgcagctacccaggcctgctgattgtgccccagagcgtgcaggacaatgccctgcagagggtgagccgctgctaccggcagaaccgcttccctgtggtgtgctggaggagcggccgcagcaaggctgtgctgctgcggagcggcggcctgcatggaaaaggagtggtgggcctcttcaaggcccagaatgcccccagccctggccagagccaggccgacagcagcagcctggagcaggagaagtacctgcaggccgtggtgtcctccatgcccaggtatgcagatgccagcggcaggaacaccctgagcggcttcagcagcgcccacatgggcagccacgtgcccagcccccgggcccgggtgaccaccctgagcaaccccatggccgccagcgccagcagaagaacagccccccggggcaagtggggctctgtgaggaccagcggccgcagcagcggcctgggcacagatgtgggcagccggctggccggcagagatgccctggccccaccccaggccaacggcggccccccagaccccggcttcctgcggccccagagagctgccctgtacatcctgggggacaaggcccagctgaagggcgtgcggagtgaccccctgcagcagtgggagctggtgcccatcgaggtgtttgaggcccggcaggtgaaggccagcttcaagaagctgctgaaggcctgtgtgcccggctgcccagctgctgagcccagccctgccagcttcctgcggagcctggaggacagcgagtggctgatccagatccacaagctgctgcaggtgtctgtgctggtggtggagctgctggacagcggcagctctgtgctggtgggcctggaggatggctgggacatcaccacccaggtggtgtccctggtgcagctgctgagtgaccccttctaccgcaccctggagggcttccggctgctggtggagaaggagtggctgagctttggccaccgcttcagccacagaggagcccacaccctggccggccagagcagcggcttcacccctgtgttcctgcagttcctggactgtgtgcaccaggtgcacctgcagttccccatggagtttgagttcagccagttctacctgaagttcctgggctaccaccacgtgagccgccgcttccgcaccttcctgctggacagcgactatgagcgcatcgagctgggcctgctgtatgaggagaagggggagcggcggggccaggtgccctgccgctctgtgtgggagtatgtggaccggctgagcaagaggacccctgtgttccacaactacatgtatgccccagaagatgctgaggtgctgcggccctacagcaatgtgagcaacctgaaggtgtgggacttctacacagaggagaccctggccgagggccccccctatgactgggagctggcccagggccccccagagcccccagaggaggagaggagtgatggaggagccccccagagcagaagaagagtggtgtggccctgctatgacagctgcccccgggcccagccagatgccatcagccggctgctggaggagctgcagaggctggagacagagctgggccagcctgctgagcgctggaaggacacctgggacagagtgaaggccgcccagaggctggagggccgcccagatggccggggcacccccagcagcctgctggtgtccacagccccccaccaccggcgcagcctgggcgtgtacctgcaggagggccctgtgggcagcaccctgagcctgagcctggacagcgaccagagcagcggcagcaccaccagcggcagccggcaggccgcccggcgcagcaccagcaccctgtacagccagttccagacagctgagagcgagaacagaagctatgagggcaccctgtacaagaagggggccttcatgaagccctggaaggcccgctggtttgtgctggacaagaccaagcaccagctgcgctactatgaccaccgggtggacacagagtgcaagggcgtgattgacctggccgaggtggaggccgtggcccctggcacccccaccatgggcgcccccaagacagtggatgagaaggccttctttgatgtgaagaccacccggcgggtgtacaacttctgtgcccaggatgtgcccagcgcccagcagtgggtggaccgcatccagagctgcctgagtgatgcctag

SEQ ID NO: 134003 - DNA, 5682 bp, Artificial Sequence
  derived and/or modified sequence
atggcccggctggccgactactttgtgctggtggccttcggcccccacccccggggcagcggggagggccagggccagatcctgcagcgcttccctgagaaggactgggaggacaaccccttcccccagggcatcgagctgttctgccagcccagcggctggcagctgtgcccagagaggaacccccccaccttctttgtggccgtgctgacagacatcaacagcgagcggcactactgtgcctgcctgaccttctgggagcctgctgagcccagccaggagaccaccagggtggaggatgccacagagcgggaggaggagggagatgaaggaggccagacccacctgagccccacagccccagcccccagcgcccagctgtttgcccccaagaccctggtgctggtgtcccggctggaccacacagaggtgttcaggaacagcctgggcctcatctatgccatccacgtggagggcctgaatgtgtgcctggagaatgtcatcggcaacctgctgacctgcaccgtgcccctggccggcggcagccagaggaccatcagcctgggcgctggggaccggcaggtgatccagacccccctggccgacagcctgcctgtgagccgctgcagcgtggccctgctcttccggcagctgggcatcaccaacgtgctgagcctcttctgtgccgccctgacagagcacaaggtgctcttcctgagccgcagctaccagaggctggctgatgcctgccggggcctgctggccctgctcttccccctgcgctacagcttcacctacgtgcccatcctgcctgcccagctgctggaggtgctgagcacccccacccccttcatcatcggcgtgaatgctgccttccaggccgagacccaggagctgctggatgtgattgtggccgacctggatggcggcaccgtgaccatcccagaatgtgtgcacatcccccccctgcctgagcccctgcagagccagacccacagcgtgctgtccatggtgctggaccctgagctggagctggccgacctggccttccccccacccaccaccagcaccagcagcctgaagatgcaggacaaggagctgcgggctgtgttcctgcggctgtttgcccagctgctgcagggctaccgctggtgcctgcacgtggtgcgcatccaccctgagcctgtgatccgcttccacaaggccgccttcctgggccagaggggcctggtggaggatgacttcctgatgaaggtgctggagggcatggcctttgctggctttgtgtctgagcggggcgtgccctaccggcccacagacctgtttgatgagctggtggcccacgaggtggccaggatgagagcagatgagaaccacccccagagggtgctgcggcacgtgcaggagctggccgagcagctgtacaagaatgaaaacccctacccagctgtggccatgcacaaggtgcagaggcctggagagagcagccacctgcggcgggtgccccggcccttcccccggctggatgagggcaccgtgcagtggatcgtggaccaggccgccgccaagatgcagggcgcccccccagctgtgaaggccgagaggaggaccaccgtgcccagcggcccccccatgacagccatcctggagcgctgcagcggcctgcacgtgaacagcgcccggcggctggaggtggtgaggaactgcatctcctatgtgtttgagggcaagatgctggaggccaagaagctgctgcctgctgtgctgcgggccctgaagggccgggccgcccggcgctgcctggcccaggagctgcacctgcacgtgcagcagaacagagctgtgctggaccaccagcagtttgattttgtggtgaggatgatgaactgctgcctgcaggactgcaccagcctggatgaacatggaattgctgctgccctgctgcccctggtgacagccttctgcaggaagctgagccctggggtgacccagtttgcctacagctgtgtgcaggagcacgtggtgtggagcaccccccagttctgggaggccatgttttatggagatgtgcagacccacatccgggccctgtacctggagcccacagaggacctggccccagcccaggaggtgggggaggcccccagccaggaggatgagaggtctgccctggatgtggccagcgagcagaggcggctgtggcccaccctgagccgggagaagcagcaggagctggtgcagaaggaggagagcaccgtcttcagccaggccatccactacgccaacaggatgagctacctgctgctgcccctggacagcagcaagagccggctgctgcgggagagagctggcctgggggacctggagagcgccagcaacagcctggtgaccaacagcatggccggctctgtggccgagagctatgacacagagagcggctttgaagatgctgagacctgtgatgtggccggggctgtggtgcgcttcatcaacagatttgtggacaaggtgtgcacagaaagtggagtgaccagtgaccacctgaagggcctgcacgtgatggtgcctgacatcgtgcagatgcacatcgagaccctggaggccgtgcagcgggagagccggcggctgccccccatccagaagcccaagctgctgcggccccggctgctgcctggagaggagtgtgtgctggatggcctgcgggtgtacctgctgcctgatggccgggaggagggcgccggcggcagcgctgggggccctgccctgctgcctgctgagggcgctgtgttcctgaccacctacagagtcatcttcaccggcatgcccacagaccccctggtgggggagcaggtggtggtgcgctccttccctgtggccgccctgaccaaggagaagaggatctctgtgcagacccctgtggaccagctgctgcaggacggcctgcagctgcggagctgcaccttccagctgctgaagatggcctttgatgaggaggtgggcagtgacagcgctgagctgttcaggaagcagctgcacaagctgcgctaccccccagacatccgggccacctttgccttcaccctgggcagcgcccacaccccaggccggcccccccgggtgaccaaggacaagggccccagcctgcggaccctgagcaggaacctggtgaagaatgccaagaagaccatcggccggcagcacgtgaccaggaagaagtacaaccccccatcctgggagcaccggggccagcccccacctgaggaccaggaggatgagatctctgtgtctgaggagctggagcccagcaccctgacccccagcagcgccctgaagcccagcgacaggatgaccatgagcagcctggtggagcgggcctgctgccgggactaccagaggctgggcctgggcaccctgagcagcagcctgagccgggccaagtctgagcccttccgcatcagccctgtgaacaggatgtatgccatctgccgcagctacccaggcctgctgattgtgccccagagcgtgcaggacaatgccctgcagagggtgagccgctgctaccggcagaaccgcttccctgtggtgtgctggaggagcggccgcagcaaggctgtgctgctgcggagcggcggcctgcatggaaaaggagtggtgggcctcttcaaggcccagaatgcccccagccctggccagagccaggccgacagcagcagcctggagcaggagaagtacctgcaggccgtggtgtcctccatgcccaggtatgcagatgccagcggcaggaacaccctgagcggcttcagcagcgcccacatgggcagccacgtgcccagcccccgggcccgggtgaccaccctgagcaaccccatggccgccagcgccagcagaagaacagccccccggggcaagtggggctctgtgaggaccagcggccgcagcagcggcctgggcacagatgtgggcagccggctggccggcagagatgccctggccccaccccaggccaacggcggccccccagaccccggcttcctgcggccccagagagctgccctgtacatcctgggggacaaggcccagctgaagggcgtgcggagtgaccccctgcagcagtgggagctggtgcccatcgaggtgtttgaggcccggcaggtgaaggccagcttcaagaagctgctgaaggcctgtgtgcccggctgcccagctgctgagcccagccctgccagcttcctgcggagcctggaggacagcgagtggctgatccagatccacaagctgctgcaggtgtctgtgctggtggtggagctgctggacagcggcagctctgtgctggtgggcctggaggatggctgggacatcaccacccaggtggtgtccctggtgcagctgctgagtgaccccttctaccgcaccctggagggcttccggctgctggtggagaaggagtggctgagctttggccaccgcttcagccacagaggagcccacaccctggccggccagagcagcggcttcacccctgtgttcctgcagttcctggactgtgtgcaccaggtgcacctgcagttccccatggagtttgagttcagccagttctacctgaagttcctgggctaccaccacgtgagccgccgcttccgcaccttcctgctggacagcgactatgagcgcatcgagctgggcctgctgtatgaggagaagggggagcggcggggccaggtgccctgccgctctgtgtgggagtatgtggaccggctgagcaagaggacccctgtgttccacaactacatgtatgccccagaagatgctgaggtgctgcggccctacagcaatgtgagcaacctgaaggtgtgggacttctacacagaggagaccctggccgagggccccccctatgactgggagctggcccagggccccccagagcccccagaggaggagaggagtgatggaggagccccccagagcagaagaagagtggtgtggccctgctatgacagctgcccccgggcccagccagatgccatcagccggctgctggaggagctgcagaggctggagacagagctgggccagcctgctgagcgctggaaggacacctgggacagagtgaaggccgcccagaggctggagggccgcccagatggccggggcacccccagcagcctgctggtgtccacagccccccaccaccggcgcagcctgggcgtgtacctgcaggagggccctgtgggcagcaccctgagcctgagcctggacagcgaccagagcagcggcagcaccaccagcggcagccggcaggccgcccggcgcagcaccagcaccctgtacagccagttccagacagctgagagcgagaacagaagctatgagggcaccctgtacaagaagggggccttcatgaagccctggaaggcccgctggtttgtgctggacaagaccaagcaccagctgcgctactatgaccaccgggtggacacagagtgcaagggcgtgattgacctggccgaggtggaggccgtggcccctggcacccccaccatgggcgcccccaagacagtggatgagaaggccttctttgatgtgaagaccacccggcgggtgtacaacttctgtgcccaggatgtgcccagcgcccagcagtgggtggaccgcatccagagctgcctgagtgatgcctag

SEQ ID NO: 134004 - DNA, 5712 bp, Artificial Sequence
  derived and/or modified sequence
atggccgccggcacctgggccgccgccgccgccgccgccgccgccgactacttcgtgcttgtcgctttcgggcctcatccacgtggatctggcgagggccaaggacagatcctgcagcgcttccccgagaaagactgggaggataacccatttccccagggcattgagcttttctgccaacccagcgggtggcagctgtgcccagaacgcaatccgcccacctttttcgtcgccgtcttaactgatataaattccgagcgccactactgcgcctgtctcaccttctgggagcctgccgaaccctcacaggagaccacacgagtcgaagatgccaccgagcgggaagaggagggagacgagggcggacagacccacttatctcctacggcccccgcaccctcagcacagctgtttgcgccaaagactctggtgttggtttcaagacttgatcacacagaggtgttcaggaattcgctcgggctcatctacgccatccatgtagaagggttgaatgtgtgtctggagaacgtgatcggcaacctactcacttgtacagtgcccctggctggcgggtcccagaggactatctctctgggagctggcgatcgccaagttattcagacgccgttggcagacagtttgccagtgagcagatgctccgttgcactcctgttccgacagctgggcattaccaacgttctgagcttgttctgtgccgctctaactgaacataaggtcctgtttttgagtcgcagttaccagcgcctggcagacgcatgcagggggttgttggctctcttattcccactacgatattcttttacctatgtgcccatcttacctgcccagctgttggaggtactctccactcccacccccttcataatcggggtgaacgcagccttccaggcagagacacaggagctgctggacgttatcgtagctgatctcgacggaggaaccgtgactattcctgaatgcgtacacatccccccattgcccgaaccactgcaatcacaaacacatagcgtcctttcgatggtgctcgatccagagctagaactagcggatctggcgttcccacccccgactacatcaaccagtagtctgaaaatgcaggacaaagagctgcgggcagtcttcctgcggctgtttgctcagctcttacagggatacagatggtgtttgcatgtggtaagaattcaccctgaaccagtgatccggttccataaggcagctttcctaggccaacgcggtttggtcgaggatgatttcctgatgaaggtgctggagggtatggcatttgcaggtttcgttagtgagaggggggtgccataccgtcccaccgatttgtttgatgagttggtggcgcacgaggtggccaggatgcgtgccgacgaaaatcatccacagagggtgctgagacatgttcaggaactggcagagcagctgtacaagaatgagaacccgtacccagcagtcgccatgcataaggtacaacgacctggggagtccagccacctgaggcgggtgcccaggccatttcctaggctggatgaggggacagtgcaatggatcgtcgatcaggctgctgccaaaatgcaaggcgcacctccggcggtaaaggcagaacggcgaactaccgtcccgagcggaccaccaatgactgcaatcctggaaaggtgctctggattgcacgtcaactccgcccgacggctggaggtcgtgcggaattgtatatcttatgtatttgaaggcaagatgctggaggccaaaaagttgctccctgcagtgttaagggctctcaagggcagagccgccaggcgctgcctggcgcaagagctacacctacatgtgcagcagaaccgtgctgtgctcgaccaccaacagttcgactttgtggtgcggatgatgaactgctgcctgcaagactgcacctctctcgacgagcatggtatcgcggccgccttactcccgctggttaccgccttttgccgtaagctcagcccaggcgtaacccagttcgcctactcctgcgtgcaggaacacgtggtctggagtactccacagttttgggaggctatgttctacggtgacgtccaaactcatattagggctttgtacctggagcccaccgaagatctcgcaccggctcaggaggtgggcgaagcaccttcccaggaagacgaacggtccgctctcgacgtggccagcgagcaacgcaggttatggcctacactttcccgcgaaaagcagcaggagctggtacaaaaggaagagagtactgtattctcccaggccatccactacgccaaccggatgagttacctgcttctgccactcgactcttcaaagtccagactactgcgagaaagagccgggttgggcgatctggagagtgccagcaactcattggttacaaattctatggcaggctcagtcgcggaatcgtatgataccgaatccggttttgaagacgcagagacatgcgatgtggcaggtgccgtcgtgagatttatcaataggtttgttgataaggtttgtaccgaaagtggcgtgacctcggatcacctcaaagggctgcatgttatggttcccgacatcgtgcagatgcacattgaaacactagaggcagtccagagggagtccagaaggctcccacctattcagaaaccaaagcttctccgacccaggctgctgccaggggaagagtgtgtgttggacggcctccgggtatacttactccctgatggtagagaggaaggagctggtgggtcggcaggggggccggccctgttgccagcggagggcgctgtgttcttgaccacttaccgagtgattttcactggtatgcccacagatccactggtcggggagcaggtcgtcgttcgatcctttcctgtggccgcactcacaaaggagaagcggataagcgtccagactccagtggatcagctgcttcaggatggactgcagcttagatcttgtacatttcagcttctgaagatggctttcgacgaagaggtgggcagcgattctgctgaactgttcagaaagcagttgcacaaactccgctacccaccagatattcgagcaacatttgcattcacgctgggatccgcacacacgccagggcggcctccaagagtgacgaaggataaaggcccaagtctccggactttatctaggaacctggtcaaaaatgcaaaaaaaaccatcggaagacagcatgtgacgcggaagaagtacaacccgcccagttgggagcatcgggggcagccccccccagaggaccaggaagatgaaatttctgtgagtgaggagctcgagccaagcaccttaacgccttcatcagcgttgaagccatcagataggatgacaatgagcagcctggtcgagagggcatgttgcagagactaccagcggctgggacttgggaccctgagcagctccctgagccgagcaaagtcagagccatttcggataagccccgtgaaccgaatgtacgctatctgtcggagttatccagggttgctgatagtgccgcagagcgtgcaggataacgccctgcagagagtttcgaggtgttatcggcaaaatcggttcccagtagtctgttggagatccggccgttccaaagcagtgctgttgcgcagtggagggttacacggaaaaggggtggtcgggctgttcaaggcgcagaacgccccaagcccgggacaaagtcaggcagattcatcttcactggaacaggaaaagtatttacaagcggtagtatcatctatgcccagatacgctgatgccagcggccggaacacactatccggtttctcttcggcccacatgggatcccacgtcccaagccccagagcaagggtgaccaccctgtccaatcccatggctgcctcagcttccaggcgaactgccccacgggggaagtggggcagcgtgcggacctcagggagaagttccgggctgggaaccgacgtgggatctagactggccggcagggacgcccttgcacccccacaggctaatggtggacccccagacccggggttcttgcgacctcagcgggcagcactgtatatcttgggggacaaggcccagcttaagggcgtccgcagcgatcctctccagcagtgggagctcgtgcccattgaggtgttcgaggcccggcaggtaaaagcgagcttcaaaaaactgctcaaggcatgcgtgcccggctgccctgccgccgaacccagccccgcctccttcctccgatcactggaggatagcgaatggctgatacagattcacaagttactgcaagtctctgttttggtagttgagctactggactcaggctcttctgtcctagtaggcctagaggacggctgggacatcactactcaagttgtttcactggtccagcttctgagcgatccattctatcggacacttgagggtttccgcctcctagtggagaaggagtggctgagctttggtcatcgcttctcccaccgaggggctcatacactcgccggacagagctctggcttcacacctgtgtttctgcaatttttggactgtgtacatcaggttcatctccagttccctatggagttcgaattctctcagttttatctaaagtttctgggataccaccatgtcagtcggagattccgcacttttctgctagacagcgactacgagcggatagaactgggcctattatacgaggaaaagggcgaaagacgaggtcaggtgccatgtcgatccgtttgggagtacgtggatagactttccaagagaacacccgtgttccataattacatgtacgcccctgaggacgccgaggtgctgaggccctacagtaacgtatcaaacctcaaagtgtgggatttctatacagaggaaacgctcgccgaaggtcccccatacgattgggaactggcgcagggtcccccggagccacccgaggaggagcgctctgatggtggcgcccctcagagtaggagaagggtggtgtggccttgctacgactcgtgtcccagggcccaacctgatgccatatcaagactcctggaagagctccagagactggagacagagctgggccagcccgctgagcgttggaaggatacctgggaccgagtcaaggcggcccagcggcttgagggaagaccggacggccgcggcacaccctcttctctccttgtctcgacagcaccccaccaccggcgctctctaggagtataccttcaggagggccccgttgggtctacattatccctttccctggactccgaccagtcatccgggagcaccacatcagggtcacggcaggctgcaaggcgatcaacctcaaccctgtatagccagtttcagactgcagaaagtgagaaccggagctacgaagggaccctttataagaagggcgctttcatgaaaccttggaaagcccggtggtttgtgctagacaagacaaagcatcagctgcgctactatgatcaccgagtagatacggagtgcaagggggtcattgatcttgcagaggtggaagcagtggctccaggcactccgacgatgggcgctcctaagactgtcgacgagaaggcctttttcgatgttaagaccacccgtcgcgtgtacaatttctgtgcccaggatgtaccgagtgcccaacagtgggtggataggattcagagttgcctgtcagatgcatag

SEQ ID NO: 134005 - DNA, 5682 bp, Artificial Sequence
  derived and/or modified sequence
atggcccggctggccgactacttcgtgctggtggccttcggcccccacccaagagggtccggagagggccaggggcaaatcctccaacggttcccagagaaagactgggaggacaaccctttccctcaaggaatcgaattattctgccagcctagcggatggcagctgtgtcccgaacggaaccccccaactttctttgtggccgtgctaaccgacattaattcagagcgccattactgtgcctgcttaactttttgggagcccgccgaaccttcgcaggaaactacaagggtggaagatgcaacggaaagggaggaagagggcgatgagggaggacagactcacctgtctccgaccgcaccagcgccgtcggcacagctgtttgccccaaaaacgttggtcctggttagcagactagatcatacagaggtgttcagaaactctctgggcctgatctacgcgatccacgtggagggcctgaatgtgtgtttagaaaacgtgattggcaatttactgacctgtacagtgcctctcgctggtggatcacagcggacaatatcactgggcgccggcgataggcaggtaatccagacccccctagctgattccctgcccgtttcgagatgcagtgtggctttattattcaggcagttggggatcacaaacgtgttgagcctgttctgcgccgccctgacagagcacaaagttctttttcttagccgaagctatcagcggttagctgacgcctgtcggggcctgctggcccttctgtttccactgcgctacagctttacctacgtccccattctgcctgcccaacttctggaggtgttgtcaaccccaacaccctttatcatcggcgtgaatgcagccttccaggccgagacacaggagttactagacgtgattgtggctgatctggacggtgggacagtcactattcctgagtgcgtgcacattccacctctacccgaaccgctccagagccagacccactcggtgctgagtatggtgctggaccccgaactggaactggcagatctggccttccccccccctacaacttctacttcttcactgaagatgcaggataaggagctgcgcgccgttttccttagattgtttgcgcagcttctgcagggatatcggtggtgccttcatgtggtcagaatccaccctgaacccgtgatcagattccacaaggctgcctttctgggacagcgcggactcgtagaggatgatttcctcatgaaagtcctcgaggggatggcttttgccggctttgtgagcgagcggggggtcccctataggccaacagatcttttcgacgagttggtcgctcacgaagtcgctcggatgcgtgcggacgaaaaccacccacagagggtcctgcgtcacgtacaggaactcgctgagcagctgtataagaatgagaatccctatcctgccgtggctatgcacaaggtgcaaagaccgggtgagtcaagccacctaaggagggtccccagaccattcccaagactggacgaaggtaccgtgcagtggattgtggaccaagccgccgctaagatgcagggggccccacccgccgtgaaggctgagagacgcactaccgtgccctcaggaccccccatgactgcgatattagaaagatgttccggcctgcacgtaaactcagccagacgtctggaggtggtgcgtaactgtatctcatatgtcttcgagggcaaaatgctggaagctaaaaagttattacccgctgtgctacgagcactcaagggtcgcgctgccaggcgctgtctcgctcaggagcttcacctacacgtgcaacagaatagagcagttctcgaccaccaacagtttgactttgtggtgcgtatgatgaactgctgcttgcaggactgcacttcattggacgagcacggaatcgcagccgccctgctgcctctagtcacagcattttgccgcaagctgagtcccggagtgacccaattcgcctactcttgtgtgcaggaacacgtggtctggagcacacctcaattctgggaggctatgttctatggcgatgtgcagacccatataagggccttatacttggagcccaccgaagatctcgccccggctcaggaggtaggtgaagcaccctctcaggaagacgaacgatcggcgctggatgtggcctcagagcagagaagattatggcctactctgtccagagagaagcaacaagagctggtccagaaggaggagtcaaccgtgttctcccaggccatccactatgcaaacaggatgtcttacctcttacttcccctggattcctcaaaatcacggctgctacgtgaaagggccggactcggcgacctcgagagcgcttccaattcgctggtcacaaacagcatggctggaagcgtcgcagagtcatatgatacagagtccggcttcgaagacgccgagacttgtgatgtggccggcgctgtggttagattcatcaaccgctttgtggacaaagtgtgtactgagtcaggggtgacctcagaccatttgaagggactccacgttatggtgcccgatattgtgcaaatgcatatcgagaccctggaagccgtgcaaagggaaagcagacgccttccgccgatacagaaacccaaactgctgcgtcccagactgctgcccggcgaggagtgcgtgctcgatggactcagagtgtacctgctgccagacggtagggaagagggtgccggtgggagcgccggtggtcctgcactccttccagccgaaggggccgtgttcttgactacctatcgggtcatcttcaccggcatgcctacggacccattggtcggggagcaggtagtggtacgatcatttccagtggccgcccttaccaaggaaaagcggatctcagtgcagaccccagtggatcagctgctgcaagatggcttacaactgaggagttgcaccttccagctgctcaaaatggcgttcgatgaagaggtaggctccgattctgccgagttgttcaggaagcaattgcataagttgcgatacccccccgacatcagggctactttcgctttcaccctcggaagtgcacatacaccaggacgccctcctcgcgtgactaaggacaagggccctagcctccggactctctcgagaaatctggtgaagaacgctaagaagaccattggacgccagcacgtgacgagaaagaagtacaatccccccagctgggaacaccgcggccagccccccccggaggaccaggaggatgaaatctctgtgagtgaggaactggaaccctctactctcacccccagctcagcactgaagcccagtgatagaatgacaatgtcgagtttggtcgaacgggcctgttgccgcgactaccagaggcttggcttaggaacgctcagctctagcctgtccagagccaaaagcgagccttttagaataagccctgtaaatcggatgtacgcgatttgtagatcataccccggcttgctgattgtgccccagtccgtacaggacaatgcattgcaaagggtgtcccggtgctacagacaaaaccgttttccagtagtctgctggcgctcaggacgaagtaaagcagtcctcctccgcagcggaggccttcacggaaagggtgtcgtcggactcttcaaagcacaaaatgccccctctccaggccaatctcaggccgattcaagttccttggagcaggaaaagtacttgcaggctgtggtgtccagcatgccacgctacgctgacgcttctggacgcaatacactgagtggatttagctccgcacatatgggaagccatgtgcccagcccacgcgctcgagtgacaaccctaagtaacccaatggccgctagcgcttctaggagaaccgctccccgcgggaaatggggttcggtcagaaccagcggaagatcttctggactgggcaccgacgttggatcgaggctggcgggaagggatgcactggccccaccacaggctaacgggggaccaccagaccccggtttcctgaggccccaaagagccgccctgtatatcctgggagataaagcccagctgaagggagttcgctcggaccctctccagcagtgggagttggtgcctatcgaggtgtttgaagccagacaggtaaaggcatcatttaaaaagctcctgaaagcctgcgtgccaggatgccccgcagctgaacctagtcctgccagttttttgaggagtttagaagattccgaatggcttatccaaattcataaattgctacaggtctctgtgcttgtggtggaactcttggacagcgggtcttccgtcctggtaggcctggaggatggctgggatattacgacccaggtcgtcagtttggtccaactcctctctgatccattttacagaaccttggagggttttcggctgctcgtggaaaaggaatggctgagtttcggacatcgattctcccatagaggtgctcacacactggcaggccagtctagtgggttcactcccgtatttctccagttcctggattgtgttcatcaggttcatctgcagtttccaatggagtttgagttcagccagttttacctcaaatttctaggctaccatcacgtctcaagaaggtttcgcaccttcctgctcgattccgattatgagcggatcgagttgggccttctgtatgaggaaaagggcgagagacggggccaggtgccatgcaggagcgtgtgggagtatgttgacaggttatcaaagcgcaccccagttttccataattacatgtacgccccagaagacgccgaagtgctacgcccgtactcaaacgtttcaaacctcaaagtctgggatttctataccgaagagacattagcagaggggccaccttacgattgggagctagcccagggaccacccgagcctcccgaggaagaacggtcagacggaggcgcacctcagtcgaggaggcgggtggtatggccctgttacgactcctgtccacgggctcagccagacgccatctcccgcctgttggaagagctgcagcgcctggagacagaacttggacaacccgccgaaaggtggaaagatacttgggacagggtgaaggcagcacaacgcttggaagggaggcccgacggaagaggaacgccctcgagtctgctggtgtccaccgctccacatcacagaaggagcctaggagtctacttgcaggaggggcctgttgggtccaccctcagtctgagcctggacagcgaccagtccagcggctctaccacatcaggctctagacaggcagcgagacggtctacatcaacgctgtactcacagtttcaaacagccgaatcggagaatcgctcatacgagggcaccttgtataaaaagggagcattcatgaaaccctggaaagctcgctggttcgttctggataaaaccaaacaccagctgagatattatgatcacagagttgatactgagtgcaagggagtcatcgacctggccgaagttgaagctgttgctccaggaaccccaaccatgggtgctcctaaaaccgttgatgagaaggccttttttgacgtcaagacaacacgccgagtctacaatttctgtgctcaggatgtgccctcggctcaacagtgggtcgatcggattcagtcctgtctcagcgacgcatag

SEQ ID NO: 134006 - DNA, 5711 bp, Artificial Sequence
  derived and/or modified sequence
atggccgcaggcacctgggccgctgccgctgcagcagccgctgccgactacttcgttttggttgcattcggcccacaccctcgagggagtggggaagggcaagggcagatcctgcaacgcttccctgaaaaggattgggaagacaaccccttccctcaggggatcgagctcttttgtcagcccagcggatggcagctgtgcccagaaagaaatcctccaacgttctttgtggcagtgctcactgacatcaactctgaaagacactattgtgcctgcctcacattttgggaaccagctgaaccaagccaggagactaccagagtggaggatgctacagagagggaagaggaaggagacgaggggggacaaactcatctctcaccgacggctccagccccatctgcacagttgtttgcccctaaaaccctggtattagtgagcagattagatcatacagaagtctttcgaaattcactcggcctgatttacgctatccatgttgaaggtcttaacgtatgtttagaaaacgtgattggtaacctgttaacgtgtacagtgcctctcgccggaggttctcagcggacaatttcacttggggctggagatcgccaggtgatacaaaccccactggcggacagcttaccagtgagccggtgcagcgttgcactactgttccgccaattagggatcaccaacgttcttagtctgttttgcgccgctctgacagagcataaggtgctttttctgtccaggtcttaccagcgcctcgccgacgcctgcagaggcctgctggcgctgctgttccccttgagatattcttttacctacgtccctattctgcctgcacagttgttagaagtgctgtccacaccaaccccattcattattggggttaacgctgctttccaggcggagactcaggagctcctggacgtcatagtggccgacctcgacggcggaaccgttacgattcccgaatgcgtgcacattccccctctcccagagcctctccaaagccagactcatagcgtacttagtatggtgcttgacccagaactggagctcgccgacttggcgtttccgccacccaccacctccacgtcatcactcaaaatgcaagataaggagctgagggctgtctttcttcggctctttgcgcagctgctccagggctatcgatggtgtcttcacgtcgtgagaattcatccagagcctgtgatccgcttccacaaagccgcatttttgggtcagagaggcttggtggaggatgatttcctgatgaaggtactggagggaatggctttcgcaggctttgtgtctgaaagaggagttccgtatcggccaacagatctgttcgatgagctcgtggcacacgaagtagccagaatgagagccgatgaaaatcatccccagcgcgtgctcagacacgtgcaggagcttgcggagcagttgtacaagaatgagaatccataccccgctgttgcgatgcacaaagtgcagaggcctggtgaaagctcccatctgcggagggtacccagaccctttccaagattggatgaggggacagtccaatggatcgttgaccaagctgccgctaagatgcagggggctccacccgcagtgaaagcggaacggcgaacaacagtaccctctggacctccgatgacagctatactggaacggtgcagtggcctccatgtaaattccgcacgccgtttggaagtcgtccggaactgcatttcttacgtgttcgaagggaagatgctggaggcaaaaaaactcctccctgcagtcctaagggcactcaaggggagggcggcacggagatgccttgcacaagaactacatctgcatgtgcagcaaaatcgggctgtcttagatcaccaacaatttgactttgttgtcagaatgatgaactgctgcctgcaggactgtacaagtctagacgagcacggcatcgcagccgctttactgcctttggtcacggctttctgccggaagttaagcccaggggtcacacaatttgcatacagctgcgtacaagagcacgtggtgtggtctacgccacagttctgggaagccatgttttacggagacgttcagactcacatccgcgcactttacctcgagcccacggaagacctggctcccgctcaggaagtcggagaggccccttcccaggaggacgaacgctcggcattggatgttgcctcagaacagcgtaggttgtggcccaccctctcacgggaaaagcagcaggagctcgttcagaaggaggagagcacggtatttagtcaggccatccattacgctaacagaatgtcttaccttttgctgccactggatagctccaaaagccgtctcttgagggagagagccggactgggggatttggaatcagcctccaattcacttgtcaccaactctatggctgggtccgtcgccgagagctacgataccgagagcggattcgaagacgctgagacttgcgatgtggctggagcagtggtgaggttcattaaccggttcgtcgataaggtttgcaccgaatccggggtcacttctgatcaccttaaaggcttacatgtaatggtgccagacatagtgcagatgcatattgaaacgctggaagctgtgcagagagagagcaggagactgccaccaatacaaaaaccaaagctccttaggcctcgtttattgcccggtgaggagtgcgtgctcgacggtttaagagtctatctgctccctgatgggagagaggagggcgcaggcggaagcgcaggcggaccggctctgctgccagcagagggggctgtgttcctcacgacatatcgcgttatcttcaccggtatgccgacggaccccctcgtgggcgaacaggtggtggtacgcagctttcccgtcgcagccttgacgaaggaaaagcgcataagcgtccaaactccggtcgaccagctgttgcaggacgggctgcagttgcgttcttgcacattccagctgcttaaaatggcattcgacgaggaagtgggctctgattccgctgaactgttccgcaaacagttgcataagcttagatacccaccggatatacgggctaccttcgccttcacccttgggagcgcccacacacctgggaggcctcccagggtcaccaaggacaaggggcctagcctcaggaccctctctcgcaacttagttaaaaatgccaaaaaaacgatcgggaggcaacatgtgacacgaaagaaatataatccacccagctgggaacaccgagggcagcctcctcccgaggatcaggaggatgaaatctctgtgagcgaggagcttgagccgtcgacactcactccttcaagcgctttgaaaccatctgaccgcatgacaatgtcaagtctggtcgaacgggcttgttgccgagattaccagcgcttgggtctgggcacgttgtctagcagcctttctcgggctaagtcggagccttttcgaatcagccccgtaaacagaatgtacgctatctgtagaagctatccaggcttattaatcgttcctcaatccgttcaggacaacgcgctccaacgagtctcacgttgctatcgccagaacaggttccccgtcgtctgttggcgcagtgggagatccaaggctgtgttgctaaggtctggtggcctgcatggtaaaggggtggttgggctcttcaaggcacagaacgccccatccccaggccaatcacaggccgattcttctagtttagaacaggagaaatatcttcaggcggtggtgtcttccatgcccaggtacgcagacgcctctggcagaaacacgctcagcggcttctccagcgctcatatgggcagtcatgtgccttcaccacgcgcaagggtcaccacactgagtaaccccatggctgcaagcgcctccaggcgcacagctcctagaggaaaatgggggagtgtgcgaacgtctggtcgcagttctggactggggaccgacgtgggaagtcgcctggcaggtcgcgatgcgctggctcctccccaagccaacggcggacccccagatcccggtttcctacggccacagagggcagcactatatattttgggagacaaagcccagctgaaaggagtaaggagtgacccgttacagcagtgggaactggttcccatcgaagtgttcgaggccagacaagtgaaggcctcctttaagaagctgctcaaggcatgcgtgcccggatgccctgctgctgaaccttctcctgcttctttcctgcgtagcctcgaggactctgaatggctcattcagatccacaaacttcttcaagtgtcagttctggtagtcgagctgctagattccggctcatcagtccttgtgggactggaggacggttgggatatcaccacccaagttgtcagcctggtccagcttcttagtgaccctttttacagaacccttgagggtttccgcctgttggttgagaaggagtggctctccttcggccatcgcttttcccacaggggagcgcatacactggccggacaatcttcgggtttcacacccgtgtttcttcagtttctggactgtgtacatcaggttcacctccagttccccatggaatttgagttctctcagttctaccttaaatttctgggctaccatcatgtctcccgcagatttagaactttcctgttggatagcgattacgaacgcatcgagttgggtctgctgtacgaagagaagggagaacgaagaggacaggtgccatgcaggagcgtctgggagtacgtggatagactgtccaaacgaaccccagtatttcacaactacatgtacgccccagaggatgctgaggtgctgcgcccatatagtaacgtgtcgaacttgaaggtgtgggatttctacaccgaggagacactggccgagggcccaccctacgactgggagcttgctcagggaccaccggaaccgccagaagaagagagatccgatgggggtgctccgcagagcagacggagggtggtttggccatgctatgactcctgccctcgggctcaacccgacgccatctcacgcctactggaagagctgcagcgcctagaaacagagttggggcagcccgctgagaggtggaaggatacctgggatcgtgtgaaggcggcacagagactggaaggtcggcctgatggcagggggacgccctcctctctgctggtctccacggctccacatcaccgacgatctctgggcgtgtacttacaggagggcccagtcggatctactctgagtttgtctcttgattccgaccagtccagcggatctacaacatccggctcaagacaggctgcaagacggtctacatccaccctgtactcccagttccaaactgccgaatcggaaaacagatcatatgagggaacactgtacaaaaaaggagcgtttatgaagccttggaaggcaaggtggttcgtgctggataagacaaaacatcagctcagatactatgaccaccgagttgacacagaatgtaaaggtgtaatcgacctagctgaggtggaagccgtggctcctggcacccccaccatgggagcccctaagacagtcgatgagaaggccttcttcgacgtcaagacaacaaggagggtgtacaatttctgtgctcaggacgtgccaagcgcgcagcaatgggtggaccgtattcagtcatgcctgtcagatgccta

SEQ ID NO: 134007 - DNA, 5681 bp, Artificial Sequence
  derived and/or modified sequence
atggcccgtctggcagattattttgttttggtggcgtttggccctcatcctagggggtccggcgagggacagggtcagatactccaacgattccccgaaaaggattgggaggacaatcccttcccccagggtatcgaactgttttgtcagcctagtgggtggcagctgtgtcctgagaggaatcctcccactttctttgtggcggtgctgaccgatatcaactccgaacgtcattactgcgcttgtctgacattctgggagcctgccgagccatcccaagagactacccgcgtggaagatgccaccgaaagagaagaggaaggagatgagggtggtcagactcacctcagtccgaccgctccggctcccagtgcacagctcttcgcccctaagactttggtgctagtcagcaggctcgaccatacagaggttttcagaaactcactcggtcttatctacgcgatccatgtagaaggcctcaatgtgtgcctcgagaatgtgattggcaacttgctaacgtgcacagtgcctctcgctggtggtagccaacgcactatttcactgggggctggagaccgccaggtgattcagactcccctggccgattcacttccagtgtctcggtgctcggtggccttgttgttccgccaactgggtatcacaaacgtgctgagcctgttctgcgcagcattgaccgagcataaagtcctgtttctatcgagatcctaccagcgcctcgcggacgcttgtcggggtctgttagccctgttgtttccgctgcgttacagttttacttacgtgcctatcctcccagcccagctgttggaagtgctttccactcccacaccatttattattggggtcaacgcagcttttcaggctgagacccaggagcttctggacgttatcgtggccgatctggacggcggtacagtgacgatcccagaatgtgtgcacatcccacctctaccggaacctttgcagagtcagactcacagcgtgctgtcgatggtgctggatcccgagttggaactagccgacctggcctttccaccacctaccacctcaacgagtagcttaaaaatgcaggacaaggagctccgagcggtgtttctcagacttttcgctcaattgctacaggggtatcgctggtgcctccatgtagtgcgcattcacccagaacccgtcatccggttccataaggccgctttccttggtcagagggggctggtggaagacgactttctgatgaaagtcctagagggcatggcctttgctgggtttgtatctgagaggggggtgccataccggccaacggatctatttgatgaacttgtcgcccacgaggtggctagaatgagagccgatgagaaccacccccagcgggtcttacggcacgtacaggagctggcagagcagctgtataagaacgaaaatccataccctgctgttgcaatgcataaggttcaacgacccggtgaaagcagtcatcttcggagagtcccacgcccttttccgcgactcgatgaaggcacagtgcaatggattgtagaccaggccgctgccaaaatgcaaggagctccacccgctgtgaaagccgagcgaagaacgacagtgccatcggggccacctatgactgcaatactcgagagatgttccggcctgcacgtcaattcagctcggaggctggaagtagtgagaaattgtatatcatatgtgttcgagggcaaaatgctggaggctaagaaactgttgcccgcagtgctcagggctttgaagggtcgggcagcacgcaggtgtttagcacaggagctgcaccttcacgtacagcaaaaccgcgctgtgctggaccatcagcagttcgatttcgtggtgcggatgatgaattgctgcctgcaggactgtacgagtctcgatgagcatggaatcgcagcagcactgctaccgctggtgacggccttttgccgcaaattgagccccggtgttacccaattcgcctacagttgcgttcaggaacacgtcgtgtggtcaacccctcagttctgggaagccatgttctacggagatgtgcagacccatatccgcgctctatatttagagcccacggaggatctggcgccagcacaagaggtcggcgaagccccatctcaggaggacgaacgctcagccctggatgtggcgtcagaacagagacgcctgtggccgactctatctcgggagaagcagcaggaactggtgcagaaggaagagtccacggttttctcccaggctattcactacgcaaataggatgtcctacctgctactgcctctggactcctcgaagtcccggctgttacgggaaagggctgggctcggcgacctcgagtccgctagtaactcactggtcaccaactcaatggccggttccgtggctgagtcctacgacactgaaagcggcttcgaggacgcagagacatgcgatgtggcaggggctgttgtgcgcttcatcaaccgcttcgtagataaggtgtgcaccgaaagtggggtgacatctgatcacctgaaaggcctacatgtgatggtgccagacatcgtacagatgcatatagaaacactcgaggctgtgcaacgcgaatccaggagactgcccccaatccagaagccaaaactgctaaggccaagactgctgccaggagaggaatgtgtgttggacggactgcgagtatacctgctgccagatggacgcgaagagggcgctggcggtagcgctggaggcccagctctcttgcccgcagagggtgctgtgttcctgactacttatcgcgtgattttcactggaatgccaacagaccctctcgtaggggagcaagtggtagtgagatcatttcctgtagccgctctgaccaaggagaaaaggatcagtgtgcagacaccagtcgaccagctgttgcaggatggcctgcagttacgcagttgtactttccagctcttgaaaatggctttcgacgaggaggtcggctcagactctgctgaactgtttagaaagcagctccataagttgaggtatccaccggatatccgcgcaacctttgcattcacactcggcagtgcacacaccccaggacgcccacctagagtaacaaaggataagggacccagcctccgaaccctttcacggaacctcgtaaaaaacgctaagaagaccatcggacgacagcacgtgaccagaaagaagtataatccaccatcatgggagcaccggggacagccaccaccggaggaccaggaggatgaaatctccgtgtctgaagaacttgaaccctcaacactgactccatcttccgccctgaagccctccgaccgaatgacaatgagctccctggtggagcgcgcatgttgtcgcgattatcagcgcctcggcctggggacactttcaagctccctctctcgggcaaagagcgaaccctttcgaatatcccccgttaaccgtatgtacgccatctgccgttcttaccccggactactcattgtgccgcagtcagtccaggacaacgctttacagagggtgagcaggtgctataggcaaaatagattccccgtggtgtgctggaggagcggcaggagtaaggcggtcctgctccgttccggaggtctccacggcaaaggggttgtgggcctttttaaagcgcagaacgcacccagccctggccagtcacaagccgattcttctagcctcgagcaggaaaagtatttgcaggcggtagtgtcgagcatgcctcggtacgccgatgctagcggccgtaatacattatcggggttctcctccgcgcacatgggatcccacgtgccctctccccgtgcaagagttaccactctgtcaaatccaatggccgctagcgcctctagaaggaccgcacccagggggaagtggggatctgtcagaacaagcggtcgatcatccggcttggggactgacgtgggaagccgcctggccggaagagatgccctggcccctccacaggcaaacgggggtccccctgatcccggatttctcaggccccagcgagctgccttgtacatcctaggcgacaaggcgcagttgaaaggggtgcgatctgacccgctacagcagtgggaacttgtgccaatcgaggtattcgaagccagacaggttaaagccagtttcaaaaagctcctcaaggcgtgcgttccagggtgcccagccgcagaacccagccccgcaagcttcctgagatccctggaagactctgaatggttgatccagatccacaaactgctgcaggtcagcgtactggttgtcgagctcctagactcaggcagcagtgtgttggtgggcttggaagatggctgggatataacgacccaggtggtgtcgctggtgcagctgttgagtgatcccttctacagaacactcgagggcttccgccttctggtggaaaaggagtggctctcttttggtcatagattctctcatcggggagcccataccttggctggtcagtcaagtggctttacgccggttttcctccaatttctcgactgcgtgcaccaagtgcacctgcaattcccaatggagtttgagttcagtcagttttaccttaaatttttgggttatcatcacgtatcgcgtcgttttcgcacctttctgcttgacagcgattacgaacgcattgaacttgggctcttgtacgaggaaaaaggggagcgcagggggcaggtgccatgtcgaagtgtttgggaatacgtagatagactctccaagaggacacctgtgtttcataattacatgtatgcacccgaggacgcagaggtactccggccatactccaacgtaagcaatttaaaggtgtgggacttctatactgaggagactcttgcagaggggcctccctacgattgggaactcgcccaaggccctcccgagccccctgaagaagaaagaagcgacggtggggctccacaaagtcgacgcagagtagtttggccatgttatgactcatgcccacgggcacagcctgacgccatatctcgactattggaagagcttcagcgtctggagactgagctcggccagcccgcagagcgatggaaagacacatgggaccgcgtcaaagcagcccagcgactggaaggtcggccagacgggagggggacacctagctccttgctcgtgtccaccgcccctcaccaccgcaggtccttgggcgtgtacttgcaagaagggccagtggggtcaactctttctctctcactggacagcgatcagagcagtggtagcaccacttccgggtctcgtcaggctgcaagaaggtccacaagtacactgtacagtcagttccaaaccgccgagtcagagaatcgatcttacgagggcaccttgtataaaaaaggggcttttatgaagccttggaaggcgagatggttcgtgctcgataagaccaaacatcagcttagatactacgaccatagagtagatacagaatgtaagggggttatagacttggcagaggttgaggccgtggcacctggcacacccactatgggagcccctaaaactgtagacgagaaggcatttttcgatgtcaaaacaacacgaagggtgtataatttttgcgcacaggacgtcccttctgcacaacagtgggtagaccgtatacaatcttgtctgagcgatgctta

SEQ ID NO: 134008 - DNA, 5735 bp, Artificial Sequence
  derived and/or modified sequence
gggcgggccggctggctgggaagatggcggcgggaacctgggccgccgccgccgccgccgccgccgcggactacttcgtgctggtggcgttcgggccgcacccgcgcgggagtggggaaggccagggccagattctgcagcgcttcccagagaaggactgggaggacaacccattcccccagggcatcgagctgttttgccagcccagcgggtggcagctgtgtcccgagaggaatccaccgaccttctttgttgctgtcctcaccgacatcaactccgagcgccactactgcgcctgcttgaccttctgggagccagcggagccttcacaggaaacgacgcgcgtggaggatgccacagagagggaggaagagggggatgagggaggccagacccacctgtctcccacagcacctgccccatctgcccagctgtttgcaccgaagacgctggtactggtgtcgcgactcgaccacacggaggtgttcaggaacagccttggcctcatctatgccatccacgtggagggcctgaatgtgtgcctggagaacgtgattgggaacctgctgacgtgcactgtgcccctggctgggggctcgcagaggacgatctctttgggggctggtgaccggcaggtcatccagactccactggccgactcgctgcccgtcagccgctgcagcgtggccctgctcttccgccagctaggcatcaccaacgtgctgtctttgttctgtgccgccctcacggagcacaaggttctcttcctgtcccggagctaccagcggctcgccgatgcctgtaggggcctcctggcactgctgtttcctctcagatacagcttcacctatgtgcccatcctgccggctcagctgctggaggtcctcagcacacccacgcccttcatcattggggtcaacgcggccttccaggcagagacccaggagctgctcgatgtgattgttgctgatctggatggagggacggtcaccattcctgagtgtgtgcacattccacccttgccagagccactgcagagtcagacgcacagtgtgctgagcatggtcctggacccggagctggagttggctgacctcgccttccctccgcccacgacatccacctcctccctgaagatgcaggacaaggagctgcgcgcggtcttcctgcggctgttcgctcagctgctgcagggctatcgctggtgcctgcacgtcgtgcgcatccacccggagcctgtcatccgcttccataaggcagccttcctgggccagcgtgggctggtagaggacgatttcctgatgaaggtgctggagggcatggcctttgctggctttgtgtcagagcgtggggtcccataccgccctacggacctgttcgatgagctggtggcccacgaggtggcaaggatgcgggcggatgagaaccacccccagcgtgtcctgcgtcacgtccaggaactggcagagcagctctacaagaacgagaacccgtacccagccgtggcgatgcacaaggtacagaggcccggtgagagcagccacctgcgacgggtgccccgacccttcccccggctggatgagggcaccgtgcagtggatcgtggaccaggctgcagccaagatgcagggtgcacccccagctgtgaaggccgagaggaggaccaccgtgccctcagggccccccatgactgccatactggagcggtgcagtgggctgcatgtcaacagcgcccggcggctggaggttgtgcgcaactgcatctcctacgtgtttgaggggaaaatgcttgaggccaagaagctgctcccagccgtgttgagggccctgaaggggcgagctgcccgccgctgcctcgcccaggagctgcacctgcatgtgcagcagaaccgtgcggtcctggaccaccagcagtttgactttgtcgtccgtatgatgaactgctgcctgcaggactgcacttctctggacgagcatggcattgcggcggctctgctgcctctggtcacagccttctgccggaagctgagcccgggggtgacgcagtttgcatacagctgtgtgcaggagcacgtggtgtggagcacgccacagttctgggaggccatgttctatggggatgtgcagactcacatccgggccctctacctggagcccacggaggacctggcccccgcccaggaggttggggaggcaccttcccaggaggacgagcgctctgccctagacgtggcttctgagcagcggcgcttgtggccaactctgagtcgtgagaagcagcaggagctggtgcagaaggaggagagcacggtgttcagccaggccatccactatgccaaccgcatgagctacctcctcctgcccctggacagcagcaagagccgcctacttcgggagcgtgccgggctgggcgacctggagagcgccagcaacagcctggtcaccaacagcatggctggcagtgtggccgagagctatgacacggagagcggcttcgaggatgcagagacctgcgacgtagctggggctgtggtccgcttcatcaaccgctttgtggacaaggtctgcacggagagtggggtcaccagcgaccacctcaaggggctgcatgtcatggtgccagacattgtccagatgcacatcgagaccctggaggccgtgcagcgggagagccggaggctgccgcccatccagaagcccaagctgctgcggccgcgcctgctgccgggtgaggagtgtgtgctggacggcctgcgcgtctacctgctgccggatgggcgtgaggagggcgcggggggcagtgctgggggaccagcattgctcccagctgagggcgccgtcttcctcaccacgtaccgggtcatcttcacggggatgcccacggaccccctggttggggagcaggtggtggtccgctccttcccggtggctgcgctgaccaaggagaagcgcatcagcgtccagacccctgtggaccagctcctgcaggacgggctccagctgcgctcctgcacattccagctgctgaaaatggcctttgacgaggaggtggggtctgacagcgccgagctcttccgtaagcagctgcataagctgcggtacccgccggacatcagggccacctttgcgttcaccttgggctctgcccacacacctggccggccaccgcgagtcaccaaggacaagggtccttccctcagaaccctgtcccggaacctggtcaagaacgccaagaagaccatcgggcggcagcatgtcactcgcaagaagtacaacccccccagctgggagcaccggggccagccgccccctgaggaccaggaggacgagatctcagtgtcggaggagctggagcccagcacgctgaccccgtcctcagccctgaagccctccgaccgcatgaccatgagcagcctggtggaaagggcttgctgtcgcgactaccagcgcctcggtctgggcaccctgagcagcagcctgagccgggccaagtctgagcccttccgcatttctccggtcaaccgcatgtatgccatctgccgcagctacccagggctgctgatcgtgccccagagtgtccaggacaacgccctgcagcgcgtgtcccgctgctaccgccagaaccgcttccccgtggtctgctggcgcagcgggcggtccaaggcggtgctgctgcgctctggaggcctgcatggcaaaggtgtcgtcggcctcttcaaggcccagaacgcaccttctccaggccagtcccaggcggactcgagtagcctggagcaggagaagtacctgcaggctgtggtcagctccatgccccgctacgccgacgcgtcgggacgcaacacgcttagcggcttctcctcagcccacatgggcagtcacgttcccagccccagagccagggtcaccacgctgtccaaccccatggcggcctcggcctccagacggaccgcaccccgaggtaagtggggcagtgtccggaccagtggacgcagcagtggccttggcaccgatgtgggctcccggctagctggcagagacgcgctggccccaccccaggccaacgggggccctcccgacccgggcttcctgcgtccgcagcgagcagccctctatatccttggggacaaagcccagctcaagggtgtgcggtcagaccccctgcagcagtgggagctggtgcccattgaggtattcgaggcacggcaggtgaaggctagcttcaagaagctgctgaaagcatgtgtcccaggctgccccgctgctgagcccagcccagcctccttcctgcgctcactggaggactcagagtggctgatccagatccacaagctgctgcaggtgtctgtgctggtggtggagctcctggattcaggctcctccgtgctggtgggcctggaggatggctgggacatcaccacccaggtggtatccttggtgcagctgctctcagaccccttctaccgcacgctggagggctttcgcctgctggtggagaaggagtggctgtccttcggccatcgcttcagccaccgtggagctcacaccctggccgggcagagcagcggcttcacacccgtcttcctgcagttcctggactgcgtacaccaggtccacctgcagttccccatggagtttgagttcagccagttctacctcaagttcctcggctaccaccatgtgtcccgccgtttccggaccttcctgctcgactctgactatgagcgcattgagctggggctgctgtatgaggagaagggggaacgcaggggccaggtgccgtgcaggtctgtgtgggagtatgtggaccggctgagcaagaggacgcctgtgttccacaattacatgtatgcgcccgaggacgcagaggtcctgcggccctacagcaacgtgtccaacctgaaggtgtgggacttctacactgaggagacgctggccgagggccctccctatgactgggaactggcccaggggccccctgaacccccagaggaagaacggtctgatggaggcgctccccagagcaggcgccgcgtggtgtggccctgttacgacagctgcccgcgggcccagcctgacgccatctcacgcctgctggaggagctgcagaggctggagacagagttgggccaacccgctgagcgctggaaggacacctgggaccgggtgaaggctgcacagcgcctcgagggccggccagacggccgtggcacccctagctccctccttgtgtccaccgcaccccaccaccgtcgctcgctgggtgtgtacctgcaggaggggcccgtgggctccaccctgagcctcagcctggacagcgaccagagtagtggctcaaccacatccggctcccgtcaggctgcccgccgcagcaccagcaccctgtacagccagttccagacagcagagagtgagaacaggtcctacgagggcactctgtacaagaagggggccttcatgaagccttggaaggcccgctggttcgtgctggacaagaccaagcaccagctgcgctactacgaccaccgtgtggacacagagtgcaagggtgtcatcgacttggcggaggtggaggctgtggcacctggcacgcccactatgggtgcccctaagactgtggacgagaaggccttctttgacgtgaagacaacgcgtcgcgtttacaacttctgtgcccaggacgtgccctcggcccagcagtgggtggaccggatccagagctgcctgtcggacgcctga

SEQ ID NO: 134009 - DNA, 6253 bp, Artificial Sequence
  derived and/or modified sequence
ctggctgggaagatggcggcgggaacctgggccgccgccgccgccgccgccgccgccgcggagcgaaccaggggtgtccggggtgcgcggtccagggccggggccgggccatgagcgcgccgtcctcgagtccccgagccgcggagcccgcccgcgcccctcgggccgccccgcgtccctcgccatggcgcggctcgcggactacttcgtgctggtggcgttcgggccgcacccgcgcgggagtggggaaggccagggccagattctgcagcgcttcccagagaaggactgggaggacaacccattcccccagggcatcgagctgttttgccagcccagcgggtggcagctgtgtcccgagaggaatccaccgaccttctttgttgctgtcctcaccgacatcaactccgagcgccactactgcgcctgcttgaccttctgggagccagcggagccttcacaggaaacgacgcgcgtggaggatgccacagagagggaggaagagggggatgagggaggccagacccacctgtctcccacagcacctgccccatctgcccagctgtttgcaccgaagacgctggtactggtgtcgcgactcgaccacacggaggtgttcaggaacagccttggcctcatctatgccatccacgtggagggcctgaatgtgtgcctggagaacgtgattgggaacctgctgacgtgcactgtgcccctggctgggggctcgcagaggacgatctctttgggggctggtgaccggcaggtcatccagactccactggccgactcgctgcccgtcagccgctgcagcgtggccctgctcttccgccagctaggcatcaccaacgtgctgtctttgttctgtgccgccctcacggagcacaaggttctcttcctgtcccggagctaccagcggctcgccgatgcctgtaggggcctcctggcactgctgtttcctctcagatacagcttcacctatgtgcccatcctgccggctcagctgctggaggtcctcagcacacccacgcccttcatcattggggtcaacgcggccttccaggcagagacccaggagctgctcgatgtgattgttgctgatctggatggagggacggtcaccattcctgagtgtgtgcacattccacccttgccagagccactgcagagtcagacgcacagtgtgctgagcatggtcctggacccggagctggagttggctgacctcgccttccctccgcccacgacatccacctcctccctgaagatgcaggacaaggagctgcgcgcggtcttcctgcggctgttcgctcagctgctgcagggctatcgctggtgcctgcacgtcgtgcgcatccacccggagcctgtcatccgcttccataaggcagccttcctgggccagcgtgggctggtagaggacgatttcctgatgaaggtgctggagggcatggcctttgctggctttgtgtcagagcgtggggtcccataccgccctacggacctgttcgatgagctggtggcccacgaggtggcaaggatgcgggcggatgagaaccacccccagcgtgtcctgcgtcacgtccaggaactggcagagcagctctacaagaacgagaacccgtacccagccgtggcgatgcacaaggtacagaggcccggtgagagcagccacctgcgacgggtgccccgacccttcccccggctggatgagggcaccgtgcagtggatcgtggaccaggctgcagccaagatgcagggtgcacccccagctgtgaaggccgagaggaggaccaccgtgccctcagggccccccatgactgccatactggagcggtgcagtgggctgcatgtcaacagcgcccggcggctggaggttgtgcgcaactgcatctcctacgtgtttgaggggaaaatgcttgaggccaagaagctgctcccagccgtgttgagggccctgaaggggcgagctgcccgccgctgcctcgcccaggagctgcacctgcatgtgcagcagaaccgtgcggtcctggaccaccagcagtttgactttgtcgtccgtatgatgaactgctgcctgcaggactgcacttctctggacgagcatggcattgcggcggctctgctgcctctggtcacagccttctgccggaagctgagcccgggggtgacgcagtttgcatacagctgtgtgcaggagcacgtggtgtggagcacgccacagttctgggaggccatgttctatggggatgtgcagactcacatccgggccctctacctggagcccacggaggacctggcccccgcccaggaggttggggaggcaccttcccaggaggacgagcgctctgccctagacgtggcttctgagcagcggcgcttgtggccaactctgagtcgtgagaagcagcaggagctggtgcagaaggaggagagcacggtgttcagccaggccatccactatgccaaccgcatgagctacctcctcctgcccctggacagcagcaagagccgcctacttcgggagcgtgccgggctgggcgacctggagagcgccagcaacagcctggtcaccaacagcatggctggcagtgtggccgagagctatgacacggagagcggcttcgaggatgcagagacctgcgacgtagctggggctgtggtccgcttcatcaaccgctttgtggacaaggtctgcacggagagtggggtcaccagcgaccacctcaaggggctgcatgtcatggtgccagacattgtccagatgcacatcgagaccctggaggccgtgcagcgggagagccggaggctgccgcccatccagaagcccaagctgctgcggccgcgcctgctgccgggtgaggagtgtgtgctggacggcctgcgcgtctacctgctgccggatgggcgtgaggagggcgcggggggcagtgctgggggaccagcattgctcccagctgagggcgccgtcttcctcaccacgtaccgggtcatcttcacggggatgcccacggaccccctggttggggagcaggtggtggtccgctccttcccggtggctgcgctgaccaaggagaagcgcatcagcgtccagacccctgtggaccagctcctgcaggacgggctccagctgcgctcctgcacattccagctgctgaaaatggcctttgacgaggaggtggggtctgacagcgccgagctcttccgtaagcagctgcataagctgcggtacccgccggacatcagggccacctttgcgttcaccttgggctctgcccacacacctggccggccaccgcgagtcaccaaggacaagggtccttccctcagaaccctgtcccggaacctggtcaagaacgccaagaagaccatcgggcggcagcatgtcactcgcaagaagtacaacccccccagctgggagcaccggggccagccgccccctgaggaccaggaggacgagatctcagtgtcggaggagctggagcccagcacgctgaccccgtcctcagccctgaagccctccgaccgcatgaccatgagcagcctggtggaaagggcttgctgtcgcgactaccagcgcctcggtctgggcaccctgagcagcagcctgagccgggccaagtctgagcccttccgcatttctccggtcaaccgcatgtatgccatctgccgcagctacccagggctgctgatcgtgccccagagtgtccaggacaacgccctgcagcgcgtgtcccgctgctaccgccagaaccgcttccccgtggtctgctggcgcagcgggcggtccaaggcggtgctgctgcgctctggaggcctgcatggcaaaggtgtcgtcggcctcttcaaggcccagaacgcaccttctccaggccagtcccaggcggactcgagtagcctggagcaggagaagtacctgcaggctgtggtcagctccatgccccgctacgccgacgcgtcgggacgcaacacgcttagcggcttctcctcagcccacatgggcagtcacgttcccagccccagagccagggtcaccacgctgtccaaccccatggcggcctcggcctccagacggaccgcaccccgaggtaagtggggcagtgtccggaccagtggacgcagcagtggccttggcaccgatgtgggctcccggctagctggcagagacgcgctggccccaccccaggccaacgggggccctcccgacccgggcttcctgcgtccgcagcgagcagccctctatatccttggggacaaagcccagctcaagggtgtgcggtcagaccccctgcagcagtgggagctggtgcccattgaggtattcgaggcacggcaggtgaaggctagcttcaagaagctgctgaaagcatgtgtcccaggctgccccgctgctgagcccagcccagcctccttcctgcgctcactggaggactcagagtggctgatccagatccacaagctgctgcaggtgtctgtgctggtggtggagctcctggattcaggctcctccgtgctggtgggcctggaggatggctgggacatcaccacccaggtggtatccttggtgcagctgctctcagaccccttctaccgcacgctggagggctttcgcctgctggtggagaaggagtggctgtccttcggccatcgcttcagccaccgtggagctcacaccctggccgggcagagcagcggcttcacacccgtcttcctgcagttcctggactgcgtacaccaggtccacctgcagttccccatggagtttgagttcagccagttctacctcaagttcctcggctaccaccatgtgtcccgccgtttccggaccttcctgctcgactctgactatgagcgcattgagctggggctgctgtatgaggagaagggggaacgcaggggccaggtgccgtgcaggtctgtgtgggagtatgtggaccggctgagcaagaggacgcctgtgttccacaattacatgtatgcgcccgaggacgcagaggtcctgcggccctacagcaacgtgtccaacctgaaggtgtgggacttctacactgaggagacgctggccgagggccctccctatgactgggaactggcccaggggccccctgaacccccagaggaagaacggtctgatggaggcgctccccagagcaggcgccgcgtggtgtggccctgttacgacagctgcccgcgggcccagcctgacgccatctcacgcctgctggaggagctgcagaggctggagacagagttgggccaacccgctgagcgctggaaggacacctgggaccgggtgaaggctgcacagcgcctcgagggccggccagacggccgtggcacccctagctccctccttgtgtccaccgcaccccaccaccgtcgctcgctgggtgtgtacctgcaggaggggcccgtgggctccaccctgagcctcagcctggacagcgaccagagtagtggctcaaccacatccggctcccgtcaggctgcccgccgcagcaccagcaccctgtacagccagttccagacagcagagagtgagaacaggtcctacgagggcactctgtacaagaagggggccttcatgaagccttggaaggcccgctggttcgtgctggacaagaccaagcaccagctgcgctactacgaccaccgtgtggacacagagtgcaagggtgtcatcgacttggcggaggtggaggctgtggcacctggcacgcccactatgggtgcccctaagactgtggacgagaaggccttctttgacgtgaagacaacgcgtcgcgtttacaacttctgtgcccaggacgtgccctcggcccagcagtgggtggaccggatccagagctgcctgtcggacgcctgagcctcccagccctgcccggctgctctgcttccggtcgttaccgaccactaggggtgggcagggccgccccggccatgtttacagccccggccctcgacagtattgaggccccgagcccccagcacttgtgtgtacagcccccgtccccgccccgccccgcccggccggccctaacttattttggcgtcacagctgagcaccgtgccgggaggtggccaaggtacagcccgcaatgggcctgtaaatagtccggccccgtcagcgtgtgctggtccagccagcggctgcaggcgagtttctagaaccagagtctatataaagagagaactaacgccacgctcctgtgcctgccttccccactccccggctgcctgctctcggcctacc

SEQ ID NO: 134010 - DNA, 5712 bp, Artificial Sequence
  derived and/or modified sequence
atggccgccggcacctgggccgccgccgccgccgccgccgccgccgactacttcgtgctggtggccttcggcccccaccccagaggcagcggcgagggccagggccagatcctgcagagattccccgagaaggactgggaggacaaccccttcccccagggcatcgagctgttctgccagcccagcggctggcagctgtgccccgagagaaacccccccaccttcttcgtggccgtgctgaccgacatcaacagcgagagacactactgcgcctgcctgaccttctgggagcccgccgagcccagccaggagaccaccagagtggaggacgccaccgagagagaggaggagggcgacgagggcggccagacccacctgagccccaccgcccccgcccccagcgcccagctgttcgcccccaagaccctggtgctggtgagcagactggaccacaccgaggtgttcagaaacagcctgggcctgatctacgccatccacgtggagggcctgaacgtgtgcctggagaacgtgatcggcaacctgctgacctgcaccgtgcccctggccggcggcagccagagaaccatcagcctgggcgccggcgacagacaggtgatccagacccccctggccgacagcctgcccgtgagcagatgcagcgtggccctgctgttcagacagctgggcatcaccaacgtgctgagcctgttctgcgccgccctgaccgagcacaaggtgctgttcctgagcagaagctaccagagactggccgacgcctgcagaggcctgctggccctgctgttccccctgagatacagcttcacctacgtgcccatcctgcccgcccagctgctggaggtgctgagcacccccacccccttcatcatcggcgtgaacgccgccttccaggccgagacccaggagctgctggacgtgatcgtggccgacctggacggcggcaccgtgaccatccccgagtgcgtgcacatcccccccctgcccgagcccctgcagagccagacccacagcgtgctgagcatggtgctggaccccgagctggagctggccgacctggccttccccccccccaccaccagcaccagcagcctgaagatgcaggacaaggagctgagagccgtgttcctgagactgttcgcccagctgctgcagggctacagatggtgcctgcacgtggtgagaatccaccccgagcccgtgatcagattccacaaggccgccttcctgggccagagaggcctggtggaggacgacttcctgatgaaggtgctggagggcatggccttcgccggcttcgtgagcgagagaggcgtgccctacagacccaccgacctgttcgacgagctggtggcccacgaggtggccagaatgagagccgacgagaaccacccccagagagtgctgagacacgtgcaggagctggccgagcagctgtacaagaacgagaacccctaccccgccgtggccatgcacaaggtgcagagacccggcgagagcagccacctgagaagagtgcccagacccttccccagactggacgagggcaccgtgcagtggatcgtggaccaggccgccgccaagatgcagggcgccccccccgccgtgaaggccgagagaagaaccaccgtgcccagcggcccccccatgaccgccatcctggagagatgcagcggcctgcacgtgaacagcgccagaagactggaggtggtgagaaactgcatcagctacgtgttcgagggcaagatgctggaggccaagaagctgctgcccgccgtgctgagagccctgaagggcagagccgccagaagatgcctggcccaggagctgcacctgcacgtgcagcagaacagagccgtgctggaccaccagcagttcgacttcgtggtgagaatgatgaactgctgcctgcaggactgcaccagcctggacgagcacggcatcgccgccgccctgctgcccctggtgaccgccttctgcagaaagctgagccccggcgtgacccagttcgcctacagctgcgtgcaggagcacgtggtgtggagcaccccccagttctgggaggccatgttctacggcgacgtgcagacccacatcagagccctgtacctggagcccaccgaggacctggcccccgcccaggaggtgggcgaggcccccagccaggaggacgagagaagcgccctggacgtggccagcgagcagagaagactgtggcccaccctgagcagagagaagcagcaggagctggtgcagaaggaggagagcaccgtgttcagccaggccatccactacgccaacagaatgagctacctgctgctgcccctggacagcagcaagagcagactgctgagagagagagccggcctgggcgacctggagagcgccagcaacagcctggtgaccaacagcatggccggcagcgtggccgagagctacgacaccgagagcggcttcgaggacgccgagacctgcgacgtggccggcgccgtggtgagattcatcaacagattcgtggacaaggtgtgcaccgagagcggcgtgaccagcgaccacctgaagggcctgcacgtgatggtgcccgacatcgtgcagatgcacatcgagaccctggaggccgtgcagagagagagcagaagactgccccccatccagaagcccaagctgctgagacccagactgctgcccggcgaggagtgcgtgctggacggcctgagagtgtacctgctgcccgacggcagagaggagggcgccggcggcagcgccggcggccccgccctgctgcccgccgagggcgccgtgttcctgaccacctacagagtgatcttcaccggcatgcccaccgaccccctggtgggcgagcaggtggtggtgagaagcttccccgtggccgccctgaccaaggagaagagaatcagcgtgcagacccccgtggaccagctgctgcaggacggcctgcagctgagaagctgcaccttccagctgctgaagatggccttcgacgaggaggtgggcagcgacagcgccgagctgttcagaaagcagctgcacaagctgagatacccccccgacatcagagccaccttcgccttcaccctgggcagcgcccacacccccggcagaccccccagagtgaccaaggacaagggccccagcctgagaaccctgagcagaaacctggtgaagaacgccaagaagaccatcggcagacagcacgtgaccagaaagaagtacaacccccccagctgggagcacagaggccagcccccccccgaggaccaggaggacgagatcagcgtgagcgaggagctggagcccagcaccctgacccccagcagcgccctgaagcccagcgacagaatgaccatgagcagcctggtggagagagcctgctgcagagactaccagagactgggcctgggcaccctgagcagcagcctgagcagagccaagagcgagcccttcagaatcagccccgtgaacagaatgtacgccatctgcagaagctaccccggcctgctgatcgtgccccagagcgtgcaggacaacgccctgcagagagtgagcagatgctacagacagaacagattccccgtggtgtgctggagaagcggcagaagcaaggccgtgctgctgagaagcggcggcctgcacggcaagggcgtggtgggcctgttcaaggcccagaacgcccccagccccggccagagccaggccgacagcagcagcctggagcaggagaagtacctgcaggccgtggtgagcagcatgcccagatacgccgacgccagcggcagaaacaccctgagcggcttcagcagcgcccacatgggcagccacgtgcccagccccagagccagagtgaccaccctgagcaaccccatggccgccagcgccagcagaagaaccgcccccagaggcaagtggggcagcgtgagaaccagcggcagaagcagcggcctgggcaccgacgtgggcagcagactggccggcagagacgccctggcccccccccaggccaacggcggcccccccgaccccggcttcctgagaccccagagagccgccctgtacatcctgggcgacaaggcccagctgaagggcgtgagaagcgaccccctgcagcagtgggagctggtgcccatcgaggtgttcgaggccagacaggtgaaggccagcttcaagaagctgctgaaggcctgcgtgcccggctgccccgccgccgagcccagccccgccagcttcctgagaagcctggaggacagcgagtggctgatccagatccacaagctgctgcaggtgagcgtgctggtggtggagctgctggacagcggcagcagcgtgctggtgggcctggaggacggctgggacatcaccacccaggtggtgagcctggtgcagctgctgagcgaccccttctacagaaccctggagggcttcagactgctggtggagaaggagtggctgagcttcggccacagattcagccacagaggcgcccacaccctggccggccagagcagcggcttcacccccgtgttcctgcagttcctggactgcgtgcaccaggtgcacctgcagttccccatggagttcgagttcagccagttctacctgaagttcctgggctaccaccacgtgagcagaagattcagaaccttcctgctggacagcgactacgagagaatcgagctgggcctgctgtacgaggagaagggcgagagaagaggccaggtgccctgcagaagcgtgtgggagtacgtggacagactgagcaagagaacccccgtgttccacaactacatgtacgcccccgaggacgccgaggtgctgagaccctacagcaacgtgagcaacctgaaggtgtgggacttctacaccgaggagaccctggccgagggccccccctacgactgggagctggcccagggcccccccgagccccccgaggaggagagaagcgacggcggcgccccccagagcagaagaagagtggtgtggccctgctacgacagctgccccagagcccagcccgacgccatcagcagactgctggaggagctgcagagactggagaccgagctgggccagcccgccgagagatggaaggacacctgggacagagtgaaggccgcccagagactggagggcagacccgacggcagaggcacccccagcagcctgctggtgagcaccgccccccaccacagaagaagcctgggcgtgtacctgcaggagggccccgtgggcagcaccctgagcctgagcctggacagcgaccagagcagcggcagcaccaccagcggcagcagacaggccgccagaagaagcaccagcaccctgtacagccagttccagaccgccgagagcgagaacagaagctacgagggcaccctgtacaagaagggcgccttcatgaagccctggaaggccagatggttcgtgctggacaagaccaagcaccagctgagatactacgaccacagagtggacaccgagtgcaagggcgtgatcgacctggccgaggtggaggccgtggcccccggcacccccaccatgggcgcccccaagaccgtggacgagaaggccttcttcgacgtgaagaccaccagaagagtgtacaacttctgcgcccaggacgtgcccagcgcccagcagtgggtggacagaatccagagctgcctgagcgacgcctag

SEQ ID NO: 134011 - DNA, 5682 bp, Artificial Sequence
  derived and/or modified sequence
atggccagactggccgactacttcgtgctggtggccttcggcccccaccccagaggcagcggcgagggccagggccagatcctgcagagattccccgagaaggactgggaggacaaccccttcccccagggcatcgagctgttctgccagcccagcggctggcagctgtgccccgagagaaacccccccaccttcttcgtggccgtgctgaccgacatcaacagcgagagacactactgcgcctgcctgaccttctgggagcccgccgagcccagccaggagaccaccagagtggaggacgccaccgagagagaggaggagggcgacgagggcggccagacccacctgagccccaccgcccccgcccccagcgcccagctgttcgcccccaagaccctggtgctggtgagcagactggaccacaccgaggtgttcagaaacagcctgggcctgatctacgccatccacgtggagggcctgaacgtgtgcctggagaacgtgatcggcaacctgctgacctgcaccgtgcccctggccggcggcagccagagaaccatcagcctgggcgccggcgacagacaggtgatccagacccccctggccgacagcctgcccgtgagcagatgcagcgtggccctgctgttcagacagctgggcatcaccaacgtgctgagcctgttctgcgccgccctgaccgagcacaaggtgctgttcctgagcagaagctaccagagactggccgacgcctgcagaggcctgctggccctgctgttccccctgagatacagcttcacctacgtgcccatcctgcccgcccagctgctggaggtgctgagcacccccacccccttcatcatcggcgtgaacgccgccttccaggccgagacccaggagctgctggacgtgatcgtggccgacctggacggcggcaccgtgaccatccccgagtgcgtgcacatcccccccctgcccgagcccctgcagagccagacccacagcgtgctgagcatggtgctggaccccgagctggagctggccgacctggccttccccccccccaccaccagcaccagcagcctgaagatgcaggacaaggagctgagagccgtgttcctgagactgttcgcccagctgctgcagggctacagatggtgcctgcacgtggtgagaatccaccccgagcccgtgatcagattccacaaggccgccttcctgggccagagaggcctggtggaggacgacttcctgatgaaggtgctggagggcatggccttcgccggcttcgtgagcgagagaggcgtgccctacagacccaccgacctgttcgacgagctggtggcccacgaggtggccagaatgagagccgacgagaaccacccccagagagtgctgagacacgtgcaggagctggccgagcagctgtacaagaacgagaacccctaccccgccgtggccatgcacaaggtgcagagacccggcgagagcagccacctgagaagagtgcccagacccttccccagactggacgagggcaccgtgcagtggatcgtggaccaggccgccgccaagatgcagggcgccccccccgccgtgaaggccgagagaagaaccaccgtgcccagcggcccccccatgaccgccatcctggagagatgcagcggcctgcacgtgaacagcgccagaagactggaggtggtgagaaactgcatcagctacgtgttcgagggcaagatgctggaggccaagaagctgctgcccgccgtgctgagagccctgaagggcagagccgccagaagatgcctggcccaggagctgcacctgcacgtgcagcagaacagagccgtgctggaccaccagcagttcgacttcgtggtgagaatgatgaactgctgcctgcaggactgcaccagcctggacgagcacggcatcgccgccgccctgctgcccctggtgaccgccttctgcagaaagctgagccccggcgtgacccagttcgcctacagctgcgtgcaggagcacgtggtgtggagcaccccccagttctgggaggccatgttctacggcgacgtgcagacccacatcagagccctgtacctggagcccaccgaggacctggcccccgcccaggaggtgggcgaggcccccagccaggaggacgagagaagcgccctggacgtggccagcgagcagagaagactgtggcccaccctgagcagagagaagcagcaggagctggtgcagaaggaggagagcaccgtgttcagccaggccatccactacgccaacagaatgagctacctgctgctgcccctggacagcagcaagagcagactgctgagagagagagccggcctgggcgacctggagagcgccagcaacagcctggtgaccaacagcatggccggcagcgtggccgagagctacgacaccgagagcggcttcgaggacgccgagacctgcgacgtggccggcgccgtggtgagattcatcaacagattcgtggacaaggtgtgcaccgagagcggcgtgaccagcgaccacctgaagggcctgcacgtgatggtgcccgacatcgtgcagatgcacatcgagaccctggaggccgtgcagagagagagcagaagactgccccccatccagaagcccaagctgctgagacccagactgctgcccggcgaggagtgcgtgctggacggcctgagagtgtacctgctgcccgacggcagagaggagggcgccggcggcagcgccggcggccccgccctgctgcccgccgagggcgccgtgttcctgaccacctacagagtgatcttcaccggcatgcccaccgaccccctggtgggcgagcaggtggtggtgagaagcttccccgtggccgccctgaccaaggagaagagaatcagcgtgcagacccccgtggaccagctgctgcaggacggcctgcagctgagaagctgcaccttccagctgctgaagatggccttcgacgaggaggtgggcagcgacagcgccgagctgttcagaaagcagctgcacaagctgagatacccccccgacatcagagccaccttcgccttcaccctgggcagcgcccacacccccggcagaccccccagagtgaccaaggacaagggccccagcctgagaaccctgagcagaaacctggtgaagaacgccaagaagaccatcggcagacagcacgtgaccagaaagaagtacaacccccccagctgggagcacagaggccagcccccccccgaggaccaggaggacgagatcagcgtgagcgaggagctggagcccagcaccctgacccccagcagcgccctgaagcccagcgacagaatgaccatgagcagcctggtggagagagcctgctgcagagactaccagagactgggcctgggcaccctgagcagcagcctgagcagagccaagagcgagcccttcagaatcagccccgtgaacagaatgtacgccatctgcagaagctaccccggcctgctgatcgtgccccagagcgtgcaggacaacgccctgcagagagtgagcagatgctacagacagaacagattccccgtggtgtgctggagaagcggcagaagcaaggccgtgctgctgagaagcggcggcctgcacggcaagggcgtggtgggcctgttcaaggcccagaacgcccccagccccggccagagccaggccgacagcagcagcctggagcaggagaagtacctgcaggccgtggtgagcagcatgcccagatacgccgacgccagcggcagaaacaccctgagcggcttcagcagcgcccacatgggcagccacgtgcccagccccagagccagagtgaccaccctgagcaaccccatggccgccagcgccagcagaagaaccgcccccagaggcaagtggggcagcgtgagaaccagcggcagaagcagcggcctgggcaccgacgtgggcagcagactggccggcagagacgccctggcccccccccaggccaacggcggcccccccgaccccggcttcctgagaccccagagagccgccctgtacatcctgggcgacaaggcccagctgaagggcgtgagaagcgaccccctgcagcagtgggagctggtgcccatcgaggtgttcgaggccagacaggtgaaggccagcttcaagaagctgctgaaggcctgcgtgcccggctgccccgccgccgagcccagccccgccagcttcctgagaagcctggaggacagcgagtggctgatccagatccacaagctgctgcaggtgagcgtgctggtggtggagctgctggacagcggcagcagcgtgctggtgggcctggaggacggctgggacatcaccacccaggtggtgagcctggtgcagctgctgagcgaccccttctacagaaccctggagggcttcagactgctggtggagaaggagtggctgagcttcggccacagattcagccacagaggcgcccacaccctggccggccagagcagcggcttcacccccgtgttcctgcagttcctggactgcgtgcaccaggtgcacctgcagttccccatggagttcgagttcagccagttctacctgaagttcctgggctaccaccacgtgagcagaagattcagaaccttcctgctggacagcgactacgagagaatcgagctgggcctgctgtacgaggagaagggcgagagaagaggccaggtgccctgcagaagcgtgtgggagtacgtggacagactgagcaagagaacccccgtgttccacaactacatgtacgcccccgaggacgccgaggtgctgagaccctacagcaacgtgagcaacctgaaggtgtgggacttctacaccgaggagaccctggccgagggccccccctacgactgggagctggcccagggcccccccgagccccccgaggaggagagaagcgacggcggcgccccccagagcagaagaagagtggtgtggccctgctacgacagctgccccagagcccagcccgacgccatcagcagactgctggaggagctgcagagactggagaccgagctgggccagcccgccgagagatggaaggacacctgggacagagtgaaggccgcccagagactggagggcagacccgacggcagaggcacccccagcagcctgctggtgagcaccgccccccaccacagaagaagcctgggcgtgtacctgcaggagggccccgtgggcagcaccctgagcctgagcctggacagcgaccagagcagcggcagcaccaccagcggcagcagacaggccgccagaagaagcaccagcaccctgtacagccagttccagaccgccgagagcgagaacagaagctacgagggcaccctgtacaagaagggcgccttcatgaagccctggaaggccagatggttcgtgctggacaagaccaagcaccagctgagatactacgaccacagagtggacaccgagtgcaagggcgtgatcgacctggccgaggtggaggccgtggcccccggcacccccaccatgggcgcccccaagaccgtggacgagaaggccttcttcgacgtgaagaccaccagaagagtgtacaacttctgcgcccaggacgtgcccagcgcccagcagtgggtggacagaatccagagctgcctgagcgacgcctag

SEQ ID NO: 134012 - protein, 1313 aa, Artificial Sequence
  derived and/or modified sequence
MRSAAAAPRSPAVATESRRFAAARWPGWRSLQRPARRSGRGGGGAAPGPYPSAAPPPPGPGPPPSRQSSPPSASDCFGSNGNGGGAFRPGSRRLLGLGGPPRPFVVLLLPLASPGAPPAAPTRASPLGARASPPRSGVSLARPAPGCPRPACEPVYGPLTMSLKPQQQQQQQQQQQQQQQQQQQQQQQPPPAAANVRKPGGSGLLASPAAAPSPSSSSVSSSSATAPSSVVAATSGGGRPGLGRGRNSNKGLPQSTISFDGIYANMRMVHILTSVVGSKCEVQVKNGGIYEGVFKTYSPKCDLVLDAAHEKSTESSSGPKREEIMESILFKCSDFVVVQFKDMDSSYAKRDAFTDSAISAKVNGEHKEKDLEPWDAGELTANEELEALENDVSNGWDPNDMFRYNEENYGVVSTYDSSLSSYTVPLERDNSEEFLKREARANQLAEEIESSAQYKARVALENDDRSEEEKYTAVQRNSSEREGHSINTRENKYIPPGQRNREVISWGSGRQNSPRMGQPGSGSMPSRSTSHTSDFNPNSGSDQRVVNGGVPWPSPCPSPSSRPPSRYQSGPNSLPPRAATPTRPPSRPPSRPSRPPSHPSAHGSPAPVSTMPKRMSSEGPPRMSPKAQRHPRNHRVSAGRGSISSGLEFVSHNPPSEAATPPVARTSPSGGTWSSVVSGVPRLSPKTHRPRSPRQNSIGNTPSGPVLASPQAGIIPTEAVAMPIPAASPTPASPASNRAVTPSSEAKDSRLQDQRQNSPAGNKENIKPNETSPSFSKAENKGISPVVSEHRKQIDDLKKFKNDFRLQPSSTSESMDQLLNKNREGEKSRDLIKDKIEPSAKDSFIENSSSNCTSGSSKPNSPSISPSILSNTEHKRGPEVTSQGVQTSSPACKQEKDDKEEKKDAAEQVRKSTLNPNAKEFNPRSFSQPKPSTTPTSPRPQAQPSPSMVGHQQPTPVYTQPVCFAPNMMYPVPVSPGVQPLYPIPMTPMPVNQAKTYRAVPNMPQQRQDQHHQSAMMHPASAAGPPIAATPPAYSTQYVAYSPQQFPNQPLVQHVPHYQSQHPHVYSPVIQGNARMMAPPTHAQPGLVSSSATQYGAHEQTHAMYACPKLPYNKETSPSFYFAISTGSLAQQYAHPNATLHPHTPHPQPSATPTGQQQSQHGGSHPAPSPVQHHQHQAAQALHLASPQQQSAIYHAGLAPTPPSMTPASNTQSPQNSFPAAQQTVFTIHPSHVQPAYTNPPHMAHVPQAHVQSGMVPSHPTAHAPMMLMTTQPPGGPQAALAQSALQPIPVSTTAHFPYMTHPSVQAHHQQQL

SEQ ID NO: 134013 - protein, 995 aa, Artificial Sequence
  derived and/or modified sequence
MRSAAAAPRSPAVATESRRFAAARWPGWRSLQRPARRSGRGGGGAAPGPYPSAAPPPPGPGPPPSRQSSPPSASDCFGSNGNGGGAFRPGSRRLLGLGGPPRPFVVLLLPLASPGAPPAAPTRASPLGARASPPRSGVSLARPAPGCPRPACEPVYGPLTMSLKPQQQQQQQQQQQQQQQQQQQQQQQPPPAAANVRKPGGSGLLASPAAAPSPSSSSVSSSSATAPSSVVAATSGGGRPGLGRGRNSNKGLPQSTISFDGIYANMRMVHILTSVVGSKCEVQVKNGGIYEGVFKTYSPKCDLVLDAAHEKSTESSSGPKREEIMESILFKCSDFVVVQFKDMDSSYAKRDAFTDSAISAKVNGEHKEKDLEPWDAGELTANEELEALENDVSNGWDPNDMFRYNEENYGVVSTYDSSLSSYTVPLERDNSEEFLKREARANQLAEEIESSAQYKARVALENDDRSEEEKYTAVQRNSSEREGHSINTRENKYIPPGQRNREVISWGSGRQNSPRMGQPGSGSMPSRSTSHTSDFNPNSGSDQRVVNGGVPWPSPCPSPSSRPPSRYQSGPNSLPPRAATPTRPPSRPPSRPSRPPSHPSAHGSPAPVSTMPKRMSSEGPPRMSPKAQRHPRNHRVSAGRGSISSGLEFVSHNPPSEAATPPVARTSPSGGTWSSVVSGVPRLSPKTHRPRSPRQNSIGNTPSGPVLASPQAGIIPTEAVAMPIPAASPTPASPASNRAVTPSSEAKDSRLQDQRQNSPAGNKENIKPNETSPSFSKAENKGISPVVSEHRKQIDDLKKFKNDFRLQPSSTSESMDQLLNKNREGEKSRDLIKDKIEPSAKDSFIENSSSNCTSGSSKPNSPSISPSILSNTEHKRGPEVTSQGVQTSSPACKQEKDDKEEKKDAAEQVRKSTLNPNAKEFNPRSFSQPKPSTTPTSPRPQAQPSPSMVGHQQPTPVYTQPVCFAPNMMYPVPVSPGVQYQICPNSGKTSIIRVP

SEQ ID NO: 134014 - DNA, 4712 bp, Artificial Sequence
  derived and/or modified sequence
acccccgagaaagcaacccagcgcgccgcccgctcctcacgtgtccctcccggccccggggccacctcacgttctgcttccgtctgacccctccgacttccggtaaagagtccctatccgcacctccgctcccacccggcgcctcggcgcgcccgccctccgatgcgctcagcggccgcagctcctcggagtcccgcggtggccaccgagtctcgccgcttcgccgcagccaggtggcccgggtggcgctcgctccagcggccggcgcggcggagcgggcggggcggcggtggcgcggccccgggaccgtatccctccgccgcccctcccccgcccggccccggcccccctccctcccggcagagctcgcctccctccgcctcagactgttttggtagcaacggcaacggcggcggcgcgtttcggcccggctcccggcggctccttggtctcggcgggcctccccgccccttcgtcgtcctccttctccccctcgccagcccgggcgcccctccggccgcgccaacccgcgcctccccgctcggcgcccgcgcgtccccgccgcgttccggcgtctccttggcgcgcccggctcccggctgtccccgcccggcgtgcgagccggtgtatgggcccctcaccatgtcgctgaagccccagcagcagcagcagcagcagcagcagcagcagcagcagcaacagcagcagcagcagcagcagcagcagccgccgcccgcggctgccaatgtccgcaagcccggcggcagcggccttctagcgtcgcccgccgccgcgccttcgccgtcctcgtcctcggtctcctcgtcctcggccacggctccctcctcggtggtcgcggcgacctccggcggcgggaggcccggcctgggcagaggtcgaaacagtaacaaaggactgcctcagtctacgatttcttttgatggaatctatgcaaatatgaggatggttcatatacttacatcagttgttggctccaaatgtgaagtacaagtgaaaaatggaggtatatatgaaggagtttttaaaacttacagtccgaagtgtgatttggtacttgatgccgcacatgagaaaagtacagaatccagttcggggccgaaacgtgaagaaataatggagagtattttgttcaaatgttcagactttgttgtggtacagtttaaagatatggactccagttatgcaaaaagagatgcttttactgactctgctatcagtgctaaagtgaatggcgaacacaaagagaaggacctggagccctgggatgcaggtgaactcacagccaatgaggaacttgaggctttggaaaatgacgtatctaatggatgggatcccaatgatatgtttcgatataatgaagaaaattatggtgtagtgtctacgtatgatagcagtttatcttcgtatacagtgcccttagaaagagataactcagaagaatttttaaaacgggaagcaagggcaaaccagttagcagaagaaattgagtcaagtgcccagtacaaagctcgagtggccctggaaaatgatgataggagtgaggaagaaaaatacacagcagttcagagaaattccagtgaacgtgaggggcacagcataaacactagggaaaataaatatattcctcctggacaaagaaatagagaagtcatatcctggggaagtgggagacagaattcaccgcgtatgggccagcctggatcgggctccatgccatcaagatccacttctcacacttcagatttcaacccgaattctggttcagaccaaagagtagttaatggaggtgttccctggccatcgccttgcccatctccttcctctcgcccaccttctcgctaccagtcaggtcccaactctcttccacctcgggcagccacccctacacggccgccctccaggcccccctcgcggccatccagacccccgtctcacccctctgctcatggttctccagctcctgtctctactatgcctaaacgcatgtcttcagaagggcctccaaggatgtccccaaaggcccagcgacatcctcgaaatcacagagtttctgctgggaggggttccatatccagtggcctagaatttgtatcccacaacccacccagtgaagcagctactcctccagtagcaaggaccagtccctcggggggaacgtggtcatcagtggtcagtggggttccaagattatcccctaaaactcatagacccaggtctcccagacagaacagtattggaaatacccccagtgggccagttcttgcttctccccaagctggtattattccaactgaagctgttgccatgcctattccagctgcatctcctacgcctgctagtcctgcatcgaacagagctgttaccccttctagtgaggctaaagattccaggcttcaagatcagaggcagaactctcctgcagggaataaagaaaatattaaacccaatgaaacatcacctagcttctcaaaagctgaaaacaaaggtatatcaccagttgtttctgaacatagaaaacagattgatgatttaaagaaatttaagaatgattttaggttacagccaagttctacttctgaatctatggatcaactactaaacaaaaatagagagggagaaaaatcaagagatttgatcaaagacaaaattgaaccaagtgctaaggattctttcattgaaaatagcagcagcaactgtaccagtggcagcagcaagccgaatagccccagcatttccccttcaatacttagtaacacggagcacaagaggggacctgaggtcacttcccaaggggttcagacttccagcccagcatgtaaacaagagaaagacgataaggaagagaagaaagacgcagctgagcaagttaggaaatcaacattgaatcccaatgcaaaggagttcaacccacgttccttctctcagccaaagccttctactaccccaacttcacctcggcctcaagcacaacctagcccatctatggtgggtcatcaacagccaactccagtttatactcagcctgtttgttttgcaccaaatatgatgtatccagtcccagtgagcccaggcgtgcaacctttatacccaatacctatgacgcccatgccagtgaatcaagccaagacatatagagcagtaccaaatatgccccaacagcggcaagaccagcatcatcagagtgccatgatgcacccagcgtcagcagcgggcccaccgattgcagccaccccaccagcttactccacgcaatatgttgcctacagtcctcagcagttcccaaatcagccccttgttcagcatgtgccacattatcagtctcagcatcctcatgtctatagtcctgtaatacagggtaatgctagaatgatggcaccaccaacacacgcccagcctggtttagtatcttcttcagcaactcagtacggggctcatgagcagacgcatgcgatgtatgcatgtcccaaattaccatacaacaaggagacaagcccttctttctactttgccatttccacgggctcccttgctcagcagtatgcgcaccctaacgctaccctgcacccacatactccacaccctcagccttcagctacccccactggacagcagcaaagccaacatggtggaagtcatcctgcacccagtcctgttcagcaccatcagcaccaggccgcccaggctctccatctggccagtccacagcagcagtcagccatttaccacgcggggcttgcgccaactccaccctccatgacacctgcctccaacacgcagtcgccacagaatagtttcccagcagcacaacagactgtctttacgatccatccttctcacgttcagccggcgtataccaacccaccccacatggcccacgtacctcaggctcatgtacagtcaggaatggttccttctcatccaactgcccatgcgccaatgatgctaatgacgacacagccacccggcggtccccaggccgccctcgctcaaagtgcactacagcccattccagtctcgacaacagcgcatttcccctatatgacgcacccttcagtacaagcccaccaccaacagcagttgtaaggctgccctggaggaaccgaaaggccaaattccctcctcccttctactgcttctaccaactggaagcacagaaaactagaatttcatttattttgtttttaaaatatatatgttgatttcttgtaacatccaataggaatgctaacagttcacttgcagtggaagatacttggaccgagtagaggcatttaggaacttgggggctattccataattccatatgctgtttcagagtcccgcaggtaccccagctctgcttgccgaaactggaagttatttattttttaataacccttgaaagtcatgaacacatcagctagcaaaagaagtaacaagagtgattcttgctgctattactgctaaaaaaaaaaaaaaaaaaaaatcaagacttggaacgcccttttactaaacttgacaaagtttcagtaaattcttaccgtcaaactgacggattattatttataaatcaagtttgatgaggtgatcactgtctacagtggttcaacttttaagttaagggaaaaacttttactttgtagataatataaaataaaaacttaaaaaaaatttaaaaaataaaaaaagttttaaaaactgaaaaaaaaaaa

SEQ ID NO: 134015 - DNA, 3942 bp, Artificial Sequence
  derived and/or modified sequence
atgcgctcagctgcagcagcacctcggagccccgctgttgccaccgagagcaggcgttttgctgccgctaggtggccgggctggaggtcccttcagcgccctgcccgcagaagcggcaggggcggcggaggcgccgcgccaggcccttatcctagcgctgctcctcctccaccaggtcctggtcctccacccagtcggcagagcagccctccgtccgcaagcgactgtttcgggtcaaacgggaacggggggggggcctttaggcccggtagccgacggctgctgggtcttggagggccaccaaggccattcgtggtcctgctgctccctcttgcatctcccggcgctccacccgccgcccccaccagagcttcacctctgggggcacgtgcttcacctcccaggagcggtgtgtccctggcccgccccgcaccgggatgccctcgccctgcatgtgaaccagtttacggtcccctgactatgtccctcaagccgcagcagcaacagcaacaacagcagcaacagcagcagcagcaacagcaacagcaacagcaacagcagcaacccccccccgccgctgctaatgtccgtaagcccggggggagcggacttttggcttctccagctgccgctcctagcccaagcagctcttcggtatccagctcctccgccaccgcaccatcctcagtggtggctgcaacatccggcggcggccgacccggcctcggtcgcggcaggaactcaaataaagggctgcctcagagcactatttcctttgacggcatatatgcaaatatgcgtatggtccacattttgacttcagtggtgggcagtaaatgcgaggtccaggtgaagaatggtggtatctacgaaggggtgtttaaaacatatagtcctaagtgtgacctggttctggatgccgcccacgagaagagcactgaaagctccagcgggccgaagcgcgaggaaattatggagtctatcctttttaaatgtagcgatttcgtcgtggtccaattcaaagatatggatagttcgtatgcaaaacgcgacgcttttacggattcagctataagcgccaaagtcaacggcgagcataaagagaaggacctggaaccctgggatgcgggggaactgacagctaacgaggagctggaagcccttgaaaatgacgtgtcgaacggttgggaccctaacgatatgttccggtataacgaagagaactatggcgtagtaagtacctatgactcgagcttatcctcatataccgtccctctggaaagggataatagcgaggagttccttaaaagggaagccagggctaatcagctggcagaggagatcgaaagctccgcacagtacaaggcccgcgtggccctggagaacgatgacagaagcgaagaagagaaatacactgctgttcagcggaatagcagtgagcgggaaggtcattctataaatactcgagagaataaatacatcccacccggccaacgcaacagggaagtgattagctggggctcgggaaggcagaatagtcctcgaatgggacaaccaggctccggcagtatgccaagccgttccacttcacacacaagcgactttaaccctaattctggtagtgaccagagggtggtgaacggaggcgtgccttggccttccccctgtccctccccaagctccaggccacctagccgataccagtcaggcccaaattccctgccaccaagagccgcaaccccaacacgtccccctagccgaccccccagtcgaccatcaagacctccgtctcatccgagcgcgcacggcagtccagccccagtatcgacgatgccgaagcggatgagcagtgagggccctccacgtatgtctcccaaggcccagcggcatcccaggaatcacagagtgtccgctggcagggggagcatctcaagcggacttgagttcgttagtcacaacccacctagtgaggcggccacacccccagtcgcaagaaccagcccctctggaggcacctggagcagtgtggtgagcggcgttccgcgccttagccctaaaacccaccgaccccggagtccgaggcagaacagtatcggtaacactccatcagggcccgtgttggcttccccacaggcgggcatcattcccactgaagccgtcgctatgcccatccccgccgctagccctacccccgcctcacctgcctccaatcgggccgtgacaccgagctcagaagctaaggatagccgactccaggatcagcgtcagaattcaccagccggtaataaagagaacatcaaacctaacgaaacatccccaagtttctctaaggcagagaataagggaatttcacccgtagtgtcagagcatcgaaaacagattgacgacctcaaaaagttcaagaacgattttagactgcagccttccagtacctccgagtcaatggatcaattgctgaataagaatagggaaggtgagaagtccagggatctcataaaggacaagattgaaccctctgctaaggatagtttcatcgagaactcctccagtaactgcacttccgggagttcaaagcctaactcaccgtcaatcagcccttccattttgagcaatacagagcacaaacgggggccagaggtgacttctcaaggcgtgcagacgtctagccccgcctgtaaacaggagaaggacgacaaggaggagaagaaggacgcagcggagcaggttaggaagagcaccctgaaccccaacgctaaagagttcaatccaaggtccttttcccagccaaagccatcaaccacgcccaccagccccagaccccaggcccagccatccccatctatggtggggcaccagcagccaacaccagtgtatacccagcccgtttgcttcgcccccaacatgatgtatcccgtgccagtaagcccaggcgtgcagcccctctaccccatcccaatgacacctatgcccgtgaaccaggccaagacgtaccgcgcagttcccaacatgcctcagcagcggcaagaccagcaccatcagtccgcgatgatgcacccagcaagcgcagctggcccaccgatcgcagcaacccctccggcctactccacacagtacgtggcatactcacctcaacaatttcctaaccagcccctcgtccaacacgtgccacactaccaaagtcagcacccacacgtatacagccccgtaatccaggggaatgccaggatgatggctcctcccacacatgctcaacccggtctcgtgagctccagcgctactcagtatggagcccatgaacaaactcacgctatgtatgcgtgtcctaaactcccctacaataaggagacatccccctcattctattttgccataagcacgggctcgctggctcaacagtacgctcatcctaacgctacccttcaccctcatacccctcatccccagccatctgctacccccaccggacaacaacagagccagcatggtggatcccaccccgctccctcccccgttcagcaccaccagcaccaagccgcccaggccctacaccttgcctccccccaacagcagagcgccatttaccatgccggcctcgccccaaccccccctagtatgacgcctgcttctaacacccagagtccacaaaatagcttccccgccgcccagcagacggtcttcacaatacatcctagccacgtccaacctgcgtatacgaaccccccgcatatggcacatgtgcctcaggctcacgttcagagcgggatggtgccatctcatccaaccgcccatgctcccatgatgcttatgacaacccagcctcctggtggacctcaggcggcattggcgcagtccgccctacagccgatccccgttagtaccacagcccattttccttacatgacccacccctccgtccaggctcaccatcagcaacagctctag

SEQ ID NO: 134016 - DNA, 2988 bp, Artificial Sequence
  derived and/or modified sequence
atgcggtctgctgcagctgctccacgttctcccgctgtggctaccgagtctcgacgcttcgctgctgcaaggtggccaggatggcgctcactgcagcggcctgccagacggtcaggccgaggtgggggaggcgccgctccgggtccttacccctcagcagcgcccccacctcccggtccagggcccccccctagcaggcaatcgagcccccctagcgctagcgattgttttggttctaacgggaacggtgggggcgcctttcgtccgggctcccggagactgctagggttgggcggccccccccgccctttcgtcgtcttactattacccttggcctctcctggagcccctccagcggcgcccacccgcgcttctcctctgggcgccagagcaagtccgcccaggtccggagtgtcattagcacgacccgctcctggctgtccccgtccagcatgtgagcccgtttacgggccgctgactatgtcattaaagcctcagcagcagcaacaacaacagcagcagcagcagcagcaacagcagcaacagcagcagcagcagcagcagccaccccctgcggccgctaacgttagaaagcccggagggagtggactgctcgcttcacctgccgccgccccttcgccttcctcttccagcgtgagcagctccagcgccactgcacccagcagtgtggtggccgcaaccagcggagggggcagacctggattgggtcgggggcgcaactccaacaaggggctgcctcagtccaccataagttttgacgggatttacgctaacatgagaatggtgcacatcctgacatccgtggtgggaagcaagtgtgaggttcaagttaaaaacggcggaatttacgagggtgtgttcaagacttactctccaaagtgtgacctggtgctagacgcggcccacgagaaaagtactgaaagcagctctgggcctaagagagaggagatcatggaatcaattcttttcaaatgttcagattttgtggtcgttcagttcaaggatatggactcatcctatgccaagagggatgcattcaccgatagtgccatctccgctaaagttaacggcgagcataaagagaaagatttggaaccgtgggatgctggagagctaaccgcaaatgaagaacttgaggcgctagaaaatgatgtgtcaaacggatgggatccgaacgacatgttcagatacaatgaagagaactatggggtggtgtctacctacgactcttctctctcgtcctatactgtccccctggagagagacaactccgaagaattcttaaagcgggaagcccgagctaatcaactggcagaggagatcgagtcgtctgcacagtataaagcccgtgtggcgctggaaaacgatgatagatctgaagaagagaagtatacggctgtacaacgtaatagttctgagcgcgaggggcactctatcaacaccagagaaaacaagtatatcccacccgggcaacggaatcgggaggtgatctcctgggggagcggccgccagaactcaccacgaatggggcagccgggatccggctccatgccgtctcggagcacatcccatacctccgattttaatcctaacagcggcagtgatcagcgtgttgtcaatggcggggtaccttggcccagtccctgcccttcgcccagttccagacccccatccagatatcagagcggaccgaattcgttacctcctagggctgccacgcccacaaggcccccgagccggcctccttcacgccctagccgaccacctagccacccgtccgcccatggatcccccgcacccgtgtccactatgccaaaacgaatgagctccgagggccctccccggatgagccctaaagcacagaggcatccaagaaaccaccgtgtgtctgccggccgcggctctattagctccgggctggagtttgtttcccataacccacctagcgaagccgcaaccccacctgtggctcgcaccagtccctctggcggcacttggtctagcgtcgtgagtggggttcctcgtctgtctcccaagacccacagacctaggtcccctaggcagaactccatcggtaataccccatctggcccagttctggctagcccccaggccgggatcatccccacagaggccgtcgctatgccaatacccgccgcatctccaactcctgcctctcccgccagcaaccgcgccgtgacccccagctccgaggcgaaggattctcgcctgcaggaccaaagacagaacagccccgctggaaataaagagaacatcaaacccaacgaaaccagcccctctttcagcaaggcggagaataaagggatctcacccgttgtgtctgagcatcgaaaacagatcgatgacctaaaaaaatttaaaaacgacttcaggttgcagccaagcagcacatctgaatcgatggatcagctgctgaacaagaaccgcgagggggaaaaatccagagacctgataaaagataaaatcgagcctagcgcgaaagacagttttatcgagaattcttccagcaattgcacaagcggatctagcaaaccgaactcaccaagcatttctccatccattctctctaacacagagcacaagcggggacctgaggtaaccagtcaaggggtgcaaacttccagtccggcctgtaaacaggagaaagacgataaagaagagaaaaaagacgctgcagagcaggtgcgcaagtctaccctgaacccaaacgcaaaagagttcaaccccagatccttctcccaacccaaacctagtacaactccgacatcacccaggccacaggcccagccaagccccagcatggtgggacaccagcagccaacccctgtgtacacgcaaccagtatgtttcgctcccaatatgatgtatccggttcccgtctctcccggagtgcaatatcaaatctgccccaatagcggaaagactagcatcatcagagtgccctag

SEQ ID NO: 134017 - DNA, 3942 bp, Artificial Sequence
  derived and/or modified sequence
atgaggtctgctgctgctgcccccaggagccctgctgtggccacagagagccgccgctttgctgctgcccgctggccaggctggaggagcctgcagaggcctgcccggcgcagcggccggggcggcggcggggccgcccctggcccctaccccagcgctgcccctcctcctcctggccctggccccccacccagccggcagagcagcccccccagcgccagtgactgcttcggcagcaatggaaatggaggaggagccttccggcccggcagccggcggctgctgggcctgggcggccccccccggccctttgtggtgctgctgctgcccctggccagccctggggcccctcctgctgcccccacccgggccagccccctgggcgcccgggccagccccccaagaagtggagtgtccctggcccggcctgcccctggctgccccaggcctgcctgtgagcctgtgtatggccccctgaccatgagcctgaagccccagcagcagcagcagcagcagcagcagcagcagcagcagcagcagcagcagcagcagcagcagcagcagcccccacctgctgctgccaacgtgaggaagccaggcggcagcggcctgctggccagccctgctgctgcccccagccccagcagcagctctgtgagcagcagcagcgccacagcccccagctctgtggtggccgccaccagcggcggcggccggcccggcctgggccggggcaggaacagcaacaagggcctgccccagagcaccatcagctttgatggcatctatgccaacatgaggatggtgcacatcctgacctctgtggtgggcagcaaatgtgaggtgcaggtgaagaatggaggcatctatgagggcgtcttcaagacctacagccccaagtgtgacctggtgctggatgctgcccacgagaagagcacagagagcagcagcggccccaagcgggaggagatcatggagagcatcctcttcaagtgcagcgactttgtggtggtgcagttcaaggacatggacagcagctatgccaagagagatgccttcacagacagcgccatcagcgccaaggtgaatggagagcacaaggagaaggacctggagccctgggatgctggggagctgacagccaatgaggagctggaggccctggagaatgatgtgtccaatggctgggaccccaatgacatgttccgctacaatgaagaaaattatggagtggtgtccacctatgacagcagcctgagcagctacacagtgcccctggagcgggacaacagcgaggagttcctgaagcgggaggcccgggccaaccagctggccgaggagattgagagcagcgcccagtacaaggcccgggtggccctggagaatgatgacagaagtgaggaggagaagtacacagctgtgcagaggaacagcagcgagcgggagggccacagcatcaacacccgggagaacaagtacatccccccaggccagaggaaccgggaggtgatctcctggggcagcggccggcagaacagccccaggatgggccagcccggcagcggctccatgcccagccgcagcaccagccacaccagtgacttcaaccccaacagcggcagtgaccagagggtggtgaatggaggagtgccctggcccagcccctgccccagccccagcagcaggcctcccagccgctaccagagcggccccaacagcctgcccccccgggccgccacccccacccggccccccagccggccccccagccggcccagcaggcctcccagccaccccagcgcccacggcagccctgcccctgtgtccaccatgcccaagaggatgagcagcgagggcccccccaggatgagccccaaggcccagaggcaccccaggaaccaccgggtgtctgctggccggggcagcatcagcagcggcctggagtttgtgagccacaacccccccagcgaggccgccaccccacctgtggcccggaccagccccagcggcggcacctggagctctgtggtgtctggagtgccccggctgagccccaagacccaccggcccaggagcccccggcagaacagcatcggcaacaccccatctggccctgtgctggccagcccccaggccggcatcatccccacagaagctgtggccatgcccatcccagctgccagccccaccccagccagccctgccagcaacagagctgtgacccccagcagcgaggccaaggacagccggctgcaggaccagaggcagaacagccctgctggcaacaaggagaacatcaagcccaatgagaccagccccagcttcagcaaggcagaaaataaaggcatcagccctgtggtgtctgagcacaggaagcagattgatgacctgaagaagttcaagaatgacttccggctgcagcccagcagcaccagcgagagcatggaccagctgctgaacaagaaccgggagggggagaagagccgggacctgatcaaggacaagattgagcccagcgccaaggacagcttcatcgagaacagcagcagcaactgcaccagcggcagcagcaagcccaacagccccagcatcagccccagcatcctgagcaacacagagcacaagaggggccctgaggtgaccagccagggcgtgcagaccagcagccctgcctgcaagcaggagaaggatgacaaggaggagaagaaggatgctgctgagcaggtgaggaagagcaccctgaaccccaatgccaaggagttcaaccccaggagcttcagccagcccaagcccagcaccacccccaccagcccccggccccaggcccagcccagccccagcatggtgggccaccagcagcccacccctgtgtacacccagcctgtgtgctttgcccccaacatgatgtaccctgtgcctgtgtcccctggggtgcagcccctgtaccccatccccatgacccccatgcctgtgaaccaggccaagacctacagagctgtgcccaacatgccccagcagaggcaggaccagcaccaccagagcgccatgatgcacccagccagcgctgctggcccccccatcgccgccaccccaccagcctacagcacccagtatgtggcctacagcccccagcagttccccaaccagcccctggtgcagcacgtgccccactaccagagccagcacccccacgtgtacagccctgtgatccagggcaatgccaggatgatggccccacccacccacgcccagcccggcctggtgagcagcagcgccacccagtatggagcccacgagcagacccacgccatgtatgcctgccccaagctgccctacaacaaggagaccagccccagcttctactttgccatcagcacaggcagcctggcccagcagtatgcccaccccaatgccaccctgcacccccacaccccccacccccagcccagcgccacccccaccggccagcagcagagccagcacggcggcagccacccagcccccagccctgtgcagcaccaccagcaccaggccgcccaggccctgcacctggccagcccccagcagcagagcgccatctaccacgccggcctggcccccaccccacccagcatgaccccagccagcaacacccagagcccccagaacagcttccctgctgcccagcagaccgtcttcaccatccaccccagccacgtgcagcctgcctacaccaaccccccccacatggcccacgtgccccaggcccacgtgcagagcggcatggtgcccagccaccccacagcccacgcccccatgatgctgatgaccacccagcccccaggcggcccccaggccgccctggcccagagcgccctgcagcccatccctgtgtccaccacagcccacttcccctacatgacccaccccagcgtgcaggcccaccaccagcagcagctgtag

SEQ ID NO: 134018 - DNA, 2988 bp, Artificial Sequence
  derived and/or modified sequence
atgaggtctgctgctgctgcccccaggagccctgctgtggccacagagagccgccgctttgctgctgcccgctggccaggctggaggagcctgcagaggcctgcccggcgcagcggccggggcggcggcggggccgcccctggcccctaccccagcgctgcccctcctcctcctggccctggccccccacccagccggcagagcagcccccccagcgccagtgactgcttcggcagcaatggaaatggaggaggagccttccggcccggcagccggcggctgctgggcctgggcggccccccccggccctttgtggtgctgctgctgcccctggccagccctggggcccctcctgctgcccccacccgggccagccccctgggcgcccgggccagccccccaagaagtggagtgtccctggcccggcctgcccctggctgccccaggcctgcctgtgagcctgtgtatggccccctgaccatgagcctgaagccccagcagcagcagcagcagcagcagcagcagcagcagcagcagcagcagcagcagcagcagcagcagcagcccccacctgctgctgccaacgtgaggaagccaggcggcagcggcctgctggccagccctgctgctgcccccagccccagcagcagctctgtgagcagcagcagcgccacagcccccagctctgtggtggccgccaccagcggcggcggccggcccggcctgggccggggcaggaacagcaacaagggcctgccccagagcaccatcagctttgatggcatctatgccaacatgaggatggtgcacatcctgacctctgtggtgggcagcaaatgtgaggtgcaggtgaagaatggaggcatctatgagggcgtcttcaagacctacagccccaagtgtgacctggtgctggatgctgcccacgagaagagcacagagagcagcagcggccccaagcgggaggagatcatggagagcatcctcttcaagtgcagcgactttgtggtggtgcagttcaaggacatggacagcagctatgccaagagagatgccttcacagacagcgccatcagcgccaaggtgaatggagagcacaaggagaaggacctggagccctgggatgctggggagctgacagccaatgaggagctggaggccctggagaatgatgtgtccaatggctgggaccccaatgacatgttccgctacaatgaagaaaattatggagtggtgtccacctatgacagcagcctgagcagctacacagtgcccctggagcgggacaacagcgaggagttcctgaagcgggaggcccgggccaaccagctggccgaggagattgagagcagcgcccagtacaaggcccgggtggccctggagaatgatgacagaagtgaggaggagaagtacacagctgtgcagaggaacagcagcgagcgggagggccacagcatcaacacccgggagaacaagtacatccccccaggccagaggaaccgggaggtgatctcctggggcagcggccggcagaacagccccaggatgggccagcccggcagcggctccatgcccagccgcagcaccagccacaccagtgacttcaaccccaacagcggcagtgaccagagggtggtgaatggaggagtgccctggcccagcccctgccccagccccagcagcaggcctcccagccgctaccagagcggccccaacagcctgcccccccgggccgccacccccacccggccccccagccggccccccagccggcccagcaggcctcccagccaccccagcgcccacggcagccctgcccctgtgtccaccatgcccaagaggatgagcagcgagggcccccccaggatgagccccaaggcccagaggcaccccaggaaccaccgggtgtctgctggccggggcagcatcagcagcggcctggagtttgtgagccacaacccccccagcgaggccgccaccccacctgtggcccggaccagccccagcggcggcacctggagctctgtggtgtctggagtgccccggctgagccccaagacccaccggcccaggagcccccggcagaacagcatcggcaacaccccatctggccctgtgctggccagcccccaggccggcatcatccccacagaagctgtggccatgcccatcccagctgccagccccaccccagccagccctgccagcaacagagctgtgacccccagcagcgaggccaaggacagccggctgcaggaccagaggcagaacagccctgctggcaacaaggagaacatcaagcccaatgagaccagccccagcttcagcaaggcagaaaataaaggcatcagccctgtggtgtctgagcacaggaagcagattgatgacctgaagaagttcaagaatgacttccggctgcagcccagcagcaccagcgagagcatggaccagctgctgaacaagaaccgggagggggagaagagccgggacctgatcaaggacaagattgagcccagcgccaaggacagcttcatcgagaacagcagcagcaactgcaccagcggcagcagcaagcccaacagccccagcatcagccccagcatcctgagcaacacagagcacaagaggggccctgaggtgaccagccagggcgtgcagaccagcagccctgcctgcaagcaggagaaggatgacaaggaggagaagaaggatgctgctgagcaggtgaggaagagcaccctgaaccccaatgccaaggagttcaaccccaggagcttcagccagcccaagcccagcaccacccccaccagcccccggccccaggcccagcccagccccagcatggtgggccaccagcagcccacccctgtgtacacccagcctgtgtgctttgcccccaacatgatgtaccctgtgcctgtgtcccctggggtgcagtaccagatctgccccaacagcggcaagaccagcatcatccgggtgccctag

SEQ ID NO: 134019 - DNA, 3942 bp, Artificial Sequence
  derived and/or modified sequence
atgcggagcgccgccgccgccccccggagccccgccgtggccaccgaatccaggaggtttgctgctgcccgatggcccgggtggcggtcactccagagaccggcccgtcgatcaggaagaggcggtggaggcgctgcaccgggtccttatccctccgccgccccccctccacctggaccgggccctcctccaagcagacaatccagccccccctcagctagcgattgctttggtagtaatggcaacggcggaggggctttccgaccaggcagccggcgcttgttaggccttggaggtcccccgaggccttttgtggtcctcttgctgcccctggcatccccaggagctccaccagccgcccccacccgcgcgagcccgctgggggcccgcgcatcccctcctcggagcggtgttagtcttgcccggccggccccgggctgtccgcgccctgcttgtgagcccgtgtacggcccactcaccatgtctctcaagccccagcaacagcaacaacagcagcagcagcagcagcagcagcagcagcaacagcagcagcagcagcagcaaccccctccagccgccgcgaacgtccgaaagccaggaggcagcgggttgttggcaagccccgccgctgccccatctccatcctcgtctagtgtgtcgtcctcttctgctactgctccatccagtgtggtggcagccacatctggaggaggacgcccaggcctcggccggggacggaactctaataaaggcttaccacagtcaaccattagctttgatggcatctacgccaatatgcgcatggtacacatcctgacatccgtcgtgggctctaagtgtgaagtccaggtaaagaacggtggcatctatgaaggcgtgtttaagacgtactcccccaagtgcgacctggtgctggatgcagctcacgagaaatcgaccgaatcatcgtctggtcctaagagagaagagataatggagagcatccttttcaagtgtagtgatttcgtggtggtgcagtttaaagacatggatagctcatacgccaaacgtgatgcctttaccgattccgctattagtgcaaaagtcaatggtgagcataaggaaaaagatctggaaccttgggatgcaggggagctcacagccaacgaggagctcgaagctctagaaaacgacgttagtaacgggtgggacccaaacgacatgtttcggtataatgaggagaactacggagtggtgtcgacttatgattcatccctgagctcctacaccgtcccccttgaacgggacaattccgaggaatttctaaagagagaggcccgcgccaaccagctcgccgaggagatcgaatccagcgcgcagtataaggcccgggttgctctcgagaacgacgatcgaagcgaggaggagaaatatactgccgttcaaaggaactcctctgagcgagaggggcacagcatcaatactcgcgagaacaagtacatcccacccgggcaacggaaccgggaggtgatttcatgggggtccggccgtcagaatagtccacggatgggacagcccggatctggcagcatgccttcacgtagcacctcgcacactagcgatttcaaccctaactcaggctctgatcagcgagtggtgaatggtggagttccttggccaagcccctgcccctcgccctctagcaggcccccttctaggtatcaatctggtcctaattccctaccacctcgggcggccacccccacacgccccccctcccgtcctccaagcagaccctcccgaccaccttctcacccctccgcccacggctctccagcccccgtctccacaatgcctaagcgtatgtccagcgaaggcccaccacggatgtcccctaaagcccagcgccatcctaggaaccatagagtgtcagcagggaggggctccatctcctcaggcctcgaattcgtgtcccacaatcctccatctgaggctgctacccctcccgtggcccgaacctctccatccggcggaacctggagcagcgtggtgtcaggtgtgcctcgtctctcacctaagacgcaccggccgcggtcaccgagacagaacagcataggtaatacaccttctggtcctgtgctggcctcccctcaagccgggattatccctacagaagcagtggctatgccaattcccgctgcctctcctactcccgcaagtcccgctagtaatcgtgcggtgactccatcatcagaagctaaagactctcgtctgcaggaccaaaggcagaacagtcctgccggtaacaaagagaatatcaagccaaatgaaacatcacctagtttttccaaagctgagaacaagggtatcagccctgtggtgtctgagcataggaaacagatcgatgacctcaagaaattcaagaacgacttccgcctgcagcctagttcaacaagcgagtctatggaccagctgctgaataaaaatagggagggcgaaaaatccagggacttaattaaagacaagatcgaaccatcggccaaggatagttttatcgagaattcaagtagcaattgtacaagcgggagttcaaagcccaactctccttcaatcagcccttccatcctttctaacactgagcacaagcggggtcccgaggtgacgagccagggagtccagaccagttcccccgcctgcaagcaggagaaggacgacaaggaggagaagaaggatgccgccgagcaggtgcgaaagtccacactcaaccccaacgcaaaagaatttaatcccagatctttctcacagcccaagcctagcaccacgccaacctcccctaggcctcaagcacagcccagtccaagcatggtaggccaccaacagcctactccagtgtacacacagccagtgtgcttcgcaccaaatatgatgtatccagttcccgtcagtcccggcgtacaacctctttaccctatccctatgaccccaatgccggtgaaccaggctaagacgtacagggcagtcccaaatatgccccagcagagacaggaccaacaccaccagtctgcaatgatgcaccccgcctccgcagcaggtcctcccatagccgctacacctcccgcgtactctacacaatatgtagcgtacagtccccagcaatttcctaatcaaccattggttcagcacgtcccacattaccagagtcaacacccacatgtgtatagtcccgtaatccaaggcaacgctagaatgatggctccaccaacacacgcccagcctgggctggttagctcctcagcaacacagtatggggcgcacgagcagacccacgcgatgtatgcctgccctaagctgccttacaataaggagacatcaccttctttctattttgccatctctacaggaagcctggctcagcagtatgctcatcccaatgccactttacaccctcacactccccatccacagcccagtgccacccctactgggcagcagcaaagccagcatgggggcagccatcccgcccctagccccgttcagcatcatcaacaccaggcggcccaggcgttgcacctggcgtccccccagcagcagtcagccatctatcacgctggcctggccccaactccaccttctatgacccccgcctctaacacacagtctcctcagaactcatttcctgcagcgcaacaaacagttttcacaatccacccatcccacgtccagcctgcctacaccaacccccctcacatggcccacgtacctcaggcccacgtgcagtcgggaatggtgccatcacaccctaccgcccacgcacctatgatgctcatgactactcagcccccgggcggcccgcaggcggcgctggctcagtctgcgctccaacccatcccagtttccaccaccgctcacttcccctacatgactcaccccagcgtccaggcccatcatcagcagcagctctag

SEQ ID NO: 134020 - DNA, 2988 bp, Artificial Sequence
  derived and/or modified sequence
atgcggagcgccgccgccgccccccggagccccgccgtggccaccgaatcccgacgttttgccgccgcccgatggcctggatggagatcacttcaaaggcccgccagaagatctggcaggggaggaggaggtgccgcacccggaccatatccatctgccgcccccccaccacctggccccggcccgcctccatcacggcagtcctctcctcccagcgcctctgactgctttgggtccaacggtaacggaggtggcgcattccgacctggcagccggagacttctcgggctgggcggcccaccccggccctttgttgtgctccttctacccctagccagtccaggggctcccccagcagcacccactcgtgcgtcacccctcggcgcccgagccagcccccctagaagcggagtttctttggcacgacccgccccaggctgcccaaggccagcctgtgaacccgtgtatggtcccctcacaatgtcactcaagccgcaacaacagcagcagcagcagcagcagcagcaacagcagcaacagcaacagcaacagcagcagcagcaaccgcctcccgccgccgctaatgtgcgaaagcccggcggctctggactgctcgcctcccccgccgccgcaccaagcccatcttcgtcctcagtgagtagttcatcggctacagcccccagctccgtcgtggcagccacctcgggcggggggcgccctggcctgggacgaggccggaattctaataaaggcctccctcagtccaccataagttttgacgggatctacgccaatatgagaatggtacatatccttacttctgtagtaggctccaagtgtgaagtgcaagtgaagaatggaggcatctacgagggggtgtttaaaacctatagccctaagtgcgatctggtcctggatgctgcccacgagaagtccaccgaaagttcttccggacccaagcgagaagagataatggaaagtatcctgttcaagtgcagtgattttgtcgtggtgcagttcaaagacatggacagtagctatgctaaaagggatgcattcactgattcggctatctccgctaaagttaacggggagcataaggaaaaagaccttgagccctgggatgctggagaattgaccgctaacgaggagctggaagccctggaaaatgacgtgagtaatgggtgggaccccaatgacatgttccggtataacgaggagaattacggagtagtatctacatatgattccagcctctcatcctacactgtgccattggagagagacaacagcgaggagtttctcaagcgcgaagccagagccaaccagttggcagaggaaatcgagagctccgcccagtacaaagctcgtgtggcactggaaaacgacgatcgctccgaagaggaaaaatacacagctgtacaacgcaactcctccgagcgcgagggacattctattaacacacgcgagaataagtatataccgccaggacagcgtaaccgtgaggtaatcagttggggatccggccgtcagaattctccaaggatgggacaacccggttctggctctatgccctcgcgttccacctctcatacgtccgatttcaacccaaatagtggtagcgatcagcgagtggtcaacgggggagtgccttggccgtcaccatgcccttccccgtcatcccgtccgccatctcgctaccaatccgggcctaattctctgccacctcgagcagctacgcctacacggccaccatcacgacccccatctcggccctctcgcccaccgtctcacccttctgctcacggcagtccagccccagtgagtaccatgcctaagcgcatgagcagtgaagggccgccacgtatgtccccgaaggcccagcgccacccaagaaaccacagagtttcagcgggcaggggctccatttctagtggcttggagttcgtgtcccacaatcccccttctgaagcggcaactcccccggttgcgaggacgtccccaagcggcggcacttggagctctgtggtgtcaggagtaccgcgtcttagccctaaaactcatcggccacggagtccccgtcagaacagcattggcaacacccccagcggcccagttctggcgtcgccccaggccgggattatcccaaccgaggcggtcgctatgccaatacccgccgcgtctccaaccccagctagcccagcttcgaacagggcggtaaccccgtccagcgaggcaaaggacagtcggctgcaggatcaacgccagaatagtccagccggtaataaagagaatataaaaccaaacgaaaccagcccatcattctccaaggctgagaataaaggcatcagtccggtcgtgtcggagcaccggaagcaaattgacgatctgaagaaattcaaaaatgactttcgcctccagccttcgagtactagtgagtccatggatcagctacttaacaagaatcgggagggcgaaaaatcaagggatctgataaaggataagatcgagccctccgctaaggactccttcatcgaaaacagcagtagcaactgtaccagtgggagctctaaacctaattctccttccatatctccgtccattctctctaatacagaacataagagggggccggaggtgacctctcaaggtgtccagaccagtagtcccgcctgtaagcaggaaaaagacgacaaggaagagaagaaagacgccgcagagcaggttcggaaatcaactctgaatccgaatgccaaggaattcaatcctagaagtttctctcagccaaagccgagtaccaccccaaccagccctcgacctcaggctcaaccgagtcctagcatggtaggacaccagcagccgaccccagtctatactcagcctgtgtgcttcgcccccaacatgatgtaccccgtacctgtctcgcctggcgtgcagtaccagatttgtccgaactccggaaaaacatcaataattcgcgtgccctag

SEQ ID NO: 134021 - DNA, 3942 bp, Artificial Sequence
  derived and/or modified sequence
atgcggtcggccgctgccgcaccacggtcccctgcagttgccaccgaatcaagacgatttgccgcagcccgttggcccggatggcggagtctccaaagaccggctcgccgatctgggaggggagggggtggcgctgcccctggcccatacccctcagccgctcctccgcctcccggtccgggtcctcctccgtctcggcaatcgagtccaccctctgccagcgactgttttggctctaatggaaacggagggggtgccttcaggccaggaagtagaagactcctgggcctcggtggtccacctagaccattcgtggtactcttattaccactggctagcccaggcgcaccgcctgccgctcccacccgggcatctccgttgggtgcccgagcttctcctcccaggagcggggtgtccctcgcgcgtcccgctccaggctgcccacggcctgcctgcgaacctgtttatgggccactcaccatgagcctaaaaccacagcagcagcagcaacagcaacaacagcaacagcaacagcagcagcagcagcagcagcagcagcagcagcccccaccagctgccgcaaacgtacgcaaacccggaggctctggcctactggcttcccctgcagctgcaccttctccaagctcctcctctgttagctcatcgtccgcaaccgcaccttcctctgtggtagctgctacctccggcggaggtagaccgggacttggaagaggcagaaattctaacaaagggctacctcagagcaccatcagcttcgatggcatctacgctaatatgcgcatggtccatatcttaacctctgtggtgggaagtaaatgcgaggtccaggtgaaaaacggcggaatctacgaaggagtgttcaaaacttattctccaaagtgcgatctggtcttggacgctgcccatgaaaaatcaaccgagtcaagtagtggccctaaaagggaggaaataatggaatcaattctattcaaatgctccgacttcgtcgtggtccagtttaaggatatggattcttcttatgccaagagggatgcttttaccgactccgccatctcggctaaggttaacggtgaacataaggaaaaagacctggagccatgggacgcgggagagctcacagctaatgaagaacttgaggctctggagaacgacgtgtccaatggttgggatcccaacgacatgtttcgatacaacgaggagaactacggggttgtatcaacatatgacagtagcctttccagctacaccgtcccgttggaacgcgacaactcagaggagtttctcaagcgagaggctcgggctaatcagcttgcagaggaaatcgagagcagtgcgcagtacaaggccagagtggcattggagaacgatgacaggagcgaggaggagaaatatacagccgtccagagaaactcaagcgagcgggaaggtcatagcatcaacacaagagagaacaaatacatcccccctggacagcgcaacagggaagttataagttggggctccggaagacagaacagccctaggatgggccagcccggtagcggatctatgccatctcggtctacttctcacacctctgattttaaccccaattccggcagcgaccagcgagtcgtgaacggcggagtcccatggccgagcccttgcccatcccccagtagccggccaccttcaaggtaccagagtggtcccaatagtttgccgccacgcgctgccacccccacgaggccacctagcaggcccccaagccgtccaagcagacccccatctcatccgtctgcccatggaagccccgctccagtatcgaccatgccaaaaagaatgagcagcgaggggcctcccagaatgagtcccaaagcgcagagacaccctcggaaccatcgggtgtccgcagggagaggttcgatttcatcgggcctagagttcgtctctcacaaccctccaagcgaggcagccactccccctgtggctcgtacgtctccctccgggggaacctggtcatccgtggtttcgggggtgccgaggctgagcccgaagacccacagacccagaagcccgaggcaaaattccataggaaatacacctagcggacccgtgcttgctagcccccaggcaggcataatccctaccgaggccgtggccatgccaataccagctgcctctcccacccccgcaagcccagcctctaacagggcggttactccctccagtgaagccaaagatagtaggctacaggaccagcgacaaaacagtcctgccggaaataaagagaacatcaaacccaatgagaccagtccgtctttctcaaaggccgaaaacaaaggaatatcaccggttgtctccgaacacaggaaacagatcgacgaccttaaaaagttcaagaacgattttagattgcagccatccagcacctctgaaagcatggatcagctgctgaataaaaatcgtgaaggagaaaaaagccgggatcttataaaagataaaatagagcctagtgctaaggactccttcatagaaaactcttcttctaactgcacttcgggcagtagcaagcctaatagtccaagcatttccccatcgattctgagtaacactgagcacaagcgtggaccagaggtgacctctcaaggtgtccagacttcatcacccgcatgcaagcaagagaaagatgataaggaagagaagaaagacgctgcggaacaggtccgcaagagtaccctgaacccaaatgcgaaggagtttaaccctaggtctttctcccagcccaagccatccaccaccccaactagccccaggcctcaggctcaaccttcccccagcatggtcggccatcagcagcctacccctgtgtacacacagcctgtctgttttgctcctaatatgatgtaccctgtaccggtgagtcccggagtgcagcccctgtacccaattccgatgactccaatgcccgtgaaccaggctaagacatatcgcgcagtgcccaatatgccccagcagagacaggaccaacaccatcaatcggccatgatgcatcccgcaagcgccgctggaccccctattgcagcaacacccccagcatattctacacagtatgtggcctacagcccgcaacagttccctaatcaacccctcgttcaacacgtgccgcattatcaatcgcagcaccctcatgtttatagcccagttattcagggcaatgcacgcatgatggcaccaccaacacatgcccagccaggcttggttagcagcagcgcgacacagtatggcgctcatgaacagactcacgccatgtacgcatgtccaaagcttccctataacaaggagaccagcccttcattctacttcgcaatttctacaggcagcttggcccaacaatacgcccaccccaacgctacccttcatcctcacactccgcacccccagccgtctgcgaccccaacaggtcaacaacagtctcagcacggtggaagccatccagcgcctagtcctgtccaacaccatcagcatcaggccgctcaggctctccacctggcttccccccagcaacagtcagctatctaccacgcgggtctagccccaacgccacccagcatgactcctgcaagtaacacacaaagtccccagaactcatttcccgctgcgcaacaaacagtgtttactatccacccatctcacgtgcagcctgcctatacaaacccccctcacatggcgcatgtgccacaggcccacgtacagagcgggatggtgccttcacacccaacggcacacgctccaatgatgttgatgactacccagccacccggagggccacaagccgcactggctcagtccgcattgcagcccatccccgtgtctacgaccgcacattttccttacatgacgcacccctctgtccaagcacaccatcaacagcagctgtag

SEQ ID NO: 134022 - DNA, 2988 bp, Artificial Sequence
  derived and/or modified sequence
atgcgcagcgccgcagccgctcccagatcccctgcagtcgcaacagagagtcggcgattcgcggctgcacgctggcccggatggagaagcttacagcgcccagcacgacggagcggcaggggcggtgggggtgctgcgccaggcccttatccctctgcagcgccacccccacctgggcctggaccccctccatctcggcagagcagccctccctcagcgagtgactgcttcggttccaatggcaacgggggtggcgcttttcgccctggcagcagaaggttgctgggcctgggtgggccaccaaggccattcgttgttctcctgttgccactggcttcccccggtgcaccgcctgccgctccaaccagagcctcccccctgggcgctcgagccagtccgcctcggtccggagtgagtctagctcggcctgcacctggttgtcctcgcccagcatgtgaaccggtctatggcccacttaccatgagccttaagcctcagcagcagcaacagcagcagcagcagcagcagcagcagcaacagcagcagcaacagcagcagcagcagccacctccagccgctgccaacgtgagaaagcctggtggatctggcctgctcgcaagccccgcagcagccccttccccctcaagctccagtgtgtcctctagcagcgcgactgccccttcgtcggtcgtcgccgctacgtctgggggaggacgcccaggtctgggacgtggaagaaatagcaacaaaggcctcccgcagagtacaatatccttcgatggcatttacgctaacatgcgaatggttcacattctcacctcagttgttggatccaagtgtgaggtgcaagtgaaaaatggtggcatctacgaaggagtgttcaaaacctactcgccaaagtgtgatttggttctggatgccgctcacgaaaaatctactgaaagctcctccggcccaaaacgggaggagataatggagtccattctgttcaagtgtagcgatttcgtcgtggtacagtttaaggacatggatagctcgtacgccaagagggatgccttcaccgattccgccattagcgcaaaagtgaatggcgaacataaggagaaggatcttgagccatgggatgcaggcgaactgactgccaatgaggagcttgaagcgcttgagaatgacgtgtctaacggttgggaccctaatgacatgtttcggtataacgaagagaattacggagtcgtgtcaacttacgacagctccttatcatcatacaccgtacctctcgagcgcgacaactcagaggaattcctgaagagagaagccagagctaatcagttggctgaagaaattgagagtagcgcccagtataaagccagagtggccctcgagaacgatgatcggtcagaggaagaaaagtacaccgcagtgcagcgaaattcaagcgagcgcgaggggcactcaatcaacacacgggagaataagtacattcctcctggtcagaggaaccgggaggtcatctcctgggggtccggtaggcagaacagtccaaggatgggacagcccggaagcgggagcatgccctcacggtctactagccatacctccgactttaatcccaatagtggaagtgatcagcgggttgtaaatggaggcgtaccttggccctcgccctgtccaagtcctagtagtaggcctccaagcagataccagtccggtcctaattccctgcctccacgcgctgccaccccaacccgaccccctagtaggcctccaagccgtccttctcgcccacctagtcacccttctgcccatggcagccctgcacctgtgagcactatgcctaagagaatgtccagcgaggggcctccacggatgagcccaaaagcccaaagacaccctcgcaaccatagagtgtccgcaggcagagggagcatttccagcggcttggaattcgtaagccacaacccaccctctgaggctgctacacctccggttgctcgcacatcccctagtggcggaacgtggagttccgtggtgagtggagtaccaaggctgtcccctaaaactcatcggcctagatcccctcgccagaacagtattggaaacacccccagtggccctgtgctagcctcaccccaggccggaatcattccaacagaggccgtggctatgcctatccctgccgcatcccctacgccagcaagccctgccagtaatcgcgctgtgacaccatccagcgaggccaaggattcgagactgcaggaccagcgccaaaattctcctgccggaaacaaggagaatattaagccaaatgagacctcccccagcttttcaaaggccgagaataagggtatttctcctgtggttagtgagcaccgaaaacaaatcgatgacctaaagaagtttaaaaacgatttccggctgcagccaagcagcaccagcgagagcatggatcagctactcaataaaaacagggaaggcgaaaagtcacgggatctgatcaaagacaagatcgaaccctcagcaaaggactcctttatagagaactccagctccaattgcacatccggatctagcaaaccgaattcccccagtataagccccagcatcctgtcgaatactgagcacaagcgtggcccagaggtaacgagccagggcgtgcagacgtcgagtccagcttgcaaacaagaaaaggacgataaagaggaaaaaaaagatgctgcagaacaggtaaggaagagtacattgaaccccaatgctaaggagttcaatccgcgatccttttctcagcccaagcctagtaccacacccacaagccctcgaccacaagctcagccttctccctcaatggtagggcatcagcagcctactcctgtttacacccagccggtgtgttttgcacctaacatgatgtacccagtgcctgtatccccgggagtgcagtatcagatctgtcctaactcaggtaagaccagcatcatcagagtgccttag

SEQ ID NO: 134023 - DNA, 480 bp, Artificial Sequence
  derived and/or modified sequence
atgtgttggacccgaacagctacatgcccagtgtggcgcagcggtcagcgcccaacgagtggacgcacaatgcgaggcagcggtttcgggggacggcgtcacccgtatggcaaggattcaccagcccctccaggttctgctgagcttcctggtttgcagggatccgtaccaccgcactgggggggagttgctggaaacagcgccggacatcggggtccacgcgctcgctgccctagggggggagccggaggctgcgcccaccaccaccctgggcctcctcagcttctccgtgatagtcggccatgtagaacaggttggcaggagagcgcaggcgcagaggctaggggccagggaagggaagttttcttcccccctgccaggcgcgcagcgggtacgaggcatcccggttgtgtttgcgcagtgggagccgctggggcagccgctgaaggccctgcggcacccggaggcggaggcggatag

SEQ ID NO: 134024 - DNA, 4702 bp, Artificial Sequence
  derived and/or modified sequence
acccccgagaaagcaacccagcgcgccgcccgctcctcacgtgtccctcccggccccggggccacctcacgttctgcttccgtctgacccctccgacttccggtaaagagtccctatccgcacctccgctcccacccggcgcctcggcgcgcccgccctccgatgcgctcagcggccgcagctcctcggagtcccgcggtggccaccgagtctcgccgcttcgccgcagccaggtggcccgggtggcgctcgctccagcggccggcgcggcggagcgggcggggcggcggtggcgcggccccgggaccgtatccctccgccgcccctcccccgcccggccccggcccccctccctcccggcagagctcgcctccctccgcctcagactgttttggtagcaacggcaacggcggcggcgcgtttcggcccggctcccggcggctccttggtctcggcgggcctccccgccccttcgtcgtcctccttctccccctcgccagcccgggcgcccctccggccgcgccaacccgcgcctccccgctcggcgcccgcgcgtccccgccgcgttccggcgtctccttggcgcgcccggctcccggctgtccccgcccggcgtgcgagccggtgtatgggcccctcaccatgtcgctgaagccccagcagcagcagcagcagcagcagcagcagcagcagcagcaacagcagcagcagcagcagcagcagcagccgccgcccgcggctgccaatgtccgcaagcccggcggcagcggccttctagcgtcgcccgccgccgcgccttcgccgtcctcgtcctcggtctcctcgtcctcggccacggctccctcctcggtggtcgcggcgacctccggcggcgggaggcccggcctgggcagaggtcgaaacagtaacaaaggactgcctcagtctacgatttcttttgatggaatctatgcaaatatgaggatggttcatatacttacatcagttgttggctccaaatgtgaagtacaagtgaaaaatggaggtatatatgaaggagtttttaaaacttacagtccgaagtgtgatttggtacttgatgccgcacatgagaaaagtacagaatccagttcggggccgaaacgtgaagaaataatggagagtattttgttcaaatgttcagactttgttgtggtacagtttaaagatatggactccagttatgcaaaaagagatgcttttactgactctgctatcagtgctaaagtgaatggcgaacacaaagagaaggacctggagccctgggatgcaggtgaactcacagccaatgaggaacttgaggctttggaaaatgacgtatctaatggatgggatcccaatgatatgtttcgatataatgaagaaaattatggtgtagtgtctacgtatgatagcagtttatcttcgtatacagtgcccttagaaagagataactcagaagaatttttaaaacgggaagcaagggcaaaccagttagcagaagaaattgagtcaagtgcccagtacaaagctcgagtggccctggaaaatgatgataggagtgaggaagaaaaatacacagcagttcagagaaattccagtgaacgtgaggggcacagcataaacactagggaaaataaatatattcctcctggacaaagaaatagagaagtcatatcctggggaagtgggagacagaattcaccgcgtatgggccagcctggatcgggctccatgccatcaagatccacttctcacacttcagatttcaacccgaattctggttcagaccaaagagtagttaatggaggtgttccctggccatcgccttgcccatctccttcctctcgcccaccttctcgctaccagtcaggtcccaactctcttccacctcgggcagccacccctacacggccgccctccaggcccccctcgcggccatccagacccccgtctcacccctctgctcatggttctccagctcctgtctctactatgcctaaacgcatgtcttcagaagggcctccaaggatgtccccaaaggcccagcgacatcctcgaaatcacagagtttctgctgggaggggttccatatccagtggcctagaatttgtatcccacaacccacccagtgaagcagctactcctccagtagcaaggaccagtccctcggggggaacgtggtcatcagtggtcagtggggttccaagattatcccctaaaactcatagacccaggtctcccagacagaacagtattggaaatacccccagtgggccagttcttgcttctccccaagctggtattattccaactgaagctgttgccatgcctattccagctgcatctcctacgcctgctagtcctgcatcgaacagagctgttaccccttctagtgaggctaaagattccaggcttcaagatcagaggcagaactctcctgcagggaataaagaaaatattaaacccaatgaaacatcacctagcttctcaaaagctgaaaacaaaggtatatcaccagttgtttctgaacatagaaaacagattgatgatttaaagaaatttaagaatgattttaggttacagccaagttctacttctgaatctatggatcaactactaaacaaaaatagagagggagaaaaatcaagagatttgatcaaagacaaaattgaaccaagtgctaaggattctttcattgaaaatagcagcagcaactgtaccagtggcagcagcaagccgaatagccccagcatttccccttcaatacttagtaacacggagcacaagaggggacctgaggtcacttcccaaggggttcagacttccagcccagcatgtaaacaagagaaagacgataaggaagagaagaaagacgcagctgagcaagttaggaaatcaacattgaatcccaatgcaaaggagttcaacccacgttccttctctcagccaaagccttctactaccccaacttcacctcggcctcaagcacaacctagcccatctatggtgggtcatcaacagccaactccagtttatactcagcctgtttgttttgcaccaaatatgatgtatccagtcccagtgagcccaggcgtgcaacctttatacccaatacctatgacgcccatgccagtgaatcaagccaagacatatagagcagtaccaaatatgccccaacagcggcaagaccagcatcatcagagtgccatgatgcacccagcgtcagcagcgggcccaccgattgcagccaccccaccagcttactccacgcaatatgttgcctacagtcctcagcagttcccaaatcagccccttgttcagcatgtgccacattatcagtctcagcatcctcatgtctatagtcctgtaatacagggtaatgctagaatgatggcaccaccaacacacgcccagcctggtttagtatcttcttcagcaactcagtacggggctcatgagcagacgcatgcgatgtatgcatgtcccaaattaccatacaacaaggagacaagcccttctttctactttgccatttccacgggctcccttgctcagcagtatgcgcaccctaacgctaccctgcacccacatactccacaccctcagccttcagctacccccactggacagcagcaaagccaacatggtggaagtcatcctgcacccagtcctgttcagcaccatcagcaccaggccgcccaggctctccatctggccagtccacagcagcagtcagccatttaccacgcggggcttgcgccaactccaccctccatgacacctgcctccaacacgcagtcgccacagaatagtttcccagcagcacaacagactgtctttacgatccatccttctcacgttcagccggcgtataccaacccaccccacatggcccacgtacctcaggctcatgtacagtcaggaatggttccttctcatccaactgcccatgcgccaatgatgctaatgacgacacagccacccggcggtccccaggccgccctcgctcaaagtgcactacagcccattccagtctcgacaacagcgcatttcccctatatgacgcacccttcagtacaagcccaccaccaacagcagttgtaaggctgccctggaggaaccgaaaggccaaattccctcctcccttctactgcttctaccaactggaagcacagaaaactagaatttcatttattttgtttttaaaatatatatgttgatttcttgtaacatccaataggaatgctaacagttcacttgcagtggaagatacttggaccgagtagaggcatttaggaacttgggggctattccataattccatatgctgtttcagagtcccgcaggtaccccagctctgcttgccgaaactggaagttatttattttttaataacccttgaaagtcatgaacacatcagctagcaaaagaagtaacaagagtgattcttgctgctattactgctaaaaaaaaaaaaaaaaaaaaatcaagacttggaacgcccttttactaaacttgacaaagtttcagtaaattcttaccgtcaaactgacggattattatttataaatcaagtttgatgaggtgatcactgtctacagtggttcaacttttaagttaagggaaaaacttttactttgtagataatataaaataaaaacttaaaaaaaatttaaaaaataaaaaaagttttaaaaactga

SEQ ID NO: 134025 - DNA, 4587 bp, Artificial Sequence
  derived and/or modified sequence
acccccgagaaagcaacccagcgcgccgcccgctcctcacgtgtccctcccggccccggggccacctcacgttctgcttccgtctgacccctccgacttccggtaaagagtccctatccgcacctccgctcccacccggcgcctcggcgcgcccgccctccgatgcgctcagcggccgcagctcctcggagtcccgcggtggccaccgagtctcgccgcttcgccgcagccaggtggcccgggtggcgctcgctccagcggccggcgcggcggagcgggcggggcggcggtggcgcggccccgggaccgtatccctccgccgcccctcccccgcccggccccggcccccctccctcccggcagagctcgcctccctccgcctcagactgttttggtagcaacggcaacggcggcggcgcgtttcggcccggctcccggcggctccttggtctcggcgggcctccccgccccttcgtcgtcctccttctccccctcgccagcccgggcgcccctccggccgcgccaacccgcgcctccccgctcggcgcccgcgcgtccccgccgcgttccggcgtctccttggcgcgcccggctcccggctgtccccgcccggcgtgcgagccggtgtatgggcccctcaccatgtcgctgaagccccagcagcagcagcagcagcagcagcagcagcagcagcagcaacagcagcagcagcagcagcagcagcagccgccgcccgcggctgccaatgtccgcaagcccggcggcagcggccttctagcgtcgcccgccgccgcgccttcgccgtcctcgtcctcggtctcctcgtcctcggccacggctccctcctcggtggtcgcggcgacctccggcggcgggaggcccggcctgggcagaggtcgaaacagtaacaaaggactgcctcagtctacgatttcttttgatggaatctatgcaaatatgaggatggttcatatacttacatcagttgttggctccaaatgtgaagtacaagtgaaaaatggaggtatatatgaaggagtttttaaaacttacagtccgaagtgtgatttggtacttgatgccgcacatgagaaaagtacagaatccagttcggggccgaaacgtgaagaaataatggagagtattttgttcaaatgttcagactttgttgtggtacagtttaaagatatggactccagttatgcaaaaagagatgcttttactgactctgctatcagtgctaaagtgaatggcgaacacaaagagaaggacctggagccctgggatgcaggtgaactcacagccaatgaggaacttgaggctttggaaaatgacgtatctaatggatgggatcccaatgatatgtttcgatataatgaagaaaattatggtgtagtgtctacgtatgatagcagtttatcttcgtatacagtgcccttagaaagagataactcagaagaatttttaaaacgggaagcaagggcaaaccagttagcagaagaaattgagtcaagtgcccagtacaaagctcgagtggccctggaaaatgatgataggagtgaggaagaaaaatacacagcagttcagagaaattccagtgaacgtgaggggcacagcataaacactagggaaaataaatatattcctcctggacaaagaaatagagaagtcatatcctggggaagtgggagacagaattcaccgcgtatgggccagcctggatcgggctccatgccatcaagatccacttctcacacttcagatttcaacccgaattctggttcagaccaaagagtagttaatggaggtgttccctggccatcgccttgcccatctccttcctctcgcccaccttctcgctaccagtcaggtcccaactctcttccacctcgggcagccacccctacacggccgccctccaggcccccctcgcggccatccagacccccgtctcacccctctgctcatggttctccagctcctgtctctactatgcctaaacgcatgtcttcagaagggcctccaaggatgtccccaaaggcccagcgacatcctcgaaatcacagagtttctgctgggaggggttccatatccagtggcctagaatttgtatcccacaacccacccagtgaagcagctactcctccagtagcaaggaccagtccctcggggggaacgtggtcatcagtggtcagtggggttccaagattatcccctaaaactcatagacccaggtctcccagacagaacagtattggaaatacccccagtgggccagttcttgcttctccccaagctggtattattccaactgaagctgttgccatgcctattccagctgcatctcctacgcctgctagtcctgcatcgaacagagctgttaccccttctagtgaggctaaagattccaggcttcaagatcagaggcagaactctcctgcagggaataaagaaaatattaaacccaatgaaacatcacctagcttctcaaaagctgaaaacaaaggtatatcaccagttgtttctgaacatagaaaacagattgatgatttaaagaaatttaagaatgattttaggttacagccaagttctacttctgaatctatggatcaactactaaacaaaaatagagagggagaaaaatcaagagatttgatcaaagacaaaattgaaccaagtgctaaggattctttcattgaaaatagcagcagcaactgtaccagtggcagcagcaagccgaatagccccagcatttccccttcaatacttagtaacacggagcacaagaggggacctgaggtcacttcccaaggggttcagacttccagcccagcatgtaaacaagagaaagacgataaggaagagaagaaagacgcagctgagcaagttaggaaatcaacattgaatcccaatgcaaaggagttcaacccacgttccttctctcagccaaagccttctactaccccaacttcacctcggcctcaagcacaacctagcccatctatggtgggtcatcaacagccaactccagtttatactcagcctgtttgttttgcaccaaatatgatgtatccagtcccagtgagcccaggcgtgcaataccaaatatgccccaacagcggcaagaccagcatcatcagagtgccatgatgcacccagcgtcagcagcgggcccaccgattgcagccaccccaccagcttactccacgcaatatgttgcctacagtcctcagcagttcccaaatcagccccttgttcagcatgtgccacattatcagtctcagcatcctcatgtctatagtcctgtaatacagggtaatgctagaatgatggcaccaccaacacacgcccagcctggtttagtatcttcttcagcaactcagtacggggctcatgagcagacgcatgcgatgtatgcatgtcccaaattaccatacaacaaggagacaagcccttctttctactttgccatttccacgggctcccttgctcagcagtatgcgcaccctaacgctaccctgcacccacatactccacaccctcagccttcagctacccccactggacagcagcaaagccaacatggtggaagtcatcctgcacccagtcctgttcagcaccatcagcaccaggccgcccaggctctccatctggccagtccacagcagcagtcagccatttaccacgcggggcttgcgccaactccaccctccatgacacctgcctccaacacgcagtcgccacagaatagtttcccagcagcacaacagactgtctttacgatccatccttctcacgttcagccggcgtataccaacccaccccacatggcccacgtacctcaggctcatgtacagtcaggaatggttccttctcatccaactgcccatgcgccaatgatgctaatgacgacacagccacccggcggtccccaggccgccctcgctcaaagtgcactacagcccattccagtctcgacaacagcgcatttcccctatatgacgcacccttcagtacaagcccaccaccaacagcagttgtaaggctgccctggaggaaccgaaaggccaaattccctcctcccttctactgcttctaccaactggaagcacagaaaactagaatttcatttattttgtttttaaaatatatatgttgatttcttgtaacatccaataggaatgctaacagttcacttgcagtggaagatacttggaccgagtagaggcatttaggaacttgggggctattccataattccatatgctgtttcagagtcccgcaggtaccccagctctgcttgccgaaactggaagttatttattttttaataacccttgaaagtcatgaacacatcagctagcaaaagaagtaacaagagtgattcttgctgctattactgctaaaaaaaaaaaaaaaaaaaaatcaagacttggaacgcccttttactaaacttgacaaagtttcagtaaattcttaccgtcaaactgacggattattatttataaatcaagtttgatgaggtgatcactgtctacagtggttcaacttttaagttaagggaaaaacttttactttgtagataat

SEQ ID NO: 134026 - DNA, 3942 bp, Artificial Sequence
  derived and/or modified sequence
atgagaagcgccgccgccgcccccagaagccccgccgtggccaccgagagcagaagattcgccgccgccagatggcccggctggagaagcctgcagagacccgccagaagaagcggcagaggcggcggcggcgccgcccccggcccctaccccagcgccgccccccccccccccggccccggccccccccccagcagacagagcagcccccccagcgccagcgactgcttcggcagcaacggcaacggcggcggcgccttcagacccggcagcagaagactgctgggcctgggcggcccccccagacccttcgtggtgctgctgctgcccctggccagccccggcgccccccccgccgcccccaccagagccagccccctgggcgccagagccagcccccccagaagcggcgtgagcctggccagacccgcccccggctgccccagacccgcctgcgagcccgtgtacggccccctgaccatgagcctgaagccccagcagcagcagcagcagcagcagcagcagcagcagcagcagcagcagcagcagcagcagcagcagcagcccccccccgccgccgccaacgtgagaaagcccggcggcagcggcctgctggccagccccgccgccgcccccagccccagcagcagcagcgtgagcagcagcagcgccaccgcccccagcagcgtggtggccgccaccagcggcggcggcagacccggcctgggcagaggcagaaacagcaacaagggcctgccccagagcaccatcagcttcgacggcatctacgccaacatgagaatggtgcacatcctgaccagcgtggtgggcagcaagtgcgaggtgcaggtgaagaacggcggcatctacgagggcgtgttcaagacctacagccccaagtgcgacctggtgctggacgccgcccacgagaagagcaccgagagcagcagcggccccaagagagaggagatcatggagagcatcctgttcaagtgcagcgacttcgtggtggtgcagttcaaggacatggacagcagctacgccaagagagacgccttcaccgacagcgccatcagcgccaaggtgaacggcgagcacaaggagaaggacctggagccctgggacgccggcgagctgaccgccaacgaggagctggaggccctggagaacgacgtgagcaacggctgggaccccaacgacatgttcagatacaacgaggagaactacggcgtggtgagcacctacgacagcagcctgagcagctacaccgtgcccctggagagagacaacagcgaggagttcctgaagagagaggccagagccaaccagctggccgaggagatcgagagcagcgcccagtacaaggccagagtggccctggagaacgacgacagaagcgaggaggagaagtacaccgccgtgcagagaaacagcagcgagagagagggccacagcatcaacaccagagagaacaagtacatcccccccggccagagaaacagagaggtgatcagctggggcagcggcagacagaacagccccagaatgggccagcccggcagcggcagcatgcccagcagaagcaccagccacaccagcgacttcaaccccaacagcggcagcgaccagagagtggtgaacggcggcgtgccctggcccagcccctgccccagccccagcagcagaccccccagcagataccagagcggccccaacagcctgccccccagagccgccacccccaccagaccccccagcagaccccccagcagacccagcagaccccccagccaccccagcgcccacggcagccccgcccccgtgagcaccatgcccaagagaatgagcagcgagggcccccccagaatgagccccaaggcccagagacaccccagaaaccacagagtgagcgccggcagaggcagcatcagcagcggcctggagttcgtgagccacaacccccccagcgaggccgccaccccccccgtggccagaaccagccccagcggcggcacctggagcagcgtggtgagcggcgtgcccagactgagccccaagacccacagacccagaagccccagacagaacagcatcggcaacacccccagcggccccgtgctggccagcccccaggccggcatcatccccaccgaggccgtggccatgcccatccccgccgccagccccacccccgccagccccgccagcaacagagccgtgacccccagcagcgaggccaaggacagcagactgcaggaccagagacagaacagccccgccggcaacaaggagaacatcaagcccaacgagaccagccccagcttcagcaaggccgagaacaagggcatcagccccgtggtgagcgagcacagaaagcagatcgacgacctgaagaagttcaagaacgacttcagactgcagcccagcagcaccagcgagagcatggaccagctgctgaacaagaacagagagggcgagaagagcagagacctgatcaaggacaagatcgagcccagcgccaaggacagcttcatcgagaacagcagcagcaactgcaccagcggcagcagcaagcccaacagccccagcatcagccccagcatcctgagcaacaccgagcacaagagaggccccgaggtgaccagccagggcgtgcagaccagcagccccgcctgcaagcaggagaaggacgacaaggaggagaagaaggacgccgccgagcaggtgagaaagagcaccctgaaccccaacgccaaggagttcaaccccagaagcttcagccagcccaagcccagcaccacccccaccagccccagaccccaggcccagcccagccccagcatggtgggccaccagcagcccacccccgtgtacacccagcccgtgtgcttcgcccccaacatgatgtaccccgtgcccgtgagccccggcgtgcagcccctgtaccccatccccatgacccccatgcccgtgaaccaggccaagacctacagagccgtgcccaacatgccccagcagagacaggaccagcaccaccagagcgccatgatgcaccccgccagcgccgccggcccccccatcgccgccaccccccccgcctacagcacccagtacgtggcctacagcccccagcagttccccaaccagcccctggtgcagcacgtgccccactaccagagccagcacccccacgtgtacagccccgtgatccagggcaacgccagaatgatggccccccccacccacgcccagcccggcctggtgagcagcagcgccacccagtacggcgcccacgagcagacccacgccatgtacgcctgccccaagctgccctacaacaaggagaccagccccagcttctacttcgccatcagcaccggcagcctggcccagcagtacgcccaccccaacgccaccctgcacccccacaccccccacccccagcccagcgccacccccaccggccagcagcagagccagcacggcggcagccaccccgcccccagccccgtgcagcaccaccagcaccaggccgcccaggccctgcacctggccagcccccagcagcagagcgccatctaccacgccggcctggcccccaccccccccagcatgacccccgccagcaacacccagagcccccagaacagcttccccgccgcccagcagaccgtgttcaccatccaccccagccacgtgcagcccgcctacaccaaccccccccacatggcccacgtgccccaggcccacgtgcagagcggcatggtgcccagccaccccaccgcccacgcccccatgatgctgatgaccacccagccccccggcggcccccaggccgccctggcccagagcgccctgcagcccatccccgtgagcaccaccgcccacttcccctacatgacccaccccagcgtgcaggcccaccaccagcagcagctgtag

SEQ ID NO: 134027 - DNA, 2988 bp, Artificial Sequence
  derived and/or modified sequence
atgagaagcgccgccgccgcccccagaagccccgccgtggccaccgagagcagaagattcgccgccgccagatggcccggctggagaagcctgcagagacccgccagaagaagcggcagaggcggcggcggcgccgcccccggcccctaccccagcgccgccccccccccccccggccccggccccccccccagcagacagagcagcccccccagcgccagcgactgcttcggcagcaacggcaacggcggcggcgccttcagacccggcagcagaagactgctgggcctgggcggcccccccagacccttcgtggtgctgctgctgcccctggccagccccggcgccccccccgccgcccccaccagagccagccccctgggcgccagagccagcccccccagaagcggcgtgagcctggccagacccgcccccggctgccccagacccgcctgcgagcccgtgtacggccccctgaccatgagcctgaagccccagcagcagcagcagcagcagcagcagcagcagcagcagcagcagcagcagcagcagcagcagcagcagcccccccccgccgccgccaacgtgagaaagcccggcggcagcggcctgctggccagccccgccgccgcccccagccccagcagcagcagcgtgagcagcagcagcgccaccgcccccagcagcgtggtggccgccaccagcggcggcggcagacccggcctgggcagaggcagaaacagcaacaagggcctgccccagagcaccatcagcttcgacggcatctacgccaacatgagaatggtgcacatcctgaccagcgtggtgggcagcaagtgcgaggtgcaggtgaagaacggcggcatctacgagggcgtgttcaagacctacagccccaagtgcgacctggtgctggacgccgcccacgagaagagcaccgagagcagcagcggccccaagagagaggagatcatggagagcatcctgttcaagtgcagcgacttcgtggtggtgcagttcaaggacatggacagcagctacgccaagagagacgccttcaccgacagcgccatcagcgccaaggtgaacggcgagcacaaggagaaggacctggagccctgggacgccggcgagctgaccgccaacgaggagctggaggccctggagaacgacgtgagcaacggctgggaccccaacgacatgttcagatacaacgaggagaactacggcgtggtgagcacctacgacagcagcctgagcagctacaccgtgcccctggagagagacaacagcgaggagttcctgaagagagaggccagagccaaccagctggccgaggagatcgagagcagcgcccagtacaaggccagagtggccctggagaacgacgacagaagcgaggaggagaagtacaccgccgtgcagagaaacagcagcgagagagagggccacagcatcaacaccagagagaacaagtacatcccccccggccagagaaacagagaggtgatcagctggggcagcggcagacagaacagccccagaatgggccagcccggcagcggcagcatgcccagcagaagcaccagccacaccagcgacttcaaccccaacagcggcagcgaccagagagtggtgaacggcggcgtgccctggcccagcccctgccccagccccagcagcagaccccccagcagataccagagcggccccaacagcctgccccccagagccgccacccccaccagaccccccagcagaccccccagcagacccagcagaccccccagccaccccagcgcccacggcagccccgcccccgtgagcaccatgcccaagagaatgagcagcgagggcccccccagaatgagccccaaggcccagagacaccccagaaaccacagagtgagcgccggcagaggcagcatcagcagcggcctggagttcgtgagccacaacccccccagcgaggccgccaccccccccgtggccagaaccagccccagcggcggcacctggagcagcgtggtgagcggcgtgcccagactgagccccaagacccacagacccagaagccccagacagaacagcatcggcaacacccccagcggccccgtgctggccagcccccaggccggcatcatccccaccgaggccgtggccatgcccatccccgccgccagccccacccccgccagccccgccagcaacagagccgtgacccccagcagcgaggccaaggacagcagactgcaggaccagagacagaacagccccgccggcaacaaggagaacatcaagcccaacgagaccagccccagcttcagcaaggccgagaacaagggcatcagccccgtggtgagcgagcacagaaagcagatcgacgacctgaagaagttcaagaacgacttcagactgcagcccagcagcaccagcgagagcatggaccagctgctgaacaagaacagagagggcgagaagagcagagacctgatcaaggacaagatcgagcccagcgccaaggacagcttcatcgagaacagcagcagcaactgcaccagcggcagcagcaagcccaacagccccagcatcagccccagcatcctgagcaacaccgagcacaagagaggccccgaggtgaccagccagggcgtgcagaccagcagccccgcctgcaagcaggagaaggacgacaaggaggagaagaaggacgccgccgagcaggtgagaaagagcaccctgaaccccaacgccaaggagttcaaccccagaagcttcagccagcccaagcccagcaccacccccaccagccccagaccccaggcccagcccagccccagcatggtgggccaccagcagcccacccccgtgtacacccagcccgtgtgcttcgcccccaacatgatgtaccccgtgcccgtgagccccggcgtgcagtaccagatctgccccaacagcggcaagaccagcatcatcagagtgccctag

SEQ ID NO: 134028 - DNA, 480 bp, Artificial Sequence
  derived and/or modified sequence
atgtgctggaccagaaccgccacctgccccgtgtggagaagcggccagagacccaccagcggcagaaccatgagaggcagcggcttcggcggcagaagacacccctacggcaaggacagccccgccccccccggcagcgccgagctgcccggcctgcagggcagcgtgcccccccactggggcggcgtggccggcaacagcgccggccacagaggccccagagccagatgccccagaggcggcgccggcggctgcgcccaccaccaccccggccccccccagctgctgagagacagcagaccctgcagaaccggctggcaggagagcgccggcgccgaggccagaggccagggcagagaggtgttcttcccccccgccagaagagccgccggcaccagacaccccggctgcgtgtgcgccgtgggcgccgccggcgccgccgccgagggccccgccgcccccggcggcggcggcggctag

SEQ ID NO: 134029 - protein, 323 aa, Artificial Sequence
  derived and/or modified sequence
MQAAWLLGALVVPQLLGFGHGARGAEREWEGGWGGAQEEEREREALMLKHLQEALGLPAGRGDENPAGTVEGKEDWEMEEDQGEEEEEEATPTPSSGPSPSPTPEDIVTYILGRLAGLDAGLHQLHVRLHALDTRVVELTQGLRQLRNAAGDTRDAVQALQEAQGRAEREHGRLEGCLKGLRLGHKCFLLSRDFEAQAAAQARCTARGGSLAQPADRQQMEALTRYLRAALAPYNWPVWLGVHDRRAEGLYLFENGQRVSFFAWHRSPRPELGAQPSASPHPLSPDQPNGGTLENCVAQASDDGSWWDHDCQRRLYYVCEFPF

SEQ ID NO: 134030 - protein, 245 aa, Artificial Sequence
  derived and/or modified sequence
MQAAWLLGALVVPQLLGFGHGARGAEREWEGGWGGAQEEEREREALMLKHLQEALGLPAGRGDENPAGTVEGKEDWEMEEDQGEEEEEEATPTPSSGPSPSPTPEDIVTYILGRLAGLDAGLHQLHVRLHALDTRVVELTQGLRQLRNAAGDTRDAVQALQEAQGRAEREHGRLEGCLKGLRLGHKCFLLSRDFEAQPSASPHPLSPDQPNGGTLENCVAQASDDGSWWDHDCQRRLYYVCEFPF

SEQ ID NO: 134031 - DNA, 972 bp, Artificial Sequence
  derived and/or modified sequence
atgcaagcagcttggctcttaggagctctagtggtgcctcaacttttgggcttcggccatggcgcacgaggtgccgaacgggagtgggaagggggatggggtggagctcaggaagaggagcgggaaagggaggccctgatgctcaagcacctgcaggaggcactcggactgccggctggccgaggtgatgaaaatccagccggtacagtggagggcaaggaagactgggagatggaggaggatcagggtgaagaagaggaggaagaggccacccccaccccgagcagtggaccatcaccttcacctactccagaggatattgtcacctacatcctgggcaggctcgcgggtctggacgctgggctgcaccagctgcacgtccgactccatgccctggacaccagagtagtggagctaacccagggactgaggcaactgagaaatgctgccggagacaccagggatgccgtccaggccttgcaggaggcccaaggtcgagcagagcgagaacatggtagactggaaggttgtttgaaaggcttacgtttggggcataaatgcttcctgctctctcgcgacttcgaagctcaggctgcagcacaggccaggtgtactgccagaggtgggagcctggcacagcccgcagatcggcagcaaatggaggctctgactcgatatctgagggctgctctcgctccgtataattggccagtgtggcttggtgtacacgatcgacgtgctgaaggcctttatctctttgagaacggccaacgggtatccttcttcgcatggcaccgaagcccacggccagaactcggggctcagccttctgcaagcccccaccccctgtcaccagatcagcccaacggcggaacacttgagaactgcgtggcccaggcaagtgacgacgggagctggtgggatcacgactgccaaagaagactctactatgtatgtgagttcccattctag

SEQ ID NO: 134032 - DNA, 738 bp, Artificial Sequence
  derived and/or modified sequence
atgcaggccgcttggctgctcggagccttagtggtgccacaactcctcggattcggtcatggggctcgtggcgcagaacgtgagtgggagggagggtggggcggagcccaggaggaggagcgagaaagagaggctctgatgctcaagcatctccaggaggcactgggactccccgctgggaggggcgacgaaaatcccgctgggaccgtggaaggcaaggaggactgggagatggaggaagaccagggagaagaagaagaagaggaggctactccaacccctagcagcggcccaagcccaagcccaacccccgaggacatagtgacctacatcctcggacgattggcgggactcgatgccggacttcatcagctgcacgtccggctgcatgccctggatacacgtgtggtggaactcacgcaaggcttaaggcagctcagaaacgctgccggagacacccgtgacgctgtgcaagcgttacaggaagcacaaggcagggcagagagggaacacgggcgacttgagggatgtcttaagggactgcggctcgggcacaaatgttttctgctgagtcgagatttcgaagctcagcccagcgcgtcaccccatccgctcagccctgatcagcccaatgggggaaccctggaaaattgcgtggctcaggcaagcgacgacggatcctggtgggaccatgattgtcaacgccgactgtactatgtctgcgaattccctttctag

SEQ ID NO: 134033 - DNA, 972 bp, Artificial Sequence
  derived and/or modified sequence
atgcaagctgcctggcttctaggagcactcgtggtaccacaactgcttgggtttggccacggtgcccgaggagcagagcgggaatgggaaggtggctggggaggagcccaggaggaagaaagggaacgggaagctcttatgttgaagcatttacaagaggccttggggttacctgccggccgtggcgacgagaatcccgctggcacagtagaaggcaaggaggattgggagatggaagaggaccagggcgaagaagaagaggaggaggccacaccgactcctagctccggaccatcaccctcccctacccccgaggatatagttacatacatactagggaggcttgcaggactggacgcgggtctgcaccaactgcatgtcaggctgcacgctcttgacacaagggtggtggagctcacccagggtctgaggcaattgcggaacgcagcgggggatacacgcgatgcagtacaggcattacaagaggcccagggcagagctgaaagggagcacggcaggctagaggggtgcctcaaaggcttaagactggggcacaaatgttttttgctttctagggactttgaggctcaggccgccgctcaggcacgctgcaccgctcgaggcgggtcattagctcagcctgcagaccgccaacagatggaagccttaacaaggtacctgcgagcagctcttgccccttacaattggccagtgtggttgggggtacatgatagacgcgctgagggactatatctcttcgagaacggccaacgcgttagcttcttcgcctggcatcgctctccccggcctgagctgggagcgcagccaagtgcctctccccacccactctccccggatcagcctaacggaggaacgctggaaaattgtgtggctcaggctagtgatgacgggagttggtgggatcacgattgtcagcgtcgcctatactacgtgtgtgagtttcccttctag

SEQ ID NO: 134034 - DNA, 738 bp, Artificial Sequence
  derived and/or modified sequence
atgcaggctgcctggcttctgggggctctcgtagtgcctcaactcctgggttttggccacggcgcacgtggggctgagcgagagtgggaagggggctggggaggagctcaggaagaagagcgcgagagagaagctttgatgctgaaacatctgcaagaagctctgggcctccccgcgggacgcggcgatgagaaccccgcaggcacggttgaaggcaaagaggactgggagatggaagaagatcagggagaagaggaggaggaggaggccaccccaacacccagctctggccccagcccaagcccaactccggaggatatcgttacatacattcttggccgccttgctggccttgatgcggggttgcaccagttgcacgtcagacttcacgcactggacaccagagtcgttgaattgactcaggggcttcgtcagctgaggaatgcagcaggagacacaagagacgcagttcaagcacttcaggaggcacagggacgggccgaaagggaacacggacgtcttgagggctgtttaaaaggtctccgcctgggacataagtgctttctgctgtctcgagatttcgaggcacagccctctgccagccctcaccctctttcccctgatcaaccgaacgggggtaccctggaaaattgtgttgctcaagctagcgacgacgggtcttggtgggatcatgactgccaaagacgattgtattatgtgtgcgaatttcccttttag

SEQ ID NO: 134035 - DNA, 972 bp, Artificial Sequence
  derived and/or modified sequence
atgcaggcagcttggttactaggcgcgctggtggtacctcaactcctggggttcggccacggggctcggggagctgaaagggagtgggagggaggatgggggggtgcgcaggaggaggaacgggagagggaagcattgatgttgaaacacctccaggaggccctgggattaccagccggccgcggagacgagaacccggcaggaacggtcgagggaaaagaggattgggaaatggaggaagaccagggggaagaggaggaggaggaggctacaccaacacccagctcaggaccaagtccctcccccacccctgaggatattgtgacctacattctgggcagactggcaggtctggatgccggcctccatcagttacacgttagattacacgcattggatacgcgggtggttgagctaacccagggtttgcgccagcttcggaacgccgctggggacactcgtgatgcagtccaggctctacaggaggcacagggcagggccgaacgggagcatggcagactagagggctgtctcaaaggacttcggctgggccacaaatgcttcctgcttagtagagacttcgaagcccaagccgccgctcaggcgcgctgtacagctcgcggtgggtcactggcgcagcccgccgatcggcagcagatggaggctttgacccgctacttacgggctgctctcgccccatataattggcctgtctggttaggcgtgcatgataggcgagccgagggattgtacctttttgagaatggacagcgtgtctctttttttgcatggcataggtcccccaggcctgagctcggagctcaacctagcgcgtctccccatcccctcagtcccgatcaacccaacgggggtacactcgaaaactgtgttgcccaagctagcgacgacggttcgtggtgggatcatgattgccaacgccgactttactatgtatgcgaatttccattctag

SEQ ID NO: 134036 - DNA, 1128 bp, Artificial Sequence
  derived and/or modified sequence
gagagaagctgggagaatcgggaacctgggggctagtgacctgcacacagggcaggggcactcggcagttcccagaggccacccctcccaccccagacatccagacatctggaactttgggtgccaagagtccagcttaatgcaggcagcctggcttttgggggctttggtggtcccccagctcttgggctttggccatggggctcggggagcagagagggagtgggagggaggctggggaggtgcccaggaggaggagcgggagagggaggccctgatgctgaagcatctgcaggaagccctaggactgcctgctgggaggggggatgagaatcctgccggaactgttgagggaaaagaggactgggagatggaggaggaccagggggaggaagaggaggaggaagcaacgccaaccccatcctccggccccagcccctctcccacccctgaggacatcgtcacttacatcctgggccgcctggccggcctggacgcaggcctgcaccagctgcacgtccgtctgcacgcgttggacacccgcgtggtcgagctgacccaggggctgcggcagctgcggaacgcggcaggcgacacccgcgatgccgtgcaagccctgcaggaggcgcagggtcgcgccgagcgcgagcacggccgcttggagggctgcctgaaggggctgcgcctgggccacaagtgcttcctgctctcgcgcgacttcgaagcccagcccagcgcctcgccgcatccgctcagcccggaccagcccaacggtggcacgctcgagaactgcgtggcgcaggcctctgacgacggctcctggtgggaccacgactgccagcggcgtctctactacgtctgcgagttccccttctagcggggccggtaccccgcctccctgcccatcccaccacccggcctttccctgcgccgtgcccaccctcctccggaatctcccttcccttcctggccacgaatggcagcgtcctccccgacccccagtctgggcgcttctgggagggctcttgcggtgccggcactcctccttgttagtgtctttccttgaaggggcgggcaccaggctaggtccggtgccaataaatccttgtggaatctgacttgaggggc

SEQ ID NO: 134037 - DNA, 738 bp, Artificial Sequence
  derived and/or modified sequence
atgcaggccgcatggttgcttggtgcactggtcgtgccccagctgctgggatttggacatggcgcacgcggagctgaaagggagtgggaaggaggctggggaggggctcaagaagaggagagggaaagggaagcactcatgctgaaacacctccaggaggcactcggcctgcccgctggacggggcgatgaaaaccccgccggaacagttgagggtaaggaggattgggagatggaggaagatcagggggaggaagaagaggaagaggctacaccaacgccaagctccggaccttctccttccccaacaccagaagacattgtgacatatatactagggagactcgcaggcctggatgctggtctgcaccaattacacgtccgactgcatgccctcgacaccagggtggtggaattgacccaaggcctccgacagcttcgaaacgcagccggcgatacaagagacgctgtgcaagctcttcaggaggcccagggacgcgccgagagagaacacggaaggttggaaggatgcttgaagggcctgcgtctgggacacaaatgcttcctgctcagcagagacttcgaagctcagccaagcgctagcccccatccactttcacctgatcagccaaacggcggaactctcgaaaattgtgtggcacaggccagtgatgatggctcctggtgggatcacgactgtcagcgcagattgtattacgtgtgtgagtttcctttttag

SEQ ID NO: 134038 - DNA, 1405 bp, Artificial Sequence
  derived and/or modified sequence
gaccaacggaccggacagagacgaggagaggaacaggaagagagaagctgggagaatcgggaacctgggggctagtgacctgcacacagggcaggggcactcggcagttcccagaggccacccctcccaccccagacatccagacatctggaactttgggtgccaagagtccagcttaatgcaggcagcctggcttttgggggctttggtggtcccccagctcttgggctttggccatggggctcggggagcagagagggagtgggagggaggctggggaggtgcccaggaggaggagcgggagagggaggccctgatgctgaagcatctgcaggaagccctaggactgcctgctgggaggggggatgagaatcctgccggaactgttgagggaaaagaggactgggagatggaggaggaccagggggaggaagaggaggaggaagcaacgccaaccccatcctccggccccagcccctctcccacccctgaggacatcgtcacttacatcctgggccgcctggccggcctggacgcaggcctgcaccagctgcacgtccgtctgcacgcgttggacacccgcgtggtcgagctgacccaggggctgcggcagctgcggaacgcggcaggcgacacccgcgatgccgtgcaagccctgcaggaggcgcagggtcgcgccgagcgcgagcacggccgcttggagggctgcctgaaggggctgcgcctgggccacaagtgcttcctgctctcgcgcgacttcgaagctcaggcggcggcgcaggcgcggtgcacggcgcggggcgggagcctggcgcagccggcagaccgccagcagatggaggcgctcactcggtacctgcgcgcggcgctcgctccctacaactggcccgtgtggctgggcgtgcacgatcggcgcgccgagggcctctacctcttcgaaaacggccagcgcgtgtccttcttcgcctggcatcgctcaccccgccccgagctcggcgcccagcccagcgcctcgccgcatccgctcagcccggaccagcccaacggtggcacgctcgagaactgcgtggcgcaggcctctgacgacggctcctggtgggaccacgactgccagcggcgtctctactacgtctgcgagttccccttctagcggggccggtaccccgcctccctgcccatcccaccacccggcctttccctgcgccgtgcccaccctcctccggaatctcccttcccttcctggccacgaatggcagcgtcctccccgacccccagtctgggcgcttctgggagggctcttgcggtgccggcactcctccttgttagtgtctttccttgaaggggcgggcaccaggctaggtccggtgccaataaatccttgtggaatctgacttgaggggcagtg

SEQ ID NO: 134039 - DNA, 972 bp, Artificial Sequence
  derived and/or modified sequence
atgcaggccgcctggctgctgggcgccctggtggtgccccagctgctgggcttcggccacggcgccagaggcgccgagagagagtgggagggcggctggggcggcgcccaggaggaggagagagagagagaggccctgatgctgaagcacctgcaggaggccctgggcctgcccgccggcagaggcgacgagaaccccgccggcaccgtggagggcaaggaggactgggagatggaggaggaccagggcgaggaggaggaggaggaggccacccccacccccagcagcggccccagccccagccccacccccgaggacatcgtgacctacatcctgggcagactggccggcctggacgccggcctgcaccagctgcacgtgagactgcacgccctggacaccagagtggtggagctgacccagggcctgagacagctgagaaacgccgccggcgacaccagagacgccgtgcaggccctgcaggaggcccagggcagagccgagagagagcacggcagactggagggctgcctgaagggcctgagactgggccacaagtgcttcctgctgagcagagacttcgaggcccaggccgccgcccaggccagatgcaccgccagaggcggcagcctggcccagcccgccgacagacagcagatggaggccctgaccagatacctgagagccgccctggccccctacaactggcccgtgtggctgggcgtgcacgacagaagagccgagggcctgtacctgttcgagaacggccagagagtgagcttcttcgcctggcacagaagccccagacccgagctgggcgcccagcccagcgccagcccccaccccctgagccccgaccagcccaacggcggcaccctggagaactgcgtggcccaggccagcgacgacggcagctggtgggaccacgactgccagagaagactgtactacgtgtgcgagttccccttctag

SEQ ID NO: 134040 - DNA, 738 bp, Artificial Sequence
  derived and/or modified sequence
atgcaggccgcctggctgctgggcgccctggtggtgccccagctgctgggcttcggccacggcgccagaggcgccgagagagagtgggagggcggctggggcggcgcccaggaggaggagagagagagagaggccctgatgctgaagcacctgcaggaggccctgggcctgcccgccggcagaggcgacgagaaccccgccggcaccgtggagggcaaggaggactgggagatggaggaggaccagggcgaggaggaggaggaggaggccacccccacccccagcagcggccccagccccagccccacccccgaggacatcgtgacctacatcctgggcagactggccggcctggacgccggcctgcaccagctgcacgtgagactgcacgccctggacaccagagtggtggagctgacccagggcctgagacagctgagaaacgccgccggcgacaccagagacgccgtgcaggccctgcaggaggcccagggcagagccgagagagagcacggcagactggagggctgcctgaagggcctgagactgggccacaagtgcttcctgctgagcagagacttcgaggcccagcccagcgccagcccccaccccctgagccccgaccagcccaacggcggcaccctggagaactgcgtggcccaggccagcgacgacggcagctggtgggaccacgactgccagagaagactgtactacgtgtgcgagttccccttctag

SEQ ID NO: 134041 - DNA, 972 bp, Artificial Sequence
  derived and/or modified sequence
atgcaggctgcttggcttctgggcgcactcgtcgtaccacagctcttaggcttcggacatggcgctagaggggcggaacgcgagtgggagggcggatggggtggggcccaggaagaagagcgggagcgcgaagccttgatgctcaagcatctgcaggaagctttagggctgccagctgggcggggcgatgagaacccagccggaaccgtcgagggtaaagaagactgggaaatggaggaggatcaaggagaagaagaagaggaggaggcgacccccacacctagcagcgggccaagcccctccccaactcctgaggatattgtgacctacatcctgggacgcctggccggcttggacgccgggcttcaccagctgcatgttagactccatgcgctggacactcgtgttgtggaactgacacagggtttaaggcagttgaggaacgccgccggagacaccagagatgccgtgcaggcactgcaggaagctcaggggagggctgaaagagaacacggaagactcgaggggtgcctgaagggcctccggctggggcacaagtgtttcctgctcagccgagattttgaggcccaggctgcagcccaggccaggtgtacagccaggggggggtcactggcacagcctgctgacaggcagcagatggaggccctcacaagatacctccgagcagcgctcgccccctacaactggcctgtgtggctgggcgtccacgatagaagggcggaagggttgtatttgttcgagaatggtcaaagggtatccttcttcgcttggcatcggtcgccaaggcctgagctgggagctcagcctagcgcctctccacatccattgtccccagaccagcctaacggtggcacacttgagaattgtgtggctcaggcctcagatgatggtagttggtgggaccacgactgtcagaggagactgtactacgtttgtgagtttccattttag

SEQ ID NO: 134042 - DNA, 738 bp, Artificial Sequence
  derived and/or modified sequence
atgcaggccgcgtggctattaggagctctagtggtaccacagctcctgggtttcggccacggtgcacgcggagcagagagggagtgggaggggggctggggcggggctcaggaagaagaacgggagcgggaagcactaatgttgaaacatctccaggaggccctcggactgccagccggaaggggcgacgagaaccctgctggcaccgtggaggggaaagaagattgggaaatggaagaggaccagggggaggaggaagaggaagaagcgacacctaccccctcttcagggcctagcccatctcccacccccgaagacatagtgacatacatcttggggcgccttgcaggacttgacgcgggcttgcaccaactgcatgtaaggctgcacgctttagacacccgggtggtcgaacttacacagggtctgcgccagctgcgcaatgcagccggggacacccgggacgcagtgcaggccctacaggaggcgcagggccgagccgaacgcgagcacggaaggctggagggatgtttgaagggtctccggttgggacacaagtgtttcctcctttctcgggattttgaagcgcagccttcagcctctccccaccccttgagcccagatcagcccaacggaggaacgttagagaactgcgtggcacaggcctctgatgacggcagctggtgggaccacgactgccagcgacgcctgtactacgtatgcgaatttccgttctag

SEQ ID NO: 134043 - DNA, 972 bp, Artificial Sequence
  derived and/or modified sequence
atgcaggccgcctggctgctgggcgccctggtggtgccccagctgctgggcttcggccacggggcccggggagctgagcgggagtgggagggcggctggggcggggcccaggaggaggagcgggagcgggaggccctgatgctgaagcacctgcaggaggccctgggcctgcctgctggaagaggagatgagaacccagctggcaccgtggagggcaaggaggactgggagatggaggaggaccagggcgaggaggaggaggaggaggccacccccacccccagcagcggccccagccccagccccaccccagaagatattgtgacctacatcctgggccgcctggccggcctggatgctggcctgcaccagctgcacgtgcggctgcacgccctggacaccagggtggtggagctgacccagggcctgcggcagctgagaaatgctgctggggacaccagagatgctgtgcaggccctgcaggaggcccagggccgggcagagcgggagcacggccgcctggagggctgcctgaagggcctgcggctgggccacaagtgcttcctgctgagccgggactttgaggcccaggccgccgcccaggcccgctgcacagcccggggcggcagcctggcccagcctgctgaccggcagcagatggaggccctgacccgctacctgcgggccgccctggccccctacaactggcctgtgtggctgggcgtgcatgacagaagagctgagggcctgtacctgtttgaaaatggccagagggtgtccttctttgcctggcacaggagccccaggcctgagctgggcgcccagcccagcgccagcccccaccccctgagcccagaccagcccaatggaggcaccctggagaactgtgtggcccaggccagtgatgatggctcctggtgggaccatgactgccagaggcggctgtactacgtgtgtgagttccccttctag

SEQ ID NO: 134044 - DNA, 738 bp, Artificial Sequence
  derived and/or modified sequence
atgcaggccgcctggctgctgggcgccctggtggtgccccagctgctgggcttcggccacggggcccggggagctgagcgggagtgggagggcggctggggcggggcccaggaggaggagcgggagcgggaggccctgatgctgaagcacctgcaggaggccctgggcctgcctgctggaagaggagatgagaacccagctggcaccgtggagggcaaggaggactgggagatggaggaggaccagggcgaggaggaggaggaggaggccacccccacccccagcagcggccccagccccagccccaccccagaagatattgtgacctacatcctgggccgcctggccggcctggatgctggcctgcaccagctgcacgtgcggctgcacgccctggacaccagggtggtggagctgacccagggcctgcggcagctgagaaatgctgctggggacaccagagatgctgtgcaggccctgcaggaggcccagggccgggcagagcgggagcacggccgcctggagggctgcctgaagggcctgcggctgggccacaagtgcttcctgctgagccgggactttgaggcccagcccagcgccagcccccaccccctgagcccagaccagcccaatggaggcaccctggagaactgtgtggcccaggccagtgatgatggctcctggtgggaccatgactgccagaggcggctgtactacgtgtgtgagttccccttctag

SEQ ID NO: 134045 - DNA, 972 bp, Artificial Sequence
  derived and/or modified sequence
atgcaggccgcctggctgctgggcgccctggtggtgccccagctgttgggatttggccatggagctcgtggtgctgaacgtgagtgggaaggagggtgggggggcgcccaggaagaagagagagaaagggaggcgctcatgttgaaacacctccaggaggcgctgggactccccgcgggacggggggacgagaaccctgctggaacagtggaaggaaaggaggattgggagatggaagaggaccagggcgaagaagaggaggaagaagccactcctacccctagctcagggcctagcccaagtccaacccctgaggatatcgttacatacattttggggagactggccgggctggacgcgggattgcatcagttacacgtccggttgcacgctttggatacacgcgtcgtagagttgactcagggactcagacagctgcgcaacgccgctggggatacaagagatgcagtgcaggccttgcaggaagcacagggtagagctgagagagagcacggtcgcctggaagggtgcctgaagggactgcggctggggcataagtgctttttgttgagtagggattttgaggctcaggcagcagcccaagcacggtgcacggcccggggcgggtccctcgcccagccagcagataggcagcagatggaggccctgacgagatatctgcgcgcggctcttgccccatacaattggcccgtctggctgggagtacatgatagacgtgctgagggtctgtacctcttcgagaacggccagcgggtgtcattttttgcctggcaccgaagtcccaggcctgagttgggggcccaaccctccgcaagtccgcatccactcagcccagatcagcctaacggaggtaccctcgagaactgcgtggcccaagcatccgatgatgggtcttggtgggatcacgattgtcagaggcggctgtactatgtatgcgagttccccttctag

SEQ ID NO: 134046 - DNA, 738 bp, Artificial Sequence
  derived and/or modified sequence
atgcaggccgcctggctgctgggcgccctggtggtgccccagctgcttgggtttggtcatggagcaaggggagcagagcgtgagtgggaaggtggttggggtggagctcaggaagaggagcgtgaaagagaggccctgatgttgaaacatctgcaggaagccctgggactgccagcaggccgtggtgacgagaaccctgccgggacggtggaaggaaaagaagattgggagatggaggaagaccagggagaagaggaagaggaggaggctacgcccaccccttcatctggcccaagcccgtcccctacgcctgaggatattgttacctatatcctaggccggctagctggcctcgacgcgggcttgcaccagctgcatgtcagactgcatgctctggacactagagttgtagagctgacacaaggcctccggcagctgcgaaacgcggcaggggacaccagggatgcggtgcaagctctccaagaagcccagggccgagctgagagagaacacgggcgcctagaaggatgtctgaaggggctgagacttggtcataaatgtttcctgctctctagggatttcgaagcccagcccagcgcctcgccacacccgctgagccctgatcagcctaatggggggacgctcgagaactgcgtggctcaagcttccgatgatggatcctggtgggatcatgattgccagcgtcggctgtattacgtgtgtgagttcccgttttag

SEQ ID NO: 134047 - RNA, 972 nt, Artificial Sequence
  derived and/or modified sequence
augcaagcugccuggcuucuaggagcacucgugguaccacaacugcuuggguuuggccacggugcccgaggagcagagcgggaaugggaagguggcuggggaggagcccaggaggaagaaagggaacgggaagcucuuauguugaagcauuuacaagaggccuugggguuaccugccggccguggcgacgagaaucccgcuggcacaguagaaggcaaggaggauugggagauggaagaggaccagggcgaagaagaagaggaggaggccacaccgacuccuagcuccggaccaucacccuccccuacccccgaggauauaguuacauacauacuagggaggcuugcaggacuggacgcgggucugcaccaacugcaugucaggcugcacgcucuugacacaagggugguggagcucacccagggucugaggcaauugcggaacgcagcgggggauacacgcgaugcaguacaggcauuacaagaggcccagggcagagcugaaagggagcacggcaggcuagaggggugccucaaaggcuuaagacuggggcacaaauguuuuuugcuuucuagggacuuugaggcucaggccgccgcucaggcacgcugcaccgcucgaggcgggucauuagcucagccugcagaccgccaacagauggaagccuuaacaagguaccugcgagcagcucuugccccuuacaauuggccagugugguuggggguacaugauagacgcgcugagggacuauaucucuucgagaacggccaacgcguuagcuucuucgccuggcaucgcucuccccggccugagcugggagcgcagccaagugccucuccccacccacucuccccggaucagccuaacggaggaacgcuggaaaauuguguggcucaggcuagugaugacgggaguuggugggaucacgauugucagcgucgccuauacuacgugugugaguuucccuucuag

SEQ ID NO: 134048 - RNA, 738 nt, Artificial Sequence
  derived and/or modified sequence
augcaggcugccuggcuucugggggcucucguagugccucaacuccuggguuuuggccacggcgcacguggggcugagcgagagugggaagggggcuggggaggagcucaggaagaagagcgcgagagagaagcuuugaugcugaaacaucugcaagaagcucugggccuccccgcgggacgcggcgaugagaaccccgcaggcacgguugaaggcaaagaggacugggagauggaagaagaucagggagaagaggaggaggaggaggccaccccaacacccagcucuggccccagcccaagcccaacuccggaggauaucguuacauacauucuuggccgccuugcuggccuugaugcgggguugcaccaguugcacgucagacuucacgcacuggacaccagagucguugaauugacucaggggcuucgucagcugaggaaugcagcaggagacacaagagacgcaguucaagcacuucaggaggcacagggacgggccgaaagggaacacggacgucuugagggcuguuuaaaaggucuccgccugggacauaagugcuuucugcugucucgagauuucgaggcacagcccucugccagcccucacccucuuuccccugaucaaccgaacggggguacccuggaaaauuguguugcucaagcuagcgacgacgggucuuggugggaucaugacugccaaagacgauuguauuaugugugcgaauuucccuuuuag

SEQ ID NO: 134049 - RNA, 972 nt, Artificial Sequence
  derived and/or modified sequence
augcaggcagcuugguuacuaggcgcgcuggugguaccucaacuccugggguucggccacggggcucggggagcugaaagggagugggagggaggaugggggggugcgcaggaggaggaacgggagagggaagcauugauguugaaacaccuccaggaggcccugggauuaccagccggccgcggagacgagaacccggcaggaacggucgagggaaaagaggauugggaaauggaggaagaccagggggaagaggaggaggaggaggcuacaccaacacccagcucaggaccaagucccucccccaccccugaggauauugugaccuacauucugggcagacuggcaggucuggaugccggccuccaucaguuacacguuagauuacacgcauuggauacgcgggugguugagcuaacccaggguuugcgccagcuucggaacgccgcuggggacacucgugaugcaguccaggcucuacaggaggcacagggcagggccgaacgggagcauggcagacuagagggcugucucaaaggacuucggcugggccacaaaugcuuccugcuuaguagagacuucgaagcccaagccgccgcucaggcgcgcuguacagcucgcggugggucacuggcgcagcccgccgaucggcagcagauggaggcuuugacccgcuacuuacgggcugcucucgccccauauaauuggccugucugguuaggcgugcaugauaggcgagccgagggauuguaccuuuuugagaauggacagcgugucucuuuuuuugcauggcauaggucccccaggccugagcucggagcucaaccuagcgcgucuccccauccccucagucccgaucaacccaacggggguacacucgaaaacuguguugcccaagcuagcgacgacgguucguggugggaucaugauugccaacgccgacuuuacuauguaugcgaauuuccauucuag

SEQ ID NO: 134050 - RNA, 738 nt, Artificial Sequence
  derived and/or modified sequence
augcaggccgcaugguugcuuggugcacuggucgugccccagcugcugggauuuggacauggcgcacgcggagcugaaagggagugggaaggaggcuggggaggggcucaagaagaggagagggaaagggaagcacucaugcugaaacaccuccaggaggcacucggccugcccgcuggacggggcgaugaaaaccccgccggaacaguugaggguaaggaggauugggagauggaggaagaucagggggaggaagaagaggaagaggcuacaccaacgccaagcuccggaccuucuccuuccccaacaccagaagacauugugacauauauacuagggagacucgcaggccuggaugcuggucugcaccaauuacacguccgacugcaugcccucgacaccagggugguggaauugacccaaggccuccgacagcuucgaaacgcagccggcgauacaagagacgcugugcaagcucuucaggaggcccagggacgcgccgagagagaacacggaagguuggaaggaugcuugaagggccugcgucugggacacaaaugcuuccugcucagcagagacuucgaagcucagccaagcgcuagcccccauccacuuucaccugaucagccaaacggcggaacucucgaaaauuguguggcacaggccagugaugauggcuccuggugggaucacgacugucagcgcagauuguauuacgugugugaguuuccuuuuuag

SEQ ID NO: 134051 - protein, 1682 aa, Artificial Sequence
  derived and/or modified sequence
MLASPEPKGLVPFTKESFELIKQHIAKTHNEDHEEEDLKPTPDLEVGKKLPFIYGNLSQGMVSEPLEDVDPYYYKKKNTFIVLNKNRTIFRFNAASILCTLSPFNCIRRTTIKVLVHPFFQLFILISVLIDCVFMSLTNLPKWRPVLENTLLGIYTFEILVKLFARGVWAGSFSFLGDPWNWLDFSVTVFEVIIRYSPLDFIPTLQTARTLRILKIIPLNQGLKSLVGVLIHCLKQLIGVIILTLFFLSIFSLIGMGLFMGNLKHKCFRWPQENENETLHNRTGNPYYIRETENFYYLEGERYALLCGNRTDAGQCPEGYVCVKAGINPDQGFTNFDSFGWALFALFRLMAQDYPEVLYHQILYASGKVYMIFFVVVSFLFSFYMASLFLGILAMAYEEEKQRVGEISKKIEPKFQQTGKELQEGNETDEAKTIQIEMKKRSPISTDTSLDVLEDATLRHKEELEKSKKICPLYWYKFAKTFLIWNCSPCWLKLKEFVHRIIMAPFTDLFLIICIILNVCFLTLEHYPMSKQTNTLLNIGNLVFIGIFTAEMIFKIIAMHPYGYFQVGWNIFDSMIVFHGLIELCLANVAGMALLRLFRMLRIFKLGKYWPTFQILMWSLSNSWVALKDLVLLLFTFIFFSAAFGMKLFGKNYEEFVCHIDKDCQLPRWHMHDFFHSFLNVFRILCGEWVETLWDCMEVAGQSWCIPFYLMVILIGNLLVLYLFLALVSSFSSCKDVTAEENNEAKNLQLAVARIKKGINYVLLKILCKTQNVPKDTMDHVNEVYVKEDISDHTLSELSNTQDFLKDKEKSSGTEKNATENESQSLIPSPSVSETVPIASGESDIENLDNKEIQSKSGDGGSKEKIKQSSSSECSTVDIAISEEEEMFYGGERSKHLKNGCRRGSSLGQISGASKKGKIWQNIRKTCCKIVENNWFKCFIGLVTLLSTGTLAFEDIYMDQRKTIKILLEYADMIFTYIFILEMLLKWMAYGFKAYFSNGWYRLDFVVVIVFCLSLIGKTREELKPLISMKFLRPLRVLSQFERMKVVVRALIKTTLPTLNVFLVCLMIWLIFSIMGVDLFAGRFYECIDPTSGERFPSSEVMNKSRCESLLFNESMLWENAKMNFDNVGNGFLSLLQVATFNGWITIMNSAIDSVAVNIQPHFEVNIYMYCYFINFIIFGVFLPLSMLITVIIDNFNKHKIKLGGSNIFITVKQRKQYRRLKKLMYEDSQRPVPRPLNKLQGFIFDVVTSQAFNVIVMVLICFQAIAMMIDTDVQSLQMSIALYWINSIFVMLYTMECILKLIAFRCFYFTIAWNIFDFMVVIFSITGLCLPMTVGSYLVPPSLVQLILLSRIIHMLRLGKGPKVFHNLMLPLMLSLPALLNIILLIFLVMFIYAVFGMYNFAYVKKEAGINDVSNFETFGNSMLCLFQVAIFAGWDGMLDAIFNSKWSDCDPDKINPGTQVRGDCGNPSVGIFYFVSYILISWLIIVNMYIVVVMEFLNIASKKKNKTLSEDDFRKFFQVWKRFDPDRTQYIDSSKLSDFAAALDPPLFMAKPNKGQLIALDLPMAVGDRIHCLDILLAFTKRVMGQDVRMEKVVSEIESGFLLANPFKITCEPITTTLKRKQEAVSATIIQRAYKNYRLRRNDKNTSDIHMIDGDRDVHATKEGAYFDKAKEKSPIQSQI

SEQ ID NO: 134052 - protein, 863 aa, Artificial Sequence
  derived and/or modified sequence
MLASPEPKGLVPFTKESFELIKQHIAKTHNEDHEEEDLKPTPDLEVGKKLPFIYGNLSQGMVSEPLEDVDPYYYKKKNTFIVLNKNRTIFRFNAASILCTLSPFNCIRRTTIKVLVHPFFQLFILISVLIDCVFMSLTNLPKWRPVLENTLLGIYTFEILVKLFARGVWAGSFSFLGDPWNWLDFSVTVFEVIIRYSPLDFIPTLQTARTLRILKIIPLNQGLKSLVGVLIHCLKQLIGVIILTLFFLSIFSLIGMGLFMGNLKHKCFRWPQENENETLHNRTGNPYYIRETENFYYLEGERYALLCGNRTDAGQCPEGYVCVKAGINPDQGFTNFDSFGWALFALFRLMAQDYPEVLYHQILYASGKVYMIFFVVVSFLFSFYMASLFLGILAMAYEEEKQRVGEISKKIEPKFQQTGKELQEGNETDEAKTIQIEMKKRSPISTDTSLDVLEDATLRHKEELEKSKKICPLYWYKFAKTFLIWNCSPCWLKLKEFVHRIIMAPFTDLFLIICIILNVCFLTLEHYPMSKQTNTLLNIGNLVFIGIFTAEMIFKIIAMHPYGYFQVGWNIFDSMIVFHGLIELCLANVAGMALLRLFRMLRIFKLGKYWPTFQILMWSLSNSWVALKDLVLLLFTFIFFSAAFGMKLFGKNYEEFVCHIDKDCQLPRWHMHDFFHSFLNVFRILCGEWVETLWDCMEVAGQSWCIPFYLMVILIGNLLVLYLFLALVSSFSSCKDVTAEENNEAKNLQLAVARIKKGINYVLLKILCKTQNVPKDTMDHVNEVYVKEDISDHTLSELSNTQDFLKDKEKSSGTEKNATENESQSLIPSPSVSETVPIASGESDIENLDNKEIQSKSGDGGSK

SEQ ID NO: 134053 - protein, 402 aa, Artificial Sequence
  derived and/or modified sequence
MLASPEPKGLVPFTKESFELIKQHIAKTHNEDHEEEDLKPTPDLEVGKKLPFIYGNLSQGMVSEPLEDVDPYYYKKKNTFIVLNKNRTIFRFNAASILCTLSPFNCIRRTTIKVLVHPFFQLFILISVLIDCVFMSLTNLPKWRPVLENTLLGIYTFEILVKLFARGVWAGSFSFLGDPWNWLDFSVTVFEVIIRYSPLDFIPTLQTARTLRILKIIPLNQGLKSLVGVLIHCLKQLIGVIILTLFFLSIFSLIGMGLFMGNLKHKCFRWPQENENETLHNRTGNPYYIRETENFYYLEGERYALLCGNRTDAGQCPEGYVCVKAGINPDQGFTNFDSFGWALFALFRLMAQDYPEVLYHQILYASGKVYMIFFVVVSFLFSFYMASLFLGILAMAYEEEKQ

SEQ ID NO: 134054 - DNA, 2136 bp, Artificial Sequence
  derived and/or modified sequence
tttatttatttctttggcttatctataatttcggaatttttcttttacaattaacatgaaccatttctgaaacaagaaaaaaaatataaaagaagaaactaagaaggaaataacctgttttaattgagacacagagggcaaataccacatttaatggtaaaaacagaacggaaaggtatttttcattggtgagagaaatattggtttgtcttcttgtctgtttttttctcatcctctctcacagataggaatgtggaagatgaggagagagggaaggaagaaaacaaggaaaggaaggtaacagcagaattgttacatgatgtggacagccgccaaactcaatagttctgagataaataactgtgcaaggtttagaggcaatacccaatgtttgaacctcagagttacacaatccacccaatacagggataagctatgtggcagagaatctcatctgagaaagataaaggatatgtctcaggaacgcttaatcaacaggtttgtccttcacatttatttatcacctacttggtgccaagcatttacaatatcctagggagacaaacagaaaatgttatctttttttacatggcattggattcacatggcatgtcattttcatattgcgtagagtggtgagtgattaggcctgtcaaagagaatcaggttcaggttctgcctccgatgccaactatgtggaggatgctacaccaagcactgaagctcagaaggagaacagttttggcagggcaagaaataagctatgttctacctgttatgtttgtggtaagtgaggaagattcaaacagagatgtctttttggtagctggatataggcatttggagtttggagagaggatagcaatttggggatcctcaatgcagcatgtagagaggaggagatggcccctggacagcatacagaaaagaatgggccaaagtttcacggggtgggcagaagaagctgccccgggaatgaagacgaagaaggaatatgcagagattggggtaaaaccaagacagaatgcttgtgaaatgtgcccaggaatgatcctctccactacttaaaatttgcttaaaatgagctgtttcagtacatccctgtgcagctgtgagcagctgtcctggttaataacatattcccatgtcccaaaggacacaaaccttggaagatgtgtttcccaataacttttcaaccttttactgagcagaacacatgaattttgcccttcctcatttggaaccatgtggaaaggggaaccacgaatggggatctgcttttggtttggattggggcttgctatggtttggataatgggattttttgtccccatcaaatctcatgttgaaatttgctccccactgtggtggtgtcagaaggtggggcctaggggaaggtgtttgagttataggcgtagaaccctcatgaatgacttcgtgctgggctgctgttctcactctggcgagatgggattaggttggtttattattatgtaaagccaggatgccctttgggtatggtgtctcttcacacgtactcacttctcctttgaccttctctgacatgttgatgccggtgccatgcttcttgtacacctgcagaactgtgagctaaataaccctcttttctttataaatcctcttttctttatacccagtgtctggtactcctttacagcaacacaaaatggactaagacaggactgaaactcaagcaatggatgtggtaataggaaagagaaaggtacagtgcattcagcagagtcacagttgtaaagtaatgccaacaaaaaaaaccatctacaacgtgaaattcgtctctggaggtcagttgatgacctgaggttcactgaggataaactaaaaaccatacggcttagagtctatcacagcctctgctaaggtaagtgtgagtgacgcagctctattcccaaagacctggcccatgggaagtagtgtacaggcaccagaccccaggtcaagaggtctggctctgccactaaaagctggttgagcctagaaaggcctctttacccctgagcttcagtttcctcatttacaaagcagaaatagatatgtctgccttatgtttttcacaggccttttacaaatataacatgcaggatgcagagtgct

SEQ ID NO: 134055 - DNA, 5049 bp, Artificial Sequence
  derived and/or modified sequence
atgttggcttcgcctgagccaaaaggcctcgtgccttttacaaaggaatcctttgagctgataaaacaacacatagctaagacacacaatgaagaccacgaagaggaggatctgaaacctacaccggacctagaggtgggcaaaaaactgccattcatctacggtaacctgtcccaggggatggtcagcgaacccctcgaggacgtcgacccttattattacaagaagaagaatactttcatcgtcctgaataaaaatcgaaccatctttcgctttaatgccgccagcatactatgcacactcagtccgttcaattgcatccggcggaccaccatcaaggtgttagtgcatcctttcttccaattgttcatactgatttctgtcctgatcgactgtgtctttatgtccctgacaaatctccccaagtggcggccggtgttggaaaacactctgttgggcatatataccttcgaaattctggtgaaactgttcgcgcgaggagtgtgggctggatcgtttagcttcttgggcgatccatggaattggctggatttttcggtcaccgtcttcgaggttattatcaggtactcccctctggatttcatcccaacactgcagaccgcaaggacactcaggattttaaaaataatccccctaaatcaaggcctcaagtcactggtgggggtactgattcattgtctgaaacagctgattggagtgattatcctcactctctttttcctgtcgatttttagcctgatcggaatggggctgtttatgggcaatctcaagcataaatgttttcgatggcctcaggagaatgagaacgaaactctgcataatcgaaccggtaacccctactatatacgcgagacggaaaatttctattatctggaaggcgagagatatgcccttctctgtggaaacaggactgacgccggtcaatgtccagaggggtatgtgtgcgtgaaagcgggtataaatccggatcaagggtttacaaacttcgacagtttcggctgggccttatttgcactctttcgcctgatggcgcaggattatccagaagtgctctatcaccagatactgtatgcaagtggaaaggtgtatatgattttcttcgtcgtagtttccttcttgttctctttttatatggctagcttgtttttggggatcctggctatggcttacgaggaagaaaaacagagagtgggcgagatttccaaaaaaattgaaccaaagtttcagcagacaggtaaagaactccaggaggggaacgaaactgacgaagctaagactatccagattgagatgaagaaacgatctcctatctcgaccgacacttccctcgacgtgctggaagatgctacgctgaggcacaaagaggagctcgagaaatcaaaaaaaatatgccccctttactggtacaaattcgccaagaccttcctaatctggaactgtagcccctgttggcttaagctcaaggagtttgtgcaccgtatcataatggcccctttcacggatctgttcctaatcatttgcatcatcctgaacgtctgcttcctcaccctcgaacattaccccatgagcaagcagacaaataccctgctgaacattggcaacctagtgtttatcggtatattcacggcggagatgatttttaaaataatagctatgcatccttatggctactttcaggtgggctggaacattttcgattctatgatcgtgttccacgggcttatcgaactttgtctggctaatgtggcgggcatggctctgctgaggctcttccggatgctgaggatttttaaattgggcaagtactggcccacattccagatcctgatgtggagcttaagtaatagctgggtcgctctgaaggatttggtcctgctgcttttcacctttatctttttcagtgctgcttttggcatgaagctgtttggcaagaattatgaggagttcgtctgccatatcgacaaagattgccagctcccccggtggcacatgcatgatttctttcattccttcctgaacgtgtttagaatactatgcggtgaatgggtcgaaacactctgggattgcatggaagtagcggggcaaagttggtgcatccccttctacttgatggtcatcttaattgggaacctactggtactttaccttttcctggccctggtatctagctttagttcttgcaaggacgtcactgctgaggaaaataacgaggccaagaatctgcagctagcggtggctcggatcaagaagggtatcaactatgtcctgctgaagatcctgtgtaagacacagaacgttccaaaagacactatggaccatgtcaacgaggtgtatgtgaaggaggatatttccgaccacacactgtctgagctttcaaatacacaggacttccttaaagataaggagaagtctagcgggactgagaaaaacgctactgaaaatgagtcacagagcttgatcccatccccctcagtgtccgagactgtccccattgccagcggagagagcgatattgagaacttggacaataaagagattcagtcgaaatcaggagatggcggctctaaggagaaaatcaagcagtcatcctcatcagaatgtagtaccgtagacatcgctattagtgaggaagaggagatgttctatggcggagagcggtctaagcacctaaagaacgggtgccgtagaggcagcagcctgggacagatttcaggagcatccaaaaagggcaaaatctggcagaacattagaaagacctgctgcaagatcgtggaaaacaactggttcaaatgcttcattgggctggtcacactcctgagcaccggaactctggcttttgaagacatctatatggaccaacggaagaccatcaaaatcctcttggagtacgcggacatgatatttacctatattttcatattggaaatgctattgaagtggatggcgtatggcttcaaagcctacttctccaacggatggtatcgactggactttgtggtggttatcgtcttttgccttagcctcatcgggaagaccagagaggaactgaaaccactgatttcgatgaagttcctgcgaccgctccgggtactgagtcagttcgaacggatgaaggtggtggtcagggccctcatcaaaacaactctcccaaccctcaacgtgtttttggtttgtctaatgatttggcttatattctcaataatgggcgtcgatttgttcgccggccggttttacgagtgcatcgatcccactagtggcgaacgcttccctagctcggaggtgatgaataaatcccgctgcgagtccctgctcttcaatgagagtatgctgtgggagaatgctaaaatgaactttgataacgtcggcaacggcttcctctctctactgcaagtggccacattcaatgggtggatcacgatcatgaacagtgcaatagatagcgttgcggtgaatattcagcctcacttcgaagtgaatatttacatgtattgttatttcatcaatttcatcatcttcggcgtctttctccccttatcgatgttgatcaccgttatcattgacaacttcaataaacacaagattaagctgggcgggtcgaatatttttatcacagtcaagcagcgcaaacagtatcgcagactgaagaagctcatgtatgaagattctcaacggccagtgccaagaccacttaacaagcttcagggatttatcttcgacgtagtgacctctcaggcctttaacgtgatcgtgatggtcctaatctgttttcaggccattgcgatgatgatcgataccgacgtgcagagtctgcagatgagcatagcactgtattggattaattccatcttcgtcatgctctataccatggaatgcatattgaagctgatcgccttccgctgcttttattttaccatcgcttggaacatctttgactttatggtggtgatcttttcaatcacaggtctctgcctaccaatgactgttggatcatatctggtgcccccatctctggtgcagctgatcttgctgtctagaattatacacatgctgaggttgggaaaaggcccgaaagtgtttcacaacctcatgcttcccttgatgctttctctgccagctctacttaacatcatcctgctgatattcctcgttatgtttatctacgctgtgtttgggatgtacaatttcgcgtatgtgaagaaagaagcaggaattaatgatgtaagcaattttgagacattcggcaattccatgttgtgtttgtttcaggtcgctatttttgctggatgggatggaatgctggacgcaattttcaactcaaaatggtcagattgcgaccctgacaaaattaacccgggtacacaggtccggggagactgcggcaatccttcggtgggaatattctatttcgtctcatacatactcatttcttggcttatcatcgtaaacatgtatattgtcgtggtgatggagttcctgaacatcgcctccaaaaagaaaaataagaccctttctgaagatgacttcagaaagtttttccaagtgtggaagcggttcgacccggacaggacccagtacatagacagctctaagctctccgactttgcagccgcactcgacccacctctgttcatggccaaaccgaataaaggccagcttatcgccctggacctgccaatggcagtgggggaccgcattcattgcctggatattctcttagctttcaccaagcgcgtgatgggccaggatgtcaggatggaaaaggtggtctccgagatcgaatcgggcttcctgctagcaaacccattcaaaatcacctgcgagccgattactaccactctcaaacggaagcaggaggccgtctcggccactataatacaaagagcctataagaactacaggctgagacgcaatgacaaaaacacttctgatatacatatgatcgatggggaccgggatgtgcacgctacaaaggagggagcctactttgacaaggctaaggaaaaatcccctatacaatctcagatctag

SEQ ID NO: 134056 - DNA, 5049 bp, Artificial Sequence
  derived and/or modified sequence
atgctggccagccctgaaccaaaaggactagttccttttaccaaggaaagcttcgaattgatcaagcagcacattgccaaaactcataatgaagaccacgaagaggaggatctgaagcctaccccagatctcgaggtcgggaagaaactgcctttcatctatggaaacctgtcccaggggatggtaagtgagccgttagaagatgtagacccatattactacaaaaagaagaacacgttcatagtgctgaataagaatcgaacaatttttagatttaatgctgctagtatcctgtgcacattgtccccatttaactgtattagacggacaactatcaaagtcctcgtccaccctttctttcaactgttcattctcatctccgttctaattgactgtgtattcatgagtttaacaaatctccctaagtggaggccagtccttgagaacaccctcctcggtatctatacctttgaaatcctcgttaaactgttcgctcgaggtgtttgggcagggagctttagtttcctcggcgatccctggaactggctcgatttctcagtgactgtgtttgaggtgataattcgctactctcctctagattttatacccaccctgcagacagcgcgtacactgcgcatcctcaagatcattccattgaatcaggggctgaaaagtctggtgggggtgctaatacattgtttgaagcagcttattggggtgataatactaacactgtttttcctttctatttttagcctcattggcatggggttatttatgggaaatctcaaacacaaatgctttagatggccccaggaaaacgagaacgaaactctgcacaatcggactggcaatccttactatatacgcgagacagaaaatttttactacctggaaggagagcggtacgcactgctgtgcggaaatagaaccgacgcaggacagtgtcctgagggttacgtctgtgtgaaagccggaattaaccccgatcaggggtttactaattttgactcatttggttgggccctctttgccctgttccggctgatggcccaggactaccccgaagttctgtatcaccagatactatacgcgtcaggcaaagtgtatatgattttctttgtggtcgtgtccttcctcttctccttctatatggcttccctgtttctcggcatcctggccatggcctacgaggaggagaagcagcgagttggagaaatcagcaagaaaattgaacccaagttccagcagaccggcaaagaactgcaggaggggaatgagaccgatgaagccaaaactatccaaattgagatgaaaaagcggtccccaatttcaacagacacctcactcgacgttctggaagatgccaccttgcggcacaaggaggaacttgaaaaatctaaaaagatctgtcccctttattggtacaagtttgctaagacatttttgatctggaactgtagcccgtgttggttgaaactgaaggaatttgtccaccgtattataatggctcccttcactgacctgtttcttattatctgcataatccttaatgtttgcttcctcaccttagaacattatccaatgagtaaacagactaataccctgctgaatataggaaatctcgtgttcataggaatattcaccgctgaaatgatctttaagatcatcgcaatgcacccctacggttatttccaggtcgggtggaacattttcgatagtatgattgtgtttcacggcctgatcgagctgtgccttgccaacgtagctgggatggcactgctgcggctgttccgtatgcttagaattttcaagcttggcaaatactggccaacattccagattcttatgtggagcctctctaacagctgggtggcattgaaagatttggtcttgcttctgtttacgttcatatttttcagcgctgcgtttggcatgaagctcttcggcaaaaactacgaggagtttgtgtgtcatattgacaaggactgtcagttaccacgctggcacatgcacgatttttttcattctttcttaaacgtatttcgtatcctgtgtggcgaatgggtggagaccctttgggattgtatggaagttgccggacaatcgtggtgcattcccttttatcttatggtcatcctcattggcaacttgctcgtcctgtacctcttcctggctctcgtatcgtcattttcatcatgcaaggatgtaacagctgaagagaacaacgaagctaaaaacctgcagttggccgtggcacgtataaagaagggcatcaattatgtcttactgaagatcctctgcaagacccaaaacgtgcccaaggataccatggatcacgtcaatgaggtttacgtgaaggaggatattagcgaccacactctctccgagctgtccaacacccaagatttcttgaaggataaggagaagtcctcaggcaccgaaaagaacgcaaccgaaaacgagtcgcagagcctcatcccatcgccctctgtatccgagacggtccctattgcctctggcgaatctgatatagaaaacctcgacaacaaggagatacagagcaaaagcggtgacgggggttccaaagagaaaattaaacagtcgagttcctctgaatgtagtacggtcgacatagccattagcgaggaagaggagatgttctatggtggagagcgctcaaagcatttaaaaaatggctgtagaagaggatcaagcctgggacagatctccggcgcctccaaaaagggtaaaatctggcaaaatatcaggaaaacctgctgcaaaatagtcgagaataattggtttaaatgctttatagggttggtgaccctgctgtctaccggcacactggcattcgaggatatctacatggaccagaggaaaactatcaaaatcctcctggagtatgccgacatgattttcacttacatcttcattctggagatgctgttgaagtggatggcttacggttttaaggcatatttctccaacggttggtataggctcgacttcgttgttgtgatcgtcttttgcctcagcctcatcgggaagaccagggaggaattgaaaccccttatatctatgaaatttctgcggccactgagagtcctgagccagttcgagcggatgaaggtagtggtgcgcgctcttataaagacgacgctccctaccctgaacgttttcctcgtgtgcttgatgatttggctgatctttagcataatgggcgtcgatctgtttgctggtcgattctatgagtgcatagacccaacgtctggtgagcggttccccagcagcgaggtaatgaacaaatcacgctgtgaatcactcctttttaatgaatccatgctgtgggagaatgccaaaatgaattttgataacgtcggtaacggcttcctaagccttctgcaggtggccactttcaatggatggatcaccattatgaattcagcgattgactcagtcgctgtgaacattcagcctcattttgaagtgaacatctacatgtactgttattttattaactttatcatattcggcgtgtttttaccattgagcatgttgatcaccgtcattatcgataacttcaacaagcacaagatcaagctgggcgggagcaacatctttataaccgtaaaacaacgaaagcagtacaggaggttaaaaaaactcatgtatgaggatagccagcggcctgtgcctcgtccactcaataagttgcaggggttcatttttgatgtggtgacaagtcaagcttttaacgttatagttatggttttaatttgttttcaggccatagccatgatgatcgatacagatgtgcaatctttacagatgtccattgccttgtattggataaactctatctttgtcatgctgtataccatggagtgtatccttaaactaatcgcttttcgctgcttttatttcacaattgcctggaatatttttgattttatggttgtgatatttagtatcaccggactgtgcctgcctatgactgtgggttcatatcttgtgcctccatccctggtccaactcatccttctatcgcgcatcatccatatgttgcgacttggtaaagggcccaaggttttccataacctgatgctgcccctcatgctctctctccccgccttactaaatatcatcttgttaatcttcttggtgatgttcatttatgctgtgtttggcatgtacaactttgcttatgtgaaaaaggaagccgggattaacgatgtaagtaattttgaaacctttggcaactcaatgctgtgcctgtttcaggtggccatctttgccggatgggatggtatgctcgacgctatcttcaactccaaatggagcgactgcgatcccgacaagatcaatcctggcacacaggtcagaggcgactgtggtaatccctccgtggggatcttctattttgtgagttacattctgatttcatggcttataattgtgaatatgtacattgtggtcgtgatggagttcttgaacatcgcttccaaaaaaaagaacaagacacttagtgaagatgatttccgaaaatttttccaggtgtggaagcgcttcgatcctgataggacacagtatattgattccagcaagctgtccgattttgctgccgcgctcgatccccctttgttcatggcgaaaccaaataaggggcagctgattgccctcgacttacccatggcggtgggcgaccggatccactgccttgatatcctgctggcatttaccaagcgagttatgggccaagatgttcggatggaaaaagtggtgtcagaaatcgaatccggattcctcctcgctaacccatttaagatcacttgtgaacccataaccacaaccttaaaaagaaagcaggaggccgtgagcgctacaatcatccagcgtgcgtacaagaactataggcttcgcagaaacgataagaatacctcagatatacacatgatcgatggggatagagatgttcacgccactaaggagggggcctatttcgataaagcaaaagaaaaatctcctattcaatcacagatctag

SEQ ID NO: 134057 - DNA, 2592 bp, Artificial Sequence
  derived and/or modified sequence
atgttagccagcccggagccgaaaggcctggtcccctttaccaaggagtcgtttgaactaatcaaacaacatatcgccaagacacacaatgaagaccatgaggaagaggacctcaagccgaccccagaccttgaggtggggaaaaaattaccctttatttatgggaacctctcacagggcatggtgagtgagcctttagaggatgttgacccctattattataaaaagaaaaacactttcattgtgttaaacaagaacaggactatatttcggttcaatgccgcgtctatcctatgtaccctctcgccattcaattgcattcgccgcaccacaatcaaagtgcttgtgcatcccttttttcagcttttcatcctgattagcgttctgatcgattgtgtttttatgtccctgactaacctgccaaagtggcggcctgtgttagagaataccctgctcgggatctacaccttcgagatcctggtcaagttgtttgcgaggggggtatgggccggctcctttagttttctgggcgatccttggaactggctcgactttagcgtgaccgtgtttgaggtgataataagatattccccccttgatttcattcctactctgcagacggctcgcacactaagaatcttgaaaatcattcctttgaaccaggggctcaagagtctagtaggcgtgctgatccattgcctcaagcagttgatcggcgtgatcatcctcacgttgttcttcctgagtattttttcccttataggcatgggtctctttatggggaacctgaaacataagtgtttcagatggcctcaggagaatgaaaatgaaactctgcataacagaactggcaacccctactatattagagaaaccgagaacttctattacctggagggagaaagatacgccctgctctgcggcaacaggactgatgccggccagtgccccgagggctacgtctgcgtgaaggcggggataaacccagatcagggatttaccaattttgacagtttcggttgggcactatttgctctgtttcgccttatggctcaggattatcctgaggtactgtatcaccaaatcctttatgccagcggcaaggtctatatgattttctttgtggtcgtatcgttcctcttctctttttacatggcttctctgttcctggggattctcgcaatggcctatgaggaagaaaaacagcgcgtcggcgagattagcaaaaaaatagagcctaaattccaacagaccggtaaagagctccaagaaggtaatgagactgatgaggccaagactatccagattgaaatgaaaaagcgttcacctatatccacagacacttctcttgacgtgttggaggacgctaccctcagacacaaggaggagttggaaaagagcaagaagatttgtcccctgtattggtataagtttgctaaaacttttttgatctggaattgctctccgtgttggctgaagttgaaagaatttgttcaccgcataatcatggcaccgtttacagatctctttctgattatctgtattattctgaacgtgtgcttcttgaccttagaacactaccctatgtcaaagcagaccaacaccttgctgaacattggcaatttggtttttatcggcatctttactgctgagatgatatttaagataatcgctatgcatccctatggatatttccaggtggggtggaacatattcgattcgatgatcgtgttccacggcctgatcgaactctgtctagccaacgtggccggcatggctctgctcaggttatttcgcatgctccggatttttaaactgggcaagtactggcccacatttcagattttgatgtggtctctatccaactcatgggtagctctgaaagatctcgtgctgctgctgtttacgttcatatttttcagcgctgcctttggaatgaagttattcgggaaaaattacgaggagttcgtttgtcacatagacaaagattgtcaactccctcgatggcatatgcatgacttctttcatagtttcctcaacgtatttaggattctttgtggggagtgggttgaaaccctttgggattgtatggaggtagcaggtcagtcctggtgtatccctttttacctgatggttatcctgatcggcaacctactggtattgtacctcttcctcgcacttgtttcctccttctcctcctgtaaagacgtgactgccgaggagaacaatgaggccaaaaatctccaattggcagtggccagaatcaagaagggcatcaattatgtgctcctgaaaatcttgtgcaaaacacaaaacgtcccaaaagatacgatggaccacgtcaatgaagtgtacgtgaaggaagacatctctgaccacacacttagtgaactgtctaacacccaggactttctgaaagacaaagaaaaatcatcaggaactgaaaaaaacgcgactgagaacgagtcacagtccttaataccgagcccgagtgttagtgaaacagtgcctattgccagcggagaaagtgacattgaaaatttggacaacaaggaaattcagtcaaagtcgggcgacggcggttccaagtag

SEQ ID NO: 134058 - DNA, 1209 bp, Artificial Sequence
  derived and/or modified sequence
atgctagcctcaccggaacccaaaggactggtgccttttaccaaagagtcttttgagttgatcaaacagcatattgccaaaactcacaatgaggaccacgaagaggaggacctgaagcccacgcccgacttggaggtgggaaaaaaactgccctttatttacggcaacttatcccaaggaatggtaagcgaacccctggaggatgtggatccatattactataaaaagaaaaataccttcattgtactcaataaaaacaggaccatcttccggtttaacgccgcctcgattctgtgtacactttctccatttaactgtatcaggagaacgacgattaaggtcctggtgcatccattcttccagctctttatccttatcagtgtgcttattgactgcgtgtttatgagcctcaccaacctccccaagtggagacctgttctggaaaatactctgctgggcatctacacctttgagatactggtgaagctgttcgctagaggcgtgtgggccgggagcttctcctttctgggcgatccatggaactggctcgattttagtgttacagtgtttgaagtgatcatacggtatagccctctggactttatccctacactgcaaacagcgcgcactctcagaatcctgaagatcattcctcttaatcaaggcctcaagagcctcgtcggtgtgctcattcactgtctaaaacagctgattggagtaatcattcttactttgttcttcctgtctatctttagcctgattgggatgggtctcttcatgggcaatctgaaacacaaatgctttagatggcctcaggagaacgaaaacgagacactccacaacaggactgggaacccgtattacatcagggagaccgaaaacttctactatctggaaggggagcgatatgctctcctgtgcggtaacaggacagatgcgggacagtgccctgaaggttacgtgtgtgtgaaagccggtattaaccctgatcaggggttcacaaatttcgactcgttcgggtgggcgttgttcgccttgtttagacttatggcccaggattacccagaggttctgtatcaccagattctctatgcaagcggtaaggtttacatgatttttttcgtggtggtgtcctttctgttttcattctatatggccagtctttttttgggcattttggccatggcatacgaggaggagaagcaatag

SEQ ID NO: 134059 - DNA, 5049 bp, Artificial Sequence
  derived and/or modified sequence
atgctggccagccctgagcccaagggcctggtgcccttcaccaaggagagctttgagctgatcaagcagcacatcgccaagacccacaatgaagatcatgaggaggaggacctgaagcccaccccagacctggaggtgggcaagaagctgcccttcatctacggcaacctgagccagggcatggtgtctgagcccctggaggatgtggacccctactactacaagaagaagaacaccttcatcgtgctgaacaagaacagaaccatcttccgcttcaatgctgccagcatcctgtgcaccctgagccccttcaactgcatccggaggaccaccatcaaggtgctggtgcaccccttcttccagctgttcatcctgatctctgtgctgattgactgtgtgttcatgagcctgaccaacctgcccaagtggaggcctgtgctggagaacaccctgctgggcatctacacctttgagatcctggtgaagctgtttgcccggggcgtgtgggccggcagcttctccttcctgggggacccctggaactggctggacttctctgtgacagtgtttgaggtgatcatccgctacagccccctggacttcatccccaccctgcagacagcccggaccctgcgcatcctgaagatcatccccctgaaccagggcctgaagagcctggtgggcgtgctgatccactgcctgaagcagctgattggagtcatcatcctgaccctcttcttcctgagcatcttcagcctcatcggcatgggcctcttcatgggcaacctgaagcacaagtgcttccgctggccccaggagaatgaaaatgagaccctgcacaacagaactggaaacccctactacatccgggagacagagaacttctactacctggagggggagagatatgccctgctgtgtggcaacagaacagatgctggccagtgcccagagggctacgtgtgtgtgaaggccggcatcaacccagaccagggcttcaccaactttgacagctttggctgggccctgtttgccctcttccggctgatggcccaggactacccagaggtgctgtaccaccagatcctgtatgccagcggcaaggtgtacatgatcttctttgtggtggtgtccttcctgttctccttctacatggccagcctcttcctgggcatcctggccatggcctatgaggaggagaagcagagggtgggggagatcagcaagaagattgagcccaagttccagcagacaggcaaggagctgcaggagggcaatgaaacagatgaggccaagaccatccagatcgagatgaagaagaggagccccatcagcacagacaccagcctggatgtgctggaggatgccaccctgcggcacaaggaggagctggagaagagcaagaagatctgccccctgtactggtacaagtttgccaagaccttcctgatctggaactgcagcccctgctggctgaagctgaaggagtttgtgcaccgcatcatcatggcccccttcacagacctcttcctgatcatctgcatcatcctgaatgtgtgcttcctgaccctggagcactaccccatgagcaagcagaccaacaccctgctgaacatcggcaacctggtgttcatcggcatcttcaccgctgagatgatcttcaagatcatcgccatgcacccctacggctacttccaggtgggctggaacatctttgacagcatgattgtgttccacggcctcatcgagctgtgcctggccaacgtggccggcatggccctgctgcggctcttcaggatgctgcgcatcttcaagctgggcaagtactggcccaccttccagatcctgatgtggagcctgagcaacagctgggtggccctgaaggacctggtgctgctgctcttcaccttcatcttcttctctgctgccttcggcatgaagctgtttgggaagaactatgaggagtttgtgtgccacatcgacaaggactgccagctgccccgctggcacatgcatgacttcttccacagcttcctgaatgtgttccgcatcctgtgtggggagtgggtggagaccctgtgggactgcatggaggtggccggccagagctggtgcatccccttctacctgatggtgatcctgattggcaacctgctggtgctgtacctgttcctggccctggtgagcagcttcagcagctgcaaggatgtgacagcagaagaaaataatgaggccaagaacctgcagctggccgtggcccgcatcaagaagggcatcaactacgtgctgctgaagatcctgtgcaagacccagaatgtgcccaaggacaccatggaccacgtgaatgaggtgtatgtgaaggaggacatcagtgaccacaccctgtctgagctgagcaacacccaggacttcctgaaggacaaggagaagagcagcggcacagagaagaatgccacagaaaatgaaagccagagcctcatccccagccccagcgtgtctgaaacagtgcccatcgccagcggggagagtgacatcgagaacctggacaacaaggagatccagagcaagtctggagatggcggcagcaaggagaagatcaagcagagcagcagcagtgaatgttccacagtggacatcgccatcagcgaggaggaggagatgttttatggaggagagaggagcaagcacctgaagaatggctgccggcggggcagcagcctgggccagatcagcggggccagcaagaagggcaagatctggcagaacatcaggaagacctgctgcaagatcgtggagaacaactggttcaagtgcttcatcggcctggtgaccctgctgagcacaggcaccctggcctttgaggacatctacatggaccagaggaagaccatcaagatcctgctggagtatgctgacatgatcttcacctacatcttcatcctggagatgctgctgaagtggatggcctacggcttcaaggcctacttcagcaatggctggtaccgcctggactttgtggtggtgattgtgttctgcctgagcctcatcggcaagacccgggaggagctgaagcccctcatctccatgaagttcctgcggcccctgcgggtgctgagccagtttgagaggatgaaggtggtggtgcgggccctgatcaagaccaccctgcccaccctgaatgtgttcctggtgtgcctgatgatctggctgatcttcagcatcatgggcgtggacctgtttgctggccgcttctatgagtgcatcgaccccaccagcggggagcgcttccccagcagcgaggtgatgaacaagagccgctgtgagagcctgctcttcaatgaatccatgctgtgggagaatgccaagatgaactttgacaacgtgggcaatggcttcctgagcctgctgcaggtggccaccttcaacggctggatcaccatcatgaacagcgccatcgacagcgtggccgtgaacatccagccccactttgaggtgaacatctacatgtactgctacttcatcaacttcatcatctttggagtcttcctgcccctgtccatgctgatcaccgtcatcatcgacaacttcaacaagcacaagatcaagctgggcggcagcaacatcttcatcaccgtgaagcagaggaagcagtacagaaggctgaagaagctgatgtatgaggacagccagaggcctgtgccccggcccctgaacaagctgcagggcttcatctttgatgtggtgaccagccaggccttcaacgtcatcgtgatggtgctgatctgcttccaggccatcgccatgatgattgacacagatgtgcagagcctgcagatgagcatcgccctgtactggatcaacagcatctttgtgatgctgtacaccatggagtgcatcctgaagctgattgccttccgctgcttctacttcaccatcgcctggaacatctttgacttcatggtggtgatcttcagcatcaccggcctgtgcctgcccatgacagtgggcagctacctggtgccccccagcctggtgcagctgatcctgctgagccgcatcatccacatgctgcggctgggcaagggccccaaggtgttccacaacctgatgctgcccctgatgctgagcctgcctgccctgctgaacatcatcctgctgatcttcctggtgatgttcatctatgctgtgtttggcatgtacaactttgcctacgtgaagaaggaggccggcatcaatgatgtgagcaactttgagaccttcggcaacagcatgctgtgcctcttccaggtggccatctttgctggctgggatggcatgctggatgccatcttcaacagcaagtggagcgactgtgaccctgacaagatcaaccctggcacccaggtgcggggggactgtggcaaccccagcgtgggcatcttctactttgtgtcctacatcctgatctcctggctgatcatcgtgaacatgtacatcgtggtggtgatggagttcctgaacatcgccagcaagaagaagaacaagaccctgtctgaagatgacttcaggaagttcttccaggtgtggaagagatttgatcctgacaggacccagtacatcgacagcagcaagctgagtgactttgctgctgccctggaccccccactcttcatggccaagcccaacaagggccagctgattgccctggacctgcccatggctgtgggggaccgcatccactgcctggacatcctgctggccttcaccaagagggtgatgggccaggatgtgaggatggagaaggtggtgtctgaaattgaaagtggcttcctgctggccaaccccttcaagatcacctgtgagcccatcaccaccaccctgaagaggaagcaggaggccgtgtctgccaccatcatccagagggcctacaagaactaccgcctgcggagaaatgacaagaacaccagtgacatccacatgattgatggagacagagatgtgcacgccaccaaggagggcgcctactttgacaaggccaaggagaagagccccatccagagccagatctag

SEQ ID NO: 134060 - DNA, 2592 bp, Artificial Sequence
  derived and/or modified sequence
atgctggccagccctgagcccaagggcctggtgcccttcaccaaggagagctttgagctgatcaagcagcacatcgccaagacccacaatgaagatcatgaggaggaggacctgaagcccaccccagacctggaggtgggcaagaagctgcccttcatctacggcaacctgagccagggcatggtgtctgagcccctggaggatgtggacccctactactacaagaagaagaacaccttcatcgtgctgaacaagaacagaaccatcttccgcttcaatgctgccagcatcctgtgcaccctgagccccttcaactgcatccggaggaccaccatcaaggtgctggtgcaccccttcttccagctgttcatcctgatctctgtgctgattgactgtgtgttcatgagcctgaccaacctgcccaagtggaggcctgtgctggagaacaccctgctgggcatctacacctttgagatcctggtgaagctgtttgcccggggcgtgtgggccggcagcttctccttcctgggggacccctggaactggctggacttctctgtgacagtgtttgaggtgatcatccgctacagccccctggacttcatccccaccctgcagacagcccggaccctgcgcatcctgaagatcatccccctgaaccagggcctgaagagcctggtgggcgtgctgatccactgcctgaagcagctgattggagtcatcatcctgaccctcttcttcctgagcatcttcagcctcatcggcatgggcctcttcatgggcaacctgaagcacaagtgcttccgctggccccaggagaatgaaaatgagaccctgcacaacagaactggaaacccctactacatccgggagacagagaacttctactacctggagggggagagatatgccctgctgtgtggcaacagaacagatgctggccagtgcccagagggctacgtgtgtgtgaaggccggcatcaacccagaccagggcttcaccaactttgacagctttggctgggccctgtttgccctcttccggctgatggcccaggactacccagaggtgctgtaccaccagatcctgtatgccagcggcaaggtgtacatgatcttctttgtggtggtgtccttcctgttctccttctacatggccagcctcttcctgggcatcctggccatggcctatgaggaggagaagcagagggtgggggagatcagcaagaagattgagcccaagttccagcagacaggcaaggagctgcaggagggcaatgaaacagatgaggccaagaccatccagatcgagatgaagaagaggagccccatcagcacagacaccagcctggatgtgctggaggatgccaccctgcggcacaaggaggagctggagaagagcaagaagatctgccccctgtactggtacaagtttgccaagaccttcctgatctggaactgcagcccctgctggctgaagctgaaggagtttgtgcaccgcatcatcatggcccccttcacagacctcttcctgatcatctgcatcatcctgaatgtgtgcttcctgaccctggagcactaccccatgagcaagcagaccaacaccctgctgaacatcggcaacctggtgttcatcggcatcttcaccgctgagatgatcttcaagatcatcgccatgcacccctacggctacttccaggtgggctggaacatctttgacagcatgattgtgttccacggcctcatcgagctgtgcctggccaacgtggccggcatggccctgctgcggctcttcaggatgctgcgcatcttcaagctgggcaagtactggcccaccttccagatcctgatgtggagcctgagcaacagctgggtggccctgaaggacctggtgctgctgctcttcaccttcatcttcttctctgctgccttcggcatgaagctgtttgggaagaactatgaggagtttgtgtgccacatcgacaaggactgccagctgccccgctggcacatgcatgacttcttccacagcttcctgaatgtgttccgcatcctgtgtggggagtgggtggagaccctgtgggactgcatggaggtggccggccagagctggtgcatccccttctacctgatggtgatcctgattggcaacctgctggtgctgtacctgttcctggccctggtgagcagcttcagcagctgcaaggatgtgacagcagaagaaaataatgaggccaagaacctgcagctggccgtggcccgcatcaagaagggcatcaactacgtgctgctgaagatcctgtgcaagacccagaatgtgcccaaggacaccatggaccacgtgaatgaggtgtatgtgaaggaggacatcagtgaccacaccctgtctgagctgagcaacacccaggacttcctgaaggacaaggagaagagcagcggcacagagaagaatgccacagaaaatgaaagccagagcctcatccccagccccagcgtgtctgaaacagtgcccatcgccagcggggagagtgacatcgagaacctggacaacaaggagatccagagcaagtctggagatggcggcagcaagtag

SEQ ID NO: 134061 - DNA, 1209 bp, Artificial Sequence
  derived and/or modified sequence
atgctggccagccctgagcccaagggcctggtgcccttcaccaaggagagctttgagctgatcaagcagcacatcgccaagacccacaatgaagatcatgaggaggaggacctgaagcccaccccagacctggaggtgggcaagaagctgcccttcatctacggcaacctgagccagggcatggtgtctgagcccctggaggatgtggacccctactactacaagaagaagaacaccttcatcgtgctgaacaagaacagaaccatcttccgcttcaatgctgccagcatcctgtgcaccctgagccccttcaactgcatccggaggaccaccatcaaggtgctggtgcaccccttcttccagctgttcatcctgatctctgtgctgattgactgtgtgttcatgagcctgaccaacctgcccaagtggaggcctgtgctggagaacaccctgctgggcatctacacctttgagatcctggtgaagctgtttgcccggggcgtgtgggccggcagcttctccttcctgggggacccctggaactggctggacttctctgtgacagtgtttgaggtgatcatccgctacagccccctggacttcatccccaccctgcagacagcccggaccctgcgcatcctgaagatcatccccctgaaccagggcctgaagagcctggtgggcgtgctgatccactgcctgaagcagctgattggagtcatcatcctgaccctcttcttcctgagcatcttcagcctcatcggcatgggcctcttcatgggcaacctgaagcacaagtgcttccgctggccccaggagaatgaaaatgagaccctgcacaacagaactggaaacccctactacatccgggagacagagaacttctactacctggagggggagagatatgccctgctgtgtggcaacagaacagatgctggccagtgcccagagggctacgtgtgtgtgaaggccggcatcaacccagaccagggcttcaccaactttgacagctttggctgggccctgtttgccctcttccggctgatggcccaggactacccagaggtgctgtaccaccagatcctgtatgccagcggcaaggtgtacatgatcttctttgtggtggtgtccttcctgttctccttctacatggccagcctcttcctgggcatcctggccatggcctatgaggaggagaagcagtag

SEQ ID NO: 134062 - DNA, 5049 bp, Artificial Sequence
  derived and/or modified sequence
atgctggccagccccgagcccaagggcctggtgcccttcaccaaggaatcctttgaactgattaaacagcatatcgccaagacccacaatgaggatcatgaggaggaggatctgaaaccaacccctgatttagaagtgggcaaaaaactaccgttcatctacggtaatctgtcccagggcatggtgagcgagcccctggaagacgtcgatccctactactataaaaaaaagaacactttcatcgttctaaacaagaatcgcactatcttcaggttcaatgccgcctctatcttgtgcactttgtctccctttaattgcatccggcgcactactattaaggtcctggtgcaccctttcttccagcttttcatcctcattagcgtgttgatagattgcgtgtttatgtccctcaccaatttgccaaaatggcgacctgtactcgaaaatacattactcggtatctatacttttgaaatcctggtgaaattgttcgctaggggagtgtgggctggatcattttcttttctgggagacccctggaattggctagacttttctgtgaccgtgttcgaggtgatcatccgctacagccctctggattttattcctactttacaaaccgcaagaacgctcaggatcctgaaaataatacctctgaaccagggcctgaaaagcctggttggagtactgatacattgtttaaagcagttgatcggagttataatcttgaccctcttctttctcagtatattctccctcattggaatggggctgttcatggggaatctgaaacacaaatgttttagatggccacaggagaatgagaatgagaccctgcacaatcggacaggtaatccttactatatccgggaaaccgagaacttttactatctagaaggggagcgttacgcattgctctgcggcaatcgcaccgatgccggtcaatgcccggaaggatatgtgtgcgtcaaagcagggatcaaccccgaccaaggattcactaattttgacagctttggctgggcactcttcgctctcttcaggcttatggcccaggactatcccgaagtcctttatcaccaaattctgtacgcttcaggcaaagtctatatgatcttcttcgtcgtggtgtccttccttttctctttttatatggcatcactctttctgggaattttggccatggcctatgaggaggaaaagcagagggtgggagaaatatccaagaaaattgaaccaaaatttcaacagaccgggaaggaactccaggaggggaacgagactgacgaggctaagaccattcagattgagatgaaaaagcggtcacctatttccaccgacacttcgcttgatgtcctggaagacgcaaccctgaggcacaaagaggaactcgagaagtccaaaaagatttgccctctgtattggtacaaatttgcaaagacatttctaatttggaactgttctccatgttggctaaagctgaaggagtttgtgcacagaatcatcatggccccgtttaccgatcttttcctgattatatgtataattttaaatgtctgtttcctgactctggagcattaccccatgagcaagcagaccaacacgttgcttaacatcggcaatctggtgttcatcggaatctttacagccgaaatgattttcaaaattatcgctatgcacccatacggctattttcaggtcgggtggaacatttttgacagtatgatcgtgttccatggtctgattgaactgtgccttgcaaacgtggccgggatggctcttctgcgcctgttcagaatgttgcgtattttcaaactggggaagtactggccaacctttcagatcctcatgtggagcctgagcaactcatgggtggctctcaaggacctcgtccttctgctgtttacattcatttttttctcagccgcctttggcatgaagctatttggtaagaactatgaagagttcgtgtgtcacattgacaaagactgtcagctgccacgttggcacatgcacgacttctttcactccttccttaatgtgttcagaatcctgtgcggcgagtgggtagagacactgtgggactgtatggaagtggctggacagtcgtggtgcatccccttctacctgatggtaatcttgatcggaaatctcctggttctgtacctttttttagcccttgtgtcatcattctctagctgtaaggatgtgacggccgaggaaaataatgaagcgaagaacttgcagctggcagttgccaggataaagaaggggatcaactatgtactgctgaagattttatgcaagacacaaaacgtgccaaaggacaccatggatcacgtgaacgaggtgtacgtcaaggaggatatctcagatcatacactaagcgaattatccaatactcaggattttctgaaagacaaagagaagagcagcggcacggagaaaaacgccacagaaaatgaaagccagagtctcataccttctccttcagtgagcgaaacagttcccattgcaagcggcgagtctgacatcgaaaatttagataacaaagagatccagtctaaatccggagatggtggctccaaagagaaaataaagcagagctcttcgagtgagtgcagtactgtggacatcgcaatatctgaggaagaagagatgttttacggaggggaaaggtcaaagcacctcaagaatggatgtcgccgaggctcctctctcggacagatttccggagccagtaaaaagggcaagatctggcagaatatacgaaagacctgctgcaagatcgtcgagaacaattggtttaaatgctttatcggcctcgttacgctactgagcactggcaccctggcctttgaagacatatacatggaccagcgtaagaccattaagatcctgctggaatacgcagatatgatatttacgtacattttcattcttgagatgttacttaaatggatggcctacggtttcaaggcgtatttctccaacggatggtatcgcctggattttgttgtggtcatagttttctgcctgagcctgataggcaagactcgcgaggagctgaagcctctaatctcgatgaagttcctccggcccttacgggttctttcgcaattcgagcgcatgaaagttgtggtgagggccctcattaaaacgacactccctacacttaacgtcttcctcgtgtgccttatgatatggctgattttctccatcatgggcgtcgacttgtttgccggtcgcttctatgagtgcatagacccaacctccggggaacggtttccaagttctgaggtcatgaataaatctcgttgcgagtctctcttatttaacgagagtatgttgtgggagaacgctaaaatgaattttgacaacgtggggaatggattcctttcgctactgcaggtcgctacattcaatggatggatcaccatcatgaattccgcaatcgacagtgtggccgtgaatatccagcctcatttcgaagtgaacatatatatgtactgctactttatcaatttcataatcttcggcgtcttcctccccctgtctatgctcattaccgtgataatcgacaacttcaacaagcacaagatcaaactgggaggaagcaatatcttcattactgtcaagcagcggaaacaatacagacgactgaagaagctgatgtatgaggattctcagcgacccgtgccccgtccactgaacaaactccagggcttcatatttgacgtcgttacatcccaggcctttaacgtaatcgtgatggtgctgatctgcttccaggctattgctatgatgattgacacagatgtccagtccctgcaaatgtctatcgccctgtactggattaactctatcttcgtgatgctgtataccatggaatgcatcctgaaactcatcgccttcagatgtttctactttacgatcgcatggaatatatttgactttatggtggtcatcttctccataactggattatgccttccaatgacagtgggttcctacctcgtgccgccttctttagtgcagctaattctcctctcaaggataattcatatgctgcgcctggggaaaggtcctaaggtgtttcacaacttgatgctccccctcatgctcagtctcccagccctgcttaacattatcctgctcattttcctcgtgatgttcatatatgccgtatttggtatgtacaacttcgcttatgttaagaaggaggccggaatcaatgatgtttcaaacttcgaaaccttcggaaattctatgctttgcctttttcaagtcgctatattcgcgggctgggacggaatgctggacgccatcttcaactcgaagtggtcggactgcgatcccgacaaaatcaatccagggactcaggtgcgaggagattgcggaaatcccagcgttggaatcttctattttgtaagctacatcctaatttcttggctcattatcgtgaacatgtacatagtggtggtgatggagtttctgaacattgcctctaagaagaagaataaaacactctcagaggacgacttccgcaagttctttcaggtttggaaacgttttgatccagaccggacccagtatatcgacagctctaagttgtcagactttgcggctgcactggacccaccactattcatggcaaaaccaaacaaaggccagctgatcgctctggacctgccaatggcagtgggggaccgcattcactgtctagacatattgctagcctttactaaaagagtaatgggacaagatgtgagaatggagaaggttgtctctgagatagaatccgggttcttgctcgccaatccatttaagatcacttgcgaacccattacgaccaccctgaagcgcaagcaggaagcggtgtctgcgacaatcatccagcgggcctataaaaactatcgtctccgccgcaacgacaaaaatactagcgatatccacatgattgacggcgacagagatgtgcatgctaccaaggagggggcatactttgacaaagccaaggagaaaagccccattcaatcccagatatag

SEQ ID NO: 134063 - DNA, 5049 bp, Artificial Sequence
  derived and/or modified sequence
atgctggccagccccgagcccaagggcctggtgcccttcaccaaggaaagcttcgagttgataaagcagcacatcgcgaaaacccacaacgaggatcacgaggaggaggatctgaaaccaacccccgacctcgaagtcggcaagaaactcccgtttatttatggaaatctgagccagggaatggtctctgaacctctggaagacgttgacccttattactacaagaagaaaaacacctttatcgtgctgaataaaaaccgaactatcttcagatttaacgctgcaagcatcctttgcaccctgtccccattcaactgtatcagacggaccaccatcaaggtactggtccacccatttttccagctattcatcctgatttcggtcttgatcgattgtgtcttcatgtccctgaccaacttacccaagtggaggccagtgctggaaaacacactgctgggtatctatactttcgaaatcctggtgaaactattcgcacgcggcgtctgggctggcagctttagtttcttgggcgacccttggaattggttggactttagcgtgaccgtttttgaggtaatcatcaggtatagccccctggacttcattcccacactgcagacggccaggacactccgcatcctgaaaatcattccgcttaatcagggcctaaagagcctcgtgggggtcctgattcactgtctcaaacagctaattggggtgattattctgacacttttttttttatctatcttcagcctcattggtatggggctgtttatgggcaaccttaaacacaaatgcttcagatggccacaggagaatgaaaatgaaacactgcacaatcgcacagggaatccttactatataagggagaccgagaatttctactatctcgagggcgagagatatgcgttgctgtgtggaaatcggaccgatgctggtcaatgcccagaggggtatgtctgcgtgaaggcagggattaaccctgaccagggctttaccaacttcgactcctttggttgggccctctttgctctatttagattaatggcgcaggattatccagaagttctttaccaccagatcctgtatgctagtggcaaagtgtatatgatcttctttgttgttgtgtccttcctgttttccttctacatggcttctcttttcttaggaatcttggccatggcttacgaagaggagaaacagcgggtgggcgagatatccaaaaagatcgaacctaaattccaacagacaggcaaggaactgcaggagggaaacgagacagatgaagccaagaccattcagatcgaaatgaagaagcggagtcccatctccactgatacttctctcgacgttttggaagatgctaccctccggcacaaggaagaactagaaaaaagtaaaaagatctgcccactgtactggtataaattcgccaaaacatttctcatttggaattgttcaccttgttggctgaagctaaaggagtttgtgcatagaattatcatggccccatttacagatctgttcctgatcatatgcattattttaaacgtttgcttcctcacattggaacattaccctatgagtaagcagaccaatacactgctgaatatcggcaacctagtgtttattgggatattcactgctgaaatgatttttaaaattatcgctatgcatccatatggatactttcaggtggggtggaacatttttgacagtatgatagtattccacggactaattgagctgtgcctagctaacgtggccggaatggcgcttctgaggctgttcagaatgttgcggatctttaagctgggcaaatattggccaaccttccagattctgatgtggtcactctcaaacagctgggtggcccttaaggatcttgtcctgcttctgttcacctttatctttttcagtgcagcatttggcatgaagctgttcgggaaaaactatgaagaattcgtttgccatatcgataaagattgtcagttgccacggtggcatatgcatgacttttttcactcattcttgaacgtctttaggatcctgtgcggcgagtgggtagagacgctgtgggattgtatggaagtggctggccagagctggtgcattcccttctatctcatggtcattttgataggcaacctcctggtgctctacctgttcctggccttggtgagttcattttcttcatgcaaggatgtgacagcagaagaaaacaatgaagccaaaaatttgcagttggccgtggcgcgcattaagaaagggatcaattacgtgttactaaaaatcttgtgcaaaactcagaatgtccctaaggacacaatggaccatgtgaacgaagtatacgtcaaagaggatatcagcgaccatacactctctgagctaagtaatacacaggatttcctgaaggacaaggagaagagctcgggaacagaaaaaaatgcaacagagaacgaaagccagtcactcattccatcacctagtgttagtgagacagtgccgattgcctccggagagagcgatatcgagaatctagataacaaagaaatacagagcaagtctggggatggtgggagcaaggagaagattaagcagagtagctcgtctgaatgctcaacagtagatattgcgatctccgaagaagaagaaatgttttacggaggcgaacgatccaaacatctcaagaacgggtgtcgtaggggctcaagcttggggcaaatctccggggccagtaaaaaagggaaaatttggcagaacatccgaaagacttgctgtaagattgtggaaaacaactggtttaagtgtttcatcggcttggttacacttctgtccacaggcacgctggcctttgaggacatctacatggaccagaggaagactattaaaattctgttggagtatgccgatatgatcttcacatatattttcatcctggagatgctccttaaatggatggcatatggctttaaagcctatttcagcaatggatggtacaggctggactttgtagtggttatcgtcttttgcctgtcactcattggcaagacccgggaagagttaaagccacttatatcaatgaagttcctgcgcccactgagagtgctgtcacagttcgagcgcatgaaagtggtcgtcagagctctgatcaagacaacactgcccaccctgaatgtcttcctcgtgtgcctaatgatctggctgatcttctccatcatgggggtggatctcttcgccggaaggttttatgaatgtattgaccccacctctggtgaacgtttcccctcttctgaggtgatgaacaagagcagatgcgaatctctgctcttcaacgagtccatgctatgggagaacgctaagatgaacttcgacaacgtaggaaatggattcttaagcttgctgcaggtcgctacattcaacggctggatcacgatcatgaatagcgccatcgattcagtggcagtcaatattcagccacatttcgaggtgaatatctatatgtattgctacttcatcaattttatcatcttcggcgtctttctgcccctttccatgctgataacggtgatcatagataattttaacaagcataagattaagctgggtggttctaatatcttcatcaccgttaagcagcgcaagcagtataggcggttaaaaaaactcatgtatgaggacagccagagacccgtaccgagaccactcaataaacttcaagggtttatattcgatgtagtcacatcccaagctttcaacgtcatcgtgatggttttgatatgcttccaagccattgccatgatgatcgataccgacgttcagagtctgcagatgtccattgctctatactggatcaattctatctttgtaatgctctacacaatggagtgtatcttgaagctcatcgcattccgatgtttttatttcaccattgcatggaatattttcgatttcatggttgtgatctttagtattaccgggctctgcctgcccatgaccgtgggctcttacttggtgcctccttcgctggtacagttgatactgttgtctagaatcatccacatgctgcgactcggcaaggggcccaaggtcttccataaccttatgctccctctaatgctgtcattgccagctctattgaacatcatcctgctgatcttcttggtaatgtttatatatgcggtgtttggcatgtacaacttcgcatacgtgaagaaagaagcagggattaacgatgtttccaattttgagacttttggcaattctatgttatgcctgtttcaggttgcgatctttgccggctgggacggcatgctagacgcaatcttcaactctaagtggagcgactgtgaccccgataagattaaccccggaacacaggttaggggtgactgcggtaacccgtctgtcggaattttctacttcgtgtcttatatcctgatcagctggctaatcattgttaatatgtacattgtggtggtcatggagttcctcaatatcgcaagcaagaagaagaataagacgttatccgaggacgactttcgcaagttcttccaagtttggaagcgttttgatcccgaccggacccagtacatcgattcatccaagctttccgatttcgccgcagctctggaccctcctttgttcatggctaagccgaataagggccaactcattgctctggatctaccaatggctgtcggggaccggattcactgcctggacatactgttggcctttaccaagcgtgtaatgggacaggatgtgcggatggagaaggtagtgagtgaaatcgagagcggattcctgctggctaacccctttaaaattacctgcgaacccatcaccactactctgaagcgtaaacaagaagccgtatccgcaaccatcatccaaagagcctacaaaaactatcgcctaaggcggaatgataagaacacaagcgacatacacatgatcgatggggatagagacgttcatgcaaccaaggaaggcgcttactttgataaggcaaaggagaaaagccctattcagtcacaaatctag

SEQ ID NO: 134064 - DNA, 2592 bp, Artificial Sequence
  derived and/or modified sequence
atgctggccagccccgagcccaagggcctggtgcccttcaccaaggaatccttcgagctgattaaacagcatattgcgaagacccataatgaagaccacgaagaggaagatcttaagccaacacctgacctggaggtcggcaagaaattaccattcatctatggcaatctctcccagggcatggtcagcgagccactggaggatgtagacccgtactattataaaaagaaaaatacatttatcgtattaaataagaaccggaccatatttcgtttcaacgcagcgtcgattctgtgcactctgagtccgttcaactgcatccgccgaacaacgataaaggtgttggtccaccccttcttccagctgtttatactgatcagcgttttaatcgattgtgtgttcatgagtctgacgaatcttccaaagtggcggcctgttctggagaacaccttactaggcatttacacatttgagatcctcgtgaaactttttgcccgaggagtgtgggccggatctttctcatttttaggggatccgtggaattggttagacttctcagtcaccgtgttcgaggttatcattcgatattccccactggacttcatcccaacactacagactgcaaggactctacgtatcctcaaaatcatacccttaaaccaggggctgaaatcactcgttggggtgttaatacactgtctcaaacagctcatcggtgtaattatcttgacgctgttcttcctgagtatattctctctgatcggaatgggactgtttatgggcaacctgaaacataaatgttttcggtggccccaggagaatgagaacgagactctccacaataggaccgggaacccttattacattcgggaaaccgaaaatttctactatctggagggggagcggtatgccctactgtgcggcaaccgtaccgacgctggtcagtgccctgaggggtacgtgtgcgtcaaggctggaattaatccagaccagggcttcacgaactttgactctttcggctgggcactttttgctctgttcagactgatggctcaggattatccagaggtcctctaccatcagatcttatacgccagcggaaaggtttacatgattttcttcgtggtcgtctctttcctgttctccttttacatggcatctctctttctcggaattttagctatggcctatgaggaggaaaagcagcgcgtgggagaaatttctaagaaaatcgaaccaaagttccagcagaccggaaaagaacttcaggaaggcaacgagacagacgaggctaaaacaatacagattgaaatgaagaagaggtccccaatttccactgacacttccctagatgtgctcgaagacgccaccctgcgccataaggaggaacttgagaaatcaaaaaaaatttgtcctttatactggtacaaattcgcaaaaactttcttgatttggaattgctccccttgttggctgaagcttaaagaatttgttcacagaattatcatggctcctttcactgatctcttcctcatcatttgtattattctcaacgtatgtttcctgaccctagagcactacccaatgagtaagcaaaccaacaccctcctgaatatcggtaatcttgtctttatcgggatctttactgcagaaatgattttcaagattattgccatgcatccctacgggtattttcaggtcggatggaacattttcgatagcatgattgttttccacggcttgatcgaactctgcttagcgaacgtggctgggatggctctgttgcgactgtttaggatgctcaggatcttcaagctaggcaagtattggcccaccttccagatcctcatgtggtctctgtccaattcatgggttgccctgaaggatctggtgctgttgctatttaccttcattttcttttcggctgcctttggaatgaaactgttcgggaaaaactacgaagaatttgtgtgccacatcgataaagactgtcagttacccagatggcatatgcatgacttctttcacagttttcttaatgtgtttaggatcctttgcggggaatgggtagagacgctttgggattgtatggaggtcgccggccagtcatggtgtatccctttttacctgatggtgattcttatcggcaacctcctagtgttatatctgttcttagcactcgtcagcagcttttcctcatgtaaggacgtaactgctgaagagaataatgaggcaaaaaatttgcagctcgccgtcgctagaatcaaaaaagggataaattacgtactattgaagattttgtgtaagactcagaacgtaccgaaggacaccatggaccacgttaacgaagtgtatgtgaaagaggacatctctgatcataccctgtccgaacttagtaacactcaggattttttaaaggacaaagagaagtccagcggcactgagaagaacgcaaccgaaaacgaaagtcagagcctcatcccgtctccctcagtgagcgagaccgtacccattgccagtggggaaagcgacatagaaaatctcgacaataaggagattcaaagcaaatcaggcgatggaggcagtaaatag

SEQ ID NO: 134065 - DNA, 1209 bp, Artificial Sequence
  derived and/or modified sequence
atgctggccagccccgagcccaagggcctggtgcccttcaccaaggagtctttcgaactgattaaacagcatatcgcaaagactcacaacgaagaccatgaagaggaggatctgaagcctaccccagacctagaggtaggcaaaaagctccccttcatctacggcaatctgtctcagggtatggtgtcagagcctctggaagacgtagacccatattattacaagaaaaagaacaccttcattgtattaaacaagaaccggacgatcttcaggttcaatgcagcttctatcttgtgcaccctgtctccctttaactgcattaggcgcaccactataaaggtcctggtgcatccatttttccaactcttcattctaatctccgtactgattgactgtgtctttatgtcactcaccaacttaccaaagtggaggcccgtgctggaaaatacactgctcgggatctatacattcgagatcctcgttaaactgtttgcccggggcgtctgggctggtagctttagcttccttggggatccttggaactggctggacttctccgttaccgtatttgaggtgattatacgctactccccactggatttcatccccaccctgcaaacggcccgcacactgaggatcctcaaaataatcccactgaaccagggacttaaatccttggtaggggtgttgattcattgtctcaagcagcttattggggtcatcattcttacgctctttttcttgtctattttcagccttatcggcatgggcctatttatgggaaacctgaagcataagtgcttccgttggccccaggaaaatgaaaatgaaacgttgcataatcggaccggtaacccttactatataagggaaactgagaatttctactatctggagggggagagatatgcccttctctgtgggaatcggactgacgcgggccaatgtccagaaggttacgtttgcgtgaaggctggaatcaaccctgatcagggtttcacgaacttcgacagtttcggctgggccctgtttgcgctgtttcgacttatggcccaagattatcccgaagtactctaccatcagatcctgtacgctagcggcaaagtgtacatgattttttttgtcgtcgtttccttcttgtttagtttttacatggcctccctcttcctcgggatcctggcgatggcctatgaagaagagaaacagtag

SEQ ID NO: 134066 - DNA, 5049 bp, Artificial Sequence
  derived and/or modified sequence
atgctagcgtcaccggaacctaaaggtctcgtaccatttacaaaagagtcattcgagttaatcaagcaacacattgccaagacccacaatgaggaccatgaggaagaagatttaaagccaactcccgacttggaggtggggaagaaactgccttttatttatggcaacctgagtcaggggatggtgagtgagcctttggaagatgtggacccatactactataagaagaagaacacattcatagtcctaaacaagaataggaccatatttcgatttaacgccgcttctattttatgcactctgtccccctttaactgcattaggaggacaaccatcaaagtgttagttcaccctttttttcagcttttcatcctcatctccgtgctgatcgactgtgttttcatgagccttacaaaccttcctaagtggcggcctgtgttagaaaacacactgctgggaatttacaccttcgagatcctggtgaagttatttgctagaggggtctgggccggatccttcagctttctgggggatccctggaattggctcgacttttctgtgacggtgtttgaagtcatcattagatacagtccattagactttattccaacactgcagacggcccgtacactgcgcatcctgaagatcatcccactgaaccagggactgaagtctctcgtgggggtgcttattcactgcctcaagcagctgatcggagtgatcatactcaccctgttttttctctctatatttagcttaatcggcatgggattgttcatgggcaatctaaaacataaatgctttaggtggccacaggaaaatgagaacgaaaccttgcataaccggacaggaaacccatattatatacgagagaccgaaaacttctattacttggagggggagcgctatgccctgctgtgtggtaatcgcaccgatgctgggcagtgccctgaggggtacgtgtgcgtgaaagctgggattaatccagatcagggcttcacgaactttgattcctttggctgggcattgtttgcactgtttcgactaatggcgcaggattatccagaagtgctctaccatcagatcctgtatgcatccgggaaggtctatatgatattctttgtcgtcgtgtcattcctgtttagtttttatatggctagcttgtttctggggatactagccatggcctatgaggaggagaagcagagggtgggcgaaattagcaagaaaatcgaacccaagtttcagcagacagggaaagaacttcaggagggtaatgagacagatgaggccaaaaccattcagattgagatgaagaagaggtcacctatctcgaccgatacatcactagacgtcctggaggatgctacactaaggcataaggaggaactcgagaaatcaaagaaaatttgtcccctgtactggtacaaatttgctaagaccttcttgatctggaattgtagtccctgctggttgaaactcaaggaatttgtacaccgaattatcatggccccttttacagacctgttcttgattatctgtattattttgaacgtgtgctttctgactctggagcattatccaatgagcaaacagacaaacaccctgctcaacataggaaatttggtgtttatcggcatttttaccgcggaaatgatcttcaagatcattgccatgcatccctacgggtatttccaggtcgggtggaatatcttcgatagcatgattgtgtttcacggactgatagagctgtgcctggcaaacgtcgctggaatggctctgctccgcctatttagaatgctccgcattttcaagctgggtaaatattggccaacgtttcagatactaatgtggtccttgtccaattcttgggtcgcactaaaagatctggtgctgttgctattcacctttatcttttttagcgctgcctttggcatgaagctgttcgggaaaaactatgaggagtttgtatgtcacatcgataaggactgtcagcttcccagatggcacatgcatgattttttccactccttcttaaacgtcttccgcattttgtgcggagaatgggtagagaccctctgggattgtatggaggtcgcgggacagtcttggtgcatacccttctatctgatggtgatcctcatcggaaatctactggtattatacttatttctcgcactggtctccagctttagctcatgcaaggacgtgacagccgaggagaataatgaggccaagaatctgcagctggctgtggcccgaatcaaaaaggggattaattacgttctattgaaaatcctgtgtaagacacagaatgttcccaaggataccatggatcacgttaacgaagtttatgttaaagaggatatctccgaccatactctgtcggagcttagtaacacccaagatttcctgaaggacaaggagaaatcaagcgggacggagaaaaacgcaacagagaacgaaagccagtctctgatcccatccccaagcgtctctgaaacagttccaatcgcatccggagaaagcgatattgagaatctggacaataaggagattcagtccaagagcggagatggaggctctaaggaaaaaatcaagcagagcagcagcagtgaatgttcgactgtcgatattgccattagtgaagaagaggagatgttttatggtggggagcggagtaaacacttaaagaacggttgccgcaggggaagctcccttggacagatcagtggggctagtaaaaaaggcaaaatatggcaaaatatccgaaagacctgctgcaaaattgtggagaacaactggttcaagtgcttcatcgggctggtcactttgctgtctacaggaaccctggctttcgaggatatttacatggaccagcgtaagacaatcaaaatcttactcgaatatgccgacatgatcttcacatatatctttatattagaaatgttgctgaagtggatggcgtacggtttcaaggcgtattttagcaatgggtggtacagactggatttcgtggtggttatcgttttctgtctctcactcatcggtaagacccgggaggaattgaagccattaattagtatgaagttcctgagacccctccgcgtgctgtctcagtttgagcgcatgaaagtggttgtccgcgcattgatcaagacaacgcttccaactctgaacgtgttcctcgtgtgcttaatgatttggttgatttttagcatcatgggggtggacctgtttgcgggtcggttttatgaatgcatagatcctacctctggagagcggttcccatcgtcagaggtcatgaacaagtctaggtgcgaaagcttgctgtttaacgaaagcatgttgtgggaaaacgcaaagatgaattttgacaatgttgggaatgggttcctgagcctgctgcaggtcgccactttcaacgggtggatcacaattatgaattctgcaatcgactccgtggctgtgaatatccagccgcacttcgaggtgaacatttacatgtattgctatttcattaacttcataatattcggggtgttcctgcctttgtccatgcttatcactgtgattatcgataacttcaacaagcataagatcaaactcggcggttcaaacatctttataaccgtgaagcaacgcaagcaataccggagattgaaaaagctgatgtacgaggacagccagcgccctgtgccaaggcctcttaacaaattacagggatttatctttgacgtagtgactagccaggctttcaatgtcattgtcatggtgcttatttgttttcaggcaattgccatgatgatagataccgacgttcaatccctccagatgagtatcgcactgtattggatcaactcgatttttgtgatgttatacactatggaatgcatccttaagctgatcgctttccgctgcttctacttcaccattgcctggaatattttcgattttatggttgtgatcttctcaattactgggttgtgcttgcccatgacagtgggatcttacttggttcccccttctctggtgcaactgattcttctatctcgcattatccacatgctgcggctgggaaaagggccaaaggtctttcacaacctgatgctgcctcttatgctgagcttgcccgcattactgaatatcatcttgctaatttttctggtcatgtttatctatgccgtgttcgggatgtacaacttcgcttacgtgaaaaaagaggctggcatcaacgatgtgagcaacttcgaaacctttggcaatagcatgctctgtctgttccaggtggcaattttcgctggatgggatggaatgttggacgccatctttaacagcaagtggtctgattgtgatcctgataagattaatcccggaactcaagttcggggagactgcggaaatccctccgtgggcatcttctactttgtgagctatattctcatctcctggctcatcatcgtcaatatgtatattgtggtggtaatggagtttcttaatatcgcctccaagaaaaaaaacaagacacttagcgaagacgatttccgtaagttcttccaggtatggaaacggtttgatcctgatagaacccagtatatcgatagctctaagctgtcagattttgccgctgctctcgacccccctctgttcatggcaaaaccaaataaaggacagctcattgcgcttgacctccccatggccgtgggtgatcgtattcactgtctggacattctcctcgctttcacaaagagagtgatgggacaggacgtcagaatggagaaagtcgtttccgaaatcgagagcggatttcttctcgcaaatccatttaaaatcacatgcgagcccatcactaccacgctgaaacgcaaacaggaggctgtgtcggcaactatcatacagagggcctacaagaattatcggctgaggcgcaatgacaagaatacatctgacatccacatgatcgatggcgacagagacgtgcacgccacaaaagagggggcttacttcgataaagccaaagagaagagccctattcagtcccagatctac

SEQ ID NO: 134067 - DNA, 5048 bp, Artificial Sequence
  derived and/or modified sequence
atgctcgcgtcaccagagccaaaaggccttgttccctttacgaaggagagcttcgagctgataaagcaacacattgccaagacacataacgaagatcacgaggaagaagatttaaaacctaccccagacctggaggtgggcaagaaattgccttttatttatgggaaccttagtcagggtatggtttcagaacccttagaggatgtggatccctactattacaaaaagaagaatacgttcattgtcctgaataagaatcgcactattttcagattcaatgcagcctccattctttgcacactatcacctttcaattgcattcggaggactacgatcaaggtgttggtacatccattcttccaactgttcatccttattagcgttctaatcgactgcgtgtttatgtccctgacaaaccttcctaagtggcgtcccgttctagagaacacactactcggcatctacacattcgagatactggttaagcttttcgcgagaggggtctgggccggaagctttagcttcctcggggacccctggaactggcttgactttagcgtcactgtgttcgaggtgatcatccgatatagcccactcgacttcataccaaccctgcagaccgccagaactctgcgaattttgaagatcattcccctcaaccaaggacttaagtcgctggttggggtcctaatccactgtctgaagcagttgatcggagtgatcattctgactctgttctttctgagcatattttccttaattggaatgggactcttcatggggaatttaaagcataaatgctttcgctggccacaagagaacgagaatgaaaccctgcacaacagaacgggaaacccatattacataagggagaccgagaacttctattacttagaaggagaacggtatgccttattatgtggtaaccggaccgatgctggtcaatgtcctgagggatatgtatgtgtcaaggccggaattaatcctgatcagggtttcacaaactttgattcctttggatgggccctgttcgctctgttcagactcatggcccaagattaccctgaggtgctgtaccaccaaatcctgtacgcttccgggaaggtatacatgatatttttcgtcgtcgtctcttttttgttttctttttacatggccagtcttttcctagggattctagcgatggcttacgaagaagagaagcagagagttggcgaaatctctaaaaagatcgaacccaaattccaacagaccggcaaagagttgcaggaaggcaacgagacggatgaggctaagacaatccagatcgaaatgaagaaaagaagcccgatcagcacggataccagtctggacgtgttggaggatgcaacacttaggcataaagaggagcttgaaaagagcaaaaaaatctgtccattatactggtacaaatttgctaagacatttctgatttggaactgctctccatgctggctcaaactgaaggagtttgtccatcgcattatcatggcaccatttacagacttatttctcattatctgtatcatcctcaacgtatgcttcttgacgttagagcactaccccatgagtaagcagactaataccttgctcaacatcgggaacctggtctttatcggcatctttacagccgagatgatcttcaagattatcgcaatgcacccatatgggtactttcaagtcggctggaacatctttgattctatgatagtattccacggcctcatagaactgtgcctggcaaatgtggccggaatggctctgctgcgactgttcaggatgctgcggatttttaagctgggaaagtactggccaacttttcaaattctcatgtggtccctgagcaattcctgggttgcattaaaagaccttgtgctgttgttgttcacatttattttcttctcagcggctttcggaatgaagctcttcggcaaaaattatgaagagtttgtgtgtcatatagacaaggattgccagttaccccgatggcacatgcatgacttttttcattcctttcttaacgttttccgaatcttgtgtggcgagtgggtggagacactgtgggactgtatggaggtcgcagggcaatcatggtgcattcctttttacctcatggtgatcctgatcggtaatctgctagtcctgtaccttttcctcgctttagtatccagcttctcctcctgtaaagacgtaacagcagaggagaacaatgaggccaaaaatctgcaactcgccgtggccagaattaagaagggcatcaactatgtgctcctgaagattctgtgcaagactcaaaacgtgcccaaagatacaatggatcatgtgaacgaggtttacgtaaaggaagacatttcagatcataccctgtcagagctttccaatacacaggacttcttaaaggacaaggaaaaatcatccggcacagaaaagaatgcgactgagaacgagagtcaatcgctcatccctagccctagcgtaagcgaaaccgtcccaatcgccagtggagaatccgacattgagaatctggataataaagagatccagtctaagtctggtgatggcggatccaaagagaaaattaagcagtcttcatcctctgagtgtagcaccgtggacatcgctatttccgaggaagaggagatgttctatgggggagaacgcagtaaacacctcaaaaatgggtgtcgtcgcggaagctccttagggcagatatctggtgcgtctaaaaaaggaaaaatctggcagaacatcagaaagacttgctgcaaaatagtagagaataactggttcaaatgctttatcggactggtcacactcctctccacaggcaccctggctttcgaggatatttacatggatcagcgtaaaacaataaagatcctgctggaatacgctgatatgatctttacttacatattcatcctggaaatgctgcttaagtggatggcttacgggttcaaggcttacttcagtaatggctggtatcggctagactttgtggtggtgattgttttttgcctttccctcatcgggaagacccgggaagagctgaaaccgctgataagcatgaaatttcttaggcctttgagggtgctgtcacagttcgaacggatgaaggtggttgtgcgcgcacttataaaaactacgctacctacactgaatgtgtttctcgtgtgtctgatgatctggcttatattcagtatcatgggggtggatctgttcgcgggtaggttttacgaatgtattgatcctacctcaggcgagaggttcccaagttctgaggttatgaataagagtagatgtgaatcattactctttaacgagtccatgctctgggagaacgcgaaaatgaacttcgacaacgtggggaatggcttcttaagtctgttgcaggtggctacatttaatggatggattaccatcatgaactctgccatcgactctgtcgccgtcaatattcaaccgcacttcgaagtgaacatttacatgtactgttactttattaattttatcatcttcggcgtgttcctgccactgtcaatgctgataacggttatcattgacaacttcaataagcacaaaatcaaattaggaggcagcaacattttcatcactgtgaagcagcggaagcagtaccgcaggttaaaaaaacttatgtatgaggactcccagcgtcccgtaccaagacccctgaacaaattgcaaggctttatattcgatgttgtgacatcccaagctttcaatgtcattgtaatggtactcatctgttttcaggccatcgcaatgatgattgatactgacgtgcaaagcctgcagatgagcattgccctatattggatcaattcgattttcgtgatgctttacacaatggaatgcatcctgaagctcatcgcctttaggtgcttctacttcaccatcgcctggaatatctttgactttatggtagtaatattctccattaccgggctatgcctgcccatgacagtaggatcttatctcgtaccaccttcactggttcaattgatccttctcagcaggatcatccatatgttgcgcttggggaaaggtcccaaagtgtttcacaaccttatgctgccgttaatgttatcactgcccgctcttttaaatataatccttttgatattcctagtgatgttcatctacgccgtgtttggcatgtataattttgcatatgtgaagaaagaagctggcataaatgatgtcagtaatttcgagacgttcgggaatagcatgctatgcctgtttcaggtggctatcttcgccggatgggatggcatgctcgacgcaatctttaattctaagtggtccgattgtgatcccgacaagataaaccccggtacgcaggtccgtggggactgtggcaatccttccgtggggattttttattttgtctcatatatactaattagttggctgattatcgtgaacatgtatattgtcgtcgtgatggagtttctaaatatcgcttcgaaaaaaaaaaacaagactctgtctgaagatgacttccgaaagttttttcaggtgtggaagcgttttgatcctgaccggactcaatatatcgactcctccaaactgagcgacttcgctgccgctctggacccccctcttttcatggcaaagcctaataaaggacagctaatcgccctcgatctgcctatggctgtgggtgaccggatacattgcctagatatactgttagcctttacaaagagggtgatgggacaggacgtgcgaatggaaaaggttgtgtcggagatcgaatcgggctttttgttagcaaaccccttcaagataacctgtgaacctattaccacgaccctgaaacgcaagcaggaggcagtgtctgccaccatcatccaacgggcttacaaaaattacagactgagaagaaacgataagaacacctccgatatccatatgattgacggcgaccgggatgtccacgctaccaaggaaggcgcatacttcgacaaagccaaagagaaatcccccatccagagccagatata

SEQ ID NO: 134068 - DNA, 2592 bp, Artificial Sequence
  derived and/or modified sequence
atgctggcgagccccgagccaaagggactcgtgccctttactaaggaaagcttcgagcttatcaagcagcatatagccaagacacacaacgaagatcatgaggaggaggacttgaagccaacaccagatctggaggtcggcaaaaagctacctttcatctacggaaatttgtctcagggtatggtcagcgaaccactcgaggacgtggacccgtattactacaagaaaaaaaataccttcattgttctgaataaaaaccgaacgatttttaggttcaatgctgcaagcattctgtgtactctctcgcctttcaattgcatcaggcgcactactattaaggtgctcgtgcacccattctttcagctttttatcctgatttccgtgctcatcgactgtgtgtttatgagcctgaccaaccttccaaagtggcgacctgttttggaaaataccttgctaggaatctacacttttgaaattctggttaaactctttgcacgcggtgtgtgggccggttccttcagctttctgggggacccatggaattggttggattttagtgttaccgtgttcgaagtaattataaggtattccccactcgacttcatccccacccttcagactgcccgtaccctgaggatcctgaagataatacctctcaatcaaggtctaaaatcactggtgggagttctcatccattgcctcaagcagttaatcggagtcattatcctgacgttgttcttcctgagtattttctctctcatcggcatgggcctctttatggggaatttaaagcacaagtgctttcgctggcctcaagagaacgagaacgagaccctgcacaataggactggtaatccgtactacatccgcgaaaccgaaaatttctattacctagaaggtgagcggtatgcgctgttgtgcggaaaccgaaccgacgcaggacagtgtccagaggggtacgtatgcgtgaaagctggaataaaccctgaccaggggttcaccaactttgacagcttcggctgggccctgttcgctctgtttcgcttaatggcccaggattatccagaggtcctgtaccatcagattttatatgccagtggtaaggtatatatgatcttctttgtagtcgtcagttttctgttttcattttatatggccagcctgtttttagggatcctggccatggcctacgaagaggaaaagcaacgggttggggaaatcagtaaaaaaatcgagcctaagttccagcaaacaggtaaggagttacaagagggaaacgaaactgacgaagccaaaacaatccagatcgaaatgaaaaagaggtcacccatcagcacggatacctcgctagacgtcttggaagacgcaacactaaggcacaaagaggaactggagaagagcaagaaaatttgccctttgtattggtacaaatttgcaaaaaccttcttaatctggaattgctcgccctgctggctgaagctgaaagagttcgtgcacagaatcattatggccccttttaccgatctcttcctgattatctgcataattctgaatgtctgcttcttgactcttgagcactatcccatgagcaaacaaaccaacaccctcctcaatatcggcaatctggtgtttataggcatcttcactgccgagatgatttttaagatcatagcgatgcacccatacggatatttccaggtcgggtggaatattttcgattcaatgattgtcttccatgggctgatagagctgtgtcttgctaacgtagcgggtatggccctgctgaggctatttagaatgctgcggatcttcaagctcggcaagtattggcctactttccagattctcatgtggagcttgagcaactcctgggtggccctcaaagatctggtcctgttgttgttcacctttatctttttttcggctgcttttggaatgaagcttttcggaaagaactacgaagagttcgtttgccatatcgataaggattgtcagctgcccaggtggcacatgcatgacttcttccattcatttctgaatgtgttcagaatcctctgtggggagtgggtggagaccctgtgggattgtatggaagtggctggacaatcctggtgcattccgttctatttaatggtcatactgattggcaatctgctagtgttatacctgttccttgcactggtctcgtcgttctcttcctgcaaagatgtcacagccgaagaaaataacgaagccaaaaacctgcaactcgcagtagcacgcattaaaaagggaatcaattacgtactcctgaaaattctttgcaagacgcaaaacgtcccaaaggatacaatggaccacgtcaatgaagtatatgtcaaggaagacatcagcgatcatacattgagcgaacttagtaatactcaggacttcttgaaagacaaagaaaaaagttcaggcaccgaaaagaacgccactgagaacgagtcacagagtctcatcccttcgccatcagtatccgaaacagtgccaattgccagcggagagagcgatatcgaaaacttagacaacaaggaaatccaatcgaaatccggcgacgggggaagtaaatag

SEQ ID NO: 134069 - DNA, 1209 bp, Artificial Sequence
  derived and/or modified sequence
atgttggcatctcctgaacctaaaggattagtgcctttcacaaaggagtccttcgaacttattaaacagcacattgctaaaactcacaacgaggatcacgaggaggaagatttgaaaccaactcccgatttagaggtaggtaaaaaactaccttttatttacggtaacctgtcccaggggatggtctctgagccactggaggatgtcgatccatactactacaagaagaaaaataccttcatagtcctgaataagaataggacgatattccgcttcaacgccgcatccattttgtgcacactctctccgtttaactgtatccgtcgtacaactatcaaggttctcgtacacccattttttcagctgtttatcctgatctccgtgttgatcgactgcgttttcatgtccctgacaaatctccccaagtggaggcctgtactggaaaatacgctgctaggaatttatacttttgaaatccttgtcaagctgttcgcacggggtgtttgggcaggtagtttcagcttcttaggggacccatggaattggctggacttttccgtgacagtctttgaggtcatcattcgttactctccactcgatttcataccaactcttcaaacagccagaacactcaggatcctgaagatcattcccctaaatcaaggtttgaaatcactcgttggtgtgcttatccactgcctgaagcagctcatcggggtgatcatccttaccctgttttttctttctatttttagcctgataggtatggggctgtttatggggaacctaaagcacaagtgctttagatggccacaggagaatgagaatgagaccttacataataggacaggaaatccatactacatacgtgaaacggaaaacttctattacctggaaggggagcgttatgcattgctgtgcgggaaccggacagacgctggacagtgtccagaaggatatgtgtgcgttaaagcaggcatcaatcctgatcaagggttcacaaactttgacagctttggctgggctcttttcgctctgttccggctcatggcccaggattatccagaagtgctataccatcagatactgtacgcatctggcaaggtgtacatgatcttctttgtcgtcgtgtcctttcttttcagcttctacatggcatcactgttcttggggatccttgcaatggcctatgaggaggagaagcaatag

SEQ ID NO: 134070 - DNA, 5727 bp, Artificial Sequence
  derived and/or modified sequence
gtcctccaccatgtgaatgccaacatggccaggtcattagagctgagggaaaactagtgcccaaagatatgaaaagagtgtggatcttctggagaagtgctgttgttcaacaggtacaaaattggaaatgttggcttcaccagaacctaagggccttgttcccttcactaaagagtcttttgaacttataaaacagcatattgctaaaacacataatgaagaccatgaagaagaagacttaaagccaactcctgatttggaagttggcaaaaagcttccatttatttatggaaacctttctcaaggaatggtgtcagagcccttggaagatgtggacccatattactacaagaaaaaaaatactttcatagtattaaataaaaatagaacaatcttcagattcaatgcggcttccatcttgtgtacattgtctcctttcaattgtattagaagaacaactatcaaggttttggtacatccctttttccaactgtttattctaattagtgtcctgattgattgcgtattcatgtccctgactaatttgccaaaatggagaccagtattagagaatactttgcttggaatttacacatttgaaatacttgtaaaactctttgcaagaggtgtctgggcaggatcattttccttcctcggtgatccatggaactggctcgatttcagcgtaactgtgtttgaggttattataagatactcacctctggacttcattccaacgcttcaaactgcaagaactttgagaattttaaaaattattcctttaaatcaaggtctgaaatcccttgtaggggtcctgatccactgcttgaagcagcttattggtgtcattatcctaactctgttttttctgagcatattttctctaattgggatggggctcttcatgggcaacttgaaacataaatgttttcgatggccccaagagaatgaaaatgaaaccctgcacaacagaactggaaacccatattatattcgagaaacagaaaacttttattatttggaaggagaaagatatgctctcctttgtggcaacaggacagatgctggtcagtgtcctgaaggatatgtgtgtgtaaaagctggcataaatcctgatcaaggcttcacaaattttgacagttttggctgggccttatttgccctatttcggttaatggctcaggattaccctgaagtactttatcaccagatactttatgcttctgggaaggtctacatgatattttttgtggtggtaagttttttgttttccttttatatggcaagtttgttcttaggcatacttgccatggcctatgaagaagaaaagcagagagttggtgaaatatctaagaagattgaaccaaaatttcaacagactggaaaagaacttcaagaaggaaatgaaacagatgaggccaagaccatacaaatagaaatgaagaaaaggtcaccaatttccacagacacatcattggatgtgttggaagatgctactctcagacataaggaagaacttgaaaaatccaagaagatatgcccattatactggtataagtttgctaaaactttcttgatctggaattgttctccctgttggttaaaattgaaagagtttgtccataggattataatggcaccatttactgatcttttccttatcatatgcataattttaaacgtatgttttctgaccttggagcattatccaatgagtaaacaaactaacactcttctcaacattggaaacctggttttcattggaattttcacagcagaaatgatttttaaaataattgcaatgcatccatatgggtatttccaagtaggttggaacatttttgatagcatgatagtgttccatggtttaatagaactttgtctagcaaatgttgcaggaatggctcttcttcgattattcaggatgttaagaattttcaagttgggaaagtattggccaacattccagattttgatgtggtctcttagtaactcatgggtggccctgaaagacttggtcctgttgttgttcacattcatcttcttttctgctgcattcggcatgaagctgtttggtaagaattatgaagaatttgtctgccacatagacaaagactgtcaactcccacgctggcacatgcatgactttttccactccttcctgaatgtgttccgaattctctgtggagagtgggtagagaccttgtgggactgtatggaggttgcaggccaatcctggtgtattcctttttacctgatggtcattttaattggaaatttactggtactttacctgtttctggcattggtgagctcatttagttcatgcaaggatgtaacagctgaagagaataatgaagcaaaaaatctccagcttgcagtggcaagaattaaaaaaggaataaactatgtgcttcttaaaatactatgcaaaacacaaaatgtcccaaaggacacaatggaccatgtaaatgaggtatatgttaaagaagatatttctgaccataccctttctgaattgagcaacacccaagattttctcaaagataaggaaaaaagcagtggcacagagaaaaacgctactgaaaatgagagccaatcacttatccccagtcctagtgtctcagaaactgtaccaattgcttcaggagaatctgatatagaaaatctggataataaggagattcagagtaagtctggtgatggaggcagcaaagagaaaataaagcaatctagctcatctgaatgcagtactgttgatattgctatctctgaagaagaagaaatgttctatggaggtgaaagatcaaagcatctgaaaaatggttgcagacgcggatcttcacttggtcaaatcagtggagcatccaagaaaggaaaaatctggcagaacatcaggaaaacctgctgcaagattgtagagaacaattggtttaagtgttttattgggcttgttactctgctcagcactggcactctggcttttgaagatatatatatggatcagagaaagacaattaaaattttattagaatatgctgacatgatctttacttatatcttcattctggaaatgcttctaaaatggatggcatatggttttaaggcctatttctctaatggctggtacaggctggacttcgtggttgttattgtgttttgtcttagcttaataggcaaaactcgggaagaactaaaacctcttatttccatgaaattccttcggcccctcagagttctatctcaatttgaaagaatgaaggtggttgtgagagctttgatcaaaacaaccttacccactttgaatgtgtttcttgtctgcctgatgatctggctgatttttagtatcatgggagtagacttatttgctggcagattctatgaatgcattgacccaacaagtggagaaaggtttccttcatctgaagtcatgaataagagtcggtgtgaaagccttctgtttaacgaatccatgctatgggaaaatgcaaaaatgaactttgataatgttggaaatggtttcctttctctgcttcaagtagcaacatttaatggatggatcactattatgaattcagcaattgattctgttgctgttaatatacagcctcattttgaagtcaacatctacatgtattgttactttatcaactttattatatttggagtatttctccctctgagtatgctgattactgttattattgataatttcaacaagcataaaataaagctgggaggctcaaatatctttataacggttaaacagagaaaacagtaccgcaggctgaagaagctaatgtatgaggattctcaaagaccagtacctcgcccattaaacaagctccaaggattcatctttgatgtggtaacaagccaagcttttaatgtcattgttatggttcttatatgtttccaagcaatagccatgatgatagacactgatgttcagagtctacaaatgtccattgctctctactggattaactcaatttttgttatgctatatactatggaatgtatactgaagctcatcgctttccgttgtttttatttcaccattgcgtggaacatttttgattttatggtggttattttctccatcacaggactatgtctgcctatgacagtaggatcctaccttgtgcctccttcacttgtgcaactgatacttctctcacggatcattcacatgctgcgtcttggaaaaggaccaaaggtgtttcataatctgatgcttcctttgatgctgtccctcccagcattattgaacatcattcttctcatcttcctggtcatgttcatctatgccgtatttggaatgtataattttgcctatgttaaaaaagaagctggaattaatgatgtgtctaattttgaaacctttggcaacagtatgctctgtctttttcaagttgcaatatttgctggttgggatgggatgcttgatgcaattttcaacagtaaatggtctgactgtgatcctgataaaattaaccctgggactcaagttagaggagattgtgggaacccctctgttgggattttttattttgtcagttatatcctcatatcatggctgatcattgtaaatatgtacattgttgttgtcatggagtttttaaatattgcttctaagaagaaaaacaagaccttgagtgaagatgattttaggaaattctttcaggtatggaaaaggtttgatcctgataggacccagtacatagactctagcaagctttcagattttgcagctgctcttgatcctcctcttttcatggcaaaaccaaacaagggccagctcattgctttggacctccccatggctgttggggacagaattcattgcctcgatatcttacttgcttttacaaagagagttatgggtcaagatgtgaggatggagaaagttgtttcagaaatagaatcagggtttttgttagccaacccttttaagatcacatgtgagccaattacgactactttgaaacgaaaacaagaggcagtttcagcaaccatcattcaacgtgcttataaaaattaccgcttgaggcgaaatgacaaaaatacatcagatattcatatgatagatggtgacagagatgttcatgctactaaagaaggtgcctattttgacaaagctaaggaaaagtcacctattcaaagccagatctaataccacttaccacctcttttcatatttcttcacatatctgaaaaatgttgaaagcctaagccaggaataaaagaaaagtagagataataatcagttctttacaaccgatggtaattaagcttgtattcacaagacttcatgccaaattcactttttagcattatatctaacaaatcaagagaatccttaatattgctgcagtgagtttaaagtgggttaaagtggccatttgacaatctcatatttgttttctctacatggcttatatgatgtgtgccttctagggaatgaagggaagtggtgatagagatcagcagcagcaggggctttcttttatattttatgtataatttaatgggctttaagtcaccactattaagacttacaaataagcaaatactttcctgatgtgggatggtgaaatgctaatggccattaaatcataaacttgcctagacaaaagccaattggaagaagggagagagcagttctttagaaagtgcctttgagatcaacctcagagattcttgggctgattaaaactgcatttg

SEQ ID NO: 134071 - DNA, 7183 bp, Artificial Sequence
  derived and/or modified sequence
gtcctccaccatgtgaatgccaacatggccaggtcattagagctgagggaaaactagtgcccaaagatatgaaaagagtgtggatcttctggagaagtgctgttgttcaacaggtacaaaattggaaatgttggcttcaccagaacctaagggccttgttcccttcactaaagagtcttttgaacttataaaacagcatattgctaaaacacataatgaagaccatgaagaagaagacttaaagccaactcctgatttggaagttggcaaaaagcttccatttatttatggaaacctttctcaaggaatggtgtcagagcccttggaagatgtggacccatattactacaagaaaaaaaatactttcatagtattaaataaaaatagaacaatcttcagattcaatgcggcttccatcttgtgtacattgtctcctttcaattgtattagaagaacaactatcaaggttttggtacatccctttttccaactgtttattctaattagtgtcctgattgattgcgtattcatgtccctgactaatttgccaaaatggagaccagtattagagaatactttgcttggaatttacacatttgaaatacttgtaaaactctttgcaagaggtgtctgggcaggatcattttccttcctcggtgatccatggaactggctcgatttcagcgtaactgtgtttgaggttattataagatactcacctctggacttcattccaacgcttcaaactgcaagaactttgagaattttaaaaattattcctttaaatcaaggtctgaaatcccttgtaggggtcctgatccactgcttgaagcagcttattggtgtcattatcctaactctgttttttctgagcatattttctctaattgggatggggctcttcatgggcaacttgaaacataaatgttttcgatggccccaagagaatgaaaatgaaaccctgcacaacagaactggaaacccatattatattcgagaaacagaaaacttttattatttggaaggagaaagatatgctctcctttgtggcaacaggacagatgctggtcagtgtcctgaaggatatgtgtgtgtaaaagctggcataaatcctgatcaaggcttcacaaattttgacagttttggctgggccttatttgccctatttcggttaatggctcaggattaccctgaagtactttatcaccagatactttatgcttctgggaaggtctacatgatattttttgtggtggtaagttttttgttttccttttatatggcaagtttgttcttaggcatacttgccatggcctatgaagaagaaaagcagagagttggtgaaatatctaagaagattgaaccaaaatttcaacagactggaaaagaacttcaagaaggaaatgaaacagatgaggccaagaccatacaaatagaaatgaagaaaaggtcaccaatttccacagacacatcattggatgtgttggaagatgctactctcagacataaggaagaacttgaaaaatccaagaagatatgcccattatactggtataagtttgctaaaactttcttgatctggaattgttctccctgttggttaaaattgaaagagtttgtccataggattataatggcaccatttactgatcttttccttatcatatgcataattttaaacgtatgttttctgaccttggagcattatccaatgagtaaacaaactaacactcttctcaacattggaaacctggttttcattggaattttcacagcagaaatgatttttaaaataattgcaatgcatccatatgggtatttccaagtaggttggaacatttttgatagcatgatagtgttccatggtttaatagaactttgtctagcaaatgttgcaggaatggctcttcttcgattattcaggatgttaagaattttcaagttgggaaagtattggccaacattccagattttgatgtggtctcttagtaactcatgggtggccctgaaagacttggtcctgttgttgttcacattcatcttcttttctgctgcattcggcatgaagctgtttggtaagaattatgaagaatttgtctgccacatagacaaagactgtcaactcccacgctggcacatgcatgactttttccactccttcctgaatgtgttccgaattctctgtggagagtgggtagagaccttgtgggactgtatggaggttgcaggccaatcctggtgtattcctttttacctgatggtcattttaattggaaatttactggtactttacctgtttctggcattggtgagctcatttagttcatgcaaggatgtaacagctgaagagaataatgaagcaaaaaatctccagcttgcagtggcaagaattaaaaaaggaataaactatgtgcttcttaaaatactatgcaaaacacaaaatgtcccaaaggacacaatggaccatgtaaatgaggtatatgttaaagaagatatttctgaccataccctttctgaattgagcaacacccaagattttctcaaagataaggaaaaaagcagtggcacagagaaaaacgctactgaaaatgagagccaatcacttatccccagtcctagtgtctcagaaactgtaccaattgcttcaggagaatctgatatagaaaatctggataataaggagattcagagtaagtctggtgatggaggcagcaaagagaaaataaagcaatctagctcatctgaatgcagtactgttgatattgctatctctgaagaagaagaaatgttctatggaggtgaaagatcaaagcatctgaaaaatggttgcagacgcggatcttcacttggtcaaatcagtggagcatccaagaaaggaaaaatctggcagaacatcaggaaaacctgctgcaagattgtagagaacaattggtttaagtgttttattgggcttgttactctgctcagcactggcactctggcttttgaagatatatatatggatcagagaaagacaattaaaattttattagaatatgctgacatgatctttacttatatcttcattctggaaatgcttctaaaatggatggcatatggttttaaggcctatttctctaatggctggtacaggctggacttcgtggttgttattgtgttttgtcttagcttaataggcaaaactcgggaagaactaaaacctcttatttccatgaaattccttcggcccctcagagttctatctcaatttgaaagaatgaaggtggttgtgagagctttgatcaaaacaaccttacccactttgaatgtgtttcttgtctgcctgatgatctggctgatttttagtatcatgggagtagacttatttgctggcagattctatgaatgcattgacccaacaagtggagaaaggtttccttcatctgaagtcatgaataagagtcggtgtgaaagccttctgtttaacgaatccatgctatgggaaaatgcaaaaatgaactttgataatgttggaaatggtttcctttctctgcttcaagtagcaacatttaatggatggatcactattatgaattcagcaattgattctgttgctgttaatatacagcctcattttgaagtcaacatctacatgtattgttactttatcaactttattatatttggagtatttctccctctgagtatgctgattactgttattattgataatttcaacaagcataaaataaagctgggaggctcaaatatctttataacggttaaacagagaaaacagtaccgcaggctgaagaagctaatgtatgaggattctcaaagaccagtacctcgcccattaaacaagctccaaggattcatctttgatgtggtaacaagccaagcttttaatgtcattgttatggttcttatatgtttccaagcaatagccatgatgatagacactgatgttcagagtctacaaatgtccattgctctctactggattaactcaatttttgttatgctatatactatggaatgtatactgaagctcatcgctttccgttgtttttatttcaccattgcgtggaacatttttgattttatggtggttattttctccatcacaggactatgtctgcctatgacagtaggatcctaccttgtgcctccttcacttgtgcaactgatacttctctcacggatcattcacatgctgcgtcttggaaaaggaccaaaggtgtttcataatctgatgcttcctttgatgctgtccctcccagcattattgaacatcattcttctcatcttcctggtcatgttcatctatgccgtatttggaatgtataattttgcctatgttaaaaaagaagctggaattaatgatgtgtctaattttgaaacctttggcaacagtatgctctgtctttttcaagttgcaatatttgctggttgggatgggatgcttgatgcaattttcaacagtaaatggtctgactgtgatcctgataaaattaaccctgggactcaagttagaggagattgtgggaacccctctgttgggattttttattttgtcagttatatcctcatatcatggctgatcattgtaaatatgtacattgttgttgtcatggagtttttaaatattgcttctaagaagaaaaacaagaccttgagtgaagatgattttaggaaattctttcaggtatggaaaaggtttgatcctgataggacccagtacatagactctagcaagctttcagattttgcagctgctcttgatcctcctcttttcatggcaaaaccaaacaagggccagctcattgctttggacctccccatggctgttggggacagaattcattgcctcgatatcttacttgcttttacaaagagagttatgggtcaagatgtgaggatggagaaagttgtttcagaaatagaatcagggtttttgttagccaacccttttaagatcacatgtgagccaattacgactactttgaaacgaaaacaagaggcagtttcagcaaccatcattcaacgtgcttataaaaattaccgcttgaggcgaaatgacaaaaatacatcagatattcatatgatagatggtgacagagatgttcatgctactaaagaaggtgcctattttgacaaagctaaggaaaagtcacctattcaaagccagatctaataccacttaccacctcttttcatatttcttcacatatctgaaaaatgttgaaagcctaagccaggaataaaagaaaagtagagataataatcagttctttacaaccgatggtaattaagcttgtattcacaagacttcatgccaaattcactttttagcattatatctaacaaatcaagagaatccttaatattgctgcagtgagtttaaagtgggttaaagtggccatttgacaatctcatatttgttttctctacatggcttatatgatgtgtgccttctagggaatgaagggaagtggtgatagagatcagcagcagcaggggctttcttttatattttatgtataatttaatgggctttaagtcaccactattaagacttacaaataagcaaatactttcctgatgtgggatggtgaaatgctaatggccattaaatcataaacttgcctagacaaaagccaattggaagaagggagagagcagttctttagaaagtgcctttgagatcaacctcagagattcttgggctgattaaaactgcatttgaaaaagattggttgaagctctgtgtttatttttgtatgttcttgttttcatttggaactgggaatgaataggatttcattgtgctcaagctcctggtttctcatctctggatagtttcacctaagctctggctcttaagcaggacagattcgtaaaacaagaagcataaaggagaggtatagccttttttttttttttttttttcattttcttctcatttacacctatttttttaaaaagtatacatttactaaaatgatgtaataaataacatgttaatagactcaagctttaccttatgaaattgatgtatttttaccagttatttctaatgtaacattgaatatataagatctgacaaatgtatgtttaaacatgaattagaagagttgagaactaccattatgtatagggattctcatagtgtcttggcccttaattggaaagttgtggcaactttaaagtactttttactgtatgttataattctttataacttagagagagacaatggtcactcaaactatgagaactatgaattaggagataaaagtttaaatttgttgttgttttataacagtatgtacaagttagttttcccttatatatttacgttttcaagttttttaatctcatcatatacatccatactctataaaatgttttatattcaaagaactgtaaaatcctaaacattagttttcactattgaaattgttttttaaagataggcataaatagttgtccttagacttattcatacaaatatagtcatttacttctatgtagtttgagattctgagagttattccaactttatgaagattgatttcaatgtgcctgctaagtcctaaaagattcagaaagaaaatttatatattattgatttaaatatcatcctttaaatatgttgtataacattcaatatagtttatgtatcagtgattgtattttattctgaatgcatgatctcaagccttaactactataatctttttctgcccctcagaaattgaataacctaaccaagatgcctttaggggatgccctaagtaaatgtaatttcagatttcagggttttttttttttcctctctaagtgttccttccctttcttctcctgctctccatcatgttatggagaccagtgaggaaccagtgttaacttggtgacaatgtgacagctggtgctttatctaagctccgttttctatttcttgggaatgctttattgtggaaactgcttcagatacttaaattgaatcataacttgcttctgtaaattgcgtaaagacaacaaactgattttagtttgaaaagtttatcttttacttgtaaaccttgtttgccagttaccttccgaaagctgtgtaaagagttatttttaacaaagtcttaacaatatatgttactttttagatactatagaaaataataaatataacctgtaaaccaca

SEQ ID NO: 134072 - DNA, 2996 bp, Artificial Sequence
  derived and/or modified sequence
ctccactggacatctgggtaggaggggtctctgggtcagtggctggagagtcgccccagtgagtcggtgtctaactggccatttagtggggcccatttactgcagagccacagctggtgaggacagacgccagcctaacagcagcttctgtacaactagagctcagaaaacccgagagatccgtggagaaagagaagcccaggaggaggaaagggctccaaggagccctgctcctgaagggtccctcaggcactggtggagacctgtcgcttcgtagcaagtcctccaccatgtgaatgccaacatggccaggtcattagagctgagggaaaactagtgcccaaagatatgaaaagagtgtggatcttctggagaagtgctgttgttcaacaggtacaaaattggaaatgttggcttcaccagaacctaagggccttgttcccttcactaaagagtcttttgaacttataaaacagcatattgctaaaacacataatgaagaccatgaagaagaagacttaaagccaactcctgatttggaagttggcaaaaagcttccatttatttatggaaacctttctcaaggaatggtgtcagagcccttggaagatgtggacccatattactacaagaaaaaaaatactttcatagtattaaataaaaatagaacaatcttcagattcaatgcggcttccatcttgtgtacattgtctcctttcaattgtattagaagaacaactatcaaggttttggtacatccctttttccaactgtttattctaattagtgtcctgattgattgcgtattcatgtccctgactaatttgccaaaatggagaccagtattagagaatactttgcttggaatttacacatttgaaatacttgtaaaactctttgcaagaggtgtctgggcaggatcattttccttcctcggtgatccatggaactggctcgatttcagcgtaactgtgtttgaggttattataagatactcacctctggacttcattccaacgcttcaaactgcaagaactttgagaattttaaaaattattcctttaaatcaaggtctgaaatcccttgtaggggtcctgatccactgcttgaagcagcttattggtgtcattatcctaactctgttttttctgagcatattttctctaattgggatggggctcttcatgggcaacttgaaacataaatgttttcgatggccccaagagaatgaaaatgaaaccctgcacaacagaactggaaacccatattatattcgagaaacagaaaacttttattatttggaaggagaaagatatgctctcctttgtggcaacaggacagatgctggtcagtgtcctgaaggatatgtgtgtgtaaaagctggcataaatcctgatcaaggcttcacaaattttgacagttttggctgggccttatttgccctatttcggttaatggctcaggattaccctgaagtactttatcaccagatactttatgcttctgggaaggtctacatgatattttttgtggtggtaagttttttgttttccttttatatggcaagtttgttcttaggcatacttgccatggcctatgaagaagaaaagcagagagttggtgaaatatctaagaagattgaaccaaaatttcaacagactggaaaagaacttcaagaaggaaatgaaacagatgaggccaagaccatacaaatagaaatgaagaaaaggtcaccaatttccacagacacatcattggatgtgttggaagatgctactctcagacataaggaagaacttgaaaaatccaagaagatatgcccattatactggtataagtttgctaaaactttcttgatctggaattgttctccctgttggttaaaattgaaagagtttgtccataggattataatggcaccatttactgatcttttccttatcatatgcataattttaaacgtatgttttctgaccttggagcattatccaatgagtaaacaaactaacactcttctcaacattggaaacctggttttcattggaattttcacagcagaaatgatttttaaaataattgcaatgcatccatatgggtatttccaagtaggttggaacatttttgatagcatgatagtgttccatggtttaatagaactttgtctagcaaatgttgcaggaatggctcttcttcgattattcaggatgttaagaattttcaagttgggaaagtattggccaacattccagattttgatgtggtctcttagtaactcatgggtggccctgaaagacttggtcctgttgttgttcacattcatcttcttttctgctgcattcggcatgaagctgtttggtaagaattatgaagaatttgtctgccacatagacaaagactgtcaactcccacgctggcacatgcatgactttttccactccttcctgaatgtgttccgaattctctgtggagagtgggtagagaccttgtgggactgtatggaggttgcaggccaatcctggtgtattcctttttacctgatggtcattttaattggaaatttactggtactttacctgtttctggcattggtgagctcatttagttcatgcaaggatgtaacagctgaagagaataatgaagcaaaaaatctccagcttgcagtggcaagaattaaaaaaggaataaactatgtgcttcttaaaatactatgcaaaacacaaaatgtcccaaaggacacaatggaccatgtaaatgaggtatatgttaaagaagatatttctgaccataccctttctgaattgagcaacacccaagattttctcaaagataaggaaaaaagcagtggcacagagaaaaacgctactgaaaatgagagccaatcacttatccccagtcctagtgtctcagaaactgtaccaattgcttcaggagaatctgatatagaaaatctggataataaggagattcagagtaagtctggtgatggaggcagcaaa

SEQ ID NO: 134073 - DNA, 1459 bp, Artificial Sequence
  derived and/or modified sequence
ctggagagtcgccccagtgagtcggtgtctaactggccatttagtggggcccatttactgcagagccacagctggtgaggacagacgccagcctaacagcagcttctgtacaactagagctcagaaaacccgagagatccgtggagaaagagaagcccaggaggaggaaagggctccaaggagccctgctcctgaagggtccctcaggcactggtggagacctgtcgcttcgtagcaagtacaaaattggaaatgttggcttcaccagaacctaagggccttgttcccttcactaaagagtcttttgaacttataaaacagcatattgctaaaacacataatgaagaccatgaagaagaagacttaaagccaactcctgatttggaagttggcaaaaagcttccatttatttatggaaacctttctcaaggaatggtgtcagagcccttggaagatgtggacccatattactacaagaaaaaaaatactttcatagtattaaataaaaatagaacaatcttcagattcaatgcggcttccatcttgtgtacattgtctcctttcaattgtattagaagaacaactatcaaggttttggtacatccctttttccaactgtttattctaattagtgtcctgattgattgcgtattcatgtccctgactaatttgccaaaatggagaccagtattagagaatactttgcttggaatttacacatttgaaatacttgtaaaactctttgcaagaggtgtctgggcaggatcattttccttcctcggtgatccatggaactggctcgatttcagcgtaactgtgtttgaggttattataagatactcacctctggacttcattccaacgcttcaaactgcaagaactttgagaattttaaaaattattcctttaaatcaaggtctgaaatcccttgtaggggtcctgatccactgcttgaagcagcttattggtgtcattatcctaactctgttttttctgagcatattttctctaattgggatggggctcttcatgggcaacttgaaacataaatgttttcgatggccccaagagaatgaaaatgaaaccctgcacaacagaactggaaacccatattatattcgagaaacagaaaacttttattatttggaaggagaaagatatgctctcctttgtggcaacaggacagatgctggtcagtgtcctgaaggatatgtgtgtgtaaaagctggcataaatcctgatcaaggcttcacaaattttgacagttttggctgggccttatttgccctatttcggttaatggctcaggattaccctgaagtactttatcaccagatactttatgcttctgggaaggtctacatgatattttttgtggtggtaagttttttgttttccttttatatggcaagtttgttcttaggcatacttgccatggcctatgaagaagaaaagcaga

SEQ ID NO: 134074 - DNA, 5049 bp, Artificial Sequence
  derived and/or modified sequence
atgctggccagccccgagcccaagggcctggtgcccttcaccaaggagagcttcgagctgatcaagcagcacatcgccaagacccacaacgaggaccacgaggaggaggacctgaagcccacccccgacctggaggtgggcaagaagctgcccttcatctacggcaacctgagccagggcatggtgagcgagcccctggaggacgtggacccctactactacaagaagaagaacaccttcatcgtgctgaacaagaacagaaccatcttcagattcaacgccgccagcatcctgtgcaccctgagccccttcaactgcatcagaagaaccaccatcaaggtgctggtgcaccccttcttccagctgttcatcctgatcagcgtgctgatcgactgcgtgttcatgagcctgaccaacctgcccaagtggagacccgtgctggagaacaccctgctgggcatctacaccttcgagatcctggtgaagctgttcgccagaggcgtgtgggccggcagcttcagcttcctgggcgacccctggaactggctggacttcagcgtgaccgtgttcgaggtgatcatcagatacagccccctggacttcatccccaccctgcagaccgccagaaccctgagaatcctgaagatcatccccctgaaccagggcctgaagagcctggtgggcgtgctgatccactgcctgaagcagctgatcggcgtgatcatcctgaccctgttcttcctgagcatcttcagcctgatcggcatgggcctgttcatgggcaacctgaagcacaagtgcttcagatggccccaggagaacgagaacgagaccctgcacaacagaaccggcaacccctactacatcagagagaccgagaacttctactacctggagggcgagagatacgccctgctgtgcggcaacagaaccgacgccggccagtgccccgagggctacgtgtgcgtgaaggccggcatcaaccccgaccagggcttcaccaacttcgacagcttcggctgggccctgttcgccctgttcagactgatggcccaggactaccccgaggtgctgtaccaccagatcctgtacgccagcggcaaggtgtacatgatcttcttcgtggtggtgagcttcctgttcagcttctacatggccagcctgttcctgggcatcctggccatggcctacgaggaggagaagcagagagtgggcgagatcagcaagaagatcgagcccaagttccagcagaccggcaaggagctgcaggagggcaacgagaccgacgaggccaagaccatccagatcgagatgaagaagagaagccccatcagcaccgacaccagcctggacgtgctggaggacgccaccctgagacacaaggaggagctggagaagagcaagaagatctgccccctgtactggtacaagttcgccaagaccttcctgatctggaactgcagcccctgctggctgaagctgaaggagttcgtgcacagaatcatcatggcccccttcaccgacctgttcctgatcatctgcatcatcctgaacgtgtgcttcctgaccctggagcactaccccatgagcaagcagaccaacaccctgctgaacatcggcaacctggtgttcatcggcatcttcaccgccgagatgatcttcaagatcatcgccatgcacccctacggctacttccaggtgggctggaacatcttcgacagcatgatcgtgttccacggcctgatcgagctgtgcctggccaacgtggccggcatggccctgctgagactgttcagaatgctgagaatcttcaagctgggcaagtactggcccaccttccagatcctgatgtggagcctgagcaacagctgggtggccctgaaggacctggtgctgctgctgttcaccttcatcttcttcagcgccgccttcggcatgaagctgttcggcaagaactacgaggagttcgtgtgccacatcgacaaggactgccagctgcccagatggcacatgcacgacttcttccacagcttcctgaacgtgttcagaatcctgtgcggcgagtgggtggagaccctgtgggactgcatggaggtggccggccagagctggtgcatccccttctacctgatggtgatcctgatcggcaacctgctggtgctgtacctgttcctggccctggtgagcagcttcagcagctgcaaggacgtgaccgccgaggagaacaacgaggccaagaacctgcagctggccgtggccagaatcaagaagggcatcaactacgtgctgctgaagatcctgtgcaagacccagaacgtgcccaaggacaccatggaccacgtgaacgaggtgtacgtgaaggaggacatcagcgaccacaccctgagcgagctgagcaacacccaggacttcctgaaggacaaggagaagagcagcggcaccgagaagaacgccaccgagaacgagagccagagcctgatccccagccccagcgtgagcgagaccgtgcccatcgccagcggcgagagcgacatcgagaacctggacaacaaggagatccagagcaagagcggcgacggcggcagcaaggagaagatcaagcagagcagcagcagcgagtgcagcaccgtggacatcgccatcagcgaggaggaggagatgttctacggcggcgagagaagcaagcacctgaagaacggctgcagaagaggcagcagcctgggccagatcagcggcgccagcaagaagggcaagatctggcagaacatcagaaagacctgctgcaagatcgtggagaacaactggttcaagtgcttcatcggcctggtgaccctgctgagcaccggcaccctggccttcgaggacatctacatggaccagagaaagaccatcaagatcctgctggagtacgccgacatgatcttcacctacatcttcatcctggagatgctgctgaagtggatggcctacggcttcaaggcctacttcagcaacggctggtacagactggacttcgtggtggtgatcgtgttctgcctgagcctgatcggcaagaccagagaggagctgaagcccctgatcagcatgaagttcctgagacccctgagagtgctgagccagttcgagagaatgaaggtggtggtgagagccctgatcaagaccaccctgcccaccctgaacgtgttcctggtgtgcctgatgatctggctgatcttcagcatcatgggcgtggacctgttcgccggcagattctacgagtgcatcgaccccaccagcggcgagagattccccagcagcgaggtgatgaacaagagcagatgcgagagcctgctgttcaacgagagcatgctgtgggagaacgccaagatgaacttcgacaacgtgggcaacggcttcctgagcctgctgcaggtggccaccttcaacggctggatcaccatcatgaacagcgccatcgacagcgtggccgtgaacatccagccccacttcgaggtgaacatctacatgtactgctacttcatcaacttcatcatcttcggcgtgttcctgcccctgagcatgctgatcaccgtgatcatcgacaacttcaacaagcacaagatcaagctgggcggcagcaacatcttcatcaccgtgaagcagagaaagcagtacagaagactgaagaagctgatgtacgaggacagccagagacccgtgcccagacccctgaacaagctgcagggcttcatcttcgacgtggtgaccagccaggccttcaacgtgatcgtgatggtgctgatctgcttccaggccatcgccatgatgatcgacaccgacgtgcagagcctgcagatgagcatcgccctgtactggatcaacagcatcttcgtgatgctgtacaccatggagtgcatcctgaagctgatcgccttcagatgcttctacttcaccatcgcctggaacatcttcgacttcatggtggtgatcttcagcatcaccggcctgtgcctgcccatgaccgtgggcagctacctggtgccccccagcctggtgcagctgatcctgctgagcagaatcatccacatgctgagactgggcaagggccccaaggtgttccacaacctgatgctgcccctgatgctgagcctgcccgccctgctgaacatcatcctgctgatcttcctggtgatgttcatctacgccgtgttcggcatgtacaacttcgcctacgtgaagaaggaggccggcatcaacgacgtgagcaacttcgagaccttcggcaacagcatgctgtgcctgttccaggtggccatcttcgccggctgggacggcatgctggacgccatcttcaacagcaagtggagcgactgcgaccccgacaagatcaaccccggcacccaggtgagaggcgactgcggcaaccccagcgtgggcatcttctacttcgtgagctacatcctgatcagctggctgatcatcgtgaacatgtacatcgtggtggtgatggagttcctgaacatcgccagcaagaagaagaacaagaccctgagcgaggacgacttcagaaagttcttccaggtgtggaagagattcgaccccgacagaacccagtacatcgacagcagcaagctgagcgacttcgccgccgccctggacccccccctgttcatggccaagcccaacaagggccagctgatcgccctggacctgcccatggccgtgggcgacagaatccactgcctggacatcctgctggccttcaccaagagagtgatgggccaggacgtgagaatggagaaggtggtgagcgagatcgagagcggcttcctgctggccaaccccttcaagatcacctgcgagcccatcaccaccaccctgaagagaaagcaggaggccgtgagcgccaccatcatccagagagcctacaagaactacagactgagaagaaacgacaagaacaccagcgacatccacatgatcgacggcgacagagacgtgcacgccaccaaggagggcgcctacttcgacaaggccaaggagaagagccccatccagagccagatctag

SEQ ID NO: 134075 - DNA, 2592 bp, Artificial Sequence
  derived and/or modified sequence
atgctggccagccccgagcccaagggcctggtgcccttcaccaaggagagcttcgagctgatcaagcagcacatcgccaagacccacaacgaggaccacgaggaggaggacctgaagcccacccccgacctggaggtgggcaagaagctgcccttcatctacggcaacctgagccagggcatggtgagcgagcccctggaggacgtggacccctactactacaagaagaagaacaccttcatcgtgctgaacaagaacagaaccatcttcagattcaacgccgccagcatcctgtgcaccctgagccccttcaactgcatcagaagaaccaccatcaaggtgctggtgcaccccttcttccagctgttcatcctgatcagcgtgctgatcgactgcgtgttcatgagcctgaccaacctgcccaagtggagacccgtgctggagaacaccctgctgggcatctacaccttcgagatcctggtgaagctgttcgccagaggcgtgtgggccggcagcttcagcttcctgggcgacccctggaactggctggacttcagcgtgaccgtgttcgaggtgatcatcagatacagccccctggacttcatccccaccctgcagaccgccagaaccctgagaatcctgaagatcatccccctgaaccagggcctgaagagcctggtgggcgtgctgatccactgcctgaagcagctgatcggcgtgatcatcctgaccctgttcttcctgagcatcttcagcctgatcggcatgggcctgttcatgggcaacctgaagcacaagtgcttcagatggccccaggagaacgagaacgagaccctgcacaacagaaccggcaacccctactacatcagagagaccgagaacttctactacctggagggcgagagatacgccctgctgtgcggcaacagaaccgacgccggccagtgccccgagggctacgtgtgcgtgaaggccggcatcaaccccgaccagggcttcaccaacttcgacagcttcggctgggccctgttcgccctgttcagactgatggcccaggactaccccgaggtgctgtaccaccagatcctgtacgccagcggcaaggtgtacatgatcttcttcgtggtggtgagcttcctgttcagcttctacatggccagcctgttcctgggcatcctggccatggcctacgaggaggagaagcagagagtgggcgagatcagcaagaagatcgagcccaagttccagcagaccggcaaggagctgcaggagggcaacgagaccgacgaggccaagaccatccagatcgagatgaagaagagaagccccatcagcaccgacaccagcctggacgtgctggaggacgccaccctgagacacaaggaggagctggagaagagcaagaagatctgccccctgtactggtacaagttcgccaagaccttcctgatctggaactgcagcccctgctggctgaagctgaaggagttcgtgcacagaatcatcatggcccccttcaccgacctgttcctgatcatctgcatcatcctgaacgtgtgcttcctgaccctggagcactaccccatgagcaagcagaccaacaccctgctgaacatcggcaacctggtgttcatcggcatcttcaccgccgagatgatcttcaagatcatcgccatgcacccctacggctacttccaggtgggctggaacatcttcgacagcatgatcgtgttccacggcctgatcgagctgtgcctggccaacgtggccggcatggccctgctgagactgttcagaatgctgagaatcttcaagctgggcaagtactggcccaccttccagatcctgatgtggagcctgagcaacagctgggtggccctgaaggacctggtgctgctgctgttcaccttcatcttcttcagcgccgccttcggcatgaagctgttcggcaagaactacgaggagttcgtgtgccacatcgacaaggactgccagctgcccagatggcacatgcacgacttcttccacagcttcctgaacgtgttcagaatcctgtgcggcgagtgggtggagaccctgtgggactgcatggaggtggccggccagagctggtgcatccccttctacctgatggtgatcctgatcggcaacctgctggtgctgtacctgttcctggccctggtgagcagcttcagcagctgcaaggacgtgaccgccgaggagaacaacgaggccaagaacctgcagctggccgtggccagaatcaagaagggcatcaactacgtgctgctgaagatcctgtgcaagacccagaacgtgcccaaggacaccatggaccacgtgaacgaggtgtacgtgaaggaggacatcagcgaccacaccctgagcgagctgagcaacacccaggacttcctgaaggacaaggagaagagcagcggcaccgagaagaacgccaccgagaacgagagccagagcctgatccccagccccagcgtgagcgagaccgtgcccatcgccagcggcgagagcgacatcgagaacctggacaacaaggagatccagagcaagagcggcgacggcggcagcaagtag

SEQ ID NO: 134076 - DNA, 1209 bp, Artificial Sequence
  derived and/or modified sequence
atgctggccagccccgagcccaagggcctggtgcccttcaccaaggagagcttcgagctgatcaagcagcacatcgccaagacccacaacgaggaccacgaggaggaggacctgaagcccacccccgacctggaggtgggcaagaagctgcccttcatctacggcaacctgagccagggcatggtgagcgagcccctggaggacgtggacccctactactacaagaagaagaacaccttcatcgtgctgaacaagaacagaaccatcttcagattcaacgccgccagcatcctgtgcaccctgagccccttcaactgcatcagaagaaccaccatcaaggtgctggtgcaccccttcttccagctgttcatcctgatcagcgtgctgatcgactgcgtgttcatgagcctgaccaacctgcccaagtggagacccgtgctggagaacaccctgctgggcatctacaccttcgagatcctggtgaagctgttcgccagaggcgtgtgggccggcagcttcagcttcctgggcgacccctggaactggctggacttcagcgtgaccgtgttcgaggtgatcatcagatacagccccctggacttcatccccaccctgcagaccgccagaaccctgagaatcctgaagatcatccccctgaaccagggcctgaagagcctggtgggcgtgctgatccactgcctgaagcagctgatcggcgtgatcatcctgaccctgttcttcctgagcatcttcagcctgatcggcatgggcctgttcatgggcaacctgaagcacaagtgcttcagatggccccaggagaacgagaacgagaccctgcacaacagaaccggcaacccctactacatcagagagaccgagaacttctactacctggagggcgagagatacgccctgctgtgcggcaacagaaccgacgccggccagtgccccgagggctacgtgtgcgtgaaggccggcatcaaccccgaccagggcttcaccaacttcgacagcttcggctgggccctgttcgccctgttcagactgatggcccaggactaccccgaggtgctgtaccaccagatcctgtacgccagcggcaaggtgtacatgatcttcttcgtggtggtgagcttcctgttcagcttctacatggccagcctgttcctgggcatcctggccatggcctacgaggaggagaagcagtag

SEQ ID NO: 134077 - protein, 1977 aa, Artificial Sequence
  derived and/or modified sequence
MAMLPPPGPQSFVHFTKQSLALIEQRIAERKSKEPKEEKKDDDEEAPKPSSDLEAGKQLPFIYGDIPPGMVSEPLEDLDPYYADKKTFIVLNKGKTIFRFNATPALYMLSPFSPLRRISIKILVHSLFSMLIMCTILTNCIFMTMNNPPDWTKNVEYTFTGIYTFESLVKILARGFCVGEFTFLRDPWNWLDFVVIVFAYLTEFVNLGNVSALRTFRVLRALKTISVIPGLKTIVGALIQSVKKLSDVMILTVFCLSVFALIGLQLFMGNLKHKCFRNSLENNETLESIMNTLESEEDFRKYFYYLEGSKDALLCGFSTDSGQCPEGYTCVKIGRNPDYGYTSFDTFSWAFLALFRLMTQDYWENLYQQTLRAAGKTYMIFFVVVIFLGSFYLINLILAVVAMAYEEQNQANIEEAKQKELEFQQMLDRLKKEQEEAEAIAAAAAEYTSIRRSRIMGLSESSSETSKLSSKSAKERRNRRKKKNQKKLSSGEEKGDAEKLSKSESEDSIRRKSFHLGVEGHRRAHEKRLSTPNQSPLSIRGSLFSARRSSRTSLFSFKGRGRDIGSETEFADDEHSIFGDNESRRGSLFVPHRPQERRSSNISQASRSPPMLPVNGKMHSAVDCNGVVSLVDGRSALMLPNGQLLPEGTTNQIHKKRRCSSYLLSEDMLNDPNLRQRAMSRASILTNTVEELEESRQKCPPWWYRFAHKFLIWNCSPYWIKFKKCIYFIVMDPFVDLAITICIVLNTLFMAMEHHPMTEEFKNVLAIGNLVFTGIFAAEMVLKLIAMDPYEYFQVGWNIFDSLIVTLSLVELFLADVEGLSVLRSFRLLRVFKLAKSWPTLNMLIKIIGNSVGALGNLTLVLAIIVFIFAVVGMQLFGKSYKECVCKINDDCTLPRWHMNDFFHSFLIVFRVLCGEWIETMWDCMEVAGQAMCLIVYMMVMVIGNLVVLNLFLALLLSSFSSDNLTAIEEDPDANNLQIAVTRIKKGINYVKQTLREFILKAFSKKPKISREIRQAEDLNTKKENYISNHTLAEMSKGHNFLKEKDKISGFGSSVDKHLMEDSDGQSFIHNPSLTVTVPIAPGESDLENMNAEELSSDSDSEYSKVRLNRSSSSECSTVDNPLPGEGEEAEAEPMNSDEPEACFTDGCVWRFSCCQVNIESGKGKIWWNIRKTCYKIVEHSWFESFIVLMILLSSGALAFEDIYIERKKTIKIILEYADKIFTYIFILEMLLKWIAYGYKTYFTNAWCWLDFLIVDVSLVTLVANTLGYSDLGPIKSLRTLRALRPLRALSRFEGMRVVVNALIGAIPSIMNVLLVCLIFWLIFSIMGVNLFAGKFYECINTTDGSRFPASQVPNRSECFALMNVSQNVRWKNLKVNFDNVGLGYLSLLQVATFKGWTIIMYAAVDSVNVDKQPKYEYSLYMYIYFVVFIIFGSFFTLNLFIGVIIDNFNQQKKKLGGQDIFMTEEQKKYYNAMKKLGSKKPQKPIPRPGNKIQGCIFDLVTNQAFDISIMVLICLNMVTMMVEKEGQSQHMTEVLYWINVVFIILFTGECVLKLISLRHYYFTVGWNIFDFVVVIISIVGMFLADLIETYFVSPTLFRVIRLARIGRILRLVKGAKGIRTLLFALMMSLPALFNIGLLLFLVMFIYAIFGMSNFAYVKKEDGINDMFNFETFGNSMICLFQITTSAGWDGLLAPILNSKPPDCDPKKVHPGSSVEGDCGNPSVGIFYFVSYIIISFLVVVNMYIAVILENFSVATEESTEPLSEDDFEMFYEVWEKFDPDATQFIEFSKLSDFAAALDPPLLIAKPNKVQLIAMDLPMVSGDRIHCLDILFAFTKRVLGESGEMDSLRSQMEERFMSANPSKVSYEPITTTLKRKQEDVSATVIQRAYRRYRLRQNVKNISSIYIKDGDRDDDLLNKKDMAFDNVNENSSPEKTDATSSTTSPPSYDSVTKPDKEKYEQDRTEKEDKGKDSKESKK

SEQ ID NO: 134078 - protein, 440 aa, Artificial Sequence
  derived and/or modified sequence
MRPHLSPPLQQLLLPVLLACAAHSTGALPRLCDVLQVLWEEQDQCLQELSREQTGDLGTEQPVPGCEGMWDNISCWPSSVPGRMVEVECPRFLRMLTSRNGSLFRNCTQDGWSETFPRPNLACGVNVNDSSNEKRHSYLLKLKVMYTVGYSSSLVMLLVALGILCAFRRLHCTRNYIHMHLFVSFILRALSNFIKDAVLFSSDDVTYCDAHRAGCKLVMVLFQYCIMANYSWLLVEGLYLHTLLAISFFSERKYLQGFVAFGWGSPAIFVALWAIARHFLEDVGCWDINANASIWWIIRGPVILSILINFILFINILRILMRKLRTQETRGNEVSHYKRLARSTLLLIPLFGIHYIVFAFSPEDAMEIQLFFELALGSFQGLVVAVLYCFLNGEVQLEVQKKWQQWHLREFPLHPVASFSNSTKASHLEQSQGTCRTSII

SEQ ID NO: 134079 - DNA, 1323 bp, Artificial Sequence
  derived and/or modified sequence
atgcgtccacacctttcacccccgctgcaacagctgctacttccagtcctgttggcttgtgcggctcactccaccggagcccttccccgcctctgcgacgtgctacaggtgctctgggaggagcaagatcagtgtctgcaagaattatccagggagcagacaggagatcttgggaccgaacaaccggtgccaggatgcgaggggatgtgggataatattagttgctggccaagttcagtcccaggcaggatggtcgaggtggagtgtccgaggtttttgaggatgctcaccagtcggaacggaagtcttttccggaactgcacccaggatggttggtccgagactttccctagacctaaccttgcttgcggcgtcaacgtaaacgattccagtaatgaaaaaaggcattcctatcttctcaagctgaaagtcatgtacacagtggggtattcttcaagtttggtcatgctgctggtcgctttgggcatcctgtgcgctttccggaggctccactgcacacggaattacatccacatgcatctgttcgtgtccttcatactgagagccctgtctaacttcataaaggatgcggtgctgttcagtagtgatgacgtcacttattgtgatgcacaccgcgccggatgtaagcttgtaatggttctgtttcaatactgcataatggccaattactcctggctcctcgtagaaggtttgtatctgcacacgctcctggctatttccttcttcagcgaaagaaagtacctccaggggtttgtggcattcggttgggggtcacctgcgattttcgtcgctctgtgggcaatagcaaggcactttttagaagatgttggctgttgggatattaacgctaatgccagtatctggtggattattagaggccccgtgatcctttctatcctaattaacttcatcctgttcatcaacattttgcggatattgatgcggaagctgcgcacacaagaaactcgtggcaacgaagtctctcactacaagcgcctagctcgttcgactctcctccttattcctctgttcggaatccattatatcgtgttcgcattcagccctgaggatgctatggaaattcaactgttcttcgaactagctctcggcagctttcaagggctggtggtagctgtattgtactgctttcttaatggcgaggtgcagctggaggttcaaaaaaagtggcagcagtggcacttgcgagagtttcctttacacccagtcgcatctttctctaattccaccaaggcatctcatctggagcagtcccagggaacatgccggacaagtatcatctag

SEQ ID NO: 134080 - DNA, 1323 bp, Artificial Sequence
  derived and/or modified sequence
atgaggccccacctgagcccccccctgcagcagctgctgctgcctgtgctgctggcctgtgccgcccacagcactggagccctgccccggctgtgtgatgtgctgcaggtgctgtgggaggagcaggaccagtgcctgcaggagctgagccgggagcagacaggagacctgggcacagagcagcctgtgcccggctgtgagggcatgtgggacaacatcagctgctggcccagctctgtgcccggccgcatggtggaggtggagtgcccccgcttcctgaggatgctgaccagcagaaatggcagcctcttcaggaactgcacccaggacggctggagcgagaccttcccccggcccaacctggcctgtggggtgaatgtgaatgacagcagcaatgagaagaggcacagctacctgctgaagctgaaggtgatgtacacagtgggctacagcagcagcctggtgatgctgctggtggccctgggcatcctgtgtgccttccggcggctgcactgcaccaggaactacatccacatgcacctgtttgtgtccttcatcctgcgggccctgagcaacttcatcaaggatgctgtgctcttcagcagtgatgatgtgacctactgtgatgcccacagagctggctgcaagctggtgatggtgctcttccagtactgcatcatggccaactacagctggctgctggtggagggcctgtacctgcacaccctgctggccatctccttcttcagcgagaggaagtacctgcagggctttgtggccttcggctggggcagccctgccatctttgtggccctgtgggccatcgcccggcacttcctggaggatgtgggctgctgggacatcaatgccaatgccagcatctggtggatcatccggggccctgtgatcctgagcatcctgatcaacttcatcctcttcatcaacatcctgcgcatcctgatgaggaagctgcggacccaggagaccagaggaaatgaggtgagccactacaagaggctggcccggagcaccctgctgctgatccccctgtttggcatccactacatcgtgtttgccttctccccagaagatgccatggagatccagctgttctttgagctggccctgggcagcttccagggcctggtggtggccgtgctgtactgcttcctgaatggagaggtgcagctggaggtgcagaagaagtggcagcagtggcacctgcgggagttccccctgcaccctgtggccagcttcagcaacagcaccaaggccagccacctggagcagagccagggcacctgcaggaccagcatcatctag

SEQ ID NO: 134081 - DNA, 1323 bp, Artificial Sequence
  derived and/or modified sequence
atgcggccccacctgagcccccccctgcagcagctgctgctgcccgttttattggcttgcgcagctcattctaccggggccttgcctaggttatgtgacgttcttcaggtcctgtgggaagagcaagaccagtgcctgcaggagctgagtagagagcagacgggcgatctgggcaccgaacagcccgtcccagggtgcgaagggatgtgggataacatctcctgttggccatcaagcgtgccgggccgaatggttgaagtggagtgcccacgttttctccggatgctgacatctaggaatggatcacttttccgaaactgtacacaggacggatggtccgagacatttccaaggcctaatctagcctgtggagtcaacgtaaacgactctagtaacgaaaagcgacactcataccttctgaaactgaaggtgatgtacaccgtgggatactcttcatccctagtcatgctgctggtagcgctggggatcctgtgtgcctttagaagattacactgtacacgcaactacatacacatgcatctgttcgtctccttcatcctgcgggcactctccaacttcatcaaagatgctgtgttattctcgagcgacgatgttacttactgcgatgcccaccgggcgggatgtaagctggtgatggtcctttttcagtactgtatcatggccaactactcatggcttttggtggaaggactgtatctgcatacactgttagccatttccttcttctctgaacggaagtacctgcaaggctttgtggccttcggctggggcagccccgccatcttcgttgctctttgggcaatcgccagacactttctggaggacgtgggatgctgggatattaacgctaacgcctcaatttggtggatcatccgcgggccagtgattctcagcattctaattaacttcattctctttattaatattctccgcatcctcatgcggaaactgcgcacacaggagacccggggcaacgaggtgtcccactacaagcgcctggcacgatccacgctgctactgattccactgtttggcatacattacatagtgttcgcattttccccagaagacgcaatggagatccagctgtttttcgaactcgcccttggatcttttcagggtctggtggtggctgtgctttattgtttcctgaatggggaagtgcagctcgaagtgcagaaaaaatggcagcagtggcatctgcgggaatttcccctccaccccgtggcctctttctctaactctacaaaggcaagccatttagaacagtcacagggaacttgcagaacgtcaatcatttag

SEQ ID NO: 134082 - DNA, 1323 bp, Artificial Sequence
  derived and/or modified sequence
atgcgtccacatctatcccctccgttacagcagctgctcctcccagtactcttagcctgcgctgcacattctacgggagcattacccaggctttgcgatgtcttacaggttctatgggaggagcaggaccagtgcctgcaggagctttctcgagaacagaccggagatctgggaactgaacagcccgtgccagggtgcgaaggcatgtgggataacataagctgttggccatctagcgtaccaggcagaatggttgaagttgagtgccccaggtttctcagaatgctcacatcccgaaacgggagtctctttcgaaattgcacacaggacggctggtcagagactttccctcgaccgaacctggcatgcggcgtcaacgtcaacgatagctccaacgagaagcgacacagctacttgctcaagctgaaagtcatgtatactgtcggatacagcagctccctggtaatgctgttggtggccttggggatcttatgtgcttttcggcgtcttcattgcactcgtaattacattcacatgcacctgtttgtgtcttttatcctacgggcactttctaactttattaaagacgccgtactcttttcttctgacgacgtgacatattgcgatgcacacagggcaggctgtaaactggtaatggtccttttccagtactgcatcatggcaaattactcttggctgcttgtggagggcctctacctacacactctgctcgcgatctcattcttctccgagcgcaaatacctgcaggggtttgtggccttcggctggggcagtcccgcaattttcgtcgcactgtgggcaattgccagacactttctggaggatgtggggtgttgggacattaatgcaaatgctagtatctggtggattatccgcggacccgtgatcctgtccatcctgattaactttatcctctttatcaacatactccgaatattgatgcggaaactccgaacccaggaaactagagggaacgaggtgagtcactataagagactggctaggtcgaccttgcttctgataccactgttcggcattcactacatcgtatttgctttttcgcctgaagatgctatggaaattcaactgttcttcgagctggccctggggagctttcagggattggtggttgctgtcctttactgcttcctcaatggcgaggtgcagctcgaggttcaaaagaaatggcagcagtggcacctgcgtgaatttcctttgcacccagttgcgagcttctctaattcgaccaaggcgagtcatttggaacagtcacagggaacgtgtcgaactagcatcatctag

SEQ ID NO: 134083 - DNA, 1323 bp, Artificial Sequence
  derived and/or modified sequence
atgcgcccccacttatcccctcctttgcaacagcttctgctgcccgtgcttctggcctgtgcggcccattccactggtgcattaccaagactgtgcgacgtgttgcaggttctatgggaagaacaagatcagtgcctacaggagctctcccgcgagcagaccggggacctcggcactgaacagcctgtcccaggttgtgagggtatgtgggataatattagttgttggccttccagtgtgcccggccggatggtcgaagtggaatgcccaagatttttgcgtatgctgaccagccgcaacggctccctgtttagaaattgtacacaggacggatggagcgaaaccttccctcggcccaacctagcgtgcggagtcaatgtgaatgactcctccaacgagaagagacactcatacctgctgaagttaaaggtaatgtacacagtcggatattccagcagcctggtgatgctcctggttgccctgggcatcctctgtgctttccgacggctccattgcacccgcaattatattcatatgcatttgtttgtaagttttattctgcgagccctcagcaactttatcaaggacgccgtgttatttagttccgatgacgtgacctactgtgacgcccatagagctggatgtaaacttgtgatggttctattccagtactgcatcatggctaattatagctggttattagtggaaggcctttacttgcatacacttttagctatttccttctttagcgagcgaaagtacctccagggattcgttgcctttggttgggggtctccagccatctttgtggctctctgggccatcgcaagacactttctcgaagatgtcggttgttgggacataaatgccaatgcaagcatctggtggattatacgtggccctgtaattctctccatactgattaactttattctgtttataaacatcctgagaattctgatgcgcaaactaagaacccaggaaacccgaggcaatgaagtcagtcattacaaacggctcgcacggtctacattactccttattccacttttcggtattcactacattgtgtttgcgttttccccagaagacgccatggagattcagctttttttcgaactcgccctgggttctttccagggcctcgtggtggcagtgctatactgttttttaaatggtgaggtgcagctggaagtacaaaagaaatggcagcagtggcacctccgggagtttcccctgcaccccgtggcttccttctccaacagcaccaaggccagccatttggagcagtctcaaggtacctgccgaaccagcattatctag

SEQ ID NO: 134084 - DNA, 1323 bp, Artificial Sequence
  derived and/or modified sequence
atgcgccctcatctctccccaccgttgcagcagctcctactacctgtgctgctggcgtgcgctgcacactccacaggcgctctaccccgcctatgcgatgtcctacaggtgctctgggaagaacaagatcagtgcctgcaagagctttctcgggaacaaacaggcgatctcggtactgaacaacccgtgcctggatgtgaggggatgtgggacaatatcagctgctggcccagctcagtgcccggaagaatggtggaagtggaatgcccccgattcttgagaatgctgacctctcgtaatggctcgctttttagaaactgcacccaagacggctggtcggaaacattccctcgtccgaatttggcatgcggggtcaacgttaacgactcaagcaatgaaaaacgccactcttacctgctcaagttgaaggtgatgtataccgtaggctattcctcatccctggttatgcttctggtggcactcggcatactgtgcgcttttagacgactgcactgtacccgtaactacatccacatgcatctgtttgtgagttttatacttcgcgctctgtccaattttatcaaggacgccgtcctattttctagtgacgatgtgacctactgcgatgcccaccgcgccgggtgcaaacttgtgatggtactctttcagtattgtataatggcaaactattcatggcttctcgtggaaggactatacctccatacattactcgctattagcttttttagtgagcggaaatatctgcagggcttcgttgcatttggatggggtagcccggctatattcgtagctctttgggcgattgcccgacattttctggaagacgtcggctgctgggatatcaacgccaacgcttctatctggtggattattcgtggcccagttatactatccattctgatcaatttcatactgtttataaatatcctccggatcctcatgagaaaattgcggactcaggaaacaagaggaaacgaggtgtcccattataagcgattagctagatcaacattactcctgattccattatttggaattcattatatcgtatttgcattcagccctgaggacgccatggagattcagctgtttttcgaactcgcattaggcagctttcaaggccttgtggtagcggtcttgtattgcttcttaaatggagaggtccaattggaagtgcaaaaaaaatggcagcagtggcatctacgggaatttccactccatcctgtcgcttcattcagcaactccacaaaagcttcacatttggaacaatcacagggaacatgtagaactagcattatatag

SEQ ID NO: 134085 - DNA, 1865 bp, Artificial Sequence
  derived and/or modified sequence
gaccccgcgccagtccctgccgggtggaggaggcgcgccggcaaagccgcgtcctgatcaatggggcgggcggcttagcgcgcgcggccacctggtccgaggaggagcagtcccggggcccgccgcaggtcgggtggctcagccatggctcctcggggcgcagcggccggccggagcccgggaccctgcgcggggcgctgagctcccgagcgggcagagggcacgggcaggcggacgtcggggcgccctcggggaacgtgcgggcaccatgcgtccccacctgtcgccgccgctgcagcagctactactgccggtgctgctcgcctgcgccgcgcactcgactggagcccttccccgactatgtgacgtgctacaagtgctgtgggaagagcaagaccagtgcctgcaggaactctccagagagcagacaggagacctgggcacggagcagccagtgccaggttgtgaggggatgtgggacaacataagctgctggccctcttctgtgccgggccggatggtggaggtggaatgcccgagattcctccggatgctcaccagcagaaatggttccttgttccgaaactgcacacaggatggctggtcagaaaccttccccaggcctaatctggcctgtggcgttaatgtgaacgactcttccaacgagaagcggcactcctacctgctgaagctgaaagtcatgtacaccgtgggctacagctcctccctggtcatgctcctggtcgcccttggcatcctctgtgctttccggaggctccactgcactcgcaactacatccacatgcacctgttcgtgtccttcatccttcgtgccctgtccaacttcatcaaggacgccgtgctcttctcctcagatgatgtcacctactgcgatgcccacagggcgggctgcaagctggtcatggtgctgttccagtactgcatcatggccaactactcctggctgctggtggaaggcctctaccttcacacactcctcgccatctccttcttctctgaaagaaagtacctccagggatttgtggcattcggatggggttctccagccatttttgttgctttgtgggctattgccagacactttctggaagatgttgggtgctgggacatcaatgccaacgcatccatctggtggatcattcgtggtcctgtgatcctctccatcctgattaatttcatccttttcataaacattctaagaatcctgatgagaaaacttagaacccaagaaacaagaggaaatgaagtcagccattataagcgcctggccaggtccactctcctgctgatccccctctttggcatccactacatcgtcttcgccttctccccagaggacgctatggagatccagctgttttttgaactagcccttggctcattccagggactggtggtggccgtcctctactgcttcctcaatggggaggtgcagctggaggttcagaagaagtggcagcaatggcacctccgtgagttcccactgcaccccgtggcctccttcagcaacagcaccaaggccagccacttggagcagagccagggcacctgcaggaccagcatcatctgagaggctggagcagggtcacccacggacagagaccaagagaggtcctgcgaaggctgggcactgctgtgggacagccagtcttcccagcagacaccctgtgtcctccttcagctgaagatgcccctccccaggccttggactcttccgaagggatgtgaggcactgtggggcaggacaagggcctgggatttggttcgtttgctcttctgggaagagaagttcaggggtcccagaaagggacagggaaataaatggtgcctgggatgagattcaa

SEQ ID NO: 134086 - DNA, 1323 bp, Artificial Sequence
  derived and/or modified sequence
atgagaccccacctgagcccccccctgcagcagctgctgctgcccgtgctgctggcctgcgccgcccacagcaccggcgccctgcccagactgtgcgacgtgctgcaggtgctgtgggaggagcaggaccagtgcctgcaggagctgagcagagagcagaccggcgacctgggcaccgagcagcccgtgcccggctgcgagggcatgtgggacaacatcagctgctggcccagcagcgtgcccggcagaatggtggaggtggagtgccccagattcctgagaatgctgaccagcagaaacggcagcctgttcagaaactgcacccaggacggctggagcgagaccttccccagacccaacctggcctgcggcgtgaacgtgaacgacagcagcaacgagaagagacacagctacctgctgaagctgaaggtgatgtacaccgtgggctacagcagcagcctggtgatgctgctggtggccctgggcatcctgtgcgccttcagaagactgcactgcaccagaaactacatccacatgcacctgttcgtgagcttcatcctgagagccctgagcaacttcatcaaggacgccgtgctgttcagcagcgacgacgtgacctactgcgacgcccacagagccggctgcaagctggtgatggtgctgttccagtactgcatcatggccaactacagctggctgctggtggagggcctgtacctgcacaccctgctggccatcagcttcttcagcgagagaaagtacctgcagggcttcgtggccttcggctggggcagccccgccatcttcgtggccctgtgggccatcgccagacacttcctggaggacgtgggctgctgggacatcaacgccaacgccagcatctggtggatcatcagaggccccgtgatcctgagcatcctgatcaacttcatcctgttcatcaacatcctgagaatcctgatgagaaagctgagaacccaggagaccagaggcaacgaggtgagccactacaagagactggccagaagcaccctgctgctgatccccctgttcggcatccactacatcgtgttcgccttcagccccgaggacgccatggagatccagctgttcttcgagctggccctgggcagcttccagggcctggtggtggccgtgctgtactgcttcctgaacggcgaggtgcagctggaggtgcagaagaagtggcagcagtggcacctgagagagttccccctgcaccccgtggccagcttcagcaacagcaccaaggccagccacctggagcagagccagggcacctgcagaaccagcatcatctag

SEQ ID NO: 134087 - protein, 96 aa, Artificial Sequence
  derived and/or modified sequence
MQIITTALVCLLLAGMWPEDVDSKSMQVPFSRCCFSFAEQEIPLRAILCYRNTSSICSNEGLIFKLKRGKEACALDTVGWVQRHRKMLRHCPSKRK

SEQ ID NO: 134088 - DNA, 291 bp, Artificial Sequence
  derived and/or modified sequence
atgcagattatcaccacagcacttgtgtgtctgctactcgcaggcatgtggccggaagacgtggattccaagtccatgcaggtgccatttagtcggtgctgcttcagcttcgcagaacaggaaatccccctaagggccattctttgctacaggaatacatcatctatttgctctaatgaagggctcattttcaagttgaagagaggcaaggaagcttgcgcccttgacacggtgggatgggtgcagcggcaccgtaagatgcttcgacattgccctagcaagaggaagtag

SEQ ID NO: 134089 - DNA, 291 bp, Artificial Sequence
  derived and/or modified sequence
atgcagatcatcaccacagccctggtgtgcctgctgctggccggcatgtggccagaagatgtggacagcaagtccatgcaggtgcccttcagccgctgctgcttctcctttgctgagcaggagatccccctgcgggccatcctgtgctacagaaacaccagcagcatctgcagcaatgaaggcctcatcttcaagctgaagaggggcaaggaggcctgtgccctggacacagtgggctgggtgcagaggcacaggaagatgctgcggcactgccccagcaagaggaagtag

SEQ ID NO: 134090 - DNA, 291 bp, Artificial Sequence
  derived and/or modified sequence
atgcagatcatcaccaccgccctggtgtgcctgctgctggccggcatgtggcccgaagacgtagactctaaaagtatgcaggtcccctttagccgctgctgtttctcttttgccgaacaggaaatccctctgagggccatcctgtgctaccggaacactagtagcatatgtagcaacgagggactgatattcaagctgaagcgaggtaaggaggcgtgcgccctagataccgtaggctgggtgcagcgccatcgcaaaatgctcaggcactgcccttccaaacggaaatag

SEQ ID NO: 134091 - DNA, 291 bp, Artificial Sequence
  derived and/or modified sequence
atgcagatcatcaccactgctctcgtctgccttttgttggcaggaatgtggcctgaagacgttgatagtaaaagtatgcaggtaccattcagtcggtgctgttttagctttgccgagcaggagatccctctcagggcgattctctgctatagaaatacatcttctatctgctccaacgaggggctcatatttaagctcaagagagggaaagaagcttgcgcactcgacacagtgggatgggtacaacgccatcggaagatgctccgacattgcccaagcaagcgcaaatag

SEQ ID NO: 134092 - DNA, 520 bp, Artificial Sequence
  derived and/or modified sequence
accaggctcatcaaagctgctccaggaaggcccaagccagaccagaagacatgcagatcatcaccacagccctggtgtgcttgctgctagctgggatgtggccggaagatgtggacagcaagagcatgcaggtacccttctccagatgttgcttctcatttgcggagcaagagattcccctgagggcaatcctgtgttacagaaataccagctccatctgctccaatgagggcttaatattcaagctgaagagaggcaaagaggcctgcgccttggacacagttggatgggttcagaggcacagaaaaatgctgaggcactgcccgtcaaaaagaaaatgagcagatttctttccattgtgggctctggaaaccacatggcttcacctgtccccgaaactaccagccctacaccattccttctgccctgcttttgctaggtcacagaggatctgcttggtcttgataagctatgttgttgcactttaaacatttaaattatacaatcatcaacccccaac

SEQ ID NO: 134093 - DNA, 291 bp, Artificial Sequence
  derived and/or modified sequence
atgcagatcatcaccaccgccctggtgtgcctgctgctggccggcatgtggcccgaggacgtggacagcaagagcatgcaggtgcccttcagcagatgctgcttcagcttcgccgagcaggagatccccctgagagccatcctgtgctacagaaacaccagcagcatctgcagcaacgagggcctgatcttcaagctgaagagaggcaaggaggcctgcgccctggacaccgtgggctgggtgcagagacacagaaagatgctgagacactgccccagcaagagaaagtag

SEQ ID NO: 134094 - protein, 99 aa, Artificial Sequence
  derived and/or modified sequence
MKVSAALLCLLLIAATFIPQGLAQPDAINAPVTCCYNFTNRKISVQRLASYRRITSSKCPKEAVIFKTIVAKEICADPKQKWVQDSMDHLDKQTQTPKT

SEQ ID NO: 134095 - DNA, 732 bp, Artificial Sequence
  derived and/or modified sequence
agactaacccagaaacatccaattctcaaactgaagctcgcactctcgcctccagcatgaaagtctctgccgcccttctgtgcctgctgctcatagcagccaccttcattccccaagggctcgctcagccagatgcaatcaatgccccagtcacctgctgttataacttcaccaataggaagatctcagtgcagaggctcgcgagctatagaagaatcaccagcagcaagtgtcccaaagaagctgtgatcttcaagaccattgtggccaaggagatctgtgctgaccccaagcagaagtgggttcaggattccatggaccacctggacaagcaaacccaaactccgaagacttgaacactcactccacaacccaagaatctgcagctaacttattttcccctagctttccccagacaccctgttttattttattataatgaattttgtttgttgatgtgaaacattatgccttaagtaatgttaattcttatttaagttattgatgttttaagtttatctttcatggtactagtgttttttagatacagagacttggggaaattgcttttcctcttgaaccacagttctacccctgggatgttttgagggtctttgcaagaatcattaatacaaagaattttttttaacattccaatgcattgctaaaatattattgtggaaatgaatattttgtaactattacaccaaataaatatatttttgtacaaaa

SEQ ID NO: 134096 - DNA, 300 bp, Artificial Sequence
  derived and/or modified sequence
atgaaagtgtcggcggcactcctatgtctcctgctaatcgctgccaccttcatcccccaaggtctcgctcaaccagatgccattaacgcccctgttacctgttgctacaatttcacaaaccggaaaatcagcgttcagaggctcgcttcttacagacgcatcacatcttccaaatgccccaaggaagcagttatctttaaaacgatcgttgccaaagaaatctgtgcagatccgaagcagaaatgggtgcaggatagcatggaccatcttgacaaacagactcagacacccaagacatag

SEQ ID NO: 134097 - DNA, 300 bp, Artificial Sequence
  derived and/or modified sequence
atgaaggtgtctgctgccctgctgtgcctgctgctgattgctgccaccttcatcccccagggcctggcccagccagatgccatcaatgcccctgtgacctgctgctacaacttcaccaacaggaagatctctgtgcagaggctggccagctaccgccgcatcaccagcagcaagtgccccaaggaggccgtcatcttcaagaccatcgtggccaaggagatctgtgccgaccccaagcagaagtgggtgcaggacagcatggaccacctggacaagcagacccagacccccaagacctag

SEQ ID NO: 134098 - DNA, 300 bp, Artificial Sequence
  derived and/or modified sequence
atgaaggtgagcgccgccctgctgtgcctgctgctgatcgccgccaccttcatcccgcagggacttgcccagccggacgccataaatgcaccagtcacctgttgctacaacttcaccaaccgtaagatcagcgtgcagagattggctagctaccgcagaatcacttcaagtaaatgcccaaaggaagctgtgatttttaaaactatcgttgcgaaagagatctgcgctgacccaaaacaaaagtgggttcaggacagtatggaccatctagataagcagacccagactcccaagacctag

SEQ ID NO: 134099 - DNA, 300 bp, Artificial Sequence
  derived and/or modified sequence
atgaaagtgagtgcggcactgctgtgcctgctcctgatcgctgctacatttattccccagggtctcgcacaacccgacgccattaacgctcccgtgacatgctgttataattttaccaatcgcaagatcagcgtccagagactcgcaagttataggaggattacaagttctaaatgccctaaggaggccgtgatttttaagaccatcgtggccaaggaaatctgtgccgacccaaaacaaaaatgggtgcaagacagcatggaccacctggacaaacagacacagacacccaagacatag

SEQ ID NO: 134100 - DNA, 300 bp, Artificial Sequence
  derived and/or modified sequence
atgaaggtgagcgccgccctgctgtgcctgctgctgatcgccgccaccttcatcccccagggcctggcccagcccgacgccatcaacgcccccgtgacctgctgctacaacttcaccaacagaaagatcagcgtgcagagactggccagctacagaagaatcaccagcagcaagtgccccaaggaggccgtgatcttcaagaccatcgtggccaaggagatctgcgccgaccccaagcagaagtgggtgcaggacagcatggaccacctggacaagcagacccagacccccaagacctag

SEQ ID NO: 134101 - protein, 92 aa, Artificial Sequence
  derived and/or modified sequence
MQVSTAALAVLLCTMALCNQFSASLAADTPTACCFSYTSRQIPQNFIADYFETSSQCSKPGVIFLTKRSRQVCADPSEEWVQKYVSDLELSA

SEQ ID NO: 134102 - DNA, 778 bp, Artificial Sequence
  derived and/or modified sequence
aaggacacgggcagcagacagtggtcagtcctttcttggctctgctgacactcgagcccacattccgtcacctgctcagaatcatgcaggtctccactgctgcccttgctgtcctcctctgcaccatggctctctgcaaccagttctctgcatcacttgctgctgacacgccgaccgcctgctgcttcagctacacctcccggcagattccacagaatttcatagctgactactttgagacgagcagccagtgctccaagcccggtgtcatcttcctaaccaagcgaagccggcaggtctgtgctgaccccagtgaggagtgggtccagaaatatgtcagcgacctggagctgagtgcctgaggggtccagaagcttcgaggcccagcgacctcggtgggcccagtggggaggagcaggagcctgagccttgggaacatgcgtgtgacctccacagctacctcttctatggactggttgttgccaaacagccacactgtgggactcttcttaacttaaattttaatttatttatactatttagtttttgtaatttattttcgatttcacagtgtgtttgtgattgtttgctctgagagttcccctgtcccctcccccttccctcacaccgcgtctggtgacaaccgagtggctgtcatcagcctgtgtaggcagtcatggcaccaaagccaccagactgacaaatgtgtatcggatgcttttgttcagggctgtgatcggcctggggaaataataaagatgctcttttaaaaggtaaa

SEQ ID NO: 134103 - DNA, 279 bp, Artificial Sequence
  derived and/or modified sequence
atgcaggtttcgactgccgcactcgccgttctgctgtgtaccatggccctgtgcaaccagttttctgcttcattagccgctgacacacctacagcgtgttgcttttcatacacaagcagacaaatacctcagaactttattgctgattactttgagacaagctcacagtgtagcaaacctggagtcatctttctgacaaagcgcagcaggcaggtttgcgcagatccgagcgaagagtgggtccagaaatacgtttccgacctggaacttagtgcctag

SEQ ID NO: 134104 - DNA, 279 bp, Artificial Sequence
  derived and/or modified sequence
atgcaggtgtccacagctgccctggccgtgctgctgtgcaccatggccctgtgcaaccagttcagcgccagcctggccgctgacacccccacagcctgctgcttctcctacaccagccggcagatcccccagaacttcatcgctgactactttgagaccagcagccagtgcagcaagccaggagtcatcttcctgaccaagaggagccggcaggtgtgtgccgaccccagcgaggagtgggtgcagaagtatgtgtctgacctggagctgagcgcctag

SEQ ID NO: 134105 - DNA, 279 bp, Artificial Sequence
  derived and/or modified sequence
atgcaggtgagcaccgccgccctggccgtgctgctgtgcaccatggccctctgcaatcagttcagcgctagcctcgcagctgatacgcccactgcatgctgcttctcttacacgtcacgccaaatcccacagaattttatagcagattattttgagacatccagtcagtgctctaaacccggagtcatctttctaaccaagcgctcccgtcaggtctgtgctgatccctccgaggagtgggttcagaagtatgtttcagacctggagctttccgcttag

SEQ ID NO: 134106 - DNA, 279 bp, Artificial Sequence
  derived and/or modified sequence
atgcaggtaagcacagccgcattggccgttttgttgtgcacaatggccttatgcaaccagttcagtgcgagcctggctgcggatacgcccaccgcctgctgtttttcctacacaagtcgccaaatcccacagaatttcatcgccgactactttgagacttcatctcagtgcagcaagcccggtgttatttttttaacaaagaggagtcggcaagtgtgcgccgacccctccgaggaatgggtgcagaagtacgtgtccgacctcgaactgagtgcttag

SEQ ID NO: 134107 - DNA, 279 bp, Artificial Sequence
  derived and/or modified sequence
atgcaggtgagcaccgccgccctggccgtgctgctgtgcaccatggccctgtgcaaccagttcagcgccagcctggccgccgacacccccaccgcctgctgcttcagctacaccagcagacagatcccccagaacttcatcgccgactacttcgagaccagcagccagtgcagcaagcccggcgtgatcttcctgaccaagagaagcagacaggtgtgcgccgaccccagcgaggagtgggtgcagaagtacgtgagcgacctggagctgagcgcctag

SEQ ID NO: 134108 - protein, 52 aa, Artificial Sequence
  derived and/or modified sequence
MKLCVTVLSLLVLVAAFCSLALSAPSNKPLEASKSALTPVSPGSRSTCMTWN

SEQ ID NO: 134109 - protein, 92 aa, Artificial Sequence
  derived and/or modified sequence
MKLCVTVLSLLVLVAAFCSLALSAPMGSDPPTACCFSYTARKLPRNFVVDYYETSSLCSQPAVVGFLGRKGKQVCADPSESWVQEYVYDLEL

SEQ ID NO: 134110 - protein, 92 aa, Artificial Sequence
  derived and/or modified sequence
MKLCVTVLSLLVLVAAFCSLALSAPMGSDPPTACCFSYTARKLPRNFVVDYYETSSLCSQPAVPWDSNLGKQVCADPSESWVQEYVYDLELN

SEQ ID NO: 134111 - protein, 47 aa, Artificial Sequence
  derived and/or modified sequence
MKLCVTVLSLLVLVAAFCSLALSAPKASKSALTPVSPGSRSTCMTWN

SEQ ID NO: 134112 - protein, 92 aa, Artificial Sequence
  derived and/or modified sequence
MKLCVTVLSLLMLVAAFCSPALSAPMGSDPPTACCFSYTARKLPRNFVVDYYETSSLCSQPAVVFQTKRSKQVCADPSESWVQEYVYDLELN

SEQ ID NO: 134113 - protein, 52 aa, Artificial Sequence
  derived and/or modified sequence
MKLCVTVLSLLMLVAAFCSPALSAPNSKPKEASKSVLIPVNPGSRSTCMTWN

SEQ ID NO: 134114 - protein, 52 aa, Artificial Sequence
  derived and/or modified sequence
MKLCVTVLSLLVLVAAFCSLALSAPNSKPKEASKSALTPVSPGSRSTCMTWN

SEQ ID NO: 134115 - DNA, 279 bp, Artificial Sequence
  derived and/or modified sequence
atgaagctctgcgtcacagttctgtccctgcttatgttggttgccgctttctgctctcccgcactgtcggctcccatgggaagtgacccacctaccgcatgttgtttctcttacaccgcccgaaaactgccgcggaattttgtagtagattattatgagacctccagtctgtgctcgcaaccagcagtggtgtttcagactaagaggagcaagcaggtgtgcgccgacccatcagaatcctgggtacaggagtatgtttacgaccttgagctaaactag

SEQ ID NO: 134116 - DNA, 159 bp, Artificial Sequence
  derived and/or modified sequence
atgaagctgtgcgtcacggttctgtctttactgatgctcgtggctgccttctgcagcccagccttatccgctccaaactccaagcccaaggaggcttctaagagcgtcctcatacccgtcaacccagggagccggtcaacttgcatgacatggaattag

SEQ ID NO: 134117 - DNA, 279 bp, Artificial Sequence
  derived and/or modified sequence
atgaagctgtgtgtgacagtgctgagcctgctgatgctggtggccgccttctgcagccctgccctgagcgcccccatgggcagtgaccccccaacagcctgctgcttctcctacacagccaggaagctgcccaggaactttgtggtggactactatgagaccagcagcctgtgcagccagcctgctgtggtgttccagaccaagaggagcaagcaggtgtgtgccgaccccagcgagagctgggtgcaggagtatgtgtatgacctggagctgaactag

SEQ ID NO: 134118 - DNA, 159 bp, Artificial Sequence
  derived and/or modified sequence
atgaagctgtgtgtgacagtgctgagcctgctgatgctggtggccgccttctgcagccctgccctgagcgcccccaacagcaagcccaaggaggccagcaagtctgtgctgatccctgtgaaccctggcagccgcagcacctgcatgacctggaactag

SEQ ID NO: 134119 - DNA, 279 bp, Artificial Sequence
  derived and/or modified sequence
atgaagctgtgcgtgaccgtgctgagcctgctgatgctggtggccgccttttgttcacccgctttgagcgctcctatgggcagtgacccgcccaccgcttgttgtttttcatatacagctaggaagttacccaggaactttgtggtggactactacgagacctcttctttgtgcagccaaccagctgtcgtgtttcagactaagaggagcaaacaggtctgcgcagatccgagtgagtcttgggtgcaggaatatgtctatgaccttgagctgaattag

SEQ ID NO: 134120 - DNA, 159 bp, Artificial Sequence
  derived and/or modified sequence
atgaagctgtgcgtgaccgtgctgagcctgctgatgctggtggccgctttctgcagccccgccctctccgcacctaatagtaaacccaaagaagcaagcaagagcgtgctgattcctgtgaatcctggatcccgatcaacctgcatgacctggaactag

SEQ ID NO: 134121 - DNA, 279 bp, Artificial Sequence
  derived and/or modified sequence
atgaagctgtgcgtgactgtgttgtcacttctcatgctggtcgctgcattctgcagtccagccctctccgcccctatgggtagtgacccacctaccgcttgttgctttagttacaccgcacgtaagctgccacgcaattttgtggtggactactatgagacgagcagcctctgtagccagcctgcagtggtgttccagacaaaacgatccaaacaggtgtgtgctgacccaagcgagtcctgggtccaggaatatgtgtatgaccttgagttgaactag

SEQ ID NO: 134122 - DNA, 159 bp, Artificial Sequence
  derived and/or modified sequence
atgaaactgtgtgtgacggtactgtccctgcttatgctggtcgccgcattttgttctccggctctcagcgctcccaacagcaaaccaaaggaagcttccaagtcagtgcttatacctgtgaacccgggtagtcgttcaacgtgtatgacttggaactag

SEQ ID NO: 134123 - DNA, 664 bp, Artificial Sequence
  derived and/or modified sequence
agcacaggacacagctgggttctgaagcttctgagttctgcagcctcacctctgagaaaacctctttgccaccaataccatgaagctctgcgtgactgtcctgtctctcctcatgctagtagctgccttctgctctccagcgctctcagcaccaatgggctcagaccctcccaccgcctgctgcttttcttacactgcgaggaagcttcctcgcaactttgtggtagattactatgagaccagcagcctctgctcccagccagctgtggtattccaaaccaaaagaagcaagcaagtctgtgctgatcccagtgaatcctgggtccaggagtacgtgtatgacctggaactgaactgagctgctcagagacaggaagtcttcagggaaggtcacctgagcccggatgcttctccatgagacacatctcctccatactcaggactcctctccgcagttcctgtcccttctcttaatttaatcttttttatgtgccgtgttattgtattaggtgtcatttccattatttatattagtttagccaaaggataagtgtcccctatggggatggtccactgtcactgtttctctgctgttgcaaatacatggataacacatttgattctgtgtgttttcataataaaactttaaaataaaatgcagaca

SEQ ID NO: 134124 - DNA, 552 bp, Artificial Sequence
  derived and/or modified sequence
agcacaggacacagctgggttctgaagcttctgagttctgcagcctcacctctgagaaaacctctttgccaccaataccatgaagctctgcgtgactgtcctgtctctcctcatgctagtagctgccttctgctctccagcgctctcagcaccaaattccaaaccaaaagaagcaagcaagtctgtgctgatcccagtgaatcctgggtccaggagtacgtgtatgacctggaactgaactgagctgctcagagacaggaagtcttcagggaaggtcacctgagcccggatgcttctccatgagacacatctcctccatactcaggactcctctccgcagttcctgtcccttctcttaatttaatcttttttatgtgccgtgttattgtattaggtgtcatttccattatttatattagtttagccaaaggataagtgtcccctatggggatggtccactgtcactgtttctctgctgttgcaaatacatggataacacatttgattctgtgtgttttcataataaaactttaaaataaaatgcagacagtt

SEQ ID NO: 134125 - DNA, 279 bp, Artificial Sequence
  derived and/or modified sequence
atgaagctgtgcgtgaccgtgctgagcctgctgatgctggtggccgccttctgcagccccgccctgagcgcccccatgggcagcgacccccccaccgcctgctgcttcagctacaccgccagaaagctgcccagaaacttcgtggtggactactacgagaccagcagcctgtgcagccagcccgccgtggtgttccagaccaagagaagcaagcaggtgtgcgccgaccccagcgagagctgggtgcaggagtacgtgtacgacctggagctgaactag

SEQ ID NO: 134126 - DNA, 159 bp, Artificial Sequence
  derived and/or modified sequence
atgaagctgtgcgtgaccgtgctgagcctgctgatgctggtggccgccttctgcagccccgccctgagcgcccccaacagcaagcccaaggaggccagcaagagcgtgctgatccccgtgaaccccggcagcagaagcacctgcatgacctggaactag

SEQ ID NO: 134127 - protein, 19 aa, Artificial Sequence
  derived and/or modified sequence
KWVREYINSLEMSKKGLAG

SEQ ID NO: 134128 - protein, 91 aa, Artificial Sequence
  derived and/or modified sequence
MKVSAAALAVILIATALCAPASASPYSSDTTPCCFAYIARPLPRAHIKEYFYTSGKCSNPAVVFVTRKNRQVCANPEKKWVREYINSLEMS

SEQ ID NO: 134129 - DNA, 276 bp, Artificial Sequence
  derived and/or modified sequence
atgaaggtgagcgccgccgccctggccgtgatcctgatcgccaccgccctgtgcgcccccgccagcgccagcccctacagcagcgacaccaccccctgctgcttcgcctacatcgccagacccctgcccagagcccacatcaaggagtacttctacaccagcggcaagtgcagcaaccccgccgtggtgttcgtgaccagaaagaacagacaggtgtgcgccaaccccgagaagaagtgggtgagagagtacatcaacagcctggagatgagctag

SEQ ID NO: 134130 - DNA, 276 bp, Artificial Sequence
  derived and/or modified sequence
atgaaagtatcagcggccgcgctggccgttattctgatagccactgccctgtgcgcccccgcttccgcttctccttatagctctgacacaactccctgttgttttgcatatatcgcccgaccactacctagggctcatatcaaagaatacttctatacctctgggaagtgtagtaatccagccgttgttttcgtgacgcgcaagaataggcaagtctgcgccaatccagaaaagaaatgggtccgagagtacattaattcattggagatgtcatag

SEQ ID NO: 134131 - DNA, 276 bp, Artificial Sequence
  derived and/or modified sequence
atgaaagtgagtgccgctgctctcgctgtgattcttatcgctaccgcactttgcgcccctgcctccgctagcccatatagttcggataccacaccttgttgctttgcatatatcgcaagacctctgccccgagcacacatcaaagagtacttctatacctctggcaaatgttccaatccagctgttgtattcgtcacgcggaaaaatagacaggtctgcgccaatcccgaaaaaaaatgggtccgggagtacatcaatagcctggaaatgtcctag

SEQ ID NO: 134132 - DNA, 276 bp, Artificial Sequence
  derived and/or modified sequence
atgaaggtgtctgctgctgccctggccgtcatcctgattgccacagccctgtgtgccccagccagcgccagcccctacagcagtgacaccaccccctgctgctttgcctacatcgcccggcccctgccccgggcccacatcaaggagtacttctacaccagcggcaagtgcagcaacccagctgtggtgtttgtgaccaggaagaaccggcaggtgtgtgccaaccctgagaagaagtgggtgcgggagtacatcaacagcctggagatgtcctag

SEQ ID NO: 134133 - DNA, 276 bp, Artificial Sequence
  derived and/or modified sequence
atgaaggtgagcgccgccgccctggccgtgatcctgatcgccaccgcactgtgtgctcccgcatccgccagcccatactcctccgatacaactccatgctgtttcgcctacatagcacgaccactcccccgggcccatattaaagaatacttctatacgagtggcaaatgttccaatccagcagtggttttcgtcactcggaagaatcggcaggtctgtgccaatccagagaaaaagtgggtgagagaatatattaattcactggaaatgtcttag

SEQ ID NO: 134134 - DNA, 276 bp, Artificial Sequence
  derived and/or modified sequence
atgaaggtgagcgccgccgccctggccgtgatcctgatcgccaccgccctgtgtgctcctgcgagcgctagcccatatagctccgacacgaccccctgctgcttcgcttatatagcaaggccccttccacgcgcccatataaaggaatacttctatacctcaggaaaatgttccaatccagcggtggtgtttgtgactaggaagaatcgtcaggtatgcgccaacccagagaaaaaatgggtgcgagaatatataaactctctggagatgtcctag

SEQ ID NO: 134135 - DNA, 276 bp, Artificial Sequence
  derived and/or modified sequence
atgaaggtgtctgccgcagcacttgcagttatcttgatcgccactgcgctctgtgctcccgcatcggccagcccatactcgagcgatacgaccccctgttgctttgcatacatagcacgccctcttccgagggctcacatcaaggaatacttctatacatcaggcaaatgtagcaaccccgctgtggtgtttgtgactaggaagaaccggcaagtttgcgccaatcccgagaaaaagtgggtccgcgagtatatcaattccctcgagatgagctag

SEQ ID NO: 134136 - DNA, 276 bp, Artificial Sequence
  derived and/or modified sequence
atgaaggtgtcagcagccgctcttgcggtcattctgatagcaaccgctctgtgtgctccagccagcgcctccccatatagcagcgacaccacgccctgttgtttcgcttatatcgcacggcctctcccaagagcccacattaaggagtacttctacacttctggaaagtgctcaaaccctgccgttgtctttgttacccgcaagaatcgccaagtctgtgccaaccctgaaaaaaaatgggtgagggaatacatcaatagtttggagatgtcctag

SEQ ID NO: 134137 - DNA, 276 bp, Artificial Sequence
  derived and/or modified sequence
atgaaagtgtccgccgccgccctggctgttatcctgattgccaccgccctgtgcgcccctgcctcggcctctccttacagttccgatacaaccccttgttgctttgcctacattgcccggccccttccccgtgcccacattaaggaatatttctatacgtccggaaaatgttcaaatcccgcagtggtattcgttaccaggaagaaccgacaagtctgtgccaatcccgagaagaaatgggtgagagaatacataaactctctcgaaatgtcctag

SEQ ID NO: 134138 - DNA, 276 bp, Artificial Sequence
  derived and/or modified sequence
atgaaagtttctgctgcagccttggccgtaatcctaattgctacagccctgtgcgcccctgcttccgcatcgccctactcatcagatactacaccctgctgtttcgcttacatcgcgcgacccttaccacgtgcgcacattaaagaatacttctatacttctggcaaatgctcgaatcccgccgttgtatttgttacaagaaagaacaggcaggtatgcgccaaccctgagaagaagtgggttcgagaatatatcaactcactagagatgagttag

SEQ ID NO: 134139 - RNA, 276 nt, Artificial Sequence
  derived and/or modified sequence
augaaaguguccgccgccgcccuggcuguuauccugauugccaccgcccugugcgccccugccucggccucuccuuacaguuccgauacaaccccuuguugcuuugccuacauugcccggccccuuccccgugcccacauuaaggaauauuucuauacguccggaaaauguucaaaucccgcagugguauucguuaccaggaagaaccgacaagucugugccaaucccgagaagaaaugggugagagaauacauaaacucucucgaaauguccuag

SEQ ID NO: 134140 - RNA, 276 nt, Artificial Sequence
  derived and/or modified sequence
augaaaguuucugcugcagccuuggccguaauccuaauugcuacagcccugugcgccccugcuuccgcaucgcccuacucaucagauacuacacccugcuguuucgcuuacaucgcgcgacccuuaccacgugcgcacauuaaagaauacuucuauacuucuggcaaaugcucgaaucccgccguuguauuuguuacaagaaagaacaggcagguaugcgccaacccugagaagaaguggguucgagaauauaucaacucacuagagaugaguuag

SEQ ID NO: 134141 - protein, 97 aa, Artificial Sequence
  derived and/or modified sequence
MKVSAALLWLLLIAAAFSPQGLAGPASVPTTCCFNLANRKIPLQRLESYRRITSGKCPQKAVIFKTKLAKDICADPKKKWVQDSMKYLDQKSPTPKP

SEQ ID NO: 134142 - DNA, 294 bp, Artificial Sequence
  derived and/or modified sequence
atgaaggtgagcgccgccctgctgtggctgctgctgatcgccgccgccttcagcccccagggcctggccggccccgccagcgtgcccaccacctgctgcttcaacctggccaacagaaagatccccctgcagagactggagagctacagaagaatcaccagcggcaagtgcccccagaaggccgtgatcttcaagaccaagctggccaaggacatctgcgccgaccccaagaagaagtgggtgcaggacagcatgaagtacctggaccagaagagccccacccccaagccctag

SEQ ID NO: 134143 - DNA, 795 bp, Artificial Sequence
  derived and/or modified sequence
agagaggctgagaccaacccagaaaccaccacctctcacgccaaagctcacaccttcagcctccaacatgaaggtctccgcagcacttctgtggctgctgctcatagcagctgccttcagcccccaggggctcgctgggccagcttctgtcccaaccacctgctgctttaacctggccaataggaagataccccttcagcgactagagagctacaggagaatcaccagtggcaaatgtccccagaaagctgtgatcttcaagaccaaactggccaaggatatctgtgccgaccccaagaagaagtgggtgcaggattccatgaagtatctggaccaaaaatctccaactccaaagccataaataatcaccatttttgaaaccaaaccagagcctgagtgttgcctaatttgttttcccttcttacaatgcattctgaggtaacctcattatcagtccaaagggcatgggttttattatatatatatatttttttttttaaaaaaaaaacgtattgcatttaatttattgaggctttaaaacttatcctccatgaatatcagttatttttaaactgtaaagctttgtgcagattctttaccccctgggagccccaattcgatcccctgtcacgtgtgggcaatgttccccctctcctctcttcctccctggaatcttgtaaaggtcctggcaaagatgatcagtatgaaaatgtcattgttcttgtgaacccaaagtgtgactcattaaatggaagtaaatgttgttttaggaatacataaagtatgtgcatattt

SEQ ID NO: 134144 - DNA, 294 bp, Artificial Sequence
  derived and/or modified sequence
atgaaagtcagcgccgcccttttatggcttctcttgatcgcagccgcattttccccacagggattggctgggccagcttcagtgccaaccacatgctgtttcaatctggcgaatagaaagatccctctgcagcgcctcgaatcatataggcgcataacctccggtaaatgccctcaaaaagctgtgattttcaaaacaaaattagctaaggatatttgtgccgatccaaagaaaaaatgggtgcaagactctatgaaatatctcgaccagaagtctcccacacccaaaccctag

SEQ ID NO: 134145 - DNA, 294 bp, Artificial Sequence
  derived and/or modified sequence
atgaaggtgtctgctgccctgctgtggctgctgctgattgctgctgccttcagcccccagggcctggccggccctgcctctgtgcccaccacctgctgcttcaacctggccaacaggaagatccccctgcagaggctggagagctaccgccgcatcaccagcggcaagtgcccccagaaggctgtgatcttcaagaccaagctggccaaggacatctgtgccgaccccaagaagaagtgggtgcaggacagcatgaagtacctggaccagaagagccccacccccaagccctag

SEQ ID NO: 134146 - DNA, 294 bp, Artificial Sequence
  derived and/or modified sequence
atgaaggtgagcgccgccctgctgtggctgctgctgatcgccgccgctttttcaccgcagggccttgcgggacccgcatccgtccccactacctgctgttttaatttagctaaccgcaagattcctctccagcggctcgagtcatacaggaggatcaccagcggtaagtgccctcagaaggccgtgattttcaagacaaagttggcgaaggatatctgcgcagatccaaaaaagaaatgggtgcaagacagcatgaaatacctggatcagaagtcccctaccccaaagccctag

SEQ ID NO: 134147 - DNA, 294 bp, Artificial Sequence
  derived and/or modified sequence
atgaaggtatcagcagccctgttgtggctccttttgatagctgctgctttttctccacagggactcgcaggtcctgcctcagtcccaaccacttgctgcttcaatctcgccaacagaaagattccattgcagaggctggagtcatatcggaggatcacatccggcaagtgtcctcagaaagcagtgatttttaagaccaagctggcaaaagatatttgtgcagaccccaaaaagaagtgggtgcaggactctatgaaatatttggaccagaaaagcccaacacctaaaccgtag

SEQ ID NO: 134148 - protein, 94 aa, Artificial Sequence
  derived and/or modified sequence
MAPLKMLALVTLLLGASLQHIHAARGTNVGRECCLEYFKGAIPLRKLKTWYQTSEDCSRDAIVFVTVQGRAICSDPNNKRVKNAVKYLQSLERS

SEQ ID NO: 134149 - DNA, 285 bp, Artificial Sequence
  derived and/or modified sequence
atggcccccctgaagatgctggcactcgtaacccttttgctcggagccagtctccagcatatacatgccgcccgtggaactaatgtgggaagggaatgctgcctggaatactttaaaggagccatcccccttagaaaattaaagacttggtaccagactagtgaggactgctccagggacgccatagtgttcgtgaccgttcaaggtcgagccatttgtagtgaccctaataataaacgtgtgaagaacgcagtgaagtatctgcaatccctggagcgtagctag

SEQ ID NO: 134150 - DNA, 285 bp, Artificial Sequence
  derived and/or modified sequence
atggcccccctgaagatgctggccctggtgaccctgctgctgggcgccagcctgcagcacatccatgctgcccggggcaccaacgtgggccgggagtgctgcctggagtacttcaagggggccatccccctgaggaagctgaagacctggtaccagaccagcgaggactgcagcagagatgccatcgtgtttgtgacagtgcagggccgggccatctgcagcgaccccaacaacaagagggtgaagaatgctgtgaagtacctgcagagcctggagaggagctag

SEQ ID NO: 134151 - DNA, 285 bp, Artificial Sequence
  derived and/or modified sequence
atggcccccctgaagatgctggccctggtgaccctgctgctgggcgctagtctccagcacatccatgcggcgcgggggaccaacgtcgggcgagagtgctgtttagagtacttcaagggagccatcccccttagaaaacttaaaacctggtatcagacatccgaggattgttcccgggatgctatagtgtttgtcacggtgcaggggagagctatctgttctgacccaaataataagagggtcaaaaacgcggtgaagtatcttcaatctttggagagaagctag

SEQ ID NO: 134152 - DNA, 285 bp, Artificial Sequence
  derived and/or modified sequence
atggccccactgaagatgcttgctcttgtgacccttctcttgggagcaagtctacagcatattcatgcggctcggggtaccaacgttggcagggaatgctgtttggaatatttcaagggtgctattccactacgcaaattgaaaacttggtaccagactagcgaggattgttctcgagatgcaattgtctttgtgactgtccagggaagagccatatgctctgatcccaataacaaacgcgtaaaaaatgcagtgaaatatctgcagtcacttgaaagatcctag

SEQ ID NO: 134153 - DNA, 285 bp, Artificial Sequence
  derived and/or modified sequence
atggcccccctgaagatgctggccctggtgaccctgctgctgggcgccagcctgcagcacatccacgccgccagaggcaccaacgtgggcagagagtgctgcctggagtacttcaagggcgccatccccctgagaaagctgaagacctggtaccagaccagcgaggactgcagcagagacgccatcgtgttcgtgaccgtgcagggcagagccatctgcagcgaccccaacaacaagagagtgaagaacgccgtgaagtacctgcagagcctggagagaagctag

SEQ ID NO: 134154 - protein, 89 aa, Artificial Sequence
  derived and/or modified sequence
MKGLAAALLVLVCTMALCSCAQVGTNKELCCLVYTSWQIPQKFIVDYSETSPQCPKPGVILLTKRGRQICADPNKKWVQKYISDLKLNA

SEQ ID NO: 134155 - DNA, 270 bp, Artificial Sequence
  derived and/or modified sequence
atgaaggggctggccgccgcccttttggtcctggtgtgcaccatggctctttgctcatgtgcccaggtcggcaccaacaaggaactgtgctgcctggtgtacacgtcctggcaaattcctcagaagttcatcgttgactacagtgaaaccagtccgcagtgccccaaacccggggtgatcctgctgacaaaacgcggacgtcaaatttgcgccgacccaaacaaaaagtgggtgcagaagtacattagtgatctcaaactgaatgcctag

SEQ ID NO: 134156 - DNA, 270 bp, Artificial Sequence
  derived and/or modified sequence
atgaagggcctggccgccgccctgctggtgctggtgtgcaccatggccctgtgcagctgtgcccaggtgggcaccaacaaggagctgtgctgcctggtgtacacctcctggcagatcccccagaagttcatcgtggactacagcgagaccagcccccagtgccccaagccaggagtcatcctgctgaccaagaggggccggcagatctgtgccgaccccaacaagaagtgggtgcagaagtacatcagtgacctgaagctgaatgcctag

SEQ ID NO: 134157 - DNA, 270 bp, Artificial Sequence
  derived and/or modified sequence
atgaagggcctggccgccgccctgctggtgctggtgtgcaccatggccttatgttcctgcgcccaggttgggacgaataaagagctgtgttgcctggtttacacttcctggcagatacctcagaaattcattgtggattactccgaaacctctccacaatgccccaaacctggggttatactcctcactaagcggggacgacagatctgcgcagacccaaacaagaaatgggttcagaagtacatcagcgatctcaagttaaacgcctag

SEQ ID NO: 134158 - DNA, 270 bp, Artificial Sequence
  derived and/or modified sequence
atgaaaggattagccgcagcccttctcgtgctcgtctgcaccatggccctttgctcctgcgcccaagttgggactaacaaagagctctgttgtttggtgtatacgtcttggcaaataccccagaagtttattgtcgactattctgagacatcacctcaatgccctaagcctggagtgatattactcactaaacgtggcaggcagatctgcgcagatcccaataaaaagtgggtccagaaatacatctctgatttaaaactcaacgcctag

SEQ ID NO: 134159 - DNA, 270 bp, Artificial Sequence
  derived and/or modified sequence
atgaagggtcttgccgctgccttactggtcttggtatgcaccatggctctctgctcttgcgctcaggtggggaccaataaggaattgtgctgcctcgtgtatacgtcttggcaaattccacagaagtttatagtagactactccgaaactagcccacagtgtcctaagcccggcgttatcttacttacaaaacggggcaggcagatctgcgctgatccgaataagaagtgggtacaaaagtatatatccgatttaaaactgaacgcttag

SEQ ID NO: 134160 - DNA, 1324 bp, Artificial Sequence
  derived and/or modified sequence
gccaggagttgtgagtttccaagccccagctcactctgaccacttctctgcctgcccagcatcatgaagggccttgcagctgccctccttgtcctcgtctgcaccatggccctctgctcctgtgcacaagttggtaccaacaaagagctctgctgcctcgtctatacctcctggcagattccacaaaagttcatagttgactattctgaaaccagcccccagtgccccaagccaggtgtcatcctcctaaccaagagaggccggcagatctgtgctgaccccaataagaagtgggtccagaaatacatcagcgacctgaagctgaatgcctgaggggcctggaagctgcgagggcccagtgaacttggtgggcccaggagggaacaggagcctgagccagggcaatggccctgccaccctggaggccacctcttctaagagtcccatctgctatgcccagccacattaactaactttaatcttagtttatgcatcatatttcattttgaaattgatttctattgttgagctgcattatgaaattagtattttctctgacatctcatgacattgtctttatcatcctttcccctttcccttcaactcttcgtacattcaatgcatggatcaatcagtgtgattagctttctcagcagacattgtgccatatgtatcaaatgacaaatctttattgaatggttttgctcagcaccaccttttaatatattggcagtacttattatataaaaggtaaaccagcattctcactgtgacgactctgttgattttgtttcactaatcggaatcacagactgagaggaattctgggggaggagtagggaaatatgaaaaggggcagaaacagcaagatagggaccaagtacttctacagtcataccagacatttccctggagatactttcctgaaaagttgaaacagacaccattagtttataaaccatattgtaactgaaatgtgatagaaaaattttctacttaaatgaatatcaagatgacgctgcaatgcatatttacgcacacaagctcattttcataaatgaagctttcctcagaatgatggctaacatctgttgaggtcttaccaagtgctgggttttgggctaagtacttatattagtaaaagtctagcaaatactgcccatagtctagcaaggactccttacctggaagttgctgaaagccttggtaatgttatctttgttctccactctgcttttggggaggatgttttccatgactatacgagatgaggcttggggctgggtggccagagttagcaaataaaaatacagaatggatacta

SEQ ID NO: 134161 - DNA, 270 bp, Artificial Sequence
  derived and/or modified sequence
atgaagggcctggccgccgccctgctggtgctggtgtgcaccatggccctgtgcagctgcgcccaggtgggcaccaacaaggagctgtgctgcctggtgtacaccagctggcagatcccccagaagttcatcgtggactacagcgagaccagcccccagtgccccaagcccggcgtgatcctgctgaccaagagaggcagacagatctgcgccgaccccaacaagaagtgggtgcagaagtacatcagcgacctgaagctgaacgcctag

SEQ ID NO: 134162 - RNA, 270 nt, Artificial Sequence
  derived and/or modified sequence
augaagggucuugccgcugccuuacuggucuugguaugcaccauggcucucugcucuugcgcucagguggggaccaauaaggaauugugcugccucguguauacgucuuggcaaauuccacagaaguuuauaguagacuacuccgaaacuagcccacaguguccuaagcccggcguuaucuuacuuacaaaacggggcaggcagaucugcgcugauccgaauaagaaguggguacaaaaguauauauccgauuuaaaacugaacgcuuag

SEQ ID NO: 134163 - protein, 134 aa, Artificial Sequence
  derived and/or modified sequence
MAQSLALSLLILVLAFGIPRTQGSDGGAQDCCLKYSQRKIPAKVVRSYRKQEPSLGCSIPAILFLPRKRSQAELCADPKELWVQQLMQHLDKTPSPQKPAQGCRKDRGASKTGKKGKGSKGCKRTERSQTPKGP

SEQ ID NO: 134164 - protein, 124 aa, Artificial Sequence
  derived and/or modified sequence
MAQSLALSLLILVLAFGIPRTQGSDGGAQDCCLKYSQRKIPAKVVRSYRKQEPSLGCSIPAILFLPRKRSQAELCADPKELWVQQLMQHLDKTPSPQKPAQGCRKDRGASKTGKKGKGSKGCKR

SEQ ID NO: 134165 - DNA, 405 bp, Artificial Sequence
  derived and/or modified sequence
atggcccaaagcttagccttgtctttgctgattctggtgcttgccttcggcatccctagaacacagggctccgacggcggagcgcaggattgttgcctgaagtactcacaaagaaagattccagccaaggttgtccggtcctatcgaaagcaagaaccatcacttgggtgtagcatcccagccatcctttttcttccgcggaagcggtcacaggccgaactgtgtgccgacccgaaggagttgtgggttcagcaactgatgcaacacttggacaagaccccttcaccccagaaacccgcccaaggttgccgtaaagatagaggcgcttcaaagacgggcaaaaagggcaagggatccaagggctgcaagaggacagagaggagccaaacgccaaaaggaccctag

SEQ ID NO: 134166 - DNA, 375 bp, Artificial Sequence
  derived and/or modified sequence
atggctcaatcccttgccctgtcactgctcattctggttctcgcctttggcattccaagaactcagggctcggacggaggcgcccaggattgttgcttaaagtactcacagaggaagatccctgctaaggtcgtccgatcatatcgcaaacaggagccttcactcggatgcagtattcccgcgattctgttcctgccgaggaagaggagtcaggcagaactgtgcgccgatcctaaagagctctgggttcaacagcttatgcagcatctcgataaaaccccctcacctcaaaaaccagcacagggctgccgcaaggaccgaggcgcgagtaagacggggaagaagggaaagggctctaagggctgcaaacgctag

SEQ ID NO: 134167 - DNA, 405 bp, Artificial Sequence
  derived and/or modified sequence
atggcccagagcctggccctgagcctgctgatcctggtgctggccttcggcatccccaggacccagggcagtgatggaggagcccaggactgctgcctgaagtacagccagaggaagatcccagccaaggtggtgcgcagctacaggaagcaggagcccagcctgggctgcagcatcccagccatcctcttcctgcccaggaagaggagccaggccgagctgtgtgccgaccccaaggagctgtgggtgcagcagctgatgcagcacctggacaagacccccagcccccagaagccagcccagggctgcaggaaggacagaggagccagcaagacaggcaagaagggcaagggcagcaagggctgcaagaggacagagaggagccagacccccaagggcccctag

SEQ ID NO: 134168 - DNA, 375 bp, Artificial Sequence
  derived and/or modified sequence
atggcccagagcctggccctgagcctgctgatcctggtgctggccttcggcatccccaggacccagggcagtgatggaggagcccaggactgctgcctgaagtacagccagaggaagatcccagccaaggtggtgcgcagctacaggaagcaggagcccagcctgggctgcagcatcccagccatcctcttcctgcccaggaagaggagccaggccgagctgtgtgccgaccccaaggagctgtgggtgcagcagctgatgcagcacctggacaagacccccagcccccagaagccagcccagggctgcaggaaggacagaggagccagcaagacaggcaagaagggcaagggcagcaagggctgcaagaggtag

SEQ ID NO: 134169 - DNA, 405 bp, Artificial Sequence
  derived and/or modified sequence
atggcccagagcctggccctgagcctgctgatcctggtgctggcctttgggatcccacgcacccaggggagtgacgggggagcacaggattgctgcctcaagtattcccagcggaagatccccgcaaaagtagtgcgttcttataggaaacaggagccctctttgggttgttccatccccgccatcctgttcctaccaagaaagagatcccaagcagagctgtgtgcagatcctaaagaactgtgggttcagcagttgatgcagcatctggacaagacccccagtcctcaaaaaccagcccaggggtgccggaaggatcgcggagccagcaagactggcaagaaaggaaagggaagtaaggggtgcaaacgtaccgagcgaagtcagactcctaaaggaccttag

SEQ ID NO: 134170 - DNA, 375 bp, Artificial Sequence
  derived and/or modified sequence
atggcccagagcctggccctgagcctgctgatcctggtgctggccttcggcattccaagaactcagggcagcgatggcggagctcaggattgctgtctgaagtattcacagagaaaaattccagcaaaggtggtcagatcctatcgcaaacaggagccgtcactcggctgtagtattcccgccattttattcctgcccaggaagagatcccaagcagagctgtgtgccgaccccaaggaactatgggttcagcagctgatgcagcacctggataaaacaccctccccacagaagccggcacaaggttgtaggaaggatagaggagcttcaaaaacaggcaaaaaaggaaaaggatccaagggttgtaaaagatag

SEQ ID NO: 134171 - DNA, 405 bp, Artificial Sequence
  derived and/or modified sequence
atggctcagtcgctcgcactgagcctcctcatactggtgctggccttcgggattccacggacacaagggtctgacgggggagcccaagactgctgtttgaagtattcccagcgcaagatccctgcaaaggtggtgcgctcctatcgaaagcaggaacccagcctgggctgcagtatccccgcaatcctgttcctcccacgtaaacggagtcaggcagaattgtgtgccgatcctaaggaactttgggtacagcagctgatgcagcatctggacaagacgccatcacctcagaaacccgctcagggctgcagaaaggaccggggagcttcaaaaaccgggaaaaaaggcaagggctcaaaaggctgcaagcggaccgagcgttctcagacacctaaaggtccatag

SEQ ID NO: 134172 - DNA, 375 bp, Artificial Sequence
  derived and/or modified sequence
atggcacagtcgcttgctctgagcctgctaatattagtgttggcttttgggattccacggacacagggatccgacggcggtgcccaggactgctgccttaaatattcccagcggaaaattcccgctaaggtggtgcggtcgtaccggaaacaagaaccaagccttgggtgcagtatccctgcgattcttttcctgccaagaaagaggtcccaggcagagctgtgtgccgaccccaaagagctgtgggttcagcaacttatgcagcatctcgacaaaacaccttcccctcaaaagcctgcccagggctgtcggaaagaccgaggggctagtaaaaccggtaaaaaagggaagggatcaaaaggatgcaagaggtag

SEQ ID NO: 134173 - DNA, 852 bp, Artificial Sequence
  derived and/or modified sequence
cttgcagctgcccacctcaccctcagctctggcctcttactcaccctctaccacagacatggctcagtcactggctctgagcctccttatcctggttctggcctttggcatccccaggacccaaggcagtgatggaggggctcaggactgttgcctcaagtacagccaaaggaagattcccgccaaggttgtccgcagctaccggaagcaggaaccaagcttaggctgctccatcccagctatcctgttcttgccccgcaagcgctctcaggcagagctatgtgcagacccaaaggagctctgggtgcagcagctgatgcagcatctggacaagacaccatccccacagaaaccagcccagggctgcaggaaggacaggggggcctccaagactggcaagaaaggaaagggctccaaaggctgcaagaggactgagcggtcacagacccctaaagggccatagcccagtgagcagcctggagccctggagaccccaccagcctcaccagcgcttgaagcctgaacccaagatgcaagaaggaggctatgctcaggggccctggagcagccaccccatgctggccttgccacactctttctcctgctttaaccaccccatctgcattcccagctctaccctgcatggctgagctgcccacagcaggccaggtccagagagaccgaggagggagagtctcccagggagcatgagaggaggcagcaggactgtccccttgaaggagaatcatcaggaccctggacctgatacggctccccagtacaccccacctcttccttgtaaatatgatttatacctaactgaataaaaagctgttctgtcttcccacccaa

SEQ ID NO: 134174 - DNA, 405 bp, Artificial Sequence
  derived and/or modified sequence
atggcccagagcctggccctgagcctgctgatcctggtgctggccttcggcatccccagaacccagggcagcgacggcggcgcccaggactgctgcctgaagtacagccagagaaagatccccgccaaggtggtgagaagctacagaaagcaggagcccagcctgggctgcagcatccccgccatcctgttcctgcccagaaagagaagccaggccgagctgtgcgccgaccccaaggagctgtgggtgcagcagctgatgcagcacctggacaagacccccagcccccagaagcccgcccagggctgcagaaaggacagaggcgccagcaagaccggcaagaagggcaagggcagcaagggctgcaagagaaccgagagaagccagacccccaagggcccctag

SEQ ID NO: 134175 - DNA, 375 bp, Artificial Sequence
  derived and/or modified sequence
atggcccagagcctggccctgagcctgctgatcctggtgctggccttcggcatccccagaacccagggcagcgacggcggcgcccaggactgctgcctgaagtacagccagagaaagatccccgccaaggtggtgagaagctacagaaagcaggagcccagcctgggctgcagcatccccgccatcctgttcctgcccagaaagagaagccaggccgagctgtgcgccgaccccaaggagctgtgggtgcagcagctgatgcagcacctggacaagacccccagcccccagaagcccgcccagggctgcagaaaggacagaggcgccagcaagaccggcaagaagggcaagggcagcaagggctgcaagagatag

SEQ ID NO: 134176 - protein, 93 aa, Artificial Sequence
  derived and/or modified sequence
MDRLQTALLVVLVLLAVALQATEAGPYGANMEDSVCCRDYVRYRLPLRVVKHFYWTSDSCPRPGVVLLTFRDKEICADPRVPWVKMILNKLSQ

SEQ ID NO: 134177 - DNA, 282 bp, Artificial Sequence
  derived and/or modified sequence
atggacagattgcaaaccgctttactggtcgtcctggtgctgcttgccgtggcgctacaagccaccgaggccgggccatacggcgccaacatggaggatagcgtctgttgtcgtgactatgtccgttatcgtctcccgcttcgagtcgtgaaacacttctactggaccagtgactcttgccctcgtcccggggttgtgttactgacctttcgcgataaggagatctgcgccgatccgcgggtcccttgggtcaaaatgatcttaaacaagctgtcacagtag

SEQ ID NO: 134178 - DNA, 282 bp, Artificial Sequence
  derived and/or modified sequence
atggaccggctgcagacagccctgctggtggtgctggtgctgctggccgtggccctgcaggccacagaggccggcccctatggagccaacatggaggacagcgtgtgctgccgggactatgtgcgctaccgcctgcccctgcgggtggtgaagcacttctactggaccagtgacagctgccccaggcctggggtggtgctgctgaccttccgggacaaggagatctgtgccgacccccgggtgccctgggtgaagatgatcctgaacaagctgagccagtag

SEQ ID NO: 134179 - DNA, 282 bp, Artificial Sequence
  derived and/or modified sequence
atggaccggctgcagaccgccctgctggtggtgctggtgctgctggccgtggctctacaagccacagaggcaggaccgtatggggcaaatatggaagactcagtttgttgtcgggactatgttagatataggctgcccctgcgcgtcgttaagcatttttattggacaagtgactcatgtccccggcccggagtcgtcctgctgacattcagggacaaagaaatttgcgcggatccacgcgtaccttgggtcaagatgatactgaataaactgtcccagtag

SEQ ID NO: 134180 - DNA, 282 bp, Artificial Sequence
  derived and/or modified sequence
atggacagacttcagacagcgttgcttgtggtgttggtccttctggccgtggcattgcaagccactgaggctggcccttatggcgcaaacatggaagacagtgtgtgttgtcgggattatgtccgctaccggctgccgctgcgtgtggtgaaacatttttactggacaagtgattcttgtcctagacctggggtcgtacttctcacattcagggacaaggaaatctgtgcagatccacgagtgccctgggtgaaaatgatcctcaacaaattgtcccagtag

SEQ ID NO: 134181 - DNA, 2929 bp, Artificial Sequence
  derived and/or modified sequence
tatgtccctttgcagacacctgggctgagacatacaggacagagcatggatcgcctacagactgcactcctggttgtcctcgtcctccttgctgtggcgcttcaagcaactgaggcaggcccctacggcgccaacatggaagacagcgtctgctgccgtgattacgtccgttaccgtctgcccctgcgcgtggtgaaacacttctactggacctcagactcctgcccgaggcctggcgtggtgttgctaaccttcagggataaggagatctgtgccgatcccagagtgccctgggtgaagatgattctcaataagctgagccaatgaagagcctactctgatgaccgtggccttggctcctccaggaaggctcaggagccctacctccctgccattatagctgctccccgccagaagcctgtgccaactctctgcattccctgatctccatccctgtggctgtcacccttggtcacctccgtgctgtcactgccatctcccccctgacccctctaacccatcctctgcctccctccctgcagtcagagggtcctgttcccatcagcgattcccctgcttaaacccttccatgactccccactgccctaagctgaggtcagtctcccaagcctggcatgtggccctctggatctgggttccatctctgtctccagcctgcccacttcccttcatgaatgttgggttctagctccctgttctccaaacccatactacacatcccacttctgggtctttgcctgggatgttgctgacacccagaaagtcccaccacctgcacatgtgtagccccaccagccctccaaggcattgctcgcccaagcagctggtaattccatttcatgtattagatgtcccctggccctctgtcccctcttaataaccctagtcacagtctccgcagattcttgggatttgggggttttctcccccacctctccactagttggaccaaggtttctagctaagttactctagtctccaagcctctagcatagagcactgcagacaggccctggctcagaatcagagcccagaaagtggctgcagacaaaatcaataaaactaatgtccctcccctctccctgccaaaaggcagttacatatcaatacagagactcaaggtcactagaaatgggccagctgggtcaatgtgaagccccaaatttgcccagattcacctttcttcccccactccctttttttttttttttttgagatggagtttcgctcttgtcacccacgctggagtgcaatggtgtggtcttggcttattgaagcctctgcctcctgggttcaagtgattctcttgcctcagcctcctgagtagctgggattacaggttcctgctaccacgcccagctaatttttgtatttttagtagagacgaggcttcaccatgttggccaggctggtctcgaactcctgtcctcaggtaatccgcccacctcagcctcccaaagtgctgggattacaggcgtgagccacagtgcctggcctcttccctctccccaccccccccccaacttttttttttttttatggcagggtctcactctgtcgcccaggctggagtgcagtggcgtgatctcggctcactacaacctcgacctcctgggttcaagcgattctcccaccccagcctcccaagtagctgggattacaggtgtgtgccactacggctggctaatttttgtatttttagtagagacaggtttcaccatattggccaggctggtcttgaactcctgacctcaagtgatccaccttccttgtgctcccaaagtgctgagattacaggcgtgagctatcacacccagcctccccctttttttcctaataggagactcctgtacctttcttcgttttacctatgtgtcgtgtctgcttacatttccttctcccctcaggctttttttgggtggtcctccaacctccaatacccaggcctggcctcttcagagtaccccccattccactttccctgcctccttccttaaatagctgacaatcaaattcatgctatggtgtgaaagactacctttgacttggtattataagctggagttatatatgtatttgaaaacagagtaaatacttaagaggccaaatagatgaatggaagaattttaggaactgtgagagggggacaaggtggagctttcctggccctgggaggaagctggctgtggtagcgtagcgctctctctctctgtctgtggcaggaggcaaagagtagggtgtaattgagtgaaggaatcctgggtagagaccattctcaggtggttgggccaggctaaagactgggatttgggtctatctatgcctttctggctgatttttgtagagacggggttttgccatgttacccaggctggtctcaaactcctgggctcaagcgatcctcctggctcagcctcccaaagtgctgggattacaggcgtgagtcactgcgcctggcttcctcttcctcttgagaaatattcttttcatacagcaagtatgggacagcagtgtcccaggtaaaggacataaatgttacaagtgtctggtcctttctgagggaggctggtgccgctctgcagggtatttgaacctgtggaattggaggaggccatttcactccctgaacccagcctgacaaatcacagtgagaatgttcaccttataggcttgctgtggggctcaggttgaaagtgtggggagtgacactgcctaggcatccagctcagtgtcatccagggcctgtgtccctcccgaacccagggtcaacctgcctaccacaggcactagaaggacgaatctgcctactgcccatgaacggggccctcaagcgtcctgggatctccttctccctcctgtcctgtccttgcccctcaggactgctggaaaataaatcctttaaaatagt

SEQ ID NO: 134182 - DNA, 282 bp, Artificial Sequence
  derived and/or modified sequence
atggacagactgcagaccgccctgctggtggtgctggtgctgctggccgtggccctgcaggccaccgaggccggcccctacggcgccaacatggaggacagcgtgtgctgcagagactacgtgagatacagactgcccctgagagtggtgaagcacttctactggaccagcgacagctgccccagacccggcgtggtgctgctgaccttcagagacaaggagatctgcgccgaccccagagtgccctgggtgaagatgatcctgaacaagctgagccagtag

SEQ ID NO: 134183 - protein, 114 aa, Artificial Sequence
  derived and/or modified sequence
MSLPSSRAARVPGPSGSLCALLALLLLLTPPGPLASAGPVSAVLTELRCTCLRVTLRVNPKTIGKLQVFPAGPQCSKVEVVASLKNGKQVCLDPEAPFLKKVIQKILDSGNKKN

SEQ ID NO: 134184 - DNA, 1718 bp, Artificial Sequence
  derived and/or modified sequence
aggcagctcctcccagccacccaccccaccaattcccatcctcccgcccccctccaccaaccccttctttccacactgccccctgagttcagggaatttccccagcatcccaaagcttgagtttcctgccagtcgggagggatgaatgcagataaagggagtgcagaaggcacgaggaaaccaaagtgctctgtatcctccagtctccgcgcctccacccagctcaggaacccgcgaaccctctcttgaccactatgagcctcccgtccagccgcgcggcccgtgtcccgggtccttcgggctccttgtgcgcgctgctcgcgctgctgctcctgctgacgccgccggggcccctcgccagcgctggtcctgtctctgctgtgctgacagagctgcgttgcacttgtttacgcgttacgctgagagtaaaccccaaaacgattggtaaactgcaggtgttccccgcaggcccgcagtgctccaaggtggaagtggtagcctccctgaagaacgggaagcaagtttgtctggacccggaagccccttttctaaagaaagtcatccagaaaattttggacagtggaaacaagaaaaactgagtaacaaaaaagaccatgcatcataaaattgcccagtcttcagcggagcagttttctggagatccctggacccagtaagaataagaaggaagggttggtttttttccattttctacatggattccctactttgaagagtgtgggggaaagcctacgcttctccctgaagtttacagctcagctaatgaagtactaatatagtatttccactatttactgttattttacctgataagttattgaaccctttggcaattgaccatattgtgagcaaagaatcactggttattagtctttcaatgaatattgaattgaagataactattgtatttctatcatacattccttaaagtcttaccgaaaaggctgtggatttcgtatggaaataatgttttattagtgtgctgttgagggaggtatcctgttgttcttactcactcttctcataaaataggaaatattttagttctgtttcttggggaatatgttactctttaccctaggatgctatttaagttgtactgtattagaacactgggtgtgtcataccgttatctgtgcagaatatatttccttattcagaatttctaaaaatttaagttctgtaagggctaatatattctcttcctatggttttagacgtttgatgtcttcttagtatggcataatgtcatgatttactcattaaactttgattttgtatgctattttttcactataggatgactataattctggtcactaaatatacactttagatagatgaagaagcccaaaaacagataaattcctgattgctaatttacatagaaatgtattctcttggttttttaaataaaagcaaaattaacaatgatctgtgctctgaaagttttgaaaatatatttgaacaatttgaatataaattcatcatttagtcctcaaaatatatatagcattgctaagattttcagatatctattgtggatcttttaaaggttttgaccattttgttatgaggaattatacatgtatcacattcactatattaaaattgcacttttattttttcctgtgtgtcatgttggtttttggtacttgtattgtcatttggagaaacaataaaagatttctaaacca

SEQ ID NO: 134185 - DNA, 345 bp, Artificial Sequence
  derived and/or modified sequence
atgtctctccctagctctcgggccgccagagtgcctggacccagcggcagcctgtgcgcgctcctcgccctccttttgttgctgaccccccctggcccgctggcgagcgccggtcctgtctcagctgttctgaccgagctgagatgcacttgtttacgagtcacattgagagtcaaccccaaaactattggtaagctccaagtgtttcccgcgggcccccagtgttccaaggtggaggttgtcgccagccttaaaaacggcaagcaggtgtgcctggacccagaagccccttttctcaaaaaagtcatacagaagatactggacagcgggaataaaaaaaattag

SEQ ID NO: 134186 - DNA, 345 bp, Artificial Sequence
  derived and/or modified sequence
atgagcctgcccagcagccgggccgcccgggtgcccggccccagcggcagcctgtgtgccctgctggccctgctgctgctgctgaccccacctggccccctggccagcgctggccctgtgtctgctgtgctgacagagctgcgctgcacctgcctgcgggtgaccctgcgggtgaaccccaagaccatcggcaagctgcaggtgtttcctgctggcccccagtgcagcaaggtggaggtggtggccagcctgaagaatggcaagcaggtgtgcctggaccctgaggcccccttcctgaagaaggtgatccagaagatcctggacagcggcaacaagaagaactag

SEQ ID NO: 134187 - DNA, 345 bp, Artificial Sequence
  derived and/or modified sequence
atgagcctgcccagcagccgggccgcccgggtgcccggccccagcggaagcctctgtgccctcctcgcccttttgctactgctaactcctccaggcccccttgcttccgctggcccagtgtctgccgtgctaacagaattgcgatgtacctgtcttcgtgtgacactgagggtgaaccctaagacaatcggaaaattacaagtgtttcccgctggcccccagtgttccaaagtcgaggtcgttgctagtctcaaaaatggtaagcaggtgtgcctcgaccctgaagctccgttcttgaaaaaggtcattcagaaaattctggactcgggcaacaaaaaaaattag

SEQ ID NO: 134188 - DNA, 345 bp, Artificial Sequence
  derived and/or modified sequence
atgtctttgccttcttcgcgtgcagccagggtgcccggacccagcggctcactttgcgccctcctagccctcttgctgctgctgactccacctgggccactggctagcgccggtcctgtgtcagcagtgctcacagagctgcgttgcacatgcttgcgagttaccttgagggtgaatcccaagaccattggaaaactgcaggttttccctgccggtccccaatgcagtaaagttgaagtagttgcgtcgctcaagaatgggaaacaggtttgtctggatccagaagcaccctttctgaagaaggtaatccagaaaatcctggacagcggcaataaaaagaactag

SEQ ID NO: 134189 - DNA, 345 bp, Artificial Sequence
  derived and/or modified sequence
atgagcctgcccagcagcagagccgccagagtgcccggccccagcggcagcctgtgcgccctgctggccctgctgctgctgctgaccccccccggccccctggccagcgccggccccgtgagcgccgtgctgaccgagctgagatgcacctgcctgagagtgaccctgagagtgaaccccaagaccatcggcaagctgcaggtgttccccgccggcccccagtgcagcaaggtggaggtggtggccagcctgaagaacggcaagcaggtgtgcctggaccccgaggcccccttcctgaagaaggtgatccagaagatcctggacagcggcaacaagaagaactag

SEQ ID NO: 134190 - protein, 114 aa, Artificial Sequence
  derived and/or modified sequence
MSLLSSRAARVPGPSSSLCALLVLLLLLTQPGPIASAGPAAAVLRELRCVCLQTTQGVHPKMISNLQVFAIGPQCSKVEVVASLKNGKEICLDPEAPFLKKVIQKILDGGNKEN

SEQ ID NO: 134191 - DNA, 345 bp, Artificial Sequence
  derived and/or modified sequence
atgagcctgctctcttccagagctgctagggttcccggtccttccagcagtctgtgcgctctgttggtactgcttttgctcctgactcagcccggccccattgcttctgccggacccgctgctgccgtgctgcgtgagcttcgatgtgtgtgcttacaaacgacccagggcgttcatcccaagatgattagtaacttacaggtgttcgctatcggacctcagtgctctaaagtcgaagtcgtcgcttccctaaaaaacggtaaagagatctgcctcgaccctgaggccccattcctgaagaaagtcatccagaagatccttgacgggggtaataaagaaaattag

SEQ ID NO: 134192 - DNA, 345 bp, Artificial Sequence
  derived and/or modified sequence
atgagcctgctgagcagccgggccgcccgggtgcccggccccagcagcagcctgtgtgccctgctggtgctgctgctgctgctgacccagcccggccccatcgccagcgctggccctgctgctgctgtgctgcgggagctgcgctgtgtgtgcctgcagaccacccagggcgtgcaccccaagatgatcagcaacctgcaggtgtttgccatcggcccccagtgcagcaaggtggaggtggtggccagcctgaagaatggcaaggagatctgcctggaccctgaggcccccttcctgaagaaggtgatccagaagatcctggatggcggcaacaaggaaaattag

SEQ ID NO: 134193 - DNA, 345 bp, Artificial Sequence
  derived and/or modified sequence
atgagcctgctgagcagccgggccgcccgggtgcccggccccagctcaagcttgtgcgctttgctggtgcttctactcttgcttactcagccaggccccattgcctccgccggccctgccgccgccgtgcttagagaactgcggtgtgtctgcctacaaaccacacagggtgttcaccctaagatgatttctaatttgcaggtgttcgcaatcggcccccaatgcagcaaggtggaggtcgttgcgtcgctgaaaaacggcaaagaaatttgtttagatcccgaagctcctttcctcaaaaaagtgattcagaagatcctggatggcggaaacaaggaaaattag

SEQ ID NO: 134194 - DNA, 345 bp, Artificial Sequence
  derived and/or modified sequence
atgagcttgctctcctcccgcgcagctagagttccaggaccatcgagtagtctgtgtgccttactcgtgcttctcctgctactgactcagcccggtccaattgcctctgccggaccagccgctgcagtcctccgcgagctcagatgcgtctgcttgcagactacccagggcgtacatccaaagatgatttccaacctgcaggtttttgccataggtccacagtgttcgaaagtggaggtggtggcctcccttaagaatgggaaggaaatatgccttgaccccgaggctccattcttgaagaaagttatccagaagatcctcgatggaggcaacaaggagaattag

SEQ ID NO: 134195 - DNA, 2538 bp, Artificial Sequence
  derived and/or modified sequence
ccatgagttcagggaatttccccagcatcccaaagcttgagtttcctgtcagtggggagagatgagtgtagataaaaggagtgcagaaggcacgaggaagccacagtgctccggatcctccaatcttcgctcctccaatctccgctcctccacccagttcaggaacccgcgaccgctcgcagcgctctcttgaccactatgagcctcctgtccagccgcgcggcccgtgtccccggtccttcgagctccttgtgcgcgctgttggtgctgctgctgctgctgacgcagccagggcccatcgccagcgctggtcctgccgctgctgtgttgagagagctgcgttgcgtttgtttacagaccacgcaaggagttcatcccaaaatgatcagtaatctgcaagtgttcgccataggcccacagtgctccaaggtggaagtggtagcctccctgaagaacgggaaggaaatttgtcttgatccagaagccccttttctaaagaaagtcatccagaaaattttggacggtggaaacaaggaaaactgattaagagaaatgagcacgcatggaaaagtttcccagtcttcagcagagaagttttctggaggtctctgaacccagggaagacaagaaggaaagattttgttgttgtttgtttatttgtttttccagtagttagctttcttcctggattcctcactttgaagagtgtgaggaaaacctatgtttgccgcttaagctttcagctcagctaatgaagtgtttagcatagtacctctgctatttgctgttattttatctgctatgctattgaagttttggcaattgactatagtgtgagccaggaatcactggctgttaatctttcaaagtgtcttgaattgtaggtgactattatatttccaagaaatattccttaagatattaactgagaaggctgtggatttaatgtggaaatgatgtttcataagaattctgttgatggaaatacactgttatcttcacttttataagaaataggaaatattttaatgtttcttggggaatatgttagagaatttccttactcttgattgtgggatactatttaattatttcactttagaaagctgagtgtttcacaccttatctatgtagaatatatttccttattcagaatttctaaaagtttaagttctatgagggctaatatcttatcttcctataattttagacattctttatctttttagtatggcaaactgccatcatttacttttaaactttgattttatatgctatttattaagtattttattaggagtaccataattctggtagctaaatatatattttagatagatgaagaagctagaaaacaggcaaattcctgactgctagtttatatagaaatgtattcttttagtttttaaagtaaaggcaaacttaacaatgacttgtactctgaaagttttggaaacgtattcaaacaatttgaatataaatttatcatttagttataaaaatatatagcgacatcctcgaggccctagcatttctccttggataggggaccagagagagcttggaatgttaaaaacaaaacaaaacaaaaaaaaacaaggagaagttgtccaagggatgtcaattttttatccctctgtatgggttagattttccaaaatcataatttgaagaaggccagcatttatggtagaatatataattatatataaggtggccacgctggggcaagttccctccccactcacagctttggcccctttcacagagtagaacctgggttagaggattgcagaagacgagcgggagcggggagggcagggaagatgcctgtcgggtttttagcacagttcatttcactgggattttgaagcatttctgtctgaatgtaaagcctgttctagtcctggtgggacacactggggttgggggtgggggaagatgcggtaatgaaaccggttagtcagtgttgtcttaatatccttgataatgctgtaaagtttatttttacaaatatttctgtttaagctatttcacctttgtttggaaatccttcccttttaaagagaaaatgtgacacttgtgaaaaggcttgtaggaaagctcctccctttttttctttaaacctttaaatgacaaacctaggtaattaatggttgtgaatttctatttttgctttgtttttaatgaacatttgtctttcagaataggattctgtgataatatttaaatggcaaaaacaaaacataattttgtgcaattaacaaagctactgcaagaaaaataaaacatttcttggtaaaaacgtatgtatttatatattatatatttatatataatatatattatatatttagcattgctgagctttttagatgcctattgtgtatcttttaaaggttttgaccattttgttatgagtaattacatatatattacattcactatattaaaattgtacttttttactatgtgtctcattggttcatagtctttattttgtcctttgaataaacattaaaagatttctaaacttca

SEQ ID NO: 134196 - DNA, 345 bp, Artificial Sequence
  derived and/or modified sequence
atgagcctgctgagcagcagagccgccagagtgcccggccccagcagcagcctgtgcgccctgctggtgctgctgctgctgctgacccagcccggccccatcgccagcgccggccccgccgccgccgtgctgagagagctgagatgcgtgtgcctgcagaccacccagggcgtgcaccccaagatgatcagcaacctgcaggtgttcgccatcggcccccagtgcagcaaggtggaggtggtggccagcctgaagaacggcaaggagatctgcctggaccccgaggcccccttcctgaagaaggtgatccagaagatcctggacggcggcaacaaggagaactag

SEQ ID NO: 134197 - protein, 397 aa, Artificial Sequence
  derived and/or modified sequence
MAPISLSWLLRLATFCHLTVLLAGQHHGVTKCNITCSKMTSKIPVALLIHYQQNQASCGKRAIILETRQHRLFCADPKEQWVKDAMQHLDRQAAALTRNGGTFEKQIGEVKPRTTPAAGGMDESVVLEPEATGESSSLEPTPSSQEAQRALGTSPELPTGVTGSSGTRLPPTPKAQDGGPVGTELFRVPPVSTAATWQSSAPHQPGPSLWAEAKTSEAPSTQDPSTQASTASSPAPEENAPSEGQRVWGQGQSPRPENSLEREEMGPVPAHTDAFQDWGPGSMAHVSVVPVSSEGTPSREPVASGSWTPKAEEPIHATMDPQRLGVLITPVPDAQAATRRQAVGLLAFLGLLFCLGVAMFTYQSLQGCPRKMAGEMAEGLRYIPRSCGSNSYVLVPV

SEQ ID NO: 134198 - DNA, 1194 bp, Artificial Sequence
  derived and/or modified sequence
atggccccaataagtctgagttggctgctgcggctggccactttctgccacttgaccgttctgctcgcgggtcagcatcatggtgtcaccaagtgcaatatcacatgttctaagatgacaagtaaaatccccgtggcacttctgatacattaccagcagaatcaagccagctgtggaaagcgtgccattatattagaaaccagacagcacaggctgttctgcgctgaccctaaagaacagtgggtcaaggatgccatgcagcatctcgatcgccaggccgccgccctgactaggaacggaggtacattcgagaagcagatcggcgaagttaagccccgaaccacaccagctgccggggggatggatgaaagtgtcgtcctggagccggaggctaccggtgagagcagcagccttgaacctacaccaagctcccaggaggcccaaagggctttgggaacatcaccagagctgccaacgggcgtgacaggtagcagcggcacgaggctacctcctacccctaaagcccaggacgggggccccgtggggacagaactcttccgggtgccgccggtctcaactgctgcgacctggcagagtagcgctcctcaccagcccggcccaagcctgtgggccgaggcaaagacatcggaggcgcctagcacacaggatcctagtacccaggctagcactgcttcttcacccgccccagaggagaatgccccctctgaggggcagagggtctgggggcagggccagagcccccgtcccgaaaattcgctcgagcgggaagaaatgggccccgtgccggcccatactgatgcattccaggattgggggcccgggagtatggctcacgtgagtgttgtgcctgtctccagtgaaggtactccttctagagagccggtagcaagcggatcctggacccccaaagcagaagagcctattcacgccaccatggaccctcagcggctgggtgtgcttatcacacccgtgccggacgctcaagccgccacacgccggcaggctgtagggcttcttgcattcctcggcttgctgttttgcctaggagtggctatgttcacctatcagtctctgcaagggtgcccacgcaagatggcaggcgaaatggctgaaggactacgctacattccaagatcctgtgggtcaaactcttacgtattggtgccagtatag

SEQ ID NO: 134199 - DNA, 1194 bp, Artificial Sequence
  derived and/or modified sequence
atggcccccatcagcctgtcctggctgctgcggctggccaccttctgccacctgactgtgctgctggccggccagcaccacggcgtgaccaagtgcaacatcacctgcagcaagatgaccagcaagatccctgtggccctgctgatccactaccagcagaaccaggccagctgtgggaagagggccatcatcctggagacccggcagcacaggctcttctgtgccgaccccaaggagcagtgggtgaaggatgccatgcagcacctggaccggcaggccgccgccctgaccagaaatggaggcacctttgagaagcagattggagaggtgaagcccaggaccaccccagctgctgggggcatggatgagagcgtggtgctggagcctgaggccaccggggagagcagcagcctggagcccacccccagcagccaggaggcccagagggccctgggcaccagccctgagctgcccactggagtgacaggcagcagcggcacccggctgccccccacccccaaggcccaggacggcggccctgtgggcacagagctgttccgggtgccccctgtgtccacagctgccacctggcagagcagcgccccccaccagcccggccccagcctgtgggccgaggccaagaccagcgaggcccccagcacccaggaccccagcacccaggccagcacagccagcagccctgcccctgaggagaatgcccccagcgagggccagagggtgtggggccagggccagagccccaggcctgagaacagcctggagcgggaggagatgggccctgtgcctgcccacacagatgccttccaggactggggccctggctccatggcccacgtgtctgtggtgcctgtgtcctctgagggcacccccagccgggagcctgtggccagcggctcctggacccccaaggccgaggagcccatccacgccaccatggacccccagaggctgggcgtgctgatcacccctgtgcctgatgcccaggccgccacccggcggcaggccgtgggcctgctggccttcctgggcctgctcttctgcctgggcgtggccatgttcacctaccagagcctgcagggctgccccaggaagatggccggggagatggccgagggcctgcgctacatccccaggagctgtggcagcaacagctatgtgctggtgcctgtgtag

SEQ ID NO: 134200 - DNA, 1194 bp, Artificial Sequence
  derived and/or modified sequence
atggcccccatcagcctgagctggctgctgcggctggccaccttctgccatcttacagtccttctggcgggacagcatcacggcgtaactaaatgtaacattacctgctcaaaaatgaccagcaaaattcccgtcgcgcttctgatccattaccaacagaatcaggccagctgtggcaaacgcgctattatactcgagaccagacagcacagactcttttgcgccgatcctaaggagcagtgggtcaaagatgccatgcagcatttggaccggcaggccgcagctctaactcgtaacggcggcactttcgagaaacaaattggagaagtgaaacctaggaccacccccgcagccggaggcatggatgagagcgtggtcttggagccagaggcaactggggaaagctctagcctggagcccacgccatccagtcaagaagctcagcgtgctctgggcacaagccctgagctgcccactggagtgacaggatcttccggaacccgcctgcctcccacccccaaggcacaagacgggggccctgttggcacagagttgtttcgggtgcctcccgtgtctacagccgcgacatggcaaagttccgccccccaccagccgggaccctctttgtgggcggaagccaagacaagtgaagccccaagcacacaggatccttcaacgcaagcctctacggcatcatctcccgctcccgaagagaatgcaccttcagagggtcaacgggtgtggggacagggccagtccccacggcccgaaaactctctggagagagaagagatggggcccgtgcccgcacacactgatgctttccaggactgggggcctggttctatggcccacgtatctgtcgtccctgtatcaagcgagggtacaccgtcccgagaaccagttgcctcaggctcctggactccaaaggcagaagaacccatccacgctacaatggatccccagcgcctcggagtcctgatcacaccggtcccggacgctcaggcggctaccagacgccaagctgttgggctattggcttttctcggtctgctgttctgcctgggagtcgccatgtttacttaccaatctctgcaaggctgtccacgcaaaatggctggcgagatggcagagggccttcgatatatcccccgatcttgtggttcaaactcctatgtccttgtgcctgtgtag

SEQ ID NO: 134201 - DNA, 1194 bp, Artificial Sequence
  derived and/or modified sequence
atggcccctatctccctatcttggctccttcgattggctactttctgtcatttgaccgtcctgctggctggacagcaccacggtgttacaaagtgcaacataacttgttcgaaaatgacatctaagataccagtagccttgctcattcactatcagcagaaccaggcctcgtgtggcaagcgggctattattctagaaacgcgacaacatcgtctgttttgtgctgatcccaaggagcaatgggtgaaagatgctatgcagcacctggacaggcaggccgcagcactcacaagaaatggcggtactttcgaaaaacagattggcgaagttaagccccgaaccacaccggctgctggaggcatggatgaatccgtggtgctcgaacctgaggccacgggtgagtcctcttctctcgagccaactcctagtagccaagaagctcagagggcattggggacaagccctgagctgccaaccggcgtcaccggctcatctggcactcggctgccgccaactcctaaagcacaggacgggggacccgtgggaactgaactgtttcgggtacccccagtgtcgactgctgcaacttggcagtcaagcgccccacatcagcccggtccgtccctgtgggcagaggccaagacatcagaagcgcctagcacacaggacccctcaacacaggccagcacggcttcatcaccagctccagaggaaaacgctccctcggaaggtcaacgggtttggggccagggtcagagccccaggcccgaaaattctcttgagagagaagaaatgggacctgttcctgcccatacagacgcgttccaggactgggggccaggcagcatggcccacgtgagcgttgtgcctgtgagttctgaaggaaccccgagcagagagcctgtggcctctggatcttggacgccaaaggccgaggagccaattcacgccacaatggatcctcagagattgggcgtccttatcacccccgtaccagacgcccaggccgctacacgtaggcaggcagtcggcctcctggcattcttgggcttgctcttctgcctgggcgtggccatgttcacatatcagtctctgcaaggctgccccaggaagatggcaggagaaatggccgaagggctacgatatatacctcggtcctgtggcagcaacagttacgtgctggtccctgtttag

SEQ ID NO: 134202 - DNA, 1194 bp, Artificial Sequence
  derived and/or modified sequence
atggctccaatttcccttagctggttgctccgacttgctactttttgccatctgactgtgctgctggctggccaacaccatggagtcaccaagtgtaacatcacctgtagcaaaatgacgagtaagattccagtggcccttctaatacattatcagcagaatcaggccagttgtggtaagcgagcgattatcttggagacccgacaacacagactcttctgcgctgaccccaaggaacagtgggtgaaagacgctatgcagcacctagacaggcaagcagccgccctgacgcggaatggagggacatttgagaagcagattggagaagtcaagccacgcacaacgcctgccgcaggcggaatggatgaaagcgtagtgctcgagcccgaggcaaccggagagagttccagcctggagcccactccgtcaagccaggaagcacaaagggctttaggaacctccccagagctccctacaggagttacagggagttctggtactcgattgcctccaacccccaaagcccaggatggaggaccagtcgggaccgagcttttccgggtaccaccagttagcacagccgctacttggcagtcttcagccccgcatcaacccggcccctcgctttgggccgaagccaagacttccgaggctccttccactcaagatccatccacacaggcctcaacagcttcttcccctgcccccgaggagaatgcccccagcgaaggacagagggtctggggtcaaggccagagtcctaggcctgagaactcactggaaagagaagagatggggccagtgcccgcccataccgatgcattccaggactggggaccaggtagcatggcccacgtgtctgtggtccctgtttcgtcagaaggaaccccatctagggagccagtcgcatccggctcatggacacccaaggccgaagaaccaattcatgcgacaatggatccacaacgtctgggagtgctcatcactccagtgcccgacgctcaggcagccacaaggcgccaggcagtgggattgttggcattcctgggcctactcttttgcctgggagtggctatgtttacttaccagagcctgcaggggtgtccccgcaagatggctggggaaatggctgaaggtctaagatacattccccggtcctgtgggtctaattcttatgttttggtgcccgtttag

SEQ ID NO: 134203 - DNA, 1194 bp, Artificial Sequence
  derived and/or modified sequence
atggcccccatatcattatcctggctgcttagactggctacattttgccatcttaccgttcttttagccggccaacatcatggggtgacaaaatgcaatattacctgttccaagatgacatcgaagatacccgtcgcactactcatccattaccagcagaatcaggccagctgcggtaagcgagcgattatcctggagacccgacagcataggctcttctgtgcagaccccaaggagcagtgggtgaaagatgccatgcaacacctagacagacaggctgccgccttgactcggaatggagggacattcgaaaaacagataggtgaagtgaagccaaggaccacccccgccgctggcggaatggacgagagtgtggtactggaaccggaagcgaccggggaatcttccagtctggaaccaacccctagctcccaagaggcccagagagctctcggaactagtcctgagttgcctactggagtgacaggatcaagtggcacccggctgcctccaacccccaaagcccaggatggcgggcctgtgggtacagaactcttcagagtgccccccgtctccaccgccgccacatggcaatcatccgctccccatcagccaggacctagtctttgggccgaagctaaaacttccgaagcaccaagcacccaagacccgtcgactcaggcttctaccgcctccagcccagcgcccgaggaaaatgctccatccgaaggtcagagagtctggggacagggacagtctcctagacccgaaaatagcttggagagagaagagatgggtcctgtgcctgctcatactgatgctttccaggactggggccccggtagcatggcacacgtttctgtggtgcctgtctcgagcgaagggactccatctagagaacctgtcgctagcggttcttggacaccaaaagctgaagaacccatccacgccactatggatccccagcggctcggagttctgattactcccgtgcctgacgcccaagccgcgactcgcaggcaggctgtcgggcttctagcatttctgggtctgctgttctgtctcggtgtagcaatgttcacctaccagtcgctccaagggtgccctagaaaaatggcaggcgaaatggctgaaggtcttcgatacatcccacgctcctgtggttcaaatagttacgtcctggttcccgtgtag

SEQ ID NO: 134204 - DNA, 3316 bp, Artificial Sequence
  derived and/or modified sequence
aaaaagccacagatctctggcggcggcaaggggacagcactgagctctgccgcctggctctagccgcctgcctggcccccgccgggactcttgcccaccctcagccatggctccgatatctctgtcgtggctgctccgcttggccaccttctgccatctgactgtcctgctggctggacagcaccacggtgtgacgaaatgcaacatcacgtgcagcaagatgacatcaaagatacctgtagctttgctcatccactatcaacagaaccaggcatcatgcggcaaacgcgcaatcatcttggagacgagacagcacaggctgttctgtgccgacccgaaggagcaatgggtcaaggacgcgatgcagcatctggaccgccaggctgctgccctaactcgaaatggcggcaccttcgagaagcagatcggcgaggtgaagcccaggaccacccctgccgccgggggaatggacgagtctgtggtcctggagcccgaagccacaggcgaaagcagtagcctggagccgactccttcttcccaggaagcacagagggccctggggacctccccagagctgccgacgggcgtgactggttcctcagggaccaggctccccccgacgccaaaggctcaggatggagggcctgtgggcacggagcttttccgagtgcctcccgtctccactgccgccacgtggcagagttctgctccccaccaacctgggcccagcctctgggctgaggcaaagacctctgaggccccgtccacccaggacccctccacccaggcctccactgcgtcctccccagccccagaggagaatgctccgtctgaaggccagcgtgtgtggggtcagggacagagccccaggccagagaactctctggagcgggaggagatgggtcccgtgccagcgcacacggatgccttccaggactgggggcctggcagcatggcccacgtctctgtggtccctgtctcctcagaagggacccccagcagggagccagtggcttcaggcagctggacccctaaggctgaggaacccatccatgccaccatggacccccagaggctgggcgtccttatcactcctgtccctgacgcccaggctgccacccggaggcaggcggtggggctgctggccttccttggcctcctcttctgcctgggggtggccatgttcacctaccagagcctccagggctgccctcgaaagatggcaggagagatggcggagggccttcgctacatcccccggagctgtggtagtaattcatatgtcctggtgcccgtgtgaactcctctggcctgtgtctagttgtttgattcagacagctgcctgggatccctcatcctcatacccacccccacccaagggcctggcctgagctgggatgattggaggggggaggtgggatcctccaggtgcacaagctccaagctcccaggcattccccaggaggccagccttgaccattctccacctgccagggacagagggggtggcctcccaactcaccccagccccaaaactctcctctgctgctggctggttagaggttccctttgacgccatcccagccccaatgaacaattatttattaaatgcccagccccttctgacccatgctgccctgtgagtactacagtcctcccatctcacacatgagcatcaggccaggccctctgcccactccctgcaacctgattgtgtctcttggtcctgctgcagttgccagtcaccccggccacctgcggtgctatctcccccagccccatcctctgtacagagcccacgcccccactggtgacatgtcttttcttgcatgaggctagtgtggtgtttcctggcactgcttccagtgaggctctgcccttggttaggcattgtgggaaggggagataagggtatctggtgactttcctctttggtctacactgtgctgagtctgaaggctgggttctgatcctagttccaccatcaagccaccaacatactcccatctgtgaaaggaaagagggaggtaaggaatacctgtccccctgacaacactcattgacctgaggcccttctctccagcccctggatgcagcctcacagtccttaccagcagagcaccttagacagtccctgccaatggactaacttgtctttggaccctgaggcccagagggcctgcaagggagtgagttgatagcacagaccctgccctgtgggcccccaaatggaaatgggcagagcagagaccatccctgaaggccccgcccaggcttagtcactgagacagcccgggctctgcctcccatcacccgctaagagggagggagggctccagacacatgtccaagaagcccaggaaaggctccaggagcagccacattcctgatgcttcttcagagactcctgcaggcagccaggccacaagacccttgtggtcccaccccacacacgccagattctttcctgaggctgggctcccttcccacctctctcactccttgaaaacactgttctctgccctccaagaccttctccttcacctttgtccccaccgcagacaggaccagggatttccatgatgttttccatgagtcccctgtttgtttctgaaagggacgctacccgggaagggggctgggacatgggaaaggggaagttgtaggcataaagtcaggggttcccttttttggctgctgaaggctcgagcatgcctggatggggctgcaccggctggcctggcccctcagggtccctggtggcagctcacctctcccttggattgtccccgacccttgccgtctacctgaggggcctcttatgggctgggttctacccaggtgctaggaacactccttcacagatgggtgcttggaggaaggaaacccagctctggtccatagagagcaagacgctgtgctgccctgcccacctggcctctgcactcccctgctgggtgtggcgcagcatattcaggaagctcagggcctggctcaggtggggtcactctggcagctcagagagggtgggagtgggcccaatgcactttgttctggctcttccaggctgggagagccttccaggggtgggacaccctgtgatggggccctgcctcctttgtgaggaagccgctggggccagttggtcccccttccatggactttgttagtttctccaagcaggacatggacaaggatgatctaggaagactttggaaagagtaggaagactttggaaagacttttccaaccctcatcaccaacgtctgtgccattttgtattttactaataaaatttaaaagtcttgtgaatcaa

SEQ ID NO: 134205 - DNA, 1194 bp, Artificial Sequence
  derived and/or modified sequence
atggcccccatcagcctgagctggctgctgagactggccaccttctgccacctgaccgtgctgctggccggccagcaccacggcgtgaccaagtgcaacatcacctgcagcaagatgaccagcaagatccccgtggccctgctgatccactaccagcagaaccaggccagctgcggcaagagagccatcatcctggagaccagacagcacagactgttctgcgccgaccccaaggagcagtgggtgaaggacgccatgcagcacctggacagacaggccgccgccctgaccagaaacggcggcaccttcgagaagcagatcggcgaggtgaagcccagaaccacccccgccgccggcggcatggacgagagcgtggtgctggagcccgaggccaccggcgagagcagcagcctggagcccacccccagcagccaggaggcccagagagccctgggcaccagccccgagctgcccaccggcgtgaccggcagcagcggcaccagactgccccccacccccaaggcccaggacggcggccccgtgggcaccgagctgttcagagtgccccccgtgagcaccgccgccacctggcagagcagcgccccccaccagcccggccccagcctgtgggccgaggccaagaccagcgaggcccccagcacccaggaccccagcacccaggccagcaccgccagcagccccgcccccgaggagaacgcccccagcgagggccagagagtgtggggccagggccagagccccagacccgagaacagcctggagagagaggagatgggccccgtgcccgcccacaccgacgccttccaggactggggccccggcagcatggcccacgtgagcgtggtgcccgtgagcagcgagggcacccccagcagagagcccgtggccagcggcagctggacccccaaggccgaggagcccatccacgccaccatggacccccagagactgggcgtgctgatcacccccgtgcccgacgcccaggccgccaccagaagacaggccgtgggcctgctggccttcctgggcctgctgttctgcctgggcgtggccatgttcacctaccagagcctgcagggctgccccagaaagatggccggcgagatggccgagggcctgagatacatccccagaagctgcggcagcaacagctacgtgctggtgcccgtgtag

SEQ ID NO: 134206 - protein, 201 aa, Artificial Sequence
  derived and/or modified sequence
MRRAWILLTLGLVACVSAESRAELTSDKDMYLDNSSIEEASGVYPIDDDDYASASGSGADEDVESPELTTSRPLPKILLTSAAPKVETTTLNIQNKIPAQTKSPEETDKEKVHLSDSERKMDPAEEDTNVYTEKHSDSLFKRTEVLAAVIAGGVIGFLFAIFLILLLVYRMRKKDEGSYDLGERKPSSAAYQKAPTKEFYA

SEQ ID NO: 134207 - protein, 165 aa, Artificial Sequence
  derived and/or modified sequence
MRRAWILLTLGLVACVSAESVRADEDVESPELTTSRPLPKILLTSAAPKVETTTLNIQNKIPAQTKSPEETDKEKVHLSDSERKMDPAEEDTNVYTEKHSDSLFKRTEVLAAVIAGGVIGFLFAIFLILLLVYRMRKKDEGSYDLGERKPSSAAYQKAPTKEFYA

SEQ ID NO: 134208 - protein, 191 aa, Artificial Sequence
  derived and/or modified sequence
MRVACVSAESRAELTSDKDMYLDNSSIEEASGVYPIDDDDYASASGSGADEDVESPELTTSRPLPKILLTSAAPKVETTTLNIQNKIPAQTKSPEETDKEKVHLSDSERKMDPAEEDTNVYTEKHSDSLFKRTEVLAAVIAGGVIGFLFAIFLILLLVYRMRKKDEGSYDLGERKPSSAAYQKAPTKEFYA

SEQ ID NO: 134209 - DNA, 606 bp, Artificial Sequence
  derived and/or modified sequence
atgagaagagcctggatcctgctgaccctgggcctggtggcctgcgtgagcgccgagagcagagccgagctgaccagcgacaaggacatgtacctggacaacagcagcatcgaggaggccagcggcgtgtaccccatcgacgacgacgactacgccagcgccagcggcagcggcgccgacgaggacgtggagagccccgagctgaccaccagcagacccctgcccaagatcctgctgaccagcgccgcccccaaggtggagaccaccaccctgaacatccagaacaagatccccgcccagaccaagagccccgaggagaccgacaaggagaaggtgcacctgagcgacagcgagagaaagatggaccccgccgaggaggacaccaacgtgtacaccgagaagcacagcgacagcctgttcaagagaaccgaggtgctggccgccgtgatcgccggcggcgtgatcggcttcctgttcgccatcttcctgatcctgctgctggtgtacagaatgagaaagaaggacgagggcagctacgacctgggcgagagaaagcccagcagcgccgcctaccagaaggcccccaccaaggagttctacgcctag

SEQ ID NO: 134210 - DNA, 498 bp, Artificial Sequence
  derived and/or modified sequence
atgagaagagcctggatcctgctgaccctgggcctggtggcctgcgtgagcgccgagagcgtgagagccgacgaggacgtggagagccccgagctgaccaccagcagacccctgcccaagatcctgctgaccagcgccgcccccaaggtggagaccaccaccctgaacatccagaacaagatccccgcccagaccaagagccccgaggagaccgacaaggagaaggtgcacctgagcgacagcgagagaaagatggaccccgccgaggaggacaccaacgtgtacaccgagaagcacagcgacagcctgttcaagagaaccgaggtgctggccgccgtgatcgccggcggcgtgatcggcttcctgttcgccatcttcctgatcctgctgctggtgtacagaatgagaaagaaggacgagggcagctacgacctgggcgagagaaagcccagcagcgccgcctaccagaaggcccccaccaaggagttctacgcctag

SEQ ID NO: 134211 - DNA, 576 bp, Artificial Sequence
  derived and/or modified sequence
atgagagtggcctgcgtgagcgccgagagcagagccgagctgaccagcgacaaggacatgtacctggacaacagcagcatcgaggaggccagcggcgtgtaccccatcgacgacgacgactacgccagcgccagcggcagcggcgccgacgaggacgtggagagccccgagctgaccaccagcagacccctgcccaagatcctgctgaccagcgccgcccccaaggtggagaccaccaccctgaacatccagaacaagatccccgcccagaccaagagccccgaggagaccgacaaggagaaggtgcacctgagcgacagcgagagaaagatggaccccgccgaggaggacaccaacgtgtacaccgagaagcacagcgacagcctgttcaagagaaccgaggtgctggccgccgtgatcgccggcggcgtgatcggcttcctgttcgccatcttcctgatcctgctgctggtgtacagaatgagaaagaaggacgagggcagctacgacctgggcgagagaaagcccagcagcgccgcctaccagaaggcccccaccaaggagttctacgcctag

SEQ ID NO: 134212 - DNA, 606 bp, Artificial Sequence
  derived and/or modified sequence
atgaggagggcgtggatccttctaactcttggcctggtggcatgcgttagcgccgaaagtagagccgaactcactagcgataaggacatgtacctagacaattcttcaatcgaggaagccagcggagtttaccctattgatgacgatgactatgctagtgcctccggttctggggctgatgaggatgtcgaatccccagagcttactacaagtaggcccctgcctaagatactgttgacctctgcagccccaaaagtggaaaccaccacgcttaatatccagaataagatacccgcccaaacaaaaagcccagaggagaccgataaggagaaagtgcacctctcagattctgaacggaagatggaccccgctgaagaagatacaaacgtctacacagagaaacattccgattcactattcaagcgcacagaggtgctcgccgctgtcattgctgggggggtgataggcttcctctttgcaatttttctcattctgttactggtttaccgcatgcgcaagaaggatgagggttcttatgacctgggggagcggaagcccagctctgctgcatatcagaaggcccccactaaggaattctacgcatag

SEQ ID NO: 134213 - DNA, 498 bp, Artificial Sequence
  derived and/or modified sequence
atgcgccgcgcctggattctgctgaccctgggactggttgcttgtgttagcgctgagagcgttcgcgccgatgaggatgtggagtcaccggagctaacgaccagtcgtccattaccaaaaattttactcactagcgctgcccccaaggtggaaaccaccacacttaatatccagaataagattccggcacagacaaagtcccccgaggaaacagataaggaaaaagtgcacttgtctgacagtgaacgaaaaatggatccagcggaggaggataccaacgtctacacagaaaaacattctgactctctcttcaaacgaactgaggtgctcgcagcagtcatcgctggcggagtgatcggtttcttgttcgcaatcttcttgattttgctgctagtgtatcggatgagaaaaaaggatgaaggctcatacgacctcggcgaaagaaagcccagtagcgcggcataccagaaggcccccactaaggaattctacgcatag

SEQ ID NO: 134214 - DNA, 606 bp, Artificial Sequence
  derived and/or modified sequence
atgcgcagggcatggatcctgttgaccctggggctagtcgcttgcgtatcagccgagagcagagccgagttaacctccgataaggatatgtacctggacaattccagcattgaagaggcctccggcgtgtatccaattgacgatgatgactatgcctcagcgagcggatccggtgccgacgaggatgttgagtcaccggaattaaccacatcacgaccacttccgaagatacttctgacctccgctgcacctaaagtcgagacaacaaccttaaacatccagaacaagattccagcacagactaaaagcccggaggaaacggacaaggagaaagtccatctgagtgatagcgagcgcaagatggaccccgccgaagaggacactaatgtctacactgagaaacatagtgactcactgtttaaacgcactgaggtactggcagccgtcattgctgggggagttatcggcttcctcttcgcaatcttcctgatcttactgctggtctataggatgagaaagaaagatgaaggatcctatgacctgggagagaggaagccatcctccgccgcttaccaaaaagctccaactaaggaattttacgcatag

SEQ ID NO: 134215 - DNA, 576 bp, Artificial Sequence
  derived and/or modified sequence
atgcgcgtagcatgtgtatccgccgaatctagagctgaactgacatccgacaaagatatgtatctggataactcaagcatcgaagaggccagtggggtatatcccatcgatgacgatgactatgctagcgccagcgggagtggggccgacgaagatgtcgagagtcccgagctgaccacatccaggcccctgcctaagattctgttaacttcggccgcgcctaaggtagagacaacaaccctaaatatccaaaacaaaataccggctcagacaaagtctcctgaggagacggacaaggagaaagtgcatttgtcagactcagagagaaaaatggaccccgctgaagaagatacaaatgtgtacaccgaaaagcactcggattcactttttaagagaaccgaagttctggctgcagtgatagctggcggtgttattggctttctgttcgccatattcttgattctacttttagtgtaccgaatgcgtaagaaggacgaaggcagctacgacctgggggaacggaaaccatcctcagcagcttatcagaaggcgcctacaaaagaattttacgcttag

SEQ ID NO: 134216 - DNA, 606 bp, Artificial Sequence
  derived and/or modified sequence
atgaggcgggcctggatcctgctgaccctgggcctggtggcctgtgtgtctgctgagagcagagctgagctgaccagtgacaaggacatgtacctggacaacagcagcattgaggaggccagcggcgtgtaccccattgatgatgatgattatgccagcgccagcggcagcggggctgatgaagatgtggagagccctgagctgaccaccagccggcccctgcccaagatcctgctgaccagcgctgcccccaaggtggagaccaccaccctgaacatccagaacaagatcccagcccagaccaagagccctgaggagacagacaaggagaaggtgcacctgagtgacagcgagaggaagatggaccctgctgaggaggacaccaacgtgtacacagagaagcacagcgacagcctcttcaagaggacagaggtgctggccgctgtgattgctggaggagtgattggcttcctgtttgccatcttcctgatcctgctgctggtgtacaggatgaggaagaaggatgagggcagctatgacctgggggagaggaagcccagcagcgctgcctaccagaaggcccccaccaaggagttctacgcctag

SEQ ID NO: 134217 - DNA, 498 bp, Artificial Sequence
  derived and/or modified sequence
atgaggcgggcctggatcctgctgaccctgggcctggtggcctgtgtgtctgctgagagcgtgcgggcagatgaagatgtggagagccctgagctgaccaccagccggcccctgcccaagatcctgctgaccagcgctgcccccaaggtggagaccaccaccctgaacatccagaacaagatcccagcccagaccaagagccctgaggagacagacaaggagaaggtgcacctgagtgacagcgagaggaagatggaccctgctgaggaggacaccaacgtgtacacagagaagcacagcgacagcctcttcaagaggacagaggtgctggccgctgtgattgctggaggagtgattggcttcctgtttgccatcttcctgatcctgctgctggtgtacaggatgaggaagaaggatgagggcagctatgacctgggggagaggaagcccagcagcgctgcctaccagaaggcccccaccaaggagttctacgcctag

SEQ ID NO: 134218 - DNA, 576 bp, Artificial Sequence
  derived and/or modified sequence
atgagggtggcctgtgtgtctgctgagagcagagctgagctgaccagtgacaaggacatgtacctggacaacagcagcattgaggaggccagcggcgtgtaccccattgatgatgatgattatgccagcgccagcggcagcggggctgatgaagatgtggagagccctgagctgaccaccagccggcccctgcccaagatcctgctgaccagcgctgcccccaaggtggagaccaccaccctgaacatccagaacaagatcccagcccagaccaagagccctgaggagacagacaaggagaaggtgcacctgagtgacagcgagaggaagatggaccctgctgaggaggacaccaacgtgtacacagagaagcacagcgacagcctcttcaagaggacagaggtgctggccgctgtgattgctggaggagtgattggcttcctgtttgccatcttcctgatcctgctgctggtgtacaggatgaggaagaaggatgagggcagctatgacctgggggagaggaagcccagcagcgctgcctaccagaaggcccccaccaaggagttctacgcctag

SEQ ID NO: 134219 - DNA, 606 bp, Artificial Sequence
  derived and/or modified sequence
atgcggcgggcctggatcctgctgaccctgggcctggtggcctgcgtcagcgccgagtcaagggcagaactaacaagtgacaaggatatgtacttagataatagtagcatagaagaagcctccggtgtgtatcccatagacgatgacgattacgctagtgctagtggctccggcgcagacgaggacgttgagtcacccgaactcacaaccagcaggcctttgcccaagatcctgctgacaagcgccgcccccaaggtcgagaccacgaccctaaacattcagaataagataccagcccagactaagagcccagaggagacagacaaggagaaagtgcacctgagtgactcagaacgcaaaatggatcccgccgaagaggatacaaacgtttacacagaaaagcatagtgactccctctttaaacggacagaagtgctggcagccgttattgccgggggggtgattgggtttctgtttgctatttttctcattttgctgctggtatacagaatgagaaaaaaggacgaagggtcctacgacctcggagagcgcaaaccatcctccgcagcttaccaaaaggcgccgacgaaagaattttacgcctag

SEQ ID NO: 134220 - DNA, 498 bp, Artificial Sequence
  derived and/or modified sequence
atgcggcgggcctggatcctgctgaccctgggcctggtggcctgcgtgagcgccgaatctgtgcgggctgacgaagacgtagagtctcctgaactgacaactagccggccactgccaaaaattttgctgacctccgccgctcccaaggtggaaacaaccaccctgaatattcaaaataaaattccagcacaaacgaagagccctgaggaaactgacaaggaaaaggttcacttgagcgactctgagagaaaaatggaccctgccgaagaagacaccaatgtgtacacagaaaagcattcagactccctcttcaaacggacggaagtccttgcggctgtgattgccggtggcgtgataggatttctgtttgccatctttcttatactgcttctggtctatcgtatgcgcaaaaaggacgagggcagctatgatttaggcgagcggaagccatcttccgcagcttatcagaaagcccccactaaggaattttatgcctag

SEQ ID NO: 134221 - DNA, 606 bp, Artificial Sequence
  derived and/or modified sequence
atgcggcgggcctggatcctgctgaccctgggcctggtggcctgcgtgtcagcagagtctcgcgcggaattgacttccgataaggacatgtatctggataattcgtcgatcgaagaggccagcggggtgtatccgatcgatgatgacgattatgctagcgctagcggatccggcgcggacgaggatgtcgaatccccagagctgactacatccagacccctgcccaagatcctcctaacctctgccgctccaaaggtcgagacaactacactaaacatccagaataagatacccgcccagaccaaatcccccgaggagaccgataaagagaaagtccacctctcagattcggaaagaaaaatggaccctgctgaagaagataccaacgtgtacacggagaagcactccgacagtctatttaagcgcacagaggtcctggctgccgtgattgctgggggagtgataggttttctatttgctatcttccttatcctgctgctggtatacaggatgcggaaaaaggacgagggcagttacgatctgggcgagcgcaaaccgtcctcggctgcatatcagaaggctccaaccaaagagttttatgcctag

SEQ ID NO: 134222 - DNA, 576 bp, Artificial Sequence
  derived and/or modified sequence
atgcgggtggcctgcgtgagcgccgagagccgggccgagctgaccagcgataaagatatgtacttagacaattcttctatcgaggaagcttcgggtgtttatcctattgacgacgatgattatgcctccgcaagcggctctggtgccgacgaggacgttgaaagtccggagttaactacatcccgacctcttcctaagatcctgcttacctccgccgccccgaaagtggaaacaacgactctgaatatacagaataagatcccagcacagactaaatctcccgaggagacggacaaggaaaaggtgcacttaagcgactcagagcgcaagatggatcccgcagaagaagacacgaatgtatacaccgagaaacactccgactcgctgttcaagcggactgaagtactggccgccgtgattgcgggtggcgtgatcggatttctgttcgccattttcttgattctgcttcttgtgtaccgaatgcggaaaaaggacgaaggcagctatgacttaggagaacggaagcccagcagtgccgcatatcagaaagccccaactaaggaattttatgcgtag

SEQ ID NO: 134223 - DNA, 606 bp, Artificial Sequence
  derived and/or modified sequence
atgagaagggcgtggatccttctaacgttgggcctagtagcatgtgtctccgccgagtcaagggcggaactgacgagcgataaagatatgtatctcgacaactcatccatagaggaagccagcggagtataccctattgacgatgatgactacgcatccgcttccggcagcggagcagatgaagatgtcgagtctcctgagttgacaacaagtagacccctgcctaaaatcctactgacctctgccgctcccaaggttgagactactaccctaaacattcagaataaaatcccagcccaaactaagtcacccgaggaaacggacaaagaaaaagtccatctcagtgactccgagaggaagatggacccagctgaggaggacactaatgtgtataccgagaaacacagtgattctctgttcaagcgtaccgaagtactagccgctgtgatcgctggcggagttattggttttctttttgccatcttcttgatcctgctcttggtgtatcggatgcgcaaaaaagacgaaggctcatatgacctaggggaaaggaagcctagcagcgccgcttatcagaaagcccctaccaaggaattctacgcgtag

SEQ ID NO: 134224 - DNA, 498 bp, Artificial Sequence
  derived and/or modified sequence
atgaggagggcgtggatcttgttgactttgggcctggtagcttgcgtttcagcagagtccgtgagggccgatgaagacgtcgagtctccagaactgactacaagccggccactgcccaagattcttttaacaagtgcagctcccaaggtggaaacaacaacgttgaacatccagaataagatccccgcacagactaagagtccagaagaaactgacaaggagaaggtccacttgagcgacagtgagaggaagatggacccggcagaagaagacaccaacgtgtacacagaaaaacactcagactccctttttaaacgaaccgaagtgttagccgcagtaattgcgggaggcgtcattgggttcctgtttgcaatctttctgatcctgttactggtgtatagaatgagaaagaaggacgaggggtcatacgacctgggagagcgtaaaccttcctccgctgcataccagaaagcccctacgaaggagttctacgcctag

SEQ ID NO: 134225 - DNA, 606 bp, Artificial Sequence
  derived and/or modified sequence
atgaggcgcgcatggatactgctgacactgggcctagtggcgtgcgtttctgccgagtcaagggccgagctgacaagtgacaaagatatgtatctggacaattccagtatagaggaagctagtggggtgtatccgattgatgatgatgactatgcctccgccagcggtagcggcgcagatgaggacgtagagagtccggagttgactacttcccgtccactacctaagattctactgacttccgcagccccaaaagtggagacgacgacgctgaatatacagaataaaattcccgctcagacgaagtctccagaggaaaccgataaggagaaagtccacctttccgactcagagcgcaaaatggaccccgctgaggaagatacaaatgtctatactgaaaaacattccgacagtctcttcaaaaggaccgaggtgctggccgctgtaattgccggaggggtgatcggatttctattcgccatcttcctcatcttactgctcgtgtacagaatgcggaaaaaggatgaagggtcttatgacttgggcgaacgcaaaccatctagtgccgcatatcagaaagctcccacaaaggagttttatgcttag

SEQ ID NO: 134226 - DNA, 576 bp, Artificial Sequence
  derived and/or modified sequence
atgagagtcgcctgtgtcagcgccgagtcacgcgctgaactgacctccgataaggatatgtatctggacaatagctccatcgaggaagcatctggtgtgtatcccattgacgacgatgactatgcatcagcaagcggtagtggcgctgatgaggacgttgaatcgccggaattaactacaagtaggcctctcccaaagattctcttgactagtgccgctcccaaagtggagacgaccactttaaacattcagaacaagatccctgcccagaccaaaagtcccgaagagaccgacaaagagaaggtgcacctgagcgactcagagagaaagatggatcccgcagaagaagacaccaacgtctatactgagaagcactccgacagcctattcaagagaaccgaggtgctggctgccgtcatcgcgggtggcgttatcggatttctgttcgccattttcttaatactgctgcttgtttataggatgagaaagaaggatgaaggaagctatgaccttggggagaggaagcccagctctgccgcatatcagaaagccccaactaaggaattttatgcctag

SEQ ID NO: 134227 - DNA, 3751 bp, Artificial Sequence
  derived and/or modified sequence
agaaaagctacatacgtctctcgtttcttcactaattgttctctagaaaagggaaagtgaagaagggaaagagaaaagacaacggggaagaaaagagcatagaggagagaggaaaagtggggagagaaaggaagaaaaggactgagaaaacgcaggagccctggcttgccggtgagcagagccggcgcagccacagcgcggagccgcggcgcccactggtcctcggagctgccaatcggcgtgtaatcctgtaggaatttctcccgggtttatctgggagtcacactgccgcctcctctccccagtcgcccaggggagcccggagaagcaggctcaggagggagggagccagaggaaaagaagaggaggagaaggaggaggacccggggagggaggcgcggcgcgggaggaggaggggcgcagccgcggagccagtggccccgcttggacgcgctgctctccagatacccccggagctccagccgcgcggatcgcgcgctcccgccgctctgcccctaaacttctgccgtagctccctttcaagccagcgaatttattccttaaaaccagaaactgaacctcggcacgggaaaggagtccgcggaggagcaaaaccacagcagagcaagaagagcttcagagagcagccttcccggagcaccaactccgtgtcgggagtgcagaaaccaacaagtgagagggcgccgcgttcccggggcgcagctgcgggcggcgggagcaggcgcaggaggaggaagcgagcgcccccgagccccgagcccgagtccccgagcctgagccgcaatcgctgcggtactctgctccggattcgtgtgcgcgggctgcgccgagcgctgggcaggaggcttcgttttgccctggttgcaagcagcggctgggagcagccggtccctggggaatatgcggcgcgcgtggatcctgctcaccttgggcttggtggcctgcgtgtcggcggagtcgagagcagagctgacatctgataaagacatgtaccttgacaacagctccattgaagaagcttcaggagtgtatcctattgatgacgatgactacgcttctgcgtctggctcgggagctgatgaggatgtagagagtccagagctgacaacatctcgaccacttccaaagatactgttgactagtgctgctccaaaagtggaaaccacgacgctgaatatacagaacaagatacctgctcagacaaagtcacctgaagaaactgataaagagaaagttcacctctctgactcagaaaggaaaatggacccagccgaagaggatacaaatgtgtatactgagaaacactcagacagtctgtttaaacggacagaagtcctagcagctgtcattgctggtggagttattggctttctctttgcaatttttcttatcctgctgttggtgtatcgcatgagaaagaaggatgaaggaagctatgaccttggagaacgcaaaccatccagtgctgcttatcagaaggcacctactaaggagttttatgcgtaaaactccaacttagtgtctctatttatgagatcactgaacttttcaaaataaagcttttgcatagaataatgaagatctttgttttttgttttcattaaagagccattctggcactttaatgataaaatcccattgtatttaaaacatttcatgtatttctttagaacaacataaaattaaaatttaacatctgcagtgttctgtgaatagcagtggcaaaatattatgttatgaaaaccctcgatgttcatggaattggtttaaacttttatgcgcaaatacaaaatgattgtctttttcctatgactcaaagatgaaagctgtttcatttgtgtcagcatgtctcagattgaccttaccaagttggtcttactttgttaatttatctgttgtccccttcctctcctctgccctcccttcttgtgcccttaaaaccaaaccctatgccttttgtagctgtcatggtgcaatttgtctttggaaaattcagataatggtaatttagtgtatatgtgattttcaaatatgtaaactttaacttccactttgtataaatttttaagtgtcagactatccattttacacttgctttatttttcattacctgtagctttgggcagatttgcaacagcaaattaatgtgtaaaattggattattactacaaaaccgtttagtcatatctatctaatcagatcttcttttgggaggatttgatgtaagttactgacaagcctcagcaaacccaaagatgttaacagtattttaagaagttgctgcagattcctttggccactgtatttgttaatttcttgcaatttgaaggtacgagtagaggtttaaagaaaaatcagtttttgttcttaaaaatgcatttaagttgtaaacgtctttttaagcctttgaagtgcctctgattctatgtaacttgttgcagactggtgttaatgagtatatgtaacagtttaaaaaaaaagttggtattttataagcacagacaattctaatggtaacttttgtagtcttatgaatagacataaattgtaatttgggaacataaaaactactgaataaatcatgtggcctaatattgaaaatgtcactgttataaattttgtacatttttgatcaaatgtacatctcccctttgctaacggccgtctgctctcaaggatgacgtgggtttgatttctaagtgtttcacagtgtctgtaaatcaagaccaaagagcctgtcgatgagactgtttattaccagattcacttctgaattggccagaggaaatctgaatgtattatcctgtgtgtgtctaggtagagatattggaaggctgccaggggatttcgaagtttgcaacctttataggataactgatggcaatattaagacagacgcctgcttttgcaaataacttacaagactgtaaattccaaagatctgaatggggctttcctgatgttggtatctaaggcttaggcctatagattgatttacctttggaattgtgctccaaatgtctactgaagcttaaccgaagaactaataaatggactacagtagctcacgttacagggaaggagggtaggcagggaggctctgtgtgttaaaatgagggtctcactgctttaggattgaagtggctggaaagagtgatgcctggggaaggagatggagttatgagggtactgtggctggtactttctgtactaaacatttcctttttctattttaccactaattttgttttaaactgtgagccgtccaagtcagaagaagacagcaaaaaaagcaacttttccaacatacaatttacttttaataaagtatgaatatttcattttgagaacattccctggaattgccacataattcattaaaaacatttttttaagcaacacttggaacagtgtttactttaaatccttaatggccttaattaattctcagattcctgccccatcacttacagaaccaattcactttagagtgactaaaaggaaacgatagcctagctttctaaagccacgctgtgtccctcaattacagagggtaggaatgggtatacctctaactgtgcaaagcagagtgaaattcaattcatagaataacaactgctgggaatatccgtgccaggaaaagaaaaatttctggcaaatattttgtcactgctgtaaagcaaaatatttgtgaaagtgccaaaataaagtctgtcatgccaaaagtaaa

SEQ ID NO: 134228 - DNA, 1583 bp, Artificial Sequence
  derived and/or modified sequence
agatacccccggagctccagccgcgcggatcgcgcgctcccgccgctctgcccctaaacttctgccgtagctccctttcaagccagcgaatttattccttaaaaccagaaactgaacctcggcacgggaaaggagtccgcggaggagcaaaaccacagcagagcaagaagagcttcagagagcagccttcccggagcaccaactccgtgtcgggagtgcagaaaccaacaagtgagagggcgccgcgttcccggggcgcagctgcgggcggcgggagcaggcgcaggaggaggaagcgagcgcccccgagccccgagcccgagtccccgagcctgagccgcaatcgctgcggtactctgctccggattcgtgtgcgcgggctgcgccgagcgctgggcaggaggcttcgttttgccctggttgcaagcagcggctgggagcagccggtccctggggaatatgcggcgcgcgtggatcctgctcaccttgggcttggtggcctgcgtgtcggcggagtcggtgagagctgatgaggatgtagagagtccagagctgacaacatctcgaccacttccaaagatactgttgactagtgctgctccaaaagtggaaaccacgacgctgaatatacagaacaagatacctgctcagacaaagtcacctgaagaaactgataaagagaaagttcacctctctgactcagaaaggaaaatggacccagccgaagaggatacaaatgtgtatactgagaaacactcagacagtctgtttaaacggacagaagtcctagcagctgtcattgctggtggagttattggctttctctttgcaatttttcttatcctgctgttggtgtatcgcatgagaaagaaggatgaaggaagctatgaccttggagaacgcaaaccatccagtgctgcttatcagaaggcacctactaaggagttttatgcgtaaaactccaacttagtgtctctatttatgagatcactgaacttttcaaaataaagcttttgcatagaataatgaagatctttgttttttgttttcattaaagagccattctggcactttaatgataaaatcccattgtatttaaaacatttcatgtatttctttagaacaacataaaattaaaatttaacatctgcagtgttctgtgaatagcagtggcaaaatattatgttatgaaaaccctcgatgttcatggaattggtttaaacttttatgcgcaaatacaaaatgattgtctttttcctatgactcaaagatgaaagctgtttcatttgtgtcagcatgtctcagattgaccttaccaagttggtcttactttgttaatttatctgttgtccccttcctctcctctgccctcccttcttgtgcccttaaaaccaaaccctatgccttttgtagctgtcatggtgcaatttgtctttggaaaattcagataatggtaatttagtgtatatgtgattttcaaatatgtaaactttaacttccactttgtataaatttttaagtgtcagactatccattttacacttgctttatttttcattacctgtagctttgggcagatttgc

SEQ ID NO: 134229 - DNA, 2116 bp, Artificial Sequence
  derived and/or modified sequence
agatacccccggagctccagccgcgcggatcgcgcgctcccgccgctctgcccctaaacttctgccgtagctccctttcaagccagcgaatttattccttaaaaccagaaactgaacctcggcacgggaaaggagtccgcggaggagcaaaaccacagcagagcaagaagagcttcagagagcagccttcccggagcaccaactccgtgtcgggagtgcagaaaccaacaagtgagagggcgccgcgttcccggggcgcagctgcgggcggcgggagcccgagtccccgagcctgagccgcaatcgctgcggtactctgctccggattcgtgtgcgcgggctgcgccgagcgctgggcaggaggcttcgttttgccctggttgcaagcagcggctgggagcagccggtccctggggaatatgcggcgcgcgtggatcctgctcaccttgggcttggtggcctgcgtgtcggcggagtcgagagcagagctgacatctgataaagacatgtaccttgacaacagctccattgaagaagcttcaggagtgtatcctattgatgacgatgactacgcttctgcgtctggctcgggagctgatgaggatgtagagagtccagagctgacaacatctcgaccacttccaaagatactgttgactagtgctgctccaaaagtggaaaccacgacgctgaatatacagaacaagatacctgctcagacaaagtcacctgaagaaactgataaagagaaagttcacctctctgactcagaaaggaaaatggacccagccgaagaggatacaaatgtgtatactgagaaacactcagacagtctgtttaaacggacagaagtcctagcagctgtcattgctggtggagttattggctttctctttgcaatttttcttatcctgctgttggtgtatcgcatgagaaagaaggatgaaggaagctatgaccttggagaacgcaaaccatccagtgctgcttatcagaaggcacctactaaggagttttatgcgtaaaactccaacttagtgtctctatttatgagatcactgaacttttcaaaataaagcttttgcatagaataatgaagatctttgttttttgttttcattaaagagccattctggcactttaatgataaaatcccattgtatttaaaacatttcatgtatttctttagaacaacataaaattaaaatttaacatctgcagtgttctgtgaatagcagtggcaaaatattatgttatgaaaaccctcgatgttcatggaattggtttaaacttttatgcgcaaatacaaaatgattgtctttttcctatgactcaaagatgaaagctgtttcatttgtgtcagcatgtctcagattgaccttaccaagttggtcttactttgttaatttatctgttgtccccttcctctcctctgccctcccttcttgtgcccttaaaaccaaaccctatgccttttgtagctgtcatggtgcaatttgtctttggaaaattcagataatggtaatttagtgtatatgtgattttcaaatatgtaaactttaacttccactttgtataaatttttaagtgtcagactatccattttacacttgctttatttttcattacctgtagctttgggcagatttgcaacagcaaattaatgtgtaaaattggattattactacaaaaccgtttagtcatatctatctaatcagatcttcttttgggaggatttgatgtaagttactgacaagcctcagcaaacccaaagatgttaacagtattttaagaagttgctgcagattcctttggccactgtatttgttaatttcttgcaatttgaaggtacgagtagaggtttaaagaaaaatcagtttttgttcttaaaaatgcatttaagttgtaaacgtctttttaagcctttgaagtgcctctgattctatgtaacttgttgcagactggtgttaatgagtatatgtaacagtttaaaaaaaaagttggtattttataagcacagacaattctaatggtaacttttgtagtcttatgaatagacataaattgtaatttgggaacataaaaactactgaataaatcatgtggcctaatattg

SEQ ID NO: 134230 - DNA, 1473 bp, Artificial Sequence
  derived and/or modified sequence
agatacccccggagctccagccgcgcggatcgcgcgctcccgccgctctgcccctaaacttctgccgtagctccctttcaagccagcgaatttattccttaaaaccagaaactgaacctcggcacgggaaaggagtccgcggaggagcaaaaccacagcagagcaagaagagcttcagagagcagccttcccggagcaccaactccgtgtcgggagtgcagaaaccaacaagtgagagggcgccgcgttcccggggcgcagctgcgggcggcgggagcaggcgcaggaggcttcgttttgccctggttgcaagcagcggctgggagcagccggtccctggggaatatgcgggtggcctgcgtgtcggcggagtcgagagcagagctgacatctgataaagacatgtaccttgacaacagctccattgaagaagcttcaggagtgtatcctattgatgacgatgactacgcttctgcgtctggctcgggagctgatgaggatgtagagagtccagagctgacaacatctcgaccacttccaaagatactgttgactagtgctgctccaaaagtggaaaccacgacgctgaatatacagaacaagatacctgctcagacaaagtcacctgaagaaactgataaagagaaagttcacctctctgactcagaaaggaaaatggacccagccgaagaggatacaaatgtgtatactgagaaacactcagacagtctgtttaaacggacagaagtcctagcagctgtcattgctggtggagttattggctttctctttgcaatttttcttatcctgctgttggtgtatcgcatgagaaagaaggatgaaggaagctatgaccttggagaacgcaaaccatccagtgctgcttatcagaaggcacctactaaggagttttatgcgtaaaactccaacttagtgtctctatttatgagatcactgaacttttcaaaataaagcttttgcatagaataatgaagatctttgttttttgttttcattaaagagccattctggcactttaatgataaaatcccattgtatttaaaacatttcatgtatttctttagaacaacataaaattaaaatttaacatctgcagtgttctgtgaatagcagtggcaaaatattatgttatgaaaaccctcgatgttcatggaattggtttaaacttttatgcgcaaatacaaaatgattgtctttttcctatgactcaaagatgaaagctgtttcatttgtgtcagcatgtctcagattgaccttaccaagttggtcttactttgttaatttatctgttgtccccttcctctcctctgccctcccttcttgtgcccttaaaaccaaaccctatgccttttgtagctgtcatggtgcaatttgtctttggaaaattcagataatggtaatttagtgtatatgtgattttcaaatatgtaaactttaacttccactttgtat

SEQ ID NO: 134231 - protein, 198 aa, Artificial Sequence
  derived and/or modified sequence
MAPARLFALLLFFVGGVAESIRETEVIDPQDLLEGRYFSGALPDDEDVVGPGQESDDFELSGSGDLDDLEDSMIGPEVVHPLVPLDNHIPERAGSGSQVPTEPKKLEENEVIPKRISPVEESEDVSNKVSMSSTVQGSNIFERTEVLAALIVGGIVGILFAVFLILLLMYRMKKKDEGSYDLGKKPIYKKAPTNEFYA

SEQ ID NO: 134232 - protein, 126 aa, Artificial Sequence
  derived and/or modified sequence
MIGPEVVHPLVPLDNHIPERAGSGSQVPTEPKKLEENEVIPKRISPVEESEDVSNKVSMSSTVQGSNIFERTEVLAALIVGGIVGILFAVFLILLLMYRMKKKDEGSYDLGKKPIYKKAPTNEFYA

SEQ ID NO: 134233 - DNA, 597 bp, Artificial Sequence
  derived and/or modified sequence
atggcccccgccagactgttcgccctgctgctgttcttcgtgggcggcgtggccgagagcatcagagagaccgaggtgatcgacccccaggacctgctggagggcagatacttcagcggcgccctgcccgacgacgaggacgtggtgggccccggccaggagagcgacgacttcgagctgagcggcagcggcgacctggacgacctggaggacagcatgatcggccccgaggtggtgcaccccctggtgcccctggacaaccacatccccgagagagccggcagcggcagccaggtgcccaccgagcccaagaagctggaggagaacgaggtgatccccaagagaatcagccccgtggaggagagcgaggacgtgagcaacaaggtgagcatgagcagcaccgtgcagggcagcaacatcttcgagagaaccgaggtgctggccgccctgatcgtgggcggcatcgtgggcatcctgttcgccgtgttcctgatcctgctgctgatgtacagaatgaagaagaaggacgagggcagctacgacctgggcaagaagcccatctacaagaaggcccccaccaacgagttctacgcctag

SEQ ID NO: 134234 - DNA, 597 bp, Artificial Sequence
  derived and/or modified sequence
atggcacccgccaggctgttcgcccttctgttattttttgtcggcggcgttgctgagagtattagggaaacagaggtcatcgatccacaggatttgctggagggtcggtacttttccggagccctgcccgatgatgaagacgtggtgggacccgggcaggagagcgacgacttcgagctttccgggtctggggacttagacgacctggaggacagcatgataggcccagaagtggtgcacccccttgtacccttggataatcatataccggagcgagctggctcaggcagccaggtccctacagaaccaaagaagctagaagagaatgaggtgataccaaaaagaatttctcccgtggaggaatctgaggacgtttctaacaaggtgtctatgtcttccaccgtgcagggttccaatatcttcgagagaaccgaggtactggccgcgctgatcgtcggtggtatcgtgggcatcctttttgctgtgttcctgatacttttgctgatgtatcgcatgaagaagaaagacgagggcagctacgatctcggaaaaaaaccaatctataagaaagccccaacaaacgagttttatgcctag

SEQ ID NO: 134235 - DNA, 597 bp, Artificial Sequence
  derived and/or modified sequence
atggccccagcccggctgtttgccctgctgctcttctttgtgggcggcgtggccgagagcatccgggagacagaggtgattgacccccaggacctgctggagggccgctacttcagcggggccctgcctgatgatgaagatgtggtgggccctggccaggagagtgatgactttgagctgagcggcagcggggacctggatgacctggaggacagcatgattggccctgaggtggtgcaccccctggtgcccctggacaaccacatccctgagagagctggcagcggcagccaggtgcccacagagcccaagaagctggaggagaatgaagtcatccccaagaggatcagccctgtggaggagagtgaagatgtgagcaacaaggtgtccatgagcagcacagtgcagggcagcaacatctttgagaggacagaggtgctggccgccctgattgtgggcggcatcgtgggcatcctgtttgctgtgttcctgatcctgctgctgatgtacaggatgaagaagaaggatgagggcagctatgacctgggcaagaagcccatctacaagaaggcccccaccaatgagttctacgcctag

SEQ ID NO: 134236 - DNA, 597 bp, Artificial Sequence
  derived and/or modified sequence
atggcccccgcccggctgttcgccctgctgctgttcttcgtgggcggggtcgctgaatccatacgtgagaccgaagtgattgatccccaggacctacttgagggaaggtacttcagcggagctctgccagacgatgaagatgttgtgggacccggacaggaatcagatgacttcgaactcagcggcagtggtgatctagatgacctggaggacagcatgattggcccagaggtagttcaccctctagtgccactcgacaaccatataccagagcgcgcagggtctgggtcccaggtgccaaccgagcctaaaaaactcgaagaaaacgaggtcatcccaaagcgcatctcccccgtggaggagtcagaagatgtaagtaacaaggtgtccatgtcatctactgtccaaggctccaacattttcgagagaaccgaggtgttggcagccctgatagtgggtggaattgttgggatcttgtttgccgtcttcctgatcttgctgctcatgtacagaatgaaaaagaaggatgaaggaagttacgacttaggtaagaagcctatctacaaaaaagccccaacaaacgaattttatgcttag

SEQ ID NO: 134237 - DNA, 597 bp, Artificial Sequence
  derived and/or modified sequence
atggcaccagcacgcctcttcgccctgctgctgttctttgtgggaggggtagctgagagcatcagggagactgaggttattgacccccaagacctgctggaggggcgttattttagcggggcactccccgatgacgaggacgtggtagggcctgggcaggagagcgacgacttcgagctgagcggttctggcgacttagatgacctcgaagatagcatgatcggacccgaagtcgtgcatccattggttccgctggataaccacatccccgagcgggctgggagcggctcccaggtgcctacagagccaaaaaagctcgaagagaacgaggtcatccccaaaaggataagccccgtagaggagagtgaggacgtcagcaacaaggtgagtatgtcgagcacagtgcaaggcagtaacatctttgagcggacagaagtacttgcagcactgatcgtagggggaatcgtagggattttgttcgctgtgtttcttattctgttattgatgtatcgcatgaagaagaaagacgagggctcttacgacctggggaaaaagcctatctacaagaaagccccaactaatgaattttacgcatag

SEQ ID NO: 134238 - DNA, 2613 bp, Artificial Sequence
  derived and/or modified sequence
actcgccgcagcctgcgcgccttctccagtccgcggtgccatggcccccgcccgtctgttcgcgctgctgctgttcttcgtaggcggagtcgccgagtcgatccgagagactgaggtcatcgacccccaggacctcctagaaggccgatacttctccggagccctaccagacgatgaggatgtagtggggcccgggcaggaatctgatgactttgagctgtctggctctggagatctggatgacttggaagactccatgatcggccctgaagttgtccatcccttggtgcctctagataaccatatccctgagagggcagggtctgggagccaagtccccaccgaacccaagaaactagaggagaatgaggttatccccaagagaatctcacccgttgaagagagtgaggatgtgtccaacaaggtgtcaatgtccagcactgtgcagggcagcaacatctttgagagaacggaggtcctggcagctctgattgtgggtggcatcgtgggcatcctctttgccgtcttcctgatcctactgctcatgtaccgtatgaagaagaaggatgaaggcagctatgacctgggcaagaaacccatctacaagaaagcccccaccaatgagttctacgcgtgaagcttgcttgtgggcactggcttggactttagcggggagggaagccaggggattttgaagggtggacattagggtagggtgaggtcaacctaatactgacttgtcagtatctccagctctgattacctttgaagtgttcagaagagacattgtcttctactgttctgccaggttcttcttgagctttgggcctcagttgccctggcagaaaaatggattcaacttggcctttctgaaggcaagactgggattggatcacttcttaaacttccagttaagaatctaggtccgccctcaagcccatactgaccatgcctcatccagagctcctctgaagccagggggctaacggatgttgtgtggagtcctggctggaggtcctcccccagtggccttcctcccttcctttcacagccggtctctctgccaggaaatgggggaaggaactagaaccacctgcaccttgagatgtttctgtaaatgggtacttgtgatcacactacgggaatctctgtggtatatacctggggccattctaggctctttcaagtgacttttggaaatcaaccttttttatttgggggggaggatggggaaaagagctgagagtttatgctgaaatggatttatagaatatttgtaaatctatttttagtgtttgttcgtttttttaactgttcattcctttgtgcagagtgtatatctctgcctgggcaagagtgtggaggtgccgaggtgtcttcattctctcgcacatttccacagcacctgctaagtttgtatttaatggtttttgtttttgtttttgtttgtttcttgaaaatgagagaagagccggagagatgatttttattaattttttttttttttttttttttttactatttatagctttagatagggcctcccttcccctcttctttctttgttctctttcattaaaccccttccccagttttttttttatactttaaaccccgctcctcatggccttggccctttctgaagctgcttcctcttataaaatagcttttgccgaaacatagtttttttttagcagatcccaaaatataatgaaggggatggtgggatatttgtgtctgtgttcttataatatattattattcttccttggttctagaaaaatagataaatatatttttttcaggaaatagtgtggtgtttccagtttgatgttgctgggtggttgagtgagtgaattttcatgtggctgggtgggtttttgcctttttctcttgccctgttcctggtgccttctgatggggctggaatagttgaggtggatggttctaccctttctgccttctgtttgggacccagctggtgttctttggtttgctttcttcaggctctagggctgtgctatccaatacagtaaccacatgcggctgtttaaagttaagccaattaaaatcacataagattaaaaattccttcctcagttgcactaaccacgtttctagaggcgtcactgtatgtagttcatggctactgtactgacagcgagagcatgtccatctgttggacagcactattctagagaactaaactggcttaacgagtcacagcctcagctgtgctgggacgacccttgtctccctgggtaggggggggggaatgggggagggctgatgaggccccagctggggcctgttgtctgggaccctccctctcctgagaggggaggcctggtggcttagcctgggcaggtcgtgtctcctcctgaccccagtggctgcggtgaggggaaccaccctcccttgctgcaccagtggccattagctcccgtcaccactgcaacccagggtcccagctggctgggtcctcttctgcccccagtgcccttccccttgggctgtgttggagtgagcacctcctctgtaggcacctctcacactgttgtctgttactgattttttttgataaaaagataataaaacctggtactttctaaa

SEQ ID NO: 134239 - DNA, 1286 bp, Artificial Sequence
  derived and/or modified sequence
actcgccgcagcctgcgcgccttctccagtccgcggtgccatggcccccgcccgtctgttcgcgctgctgctgttcttcgtaggcggagtcgccgagtcgatgacttggaagactccatgatcggccctgaagttgtccatcccttggtgcctctagataaccatatccctgagagggcagggtctgggagccaagtccccaccgaacccaagaaactagaggagaatgaggttatccccaagagaatctcacccgttgaagagagtgaggatgtgtccaacaaggtgtcaatgtccagcactgtgcagggcagcaacatctttgagagaacggaggtcctggcagctctgattgtgggtggcatcgtgggcatcctctttgccgtcttcctgatcctactgctcatgtaccgtatgaagaagaaggatgaaggcagctatgacctgggcaagaaacccatctacaagaaagcccccaccaatgagttctacgcgtgaagcttgcttgtgggcactggcttggactttagcggggagggaagccaggggattttgaagggtggacattagggtagggtgaggtcaacctaatactgacttgtcagtatctccagctctgattacctttgaagtgttcagaagagacattgtcttctactgttctgccaggttcttcttgagctttgggcctcagttgccctggcagaaaaatggattcaacttggcctttctgaaggcaagactgggattggatcacttcttaaacttccagttaagaatctaggtccgccctcaagcccatactgaccatgcctcatccagagctcctctgaagccagggggctaacggatgttgtgtggagtcctggctggaggtcctcccccagtggccttcctcccttcctttcacagccggtctctctgccaggaaatgggggaaggaactagaaccacctgcaccttgagatgtttctgtaaatgggtacttgtgatcacactacgggaatctctgtggtatatacctggggccattctaggctctttcaagtgacttttggaaatcaaccttttttatttgggggggaggatggggaaaagagctgagagtttatgctgaaatggatttatagaatatttgtaaatctatttttagtgtttgttcgtttttttaactgttcattcctttgtgcagagtgtatatctctgcctgggcaagagtgtggaggtgccgaggtgtcttcattctctcgcacatttccacagcacctgctaagtttgtatttaat

SEQ ID NO: 134240 - protein, 169 aa, Artificial Sequence
  derived and/or modified sequence
MAALLLRHVGRHCLRAHFSPQLCIRNAVPLGTTAKEEMERFWNKNIGSNRPLSPHITIYSWSLPMAMSICHRGTGIALSAGVSLFGMSALLLPGNFESYLELVKSLCLGPALIHTAKFALVFPLMYHTWNGIRHLMWDLGKGLKIPQLYQSGVVVLVLTVLSSMGLAAM

SEQ ID NO: 134241 - DNA, 510 bp, Artificial Sequence
  derived and/or modified sequence
atggccgccctgctgctgagacacgtgggcagacactgcctgagagcccacttcagcccccagctgtgcatcagaaacgccgtgcccctgggcaccaccgccaaggaggagatggagagattctggaacaagaacatcggcagcaacagacccctgagcccccacatcaccatctacagctggagcctgcccatggccatgagcatctgccacagaggcaccggcatcgccctgagcgccggcgtgagcctgttcggcatgagcgccctgctgctgcccggcaacttcgagagctacctggagctggtgaagagcctgtgcctgggccccgccctgatccacaccgccaagttcgccctggtgttccccctgatgtaccacacctggaacggcatcagacacctgatgtgggacctgggcaagggcctgaagatcccccagctgtaccagagcggcgtggtggtgctggtgctgaccgtgctgagcagcatgggcctggccgccatgtag

SEQ ID NO: 134242 - DNA, 510 bp, Artificial Sequence
  derived and/or modified sequence
atggctgctcttctgctcagacacgtggggagacactgcctgagagcacacttttctccacaactctgcatccgcaacgcagttcctctcgggaccacggccaaggaggagatggaaaggttctggaataaaaacattggatccaatagaccattgtcacctcatatcaccatttactcttggtcactgccaatggctatgtcaatctgccacaggggcacgggaattgccctttccgccggggtgtctttgttcggcatgtcagcactgttgctccccggaaactttgaaagctacctggagctggtcaaatcactgtgcttgggtccagccctgatccacacggcaaagtttgccttggtctttcctctcatgtatcatacatggaacgggatccgtcacctgatgtgggacttaggcaagggattaaagattccccaactgtaccaatccggagtagtggtgttagtgttgactgtcctctcctccatgggcctggcagcgatgtag

SEQ ID NO: 134243 - DNA, 510 bp, Artificial Sequence
  derived and/or modified sequence
atggccgccctgctgctgcggcacgtgggccgccactgcctgcgggcccacttcagcccccagctgtgcatcagaaatgctgtgcccctgggcaccacagccaaggaggagatggagcgcttctggaacaagaacatcggcagcaaccggcccctgagcccccacatcaccatctacagctggagcctgcccatggccatgagcatctgccaccggggcaccggcatcgccctgtctgctggggtgtccctgtttggcatgtctgccctgctgctgcccggcaactttgagagctacctggagctggtgaagagcctgtgcctgggccctgccctgatccacacagccaagtttgccctggtgttccccctgatgtaccacacctggaatggcatccgccacctgatgtgggacctgggcaagggcctgaagatcccccagctgtaccagagcggcgtggtggtgctggtgctgactgtgctgagctccatgggcctggccgccatgtag

SEQ ID NO: 134244 - DNA, 510 bp, Artificial Sequence
  derived and/or modified sequence
atggccgccctgctgctgcggcacgtgggccggcactgcctgcgggctcacttctcacctcagttgtgcatccgaaatgctgttcccctgggtactactgctaaggaagaaatggagaggttctggaacaaaaacatcggctccaaccggcccctctctccacacatcacaatctactcgtggtcattacccatggcgatgtcaatatgtcatagagggacaggcatcgccttgagcgcaggtgtctcgctgtttggcatgagtgccctgctgttgcccggaaacttcgaatcttacctggaactcgtgaaatccctttgcctggggccggccttgatccacacagccaagttcgcccttgtatttcccctcatgtatcacacatggaatggtattcgccatctgatgtgggatcttggtaagggactgaagattccacagctgtaccagagcggagttgtcgtgctcgtgctcacggttctgtcttcgatgggcctggctgccatgtag

SEQ ID NO: 134245 - DNA, 510 bp, Artificial Sequence
  derived and/or modified sequence
atggctgctcttctgctgcgccacgtggggaggcattgcttgcgagcccactttagtccacagctttgcattcggaacgccgtccctctgggcactaccgccaaggaggagatggagagattctggaacaagaatattggctctaaccgcccactcagccctcatattacgatttactcttggtccctgcccatggcaatgagcatctgccaccggggaaccggcatcgcgctgtcagccggagtctcactgtttgggatgtctgctttgctgctgcccggaaatttcgaaagttacctggagcttgtgaaaagcctgtgtctaggacctgcactgatccataccgctaaatttgcgttagtttttcctctgatgtaccatacttggaacggcattcgccatttgatgtgggacctgggcaaggggttgaagatcccccagctgtatcaaagtggggttgtagtactggtcttaacagtactgtccagcatgggactggccgctatgtag

SEQ ID NO: 134246 - DNA, 1420 bp, Artificial Sequence
  derived and/or modified sequence
agctaggcagagctgagcggagaagctccagagccttttaaagagactctcgtcacatgacacccccaaccccgacccccagccggcgcgcctccgccctcgggtggcggggccgcctggcgtcacttccgtccagaccggaacccaagatggctgcgctgttgctgagacacgttggtcgtcattgcctccgagcccactttagccctcagctctgtatcagaaatgctgttcctttgggaaccacggccaaagaagagatggagcggttctggaataagaatataggttcaaaccgtcctctgtctccccacattactatctacagttggtctcttcccatggcgatgtccatctgccaccgtggcactggtattgctttgagtgcaggggtctctctttttggcatgtcggccctgttactccctgggaactttgagtcttatttggaacttgtgaagtccctgtgtctggggccagcactgatccacacagctaagtttgcacttgtcttccctctcatgtatcatacctggaatgggatccgacacttgatgtgggacctaggaaaaggcctgaagattccccagctataccagtctggagtggttgtcctggttcttactgtgttgtcctctatggggctggcagccatgtgaagaaaggaggctcccagcatcatcttcctacacattattacattcacccatctttctgtttgtcattcttatctccagcctgggaaaagttctccttatttgtttagatccttttgtattttcagatctccttggagcagtagagtacctggtagaccataatagtggaaaagggtctagttttccccttgtttctaaagatgaggtggctgcaaaaactccccttttttgcccacagcttgcctactctcggcctagaagcagttattctctctccatattgggctttgatttgtgctgagggtcagcttttggctccttcttcctgagacagtggaaacaatgccagctctgtggcttctgccctggggatgggccgggttggggggtgggttggtgaggctttgggtgccactgcctgtgggttgctggcttaaaggacaattctcttcattggtgagagcccaggccattaacacctacacagtgttattgaaagaagagaggtgggggtggaggggaattagtctgtcccagctagagggagataaagagggctagttagttcttggagcagctgcttttgaggagaaaatatatagctttggacacgaggaagatctagaaaattatcattgaacatattaatggttatttctttttcttggatttccagaaaagcctcttaattttatgctttctcatcgaagtaatgtaccctttttttctgaaactgaattaaatactcattttatctttga

SEQ ID NO: 134247 - protein, 159 aa, Artificial Sequence
  derived and/or modified sequence
MAVLWRLSAVCGALGGRALLLRTPVVRPAHISAFLQDRPIPEWCGVQHIHLSPSHHSGSKAASLHWTSERVVSVLLLGLLPAAYLNPCSAMDYSLAAALTLHGHWGLGQVVTDYVHGDALQKAAKAGLLALSALTFAGLCYFNYHDVGICKAVAMLWKL

SEQ ID NO: 134248 - DNA, 480 bp, Artificial Sequence
  derived and/or modified sequence
atggccgtgctgtggagactgagcgccgtgtgcggcgccctgggcggcagagccctgctgctgagaacccccgtggtgagacccgcccacatcagcgccttcctgcaggacagacccatccccgagtggtgcggcgtgcagcacatccacctgagccccagccaccacagcggcagcaaggccgccagcctgcactggaccagcgagagagtggtgagcgtgctgctgctgggcctgctgcccgccgcctacctgaacccctgcagcgccatggactacagcctggccgccgccctgaccctgcacggccactggggcctgggccaggtggtgaccgactacgtgcacggcgacgccctgcagaaggccgccaaggccggcctgctggccctgagcgccctgaccttcgccggcctgtgctacttcaactaccacgacgtgggcatctgcaaggccgtggccatgctgtggaagctgtag

SEQ ID NO: 134249 - DNA, 480 bp, Artificial Sequence
  derived and/or modified sequence
atggccgtgttatggcggttgtctgctgtctgcggtgccctcggggggcgggccctgcttctgcgcaccccagtggttcgtccagcccacatctccgcctttcttcaggacaggcctattccagaatggtgcggggtgcaacacattcatttaagccctagccaccactctggcagcaaagccgcttccctccactggacatcggagcgggtagtttccgtccttttgctgggcttgctccctgctgcataccttaatccttgtagcgcaatggattatagcttggctgccgccctgacattgcacggtcactggggattagggcaggttgtaaccgactacgttcatggggacgctctccagaaagcagctaaggctggactgctggcgctaagtgcattaacgtttgcgggcctatgttattttaattaccatgacgttggcatctgcaaggcagtcgcgatgctgtggaaactgtag

SEQ ID NO: 134250 - DNA, 480 bp, Artificial Sequence
  derived and/or modified sequence
atggctgtgctgtggaggctgtctgctgtgtgtggggccctgggcggccgggccctgctgctgcggacccctgtggtgcggcctgcccacatcagcgccttcctgcaggaccggcccatccctgagtggtgtggggtgcagcacatccacctgagccccagccaccacagcggcagcaaggccgccagcctgcactggaccagcgagcgggtggtgtctgtgctgctgctgggcctgctgcctgctgcctacctgaacccctgcagcgccatggactacagcctggccgccgccctgaccctgcacggccactggggcctgggccaggtggtgacagattatgtgcatggagatgccctgcagaaggccgccaaggccggcctgctggccctgagcgccctgacctttgctggcctgtgctacttcaactaccatgatgtgggcatctgcaaggctgtggccatgctgtggaagctgtag

SEQ ID NO: 134251 - DNA, 480 bp, Artificial Sequence
  derived and/or modified sequence
atggccgtgctgtggcggctgagcgccgtgtgcggcgccctgggcggcagagctctgctgctgcgcacacctgtagtgcgtcccgctcatatttcggcattcctccaggatcggcccatcccagagtggtgcggtgtacagcacatccacctgtctccctcacaccattctggctctaaggctgccagtttgcactggacgtctgagcgggtagtctctgtactgctgctgggtctgctccccgctgcatacttgaatccatgttctgcaatggactactccctggccgccgctctaacactgcacggacactgggggctcggacaggtagtgacagactacgtgcatggtgacgccttacagaaggctgctaaggctggcttgctggcactctctgctctgaccttcgccgggctctgttacttcaattaccacgatgtgggcatatgcaaggccgtcgccatgctttggaagctatag

SEQ ID NO: 134252 - DNA, 480 bp, Artificial Sequence
  derived and/or modified sequence
atggcagttctgtggcgcctgagcgcagtctgtggcgcactgggcggacgcgcattactgctccggacccccgtcgtgcgtcccgctcatatctccgccttccttcaggaccgtcctataccggaatggtgcggggtccagcacatccacctgtcaccatctcatcacagtgggagtaaagccgcttctttgcactggacttccgagagagtggtttctgtcttactcctgggcctcttaccagctgcttatctaaacccatgctccgccatggattacagcctggccgctgcactcactttacatggccactggggactggggcaggttgtgaccgattacgtacacggagatgctctgcaaaaggccgcaaaggccggactgttggcattgagcgcactgacttttgccggattgtgctactttaactaccacgatgtgggcatttgcaaagctgtggctatgctatggaagctatag

SEQ ID NO: 134253 - DNA, 1439 bp, Artificial Sequence
  derived and/or modified sequence
gacgggtgtgcaccgcctctcgacttccggttcacccagcatttcctcttccctgttttctttcgtcgtcgtgggtgggaattgtcgcctaagtggttccgggttggtggatgaccttgagccctcaggaacgagatggcggttctctggaggctgagtgccgtttgcggtgccctaggaggccgagctctgttgcttcgaactccagtggtcagacctgctcatatctcagcatttcttcaggaccgacctatcccagaatggtgtggagtgcagcacatacacttgtcaccgagccaccattctggctccaaggctgcatctctccactggactagcgagagggttgtcagtgttttgctcctgggtctgcttccggctgcttatttgaatccttgctctgcgatggactattccctggctgcagccctcactcttcatggtcactggggccttggacaagttgttactgactatgttcatggggatgccttgcagaaagctgccaaggcagggcttttggcactttcagctttaacctttgctgggctttgctatttcaactatcacgatgtgggcatctgcaaagctgttgccatgctgtggaagctctgacctttttgacttcatactttgaagaattgatgtatgcctctttgcctctgctttgtcatgccattaagctcacaataaggaagaaataacagataagtccattggtggacagccttcttctcttaatcacaagattattttcagaatttaatctttgaggaaaaggtttgagaggaattatatctaagttgtgagactgagttctatattctggtgagttaatggggttgcctcccagcttcttataagactcacagtataactaaacatgatatatcagcttttgcctttcaatttatcaatctcttaaagagaatccaactttattacgattagtatatgatcaaacttccatatttgccttgggaataatggacaaagggaaatactcttaattcatgaataaaaactttgcagaaaattagacagtgtttaattttcgaaaacttccctctctagacagtagataccacctactgatggttacatatactagggaaattttaaaattaggaaatgctgatagctcatattataaatttctaaatcctaggaagaaacgcttggagtgcttctgaatatacagaagttccatttaagggcaagtttccctgtagatgtatcaaaatactaccaactgtaaattgagatttaattcccaaatgtattctacttgttctaaaacaatctgtccacaaatataaaactataagtaataaattgttattttcgcacaatgggaatctctaatgtgaaaatgtattctatgaaaataatttttttaaataaaatgttatataataaaagtgtcttctatgctttta

SEQ ID NO: 134254 - protein, 248 aa, Artificial Sequence
  derived and/or modified sequence
MQTCPLAFPGHVSQALGTLLFLAASLSAQNEGWDSPICTEGVVSVSWGENTVMSCNISNAFSHVNIKLRAHGQESAIFNEVAPGYFSRDGWQLQVQGGVAQLVIKGARDSHAGLYMWHLVGHQRNNRQVTLEVSGAEPQSAPDTGFWPVPAVVTAVFILLVALVMFAWYRCRCSQQRREKKFFLLEPQMKVAALRAGAQQGLSRASAELWTPDSEPTPRPLALVFKPSPLGALELLSPQPLFPYAADP

SEQ ID NO: 134255 - DNA, 747 bp, Artificial Sequence
  derived and/or modified sequence
atgcaaacatgtccactggcattccccgggcacgtgtctcaggcgctcggcacccttctattcctggccgcctcactctccgcacagaacgagggctgggacagtccaatttgtacggagggcgttgtgagtgtttcttggggggagaacacagtgatgagctgcaatattagcaatgccttctcgcatgttaacattaagctgcgcgctcacgggcaagaatctgctattttcaacgaggtcgctcctggatattttagtagggatggctggcagttgcaagtacagggaggcgtagcgcagctcgtgatcaaaggcgcacgggattcccacgcaggactgtacatgtggcatttggtgggccaccagcggaataataggcaggtcaccttggaagtgtccggggctgagccacagagcgctcccgacaccgggttttggcccgtgccggctgtggtaaccgctgttttcattctgctggtggctctggtgatgtttgcctggtaccgatgcagatgcagtcagcagaggcgggaaaaaaagttcttcttattggaaccccaaatgaaagtggccgctcttcgggctggcgcgcagcagggcctgtcccgagcgtcggccgagctctggacccctgattctgagccaacccctcggccactggcactggtgttcaaaccatctccattgggagccctcgaactccttagtccccagccattattcccctatgctgcagacccctag

SEQ ID NO: 134256 - DNA, 747 bp, Artificial Sequence
  derived and/or modified sequence
atgcagacctgccccctggccttccctggccacgtgtcccaggccctgggcaccctgctcttcctggccgccagcctgagcgcccagaatgaaggctgggacagccccatctgcacagaaggagtggtgtctgtgtcctggggagaaaatacagtgatgagctgcaacatcagcaatgccttcagccacgtgaacatcaagctgcgggcccacggccaggagagcgccatcttcaatgaggtggcccctggctacttcagcagagatggctggcagctgcaggtgcagggcggcgtggcccagctggtgatcaagggggcccgggacagccacgccggcctgtacatgtggcacctggtgggccaccagaggaacaaccggcaggtgaccctggaggtgtctggagctgagccccagagcgccccagacaccggcttctggcctgtgcctgctgtggtgacagctgtgttcatcctgctggtggccctggtgatgtttgcctggtaccgctgccgctgcagccagcagaggcgggagaagaagttcttcctgctggagccccagatgaaggtggccgccctgcgggccggggcccagcagggcctgagccgggccagcgctgagctgtggaccccagacagcgagcccaccccccggcccctggccctggtgttcaagcccagccccctgggcgccctggagctgctgagcccccagcccctcttcccctatgctgctgacccctag

SEQ ID NO: 134257 - DNA, 747 bp, Artificial Sequence
  derived and/or modified sequence
atgcagacctgccccctggccttccccggccacgtgagccaggcccttggcaccttactgtttctggctgcttctctgtcagcccagaacgagggctgggacagcccgatctgcaccgaaggagtcgtttccgtgtcctggggcgagaacacagtgatgtcatgcaacatctccaacgcattctcacatgtgaacatcaagctgcgtgcccatggacaagagtcagccatatttaacgaggtcgcgcccgggtatttctcgcgagacggctggcagttgcaggtgcagggaggtgtggcacagctggtgataaaaggagcgcgggatagtcacgccggattatatatgtggcacctcgtcggccatcagagaaacaaccgccaggtaacactggaggtgtccggagctgagcctcagagcgcacccgataccgggttttggcctgttcctgcggtcgttaccgctgtgttcattctgctggttgccttagtaatgttcgcttggtaccgctgtaggtgctcacagcagcggcgcgagaagaagttctttcttttagagcctcagatgaaagtcgccgcgctgagagctggtgcccagcagggattaagccgggccagcgctgagttatggactcccgatagcgagcctaccccacggcctcttgccttggttttcaaacccagccccctgggcgctctcgaactactgtctccacaacctctttttccctatgctgcagacccatag

SEQ ID NO: 134258 - DNA, 747 bp, Artificial Sequence
  derived and/or modified sequence
atgcagacctgccccttagcattccccggacacgtaagtcaagctcttggcacactcttatttctcgcagctagtctgtccgctcagaacgagggatgggacagccctatatgcacagaaggggtggtgtccgtttcatggggagaaaacactgtaatgagctgtaatatcagcaacgctttcagccatgtgaacatcaagcttcgagctcacgggcaggagagcgcaatctttaatgaggtagcacctgggtacttctctcgcgacggctggcagcttcaggtgcaggggggtgtggcccagctggtcattaaaggcgctcgtgactcccacgccggtctctacatgtggcacctggtgggtcaccagagaaataacagacaggtcacactcgaagtctccggggcagagccccagagcgcaccagatacaggtttctggccagtccccgctgttgtgaccgccgtgtttatactgcttgtggcactggtgatgttcgcatggtataggtgtaggtgttcacagcaacgcagagaaaagaagttttttttgcttgagcctcagatgaaggtggcggcattaagagccggtgcccagcagggactgtcaagagcgtcagctgagttgtggacaccagattccgagccaacgcctcggccactggctctggtttttaagccctctcctctgggtgctttggagctactatccccacagcccctcttcccctacgcagcagacccatag

SEQ ID NO: 134259 - DNA, 2282 bp, Artificial Sequence
  derived and/or modified sequence
aaacagccccgcggggaacgcgcgccgcacgcgagctggacccgcccaggcacgaactctcctggaaaaatgctcccggcggctttcctgcttcctttagcgtgaaccgcgggtgcggtgcctcccgtgaaaataataaattcaccgtcacgcttgttgtgaacgcgggtggttcccgaaacttggaggcttcccgtaaacccagctccttcctcatctgggaggtgggtcccgcgcgggtccgccgcctcctccctggcccctccctctcgtgtctttcattttcctggggctccggggcgcggagaagctgcatcccagaggagcgcgtccaggagcggacccgggagtgtttcaagagccagtgacaaggaccaggggcccaagtcccaccagccatgcagacctgccccctggcattccctggccacgtttcccaggcccttgggaccctcctgtttttggctgcctccttgagtgctcagaatgaaggctgggacagccccatctgcacagagggggtagtctctgtgtcttggggcgagaacaccgtcatgtcctgcaacatctccaacgccttctcccatgtcaacatcaagctgcgtgcccacgggcaggagagcgccatcttcaatgaggtggctccaggctacttctcccgggacggctggcagctccaggttcagggaggcgtggcacagctggtgatcaaaggcgcccgggactcccatgctgggctgtacatgtggcacctcgtgggacaccagagaaataacagacaagtcacgctggaggtttcaggtgcagaaccccagtccgcccccgacactgggttctggcctgtgccagcggtggtcactgctgtcttcatcctcttggtcgctctggtcatgttcgcctggtacaggtgccgctgttcccagcaacgccgggagaagaagttcttcctcctagaaccccagatgaaggtcgcagccctcagagcgggagcccagcagggcctgagcagagcctccgctgaactgtggaccccagactccgagcccaccccaaggccgctggcactggtgttcaaaccctcaccacttggagccctggagctgctgtccccccaacccttgtttccatatgccgcagacccatagccgcctgcaaggcagagaggacacaggagagccagccctgagtgccgaccttgggtggcggggcctgggtctctcgtcccacccggagggcacagacaccggcttgcttggcaggctgggcctctgtgtcacccactcctgggtgcgtgcagacccttcccctccaccccccaggtcttccaagctctgcttcctcagtttccaaaatggaaccacctcacctccgcagcacccgacttaccaggacgcatgcccctccctctgccctcatcaaacccacagacccggactccctttctgccaccccaggctggtccggccccaggtgtggggtccgctctctccactcccagggctccgcgcccaagtgagggggcccctgccggagcctcagacacactccagttcagggctgtggggggccttggccacatacctgtcccttggctatgagcaggctttgggggcccttccgcggcagccccgggggccgaggtagggtcgggggcttagaggctgggatggctcctggccccaccgccagggggcagcgcaggccgggctgggaggcggcggcggcggctcgggctggggggtcaggtggacgccgccctccggggctggacgcgcatccctcagtccctcggccacccgggggtcgctccctcgtgcccaccgcacctgccgagcctctttggacccagatctgttcatgcttttgtcttcgtcactgcggcggggccctttgatgtcttcatctgtatggggtggaaaaatcaccgggaatcccccttcagttctttgaaaaagttccatgactcgaatatctgaaatgaagaaaacaaaccgactcacaaacctccaagtagctccaaatgcaatttttaaaatggaaaacaaaaatctgaaagaaacgtctttagtggctttaagccccaaaacgtccctaaggcgtcctcgagatgaagacgggggggagcccccagccaggtggagaccccgcagggacgcggcggcgcccggtgaccgaggcctcgcacagccggccgccctgagggtcgggccggagccagggtccaagaggggcgcgtttgtgtctcgggttaaaataaggttccgtccgcgtgctgggtcaga

SEQ ID NO: 134260 - DNA, 747 bp, Artificial Sequence
  derived and/or modified sequence
atgcagacctgccccctggccttccccggccacgtgagccaggccctgggcaccctgctgttcctggccgccagcctgagcgcccagaacgagggctgggacagccccatctgcaccgagggcgtggtgagcgtgagctggggcgagaacaccgtgatgagctgcaacatcagcaacgccttcagccacgtgaacatcaagctgagagcccacggccaggagagcgccatcttcaacgaggtggcccccggctacttcagcagagacggctggcagctgcaggtgcagggcggcgtggcccagctggtgatcaagggcgccagagacagccacgccggcctgtacatgtggcacctggtgggccaccagagaaacaacagacaggtgaccctggaggtgagcggcgccgagccccagagcgcccccgacaccggcttctggcccgtgcccgccgtggtgaccgccgtgttcatcctgctggtggccctggtgatgttcgcctggtacagatgcagatgcagccagcagagaagagagaagaagttcttcctgctggagccccagatgaaggtggccgccctgagagccggcgcccagcagggcctgagcagagccagcgccgagctgtggacccccgacagcgagcccacccccagacccctggccctggtgttcaagcccagccccctgggcgccctggagctgctgagcccccagcccctgttcccctacgccgccgacccctag

SEQ ID NO: 134261 - protein, 830 aa, Artificial Sequence
  derived and/or modified sequence
MANCQIAILYQRFQRVVFGISQLLCFSALISELTNQKEVAAWTYHYSTKAYSWNISRKYCQNRYTDLVAIQNKNEIDYLNKVLPYYSSYYWIGIRKNNKTWTWVGTKKALTNEAENWADNEPNNKRNNEDCVEIYIKSPSAPGKWNDEHCLKKKHALCYTASCQDMSCSKQGECLETIGNYTCSCYPGFYGPECEYVRECGELELPQHVLMNCSHPLGNFSFNSQCSFHCTDGYQVNGPSKLECLASGIWTNKPPQCLAAQCPPLKIPERGNMTCLHSAKAFQHQSSCSFSCEEGFALVGPEVVQCTASGVWTAPAPVCKAVQCQHLEAPSEGTMDCVHPLTAFAYGSSCKFECQPGYRVRGLDMLRCIDSGHWSAPLPTCEAISCEPLESPVHGSMDCSPSLRAFQYDTNCSFRCAEGFMLRGADIVRCDNLGQWTAPAPVCQALQCQDLPVPNEARVNCSHPFGAFRYQSVCSFTCNEGLLLVGASVLQCLATGNWNSVPPECQAIPCTPLLSPQNGTMTCVQPLGSSSYKSTCQFICDEGYSLSGPERLDCTRSGRWTDSPPMCEAIKCPELFAPEQGSLDCSDTRGEFNVGSTCHFSCDNGFKLEGPNNVECTTSGRWSATPPTCKGIASLPTPGVQCPALTTPGQGTMYCRHHPGTFGFNTTCYFGCNAGFTLIGDSTLSCRPSGQWTAVTPACRAVKCSELHVNKPIAMNCSNLWGNFSYGSICSFHCLEGQLLNGSAQTACQENGHWSTTVPTCQAGPLTIQEALTYFGGAVASTIGLIMGGTLLALLRKRFRQKDDGKCPLNPHSHLGTYGVFTNAAFDPSP

SEQ ID NO: 134262 - protein, 644 aa, Artificial Sequence
  derived and/or modified sequence
MANCQIAILYQRFQRVVFGISQLLCFSALISELTNQKEVAAWTYHYSTKAYSWNISRKYCQNRYTDLVAIQNKNEIDYLNKVLPYYSSYYWIGIRKNNKTWTWVGTKKALTNEAENWADNEPNNKRNNEDCVEIYIKSPSAPGKWNDEHCLKKKHALCYTASCQDMSCSKQGECLETIGNYTCSCYPGFYGPECEYVRECGELELPQHVLMNCSHPLGNFSFNSQCSFHCTDGYQVNGPSKLECLASGIWTNKPPQCLAAQCPPLKIPERGNMTCLHSAKAFQHQSSCSFSCEEGFALVGPEVVQCTASGVWTAPAPVCKALQCQDLPVPNEARVNCSHPFGAFRYQSVCSFTCNEGLLLVGASVLQCLATGNWNSVPPECQAIPCTPLLSPQNGTMTCVQPLGSSSYKSTCQFICDEGYSLSGPERLDCTRSGRWTDSPPMCEGIASLPTPGVQCPALTTPGQGTMYCRHHPGTFGFNTTCYFGCNAGFTLIGDSTLSCRPSGQWTAVTPACRAVKCSELHVNKPIAMNCSNLWGNFSYGSICSFHCLEGQLLNGSAQTACQENGHWSTTVPTCQAGPLTIQEALTYFGGAVASTIGLIMGGTLLALLRKRFRQKDDGKCPLNPHSHLGTYGVFTNAAFDPSP

SEQ ID NO: 134263 - protein, 829 aa, Artificial Sequence
  derived and/or modified sequence
ANCQIAILYQRFQRVVFGISQLLCFSALISELTNQKEVAAWTYHYSTKAYSWNISRKYCQNRYTDLVAIQNKNEIDYLNKVLPYYSSYYWIGIRKNNKTWTWVGTKKALTNEAENWADNEPNNKRNNEDCVEIYIKSPSAPGKWNDEHCLKKKHALCYTASCQDMSCSKQGECLETIGNYTCSCYPGFYGPECEYVRECGELELPQHVLMNCSHPLGNFSFNSQCSFHCTDGYQVNGPSKLECLASGIWTNKPPQCLAAQCPPLKIPERGNMTCLHSAKAFQHQSSCSFSCEEGFALVGPEVVQCTASGVWTAPAPVCKAVQCQHLEAPSEGTMDCVHPLTAFAYGSSCKFECQPGYRVRGLDMLRCIDSGHWSAPLPTCEAISCEPLESPVHGSMDCSPSLRAFQYDTNCSFRCAEGFMLRGADIVRCDNLGQWTAPAPVCQALQCQDLPVPNEARVNCSHPFGAFRYQSVCSFTCNEGLLLVGASVLQCLATGNWNSVPPECQAIPCTPLLSPQNGTMTCVQPLGSSSYKSTCQFICDEGYSLSGPERLDCTRSGRWTDSPPMCEAIKCPELFAPEQGSLDCSDTRGEFNVGSTCHFSCDNGFKLEGPNNVECTTSGRWSATPPTCKGIASLPTPGVQCPALTTPGQGTMYCRHHPGTFGFNTTCYFGCNAGFTLIGDSTLSCRPSGQWTAVTPACRAVKCSELHVNKPIAMNCSNLWGNFSYGSICSFHCLEGQLLNGSAQTACQENGHWSTTVPTCQAGPLTIQEALTYFGGAVASTIGLIMGGTLLALLRKRFRQKDDGKCPLNPHSHLGTYGVFTNAAFDPSP

SEQ ID NO: 134264 - DNA, 2493 bp, Artificial Sequence
  derived and/or modified sequence
atggctaactgccagatcgctattctgtaccagcgcttccagcgggtcgtttttgggattagccagctcctatgttttagcgccctgatttcggagctgaccaatcagaaggaggtcgctgcatggacgtaccactacagcacaaaagcctactcctggaatattagccgcaagtactgccagaacagatacaccgacctcgttgctatccaaaacaaaaatgaaatcgactatcttaacaaagtgcttccctattattcatcttattactggatcgggattcgaaaaaacaacaagacatggacatgggtgggcacgaagaaagcactgacaaacgaggcggaaaattgggcagataacgagcctaataacaagagaaataatgaggattgcgttgagatctatattaaaagtccatcggcccctggcaaatggaatgacgagcactgtcttaagaaaaaacatgccctgtgctacaccgccagctgccaagacatgagctgcagcaaacagggtgagtgccttgaaaccattgggaactatacgtgctcatgttatcctggattttatggccctgaatgtgaatacgtccgggagtgtggggagcttgagctgcctcaacacgttttgatgaattgctcccaccccctcggcaacttctccttcaacagccagtgttctttccactgcacagacggttaccaggtgaatggtcccagtaaattagagtgtctggcttctggaatctggacaaacaagcctccccagtgcttggcagctcagtgtccacccctcaagattcccgaacggggcaatatgacctgcctgcacagcgccaaggcctttcagcatcagtctagctgtagcttttcctgcgaagaagggtttgcattggtcggcccagaggtagtgcagtgtaccgccagcggtgtttggacagctcctgcgccagtctgtaaggctgtgcagtgccagcatctcgaagcccccagtgaaggaaccatggattgcgtccaccctctgaccgcgttcgcctatggctcgagctgcaagttcgagtgccagccgggctacagagtgagagggcttgatatgctccgatgcatcgactcagggcactggagcgccccactacccacctgcgaggctattagctgcgagcctctggagagtccagtccacggctctatggactgtagccccagtctgcgggcattccagtacgatactaattgcagttttagatgtgccgaaggttttatgctgcgcggtgctgacattgtgcgatgtgataatctgggccagtggactgccccagccccagtgtgccaagcgctccagtgccaggatctgccagtgccaaacgaggcacgggttaactgttctcacccctttggggcattcagataccagtccgtttgttcctttacttgcaacgaggggctgctcctggttggtgccagcgtcctacaatgtctggcaactggaaactggaactccgttccccctgagtgccaggccatcccctgcaccccgctcctgagtccccagaacggaactatgacatgcgtgcaaccactcggcagctctagttacaagtccacgtgtcagtttatttgtgacgaaggctattctttgtctggcccggagagactagattgtacaaggtctgggcggtggacagattcacctcccatgtgcgaagctatcaagtgtcctgaactctttgctccagaacaggggtcactcgactgttccgacaccaggggagaattcaatgtgggctccacttgccactttagttgcgacaacgggttcaaattggagggcccaaacaatgtagagtgcaccacaagcggccgatggtctgccaccccgccgacctgtaagggaatagcaagtctccccacccctggtgtgcaatgccccgccctgactacacctggccaaggaacaatgtattgtcgtcaccacccaggtacattcggtttcaatacgacttgttactttggatgtaacgccggtttcacacttatcggcgacagcacactctcctgcagaccaagtggtcagtggacagcggtgactccagcctgtcgggcagtcaagtgttctgagctgcacgtcaataaaccaattgccatgaactgcagcaacttgtggggaaacttcagctacggctcaatctgtagtttccactgtctggaagggcaactcctgaacggctcagctcaaacagcatgccaggagaatgggcactggagtactaccgtgcctacttgccaggctgggcccctaaccatccaggaggccctgacgtacttcggcggtgccgtggcctccactatagggctcattatggggggcaccctgctggccctgctcagaaaacgttttcgacagaaggatgacggtaagtgtccactcaatccccactctcatctgggtacctacggagtgttcacaaacgccgcattcgatccctccccttag

SEQ ID NO: 134265 - DNA, 2493 bp, Artificial Sequence
  derived and/or modified sequence
atggccaactgtcagatcgcaatcctgtatcagcgtttccagagggttgtgtttgggatatctcagctgctctgcttcagcgctctcatctccgaactgactaaccagaaagaagtggctgcatggacctatcattactctactaaggcgtacagttggaatatcagtcgcaaatattgccagaatcgttatactgacttagtagcaatacagaacaagaacgaaattgattatctgaataaggtgcttccatattatagctcctattactggatcggcattagaaagaataacaagacgtggacatgggtgggtactaaaaaggcattaaccaatgaggccgagaattgggcggacaacgagcccaacaataaacgtaataacgaggactgcgtggagatctacattaaatcgccctctgctcccggaaaatggaatgacgagcattgtcttaagaagaaacacgccttgtgctacaccgcaagctgtcaagacatgtcctgcagtaaacagggtgagtgcctcgagacaataggaaactacacctgtagctgttatccaggcttttatggccccgagtgtgagtacgtgcgcgagtgtggcgagctagagctgccgcagcacgtgctaatgaactgcagccatccactcggtaacttctcttttaacagtcaatgctcgttccactgcacggacgggtatcaagttaatggtcctagtaaactcgagtgccttgcatctggaatttggacaaataaacctcctcaatgtttagctgcccagtgccctcccctcaagattccagaaagggggaatatgacttgtcttcatagtgccaaggcattccaacaccaatcgagctgttcctttagctgcgaggagggatttgccctagtgggcccagaggttgttcagtgcaccgcatcaggtgtatggaccgccccagctcccgtgtgcaaagccgtccagtgtcagcacctagaggcacccagcgaaggtacgatggactgtgtgcacccactgactgccttcgcctatggttcctcctgcaaattcgaatgccaacctggttacagagttcgcggcctcgacatgctgcgctgcatcgattccggacactggtctgcaccattgccaacatgtgaggccatttcctgcgaacccctggagagccctgtgcacggatcgatggactgctctccttctctacgtgcctttcagtatgatacaaactgtagctttcgttgtgctgagggctttatgctgagaggagcagacattgtacgttgcgacaatctgggccagtggactgccccggcacccgtgtgccaagcgctgcagtgtcaggatctaccagtgccgaacgaagctcgggttaactgctctcacccctttggcgcttttcgttaccagtcagtttgtagtttcacttgtaatgaagggttgctgcttgtgggggcttccgtcttacagtgcctggccaccggcaactggaactctgtaccccccgagtgccaggctattccttgcacaccactattgtctccccagaatggtaccatgacgtgcgtgcagccactaggctcatcttcgtataagagcacttgccagtttatctgcgatgagggatactcccttagtggacccgaacgactggattgcacacgttcagggcggtggacagattctccaccgatgtgcgaagccattaaatgtcccgagctgttcgctcccgagcaaggaagcctcgactgcagtgatacaagaggagaatttaacgtgggctcaacatgtcatttcagttgtgacaatggttttaagctcgaagggcctaacaacgtggaatgtaccacaagcggcagatggtcagccacgcctcctacctgcaaaggcatcgccagtctacccactccgggtgtacagtgcccagctctgactacaccaggccagggaacaatgtactgcaggcaccaccctggaacattcgggttcaatacaacctgttatttcggctgtaatgccggttttactttaataggcgattccaccctctcatgccgcccatctggccagtggactgccgtgactccagcttgcagggcagttaagtgctccgaactccatgtcaataaaccaattgctatgaattgttccaatctgtggggaaattttagctatggaagtatttgttctttccactgccttgagggacagctgcttaatgggagcgctcagaccgcctgtcaggagaacggtcactggtcaaccactgttcccacatgtcaggctggaccactcacaatacaggaggctctgacgtacttcggaggagcagtggcctccacaatcgggctgatcatgggcgggacgctcttggcgctactgcgaaaaaggtttcggcagaaggacgatggcaagtgcccgctcaacccacattctcacctaggcacttatggagtgtttaccaacgccgccttcgatccctccccgtag

SEQ ID NO: 134266 - DNA, 1935 bp, Artificial Sequence
  derived and/or modified sequence
atggcaaactgtcagatcgccattctgtaccagaggtttcaacgcgttgtatttggaatatcccagctcctatgcttctctgctttaatctccgagctcaccaaccaaaaagaagtcgccgcctggacataccactattcgactaaagcgtactcttggaacatcagtcgcaagtactgccaaaaccgctacaccgatctagtcgcgattcagaataagaatgagatcgattatctcaacaaagttctgccatactactccagttactattggattgggataagaaaaaacaataagacttggacctgggtagggaccaagaaagccctgactaatgaggccgaaaattgggccgataacgagcctaacaataaacgcaataatgaggactgtgtggaaatatacatcaagtctccaagtgcacccggcaagtggaacgacgaacactgcctgaaaaagaaacacgctctttgctataccgccagttgccaggatatgtcctgtagcaagcagggagaatgcttggagacaatcggcaattacacctgcagctgttaccccgggttttacggtcctgagtgcgagtacgtgagagaatgtggagagctcgaactaccacaacatgtcctaatgaattgtagccaccccttaggcaacttttccttcaattcgcaatgttcctttcactgtactgacgggtaccaagttaacgggccaagcaaactggagtgtctcgcatccggcatatggaccaacaagcctcctcaatgtcttgcggcccagtgcccaccgcttaagatcccagaacgcggtaacatgacctgcctccactcggccaaggctttccagcatcagtcctcttgttcattctcctgtgaggagggcttcgctctggtggggcctgaggtggtccagtgtaccgccagtggggtgtggaccgctccagcacccgtgtgtaaggcactgcagtgtcaggaccttcctgtcccaaacgaggcccgtgtgaattgcagccatccttttggagctttccgataccagtcagtgtgcagctttacgtgtaatgaggggctcctgctggtgggggcctcagtccttcagtgcctggcaaccggaaattggaactctgtgccgcccgagtgtcaggccatcccatgtacacccctgctcagcccacaaaacgggactatgacttgtgtgcagccacttgggagttcttcatacaaaagcacctgccaattcatttgcgacgagggctatagcctcagcggcccagagcggctggattgtactcggtccggccggtggacagacagcccacctatgtgtgaaggcattgccagcctccccacccctggagtgcagtgtccagccttaacaaccccaggccagggtaccatgtattgtagacaccaccccggcacgtttggcttcaataccacatgctatttcgggtgtaacgccggctttaccctcatcggcgattccacccttagctgcagaccttctgggcaatggaccgccgtcacacccgcttgcagggcagtcaagtgcagcgaactgcacgtgaacaagccaatcgctatgaattgtagtaatctgtgggggaacttctcctacggatcaatttgcagtttccactgtcttgaaggacagctgctcaatggatctgcccagaccgcttgtcaggagaacgggcattggtctacaacagtgcccacctgtcaggcgggaccactaaccatccaggaagccctgacttatttcggcggagcagtcgcctctactataggcctcataatgggggggacactcctcgcactcctcagaaaacgatttaggcaaaaggatgatgggaaatgccctctgaacccacactcacacctggggacgtacggcgtgttcaccaacgctgcgtttgaccccagtccatag

SEQ ID NO: 134267 - DNA, 1935 bp, Artificial Sequence
  derived and/or modified sequence
atggcgaattgtcagatcgccatcctttatcagcggttccaacgcgtggtgtttggtatctcacagctgctctgcttctctgcactgatttcagaactgacaaaccagaaggaagtcgctgcatggacatatcattattctacaaaggcctattcctggaacatctccaggaagtattgtcagaatcggtatacagacctcgttgcaattcagaacaagaacgaaatcgactacttaaacaaagtcctgccttattactccagctattactggatcgggattcgcaaaaataacaagacctggacatgggttggcaccaagaaggccctgacgaatgaggcggaaaactgggccgataatgagcccaataataaacgcaataacgaagactgtgttgagatctacatcaaatccccgtcggccccaggtaaatggaatgatgagcactgtttgaaaaagaagcacgccttatgttatacggcctcttgtcaggacatgtcgtgctccaagcaaggagaatgcctggaaaccattgggaattacacctgttcttgttaccctggtttttatgggcctgagtgcgagtatgtacgggagtgtggggagttggagctgcctcaacacgtcctgatgaactgctctcacccactcggaaactttagcttcaacagccaatgcagctttcattgcacagacgggtaccaggtcaatggcccatcaaagctagagtgcctggcctcaggaatttggaccaacaagcctcctcagtgccttgcagcccagtgccccccgttgaagatccccgaaagggggaacatgacctgtttgcacagcgccaaagccttccaacaccaaagctcctgttccttttcatgtgaagaaggatttgctttagtcgggccagaggtggtgcaatgcacggccagtggagtgtggaccgctcccgctccggtatgcaaggccctgcagtgccaagacttgccagtacctaatgaggcgagagttaattgtagccacccgttcggtgcattcagataccagtctgtctgctcattcacctgcaatgaaggccttttactggttggcgcatccgtgctccagtgtttggcaacagggaattggaacagtgtgccgccagaatgccaggctattccctgcacccctctcttgtctcctcaaaacggcacgatgacctgcgtgcagcctctgggatctagcagttataagtccacttgtcagttcatttgcgatgaaggatattctctctctggccccgagcggctggattgtacaaggagcggacggtggaccgacagtcccccaatgtgcgaagggatagccagcctgcccacacctggagtgcaatgcccagctctgaccactccaggccagggcaccatgtactgcagacaccatcccggcactttcggcttcaacactacgtgttactttgggtgtaatgctgggtttaccctgatcggggatagcacattgtcttgccgcccgagcggacagtggactgctgtaacacctgcctgccgagccgttaagtgctccgaactgcacgtaaataaaccgattgcgatgaattgcagcaacttgtggggcaatttttcttatggcagtatctgttcctttcactgcttggaaggccagctgctcaatggaagtgctcaaaccgcctgtcaagagaacggccattggagcaccaccgttccaacttgccaggcaggtccactgacgatccaggaagcactcacctatttcgggggcgccgtggcatcaacaatcgggctcatcatgggcgggactctcctcgctttgctccgtaaacgattcagacagaaggacgacggcaagtgtcctctgaatccccacagtcatctggggacctatggagtgtttaccaacgccgcctttgatccctcaccatag

SEQ ID NO: 134268 - DNA, 2490 bp, Artificial Sequence
  derived and/or modified sequence
gcgaactgccaaatcgctatcctataccagcggttccagcgtgtggttttcggcatctcccagctgctgtgctttagcgccctgatcagtgaacttacaaaccagaaggaagtggcggcctggacctatcattattccacgaaagcatactcatggaacattagccgcaaatactgtcagaatagatataccgatctggttgctatccagaataagaacgagatcgactacctgaataaggtgcttccatattattcctcatattattggatcggcataaggaaaaataataaaacatggacctgggtcggaacaaaaaaggcgctgaccaacgaggccgagaactgggctgataacgagcctaacaacaagcgtaacaacgaagattgcgtggaaatctatataaaatccccctcagcgcccggcaaatggaatgatgagcattgcttaaagaagaaacatgctctatgttacacagcctcctgccaggacatgagctgctcgaaacagggtgaatgcctggaaaccataggcaattatacttgctcatgctatccagggttttacggccccgagtgcgagtatgtgcgagaatgcggggagttggagctgccccagcacgtgctaatgaattgctcccaccccctggggaacttttccttcaactcccagtgtagcttccactgcaccgacggataccaggtcaatggtccctctaagcttgaatgtctcgcctctggcatctggaccaataagcctcctcagtgtctggccgcgcaatgccctccactcaagattccagaacgtggcaacatgacgtgtcttcactccgctaaagcttttcagcaccagtccagttgcagtttttcatgcgaggaggggttcgcacttgtaggaccagaggtggttcagtgcactgcctccggcgtctggacagcccccgccccagtctgtaaggccgtacagtgtcagcacctggaagccccgtctgaggggactatggactgtgtgcacccactcaccgctttcgcatatggcagcagctgcaagttcgagtgccagcccgggtacagagttaggggcctggatatgttaaggtgcattgacagcggacactggagtgcccccctccccacttgtgaagctatcagctgcgagccccttgagtctcctgtgcacggctccatggattgtagcccctccctcagagccttccagtatgacaccaattgttcctttcggtgtgcggaggggttcatgttgagaggagcagacattgtgaggtgcgacaatctgggccagtggaccgcccctgctcccgtttgccaggctctgcaatgccaggacttgcccgttcctaacgaggctagggtcaactgtagccatccctttggagcgttccgctaccagtccgtatgttccttcacatgtaacgaaggccttcttctcgttggcgcttctgtcctgcaatgcctggccactgggaactggaactccgtccctcccgaatgtcaagccattccatgcacacctcttttgtcgccacaaaacggtacgatgacatgtgtccagccactcggcagctcttcctataagtccacttgccagtttatttgcgacgaggggtactccttgtctggccctgagcggttagattgtacacgaagtgggcgctggacagattcgccacccatgtgcgaggccatcaagtgccctgagttattcgcacctgagcaggggtctctcgactgttctgacaccaggggcgagtttaacgtgggctctacttgccacttttcgtgcgataatggattcaaactcgagggcccaaacaatgtagagtgtaccacgtccggcagatggtcagctactcctcctacttgcaaaggtattgcgtcccttcctacgcccggagtccagtgtcccgctttaacaacgcccgggcagggcaccatgtattgccgtcaccaccctggtaccttcggattcaacaccacctgctatttcggatgcaatgcagggtttaccctgattggagacagtaccctgtcttgcagaccttcaggccaatggacagccgtgactcccgcctgccgcgctgtgaagtgctctgagttgcacgtgaacaagcctatcgctatgaattgctcgaatctctggggaaacttctcctatggaagtatttgttccttccactgcctggagggccagcttctgaacggctctgctcaaacagcctgtcaggaaaacgggcactggagtactactgtccctacatgtcaggctggacctcttacaattcaggaggccctgacctacttcggtggcgccgtggccagtaccattgggctgattatggggggcacactactcgccctgctccggaagcggtttagacagaaggacgacggtaagtgcccgctgaaccctcattctcatctcgggacgtatggcgtattcacaaacgccgccttcgacccatctccctag

SEQ ID NO: 134269 - DNA, 2493 bp, Artificial Sequence
  derived and/or modified sequence
atggccaactgccagatcgccatcctgtaccagcgcttccagagggtggtgtttggcatcagccagctgctgtgcttcagcgccctgatcagcgagctgaccaaccagaaggaggtggccgcctggacctaccactacagcaccaaggcctacagctggaacatcagcaggaagtactgccagaaccgctacacagacctggtggccatccagaacaagaatgaaattgactacctgaacaaggtgctgccctactacagcagctactactggattggcatcaggaagaacaacaagacctggacctgggtgggcaccaagaaggccctgaccaatgaagctgagaactgggccgacaatgagcccaacaacaagaggaacaatgaagactgtgtggagatctacatcaagagccccagcgcccctgggaagtggaatgatgagcactgcctgaagaagaagcacgccctgtgctacacagccagctgccaggacatgagctgcagcaagcagggagaatgtctggagaccatcggcaactacacctgcagctgctacccaggcttctacggcccagaatgtgaatatgtgagagaatgtggggagctggagctgccccagcacgtgctgatgaactgcagccaccccctgggcaacttctccttcaacagccagtgcagcttccactgcacagatggctaccaggtgaatggccccagcaagctggagtgcctggccagcggcatctggaccaacaagccaccccagtgcctggccgcccagtgcccccccctgaagatccctgagcggggcaacatgacctgcctgcacagcgccaaggccttccagcaccagagcagctgcagcttcagctgtgaggagggctttgccctggtgggccctgaggtggtgcagtgcacagccagcggcgtgtggacagccccagcccctgtgtgcaaggctgtgcagtgccagcacctggaggcccccagcgagggcaccatggactgtgtgcaccccctgacagcctttgcctacggcagcagctgcaagtttgagtgccagcccggctacagagtgcggggcctggacatgctgcgctgcattgattctggccactggagcgcccccctgcccacctgtgaggccatcagctgtgagcccctggagagccctgtgcacggctccatggactgcagccccagcctgcgggccttccagtatgacaccaactgcagcttccgctgtgccgagggcttcatgctgcggggagctgacatcgtgcgctgtgacaacctgggccagtggacagccccagcccctgtgtgccaggccctgcagtgccaggacctgcctgtgcccaatgaggcccgggtgaactgcagccacccctttggagccttccgctaccagagcgtgtgcagcttcacctgcaatgaaggcctgctgctggtgggcgcctctgtgctgcagtgcctggccactggaaactggaacagcgtgcccccagagtgccaggccatcccctgcacccccctgctgagcccccagaatggcaccatgacctgtgtgcagcccctgggcagcagcagctacaagagcacctgccagttcatctgtgatgagggctacagcctgagcggccctgagcggctggactgcaccaggagcggccgctggacagacagcccccccatgtgtgaggccatcaagtgcccagagctgtttgcccctgagcagggcagcctggactgcagcgacaccagaggagagttcaacgtgggcagcacctgccacttcagctgtgacaatggcttcaagctggagggccccaacaacgtggagtgcaccaccagcggccgctggagcgccaccccacccacctgcaagggcatcgccagcctgcccaccccaggagtgcagtgcccagccctgaccaccccaggccagggcaccatgtactgccgccaccaccctggcaccttcggcttcaacaccacctgctacttcggctgcaatgccggcttcaccctgattggagacagcaccctgagctgccggcccagcggccagtggacagctgtgaccccagcctgcagagctgtgaagtgcagcgagctgcacgtgaacaagcccatcgccatgaactgcagcaacctgtggggcaacttctcctatggcagcatctgcagcttccactgcctggagggccagctgctgaatggaagtgcccagacagcctgccaggagaatggccactggagcaccaccgtgcccacctgccaggccggccccctgaccatccaggaggccctgacctactttggaggagctgtggccagcaccatcggcctcatcatgggcggcaccctgctggccctgctgaggaagcgcttccggcagaaggatgatggcaagtgccccctgaacccccacagccacctgggcacctacggcgtcttcaccaatgctgcctttgaccccagcccctag

SEQ ID NO: 134270 - DNA, 1935 bp, Artificial Sequence
  derived and/or modified sequence
atggccaactgccagatcgccatcctgtaccagcgcttccagagggtggtgtttggcatcagccagctgctgtgcttcagcgccctgatcagcgagctgaccaaccagaaggaggtggccgcctggacctaccactacagcaccaaggcctacagctggaacatcagcaggaagtactgccagaaccgctacacagacctggtggccatccagaacaagaatgaaattgactacctgaacaaggtgctgccctactacagcagctactactggattggcatcaggaagaacaacaagacctggacctgggtgggcaccaagaaggccctgaccaatgaagctgagaactgggccgacaatgagcccaacaacaagaggaacaatgaagactgtgtggagatctacatcaagagccccagcgcccctgggaagtggaatgatgagcactgcctgaagaagaagcacgccctgtgctacacagccagctgccaggacatgagctgcagcaagcagggagaatgtctggagaccatcggcaactacacctgcagctgctacccaggcttctacggcccagaatgtgaatatgtgagagaatgtggggagctggagctgccccagcacgtgctgatgaactgcagccaccccctgggcaacttctccttcaacagccagtgcagcttccactgcacagatggctaccaggtgaatggccccagcaagctggagtgcctggccagcggcatctggaccaacaagccaccccagtgcctggccgcccagtgcccccccctgaagatccctgagcggggcaacatgacctgcctgcacagcgccaaggccttccagcaccagagcagctgcagcttcagctgtgaggagggctttgccctggtgggccctgaggtggtgcagtgcacagccagcggcgtgtggacagccccagcccctgtgtgcaaggccctgcagtgccaggacctgcctgtgcccaatgaggcccgggtgaactgcagccacccctttggagccttccgctaccagagcgtgtgcagcttcacctgcaatgaaggcctgctgctggtgggcgcctctgtgctgcagtgcctggccactggaaactggaacagcgtgcccccagagtgccaggccatcccctgcacccccctgctgagcccccagaatggcaccatgacctgtgtgcagcccctgggcagcagcagctacaagagcacctgccagttcatctgtgatgagggctacagcctgagcggccctgagcggctggactgcaccaggagcggccgctggacagacagcccccccatgtgtgagggcatcgccagcctgcccaccccaggagtgcagtgcccagccctgaccaccccaggccagggcaccatgtactgccgccaccaccctggcaccttcggcttcaacaccacctgctacttcggctgcaatgccggcttcaccctgattggagacagcaccctgagctgccggcccagcggccagtggacagctgtgaccccagcctgcagagctgtgaagtgcagcgagctgcacgtgaacaagcccatcgccatgaactgcagcaacctgtggggcaacttctcctatggcagcatctgcagcttccactgcctggagggccagctgctgaatggaagtgcccagacagcctgccaggagaatggccactggagcaccaccgtgcccacctgccaggccggccccctgaccatccaggaggccctgacctactttggaggagctgtggccagcaccatcggcctcatcatgggcggcaccctgctggccctgctgaggaagcgcttccggcagaaggatgatggcaagtgccccctgaacccccacagccacctgggcacctacggcgtcttcaccaatgctgcctttgaccccagcccctag

SEQ ID NO: 134271 - DNA, 2490 bp, Artificial Sequence
  derived and/or modified sequence
gccaactgccagatcgccatcctgtaccagcgcttccagagggtggtgtttggcatcagccagctgctgtgcttcagcgccctgatcagcgagctgaccaaccagaaggaggtggccgcctggacctaccactacagcaccaaggcctacagctggaacatcagcaggaagtactgccagaaccgctacacagacctggtggccatccagaacaagaatgaaattgactacctgaacaaggtgctgccctactacagcagctactactggattggcatcaggaagaacaacaagacctggacctgggtgggcaccaagaaggccctgaccaatgaagctgagaactgggccgacaatgagcccaacaacaagagaaataatgaagactgtgtggagatctacatcaagagccccagcgcccctgggaagtggaatgatgagcactgcctgaagaagaagcacgccctgtgctacacagccagctgccaggacatgagctgcagcaagcagggcgagtgcctggagaccatcggcaactacacctgcagctgctacccaggcttctacggcccagaatgtgaatatgtgcgggagtgtggggagctggagctgccccagcacgtgctgatgaactgcagccaccccctgggcaacttctccttcaacagccagtgcagcttccactgcacagatggctaccaggtgaatggccccagcaagctggagtgcctggccagcggcatctggaccaacaagccaccccagtgcctggccgcccagtgcccccccctgaagatccctgagcggggcaacatgacctgcctgcacagcgccaaggccttccagcaccagagcagctgcagcttcagctgtgaggagggctttgccctggtgggccctgaggtggtgcagtgcacagccagcggcgtgtggacagccccagcccctgtgtgcaaggctgtgcagtgccagcacctggaggcccccagcgagggcaccatggactgtgtgcaccccctgacagcctttgcctacggcagcagctgcaagtttgagtgccagcccggctacagagtgcggggcctggacatgctgcgctgcatcgacagcggccactggagcgcccccctgcccacctgtgaggccatcagctgtgagcccctggagagccctgtgcacggctccatggactgcagccccagcctgcgggccttccagtatgacaccaactgcagcttccgctgtgccgagggcttcatgctgcggggagctgacatcgtgcgctgtgacaacctgggccagtggacagccccagcccctgtgtgccaggccctgcagtgccaggacctgcctgtgcccaatgaggcccgggtgaactgcagccacccctttggagccttccgctaccagagcgtgtgcagcttcacctgcaatgaaggcctgctgctggtgggcgcctctgtgctgcagtgcctggccaccggcaactggaacagcgtgcccccagagtgccaggccatcccctgcacccccctgctgagcccccagaatggcaccatgacctgtgtgcagcccctgggcagcagcagctacaagagcacctgccagttcatctgtgatgagggctacagcctgagcggccctgagcggctggactgcaccaggagcggccgctggacagacagcccccccatgtgtgaggccatcaagtgcccagagctgtttgcccctgagcagggcagcctggactgcagcgacaccagaggagagttcaacgtgggcagcacctgccacttcagctgtgacaatggcttcaagctggagggccccaacaacgtggagtgcaccaccagcggccgctggagcgccaccccacccacctgcaagggcatcgccagcctgcccaccccaggagtgcagtgcccagccctgaccaccccaggccagggcaccatgtactgccgccaccaccctggcaccttcggcttcaacaccacctgctacttcggctgcaatgccggcttcaccctcatcggggacagcaccctgagctgccggcccagcggccagtggacagctgtgaccccagcctgcagagctgtgaagtgcagcgagctgcacgtgaacaagcccatcgccatgaactgcagcaacctgtggggcaacttctcctatggcagcatctgcagcttccactgcctggagggccagctgctgaatggcagcgcccagacagcctgccaggagaatggccactggagcaccaccgtgcccacctgccaggccggccccctgaccatccaggaggccctgacctactttggaggagctgtggccagcaccatcggcctcatcatgggcggcaccctgctggccctgctgaggaagcgcttccggcagaaggatgatggaaaatgtcccctgaacccccacagccacctgggcacctatggagtcttcaccaatgctgcctttgaccccagcccctag

SEQ ID NO: 134272 - DNA, 2493 bp, Artificial Sequence
  derived and/or modified sequence
atggccaactgccagatcgccatcctgtaccagcggttccagcgggtcgtgttcggaatcagccagctgctgtgcttttccgcactgatttcagagctgaccaaccagaaggaggttgcggcatggacctatcattactccacgaaggcatactcatggaatattagcagaaaatactgtcagaaccgatatacagacctggttgcaatccagaacaaaaatgagattgattatctcaataaggtgcttccctactattctagctattactggatcggaatcaggaagaacaacaaaacatggacgtgggtcgggaccaaaaaagcgctaacaaacgaggcggaaaattgggccgacaacgaacccaataataagagaaataacgaggactgtgtcgaaatttatataaagtctcctagtgctccaggtaaatggaacgatgagcattgcttgaagaagaagcatgcgctgtgctacacagcctcgtgtcaggacatgtcttgctccaagcagggagaatgcctcgaaacgatcggaaactacacatgctcttgttatccgggtttttacggtccggaatgcgagtacgtacgggagtgcggtgagcttgagcttccgcagcatgtgctgatgaattgttcccatccactcggtaacttcagcttcaattctcagtgctctttccattgtacagacggttatcaagtcaacgggccgtctaaactagaatgccttgcatccggtatctggaccaacaaaccacctcagtgtctcgcagcacaatgtccgccactcaagattccagaaagaggcaatatgacctgtctgcattccgccaaagcttttcagcatcaatcctcttgtagtttctcctgcgaggaggggttcgcactcgtaggacccgaggtagtgcagtgtacagcctccggtgtttggactgcaccagcaccagtgtgtaaggccgttcagtgtcagcacttagaagccccatccgagggtacaatggattgcgttcacccattaacagccttcgcttacggcagtagctgtaaatttgaatgccagccaggatacagggttagaggactcgatatgctccgctgcattgattctggccattggagtgctcccttgccgacgtgtgaggctatctcctgtgaaccattggagtcgcccgtccatgggagcatggattgcagcccttctctgcgggcattccaatatgacacaaactgctccttccgctgtgccgaagggtttatgctccgtggagctgacatcgtgcgatgtgacaatcttgggcagtggactgctccagcacccgtgtgtcaagccctgcagtgccaggacctgccggtgccaaacgaggctcgggtgaactgttcccatccgttcggtgcgtttcgatatcagtcagtgtgcagtttcacatgtaacgagggactgctgctcgtgggtgcgagcgtgctgcagtgtctggccaccggaaactggaactcagtcccaccagagtgtcaggctatcccgtgcacgcccctgctctccccgcagaatgggactatgacttgcgtgcagcctctcggaagctctagttacaaatcaacctgtcagtttatttgtgacgaggggtatagcctgagcggccccgagcgcctggactgtacaaggtcgggccgttggaccgactccccgcctatgtgcgaggccatcaagtgtccagaactgtttgcccctgaacagggaagtttggattgttccgacaccagaggagagtttaacgtgggctctacttgtcacttcagttgcgacaatgggtttaagctggaaggccctaataatgtcgagtgcacaaccagcggaagatggtcagcaaccccgcccacgtgtaaaggcatcgcttccctgccaactcctggagtgcagtgcccggccctgaccacgcctggacagggtactatgtattgtcgccatcaccccggtactttcggatttaacactacctgctattttggatgcaatgctggcttcaccctgataggggactccacgctatcttgccgaccaagcggccagtggacagcggtcactccagcttgccgggctgtgaaatgtagtgagctgcacgttaacaagcctatagcaatgaactgctccaatctctggggtaatttctcatatgggtctatctgcagttttcactgcctggaagggcagctgctcaacggttctgcccagacggcatgccaggaaaatggccactggagcaccacagtacctacctgtcaggctggccctctgaccatccaagaagcgctgacttacttcggcggcgccgtggcgtctactattgggttaatcatgggaggcacactcctggccttactgcgtaagagatttcggcaaaaggatgacggaaaatgcccccttaatccacatagtcacctcggcacatatggggtcttcacaaacgctgcatttgatcctagcccatag

SEQ ID NO: 134273 - DNA, 2493 bp, Artificial Sequence
  derived and/or modified sequence
atggccaactgccagatcgccatcctgtaccagcggttccagcgggtggtctttggaattagccagctgttatgcttttccgcattaatatcagagctcactaatcagaaagaagttgccgcgtggacgtatcactattctacgaaagcctattcttggaatatttcacgcaagtattgtcagaataggtatacagacttagtagctatccagaataagaacgagatcgactatctgaataaggttctgccctattactcatcatactattggatcgggattagaaaaaacaacaagacctggacatgggttggcactaagaaagccctgactaatgaggccgagaattgggctgataacgaaccaaacaacaagcggaacaacgaggattgtgtcgaaatttatatcaaatccccctctgcacccggcaagtggaacgatgagcattgtctgaaaaaaaagcacgcactctgctacaccgctagctgccaggatatgtcttgctctaagcagggtgaatgcctggaaacaattggtaattacacctgcagctgctacccggggttttatggcccagagtgcgagtatgtgagggagtgtggcgagcttgagctgccgcagcatgtgctgatgaactgcagtcatcctctggggaacttcagttttaactcacaatgtagctttcactgcaccgacgggtatcaggtgaacggacctagcaagctggagtgcctggcaagcggaatttggacaaacaagccacctcaatgcctggccgcgcagtgtcctcctctcaaaatccctgagcgtgggaatatgacttgcctgcatagtgccaaagcattccaacaccaatcttcctgctcttttagctgcgaggagggtttcgctctcgtcggcccagaggtggtgcaatgtactgcaagtggcgtttggacagcccccgcacccgtgtgcaaagcagtccagtgtcagcatctggaggccccatctgagggcaccatggactgcgttcatcctttaaccgcatttgcttatgggtccagctgcaaatttgagtgccagcccggctatcgagtgcgggggctggacatgcttcggtgcatcgattccggccactggagcgcccccctgccaacgtgcgaggctatctcatgcgaacctctggagtcacccgtccacggcagtatggactgttcccctagcctgcgggcgtttcagtacgacactaactgctccttcaggtgcgctgaagggttcatgctcagaggggccgacattgttaggtgtgataacctgggccagtggacagctccggcccctgtatgtcaagcacttcagtgccaggacttgccagttcctaatgaggcacgagtaaactgtagtcacccatttggggcctttaggtaccagtcagtttgctcctttacctgcaatgaaggccttctgcttgtgggagcgtccgtcctccagtgcctcgcaacagggaattggaatagcgtgccacccgaatgccaagctatcccttgtacccctctattgagccctcagaatggcactatgacctgcgtccagcccctgggaagctcatcgtataaatcaacatgtcaatttatttgtgatgagggatactccttgtcaggccctgagcgactggattgtacacggtccggaaggtggactgacagcccaccgatgtgcgaagcaattaaatgccctgagttgttcgcccccgagcaaggcagtctggactgtagcgacactcgcggcgagttcaacgtgggatcaacttgccacttttcttgtgacaacggtttcaagctcgaaggccccaacaacgtggagtgcactacatccggccgatggagtgctacacccccaacatgtaaaggtatcgcttctttgcctacccctggagttcagtgcccagccctgacgactcctggccaaggcactatgtactgcaggcaccaccccggtacatttgggtttaacacaacatgttattttggctgcaacgccggattcactctcattggtgactctactctgtcatgtcggccttccggacaatggaccgctgtgacgcctgcctgcagagctgtgaaatgttctgagctgcacgtgaataaacctatcgccatgaactgctcgaatctttggggcaatttcagttatggatccatctgcagcttccactgcctggagggtcagctgctcaacggatcggcccagactgcttgtcaagaaaatggccattggagcactaccgtgcccacatgtcaggcaggtcctttaactatccaagaagccctcacatattttggtggtgccgtggccagcacaatcggtcttataatgggaggtacccttctggcacttttgagaaaacgatttcgccagaaagatgacggtaaatgtccactgaacccacactcacatttaggcacatacggtgttttcaccaatgctgccttcgatccctccccttag

SEQ ID NO: 134274 - DNA, 1935 bp, Artificial Sequence
  derived and/or modified sequence
atggccaactgccagatcgccatcctgtaccagcggttccagcgggtggtgtttggcatttcacagttgctgtgcttttcagccctgatttcagaactaactaatcagaaggaggttgccgcatggacttatcactatagcaccaaagcttactcctggaatatctcgaggaagtattgtcaaaatcgatacacggacctggttgcgatacagaataaaaatgaaattgattatctaaacaaagtgctgccttactactcctcatattactggattggcatccgcaagaacaataaaacatggacgtgggtgggcacaaagaaagccctcacaaacgaggctgaaaactgggcggataatgagcccaacaataaaaggaacaacgaggactgtgtagaaatttatattaagagtccctcggccccaggaaaatggaacgatgagcattgcttaaaaaagaagcatgcactgtgctacactgcaagctgtcaagacatgagctgcagcaaacagggggagtgtcttgagaccatcggcaattatacttgttcatgctacccaggtttctacgggccagaatgtgagtacgtgcgggagtgcggagagttggagctgccccaacacgtactgatgaactgcagccacccgttgggcaacttctcctttaattcccagtgttcattccattgcaccgacgggtatcaggtgaacggaccctcaaagttggaatgtcttgcttcaggcatctggactaacaagccaccacagtgtcttgctgcccagtgcccccccttgaagattcctgaacgagggaacatgacatgtctgcacagcgccaaagcattccagcaccaaagcagttgcagcttctcatgcgaggagggattcgccctggtaggaccagaagtggtgcagtgtactgcttccggcgtttggacggctccggcccccgtctgtaaggcccttcaatgccaagacctccccgtgcctaacgaagcgcgtgtgaattgttctcaccccttcggggcctttaggtaccaaagcgtgtgtagctttacctgcaacgaagggctcctgctggtcggcgccagcgtcctgcaatgtctcgccacagggaactggaattccgtcccacccgagtgtcaggccatcccctgcactccactactgtctccccaaaatgggaccatgacatgtgtgcaaccgcttggctcctcgtcatataaaagcacttgccagtttatatgtgacgagggctactccctgtccgggcccgagcggctggactgcacaagatcaggccgatggacggactctcccccaatgtgcgagggtatcgctagccttcccacccctggtgtgcaatgtcctgcactgaccactcccggacaggggactatgtattgtcgccaccacccaggaacctttggttttaacactacttgctatttcgggtgtaatgctggttttaccctgattggtgactcaaccctttcttgtcgaccaagtggccagtggactgccgtcacaccagcctgccgcgccgtcaaatgtagcgaactacatgtcaataagcctattgctatgaactgctcaaacctttggggaaatttttcttatgggtccatttgcagtttccattgccttgaaggacagcttctgaacggatcggcccagacggcctgccaggaaaatgggcactggagtacgactgtgcctacttgtcaggcgggaccactcaccatccaagaggctctgacctattttggaggcgccgtggccagtactattggactcataatgggagggacactgctggccctgttacggaagcgattcagacagaaagacgatggcaaatgcccacttaatccccacagccacttggggacctatggggtcttcaccaatgctgcattcgatccctcgccgtag

SEQ ID NO: 134275 - DNA, 1935 bp, Artificial Sequence
  derived and/or modified sequence
atggccaactgccagatcgccatcctgtaccagcggttccagcgggtcgtgtttggcatctcacagctgctttgcttttcagctctaatctctgaactgacgaaccagaaagaggttgcagcttggacttaccactatagcactaaggcctactcttggaatatatctaggaaatactgccagaaccgctatactgatttagtcgcaatacaaaacaagaacgaaatcgactacttaaataaggtactgccatattatagcagctactactggatcggaatacgaaagaataataaaacctggacttgggtgggtactaaaaaggctcttaccaacgaagctgagaattgggccgataacgagcctaataacaagaggaacaacgaggactgcgtggagatttatattaagtctccaagcgcacccgggaagtggaacgatgaacactgtcttaaaaaaaagcatgcactttgctacacagcctcctgtcaggatatgtcatgtagcaaacagggggaatgtttggaaactattggcaattatacatgtagttgctatccaggcttctatggcccagagtgtgaatacgttagagaatgcggggaactagaactaccccaacacgtgctgatgaattgcagtcatcccctcggaaatttttccttcaacagtcagtgctcatttcactgtaccgatggttatcaggtgaacggacccagcaagctggagtgcttagcttcaggaatttggacgaacaaaccaccccagtgcttagccgctcagtgcccccccttgaagatccccgaaaggggcaacatgacttgcctgcactccgccaaagcttttcagcaccaaagctcatgttctttttcatgtgaggaaggcttcgctctggtggggcctgaagtcgttcaatgcaccgctagcggtgtttggactgcccccgctccggtgtgtaaggccctccagtgtcaggatctgcccgtcccaaacgaagctagagtgaattgttcacatccctttggagcgtttcgatatcagtctgtctgcagcttcacctgcaacgaaggccttctgttggtcggagctagcgtgctccagtgccttgcaacagggaactggaacagcgttcctccagaatgtcaagctattccatgcacaccacttttatcccctcagaacggcacaatgacatgtgtccagcctctgggttcaagctcatacaaatcgacctgccagttcatctgtgacgaagggtattcattgtccgggcctgaacgcctggactgcactaggtccgggcggtggacagactctcctccgatgtgcgaagggatcgccagcttgccaaccccaggagttcaatgcccagcgctgactacccccggacaaggcactatgtactgcagacaccaccctggcacgttcgggttcaatactacgtgctactttggttgtaatgcaggcttcactcttatcggcgatagcaccttgagctgccgaccttcagggcaatggacagctgtgacaccagcctgtagagccgtcaagtgcagcgaactccatgtgaacaagcccatcgccatgaactgttccaacctgtgggggaatttctcttatgggtccatttgctccttccactgtcttgaaggtcagttgttaaacgggtccgcccagactgcctgccaggaaaacggacattggtccaccaccgtgccaacctgccaggccggacctcttactattcaggaagcactgacctatttcggcggagccgtggcatccaccatcgggctcattatgggggggaccttactcgctctgctcagaaaaagatttagacagaaagacgatgggaagtgccccttaaacccgcattcccaccttggcacatatggtgtgttcaccaacgccgctttcgatccgtccccttag

SEQ ID NO: 134276 - DNA, 2490 bp, Artificial Sequence
  derived and/or modified sequence
gccaactgccagatcgccatcctgtaccagcggttccagcgggtggtgttcgggataagccagcttctgtgtttcagcgcactgattagtgagctcaccaatcagaaggaggtggccgcctggacctatcattattctaccaaagcctattcatggaatatctcccgaaaatactgccaaaacaggtacaccgatttggtggccatccagaacaagaatgagatcgattatcttaacaaggtcttgccatactacagtagttactattggatagggattagaaaaaacaacaagacttggacgtgggttgggacgaaaaaagccttaacaaacgaagctgaaaattgggcagacaatgaaccaaataacaaaaggaacaatgaggactgcgtggagatctatattaagagcccatcagccccgggcaagtggaatgatgagcattgcctaaagaagaaacacgcactctgttatactgcgtcttgtcaggatatgagttgcagcaagcaaggggagtgtttggagacaatcggaaactacacctgctcctgttacccaggattctacggtcccgagtgcgaatatgtgagagagtgtggcgagcttgagcttccacagcacgtcctgatgaactgctctcaccccttaggcaatttctctttcaatagtcaatgtagctttcattgcactgatggctatcaggtgaacggaccttctaagctggaatgcctggcgtccggtatctggacaaacaaaccaccacagtgtctggcagcccagtgcccccccttaaagatcccagagaggggcaatatgacctgccttcactcagctaaagctttccagcatcagagtagctgtagtttctcctgtgaagaagggttcgccctcgtggggccagaggtggtacagtgcacagcgagcggggtgtggacggccccagcgccagtgtgtaaagcagtgcagtgccaacacctcgaggctccaagtgaaggcacaatggactgcgtccaccccctgacagcgtttgcttacgggagctcctgcaagtttgagtgtcagccaggataccgtgtccgcggcctcgatatgctccgatgcatagactccggccactggtcagcacctctcccaacatgcgaagccatcagctgtgaaccattggagtccccggtgcatggctcaatggattgcagtcctagtctgcgagcgttccaatatgacacgaactgttccttcagatgtgcagagggattcatgctcaggggagccgatatagtccgttgcgacaatctcggacaatggacggcaccggctcctgtttgccaggccttgcagtgccaagatttaccggttcctaatgaagccagagtgaactgttcacaccccttcggggcctttcgctaccagtccgtctgttctttcacttgtaacgagggtctgctcttggtaggcgcttctgtgctgcaatgcttggctactggtaactggaacagtgtgccccccgagtgccaggctataccatgtacacctctgctgtctccccagaatggaacgatgacttgtgtccagccattgggttcctcctcatacaagtctacttgtcaatttatctgtgatgagggctatagcctgagtggcccagagcgccttgattgtaccagatcgggtcgctggaccgacagtcctcctatgtgcgaggccataaagtgccccgagctgttcgcaccggagcaaggatcactcgattgcagtgacactcgcggtgaatttaatgtggggtccacctgccacttctcctgtgataatggctttaaacttgaagggccaaacaatgtggagtgtacgacttctggtcgctggagtgcaacccccccgacatgcaagggtattgcctctctgcccaccccaggcgtgcagtgccctgctctaaccacgcctgggcagggcactatgtactgcagacaccaccctgggactttcgggtttaatacaacatgctacttcggatgcaacgccggcttcacactcattggagatagcacactttcctgtaggccatcgggccaatggactgcagtgactccagcctgccgcgccgtgaaatgttcagagttacatgtgaacaagccaatcgcgatgaattgctcaaacctctggggaaatttttcctatggtagcatttgcagtttccactgcctggagggccaactgctaaatggtagcgctcagacagcatgtcaggaaaatggccactggagcactaccgtgcctacttgtcaagcaggaccattgaccatccaggaggccctcacttactttgggggtgctgtggcaagtaccatcggactcatcatgggtgggactctcctggcactcttgcgcaagcggtttagacagaaggatgacgggaagtgccctctgaatcctcatagtcatcttggcacttacggcgtctttaccaatgcagcgttcgacccgtccccttag

SEQ ID NO: 134277 - DNA, 2493 bp, Artificial Sequence
  derived and/or modified sequence
atggctaattgtcagatcgcaattttgtaccagcgcttccaacgcgtggtgtttggcatctctcagttactctgcttctccgccctcatcagtgaactcacaaaccagaaggaggtggccgcatggacctatcattacagtaccaaagcatatagttggaacatttccagaaagtattgccagaaccgttacacagaccttgtggccatccagaataaaaatgagatcgattacttgaataaagttttaccttattatagttcttactactggataggcattaggaaaaataataaaacctggacttgggtgggaaccaagaaggccctcacaaacgaggccgaaaactgggctgacaatgaacctaacaataagaggaacaatgaagattgcgttgaaatttacatcaagagcccatcagctccgggtaaatggaatgatgagcattgcctgaagaagaaacatgccctttgctacacagcatcctgccaggacatgtcatgctcgaagcagggagagtgcctggaaactatcggcaactatacttgcagctgttaccccggtttctacggaccagagtgcgaatacgttcgggaatgtggcgagctggagcttccccaacacgtgcttatgaattgcagccatcccctcggcaatttttcatttaactcccagtgtagcttccactgcacagacggataccaggttaatggaccaagcaaactggagtgtctggcttccgggatctggaccaacaagccacctcagtgcctcgctgcccagtgccctccgctgaagataccagagagggggaatatgacctgcctgcatagtgccaaagcctttcagcaccaatcatcctgtagcttctcatgcgaagaaggctttgctctggtagggcctgaggtcgtgcagtgtacagcctctggcgtctggacagcacccgctcctgtctgcaaagccgtccaatgccagcatttagaagctcctagcgaaggcaccatggactgtgtgcatcctcttaccgcctttgcctacgggagtagttgcaagtttgaatgtcagccagggtaccgagtccggggactagatatgctccggtgtatcgattcaggccactggtcggcaccccttccaacatgtgaggctatttcttgcgagcccctagagagtcccgttcacggtagcatggattgcagcccgagcttaagagcatttcagtacgatacaaattgcagttttcggtgcgccgagggctttatgctgcggggtgcggatatcgttagatgcgacaacctgggtcagtggactgcgccagctcctgtgtgccaggcgcttcagtgtcaggatcttcctgtgcctaatgaagctcgtgtgaattgcagccaccccttcggcgctttcagataccagtcggtgtgttcctttacatgtaatgagggtctgctcctggtaggtgccagtgtcttacagtgtctcgccaccggtaactggaactctgtgcccccagaatgtcaggcgatcccctgtactccgctgttatccccgcaaaatggcacaatgacctgtgtccagccgttgggctcgagctcctacaaaagtacctgccagttcatttgtgacgagggctactcgctgtctgggccagagcggctggattgcactagatcaggtcgatggactgactcccctcctatgtgcgaggccatcaaatgccctgagcttttcgctcccgagcaaggatcactcgattgcagcgacactaggggagaatttaacgtgggctcaacttgtcattttagttgtgataacgggttcaaactggagggaccaaataacgtcgagtgtacaaccagcgggaggtggtcagccactccgccaacttgcaagggaatcgcttctctgcccacccccggtgtgcagtgcccagctctcactacacctggccaggggaccatgtactgcaggcatcacccaggcactttcggctttaacaccacttgttactttgggtgtaatgcgggttttactctcataggggattcgactctttcctgccgacccagtggacaatggaccgccgttactcccgcttgccgagctgtcaaatgttccgaactccatgtcaacaagccaatcgctatgaattgctccaatctctggggcaacttttcttatgggtccatatgttcatttcactgcctggaaggccaactgctaaatggatccgcccaaactgcctgccaggagaatggacactggagcacaacagtcccaacttgccaggcaggacctctcaccattcaagaggcattgacttacttcgggggagctgtggcgtctacgattggactgattatggggggtacccttctcgctctcctgagaaagaggtttagacagaaggatgacgggaaatgccccctgaacccgcacagccacttgggaacctatggcgtgttcacgaacgctgcttttgatccgagcccttag

SEQ ID NO: 134278 - DNA, 2493 bp, Artificial Sequence
  derived and/or modified sequence
atggcaaattgccagatcgctatcttatatcaaagattccagcgcgttgttttcggaataagtcaactcttgtgcttttcggccctgatatccgagttgacaaatcaaaaggaggtagccgcatggacctaccactacagtactaaagcttatagttggaacatctctcgtaagtactgtcagaacagatacaccgaccttgtggcgatacagaacaagaatgagatagactatctaaataaagtcctgccatactactcatcgtattactggatcggaatcaggaagaataacaagacttggacctgggtaggaacgaagaaagccctcacaaacgaggcagagaattgggctgacaacgaaccaaacaacaaaaggaataacgaggactgcgtggagatttatatcaaaagtccttccgccccagggaagtggaacgacgagcactgcctcaagaaaaagcacgctctgtgttacactgcgagctgccaggacatgtcctgtagcaagcagggcgaatgcctggaaactataggtaattacacatgttcatgttacccgggtttctatgggccagaatgcgaatacgtgagagaatgcggtgagctggagctcccccagcatgtcctgatgaattgctcgcatccattaggaaatttttccttcaactcccagtgctcattccattgtacagacggttatcaagttaacggaccctccaaactggaatgcctggcctcagggatttggacaaacaaaccacctcagtgcctggcggcacagtgccctccgctcaaaattcctgagcgaggaaatatgacatgccttcatagtgctaaggcatttcaacatcagagcagctgctctttttcctgcgaggaaggttttgcactggttggtcccgaagtggtgcagtgtactgccagcggagtttggacagccccagcccctgtgtgtaaggccgtgcaatgccagcaccttgaggctccctcggagggaactatggattgtgtccaccctctgaccgcattcgcatatgggtcaagctgcaagtttgaatgccaaccgggataccgcgtgagaggtctggatatgcttcgctgtattgactctggtcactggagcgcccctctgcctacctgtgaggctatatcatgtgaacccctcgaaagcccggtacacgggtctatggattgctccccgtcacttagagcttttcagtacgatacgaactgctcttttaggtgtgccgaaggattcatgttacgtggagcagatattgttcggtgtgataacctgggccaatggactgcccctgctcctgtatgtcaagctctgcagtgtcaggatcttcctgtgccaaacgaggctagagtgaattgttcacatccttttggggctttcagatatcagagcgtgtgttcctttacgtgcaatgaggggctgctgttggttggggcatccgtccttcagtgcctggccactggcaactggaacagcgtgcctccagagtgtcaggcaattccatgtacccccctgctgtcgcctcagaacgggaccatgacctgtgtgcagcctttgggcagttcaagctataaaagcacatgccagttcatatgtgatgaagggtattctttgagcggcccagagcgcctggattgtactcggtctgggcgttggactgacagccctccgatgtgtgaagcgattaagtgccccgagttattcgccccagagcagggctcactggactgtagcgacacccggggagagttcaacgtaggttcgacatgccactttagttgtgacaacgggttcaagttagagggcccaaacaatgtagagtgtacgacctctggtaggtggtcggccacaccacccacctgcaaagggattgcctcgctgcctacaccaggcgtgcagtgtccagccttgacaactccaggacaggggaccatgtattgccgccaccatccagggacgtttggcttcaatactacctgttactttggctgcaacgcaggttttactctgataggtgactccacactgtcttgccgaccctccggccaatggacagccgtgacacccgcttgccgtgcagtcaaatgctctgagctccacgtgaacaaaccaatcgctatgaattgtagtaatctgtgggggaacttttcttacggaagcatctgcagcttccattgtctggagggccagttgctgaacggtagcgctcaaacagcctgccaggagaacggccattggagtacgacggtgcccacttgtcaggctggcccactgaccatccaggaggccttgacatattttggcggagctgtagcttctacgatcggattaatcatgggcggaacattgttagcgctcctccgcaagcgcttccgacagaaagacgatggcaaatgtcctctcaaccctcactcccacctgggaacctacggcgtgtttactaatgccgcttttgatcctagcccctag

SEQ ID NO: 134279 - DNA, 1935 bp, Artificial Sequence
  derived and/or modified sequence
atggctaattgccagatagctattctctatcagaggtttcagcgcgtcgtcttcggcattagccagctgctatgcttttcagcacttatttccgagcttacaaaccagaaagaggtcgcagcttggacgtaccactacagcaccaaggcttactcctggaatatctcccggaagtactgccagaacaggtataccgatctggtcgccattcagaacaagaacgaaatcgactacttgaataaggtgttgccctattacagttcatactattggatcgggattagaaagaacaacaaaacatggacgtgggtaggaaccaaaaaggccctgacgaacgaggccgagaattgggctgacaatgagccgaacaacaagcgaaacaacgaagactgtgttgaaatctatattaagtccccatctgcacctggcaagtggaatgacgaacactgcctgaaaaagaagcacgccctgtgctataccgcctcatgtcaggatatgagctgcagcaagcaaggcgagtgcctcgaaaccatcgggaactacacatgctcatgctaccctggattttacggcccagagtgtgagtatgtccgggaatgcggggaattagaattaccacaacacgtgttgatgaactgcagccatccgttaggaaatttctcattcaattcccaatgtagctttcactgtaccgacgggtaccaggtgaatggaccttccaagctagaatgtcttgcttcaggcatctggaccaacaaaccccctcaatgtctggccgctcaatgcccaccactgaaaatcccggaacgaggcaacatgacctgcttgcactccgccaaagctttccagcatcaaagctcttgctctttctcatgtgaggagggcttcgcactggtggggcctgaggttgtccagtgtacagcctccggtgtgtggacagccccagctcccgtgtgcaaagcacttcagtgtcaggatttgcccgtgcctaacgaagctagggtgaactgctctcacccctttggggcatttagatatcagtccgtctgtagcttcacttgcaacgaaggcttgcttttggtgggtgcctcagtcctccaatgtctggccacaggaaactggaactcagttccacccgagtgtcaggccatcccgtgtacacctttactgagtccccagaacgggactatgacctgcgtgcaacccctgggtagcagctcgtacaagagcacttgtcagttcatttgcgatgagggatatagtctctccgggcctgagaggctggactgtactagatctggcaggtggacggattccccacccatgtgtgaaggaattgcttcactcccaaccccaggcgtacagtgtccggcactgaccacaccaggccaaggcacaatgtattgtcgtcaccatcccggtacctttgggtttaacacaacctgctattttggctgtaatgcaggcttcacgcttattggagactctactcttagctgcagacctagcggacagtggaccgctgtgacaccagcttgccgcgcagtgaagtgctccgaactacacgtaaataaaccaattgcaatgaattgtagtaacctgtggggaaatttttcctatgggtccatctgctccttccattgcctggaggggcagctgctaaacggatcagcccagacagcttgtcaggaaaacgggcactggagcaccacggtgcctacctgccaggccggacctctcacaattcaggaggcgctaacatattttggaggcgctgttgctagtacaattggactcatcatgggcggtacacttttggccctattgcgtaaaaggttcaggcagaaagatgacggaaaatgcccattgaaccctcattctcacttagggacctatggcgttttcaccaacgctgcctttgatccttccccgtag

SEQ ID NO: 134280 - DNA, 1935 bp, Artificial Sequence
  derived and/or modified sequence
atggctaattgccagattgctatactttaccagaggtttcagcgggtagtgttcggtatctcacagctgttgtgtttttctgctttgatttctgagttgacaaaccaaaaggaggtggctgcatggacgtatcactatagcaccaaagcatatagttggaacatctctagaaaatactgccagaataggtataccgatctagtcgctattcagaacaaaaatgaaatagattatctgaataaagtgctgccgtattactccagctattactggatagggatcaggaagaataacaaaacctggacatgggtggggaccaaaaaagctttgaccaacgaggctgagaactgggccgacaacgagcctaataacaagcggaacaacgaagactgtgtggagatttacatcaagagcccttcagcccctgggaaatggaacgatgagcattgtctcaagaaaaaacacgccttgtgttatactgctagttgccaggacatgagctgttctaaacagggcgaatgcctcgaaactatcggaaactacacttgttcctgttatcccggtttctatgggccagagtgcgagtatgttagagaatgcggggagctggaattaccacagcatgtgttaatgaactgcagtcatcccttgggaaacttctcctttaacagccaatgcagctttcattgtacggacggctaccaagtgaacggaccttctaaattagagtgcctggcaagtggtatttggactaacaagccccctcagtgcctggctgcccaatgccctcctttgaagatacctgaaagagggaatatgacgtgcctccactccgctaaggcttttcagcaccagagctcctgtagttttagttgcgaagaaggtttcgctctcgtgggaccagaggtcgtgcagtgcaccgcctcaggtgtgtggacagcgccagctccagtttgtaaagccctgcagtgccaggatcttcccgtaccaaatgaagccagggttaattgcagtcatccatttggagcgttccgataccaaagtgtgtgctcttttacatgtaacgaaggactgttgctcgttggcgcttccgtcctgcagtgcctagctacaggtaactggaacagcgtgccccctgaatgtcaggctatcccatgcacgcccctgctgtcgccgcagaatggaaccatgacatgcgtgcagcccctcggatcaagcagttataagagcacgtgccaatttatctgtgacgagggctacagcctatctggtcccgagagacttgactgcaccaggtctggcagatggactgactctcctcctatgtgtgagggaattgccagcctgcccaccccgggtgtgcagtgtcctgcgctgactacacccggacaggggactatgtactgccggcatcaccctggaacctttggatttaacactacttgctattttggctgcaacgctggcttcaccctcatcggggactccacactgagttgccgtcccagtggacagtggacagccgttaccccagcgtgccgagcagttaaatgctccgaactgcacgtcaacaaacctatcgcaatgaactgctctaatctttggggcaacttcagttatggcagcatatgttcatttcactgcttagagggccaattgctgaacgggagcgcacagacggcgtgtcaggagaatggtcactggtcgactacggttccaacgtgtcaggcgggtcctctgacaatccaggaagccctgacttactttggaggcgctgttgcatccactattggcctaatcatgggcggaaccttgcttgcgctgctaagaaagcgtttccgtcagaaagacgacgggaagtgtccccttaatccacactcccatctcgggacttacggggtgtttaccaacgctgcctttgatcccagcccatag

SEQ ID NO: 134281 - DNA, 2490 bp, Artificial Sequence
  derived and/or modified sequence
gcaaactgccagattgcaattctgtaccagaggtttcaacgcgtagtgttcgggattagccagctgctctgcttctccgcactgatcagcgagttgactaatcaaaaagaagtggctgcctggacatatcactactcgacaaaggcatattcatggaacatatccaggaagtattgccagaaccgctacactgatcttgtggctatccagaataagaatgagattgactacctgaacaaggtgctcccctactactcatcctactattggatcggcatacgcaagaacaacaagacttggacatgggttggcaccaagaaggccttgaccaacgaggctgaaaactgggcagataacgagcctaataataagagaaacaacgaagactgcgtggaaatttacatcaaaagcccttccgcacccggtaaatggaatgacgagcactgtctaaaaaagaaacatgcattgtgttataccgcaagctgccaggatatgtcctgttctaagcaaggcgaatgcctggagactattggtaattacacctgttcttgttatccgggtttttacggaccagaatgtgagtacgtacgtgagtgcggagaattagagttacctcagcatgtgctgatgaactgctctcatcccctcggaaatttcagctttaactcgcagtgttcattccattgcacagatgggtaccaggtgaatgggccaagtaaacttgaatgtctggcgtccggaatatggacgaacaagccacctcaatgcctggctgcccagtgtccacctctcaaaatccccgagagagggaatatgacttgtctgcactctgcaaaggcattccaacatcagagttcatgttcattttcctgcgaggaagggttcgctctggtcggtccggaagtcgttcagtgtaccgcttctggggtctggactgcgcctgcacctgtgtgcaaggccgtccagtgccagcatctggaggccccaagcgagggcactatggattgcgtgcaccctctcactgcatttgcttacggtagtagttgcaagttcgaatgtcagcccggatacagagtgaggggtctagatatgctgagatgcatagattcgggacactggtcggctcctctccccacttgcgaagccatctcatgcgaacccctggaatcacctgtacacgggagcatggactgcagtcctagcctccgagccttccagtacgataccaactgttcattccgatgtgccgaagggtttatgctgcgtggggcagacattgtccgatgcgataatcttggccaatggacagcacctgcgccagtgtgccaggcccttcagtgtcaggatcttcctgtccccaacgaggcgagggtaaattgctctcatccatttggtgcgttcagatatcagtcagtgtgctcttttacttgcaacgaaggactgttactcgttggcgcaagcgtactccagtgcctggccactgggaattggaattctgtgcctcccgagtgccaggcaattccatgtacccccctgctgagtcctcagaatggcacaatgacctgtgtgcagcccttggggtcctcgtcgtacaaaagtacctgccagtttatttgcgacgaagggtatagcctgagtgggcctgagcgattagattgcactcgaagtggacgctggacagatagtccacctatgtgtgaagctattaagtgtcccgagctctttgctccagaacaaggatccctggattgcagcgacactcgtggggaatttaatgtaggcagtacctgccacttcagttgcgacaacggcttcaagctggagggcccaaataatgtggagtgtactacctctggtcgatggtcggccactcccccaacgtgtaagggaatcgccagcttgcccacacccggagtccagtgtcccgctcttaccacacccggacagggcacgatgtactgtaggcaccacccgggtactttcgggttcaacaccacctgttacttcggctgcaacgccggtttcactctcataggggacagcacactatcttgtagaccatccgggcagtggacggccgttactccagcatgccgcgctgtgaaatgcagtgagctgcacgttaataagcctatcgcaatgaattgcagtaacctatggggtaattttagttatgggtccatatgcagttttcattgcctggaaggccagctattgaatggctcagcccagacagcatgccaggaaaatggccactggtccactaccgtgcctacctgtcaggccggtcccctcactattcaagaggcccttacctacttcggcggtgcggtggctagtactatcggactcataatgggtgggacactgctagctctgctcaggaagcgatttcggcagaaggatgacggcaagtgtccgctgaatccacacagccatttggggacttatggcgtgttcaccaacgccgcttttgaccccagtccctag

SEQ ID NO: 134282 - DNA, 3169 bp, Artificial Sequence
  derived and/or modified sequence
ggcagtgagactgtaagcagtctgggttgggcagaaggcagaaaaccagcagagtcacagaggagatggccaactgccaaatagccatcttgtaccagagattccagagagtggtctttggaatttcccaactcctttgcttcagtgccctgatctctgaactaacaaaccagaaagaagtggcagcatggacttatcattacagcacaaaagcatactcatggaatatttcccgtaaatactgccagaatcgctacacagacttagtggccatccagaataaaaatgaaattgattacctcaataaggtcctaccctactacagctcctactactggattgggatccgaaagaacaataagacatggacatgggtgggaaccaaaaaggctctcaccaacgaggctgagaactgggctgataatgaacctaacaacaaaaggaacaacgaggactgcgtggagatatacatcaagagtccgtcagcccctggcaagtggaatgatgagcactgcttgaagaaaaagcacgcattgtgttacacagcctcctgccaggacatgtcctgcagcaaacaaggagagtgcctcgagaccatcgggaactacacctgctcctgttaccctggattctatgggccagaatgtgaatacgtgagagagtgtggagaacttgagctccctcaacacgtgctcatgaactgcagccaccctctgggaaacttctcttttaactcgcagtgcagcttccactgcactgacgggtaccaagtaaatgggcccagcaagctggaatgcttggcttctggaatctggacaaataagcctccacagtgtttagctgcccagtgcccacccctgaagattcctgaacgaggaaacatgacctgccttcattctgcaaaagcattccagcatcagtctagctgcagcttcagttgtgaagagggatttgcattagttggaccggaagtggtgcaatgcacagcctcgggggtatggacagccccagccccagtgtgtaaagctgtgcagtgtcagcacctggaagcccccagtgaaggaaccatggactgtgttcatccgctcactgcttttgcctatggctccagctgtaaatttgagtgccagcccggctacagagtgaggggcttggacatgctccgctgcattgactctggacactggtctgcacccttgccaacctgtgaggctatttcgtgtgagccgctggagagtcctgtccacggaagcatggattgctctccatccttgagagcgtttcagtatgacaccaactgtagcttccgctgtgctgaaggtttcatgctgagaggagccgatatagttcggtgtgataacttgggacagtggacagcaccagccccagtctgtcaagctttgcagtgccaggatctcccagttccaaatgaggcccgggtgaactgctcccaccccttcggtgcctttaggtaccagtcagtctgcagcttcacctgcaatgaaggcttgctcctggtgggagcaagtgtgctacagtgcttggctactggaaactggaattctgttcctccagaatgccaagccattccctgcacacctttgctaagccctcagaatggaacaatgacctgtgttcaacctcttggaagttccagttataaatccacatgtcaattcatctgtgacgagggatattctttgtctggaccagaaagattggattgtactcgatcgggacgctggacagactccccaccaatgtgtgaagccatcaagtgcccagaactctttgccccagagcagggcagcctggattgttctgacactcgtggagaattcaatgttggctccacctgccatttctcttgtgacaacggctttaagctggaggggcccaataatgtggaatgcacaacttctggaagatggtcagctactccaccaacctgcaaaggcatagcatcacttcctactccaggggtgcaatgtccagccctcaccactcctgggcagggaaccatgtactgtaggcatcatccgggaacctttggttttaataccacttgttactttggctgcaacgctggattcacactcataggagacagcactctcagctgcagaccttcaggacaatggacagcagtaactccagcatgcagagctgtgaaatgctcagaactacatgttaataagccaatagcgatgaactgctccaacctctggggaaacttcagttatggatcaatctgctctttccattgtctagagggccagttacttaatggctctgcacaaacagcatgccaagagaatggccactggtcaactaccgtgccaacctgccaagcaggaccattgactatccaggaagccctgacttactttggtggagcggtggcttctacgataggtctgataatgggtgggacgctcctggctttgctaagaaagcgtttcagacaaaaagatgatgggaaatgccccttgaatcctcacagccacctaggaacatatggagtttttacaaacgctgcatttgacccgagtccttaaggtttccataaacacccatgaatcaaagacatggaattaccttagattagctctggaccagcctgttggacccgctctggaccaaccctgtttcctgagtttgggattgtggtacaatctcaaattctcaacctaccaccccttcctgtcccacctcttctcttcctgtaacacaagccacagaagccaggagcaaatgtttctgcagtagtctctgtgctttgactcacctgttacttgaaataccagtgaaccaaagagactggagcatctgactcacaagaagaccagactgtggagaaataaaaatacctctttattttttgattgaaggaaggttttctccactttgttggaaagcaggtggcatctctaattggaagaaattcctgtagcatcttctggagtctccagtggttgctgttgatgaggcctcttggacctctgctctgaggcttccagagagtcctctggatggcaccagaggctgcagaaggccaagaatcaagctagaaggccacatgtcaccgtggaccttcctgccaccagtcactgtccctcaaatgacccaaagaccaatattcaaatgcgtaattaaaagaattttcccc

SEQ ID NO: 134283 - DNA, 3171 bp, Artificial Sequence
  derived and/or modified sequence
ggaggcagtgagactgtaagcagtctgggttgggcagaaggcagaaaaccagcagagtcacagaggagatggccaactgccaaatagccatcttgtaccagagattccagagagtggtctttggaatttcccaactcctttgcttcagtgccctgatctctgaactaacaaaccagaaagaagtggcagcatggacttatcattacagcacaaaagcatactcatggaatatttcccgtaaatactgccagaatcgctacacagacttagtggccatccagaataaaaatgaaattgattacctcaataaggtcctaccctactacagctcctactactggattgggatccgaaagaacaataagacatggacatgggtgggaaccaaaaaggctctcaccaacgaggctgagaactgggctgataatgaacctaacaacaaaaggaacaacgaggactgcgtggagatatacatcaagagtccgtcagcccctggcaagtggaatgatgagcactgcttgaagaaaaagcacgcattgtgttacacagcctcctgccaggacatgtcctgcagcaaacaaggagagtgcctcgagaccatcgggaactacacctgctcctgttaccctggattctatgggccagaatgtgaatacgtgagagagtgtggagaacttgagctccctcaacacgtgctcatgaactgcagccaccctctgggaaacttctcttttaactcgcagtgcagcttccactgcactgacgggtaccaagtaaatgggcccagcaagctggaatgcttggcttctggaatctggacaaataagcctccacagtgtttagctgcccagtgcccacccctgaagattcctgaacgaggaaacatgacctgccttcattctgcaaaagcattccagcatcagtctagctgcagcttcagttgtgaagagggatttgcattagttggaccggaagtggtgcaatgcacagcctcgggggtatggacagccccagccccagtgtgtaaagctgtgcagtgtcagcacctggaagcccccagtgaaggaaccatggactgtgttcatccgctcactgcttttgcctatggctccagctgtaaatttgagtgccagcccggctacagagtgaggggcttggacatgctccgctgcattgactctggacactggtctgcacccttgccaacctgtgaggctatttcgtgtgagccgctggagagtcctgtccacggaagcatggattgctctccatccttgagagcgtttcagtatgacaccaactgtagcttccgctgtgctgaaggtttcatgctgagaggagccgatatagttcggtgtgataacttgggacagtggacagcaccagccccagtctgtcaagctttgcagtgccaggatctcccagttccaaatgaggcccgggtgaactgctcccaccccttcggtgcctttaggtaccagtcagtctgcagcttcacctgcaatgaaggcttgctcctggtgggagcaagtgtgctacagtgcttggctactggaaactggaattctgttcctccagaatgccaagccattccctgcacacctttgctaagccctcagaatggaacaatgacctgtgttcaacctcttggaagttccagttataaatccacatgtcaattcatctgtgacgagggatattctttgtctggaccagaaagattggattgtactcgatcgggacgctggacagactccccaccaatgtgtgaagccatcaagtgcccagaactctttgccccagagcagggcagcctggattgttctgacactcgtggagaattcaatgttggctccacctgccatttctcttgtgacaacggctttaagctggaggggcccaataatgtggaatgcacaacttctggaagatggtcagctactccaccaacctgcaaaggcatagcatcacttcctactccaggggtgcaatgtccagccctcaccactcctgggcagggaaccatgtactgtaggcatcatccgggaacctttggttttaataccacttgttactttggctgcaacgctggattcacactcataggagacagcactctcagctgcagaccttcaggacaatggacagcagtaactccagcatgcagagctgtgaaatgctcagaactacatgttaataagccaatagcgatgaactgctccaacctctggggaaacttcagttatggatcaatctgctctttccattgtctagagggccagttacttaatggctctgcacaaacagcatgccaagagaatggccactggtcaactaccgtgccaacctgccaagcaggaccattgactatccaggaagccctgacttactttggtggagcggtggcttctacgataggtctgataatgggtgggacgctcctggctttgctaagaaagcgtttcagacaaaaagatgatgggaaatgccccttgaatcctcacagccacctaggaacatatggagtttttacaaacgctgcatttgacccgagtccttaagtttccataaacacccatgaatcaaagacatggaattaccttagattagctctggaccagcctgttggacccgctctggaccaaccctgtttcctgagtttgggattgtggtacaatctcaaattctcaacctaccaccccttcctgtcccacctcttctcttcctgtaacacaagccacagaagccaggagcaaatgtttctgcagtagtctctgtgctttgactcacctgttacttgaaataccagtgaaccaaagagactggagcatctgactcacaagaagaccagactgtggagaaataaaaatacctctttattttttgattgaaggaaggttttctccactttgttggaaagcaggtggcatctctaattggaagaaattcctgtagcatcttctggagtctccagtggttgctgttgatgaggcctcttggacctctgctctgaggcttccagagagtcctctggatggcaccagaggctgcagaaggccaagaatcaagctagaaggccacatgtcaccgtggaccttcctgccaccagtcactgtccctcaaatgacccaaagaccaatattcaaatgcgtaattaaaagaattttcccc

SEQ ID NO: 134284 - DNA, 2611 bp, Artificial Sequence
  derived and/or modified sequence
ggcagtgagactgtaagcagtctgggttgggcagaaggcagaaaaccagcagagtcacagaggagatggccaactgccaaatagccatcttgtaccagagattccagagagtggtctttggaatttcccaactcctttgcttcagtgccctgatctctgaactaacaaaccagaaagaagtggcagcatggacttatcattacagcacaaaagcatactcatggaatatttcccgtaaatactgccagaatcgctacacagacttagtggccatccagaataaaaatgaaattgattacctcaataaggtcctaccctactacagctcctactactggattgggatccgaaagaacaataagacatggacatgggtgggaaccaaaaaggctctcaccaacgaggctgagaactgggctgataatgaacctaacaacaaaaggaacaacgaggactgcgtggagatatacatcaagagtccgtcagcccctggcaagtggaatgatgagcactgcttgaagaaaaagcacgcattgtgttacacagcctcctgccaggacatgtcctgcagcaaacaaggagagtgcctcgagaccatcgggaactacacctgctcctgttaccctggattctatgggccagaatgtgaatacgtgagagagtgtggagaacttgagctccctcaacacgtgctcatgaactgcagccaccctctgggaaacttctcttttaactcgcagtgcagcttccactgcactgacgggtaccaagtaaatgggcccagcaagctggaatgcttggcttctggaatctggacaaataagcctccacagtgtttagctgcccagtgcccacccctgaagattcctgaacgaggaaacatgacctgccttcattctgcaaaagcattccagcatcagtctagctgcagcttcagttgtgaagagggatttgcattagttggaccggaagtggtgcaatgcacagcctcgggggtatggacagccccagccccagtgtgtaaagctttgcagtgccaggatctcccagttccaaatgaggcccgggtgaactgctcccaccccttcggtgcctttaggtaccagtcagtctgcagcttcacctgcaatgaaggcttgctcctggtgggagcaagtgtgctacagtgcttggctactggaaactggaattctgttcctccagaatgccaagccattccctgcacacctttgctaagccctcagaatggaacaatgacctgtgttcaacctcttggaagttccagttataaatccacatgtcaattcatctgtgacgagggatattctttgtctggaccagaaagattggattgtactcgatcgggacgctggacagactccccaccaatgtgtgaaggcatagcatcacttcctactccaggggtgcaatgtccagccctcaccactcctgggcagggaaccatgtactgtaggcatcatccgggaacctttggttttaataccacttgttactttggctgcaacgctggattcacactcataggagacagcactctcagctgcagaccttcaggacaatggacagcagtaactccagcatgcagagctgtgaaatgctcagaactacatgttaataagccaatagcgatgaactgctccaacctctggggaaacttcagttatggatcaatctgctctttccattgtctagagggccagttacttaatggctctgcacaaacagcatgccaagagaatggccactggtcaactaccgtgccaacctgccaagcaggaccattgactatccaggaagccctgacttactttggtggagcggtggcttctacgataggtctgataatgggtgggacgctcctggctttgctaagaaagcgtttcagacaaaaagatgatgggaaatgccccttgaatcctcacagccacctaggaacatatggagtttttacaaacgctgcatttgacccgagtccttaaggtttccataaacacccatgaatcaaagacatggaattaccttagattagctctggaccagcctgttggacccgctctggaccaaccctgtttcctgagtttgggattgtggtacaatctcaaattctcaacctaccaccccttcctgtcccacctcttctcttcctgtaacacaagccacagaagccaggagcaaatgtttctgcagtagtctctgtgctttgactcacctgttacttgaaataccagtgaaccaaagagactggagcatctgactcacaagaagaccagactgtggagaaataaaaatacctctttattttttgattgaaggaaggttttctccactttgttggaaagcaggtggcatctctaattggaagaaattcctgtagcatcttctggagtctccagtggttgctgttgatgaggcctcttggacctctgctctgaggcttccagagagtcctctggatggcaccagaggctgcagaaggccaagaatcaagctagaaggccacatgtcaccgtggaccttcctgccaccagtcactgtccctcaaatgacccaaagaccaatattcaaatgcgtaattaaaagaattttcccc

SEQ ID NO: 134285 - DNA, 2713 bp, Artificial Sequence
  derived and/or modified sequence
cacagaggagatggccaactgccaaatagccatcttgtaccagagattccagagagtggtctttggaatttcccaactcctttgcttcagtgccctgatctctgaactaacaaaccagaaagaagtggcagcatggacttatcattacagcacaaaagcatactcatggaatatttcccgtaaatactgccagaatcgctacacagacttagtggccatccagaataaaaatgaaattgattacctcaataaggtcctaccctactacagctcctactactggattgggatccgaaagaacaataagacatggacatgggtgggaaccaaaaaggctctcaccaacgaggctgagaactgggctgataatgaacctaacaacaaaaggaacaacgaggactgcgtggagatatacatcaagagtccgtcagcccctggcaagtggaatgatgagcactgcttgaagaaaaagcacgcattgtgttacacagcctcctgccaggacatgtcctgcagcaaacaaggagagtgcctcgagaccatcgggaactacacctgctcctgttaccctggattctatgggccagaatgtgaatacgtgagagagtgtggagaacttgagctccctcaacacgtgctcatgaactgcagccaccctctgggaaacttctcttttaactcgcagtgcagcttccactgcactgacgggtaccaagtaaatgggcccagcaagctggaatgcttggcttctggaatctggacaaataagcctccacagtgtttagctgcccagtgcccacccctgaagattcctgaacgaggaaacatgacctgccttcattctgcaaaagcattccagcatcagtctagctgcagcttcagttgtgaagagggatttgcattagttggaccggaagtggtgcaatgcacagcctcgggggtatggacagccccagccccagtgtgtaaagctttgcagtgccaggatctcccagttccaaatgaggcccgggtgaactgctcccaccccttcggtgcctttaggtaccagtcagtctgcagcttcacctgcaatgaaggcttgctcctggtgggagcaagtgtgctacagtgcttggctactggaaactggaattctgttcctccagaatgccaagccattccctgcacacctttgctaagccctcagaatggaacaatgacctgtgttcaacctcttggaagttccagttataaatccacatgtcaattcatctgtgacgagggatattctttgtctggaccagaaagattggattgtactcgatcgggacgctggacagactccccaccaatgtgtgaaggcatagcatcacttcctactccaggggtgcaatgtccagccctcaccactcctgggcagggaaccatgtactgtaggcatcatccgggaacctttggttttaataccacttgttactttggctgcaacgctggattcacactcataggagacagcactctcagctgcagaccttcaggacaatggacagcagtaactccagcatgcagagctgtgaaatgctcagaactacatgttaataagccaatagcgatgaactgctccaacctctggggaaacttcagttatggatcaatctgctctttccattgtctagagggccagttacttaatggctctgcacaaacagcatgccaagagaatggccactggtcaactaccgtgccaacctgccaagcaggaccattgactatccaggaagccctgacttactttggtggagcggtggcttctacgataggtctgataatgggtgggacgctcctggctttgctaagaaagcgtttcagacaaaaagatgatgggaaatgccccttgaatcctcacagccacctaggaacatatggagtttttacaaacgctgcatttgacccgagtccttaagagacctgtccttttcctggtctcctcattcagcctccatatgatcctgttgtgaacatcaagtttcctgctacactggacttaactataatgcatttgctgcaggtttccataaacacccatgaatcaaagacatggaattaccttagattagctctggaccagcctgttggacccgctctggaccaaccctgtttcctgagtttgggattgtggtacaatctcaaattctcaacctaccaccccttcctgtcccacctcttctcttcctgtaacacaagccacagaagccaggagcaaatgtttctgcagtagtctctgtgctttgactcacctgttacttgaaataccagtgaaccaaagagactggagcatctgactcacaagaagaccagactgtggagaaataaaaatacctctttattttttgattgaaggaaggttttctccactttgttggaaagcaggtggcatctctaattggaagaaattcctgtagcatcttctggagtctccagtggttgctgttgatgaggcctcttggacctctgctctgaggcttccagagagtcctctggatggcaccagaggctgcagaaggccaagaatcaagctagaaggccacatgtcaccgtggaccttcctgccaccagtcactgtccctcaaatgacccaaagaccaatattcaaatgcgtaattaaaagaattttccccaaatgccgtgttcctctattttatggtttgttcagtaaggtctgtatacatca

SEQ ID NO: 134286 - DNA, 3205 bp, Artificial Sequence
  derived and/or modified sequence
gccaactgccaaatagccatcttgtaccagagattccagagagtggtctttggaatttcccaactcctttgcttcagtgccctgatctctgaactaacaaaccagaaagaagtggcagcatggacttatcattacagcacaaaagcatactcatggaatatttcccgtaaatactgccagaatcgctacacagacttagtggccatccagaataaaaatgaaattgattacctcaataaggtcctaccctactacagctcctactactggattgggatccgaaagaacaataagacatggacatgggtgggaaccaaaaaggctctcaccaacgaggctgagaactgggctgataatgaacctaacaacaaaaggaacaacgaggactgcgtggagatatacatcaagagtccgtcagcccctggcaagtggaatgatgagcactgcttgaagaaaaagcacgcattgtgttacacagcctcctgccaggacatgtcctgcagcaaacaaggagagtgcctcgagaccatcgggaactacacctgctcctgttaccctggattctatgggccagaatgtgaatacgtgagagagtgtggagaacttgagctccctcaacacgtgctcatgaactgcagccaccctctgggaaacttctcttttaactcgcagtgcagcttccactgcactgacgggtaccaagtaaatgggcccagcaagctggaatgcttggcttctggaatctggacaaataagcctccacagtgtttagctgcccagtgcccacccctgaagattcctgaacgaggaaacatgacctgccttcattctgcaaaagcattccagcatcagtctagctgcagcttcagttgtgaagagggatttgcattagttggaccggaagtggtgcaatgcacagcctcgggggtatggacagccccagccccagtgtgtaaagctgtgcagtgtcagcacctggaagcccccagtgaaggaaccatggactgtgttcatccgctcactgcttttgcctatggctccagctgtaaatttgagtgccagcccggctacagagtgaggggcttggacatgctccgctgcattgactctggacactggtctgcacccttgccaacctgtgaggctatttcgtgtgagccgctggagagtcctgtccacggaagcatggattgctctccatccttgagagcgtttcagtatgacaccaactgtagcttccgctgtgctgaaggtttcatgctgagaggagccgatatagttcggtgtgataacttgggacagtggacagcaccagccccagtctgtcaagctttgcagtgccaggatctcccagttccaaatgaggcccgggtgaactgctcccaccccttcggtgcctttaggtaccagtcagtctgcagcttcacctgcaatgaaggcttgctcctggtgggagcaagtgtgctacagtgcttggctactggaaactggaattctgttcctccagaatgccaagccattccctgcacacctttgctaagccctcagaatggaacaatgacctgtgttcaacctcttggaagttccagttataaatccacatgtcaattcatctgtgacgagggatattctttgtctggaccagaaagattggattgtactcgatcgggacgctggacagactccccaccaatgtgtgaagccatcaagtgcccagaactctttgccccagagcagggcagcctggattgttctgacactcgtggagaattcaatgttggctccacctgccatttctcttgtgacaacggctttaagctggaggggcccaataatgtggaatgcacaacttctggaagatggtcagctactccaccaacctgcaaaggcatagcatcacttcctactccaggggtgcaatgtccagccctcaccactcctgggcagggaaccatgtactgtaggcatcatccgggaacctttggttttaataccacttgttactttggctgcaacgctggattcacactcataggagacagcactctcagctgcagaccttcaggacaatggacagcagtaactccagcatgcagagctgtgaaatgctcagaactacatgttaataagccaatagcgatgaactgctccaacctctggggaaacttcagttatggatcaatctgctctttccattgtctagagggccagttacttaatggctctgcacaaacagcatgccaagagaatggccactggtcaactaccgtgccaacctgccaagcaggaccattgactatccaggaagccctgacttactttggtggagcggtggcttctacgataggtctgataatgggtgggacgctcctggctttgctaagaaagcgtttcagacaaaaagatgatgggaaatgccccttgaatcctcacagccacctaggaacatatggagtttttacaaacgctgcatttgacccgagtccttaagagacctgtccttttcctggtctcctcattcagcctccatatgatcctgttgtgaacatcaagtttcctgctacactggacttaactataatgcatttgctgcaggtttccataaacacccatgaatcaaagacatggaattaccttagattagctctggaccagcctgttggacccgctctggaccaaccctgtttcctgagtttgggattgtggtacaatctcaaattctcaacctaccaccccttcctgtcccacctcttctcttcctgtaacacaagccacagaagccaggagcaaatgtttctgcagtagtctctgtgctttgactcacctgttacttgaaataccagtgaaccaaagagactggagcatctgactcacaagaagaccagactgtggagaaataaaaatacctctttattttttgattgaaggaaggttttctccactttgttggaaagcaggtggcatctctaattggaagaaattcctgtagcatcttctggagtctccagtggttgctgttgatgaggcctcttggacctctgctctgaggcttccagagagtcctctggatggcaccagaggctgcagaaggccaagaatcaagctagaaggccacatgtcaccgtggaccttcctgccaccagtcactgtccctcaaatgacccaaagaccaatattcaaatgcgtaattaaaagaattttcccc

SEQ ID NO: 134287 - DNA, 2493 bp, Artificial Sequence
  derived and/or modified sequence
atggccaactgccagatcgccatcctgtaccagagattccagagagtggtgttcggcatcagccagctgctgtgcttcagcgccctgatcagcgagctgaccaaccagaaggaggtggccgcctggacctaccactacagcaccaaggcctacagctggaacatcagcagaaagtactgccagaacagatacaccgacctggtggccatccagaacaagaacgagatcgactacctgaacaaggtgctgccctactacagcagctactactggatcggcatcagaaagaacaacaagacctggacctgggtgggcaccaagaaggccctgaccaacgaggccgagaactgggccgacaacgagcccaacaacaagagaaacaacgaggactgcgtggagatctacatcaagagccccagcgcccccggcaagtggaacgacgagcactgcctgaagaagaagcacgccctgtgctacaccgccagctgccaggacatgagctgcagcaagcagggcgagtgcctggagaccatcggcaactacacctgcagctgctaccccggcttctacggccccgagtgcgagtacgtgagagagtgcggcgagctggagctgccccagcacgtgctgatgaactgcagccaccccctgggcaacttcagcttcaacagccagtgcagcttccactgcaccgacggctaccaggtgaacggccccagcaagctggagtgcctggccagcggcatctggaccaacaagcccccccagtgcctggccgcccagtgcccccccctgaagatccccgagagaggcaacatgacctgcctgcacagcgccaaggccttccagcaccagagcagctgcagcttcagctgcgaggagggcttcgccctggtgggccccgaggtggtgcagtgcaccgccagcggcgtgtggaccgcccccgcccccgtgtgcaaggccgtgcagtgccagcacctggaggcccccagcgagggcaccatggactgcgtgcaccccctgaccgccttcgcctacggcagcagctgcaagttcgagtgccagcccggctacagagtgagaggcctggacatgctgagatgcatcgacagcggccactggagcgcccccctgcccacctgcgaggccatcagctgcgagcccctggagagccccgtgcacggcagcatggactgcagccccagcctgagagccttccagtacgacaccaactgcagcttcagatgcgccgagggcttcatgctgagaggcgccgacatcgtgagatgcgacaacctgggccagtggaccgcccccgcccccgtgtgccaggccctgcagtgccaggacctgcccgtgcccaacgaggccagagtgaactgcagccaccccttcggcgccttcagataccagagcgtgtgcagcttcacctgcaacgagggcctgctgctggtgggcgccagcgtgctgcagtgcctggccaccggcaactggaacagcgtgccccccgagtgccaggccatcccctgcacccccctgctgagcccccagaacggcaccatgacctgcgtgcagcccctgggcagcagcagctacaagagcacctgccagttcatctgcgacgagggctacagcctgagcggccccgagagactggactgcaccagaagcggcagatggaccgacagcccccccatgtgcgaggccatcaagtgccccgagctgttcgcccccgagcagggcagcctggactgcagcgacaccagaggcgagttcaacgtgggcagcacctgccacttcagctgcgacaacggcttcaagctggagggccccaacaacgtggagtgcaccaccagcggcagatggagcgccaccccccccacctgcaagggcatcgccagcctgcccacccccggcgtgcagtgccccgccctgaccacccccggccagggcaccatgtactgcagacaccaccccggcaccttcggcttcaacaccacctgctacttcggctgcaacgccggcttcaccctgatcggcgacagcaccctgagctgcagacccagcggccagtggaccgccgtgacccccgcctgcagagccgtgaagtgcagcgagctgcacgtgaacaagcccatcgccatgaactgcagcaacctgtggggcaacttcagctacggcagcatctgcagcttccactgcctggagggccagctgctgaacggcagcgcccagaccgcctgccaggagaacggccactggagcaccaccgtgcccacctgccaggccggccccctgaccatccaggaggccctgacctacttcggcggcgccgtggccagcaccatcggcctgatcatgggcggcaccctgctggccctgctgagaaagagattcagacagaaggacgacggcaagtgccccctgaacccccacagccacctgggcacctacggcgtgttcaccaacgccgccttcgaccccagcccctag

SEQ ID NO: 134288 - DNA, 1935 bp, Artificial Sequence
  derived and/or modified sequence
atggccaactgccagatcgccatcctgtaccagagattccagagagtggtgttcggcatcagccagctgctgtgcttcagcgccctgatcagcgagctgaccaaccagaaggaggtggccgcctggacctaccactacagcaccaaggcctacagctggaacatcagcagaaagtactgccagaacagatacaccgacctggtggccatccagaacaagaacgagatcgactacctgaacaaggtgctgccctactacagcagctactactggatcggcatcagaaagaacaacaagacctggacctgggtgggcaccaagaaggccctgaccaacgaggccgagaactgggccgacaacgagcccaacaacaagagaaacaacgaggactgcgtggagatctacatcaagagccccagcgcccccggcaagtggaacgacgagcactgcctgaagaagaagcacgccctgtgctacaccgccagctgccaggacatgagctgcagcaagcagggcgagtgcctggagaccatcggcaactacacctgcagctgctaccccggcttctacggccccgagtgcgagtacgtgagagagtgcggcgagctggagctgccccagcacgtgctgatgaactgcagccaccccctgggcaacttcagcttcaacagccagtgcagcttccactgcaccgacggctaccaggtgaacggccccagcaagctggagtgcctggccagcggcatctggaccaacaagcccccccagtgcctggccgcccagtgcccccccctgaagatccccgagagaggcaacatgacctgcctgcacagcgccaaggccttccagcaccagagcagctgcagcttcagctgcgaggagggcttcgccctggtgggccccgaggtggtgcagtgcaccgccagcggcgtgtggaccgcccccgcccccgtgtgcaaggccctgcagtgccaggacctgcccgtgcccaacgaggccagagtgaactgcagccaccccttcggcgccttcagataccagagcgtgtgcagcttcacctgcaacgagggcctgctgctggtgggcgccagcgtgctgcagtgcctggccaccggcaactggaacagcgtgccccccgagtgccaggccatcccctgcacccccctgctgagcccccagaacggcaccatgacctgcgtgcagcccctgggcagcagcagctacaagagcacctgccagttcatctgcgacgagggctacagcctgagcggccccgagagactggactgcaccagaagcggcagatggaccgacagcccccccatgtgcgagggcatcgccagcctgcccacccccggcgtgcagtgccccgccctgaccacccccggccagggcaccatgtactgcagacaccaccccggcaccttcggcttcaacaccacctgctacttcggctgcaacgccggcttcaccctgatcggcgacagcaccctgagctgcagacccagcggccagtggaccgccgtgacccccgcctgcagagccgtgaagtgcagcgagctgcacgtgaacaagcccatcgccatgaactgcagcaacctgtggggcaacttcagctacggcagcatctgcagcttccactgcctggagggccagctgctgaacggcagcgcccagaccgcctgccaggagaacggccactggagcaccaccgtgcccacctgccaggccggccccctgaccatccaggaggccctgacctacttcggcggcgccgtggccagcaccatcggcctgatcatgggcggcaccctgctggccctgctgagaaagagattcagacagaaggacgacggcaagtgccccctgaacccccacagccacctgggcacctacggcgtgttcaccaacgccgccttcgaccccagcccctag

SEQ ID NO: 134289 - DNA, 2490 bp, Artificial Sequence
  derived and/or modified sequence
gccaactgccagatcgccatcctgtaccagagattccagagagtggtgttcggcatcagccagctgctgtgcttcagcgccctgatcagcgagctgaccaaccagaaggaggtggccgcctggacctaccactacagcaccaaggcctacagctggaacatcagcagaaagtactgccagaacagatacaccgacctggtggccatccagaacaagaacgagatcgactacctgaacaaggtgctgccctactacagcagctactactggatcggcatcagaaagaacaacaagacctggacctgggtgggcaccaagaaggccctgaccaacgaggccgagaactgggccgacaacgagcccaacaacaagagaaacaacgaggactgcgtggagatctacatcaagagccccagcgcccccggcaagtggaacgacgagcactgcctgaagaagaagcacgccctgtgctacaccgccagctgccaggacatgagctgcagcaagcagggcgagtgcctggagaccatcggcaactacacctgcagctgctaccccggcttctacggccccgagtgcgagtacgtgagagagtgcggcgagctggagctgccccagcacgtgctgatgaactgcagccaccccctgggcaacttcagcttcaacagccagtgcagcttccactgcaccgacggctaccaggtgaacggccccagcaagctggagtgcctggccagcggcatctggaccaacaagcccccccagtgcctggccgcccagtgcccccccctgaagatccccgagagaggcaacatgacctgcctgcacagcgccaaggccttccagcaccagagcagctgcagcttcagctgcgaggagggcttcgccctggtgggccccgaggtggtgcagtgcaccgccagcggcgtgtggaccgcccccgcccccgtgtgcaaggccgtgcagtgccagcacctggaggcccccagcgagggcaccatggactgcgtgcaccccctgaccgccttcgcctacggcagcagctgcaagttcgagtgccagcccggctacagagtgagaggcctggacatgctgagatgcatcgacagcggccactggagcgcccccctgcccacctgcgaggccatcagctgcgagcccctggagagccccgtgcacggcagcatggactgcagccccagcctgagagccttccagtacgacaccaactgcagcttcagatgcgccgagggcttcatgctgagaggcgccgacatcgtgagatgcgacaacctgggccagtggaccgcccccgcccccgtgtgccaggccctgcagtgccaggacctgcccgtgcccaacgaggccagagtgaactgcagccaccccttcggcgccttcagataccagagcgtgtgcagcttcacctgcaacgagggcctgctgctggtgggcgccagcgtgctgcagtgcctggccaccggcaactggaacagcgtgccccccgagtgccaggccatcccctgcacccccctgctgagcccccagaacggcaccatgacctgcgtgcagcccctgggcagcagcagctacaagagcacctgccagttcatctgcgacgagggctacagcctgagcggccccgagagactggactgcaccagaagcggcagatggaccgacagcccccccatgtgcgaggccatcaagtgccccgagctgttcgcccccgagcagggcagcctggactgcagcgacaccagaggcgagttcaacgtgggcagcacctgccacttcagctgcgacaacggcttcaagctggagggccccaacaacgtggagtgcaccaccagcggcagatggagcgccaccccccccacctgcaagggcatcgccagcctgcccacccccggcgtgcagtgccccgccctgaccacccccggccagggcaccatgtactgcagacaccaccccggcaccttcggcttcaacaccacctgctacttcggctgcaacgccggcttcaccctgatcggcgacagcaccctgagctgcagacccagcggccagtggaccgccgtgacccccgcctgcagagccgtgaagtgcagcgagctgcacgtgaacaagcccatcgccatgaactgcagcaacctgtggggcaacttcagctacggcagcatctgcagcttccactgcctggagggccagctgctgaacggcagcgcccagaccgcctgccaggagaacggccactggagcaccaccgtgcccacctgccaggccggccccctgaccatccaggaggccctgacctacttcggcggcgccgtggccagcaccatcggcctgatcatgggcggcaccctgctggccctgctgagaaagagattcagacagaaggacgacggcaagtgccccctgaacccccacagccacctgggcacctacggcgtgttcaccaacgccgccttcgaccccagcccctag

SEQ ID NO: 134290 - protein, 402 aa, Artificial Sequence
  derived and/or modified sequence
MKPNIIFVLSLLLILEKQAAVMGQKGGSKGRLPSEFSQFPHGQKGQHYSGQKGKQQTESKGSFSIQYTYHVDANDHDQSRKSQQYDLNALHKTTKSQRHLGGSQQLLHNKQEGRDHDKSKGHFHRVVIHHKGGKAHRGTQNPSQDQGNSPSGKGISSQYSNTEERLWVHGLSKEQTSVSGAQKGRKQGGSQSSYVLQTEELVANKQQRETKNSHQNKGHYQNVVEVREEHSSKVQTSLCPAHQDKLQHGSKDIFSTQDELLVYNKNQHQTKNLNQDQQHGRKANKISYQSSSTEERRLHYGENGVQKDVSQRSIYSQTEKLVAGKSQIQAPNPKQEPWHGENAKGESGQSTNREQDLLSHEQKGRHQHGSHGGLDIVIIEQEDDSDRHLAQHLNNDRNPLFT

SEQ ID NO: 134291 - protein, 462 aa, Artificial Sequence
  derived and/or modified sequence
MKPNIIFVLSLLLILEKQAAVMGQKGGSKGRLPSEFSQFPHGQKGQHYSGQKGKQQTESKGSFSIQYTYHVDANDHDQSRKSQQYDLNALHKTTKSQRHLGGSQQLLHNKQEGRDHDKSKGHFHRVVIHHKGGKAHRGTQNPSQDQGNSPSGKGISSQYSNTEERLWVHGLSKEQTSVSGAQKGRKQGGSQSSYVLQTEELVANKQQRETKNSHQNKGHYQNVVEVREEHSSKVQTSLCPAHQDKLQHGSKDIFSTQDELLVYNKNQHQTKNLNQDQQHGRKANKISYQSSSTEERRLHYGENGVQKDVSQSSIYSQTEEKAQGKSQKQITIPSQEQEHSQKANKISYQSSSTEERRLHYGENGVQKDVSQRSIYSQTEKLVAGKSQIQAPNPKQEPWHGENAKGESGQSTNREQDLLSHEQKGRHQHGSHGGLDIVIIEQEDDSDRHLAQHLNNDRNPLFT

SEQ ID NO: 134292 - DNA, 1209 bp, Artificial Sequence
  derived and/or modified sequence
atgaaaccaaacataatctttgtcctctctctactgctgattcttgagaaacaggccgcagtcatggggcagaaaggaggctctaaaggaaggttacccagcgaattttctcaatttccccatggacagaagggccagcactacagtggccagaaaggaaaacagcagacagaaagtaagggaagcttctcaattcagtacacttaccacgtggatgcgaatgatcacgatcagtctcgcaaaagtcagcaatatgacttgaatgctctgcacaaaactaccaaaagccagcgacatctcgggggttctcagcagctgttgcacaacaaacaagagggcagggaccacgataagtcgaaaggccactttcacagggtagttatacatcacaagggagggaaagctcaccgaggaacacagaacccatcgcaagatcaaggcaacagtcccagcggaaaggggatctcttcacagtattccaataccgaggagcggctctgggtgcatggtctttccaaggaacaaactagcgtttccggcgcccagaaaggcagaaagcagggaggctctcagagctcttacgtcctgcagaccgaggagttggttgccaataagcagcagagggagacaaagaacagccaccaaaataagggtcactaccagaatgtcgtcgaggttagagaggagcactccagcaaagtgcagacgtctttgtgtccagcccaccaggacaaactgcagcacggtagtaaagatatcttctcaacccaggacgagctgcttgtgtacaataagaaccagcatcaaactaaaaacttgaaccaagatcaacagcatggtaggaaagccaacaaaataagttaccaaagctctagtaccgaagaacggcgactgcactatggagagaacggcgtgcaaaaagatgtctctcaaaggagtatctatagccaaacagaaaagctggtggcgggcaaatcccagattcaggcacctaaccctaagcaagagccgtggcatggcgagaacgctaagggcgagagtggccagtcaacaaatagggagcaggaccttctcagtcatgagcagaagggtcgccatcaacatgggtcacatggcggcctggacatcgtgatcattgagcaggaagacgacagcgataggcacctcgctcaacatctaaacaacgaccggaacccccttttcacctag

SEQ ID NO: 134293 - DNA, 1389 bp, Artificial Sequence
  derived and/or modified sequence
atgaagccaaacatcattttcgtcctgtccctcctgttgatcctcgaaaaacaggccgctgttatgggacagaagggaggatccaagggaaggcttcccagtgaattttcgcagtttcctcacggtcagaagggccaacactacagcgggcaaaagggaaagcaacagaccgaatctaaaggatcattcagtattcagtatacctatcatgtggatgcaaatgatcatgaccaatccagaaaatcacagcaatacgacctgaacgcactgcataagacaaccaagtcccagcgccatctgggcgggtcacagcagctcctccataataaacaggagggccgagatcatgataagtctaagggccattttcatcgggttgtgattcatcataagggagggaaagctcataggggcactcaaaacccttctcaggaccagggaaatagtccctcaggtaaagggattagtagtcagtattcaaacaccgaggaacgcctatgggtgcatgggttgagcaaggagcagacatctgttagcggcgcacagaaaggacgaaaacaggggggcagtcaaagttcttatgtgctgcaaactgaggagctggtcgctaacaaacagcagcgtgagactaagaacagccatcaaaacaagggacactaccagaacgtagtggaagtgcgggaggagcactcctccaaagtgcagacgtccctgtgtcctgctcaccaggataagctgcagcacggaagtaaggatattttctctactcaggacgaactgctcgtgtataataaaaaccagcaccagactaaaaacctgaatcaggaccagcagcatggcaggaaagccaataagatctcatatcagtcctcttcaacggaagagagacgtctccattatggagaaaacggggttcagaaagacgtcagtcagagtagcatctattcacaaaccgaggaaaaggcccaaggcaagagtcagaagcagattaccattccctcacaggagcaggagcactctcagaaggccaataaaatatcctatcagtcgagtagtacggaggagcgcagattacactacggcgaaaatggcgtgcagaaggatgtcagtcagcgatcgatctattctcagaccgaaaagctggtggcaggcaagtcacagatccaggctcccaaccccaagcaagaaccatggcacggtgagaacgcaaagggagagtcagggcaatctaccaacagagagcaggatcttctgtcgcatgagcagaagggtcggcatcaacacgggagtcatggcgggctcgacatcgtcatcatagaacaggaggatgacagtgatcgccaccttgcccagcacctaaataatgataggaatccgctgttcacctag

SEQ ID NO: 134294 - DNA, 1209 bp, Artificial Sequence
  derived and/or modified sequence
atgaagcccaacatcatctttgtgctgagcctgctgctgatcctggagaagcaggccgctgtgatgggccagaagggcggcagcaagggccgcctgcccagcgagttcagccagttcccccacggccagaagggccagcactacagcggccagaagggcaagcagcagacagagagcaagggcagcttcagcatccagtacacctaccacgtggatgccaatgaccatgaccagagcaggaagagccagcagtatgacctgaatgccctgcacaagaccaccaagagccagaggcacctgggcggcagccagcagctgctgcacaacaagcaggagggccgggaccatgacaagagcaagggccacttccaccgggtggtgatccaccacaagggcggcaaggcccaccggggcacccagaaccccagccaggaccagggcaacagccccagcggcaagggcatcagcagccagtacagcaacacagaggagcggctgtgggtgcacggcctgagcaaggagcagacctctgtgtctggggcccagaagggcaggaagcagggcggcagccagagcagctatgtgctgcagacagaggagctggtggccaacaagcagcagcgggagaccaagaacagccaccagaacaagggccactaccagaatgtggtggaggtgcgggaggagcacagcagcaaggtgcagaccagcctgtgcccagcccaccaggacaagctgcagcacggcagcaaggacatcttcagcacccaggatgagctgctggtgtacaacaagaaccagcaccagaccaagaacctgaaccaggaccagcagcacggcaggaaggccaacaagatctcctaccagagcagcagcacagaggagcggcggctgcactacggggagaatggagtgcagaaggatgtgtcccagaggagcatctacagccagacagagaagctggtggccggcaagagccagatccaggcccccaaccccaagcaggagccctggcatggagaaaatgccaagggggagagcggccagagcaccaaccgggagcaggacctgctgagccatgagcagaagggccgccaccagcacggcagccatggaggcctggacatcgtcatcatcgagcaggaggatgacagcgacagacacctggcccagcacctgaacaatgacaggaaccccctcttcacctag

SEQ ID NO: 134295 - DNA, 1389 bp, Artificial Sequence
  derived and/or modified sequence
atgaagcccaacatcatctttgtgctgagcctgctgctgatcctggagaagcaggccgctgtgatgggccagaagggcggcagcaagggccgcctgcccagcgagttcagccagttcccccacggccagaagggccagcactacagcggccagaagggcaagcagcagacagagagcaagggcagcttcagcatccagtacacctaccacgtggatgccaatgaccatgaccagagcaggaagagccagcagtatgacctgaatgccctgcacaagaccaccaagagccagaggcacctgggcggcagccagcagctgctgcacaacaagcaggagggccgggaccatgacaagagcaagggccacttccaccgggtggtgatccaccacaagggcggcaaggcccaccggggcacccagaaccccagccaggaccagggcaacagccccagcggcaagggcatcagcagccagtacagcaacacagaggagcggctgtgggtgcacggcctgagcaaggagcagacctctgtgtctggggcccagaagggcaggaagcagggcggcagccagagcagctatgtgctgcagacagaggagctggtggccaacaagcagcagcgggagaccaagaacagccaccagaacaagggccactaccagaatgtggtggaggtgcgggaggagcacagcagcaaggtgcagaccagcctgtgcccagcccaccaggacaagctgcagcacggcagcaaggacatcttcagcacccaggatgagctgctggtgtacaacaagaaccagcaccagaccaagaacctgaaccaggaccagcagcacggcaggaaggccaacaagatctcctaccagagcagcagcacagaggagcggcggctgcactacggggagaatggagtgcagaaggatgtgtcccagagcagcatctacagccagacagaggagaaggcccagggcaagagccagaagcagatcaccatccccagccaggagcaggagcacagccagaaggccaacaagatctcctaccagagcagcagcacagaggagcggcggctgcactacggggagaatggagtgcagaaggatgtgtcccagaggagcatctacagccagacagagaagctggtggccggcaagagccagatccaggcccccaaccccaagcaggagccctggcatggagaaaatgccaagggggagagcggccagagcaccaaccgggagcaggacctgctgagccatgagcagaagggccgccaccagcacggcagccatggaggcctggacatcgtcatcatcgagcaggaggatgacagcgacagacacctggcccagcacctgaacaatgacaggaaccccctcttcacctag

SEQ ID NO: 134296 - DNA, 1209 bp, Artificial Sequence
  derived and/or modified sequence
atgaagcccaacatcatcttcgtgctgagcctgctgctgatcctggagaagcaagccgctgtgatgggccagaaaggcgggtccaaaggtcggcttccgtccgagttttcacagtttccacacggccagaaaggacagcactactccgggcagaaaggcaaacagcagacggagagcaagggttctttcagcattcagtatacctaccacgtggacgccaacgaccacgaccagagccgcaagtcccagcaatatgatctgaatgccttgcacaaaacgacgaagtcacagcggcacctcggcgggtcccagcagctgcttcacaacaagcaggaaggcagagatcacgacaaaagtaagggccacttccaccgggtcgttatccatcacaagggcggtaaagcacatagaggaactcaaaatccatcacaagatcagggcaactcaccaagcggcaaggggatttcgagccagtattccaatacggaggagcgcctgtgggtccacggcctcagcaaagaacagacttcagtgtctggagctcagaagggcagaaaacagggcgggtcgcagagtagttatgtgctacagactgaggaactggtggccaacaagcagcagcgcgaaaccaagaactcacatcagaacaaaggtcattaccagaacgtagtcgaagtccgtgaagagcacagttcaaaggtccagacttccttatgtccagcgcatcaggacaagctgcagcacggcagcaaggatatcttcagcactcaggacgaactcctcgtgtataataagaaccagcaccagaccaagaatctcaatcaggatcaacagcacggacggaaggcaaacaaaatctcctatcagtcttcttccaccgaagaacgccgcctccactacggtgaaaacggtgtccaaaaagatgttagtcagagatcaatctattcacagaccgagaaactagttgccggtaagagccaaatccaggctcccaacccaaaacaggaaccctggcacggtgagaatgcaaaaggagaaagtggtcagagtacaaatagagagcaagacctcctctcccatgagcagaaagggaggcaccagcacggtagccatggcggattggacatagtgatcatagagcaggaggatgacagtgataggcatcttgcacagcacctgaataacgatcgcaatccgctgtttacctag

SEQ ID NO: 134297 - DNA, 1389 bp, Artificial Sequence
  derived and/or modified sequence
atgaagcccaacatcatcttcgtgctgagcctgctgctgatcctggaaaagcaggcggctgttatgggacagaagggggggtccaaggggcgactgccatcagaattctctcagttcccacacggacagaagggccagcactactccggccagaagggtaagcaacagaccgagagtaagggctcattctcaattcagtatacctatcacgtcgacgccaatgaccatgaccaatcgagaaagtcccagcagtatgacctgaatgccctccacaagacgacgaagagtcaaaggcacctcggcggaagtcaacagctgcttcacaataaacaggagggaagggaccatgacaagagcaaggggcactttcacagggtcgtgatccatcacaagggcggaaaagcccaccggggcacccagaatccatctcaggatcaagggaatagcccgagcggcaaaggcatcagttcccagtactctaacactgaagagaggctgtgggtgcatggcctatcaaaagagcagacttccgtgagcggggctcaaaaaggccggaagcagggtgggagccaatcgtcatacgtgttgcagacagaggagttggtggccaataagcagcagcgcgagaccaagaacagtcaccagaataaagggcactaccagaatgtcgtggaggtgcgcgaggaacactcaagcaaggtccagaccagcctatgccccgcacatcaggacaaactacagcatggcagcaaagatattttttcaacgcaggacgaacttttggtctataacaagaatcagcatcagaccaagaatctgaatcaagaccaacagcacggacggaaagccaataaaatcagctaccaaagttcatccacagaggagaggcgtctgcactatggggaaaacggagtgcagaaggatgtttcccagtcttcaatttacagccagactgaggagaaggcccaagggaagagtcagaagcagataactattccctcacaggaacaggagcatagccaaaaagccaataagatatcctatcaaagtagcagcacggaagaaagaaggctgcactatggtgagaatggtgtgcaaaaagatgtctctcagcgttctatttattcacagactgaaaagctcgtcgcaggaaagtcacagatccaagctcccaatccaaaacaagaaccctggcatggcgagaacgccaagggtgagtctggacagtcaaccaacagggaacaagatctgctaagccatgaacagaagggccggcaccaacacggctcccacgggggactggacattgtcattattgaacaggaagacgactctgatcgccatctggctcagcatctgaataatgacagaaatccactgttcacgtag

SEQ ID NO: 134298 - DNA, 1209 bp, Artificial Sequence
  derived and/or modified sequence
atgaagcccaacataatattcgtcctgagtctcctgctgatactggagaagcaagccgcagttatgggtcagaagggtggcagcaaggggagacttcccagcgaattttctcagttcccccatggacagaaagggcagcactacagcggccaaaaagggaagcagcaaactgagagcaagggctcatttagcatacagtacacataccacgttgacgctaatgatcatgaccagtcccgcaagtcacaacagtatgacctgaatgctttgcataagacaactaaatcacagagacatctaggcggttcacaacaactcctacataataagcaggagggcagagaccatgacaagagcaaagggcactttcatagagtcgtgatccaccataaaggaggaaaggcacataggggtactcagaacccttcacaagaccaggggaatagccctagcggcaaaggcattagcagtcagtacagcaataccgaggaaaggctgtgggtgcatgggctttccaaggagcagacatcagtatcaggggcacaaaagggcagaaaacaaggcggatcccagagcagttatgtcctgcaaacagaggaattggtcgcaaataaacagcaacgggaaacgaagaatagtcaccagaataaaggacactaccaaaacgtggtagaggtgcgagaggaacattcttccaaagttcagacatctctctgtcccgctcatcaggataagttacaacacggtagcaaggatattttctctacccaggatgagctcctggtttacaacaaaaatcagcatcagaccaaaaacctgaaccaggaccagcagcacgggagaaaggctaacaagattagttaccagagcagtagcaccgaagagcgaaggctccactatggagaaaacggtgtgcagaaggacgtatctcagaggagtatctacagtcaaactgaaaaactagtggctggaaaaagccagattcaagctccaaaccccaagcaggagccctggcatggggaaaacgcaaaaggcgaaagcggccagagcactaatcgagagcaagatcttctatctcatgagcagaaaggtcggcaccagcacggctcacatggcggtttggacatcgtgatcattgaacaggaagatgactctgatcgacacctcgcgcaacacttaaacaatgaccggaatccgcttttcacttag

SEQ ID NO: 134299 - DNA, 1389 bp, Artificial Sequence
  derived and/or modified sequence
atgaagcctaatatcatttttgtgctgagtctgctgctcatcttagaaaaacaggccgcagtgatgggacagaaaggaggctctaagggacggctgccgtctgaatttagccagttcccccatgggcagaagggccagcattacagtggacaaaaagggaagcagcagaccgagagcaagggatccttttcaatacagtacacttaccacgtggatgctaatgaccacgatcagagccggaaatctcagcagtacgatctgaacgcacttcacaaaacgaccaaatcgcaaagacacctcgggggttctcaacagctgttgcacaataaacaggaggggagagatcatgataagtccaagggacactttcaccgcgtcgtcattcaccacaagggcggaaaagcacataggggcacgcagaacccatctcaggatcaggggaatagcccttctgggaaaggcatttcttcacaatactcaaacactgaggagcggctgtgggtgcacgggctgtctaaggaacagaccagcgtgagtggggctcagaagggtagaaaacagggaggaagccagagtagctacgtgctccagacagaggagcttgttgctaacaagcagcagcgcgagactaaaaactctcaccagaacaaaggacattaccagaatgtggtggaagtccgggaggaacactccagtaaggtccagacttcactatgtcccgcacaccaggacaagctgcaacacggctcaaaagacatcttctccactcaggacgagttgctggtgtacaacaaaaatcaacaccagaccaagaatcttaatcaggaccaacagcatgggaggaaggccaacaaaatctcctatcaatccagcagcaccgaagagcgcaggctgcactacggtgagaacggagtacagaaagacgtaagccagagttcaatctacagtcagacagaggaaaaggcccagggcaaaagccaaaagcagataacaatccctagccaggagcaggagcattcacagaaggctaacaaaatatcctaccagtcctcctctacagaggagaggcgtctgcattatggagagaatggggtgcagaaggacgtgtcccagcgctcaatatactcccagactgagaagcttgtcgctggaaagagtcagatccaggccccaaacccaaaacaagaaccctggcatggtgagaacgccaagggcgagtctggacagagcaccaatcgggaacaggatctcttgtcacacgagcagaagggcagacaccagcacggctcccatggaggtcttgacattgtaatcattgaacaggaggacgactctgatcgccatctggctcagcatctgaataacgatcggaatcctctgttcacctag

SEQ ID NO: 134300 - DNA, 1266 bp, Artificial Sequence
  derived and/or modified sequence
aaggaagatataaatgacaaggtcggctcagctctcagacaaggttttccaagcaagatgaagcccaacatcatctttgtactttccctgctcctcatcttggagaagcaagcagctgtgatgggacaaaaaggtggatcaaaaggccgattaccaagtgaattttcccaatttccacacggacaaaagggccagcactattctggacaaaaaggcaagcaacaaactgaatccaaaggcagtttttctattcaatacacatatcatgtagatgccaatgatcatgaccagtcccgaaaaagtcagcaatatgatttgaatgccctacataagacgacaaaatcacaacgacatctaggtggaagtcaacaactgctccataataaacaagaaggcagagaccatgataaatcaaaaggtcattttcacagggtagttatacaccataaaggaggcaaagctcatcgtgggacacaaaatccttctcaagatcaggggaatagcccatctggaaagggaatatccagtcaatattcaaacacagaagaaaggctgtgggttcatggactaagtaaagaacaaacttccgtctctggtgcacaaaaaggtagaaaacaaggcggatcccaaagcagttatgttctccaaactgaagagctagtagctaacaaacaacaacgtgagactaaaaattctcatcaaaataaagggcattaccaaaatgtggttgaagtgagagaggaacattcaagtaaagtacaaacctcactctgtcctgcgcaccaagacaaactccaacatggatccaaagacattttttctacccaagatgagctcctagtatataacaagaatcaacaccagacaaaaaatctcaatcaagatcaacagcatggccgaaaggcaaataaaatatcataccaatcttcaagtacggaagaaagacgactccactatggagaaaatggtgtgcagaaagatgtatcccaacgcagtatttatagccaaactgaaaagctagtagcaggcaagtctcaaatccaggcaccaaatcctaagcaagagccatggcatggtgaaaatgcaaaaggagagtctggccaatctacaaatagagaacaagacctactcagtcatgaacaaaaaggcagacaccaacatggatctcatgggggattggatattgtaattatagagcaggaagatgacagtgatcgtcatttggcacaacatcttaacaacgaccgaaacccattatttacataa

SEQ ID NO: 134301 - DNA, 1662 bp, Artificial Sequence
  derived and/or modified sequence
aaggaagatataaatgacaaggtcggctcagctctcagacaaggttttccaagcaagatgaagcccaacatcatctttgtactttccctgctcctcatcttggagaagcaagcagctgtgatgggacaaaaaggtggatcaaaaggccgattaccaagtgaattttcccaatttccacacggacaaaagggccagcactattctggacaaaaaggcaagcaacaaactgaatccaaaggcagtttttctattcaatacacatatcatgtagatgccaatgatcatgaccagtcccgaaaaagtcagcaatatgatttgaatgccctacataagacgacaaaatcacaacgacatctaggtggaagtcaacaactgctccataataaacaagaaggcagagaccatgataaatcaaaaggtcattttcacagggtagttatacaccataaaggaggcaaagctcatcgtgggacacaaaatccttctcaagatcaggggaatagcccatctggaaagggaatatccagtcaatattcaaacacagaagaaaggctgtgggttcatggactaagtaaagaacaaacttccgtctctggtgcacaaaaaggtagaaaacaaggcggatcccaaagcagttatgttctccaaactgaagagctagtagctaacaaacaacaacgtgagactaaaaattctcatcaaaataaagggcattaccaaaatgtggttgaagtgagagaggaacattcaagtaaagtacaaacctcactctgtcctgcgcaccaagacaaactccaacatggatccaaagacattttttctacccaagatgagctcctagtatataacaagaatcaacaccagacaaaaaatctcaatcaagatcaacagcatggccgaaaggcaaataaaatatcataccaatcttcaagtacagaagaaagacgactccactatggagaaaatggtgtgcagaaagatgtatcccaaagcagtatttatagccaaactgaagagaaagcacagggcaagtctcaaaaacagataacaattcccagtcaagagcaagagcatagccaaaaggcaaataaaatatcataccaatcttcaagtacggaagaaagacgactccactatggagaaaatggtgtgcagaaagatgtatcccaacgcagtatttatagccaaactgaaaagctagtagcaggcaagtctcaaatccaggcaccaaatcctaagcaagagccatggcatggtgaaaatgcaaaaggagagtctggccaatctacaaatagagaacaagacctactcagtcatgaacaaaaaggcagacaccaacatggatctcatgggggattggatattgtaattatagagcaggaagatgacagtgatcgtcatttggcacaacatcttaacaacgaccgaaacccattatttacataaacctaccattcggtaaccatgtgaaaggatggaccaatatcaaggtgtcagttgacctcagtgaattctgtgatgtttctgagatgcagactcccgtgtagtttcagattcttggtccatggatgacaccacctgcccatgcttccttgaattaggctttcctaacctgaagcgccttcaaacttccaataaagagatcattttctgcttcatctg

SEQ ID NO: 134302 - DNA, 1209 bp, Artificial Sequence
  derived and/or modified sequence
atgaagcccaacatcatcttcgtgctgagcctgctgctgatcctggagaagcaggccgccgtgatgggccagaagggcggcagcaagggcagactgcccagcgagttcagccagttcccccacggccagaagggccagcactacagcggccagaagggcaagcagcagaccgagagcaagggcagcttcagcatccagtacacctaccacgtggacgccaacgaccacgaccagagcagaaagagccagcagtacgacctgaacgccctgcacaagaccaccaagagccagagacacctgggcggcagccagcagctgctgcacaacaagcaggagggcagagaccacgacaagagcaagggccacttccacagagtggtgatccaccacaagggcggcaaggcccacagaggcacccagaaccccagccaggaccagggcaacagccccagcggcaagggcatcagcagccagtacagcaacaccgaggagagactgtgggtgcacggcctgagcaaggagcagaccagcgtgagcggcgcccagaagggcagaaagcagggcggcagccagagcagctacgtgctgcagaccgaggagctggtggccaacaagcagcagagagagaccaagaacagccaccagaacaagggccactaccagaacgtggtggaggtgagagaggagcacagcagcaaggtgcagaccagcctgtgccccgcccaccaggacaagctgcagcacggcagcaaggacatcttcagcacccaggacgagctgctggtgtacaacaagaaccagcaccagaccaagaacctgaaccaggaccagcagcacggcagaaaggccaacaagatcagctaccagagcagcagcaccgaggagagaagactgcactacggcgagaacggcgtgcagaaggacgtgagccagagaagcatctacagccagaccgagaagctggtggccggcaagagccagatccaggcccccaaccccaagcaggagccctggcacggcgagaacgccaagggcgagagcggccagagcaccaacagagagcaggacctgctgagccacgagcagaagggcagacaccagcacggcagccacggcggcctggacatcgtgatcatcgagcaggaggacgacagcgacagacacctggcccagcacctgaacaacgacagaaaccccctgttcacctag

SEQ ID NO: 134303 - DNA, 1389 bp, Artificial Sequence
  derived and/or modified sequence
atgaagcccaacatcatcttcgtgctgagcctgctgctgatcctggagaagcaggccgccgtgatgggccagaagggcggcagcaagggcagactgcccagcgagttcagccagttcccccacggccagaagggccagcactacagcggccagaagggcaagcagcagaccgagagcaagggcagcttcagcatccagtacacctaccacgtggacgccaacgaccacgaccagagcagaaagagccagcagtacgacctgaacgccctgcacaagaccaccaagagccagagacacctgggcggcagccagcagctgctgcacaacaagcaggagggcagagaccacgacaagagcaagggccacttccacagagtggtgatccaccacaagggcggcaaggcccacagaggcacccagaaccccagccaggaccagggcaacagccccagcggcaagggcatcagcagccagtacagcaacaccgaggagagactgtgggtgcacggcctgagcaaggagcagaccagcgtgagcggcgcccagaagggcagaaagcagggcggcagccagagcagctacgtgctgcagaccgaggagctggtggccaacaagcagcagagagagaccaagaacagccaccagaacaagggccactaccagaacgtggtggaggtgagagaggagcacagcagcaaggtgcagaccagcctgtgccccgcccaccaggacaagctgcagcacggcagcaaggacatcttcagcacccaggacgagctgctggtgtacaacaagaaccagcaccagaccaagaacctgaaccaggaccagcagcacggcagaaaggccaacaagatcagctaccagagcagcagcaccgaggagagaagactgcactacggcgagaacggcgtgcagaaggacgtgagccagagcagcatctacagccagaccgaggagaaggcccagggcaagagccagaagcagatcaccatccccagccaggagcaggagcacagccagaaggccaacaagatcagctaccagagcagcagcaccgaggagagaagactgcactacggcgagaacggcgtgcagaaggacgtgagccagagaagcatctacagccagaccgagaagctggtggccggcaagagccagatccaggcccccaaccccaagcaggagccctggcacggcgagaacgccaagggcgagagcggccagagcaccaacagagagcaggacctgctgagccacgagcagaagggcagacaccagcacggcagccacggcggcctggacatcgtgatcatcgagcaggaggacgacagcgacagacacctggcccagcacctgaacaacgacagaaaccccctgttcacctag

SEQ ID NO: 134304 - protein, 582 aa, Artificial Sequence
  derived and/or modified sequence
MKSIILFVLSLLLILEKQAAVMGQKGGSKGQLPSGSSQFPHGQKGQHYFGQKDQQHTKSKGSFSIQHTYHVDINDHDWTRKSQQYDLNALHKATKSKQHLGGSQQLLNYKQEGRDHDKSKGHFHMIVIHHKGGQAHHGTQNPSQDQGNSPSGKGLSSQCSNTEKRLWVHGLSKEQASASGAQKGRTQGGSQSSYVLQTEELVVNKQQRETKNSHQNKGHYQNVVDVREEHSSKLQTSLHPAHQDRLQHGPKDIFTTQDELLVYNKNQHQTKNLSQDQEHGRKAHKISYPSSRTEERQLHHGEKSVQKDVSKGSISIQTEEKIHGKSQNQVTIHSQDQEHGHKENKISYQSSSTEERHLNCGEKGIQKGVSKGSISIQTEEQIHGKSQNQVRIPSQAQEYGHKENKISYQSSSTEERRLNSGEKDVQKGVSKGSISIQTEEKIHGKSQNQVTIPSQDQEHGHKENKMSYQSSSTEERRLNYGGKSTQKDVSQSSISFQIEKLVEGKSQIQTPNPNQDQWSGQNAKGKSGQSADSKQDLLSHEQKGRYKQESSESHNIVITEHEVAQDDHLTQQYNEDRNPIST

SEQ ID NO: 134305 - DNA, 1749 bp, Artificial Sequence
  derived and/or modified sequence
atgaaatccattattctctttgttttatctctattgctaattctcgagaaacaggcagccgtcatgggacagaagggcggaagcaaaggccagctcccttccgggtcttcccagttcccccacggccaaaagggccagcattatttcggacagaaagaccagcaacatactaaatccaaaggttcctttagcatacagcacacgtaccatgtggacattaatgatcacgactggacccgcaagagtcaacaatatgacctgaacgcactccacaaggccaccaagtcaaaacagcacctaggtggctcacagcagctgctaaattacaaacaggaaggtcgtgatcacgacaaatcgaaaggacattttcatatgattgtgatacaccataagggcgggcaggcgcaccacggtactcaaaacccctcccaggatcagggaaactccccgtcaggcaaagggttatcgtctcagtgtagcaataccgaaaagcgcctgtgggttcatggtttgtccaaagaacaggctagcgcgagtggcgcccagaagggacggacacaggggggatctcagtctagttacgtcctccagactgaggaactcgtcgtgaataaacagcagcgggaaacaaaaaatagtcatcagaacaagggccactatcaaaacgtcgtagacgtgcgggaggaacactcgagtaagttacaaacatcactacaccctgcccaccaggaccggttgcagcatggtccaaaggacatttttactacgcaagacgagctgcttgtctataataagaaccaacatcagacgaaaaatttgagccaagaccaggaacacggtcggaaggcccataaaatctcatacccctcttcaaggaccgaggaaagacaactgcatcacggtgagaaatccgttcaaaaggacgtgtccaagggatctatcagcatccagacagaagaaaagattcacggcaaaagccagaatcaggtcactatacatagtcaagaccaggaacatgggcacaaggaaaacaaaatcagctatcaaagctccagtactgaagagagacatctcaattgtggcgagaaaggtatccaaaagggtgtgtcaaaagggtcaatttcaattcagaccgaggaacagatccacggtaagtcccagaaccaggtgcgcataccttcgcaagcacaagagtatggtcacaaagaaaacaagatatcttaccaatcctcctcaaccgaagaacggaggcttaattctggcgaaaaggatgtgcaaaagggcgtgtcgaaaggttcgatttccattcagacagaggagaagattcacggcaagtcccaaaaccaggttacaatcccatctcaggaccaagaacacgggcataaggagaacaagatgtcctaccagagctctagcactgaagagcgacgtctgaattacggcggcaagagtacccaaaaggacgtctctcagagctcaatttctttccagatcgaaaaactggtcgagggcaagagccaaattcaaaccccaaatcccaaccaggaccaatggtcaggccaaaacgcaaaagggaagagcggccagtctgcagacagcaagcaagatttgttgtctcacgaacagaagggtcgctacaagcaggagtcatccgaaagccataacattgtgattactgagcatgaggtggcacaagacgaccacttaactcagcagtacaatgaagatcgtaatccgatttcaacatag

SEQ ID NO: 134306 - DNA, 1749 bp, Artificial Sequence
  derived and/or modified sequence
atgaagagcatcatcctgtttgtgctgagcctgctgctgatcctggagaagcaggccgctgtgatgggccagaagggcggcagcaagggccagctgcccagcggcagcagccagttcccccacggccagaagggccagcactacttcggccagaaggaccagcagcacaccaagagcaagggcagcttcagcatccagcacacctaccacgtggacatcaatgaccatgactggaccaggaagagccagcagtatgacctgaatgccctgcacaaggccaccaagagcaagcagcacctgggcggcagccagcagctgctgaactacaagcaggagggccgggaccatgacaagagcaagggccacttccacatgatcgtcatccaccacaagggcggccaggcccaccacggcacccagaaccccagccaggaccagggcaacagccccagcggcaagggcctgagcagccagtgcagcaacacagagaagaggctgtgggtgcacggcctgagcaaggagcaggccagcgccagcggggcccagaagggccgcacccagggcggcagccagagcagctatgtgctgcagacagaggagctggtggtgaacaagcagcagcgggagaccaagaacagccaccagaacaagggccactaccagaatgtggtggatgtgcgggaggagcacagcagcaagctgcagaccagcctgcacccagcccaccaggaccggctgcagcacggccccaaggacatcttcaccacccaggatgagctgctggtgtacaacaagaaccagcaccagaccaagaacctgagccaggaccaggagcacggcaggaaggcccacaagatctcctaccccagcagcaggacagaggagcggcagctgcaccacggggagaagtctgtgcagaaggatgtgtccaagggcagcatcagcatccagacagaggagaagatccacggcaagagccagaaccaggtgaccatccacagccaggaccaggagcacggccacaaggagaacaagatctcctaccagagcagcagcacagaggagcggcacctgaactgtggggagaagggcatccagaagggcgtgtccaagggcagcatcagcatccagacagaggagcagatccacggcaagagccagaaccaggtgcgcatccccagccaggcccaggagtatggccacaaggagaacaagatctcctaccagagcagcagcacagaggagcggcggctgaacagcggggagaaggatgtgcagaagggcgtgtccaagggcagcatcagcatccagacagaggagaagatccacggcaagagccagaaccaggtgaccatccccagccaggaccaggagcacggccacaaggagaacaagatgagctaccagagcagcagcacagaggagcggcggctgaactacggcggcaagagcacccagaaggatgtgtcccagagcagcatctccttccagatcgagaagctggtggagggcaagagccagatccagacccccaaccccaaccaggaccagtggagcggccagaatgccaagggcaagagcggccagagcgctgacagcaagcaggacctgctgagccatgagcagaagggccgctacaagcaggagagcagcgagagccacaacatcgtcatcacagaacatgaggtggcccaggatgaccacctgacccagcagtacaatgaagatagaaaccccatcagcacctag

SEQ ID NO: 134307 - DNA, 1749 bp, Artificial Sequence
  derived and/or modified sequence
atgaagagcatcatcctgttcgtgctgagcctgctgctgatcctggaaaagcaggctgcggtgatggggcaaaagggaggttctaaaggccaactgccctctgggagttcccagttcccccatggacagaagggccaacattacttcggtcagaaggatcagcaacacaccaaatccaagggcagtttcagtattcagcacacgtatcacgtggatattaacgaccatgattggactaggaagtcccagcagtacgacctcaacgcactgcacaaggcaaccaaaagtaagcagcatctggggggctcccagcagctcttaaattacaaacaggagggcagagatcacgacaagtctaagggccattttcatatgattgtcattcatcacaagggagggcaagcacatcacggtacacaaaatccatcacaggaccagggaaatagtcccagcggcaagggcctctccagccagtgttctaacactgagaaaaggctgtgggtacatggtctgagtaaagagcaggcgtccgcttccggggcccagaagggtcgaacgcaaggcggaagccaaagctcgtatgtattgcagaccgaagagttggtggttaacaagcagcaacgcgaaaccaaaaatagccaccagaataaaggccactaccagaatgtggtcgatgtgagggaagaacactcctcaaagcttcagacctccctgcatcccgcgcatcaggaccgactgcagcatggccctaaagatatctttacgactcaggatgaactccttgtgtataataagaaccagcatcagaccaagaacctgtcccaggaccaggaacacggaaggaaagcccacaagatcagctatccgagctccagaaccgaggaacgccagctgcaccatggagagaagagtgttcagaaagatgtgtcgaaaggctcaattagtattcagaccgaggagaagatccacgggaagtcccaaaaccaggtgacaattcatagccaagatcaggagcatggacacaaagagaacaagatctcctatcagtctagctcaaccgaagaaagacacttaaattgtggggagaaaggcatccaaaagggagtatcgaagggctccatcagcatccagacagaggaacaaatccacggaaagtctcagaaccaggtgcgcatcccaagtcaagcccaggaatacggccataaagaaaataagatctcttaccagtccagctccactgaggagcgaagactgaattccggtgaaaaggatgtgcagaaaggagtcagcaagggatctattagcatccagacggaggagaagattcatggcaagagtcaaaatcaggtgactataccctcacaggatcaggagcatggacacaaggagaataagatgtcctaccagtcctccagcaccgaagagcggaggttgaattacgggggcaaatcaacccagaaagacgtgagccagtccagcatctcctttcaaattgagaagctggtggagggcaaaagccagatccagacacctaaccccaatcaggaccagtggtcaggccagaatgccaaaggtaaaagtggtcagtctgccgacagcaagcaggacctcctctcccatgagcagaagggtagatacaagcaggaatcaagcgagtcccataatatcgttatcaccgagcacgaagtggcccaagacgaccatttgacccagcaatacaacgaagatcgcaatcccattagcacatag

SEQ ID NO: 134308 - DNA, 1749 bp, Artificial Sequence
  derived and/or modified sequence
atgaaatccatcatcctgttcgtgctcagtctgctgctcatcttggagaagcaggcagcagtgatgggacagaagggaggctccaagggacaactgccctccggcagctcccaatttccccatgggcagaaggggcaacattattttggtcagaaagatcagcagcacacgaagtccaagggatccttctccatccaacacacctaccatgtcgacatcaacgatcacgactggaccaggaaaagtcagcagtacgaccttaatgctttacataaggcaactaagagcaaacaacatttgggtggatcacaacaattactcaattataagcaggaggggagagaccatgacaaaagcaaaggccactttcatatgattgtgatacatcataagggagggcaggcccatcatgggactcaaaatcctagtcaagaccagggtaatagccccagtggcaaagggctgtcttctcaatgttcaaacaccgaaaagaggctgtgggtgcacggcctatctaaggagcaggcctcagccagtggggctcagaagggaagaacccaaggtggctcccagtcatcatatgttttacagaccgaagaactcgttgtcaataaacagcagcgagaaacgaagaatagccatcagaacaaggggcactatcagaacgtcgtggacgtacgagaggaacatagctccaagctgcagaccagtctgcatcccgctcatcaggataggctccagcatggccctaaggacatttttactacccaggatgagttgcttgtttataataagaatcaacatcagactaaaaatctcagccaagaccaggaacacggaaggaaggcacacaagatttcttacccatcgtcgcggactgaagaacgtcagctgcatcacggggagaagtccgtacagaaggacgtgtccaagggtagcattagtatccagaccgaggaaaaaatacacggcaaatcccagaatcaagtaaccatccactcccaggatcaggaacacggtcacaaagagaacaaaatctcttatcagtcttccagtaccgaggagaggcacttaaactgtggtgagaaaggtatccagaaaggcgtgagcaaggggagcatctccatacagaccgaggaacagatccacggaaaatctcaaaatcaggttcgcattccatcacaagcacaggaatacggtcacaaagagaacaagataagctatcagtcatcctcaaccgaagaacgcaggctgaacagtggagagaaagacgtgcaaaagggggtcagcaagggtagcatttccattcagacagaagaaaaaatacacggaaagagtcagaaccaggttactattccatcccaggaccaagaacacggacataaggagaataaaatgtcttaccagagcagttcaaccgaggaacgcaggctgaactacggtggaaaaagcacccaaaaggacgtgtcccagtcatccatttcatttcagattgaaaagttggttgaaggcaaatcccagatccagactcccaacccaaatcaggatcagtggtcaggacagaacgctaagggcaagagcggacagagcgccgactcgaagcaagatctgctgagccatgagcaaaagggcagatacaagcaggagtcatctgaaagtcacaacatcgtgatcaccgaacacgaagtcgctcaggacgatcatctgacacagcagtacaatgaggataggaatcccatctcaacctag

SEQ ID NO: 134309 - DNA, 2051 bp, Artificial Sequence
  derived and/or modified sequence
gacatttcagctccacccatagcacacccactcaaggaacatataaatgaagagatccgctcagttctcagacaagatttttcaagcaagatgaagtccatcatcctctttgtcctttccctgctccttatcttggagaagcaagcagctgtgatgggacaaaaaggtggatcaaaaggccaattgccaagcggatcttcccaatttccacatggacaaaagggccagcactattttggacaaaaagaccaacaacatactaaatccaaaggcagtttttctattcaacacacatatcatgtagacatcaatgatcatgactggacccgaaaaagtcagcaatatgatttgaatgccctacataaggcgacaaaatcaaaacaacacctaggtggaagtcaacaactgctcaattataaacaagaaggcagagaccatgataaatcaaaaggtcattttcacatgatagttatacatcataaaggaggccaagctcatcatgggacacaaaatccttctcaagatcaggggaatagcccatctggaaagggattatccagtcaatgttcaaacacagaaaaaaggctatgggttcatggactaagtaaagaacaagcttcagcctctggtgcacaaaaaggtagaacacaaggtggatcccaaagcagttatgttctccaaactgaagaactagtagttaacaaacaacaacgtgagactaaaaattctcatcaaaataaagggcattaccaaaatgtggttgacgtgagagaggaacattcaagtaaactacaaacttcactccatcctgcacatcaagacagactccaacatggacccaaagacatttttactacccaagatgagctcctagtatataacaagaatcaacaccagacaaaaaatctcagtcaagatcaagagcatggccggaaggcacataaaatatcatacccgtcttcacgtacagaagaaagacaacttcaccatggagaaaagagtgtacagaaagatgtatccaaaggcagcatttctatccaaactgaagagaaaatacatggcaagtctcaaaaccaggtaacaattcatagtcaagatcaagagcatggccataaggaaaataaaatatcataccaatcttcaagtacagaagaaagacatctcaactgtggagaaaagggcatccagaaaggtgtatccaaaggcagtatttcgatccaaactgaagagcaaatacatggcaagtctcaaaaccaggtaagaattcctagtcaagctcaagagtatggccataaggaaaataaaatatcataccaatcttcgagtacagaagaaagacgtctcaacagtggagaaaaggatgtacagaaaggtgtatccaaaggcagtatttctatccaaactgaagagaaaatacatggcaagtctcaaaaccaggtaacaattcctagtcaagatcaagagcatggccataaggaaaataaaatgtcataccaatcttcaagtacagaagaaagacgactcaactatggaggaaagagcacgcagaaagatgtatcccaaagcagtatttctttccaaattgaaaagctagtagaaggcaagtctcaaatccagacaccaaatcctaatcaagatcaatggtctggccaaaatgcaaaaggaaagtctggtcaatctgcagatagcaaacaagacctactcagtcatgaacaaaaaggcagatacaaacaggaatccagtgagtcacataatattgtaattactgagcatgaggttgcccaagatgatcatttgacacaacaatataatgaagacagaaatccaatatctacatagccctgttgcttagcaaccacttgaaaagctggaccaatagcaaggtgtcacccgacctcagtgaagtctttgatgtttctgagaggcagactcccatgtggtcccagatccttggtccatggatgacaccaccttcccatgcttccttgcattaggctttctaaacccggagccccttcaaacttccaataaagggatcattttctgcttta

SEQ ID NO: 134310 - DNA, 1749 bp, Artificial Sequence
  derived and/or modified sequence
atgaagagcatcatcctgttcgtgctgagcctgctgctgatcctggagaagcaggccgccgtgatgggccagaagggcggcagcaagggccagctgcccagcggcagcagccagttcccccacggccagaagggccagcactacttcggccagaaggaccagcagcacaccaagagcaagggcagcttcagcatccagcacacctaccacgtggacatcaacgaccacgactggaccagaaagagccagcagtacgacctgaacgccctgcacaaggccaccaagagcaagcagcacctgggcggcagccagcagctgctgaactacaagcaggagggcagagaccacgacaagagcaagggccacttccacatgatcgtgatccaccacaagggcggccaggcccaccacggcacccagaaccccagccaggaccagggcaacagccccagcggcaagggcctgagcagccagtgcagcaacaccgagaagagactgtgggtgcacggcctgagcaaggagcaggccagcgccagcggcgcccagaagggcagaacccagggcggcagccagagcagctacgtgctgcagaccgaggagctggtggtgaacaagcagcagagagagaccaagaacagccaccagaacaagggccactaccagaacgtggtggacgtgagagaggagcacagcagcaagctgcagaccagcctgcaccccgcccaccaggacagactgcagcacggccccaaggacatcttcaccacccaggacgagctgctggtgtacaacaagaaccagcaccagaccaagaacctgagccaggaccaggagcacggcagaaaggcccacaagatcagctaccccagcagcagaaccgaggagagacagctgcaccacggcgagaagagcgtgcagaaggacgtgagcaagggcagcatcagcatccagaccgaggagaagatccacggcaagagccagaaccaggtgaccatccacagccaggaccaggagcacggccacaaggagaacaagatcagctaccagagcagcagcaccgaggagagacacctgaactgcggcgagaagggcatccagaagggcgtgagcaagggcagcatcagcatccagaccgaggagcagatccacggcaagagccagaaccaggtgagaatccccagccaggcccaggagtacggccacaaggagaacaagatcagctaccagagcagcagcaccgaggagagaagactgaacagcggcgagaaggacgtgcagaagggcgtgagcaagggcagcatcagcatccagaccgaggagaagatccacggcaagagccagaaccaggtgaccatccccagccaggaccaggagcacggccacaaggagaacaagatgagctaccagagcagcagcaccgaggagagaagactgaactacggcggcaagagcacccagaaggacgtgagccagagcagcatcagcttccagatcgagaagctggtggagggcaagagccagatccagacccccaaccccaaccaggaccagtggagcggccagaacgccaagggcaagagcggccagagcgccgacagcaagcaggacctgctgagccacgagcagaagggcagatacaagcaggagagcagcgagagccacaacatcgtgatcaccgagcacgaggtggcccaggacgaccacctgacccagcagtacaacgaggacagaaaccccatcagcacctag

SEQ ID NO: 134311 - protein, 87 aa, Artificial Sequence
  derived and/or modified sequence
MALAVRVVYCGACGYKSKYLQLKKKLEDEFPGRLDICGEGTPQATGFFEVMVAGKLIHSKKKGDGYVDTESKFLKLVAAIKAALAQG

SEQ ID NO: 134312 - protein, 88 aa, Artificial Sequence [sequence omitted]

SEQ ID NO: 134313 - DNA, 264 bp, Artificial Sequence
  derived and/or modified sequence
atggccctggccgtgagggttgtttactgtggcgcctgagggtataagtctaagtacctccaactcaaaaagaaactcgaggatgaatttccagggagactggatatatgcggggagggcaccccacaggctaccggtttcttcgaagtaatggtggccggaaaactgattcactctaagaaaaaaggagatggttacgttgacacagagtctaagttcctgaaacttgtcgccgcaatcaaggctgcgcttgcccaggggtag

SEQ ID NO: 134314 - DNA, 267 bp, Artificial Sequence
  derived and/or modified sequence
atggccttggctgtcagggttgtttactgctgcggcgctggcggctacaaatccaagtatttacaactgaagaaaaagctcgaggacgaatttcccggccggttggatatctgcggggaaggtaccccgcaagccacaggctttttcgaagtgatggtcgccggtaaactgatccactccaagaaaaagggagatgggtatgttgatactgaatcaaagtttcttaaactagtggctgctattaaggccgctctggcccagggttag

SEQ ID NO: 134315 - DNA, 258 bp, Artificial Sequence
  derived and/or modified sequence
atggccctggccgtgcgggtggtgtactgtggggcctacaagagcaagtacctgcagctgaagaagaagctggaggatgagttccctggccgcctggacatctgtggggagggcaccccccaggccaccggcttctttgaggtgatggtggccggcaagctgatccacagcaagaagaagggagatggctacgtggacacagagagcaagttcctgaagctggtggccgccatcaaggccgccctggcccagggctag

SEQ ID NO: 134316 - DNA, 267 bp, Artificial Sequence
  derived and/or modified sequence
atggccctggccgtgcgggtggtgtactgctgcggggccggcggctacaagagcaagtacctgcagctgaagaagaagctggaggatgagttccctggccgcctggacatctgtggggagggcaccccccaggccaccggcttctttgaggtgatggtggccggcaagctgatccacagcaagaagaagggagatggctacgtggacacagagagcaagttcctgaagctggtggccgccatcaaggccgccctggcccagggctag

SEQ ID NO: 134317 - DNA, 264 bp, Artificial Sequence
  derived and/or modified sequence
atggccctggccgtgcgggtggtgtactgcggcgcctgaggctacaaatctaagtatttacagctgaaaaaaaagctggaggacgagtttcccgggaggcttgacatttgcggagagggcacgcctcaagctactggcttttttgaggtgatggttgctggaaaactgatacacagcaagaagaagggggacgggtacgtggatactgagtctaaattcctcaagctcgtcgcggctatcaaggctgctttggcccagggctag

SEQ ID NO: 134318 - DNA, 267 bp, Artificial Sequence
  derived and/or modified sequence
atggccctggccgtgcgggtggtgtactgctgcggcgccggcggctataaatcgaaatacttgcagctcaaaaagaagctcgaagatgaattccccggaaggctcgacatctgtggcgaaggcacaccccaggccacaggcttcttcgaggtcatggtcgccggtaagcttattcatagcaaaaagaagggcgatggctacgtcgataccgagtcaaagttcctcaagttagtggctgccattaaagctgctttggcacagggatag

SEQ ID NO: 134319 - DNA, 264 bp, Artificial Sequence
  derived and/or modified sequence
atggctctggccgtgagagttgtgtattgtggggcttgaggatataaaagcaaatacctccaactcaagaaaaagttagaggatgagttccctgggcgattagacatttgcggtgaaggaactcctcaggcaactggcttctttgaggtcatggtcgccggtaaattgattcacagtaagaagaaaggtgacggctatgttgatacggagagtaagttcctcaagctggtagcagcgattaaagcagcgttagcacagggatag

SEQ ID NO: 134320 - DNA, 267 bp, Artificial Sequence
  derived and/or modified sequence
atggccctggccgtaagagttgtctattgctgtggagccggaggctataaatcgaagtatctgcagttaaaaaagaagctggaggacgagttcccagggcgactcgacatatgcggcgagggaactccccaggccactggcttcttcgaagttatggttgccggtaagctcatacactccaaaaagaagggcgatgggtatgtggacacagaatctaaatttctgaagctcgtggcagcgatcaaggccgctctcgctcaggggtag

SEQ ID NO: 134321 - DNA, 888 bp, Artificial Sequence
  derived and/or modified sequence
gggctggcgggtcgcgggttccttatcctccgccttggcgcctctccgcccaccgcccaccgcccctccctggcattggttggcgccaggggaagccgaggctccatcctttctgcgcaggttcccgccgcactcgcgcagacctagcgcgtccaggtgggaggttagtgtggcccgggcgtccgctcctcagcggatgtggcagccccgagccatggctctcgccgtccgagtcgtttattgtggcgcttgaggctacaagtccaagtatcttcagctcaagaagaagttagaagatgagttccccggccgcctggacatctgcggcgagggaactccccaggccaccgggttctttgaagtgatggtagccgggaagttgattcactctaagaagaaaggcgatggctacgtggacacagaaagcaagtttctgaagttggtggccgccatcaaagccgccttggctcagggctaatgcgccctgaaggcagagtccagggaccttgacccagcccctctcagcagacgcttcatgataggaaggactgaaaagtcttgtggacacctggtctttccctgatgttctcgtggctgctgttgggggcagagattgacgcccccggtctttgcctctgagcgggagagtctgtgtgtatgtgtcttccccggaatccacaccaccccaccctcctcctgtcccgtggtttcatcatatctctttgcataccccatgtcttccccagttgtcccctggagtttggggggacatcccgcctcaggcatccttctcaaggggaagccaagagaggcatcaggatgggtgggtttctgattgtggcaacgtttgcaaccgttcacgattcaataaatattggatgaatttaa

SEQ ID NO: 134322 - DNA, 881 bp, Artificial Sequence
  derived and/or modified sequence
gcgggttccttatcctccgccttggcgcctctccgcccaccgcccaccgcccctccctggcattggttggcgccaggggaagccgaggctccatcctttctgcgcaggttcccgccgcactcgcgcagacctagcgcgtccaggtgggaggttagtgtggcccgggcgtccgctcctcagcggatgtggcagccccgagccatggctctcgccgtccgagtcgtttattgctgcggggccggaggctacaagtccaagtatcttcagctcaagaagaagttagaagatgagttccccggccgcctggacatctgcggcgagggaactccccaggccaccgggttctttgaagtgatggtagccgggaagttgattcactctaagaagaaaggcgatggctacgtggacacagaaagcaagtttctgaagttggtggccgccatcaaagccgccttggctcagggctaatgcgccctgaaggcagagtccagggaccttgacccagcccctctcagcagacgcttcatgataggaaggactgaaaagtcttgtggacacctggtctttccctgatgttctcgtggctgctgttgggggcagagattgacgcccccggtctttgcctctgagcgggagagtctgtgtgtatgtgtcttccccggaatccacaccaccccaccctcctcctgtcccgtggtttcatcatatctctttgcataccccatgtcttccccagttgtcccctggagtttggggggacatcccgcctcaggcatccttctcaaggggaagccaagagaggcatcaggatgggtgggtttctgattgtggcaacgtttgcaaccgttcacgattcaataaatattggatgaatttaactg

SEQ ID NO: 134323 - DNA, 264 bp, Artificial Sequence
  derived and/or modified sequence
atggccctggccgtgagagtggtgtactgcggcgcctgaggctacaagagcaagtacctgcagctgaagaagaagctggaggacgagttccccggcagactggacatctgcggcgagggcaccccccaggccaccggcttcttcgaggtgatggtggccggcaagctgatccacagcaagaagaagggcgacggctacgtggacaccgagagcaagttcctgaagctggtggccgccatcaaggccgccctggcccagggctag

SEQ ID NO: 134324 - DNA, 267 bp, Artificial Sequence
  derived and/or modified sequence
atggccctggccgtgagagtggtgtactgctgcggcgccggcggctacaagagcaagtacctgcagctgaagaagaagctggaggacgagttccccggcagactggacatctgcggcgagggcaccccccaggccaccggcttcttcgaggtgatggtggccggcaagctgatccacagcaagaagaagggcgacggctacgtggacaccgagagcaagttcctgaagctggtggccgccatcaaggccgccctggcccagggctag

SEQ ID NO: 134325 - protein, 399 aa, Artificial Sequence
  derived and/or modified sequence
MAAPSPSGGGGSGGGSGSGTPGPVGSPAPGHPAVSSMQGKRKALKLNFANPPFKSTARFTLNPNPTGVQNPHIERLRTHSIESSGKLKISPEQHWDFTAEDLKDLGEIGRGAYGSVNKMVHKPSGQIMAVKRIRSTVDEKEQKQLLMDLDVVMRSSDCPYIVQFYGALFREGDCWICMELMSTSFDKFYKYVYSVLDDVIPEEILGKITLATVKALNHLKENLKIIHRDIKPSNILLDRSGNIKLCDFGISGQLVDSIAKTRDAGCRPYMAPERIDPSASRQGYDVRSDVWSLGITLYELATGRFPYPKWNSVFDQLTQVVKGDPPQLSNSEEREFSPSFINFVNLCLTKDESKRPKYKELLKHPFILMYEERAVEVACYVCKILDQMPATPSSPMYVD

SEQ ID NO: 134326 - protein, 376 aa, Artificial Sequence [sequence omitted]

SEQ ID NO: 134327 - DNA, 1200 bp, Artificial Sequence
  derived and/or modified sequence
atggccgcccccagccccagcggcggcggcggcagcggcggcggcagcggcagcggcacccccggccccgtgggcagccccgcccccggccaccccgccgtgagcagcatgcagggcaagagaaaggccctgaagctgaacttcgccaacccccccttcaagagcaccgccagattcaccctgaaccccaaccccaccggcgtgcagaacccccacatcgagagactgagaacccacagcatcgagagcagcggcaagctgaagatcagccccgagcagcactgggacttcaccgccgaggacctgaaggacctgggcgagatcggcagaggcgcctacggcagcgtgaacaagatggtgcacaagcccagcggccagatcatggccgtgaagagaatcagaagcaccgtggacgagaaggagcagaagcagctgctgatggacctggacgtggtgatgagaagcagcgactgcccctacatcgtgcagttctacggcgccctgttcagagagggcgactgctggatctgcatggagctgatgagcaccagcttcgacaagttctacaagtacgtgtacagcgtgctggacgacgtgatccccgaggagatcctgggcaagatcaccctggccaccgtgaaggccctgaaccacctgaaggagaacctgaagatcatccacagagacatcaagcccagcaacatcctgctggacagaagcggcaacatcaagctgtgcgacttcggcatcagcggccagctggtggacagcatcgccaagaccagagacgccggctgcagaccctacatggcccccgagagaatcgaccccagcgccagcagacagggctacgacgtgagaagcgacgtgtggagcctgggcatcaccctgtacgagctggccaccggcagattcccctaccccaagtggaacagcgtgttcgaccagctgacccaggtggtgaagggcgaccccccccagctgagcaacagcgaggagagagagttcagccccagcttcatcaacttcgtgaacctgtgcctgaccaaggacgagagcaagagacccaagtacaaggagctgctgaagcaccccttcatcctgatgtacgaggagagagccgtggaggtggcctgctacgtgtgcaagatcctggaccagatgcccgccacccccagcagccccatgtacgtggactag

SEQ ID NO: 134328 - DNA, 3742 bp, Artificial Sequence
  derived and/or modified sequence
ggccgtgcgagaggccgagcttgctgcattgcagccgccgcggcgccgctcggctcttcactcccaacaatggcggctccgagcccgagcggcggcggcggctccgggggcggcagcggcagcggcacccccggccccgtagggtccccggcgccaggccacccggccgtcagcagcatgcagggtaaacgcaaagcactgaagttgaattttgcaaatccacctttcaaatctacagcaaggtttactctgaatcccaatcctacaggagttcaaaacccacacatagagagactgagaacacacagcattgagtcatcaggaaaactgaagatctcccctgaacaacactgggatttcactgcagaggacttgaaagaccttggagaaattggacgaggagcttatggttctgtcaacaaaatggtccacaaaccaagtgggcaaataatggcagttaaaagaattcggtcaacagtggatgaaaaagaacaaaaacaacttcttatggatttggatgtagtaatgcggagtagtgattgcccatacattgttcagttttatggtgcactcttcagagagggtgactgttggatctgtatggaactcatgtctacctcgtttgataagttttacaaatatgtatatagtgtattagatgatgttattccagaagaaattttaggcaaaatcactttagcaactgtgaaagcactaaaccacttaaaagaaaacttgaaaattattcacagagatatcaaaccttccaatattcttctggacagaagtggaaatattaagctctgtgacttcggcatcagtggacagcttgtggactctattgccaagacaagagatgctggctgtaggccatacatggcacctgaaagaatagacccaagcgcatcacgacaaggatatgatgtccgctctgatgtctggagtttggggatcacattgtatgagttggccacaggccgatttccttatccaaagtggaatagtgtatttgatcaactaacacaagtcgtgaaaggagatcctccgcagctgagtaattctgaggaaagggaattctccccgagtttcatcaactttgtcaacttgtgccttacgaaggatgaatccaaaaggccaaagtataaagagcttctgaaacatccctttattttgatgtatgaagaacgtgccgttgaggtcgcatgctatgtttgtaaaatcctggatcaaatgccagctactcccagctctcccatgtatgtcgattgatatcgctgctacatcagactctagaaaaaagggctgagaggaagcaagacgtaaagaattttcatcccgtatcacagtgtttttattgctcgcccagacaccatgtgcaataagattggtgttcgtttccatcatgtctgtatactcctgtcacctagaacgtgcatccttgtaatacctgattgatcacacagtgttagtgctggtcagagagacctcatcctgctcttttgtgatgaacatattcatgaaatgtggaagtcagtacgatcaagttgttgactgtgattagatcacatcttaaattcatttctagactcaaaacctggagatgcagctactggaatggtgttttgtcagacttccaaatcctggaaggacacagtgatgaatgtactatgtctgaacatagaaactcgggcttgagtgagaagagcttgcacagccaacgagacacattgccttctggagctgggagacaaaggaggaatttactttcttcaccaagtgcaatagattactgatgtgatattctgttgctttacagttacagttgatgtttggggatcgatgtgctcagccaaatttcctgtttgaaatatcatgttaaattagaatgaatttatctttaccaaaaaccatgttgcgttcaaagaggtgaacattaaaatatagagacaggacagaatgtgttcttttctcctttaccagtcctatttttcaatgggaagactcaggagtctgccacttgtcaaagaaggtgctgatcctaagaatttttcattctcagaattcggtgtgctgccaacttgatgttccacctgccacaaaccaccaggactgaaagaagaaaacagtacagaaggcaaagtttacagatgtttttaattctagtattttatctggaacaacttgtagcagctatatatttccccttggtcccaagcctgatactttagccatcataactcactaacagggagaagtagctagtagcaatgtgccttgattgattagataaagatttctagtaggcagcaaaagaccaaatctcagttgtttgcttcttgccatcactggtccaggtcttcagtttccgaatctctttcccttcccctgtggtctattgtcgctatgtgacttgcgcttaatccaatattttgccttttttctatatcaaaaaacctttacagttagcagggatgttccttaccaaggatttttagccccaaatctctcatattcgctagtgtttaaaaggctaagaatagtggggcccagccgatgtggtaggtgataaagaggcatcttttctagagacacattggaccagatgaggatccgaaacggcagcctttacgttcatcacctgctagaacctctcgtagtccatcaccatttcttggcattggaattctactggaaaaaaatacaaaaagcaaaacaaaaccctcagcactgttacaagaggccatttaagtatcttgtgcttcttcacttacccattagccaggttctcattaggttttgcttgggcctccctggcactgaaccttaggctttgtatgacagtgaagcagcactgtgagtggttcaagcacactggaatataaaacagtcatggcctgagatgcaggtgatgccattacagaaccaaatcgtggcacgtattgctgtgtctcctctcagagtgacagtcataaatactgtcaaacaataaagggagaatggtgctgtttaaagtcacatccctgtaaattgcagaattcaaaagtgattatctctttgatctacttgcctcatttccctatcttctcccccacggtatcctaaactttagacttcccactgttctgaaaggagacattgctctatgtctgccttcgaccacagcaagccatcatcctccattgctcccggggactcaagaggaatctgtttctctgctgtcaacttcccatctggctcagcatagggtcactttgccattatgcaaatggagataaaagcaattctgactgtccaggagctaatctgaccgttctattgtgtggatgaccacataagaaggcaattttagtgtattaatcatagattattataaactataaacttaagggcaaggagtttattacaatgtatctttattaaaacaaaagggtgtatagtgttcacaaactgtgaaaatagtgtaagaactgtacattgtgagctctggttatttttctcttgtaccatagaaaaatgtataaaaattatcaaaaagctaatgtgcagggatattgccttatttgtctgtaaaaaatggagctcagtaacataactgcttcttggagctttggaatattttatcctgtattcttgtttgaattcctcctctatttaagatatatacatggaatcgaagtgtttatgtaatagttctatccttttgcctgcaggtcagttgtaataaatctaggatgtgatgatg

SEQ ID NO: 134329 - DNA, 1131 bp, Artificial Sequence
  derived and/or modified sequence
atggccgcccccagccccagcggcacccccgtgagcagcatgcagggcaagagaaaggccctgaagctgaacttcgccaacccccccttcaagagcaccgccagattcaccctgaaccccaaccccaccggcgtgcagaacccccacatcgagagactgagaacccacagcatcgagagcagcggcaagctgaagatcagccccgagcagcactgggacttcaccgccgaggacctgaaggacctgggcgagatcggcagaggcgcctacggcagcgtgaacaagatggtgcacaagcccagcggccagatcatggccgtgaagagaatcagaagcaccgtggacgagaaggagcagaagcagctgctgatggacctggacgtggtgatgagaagcagcgactgcccctacatcgtgcagttctacggcgccctgttcagagagggcgactgctggatctgcatggagctgatgagcaccagcttcgacaagttctacaagtacgtgtacagcgtgctggacgacgtgatccccgaggagatcctgggcaagatcaccctggccaccgtgaaggccctgaaccacctgaaggagaacctgaagatcatccacagagacatcaagcccagcaacatcctgctggacagaagcggcaacatcaagctgtgcgacttcggcatcagcggccagctggtggacagcatcgccaagaccagagacgccggctgcagaccctacatggcccccgagagaatcgaccccagcgccagcagacagggctacgacgtgagaagcgacgtgtggagcctgggcatcaccctgtacgagctggccaccggcagattcccctaccccaagtggaacagcgtgttcgaccagctgacccaggtggtgaagggcgaccccccccagctgagcaacagcgaggagagagagttcagccccagcttcatcaacttcgtgaacctgtgcctgaccaaggacgagagcaagagacccaagtacaaggagctgctgaagcaccccttcatcctgatgtacgaggagagagccgtggaggtggcctgctacgtgtgcaagatcctggaccagatgcccgccacccccagcagccccatgtacgtggactag

SEQ ID NO: 134330 - DNA, 1200 bp, Artificial Sequence
  derived and/or modified sequence
atggcagcaccctctccttcaggaggaggaggctcaggaggcggctccggatccggcactcccggcccagtgggctcccctgctcctggccatcctgcagttagttctatgcagggaaaacgaaaggcactgaagctcaattttgctaaccctccattcaagtccaccgcccgattcacacttaacccaaaccctaccggtgtccaaaaccctcatatcgaacggttgaggacacacagtatcgagagctcaggcaaactcaagatctctccagagcagcactgggattttaccgcagaggacttgaaggatctgggcgaaatcggacgcggggcttatgggtccgtcaacaaaatggtgcacaaaccttccggccaaatcatggcagtgaagcgaatcaggtcaaccgtggatgaaaaggagcaaaagcagctgcttatggatctcgatgtagtgatgagatccagcgattgcccatatatcgtacagttttacggcgccctgtttcgcgaaggggattgctggatttgtatggagctaatgagcacctctttcgataaattctataagtatgtgtacagcgttctggacgacgtcatcccagaagagattctcgggaagatcacccttgccacagtgaaagcactcaatcatctgaaagagaatctcaaaatcattcatagggacatcaaaccctccaatattctcctggatcgaagcgggaacattaagctctgtgatttcggcatatcaggccagctggtagactcaatcgcaaagactcgggatgccgggtgcagaccatatatggcgcctgaacgcattgaccccagcgccagtcgtcagggctacgacgtccgctccgatgtctggtctcttgggatcaccctgtatgaactggccacagggaggtttccgtatcccaaatggaattccgtcttcgaccaactgactcaagtggtgaagggcgatccacctcagctctcgaactcagaggagagagagttctcgccctctttcattaactttgtcaacctgtgcctgactaaggacgagagcaaacgcccgaagtataaggaacttctgaaacatccctttatactcatgtacgaagaaagagccgtcgaagtcgcctgttacgtttgtaagatcctggatcagatgcctgccacaccttcatcacccatgtatgtggactag

SEQ ID NO: 134331 - DNA, 1131 bp, Artificial Sequence
  derived and/or modified sequence
atggccgctccgtcaccgagtggcacccctgtgtccagcatgcagggcaagcgcaaagcactgaagttgaatttcgcaaacccaccttttaagtccaccgcccgctttacactgaatcctaatccaaccggcgtgcagaacccccatatcgagagactgcgaacgcatagcatcgaatccagcggtaagttgaagatctcaccggaacagcattgggatttcacagctgaagacttaaaagacctgggggagatcggcagaggagcctacggaagcgtgaacaagatggttcataagccgtctgggcaaatcatggctgttaaacgaattcgctctactgtcgacgagaaggaacagaagcagctgttaatggacctggatgtggtgatgaggagctccgactgtccttacattgtgcaattctacggcgccctgttccgcgagggtgattgctggatctgtatggagcttatgtctaccagtttcgataagttttacaaatatgtttatagcgtccttgatgatgtcatcccagaggaaatcctgggtaagattaccttggccactgttaaggccctcaaccatctgaaagaaaacctcaaaataattcatcgggatattaagccatccaacatcttgcttgatagaagcggaaacatcaagctttgtgacttcggcatttccggacagctcgtggatagtatagccaagactcgggacgcgggctgtagaccgtatatggcgcccgaaaggattgaccctagtgcttctcgtcagggatacgacgtgcggtctgatgtttggtctctaggcatcactctctatgaactcgctaccgggaggtttccctatcccaaatggaactctgtattcgatcaactgacacaggttgtgaaaggcgaccccccccagctgtctaactccgaagaacgggagtttagcccatcattcatcaactttgtgaacctgtgcttgacgaaggatgagtctaaacgcccgaagtacaaggagttgctaaagcacccatttatcctcatgtacgaggagagagccgtggaggtcgcatgttacgtctgcaaaatcctcgaccagatgcccgccacaccgtcctcccccatgtacgtggattag

SEQ ID NO: 134332 - DNA, 1200 bp, Artificial Sequence
  derived and/or modified sequence
atggccgcccccagccccagcggcggcggcggcagcggcggcggcagcggcagcggcaccccaggccctgtgggcagccctgcccctggccaccctgctgtgtcctccatgcagggcaagaggaaggccctgaagctgaactttgccaacccccccttcaagagcacagcccgcttcaccctgaaccccaaccccaccggggtgcagaacccccacatcgagcggctgcggacccacagcattgagagcagcggcaagctgaagatcagccctgagcagcactgggacttcaccgctgaggacctgaaggacctgggggagatcggccgcggggcctacggctctgtgaacaagatggtgcacaagcccagcggccagatcatggctgtgaagaggatccgcagcacagtggatgagaaggagcagaagcagctgctgatggacctggatgtggtgatgaggagcagtgactgcccctacatcgtgcagttctatggagccctcttccgggagggggactgctggatctgcatggagctgatgagcaccagctttgacaagttctacaagtatgtgtacagcgtgctggatgatgtgattcctgaggagatcctgggcaagatcaccctggccaccgtgaaggccctgaaccacctgaaggagaacctgaagatcatccaccgggacatcaagcccagcaacatcctgctggacaggagcggcaacatcaagctgtgtgactttggcatcagcggccagctggtggacagcatcgccaagaccagagatgctggctgccggccctacatggcccctgagagaattgaccccagcgccagccggcagggctatgatgtgcggagtgatgtgtggagcctgggcatcaccctgtatgagctggccaccggccgcttcccctaccccaagtggaacagcgtgtttgaccagctgacccaggtggtgaagggggaccccccccagctgagcaacagcgaggagcgggagttcagccccagcttcatcaactttgtgaacctgtgcctgaccaaggatgagagcaagaggcccaagtacaaggagctgctgaagcaccccttcatcctgatgtatgaggagagagctgtggaggtggcctgctacgtgtgcaagatcctggaccagatgcctgccacccccagcagccccatgtatgtggactag

SEQ ID NO: 134333 - DNA, 1131 bp, Artificial Sequence
  derived and/or modified sequence
atggccgcccccagccccagcggcacccctgtgtcctccatgcagggcaagaggaaggccctgaagctgaactttgccaacccccccttcaagagcacagcccgcttcaccctgaaccccaaccccactggagtgcagaacccccacatcgagcggctgcggacccacagcattgagagcagcggcaagctgaagatcagccctgagcagcactgggacttcaccgctgaggacctgaaggacctgggggagatcggccgcggggcctacggctctgtgaacaagatggtgcacaagcccagcggccagatcatggctgtgaagaggatccgcagcacagtggatgagaaggagcagaagcagctgctgatggacctggatgtggtgatgaggagcagtgactgcccctacatcgtgcagttctacggggccctcttccgggagggggactgctggatctgcatggagctgatgagcaccagctttgacaagttctacaagtatgtgtacagcgtgctggatgatgtgattcctgaggagatcctgggcaagatcaccctggccaccgtgaaggccctgaaccacctgaaggagaacctgaagatcatccaccgggacatcaagcccagcaacatcctgctggacagaagtggcaacatcaagctgtgtgactttggcatcagcggccagctggtggacagcatcgccaagaccagagatgctggctgccggccctacatggcccctgagagaattgaccccagcgccagccggcagggctatgatgtgcggagtgatgtgtggagcctgggcatcaccctgtatgagctggccaccggccgcttcccctaccccaagtggaacagcgtgtttgaccagctgacccaggtggtgaagggggaccccccccagctgagcaacagcgaggagcgggagttcagccccagcttcatcaactttgtgaacctgtgcctgaccaaggatgagagcaagaggcccaagtacaaggagctgctgaagcaccccttcatcctgatgtatgaggagagagctgtggaggtggcctgctacgtgtgcaagatcctggaccagatgcctgccacccccagcagccccatgtatgtggactag

SEQ ID NO: 134334 - DNA, 1200 bp, Artificial Sequence
  derived and/or modified sequence
atggccgcccccagccccagcggcggcggcggcagcggcggcggctctgggtcgggaactccagggcccgtgggttcacccgccccagggcaccccgctgtgtcaagcatgcagggaaagaggaaagctctaaaactcaattttgctaacccaccattcaagagtactgctcgtttcacccttaaccccaatcccacgggagtgcaaaatccgcacattgagagactacgcacccacagcatcgagagcagcggcaagctgaagatcagccccgaacagcattgggactttaccgccgaagacctgaaggatcttggcgaaattgggaggggggcgtacggttcagtcaacaagatggtacacaagccgagcggacagattatggccgtgaagaggatccgctccacagtggacgaaaaagagcaaaagcaactcctgatggatttagatgtggtgatgaggtccagcgactgcccttacatcgttcagttctatggagcactcttccgcgaaggggattgctggatctgcatggagcttatgagcacaagcttcgacaaattttacaaatacgtctattccgtgctggacgatgttatccctgaagagattctcggcaaaatcacacttgccacagtcaaggcactgaaccatcttaaggagaacctgaagatcattcacagagacatcaagccaagcaatatcctgcttgatagatctggaaacatcaaactctgcgatttcggaattagcggccaactggtcgattcgatcgctaaaactcgcgatgcagggtgtcgaccctacatggccccagagaggatcgacccctccgcctcgcggcaggggtatgatgtgcgcagtgacgtctggagtttggggatcaccctgtatgagttggccacaggcagattcccgtatccaaagtggaacagcgtttttgaccagctcacccaggttgtaaagggggatccaccccagctctccaattctgaggagagagaatttagcccgtctttcattaattttgttaatttgtgtctgaccaaggatgaaagcaaaagaccgaaatacaaggagctgctgaaacaccccttcatccttatgtatgaagagcgcgcagtggaggtcgcctgttatgtttgcaagatactagatcagatgccagccaccccctcttctcccatgtacgtggactag

SEQ ID NO: 134335 - DNA, 1131 bp, Artificial Sequence
  derived and/or modified sequence
atggccgcccccagccccagcggcacccccgtgagcagcatgcaggggaagagaaaagcgttgaagctgaacttcgccaacccacctttcaagtctaccgcgcggttcactctcaatcccaatcccaccggcgttcagaatccccatattgaacggctgaggacccactcaatagaatcgagtgggaaattaaaaatctcacccgaacagcattgggactttactgctgaagatctaaaagacctgggagaaattggccgcggcgcctacggatccgttaacaagatggtccacaagcctagcggacaaattatggcagtgaagaggataagaagtaccgtcgacgagaaagagcagaaacagttgttgatggacctggacgtggttatgagatcctctgactgcccttatatcgtccagttctacggtgccctttttcgcgaaggcgattgttggatctgcatggaactcatgtccaccagctttgacaaattttataagtacgtttatagcgtgctcgatgacgttattcctgaggaaattcttggaaagattaccttggctaccgtcaaggccctgaaccatctgaaagaaaaccttaagattatccaccgggatatcaagcctagcaacattttacttgacaggtctggcaacattaagctctgcgattttgggatctctggccaattagtggatagtatcgctaaaacccgggacgccggatgtagaccctatatggccccagaaagaattgatccttccgcgtccaggcaagggtacgacgtgcgctccgacgtgtggtcgttaggcattactctttacgagctggccaccggcagatttccttacccgaaatggaactctgtgttcgatcagttgacacaggtcgtgaaaggggaccctcctcaactcagcaattcagaagaacgcgagttttctcctagtttcatcaacttcgttaatctgtgtcttacaaaagatgagtccaaacggcccaaatacaaggaactcctcaagcacccattcatcttgatgtacgaagaacgggctgtggaggtggcctgctacgtttgcaagatacttgatcagatgcctgccacgccctcttcacccatgtacgtggactag

SEQ ID NO: 134336 - DNA, 1200 bp, Artificial Sequence
  derived and/or modified sequence
atggcggcaccttcacccagtgggggtggtggctctggtggcggaagcggctctggcacccccggacccgtaggctcccccgctcccggtcatccggcagtgtcctctatgcaaggaaaaaggaaagccctcaaactcaacttcgccaatcctccttttaaaagtactgctaggttcactctgaacccgaatcccacaggggtacagaacccccatatcgagcgcctgagaacacattcaattgaatcaagtggtaaactgaaaatatctcccgagcagcactgggatttcactgctgaagatctcaaggacctcggcgagataggtagaggcgcttatgggtccgttaacaaaatggtgcataaacccagtggccagatcatggctgtcaaaagaattcggtctactgtagacgaaaaggagcagaaacagctgttgatggatctggatgtagtgatgcggtctagcgattgcccctacatagtgcaattttacggagctctgtttagagagggcgactgctggatatgtatggagctgatgtccacatctttcgacaagttttataagtatgtatactcagtgctagacgacgtgataccggaggagatccttggtaagattaccctggccactgtgaaagccctcaaccaccttaaggagaatctaaagatcatccatcgcgatattaagcctagcaacatcctgctggataggtccggcaacattaaactttgcgacttcgggatttccggccagctggttgactcaattgcaaagacccgggatgcaggctgccgtccatatatggctcctgaacgcatagatccatccgcttctcggcaggggtacgacgtccggtctgacgtctggagtctggggattactctgtatgagttggccacaggacgattcccttatcctaaatggaattctgtcttcgatcagctgacgcaggtggtgaagggcgatccgcctcaactgtcaaattcggaggagcgcgaatttagccctagcttcataaatttcgtcaatttgtgcttgacaaaggacgaatctaagcggccaaaatataaagagctgctcaaacaccccttcatcctgatgtacgaggaaagggctgtcgaggtggcttgctatgtgtgcaagatcctggaccaaatgcccgcaactccaagcagcccaatgtacgtggattag

SEQ ID NO: 134337 - DNA, 1131 bp, Artificial Sequence
  derived and/or modified sequence
atggctgccccatccccgagcggaacacctgtgagctccatgcaggggaaacgcaaggctctaaagctcaactttgccaaccccccttttaagtctaccgccaggttcacactgaaccctaatccgactggagtgcagaacccgcacatagagcgccttagaactcacagtatcgaatcctccggaaaattgaaaataagccccgaacaacactgggatttcacagctgaagatctgaaggatctgggcgagatcggtaggggcgcttatggcagtgtgaacaagatggtgcataagcccagcggacagatcatggccgtcaaaagaattaggtccacagtggatgaaaaggagcagaagcagctcctgatggacctggacgtggttatgaggagttctgactgcccttacatcgtccaattctacggtgccctgtttcgcgaaggcgattgttggatctgtatggagttaatgtcaacatcattcgataagttctacaagtacgtctacagtgtcctcgacgatgtcatccctgaagagatcctcgggaagattactttggccacagtgaaagcccttaatcacctgaaggagaacctgaaaatcatccaccgtgatataaaacctagtaatatactgttggatcgctccggcaatattaagctctgtgacttcgggataagtggacagcttgttgacagtattgctaagactagggatgccggatgtcgaccttacatggctcctgaaaggatcgatccctccgccagccggcagggctacgacgttcgcagcgatgtgtggtctctgggcattacattgtatgagctggccacaggccgattcccgtatcccaaatggaacagcgtgtttgaccaactgacccaggtcgtcaaaggagaccctccgcagctgagcaactcggaggagcgtgagttcagtcctagcttcatcaatttcgttaatctctgcttgactaaggatgaatcgaaacgtcccaaatacaaggaactacttaaacatccctttattctcatgtatgaggagagagctgttgaagttgcctgttacgtgtgcaagattttagatcagatgcctgccaccccttccagccccatgtatgtggactag

SEQ ID NO: 134338 - DNA, 1401 bp, Artificial Sequence
  derived and/or modified sequence
cttcactcccaacaatggcggctccgagcccgagcggcacccccgtcagcagcatgcagggtaaacgcaaagcactgaagttgaattttgcaaatccacctttcaaatctacagcaaggtttactctgaatcccaatcctacaggagttcaaaacccacacatagagagactgagaacacacagcattgagtcatcaggaaaactgaagatctcccctgaacaacactgggatttcactgcagaggacttgaaagaccttggagaaattggacgaggagcttatggttctgtcaacaaaatggtccacaaaccaagtgggcaaataatggcagttaaaagaattcggtcaacagtggatgaaaaagaacaaaaacaacttcttatggatttggatgtagtaatgcggagtagtgattgcccatacattgttcagttttatggtgcactcttcagagagggtgactgttggatctgtatggaactcatgtctacctcgtttgataagttttacaaatatgtatatagtgtattagatgatgttattccagaagaaattttaggcaaaatcactttagcaactgtgaaagcactaaaccacttaaaagaaaacttgaaaattattcacagagatatcaaaccttccaatattcttctggacagaagtggaaatattaagctctgtgacttcggcatcagtggacagcttgtggactctattgccaagacaagagatgctggctgtaggccatacatggcacctgaaagaatagacccaagcgcatcacgacaaggatatgatgtccgctctgatgtctggagtttggggatcacattgtatgagttggccacaggccgatttccttatccaaagtggaatagtgtatttgatcaactaacacaagtcgtgaaaggagatcctccgcagctgagtaattctgaggaaagggaattctccccgagtttcatcaactttgtcaacttgtgccttacgaaggatgaatccaaaaggccaaagtataaagagcttctgaaacatccctttattttgatgtatgaagaacgtgccgttgaggtcgcatgctatgtttgtaaaatcctggatcaaatgccagctactcccagctctcccatgtatgtcgattgatatcgctgctacatcagactctagaaaaaagggctgagaggaagcaagacgtaaagaattttcatcccgtatcacagtgtttttattgctcgcccagacaccatgtgcaataagattggtgttcgtttccatcatgtctgtatactcctgtcacctagaacgtgcatccttgtaatacctgattgatcacacagtgttagtgctggtcagagagacctcatcctgctcttttgtgatgaacatattcatgaaatgt

SEQ ID NO: 134339 - protein, 277 aa, Artificial Sequence
  derived and/or modified sequence
MSAPAAKVSKKELNSNHDGADETSEKEQQEAIEHIDEVQNEIDRLNEQASEEILKVEQKYNKLRQPFFQKRSELIAKIPNFWVTTFVNHPQVSALLGEEDEEALHYLTRVEVTEFEDIKSGYRIDFYFDENPYFENKVLSKEFHLNESGDPSSKSTEIKWKSGKDLTKRSSQTQNKASRKRQHEEPESFFTWFTDHSDAGADELGEVIKDDIWPNPLQYYLVPDMDDEEGEGEEDDDDDEEEEGLEDIDEEGDEDEGEEDEDDDEGEEGEEDEGEDD

SEQ ID NO: 134340 - DNA, 834 bp, Artificial Sequence
  derived and/or modified sequence
atgagcgcccccgccgccaaggtgagcaagaaggagctgaacagcaaccacgacggcgccgacgagaccagcgagaaggagcagcaggaggccatcgagcacatcgacgaggtgcagaacgagatcgacagactgaacgagcaggccagcgaggagatcctgaaggtggagcagaagtacaacaagctgagacagcccttcttccagaagagaagcgagctgatcgccaagatccccaacttctgggtgaccaccttcgtgaaccacccccaggtgagcgccctgctgggcgaggaggacgaggaggccctgcactacctgaccagagtggaggtgaccgagttcgaggacatcaagagcggctacagaatcgacttctacttcgacgagaacccctacttcgagaacaaggtgctgagcaaggagttccacctgaacgagagcggcgaccccagcagcaagagcaccgagatcaagtggaagagcggcaaggacctgaccaagagaagcagccagacccagaacaaggccagcagaaagagacagcacgaggagcccgagagcttcttcacctggttcaccgaccacagcgacgccggcgccgacgagctgggcgaggtgatcaaggacgacatctggcccaaccccctgcagtactacctggtgcccgacatggacgacgaggagggcgagggcgaggaggacgacgacgacgacgaggaggaggagggcctggaggacatcgacgaggagggcgacgaggacgagggcgaggaggacgaggacgacgacgagggcgaggagggcgaggaggacgagggcgaggacgactag

SEQ ID NO: 134341 - DNA, 834 bp, Artificial Sequence
  derived and/or modified sequence
atgagcgcaccagcagccaaggtgagtaaaaaagagctgaactcaaaccacgatggtgcggatgaaaccagcgaaaaggagcagcaggaagctatcgagcacatcgatgaggtccagaatgagattgacagactaaacgaacaggcttcagaggaaatactcaaagtcgagcagaaatataataagctgcgtcagcccttctttcagaaaaggtctgaactgatagctaagattccaaatttctgggtgacaacctttgtgaatcatccgcaggtgagtgctctgctcggggaagaggacgaggaggccctccattacttaaccagggtggaggtgacagaatttgaggacatcaagagcggctatagaatagacttctactttgatgaaaatccatatttcgaaaacaaagtcctctcaaaggaattccacctcaatgagtccggtgacccgtctagtaagtccacagaaattaagtggaagtctggaaaagaccttaccaagcggagctcgcaaacacaaaataaagctagccgcaaacggcagcacgaggagccagagtcattcttcacgtggttcaccgaccattccgacgctggggccgatgagctgggggaagtgattaaagatgatatctggcccaacccccttcagtattacctggtgccagacatggacgacgaggagggcgaaggagaagaggacgacgacgacgatgaagaagaagagggactggaagatatcgacgaagagggagatgaggatgagggtgaggaagacgaggacgacgatgaaggcgaggagggcgaagaggatgaaggtgaagacgactag

SEQ ID NO: 134342 - DNA, 834 bp, Artificial Sequence
  derived and/or modified sequence
atgtctgccccagctgccaaggtgtccaagaaggagctgaacagcaaccatgatggagcagatgagaccagcgagaaggagcagcaggaggccatcgagcacattgatgaggtgcagaatgaaattgaccggctgaatgagcaggccagcgaggagatcctgaaggtggagcagaagtacaacaagctgcggcagcccttcttccagaagaggtctgagctgattgccaagatccccaacttctgggtgaccacctttgtgaaccacccccaggtgtctgccctgctgggggaggaggatgaggaggccctgcactacctgaccagggtggaggtgacagaatttgaggacatcaagagcggctacagaattgacttctactttgatgagaacccctactttgagaacaaggtgctgagcaaggagttccacctgaatgaaagtggggaccccagcagcaagagcacagagatcaagtggaagagcggcaaggacctgaccaagaggagcagccagacccagaacaaggccagcaggaagaggcagcacgaggagcctgagagcttcttcacctggttcacagaccacagtgatgctggagcagatgagctgggggaggtgatcaaggatgacatctggcccaaccccctgcagtactacctggtgcctgacatggatgatgaggagggggagggggaggaggatgatgatgatgatgaggaggaggagggcctggaggacattgatgaggagggagatgaagatgaaggagaagaagatgaagatgatgatgaaggagaggagggggaggaggatgaaggagaagatgactag

SEQ ID NO: 134343 - DNA, 834 bp, Artificial Sequence
  derived and/or modified sequence
atgagcgcccccgccgccaaggtgagcaagaaggagctgaacagcaatcatgacggagctgacgaaaccagcgaaaaggagcagcaagaggccattgagcacattgacgaggtccaaaatgaaatagacagacttaacgaacaagctagcgaggaaatacttaaagttgaacaaaagtacaataagttgcggcagcccttctttcagaagaggagtgagctgatagcaaagattccaaatttctgggtgaccacctttgtgaatcaccctcaagtgagcgcactcttaggcgaggaagacgaagaggcactgcactacctaaccagagtggaagtcactgagtttgaggatatcaagagtggctatagaatcgatttctacttcgatgaaaacccctatttcgaaaataaggtcctgtcaaaggagtttcatctgaatgagtccggcgatccatcatccaaaagcaccgaaataaaatggaagtcaggcaaagaccttaccaaacggtcaagtcaaacccagaacaaggcctctaggaaaagacagcacgaggaacctgagtccttcttcacatggttcaccgaccactccgatgccggagccgacgaactcggtgaagtcattaaggatgacatctggccgaacccgctccagtattatctggtccctgatatggatgatgaggagggggaaggggaagaagatgacgatgacgacgaggaagaagagggtctggaagacatcgacgaggagggcgatgaagatgagggtgaagaagatgaggatgatgatgagggagaagagggagaggaggatgaaggggaagatgattag

SEQ ID NO: 134344 - DNA, 834 bp, Artificial Sequence
  derived and/or modified sequence
atgtccgctcccgctgccaaagtctctaaaaaggaactgaatagcaatcacgatggagcagacgagacaagtgagaaagagcagcaggaggctatcgaacacatcgacgaagtgcaaaatgaaattgacaggctgaacgaacaggcctcggaagagattttgaaagtggagcagaaatacaataagctacggcaaccgtttttccagaaacgaagcgaattgattgccaagatcccaaacttttgggtaacgacctttgtcaatcatcctcaggttagcgccttgttgggcgaggaggatgaggaggcgctacattaccttacccgcgtcgaagtgaccgaatttgaagatatcaaatctgggtatcgcatcgacttctacttcgacgaaaacccctacttcgagaataaagtcttgagcaaagagttccacctgaacgagtcaggagacccttcctcgaagtccaccgagatcaagtggaaatctggcaaggaccttactaaaagaagttcacagactcagaataaggccagtcgcaaaaggcaacatgaggagcccgaatccttttttacttggtttaccgaccactcagacgccggtgctgatgaactcggtgaggtcattaaggatgacatctggcccaaccccctacagtactacttggtgccagatatggatgatgaggaaggggagggagaagaagacgatgatgacgacgaagaagaggagggtctggaagacatcgacgaggagggggacgaggatgagggagaggaagacgaggatgacgacgagggagaggagggcgaagaggatgagggagaggacgactag

SEQ ID NO: 134345 - DNA, 2915 bp, Artificial Sequence
  derived and/or modified sequence
cgccgtaggaggaggtggaggaggaggcggctcgggagagcgagcagcgagctggctggatcgccgagcgcgagtgagggagccgagccgcccgccgccgccgcctccgcctcccctccgcgaacaggagcccgggccggggcccggcacgccgccccagcccgtccctcggcgtcaggccgcgagggtagcgcgcgcgagcgagcgagggggagggagagcgagcgagcgccgggaggaggcggccggaccgagcgggcgcccgcgcgtgtggcgtgaggggaagccgcttgcccgcccccttcgccttcccttctctccccctccccgctccccccccgaccgcggagcagcaccatgtcggcgccggcggccaaagtcagtaaaaaggagctcaactccaaccacgacggggccgacgagacctcagaaaaagaacagcaagaagcgattgaacacattgatgaagtacaaaatgaaatagacagacttaatgaacaagccagtgaggagattttgaaagtagaacagaaatataacaaactccgccaaccattttttcagaagaggtcagaattgatcgccaaaatcccaaatttttgggtaacaacatttgtcaaccatccacaagtgtctgcactgcttggggaggaagatgaagaggcactgcattatttgaccagagttgaagtgacagaatttgaagatattaaatcaggttacagaatagatttttattttgatgaaaatccttactttgaaaataaagttctctccaaagaatttcatctgaatgagagtggtgatccatcttcgaagtccaccgaaatcaaatggaaatctggaaaggatttgacgaaacgttcgagtcaaacgcagaataaagccagcaggaagaggcagcatgaggaaccagagagcttctttacctggtttactgaccattctgatgcaggtgctgatgagttaggagaggtcatcaaagatgatatttggccaaacccattacagtactacttggttcccgatatggatgatgaagaaggagaaggagaagaagatgatgatgatgatgaagaggaggaaggattagaagatattgacgaagaaggggatgaggatgaaggtgaagaagatgaagatgatgatgaaggggaggaaggagaggaggatgaaggagaagatgactaaatagaacactgatggattccaaccttcctttttttaaattttctccagtccctgggagcaagttgcagtcttttttttttttttttttttttttccctcttgtgctcagtcgccctgttcttgaggtctcttttctctactccatggttctcaatttatttggggggaaataccttgagcagaatacaatgggaaaagagtctctacccctttctgttcgaagttcatttttatcccttcctgtctgaacaaaaactgtatggaatcaacaccaccgagctctgtgggaaaaaagaaaaacctgctcccttcgctctgctggaagctggagggtgctaggcccctgtgtagtagtgcatagaattctagcttttttcctcctttctctgtatattgggctcagagagtacactgtgtctctatgtgaatatggacagttagcatttaccaacatgtatctgtctactttctcttgtttaaaaaaagaaaaaaaaacttaaaaaaatggggttatagaaggtcagcaaagggtgggtttgagatgtttgggtgggttaagtgggcattttgacaacatggcttctcctttggcatgtttaattgtgatatttgacagacatccttgcagtttaagatgacacttttaaaataaattctctcctaatgatgacttgagccctgccactcaatgggagaatcagcagaacctgtaggatcttatttggaattgacattctctattgtaattttgttcctgtttatttttaaattttctttttgtttcactggaaaggaaagatgatgctcagttttaaacgttaaaagtgtacaagttgctttgttacaataaaactaaatgtgtacacaaaggatttgatgcttttctctcagcataggtatgcttactatgaccttccaagtttgacttgtataacatcactgtcaaactttgtcaccctaacttcgtattttttgatacgcactttgcaggatgacctcagggctatgtggattgagtaatgggatttgaatcaatgtattaatatctccatagctgggaaacgtgggttcaatttgccattggtttctgaaagtattcacatcatttgggataccagatagctcaatactctctgagtacattgtgcccttgatttttatctccaagtggcagtttttaaaattggccttttacctggatataaattaattgtgcctgccaccaccatccaacagacctggtgctctaatgccaagttatacacgggacagttgctggcatgtcttcattggctatataaaatgtggccaagaagataggctctcagtaagaagtctgatggtgagcagtaactgtccctgctttctggtataaagctctcaaatgtgaccatgtgaatctgggtgggataatggactcagctctgtctgctcaatgccattgtgcagagaagcaccctaatgcataagctttttaatgctgtaaaatatagtcgctgaaattaaatgccactttttcagaggtgaattaatggacagtctggtgaacttcaaaagctttttgatgtataaaacttgataaatggaactattccatcaataggcaaaagtgtaacaacctatctagatggatagtatgtaatttctgcacaggtctctgtttagtaaatacatcactgtataccgatcaggaatcttgctccaataaaggaacataaagattt

SEQ ID NO: 134346 - protein, 314 aa, Artificial Sequence
  derived and/or modified sequence
MGIGRSEGGRRGAALGVLLALGAALLAVGSASEYDYVSFQSDIGPYQSGRFYTKPPQCVDIPADLRLCHNVGYKKMVLPNLLEHETMAEVKQQASSWVPLLNKNCHAGTQVFLCSLFAPVCLDRPIYPCRWLCEAVRDSCEPVMQFFGFYWPEMLKCDKFPEGDVCIAMTPPNATEASKPQGTTVCPPCDNELKSEAIIEHLCASEFALRMKIKEVKKENGDKKIVPKKKKPLKLGPIKKKDLKKLVLYLKNGADCPCHQLDNLSHHFLIMGRKVKSQYLLTAIHKWDKKNKEFKNFMKKMKNHECPTFQSVFK

SEQ ID NO: 134347 - DNA, 945 bp, Artificial Sequence
  derived and/or modified sequence
atgggcatcggcagaagcgagggcggcagaagaggcgccgccctgggcgtgctgctggccctgggcgccgccctgctggccgtgggcagcgccagcgagtacgactacgtgagcttccagagcgacatcggcccctaccagagcggcagattctacaccaagcccccccagtgcgtggacatccccgccgacctgagactgtgccacaacgtgggctacaagaagatggtgctgcccaacctgctggagcacgagaccatggccgaggtgaagcagcaggccagcagctgggtgcccctgctgaacaagaactgccacgccggcacccaggtgttcctgtgcagcctgttcgcccccgtgtgcctggacagacccatctacccctgcagatggctgtgcgaggccgtgagagacagctgcgagcccgtgatgcagttcttcggcttctactggcccgagatgctgaagtgcgacaagttccccgagggcgacgtgtgcatcgccatgaccccccccaacgccaccgaggccagcaagccccagggcaccaccgtgtgccccccctgcgacaacgagctgaagagcgaggccatcatcgagcacctgtgcgccagcgagttcgccctgagaatgaagatcaaggaggtgaagaaggagaacggcgacaagaagatcgtgcccaagaagaagaagcccctgaagctgggccccatcaagaagaaggacctgaagaagctggtgctgtacctgaagaacggcgccgactgcccctgccaccagctggacaacctgagccaccacttcctgatcatgggcagaaaggtgaagagccagtacctgctgaccgccatccacaagtgggacaagaagaacaaggagttcaagaacttcatgaagaagatgaagaaccacgagtgccccaccttccagagcgtgttcaagtag

SEQ ID NO: 134348 - DNA, 945 bp, Artificial Sequence
  derived and/or modified sequence
atgggtattggccgctcagagggcggacgccgtggcgctgcgctgggagtgctgttggccttaggcgcggctttactggccgtgggctccgcgagcgaatacgattatgtgtcgttccaatccgatatcggtccataccagtccggtcgattttacacgaagcctccacagtgtgtagacatccccgcagatctccggctgtgccataatgtcgggtacaaaaaaatggtgcttccgaatcttctggagcatgagacgatggccgaagtcaagcagcaggcctcctcctgggtcccattgttaaataaaaactgtcacgcaggcacacaggttttcctgtgctcattgtttgctccggtttgtcttgaccggccgatatatccatgtagatggttatgcgaagccgttcgcgactcctgtgagcccgtcatgcagttcttcggcttctattggccggaaatgctgaagtgcgacaaattccccgagggcgacgtctgtatcgcaatgacgcctcctaatgcaaccgaggccagtaagccccagggtacaaccgtctgccctccctgcgacaatgaactgaagtccgaagcgattatcgaacacctttgtgcaagcgagttcgctctgcggatgaagattaaagaggtcaaaaaggaaaacggcgataagaagattgtgcccaagaagaaaaaacctctcaaactcggaccaataaagaagaaggacctaaagaaactcgtgctgtacctgaagaatggagctgattgcccttgccatcagctggacaacttgtcccatcatttcctaattatggggcggaaggtgaagtcccagtacttattgaccgcaatccacaagtgggataagaagaacaaagaattcaagaacttcatgaaaaaaatgaaaaatcatgagtgtcccacatttcaatccgtgttcaagtag

SEQ ID NO: 134349 - DNA, 945 bp, Artificial Sequence
  derived and/or modified sequence
atgggcatcggccgctctgagggcggcagaagaggagctgccctgggcgtgctgctggccctgggcgccgccctgctggccgtgggcagcgcctctgaatatgactatgtgtccttccagagcgacatcggcccctaccagagcggccgcttctacaccaagccaccccagtgtgtggacatcccagctgacctgcggctgtgccacaacgtgggctacaagaagatggtgctgcccaacctgctggagcacgagaccatggccgaggtgaagcagcaggccagctcctgggtgcccctgctgaacaagaactgccacgccggcacccaggtgttcctgtgcagcctgtttgcccctgtgtgcctggaccggcccatctacccctgccgctggctgtgtgaggccgtgcgggacagctgtgagcctgtgatgcagttcttcggcttctactggccagagatgctgaagtgtgacaagtttcctgaaggagatgtgtgcatcgccatgaccccaccaaatgccacagaggccagcaagccccagggcaccaccgtgtgccccccctgtgacaatgagctgaagtctgaggccatcatcgagcacctgtgtgccagcgagtttgccctgaggatgaagatcaaggaggtgaagaaggaaaatggagacaagaagatcgtgcccaagaagaagaagcccctgaagctgggccccatcaagaagaaggacctgaagaagctggtgctgtacctgaagaatggagctgactgcccctgccaccagctggacaacctgagccaccacttcctgatcatgggcaggaaggtgaagagccagtacctgctgacagccatccacaagtgggacaagaagaacaaggagttcaagaacttcatgaagaagatgaagaaccatgaatgtcccaccttccagagcgtcttcaagtag

SEQ ID NO: 134350 - DNA, 945 bp, Artificial Sequence
  derived and/or modified sequence
atgggcatcggccggagcgagggcggccggcggggcgccgccctgggggtgcttctcgccctaggggccgctctcctcgctgttggctccgccagtgaatatgattacgtttcttttcaatcagatattggcccttaccagagtggtagattttataccaaaccaccacagtgtgttgacatccccgcagacctgaggttatgccacaatgtcgggtataaaaagatggttcttcccaacttactagagcacgagacaatggcagaggtaaagcaacaggcctctagctgggtacctctgttaaacaagaactgccacgccggaacccaggtgttcctgtgctccctgtttgcaccagtctgtctggacagaccaatttatccctgcagatggttatgcgaagctgtgcgcgactcctgtgagcccgtgatgcaatttttcggattctactggcctgagatgttgaaatgcgacaaatttcccgaaggcgatgtatgtatagcaatgacccctcctaatgcaacggaagcatcaaagcctcaggggaccacagtttgccctccctgtgataacgagttgaagagcgaagccatcatcgagcacctctgtgctagcgagttcgcacttagaatgaagatcaaagaagtaaagaaagaaaatggtgataagaaaattgtgcccaaaaaaaagaaacctctgaaactgggtcccatcaagaaaaaagatttgaaaaagcttgttctgtacttgaaaaacggcgctgactgcccatgccatcaactcgataacttatctcaccattttctcatcatgggtcgcaaggtgaagtctcagtacctgctgacggccatccacaagtgggacaagaagaacaaggagttcaagaatttcatgaagaagatgaagaatcacgaatgccccacttttcagagcgtgttcaagtag

SEQ ID NO: 134351 - DNA, 945 bp, Artificial Sequence
  derived and/or modified sequence
atgggaatcggtcgaagtgaaggtggacgcaggggggctgccttgggagtactgctggcgcttggcgcagcactcctggctgtggggtcagcttccgagtatgattatgtcagctttcaatctgacattggcccatatcaatcgggacgcttttataccaaacctccccaatgcgttgatatacccgcagatttgcggctttgccataacgtgggatataaaaaaatggtgttgccgaacctgttggagcacgaaaccatggctgaagtgaagcagcaggcctcctcgtgggtgccactcctcaataagaattgtcacgccggtacgcaggtatttttatgctccctgttcgcccctgtatgccttgatagaccaatctacccttgtcgttggctttgcgaagcggtgcgagatagctgcgagcccgtgatgcaattttttgggttttattggcctgaaatgctgaaatgcgacaagtttcccgaaggcgacgtgtgtattgctatgaccccccctaatgccacggaggcctcaaagccccaagggaccaccgtgtgccccccttgtgacaatgagctgaagtcagaagctatcatcgagcatctgtgcgctagcgagtttgctcttcgcatgaagatcaaggaggtgaagaaagagaatggagataagaagattgttccaaaaaagaagaaaccactgaagttaggtccaatcaagaaaaaggacctgaaaaaactcgttctttaccttaagaatggggctgactgcccatgtcatcaactcgataatctctcccatcattttctaattatggggaggaaggttaagtcgcagtacctgctgaccgctattcacaagtgggataagaagaacaaagaattcaagaattttatgaagaagatgaagaaccacgaatgtcctacattccagagcgtgtttaagtag

SEQ ID NO: 134352 - DNA, 4488 bp, Artificial Sequence
  derived and/or modified sequence
cgagggctcggccgtaggagccccgcgcactccagccctgcagcctccggagtcagtgccgcgcgcccgccgccccgcgccttcctgctcgccgcacctccgggagccggggcgcacccagcccgcagcgccgcctccccgcccgcgccgcctccgaccgcaggccgagggccgccactggccggggggaccgggcagcagcttgcggccgcggagccgggcaacgctggggactgcgccttttgtccccggaggtccctggaagtttgcggcaggacgcgcgcggggaggcggcggaggcagccccgacgtcgcggagaacagggcgcagagccggcatgggcatcgggcgcagcgaggggggccgccgcggggcagccctgggcgtgctgctggcgctgggcgcggcgcttctggccgtgggctcggccagcgagtacgactacgtgagcttccagtcggacatcggcccgtaccagagcgggcgcttctacaccaagccacctcagtgcgtggacatccccgcggacctgcggctgtgccacaacgtgggctacaagaagatggtgctgcccaacctgctggagcacgagaccatggcggaggtgaagcagcaggccagcagctgggtgcccctgctcaacaagaactgccacgccggcacccaggtcttcctctgctcgctcttcgcgcccgtctgcctggaccggcccatctacccgtgtcgctggctctgcgaggccgtgcgcgactcgtgcgagccggtcatgcagttcttcggcttctactggcccgagatgcttaagtgtgacaagttccccgagggggacgtctgcatcgccatgacgccgcccaatgccaccgaagcctccaagccccaaggcacaacggtgtgtcctccctgtgacaacgagttgaaatctgaggccatcattgaacatctctgtgccagcgagtttgcactgaggatgaaaataaaagaagtgaaaaaagaaaatggcgacaagaagattgtccccaagaagaagaagcccctgaagttggggcccatcaagaagaaggacctgaagaagcttgtgctgtacctgaagaatggggctgactgtccctgccaccagctggacaacctcagccaccacttcctcatcatgggccgcaaggtgaagagccagtacttgctgacggccatccacaagtgggacaagaaaaacaaggagttcaaaaacttcatgaagaaaatgaaaaaccatgagtgccccacctttcagtccgtgtttaagtgattctcccgggggcagggtggggagggagcctcgggtggggtgggagcgggggggacagtgccccgggaacccggtgggtcacacacacgcactgcgcctgtcagtagtggacattgtaatccagtcggcttgttcttgcagcattcccgctcccttccctccatagccacgctccaaaccccagggtagccatggccgggtaaagcaagggccatttagattaggaaggtttttaagatccgcaatgtggagcagcagccactgcacaggaggaggtgacaaaccatttccaacagcaacacagccactaaaacacaaaaagggggattgggcggaaagtgagagccagcagcaaaaactacattttgcaacttgttggtgtggatctattggctgatctatgcctttcaactagaaaattctaatgattggcaagtcacgttgttttcaggtccagagtagtttctttctgtctgctttaaatggaaacagactcataccacacttacaattaaggtcaagcccagaaagtgataagtgcagggaggaaaagtgcaagtccattatgtaatagtgacagcaaagggaccaggggagaggcattgccttctctgcccacagtctttccgtgtgattgtctttgaatctgaatcagccagtctcagatgccccaaagtttcggttcctatgagcccggggcatgatctgatccccaagacatgtggaggggcagcctgtgcctgcctttgtgtcagaaaaaggaaaccacagtgagcctgagagagacggcgattttcgggctgagaaggcagtagttttcaaaacacatagttaaaaaagaaacaaatgaaaaaaattttagaacagtccagcaaattgctagtcagggtgaattgtgaaattgggtgaagagcttaggattctaatctcatgttttttccttttcacatttttaaaagaacaatgacaaacacccacttatttttcaaggttttaaaacagtctacattgagcatttgaaaggtgtgctagaacaaggtctcctgatccgtccgaggctgcttcccagaggagcagctctccccaggcatttgccaagggaggcggatttccctggtagtgtagctgtgtggctttccttcctgaagagtccgtggttgccctagaacctaacaccccctagcaaaactcacagagctttccgtttttttctttcctgtaaagaaacatttcctttgaacttgattgcctatggatcaaagaaattcagaacagcctgcctgtccccccgcactttttacatatatttgtttcatttctgcagatggaaagttgacatgggtggggtgtccccatccagcgagagagtttcaaaagcaaaacatctctgcagtttttcccaagtaccctgagatacttcccaaagcccttatgtttaatcagcgatgtatataagccagttcacttagacaactttacccttcttgtccaatgtacaggaagtagttctaaaaaaaatgcatattaatttcttcccccaaagccggattcttaattctctgcaacactttgaggacatttatgattgtccctctgggccaatgcttatacccagtgaggatgctgcagtgaggctgtaaagtggccccctgcggccctagcctgacccggaggaaaggatggtagattctgttaactcttgaagactccagtatgaaaatcagcatgcccgcctagttacctaccggagagttatcctgataaattaacctctcacagttagtgatcctgtccttttaacaccttttttgtggggttctctctgacctttcatcgtaaagtgctggggaccttaagtgatttgcctgtaattttggatgattaaaaaatgtgtatatatattagctaattagaaatattctacttctctgttgtcaaactgaaattcagagcaagttcctgagtgcgtggatctgggtcttagttctggttgattcactcaagagttcagtgctcatacgtatctgctcattttgacaaagtgcctcatgcaaccgggccctctctctgcggcagagtccttagtggaggggtttacctggaacattagtagttaccacagaatacggaagagcaggtgactgtgctgtgcagctctctaaatgggaattctcaggtaggaagcaacagcttcagaaagagctcaaaataaattggaaatgtgaatcgcagctgtgggttttaccaccgtctgtctcagagtcccaggaccttgagtgtcattagttactttattgaaggttttagacccatagcagctttgtctctgtcacatcagcaatttcagaaccaaaagggaggctctctgtaggcacagagctgcactatcacgagcctttgtttttctccacaaagtatctaacaaaaccaatgtgcagactgattggcctggtcattggtctccgagagaggaggtttgcctgtgatttcctaattatcgctagggccaaggtgggatttgtaaagctttacaataatcattctggatagagtcctgggaggtccttggcagaactcagttaaatctttgaagaatatttgtagttatcttagaagatagcatgggaggtgaggattccaaaaacattttatttttaaaatatcctgtgtaacacttggctcttggtacctgtgggttagcatcaagttctccccagggtagaattcaatcagagctccagtttgcatttggatgtgtaaattacagtaatcccatttcccaaacctaaaatctgtttttctcatcagactctgagtaactggttgctgtgtcataacttcatagatgcaggaggctcaggtgatctgtttgaggagagcaccctaggcagcctgcagggaataacatactggccgttctgacctgttgccagcagatacacaggacatggatgaaattcccgtttcctctagtttcttcctgtagtactcctcttttagatcctaagtctcttacaaaagctttgaatactgtgaaaatgttttacattccatttcatttgtgttgtttttttaactgcattttaccagatgttttgatgttatcgcttatgttaatagtaattcccgtacgtgttcattttattttcatgctttttcagccatgtatcaatattcacttgactaaaatcactcaattaatcaa

SEQ ID NO: 134353 - DNA, 1437 bp, Artificial Sequence
  derived and/or modified sequence
actccagccctgcagcctccggagtcagtgccgcgcgcccgccgccccgcgccttcctgctcgccgcacctccgggagccggggcgcacccagcccgacgtcgcggagaacagggcgcagagccggcatgggcatcgggcgcagcgaggggggccgccgcggggcagccctgggcgtgctgctggcgctgggcgcggcgcttctggccgtgggctcggccagcgagtacgactacgtgagcttccagtcggacatcggcccgtaccagagcgggcgcttctacaccaagccacctcagtgcgtggacatccccgcggacctgcggctgtgccacaacgtgggctacaagaagatggtgctgcccaacctgctggagcacgagaccatggcggaggtgaagcagcaggccagcagctgggtgcccctgctcaacaagaactgccacgccggcacccaggtcttcctctgctcgctcttcgcgcccgtctgcctggaccggcccatctacccgtgtcgctggctctgcgaggccgtgcgcgactcgtgcgagccggtcatgcagttcttcggcttctactggcccgagatgcttaagtgtgacaagttccccgagggggacgtctgcatcgccatgacgccgcccaatgccaccgaagcctccaagccccaaggcacaacggtgtgtcctccctgtgacaacgagttgaaatctgaggccatcattgaacatctctgtgccagcgagtttgcactgaggatgaaaataaaagaagtgaaaaaagaaaatggcgacaagaagattgtccccaagaagaagaagcccctgaagttggggcccatcaagaagaaggacctgaagaagcttgtgctgtacctgaagaatggggctgactgtccctgccaccagctggacaacctcagccaccacttcctcatcatgggccgcaaggtgaagagccagtacttgctgacggccatccacaagtgggacaagaaaaacaaggagttcaaaaacttcatgaagaaaatgaaaaaccatgagtgccccacctttcagtccgtgtttaagtgattctcccgggggcagggtggggagggagcctcgggaacccggtgggtcacacacacgcactgcgcctgtcagtagtggacattgtaatccagtcggcttgttcttgcagcattcccgctcccttccctccatagccacgctccaaaccccagggtagccatggccgggtaaagcaagggccatttagattaggaaggtttttaagatccgcaatgtggagcagcagccactgcacaggaggaggtgacaaaccatttccaacagcaacacagccactaaaacacaaaaagggggattgggcggaaagtgagagccagcagcaaaaactacattttgcaacttgttggtgtggatctattggctga

SEQ ID NO: 134354 - DNA, 945 bp, Artificial Sequence
  derived and/or modified sequence
atggggattggacgctcggaaggggggcggcgaggcgctgccttgggagtactgctggcactgggcgccgcactgctggccgtgggaagtgcaagcgaatacgattatgtctcatttcagtccgacatcggaccttaccagtctggacgcttttacactaagcctccccagtgtgtcgacatccctgccgatctgcgattatgccacaacgttgggtataagaagatggttctgcctaacttgctagagcatgagacaatggctgaagtaaagcagcaggcctcctcctgggtacccctgttgaacaaaaactgtcatgctggaacgcaagttttcctgtgcagcctgttcgcccctgtatgtctggatcggcccatctacccttgtcgttggctgtgtgaggctgtacgggactcctgtgagcccgtcatgcagtttttcggattctactggcccgaaatgctgaagtgtgataagttcccggaaggggatgtgtgtattgcaatgacacctccaaatgcaacagaggcctcgaaaccacaagggacaaccgtctgccccccctgtgacaatgagcttaagagcgaggcgatcatagagcatctctgtgcgtctgaatttgcgctgagaatgaaaattaaggaggtgaagaaggaaaatggagataaaaaaatcgtgccaaaaaagaaaaagccattgaaattaggtccgatcaagaagaaggatcttaagaaattggtactatatttgaaaaatggtgctgattgtccatgtcaccaactggataacctgtcccaccacttcctcataatgggacggaaggttaagtcgcagtacttacttaccgccatccacaaatgggataagaagaataaagaatttaagaacttcatgaagaaaatgaagaatcacgaatgtccaaccttccagtctgtgttcaagtag

SEQ ID NO: 134355 - DNA, 945 bp, Artificial Sequence
  derived and/or modified sequence
atgggcatcggccggagcgagggcggccggcggggcgccgccctgggagtcctcctcgcattgggtgcagctttgctcgccgtgggttctgcttccgaatacgactacgtctcatttcagagtgatattggtccataccagtccggccgcttttacactaaacctccccaatgcgtcgacattccggccgacttacggctgtgccataacgtaggctataagaagatggtgcttcccaatctgttggagcacgagacgatggccgaagttaagcagcaggccagcagctgggttcctctgctgaataaaaattgtcatgccgggactcaagtttttctttgcagtcttttcgcacccgtgtgcctcgacagacctatctacccatgcagatggctgtgtgaagccgttagagattcatgtgaacctgtgatgcagtttttcggtttctactggccggagatgctgaagtgtgataagtttccagagggagacgtgtgtatagcgatgacaccccccaatgcaacagaggcctccaagcctcagggcaccaccgtctgccctccatgcgataatgagcttaagtccgaggcgattatagagcacctgtgtgcttcagagttcgcactacggatgaagataaaagaggttaagaaggagaacggcgataagaagattgtgcccaagaaaaaaaaacctctcaaactcggcccaataaagaaaaaggacctcaaaaagctggtcctgtacctgaaaaatggagcggattgtccctgccaccaactggataatctttctcatcattttctaattatgggacggaaggtgaaatctcagtaccttctgaccgcgattcataaatgggacaagaagaataaggagtttaagaactttatgaagaagatgaagaatcacgaatgtcctacctttcagtcagtgttcaagtag

SEQ ID NO: 134356 - DNA, 945 bp, Artificial Sequence
  derived and/or modified sequence
atgggaataggcagatcagaaggtggaaggcgaggagcggcactgggagtgcttttagcactgggtgccgcactcctggctgtcggcagcgcgtctgaatacgattatgtgtcctttcaaagcgacatcggaccatatcaatccgggaggttctataccaaaccaccgcaatgtgtcgatattccggctgacctgcgcctgtgtcacaacgttgggtataagaaaatggtccttcctaacctcctagaacacgagacgatggcggaggtgaaacaacaggcttccagctgggtgcccttactaaataaaaattgccatgccggaacacaggtgtttctgtgctctctgtttgccccagtgtgccttgaccggcctatctacccatgccggtggctgtgcgaagccgtgagggactcttgtgagccagtgatgcaattcttcggattttactggccagagatgctaaaatgtgataagttcccggaaggcgacgtttgtattgcgatgaccccccctaatgccacagaagcatccaagccccaagggactactgtatgccccccatgtgataacgagcttaagtcggaggctattattgaacacctatgtgcttctgagttcgcacttcggatgaagatcaaggaagtcaagaaagagaacggggataaaaagatagtgccgaagaagaaaaagccactgaaactcggaccaataaagaaaaaggatctcaaaaaactggtcctgtacttgaagaatggagctgattgcccatgtcaccagctggacaacctgtcccatcacttcctaattatgggtaggaaagtcaagtcgcagtacctgctgacagctattcataagtgggataagaagaataaggaattcaaaaacttcatgaaaaagatgaagaatcacgaatgtcccacgttccagtctgtgtttaaatag

SEQ ID NO: 134357 - protein, 295 aa, Artificial Sequence
  derived and/or modified sequence
MLQGPGSLLLLFLASHCCLGSARGLFLFGQPDFSYKRSNCKPIPANLQLCHGIEYQNMRLPNLLGHETMKEVLEQAGAWIPLVMKQCHPDTKKFLCSLFAPVCLDDLDETIQPCHSLCVQVKDRCAPVMSAFGFPWPDMLECDRFPQDNDLCIPLASSDHLLPATEEAPKVCEACKNKNDDDNDIMETLCKNDFALKIKVKEITYINRDTKIILETKSKTIYKLNGVSERDLKKSVLWLKDSLQCTCEEMNDINAPYLVMGQKQGGELVITSVKRWQKGQREFKRISRSIRKLQC

SEQ ID NO: 134358 - DNA, 888 bp, Artificial Sequence
  derived and/or modified sequence
atgctgcagggccccggttcacttctcttgttgtttttagctagccattgctgtctgggaagcgcaagagggctctttctgttcggtcaaccagatttctcatacaaaagaagcaactgcaaaccaattcctgcaaaccttcagctgtgtcacggtattgaataccagaatatgcgacttcccaatctgctgggacatgaaaccatgaaagaagtcctggagcaagccggggcatggattccgttggttatgaagcagtgccacccagatacgaagaaatttctgtgctctctgtttgctcctgtctgcctggatgaccttgatgagaccatccagccctgccattcactctgtgtacaagtcaaagacaggtgtgcacccgtgatgtctgccttcgggttcccctggcccgacatgctggagtgtgaccggtttcctcaagataacgatctatgtataccgctggcatcttccgaccacttgctcccagccactgaggaggcccctaaggtatgcgaagcgtgtaaaaataagaatgacgatgacaacgacataatggagacgttgtgtaagaatgactttgccttaaagattaaggttaaagagattacctacataaatcgggataccaagatcatcctggagactaagtctaaaaccatatacaagctcaatggtgtctcggaacgggacctgaaaaagagtgtgctctggctgaaggattcacttcagtgtacatgcgaggagatgaatgacattaacgccccatacctcgtcatggggcaaaagcaaggcggtgagttggtgatcaccagcgtcaagcgctggcagaagggccagagggaattcaagagaatatctcgcagcattcggaagttgcagtgctag

SEQ ID NO: 134359 - DNA, 888 bp, Artificial Sequence
  derived and/or modified sequence
atgctgcagggccctggcagcctgctgctgctcttcctggccagccactgctgcctgggcagcgcccggggcctcttcctgtttggccagcctgacttctcctacaagaggagcaactgcaagcccatcccagccaacctgcagctgtgccacggcatcgagtaccagaacatgaggctgcccaacctgctgggccacgagaccatgaaggaggtgctggagcaggccggggcctggatccccctggtgatgaagcagtgccacccagacaccaagaagttcctgtgcagcctgtttgcccctgtgtgcctggatgacctggatgagaccatccagccctgccacagcctgtgtgtgcaggtgaaggacagatgtgcccctgtgatgtctgccttcggcttcccctggccagacatgctggagtgtgaccgcttcccccaggacaatgacctgtgcatccccctggccagcagtgaccacctgctgcctgccacagaggaggcccccaaggtgtgtgaggcctgcaagaacaagaatgatgatgacaatgacatcatggagaccctgtgcaagaatgactttgccctgaagatcaaggtgaaggagatcacctacatcaacagagacaccaagatcatcctggagaccaagagcaagaccatctacaagctgaatggagtgtctgagcgggacctgaagaagtctgtgctgtggctgaaggacagcctgcagtgcacctgtgaggagatgaatgacatcaatgccccctacctggtgatgggccagaagcagggcggggagctggtgatcacctctgtgaagcgctggcagaagggccagcgggagttcaagaggatcagccgcagcatcaggaagctgcagtgctag

SEQ ID NO: 134360 - DNA, 888 bp, Artificial Sequence
  derived and/or modified sequence
atgctgcagggccccggcagcctgctgctgctgttcctggccagccactgctgtctaggcagcgcccggggcctgtttctgttcggtcagccggactttagctacaagcggtccaactgcaagcctatcccagccaacctacaactgtgtcacggcatcgaatatcagaacatgcgcctccctaacttgttgggccacgaaactatgaaagaagtcctcgagcaggctggtgcttggatacctctggtgatgaagcaatgtcatcctgatactaaaaaattcctatgttctctattcgctcctgtttgccttgatgatttggatgagacgattcagccttgccacagcctctgcgtgcaggtgaaggaccggtgcgcccctgtcatgtctgcattcggcttcccctggccagacatgctggaatgcgatcgtttccctcaggacaatgatttgtgtatcccgctcgcctcatctgaccacctcctgcccgcgaccgaggaagccccaaaggtctgcgaggcatgcaagaataaaaacgacgatgacaatgatattatggaaacactttgcaaaaacgactttgctttgaaaatcaaagtaaaggaaatcacttatatcaatagggacacaaaaatcattcttgagaccaagtctaagaccatttataaactcaatggagtaagtgagagagacctaaaaaagtcagtattatggctcaaagattccctgcagtgtacttgcgaggagatgaatgacatcaatgctccatacctcgtgatggggcagaaacagggaggcgaattggttataacatccgtaaagagatggcagaaaggacagcgggagtttaaaaggatatcccggtccattaggaaattgcagtgctag

SEQ ID NO: 134361 - DNA, 888 bp, Artificial Sequence
  derived and/or modified sequence
atgcttcaaggacctggctccctgctgctgctgtttctagctagccactgctgtctaggatctgctcgagggctgttcctgttcggacagcctgacttttcctacaagcgtagcaactgtaagcctatccccgctaacttgcagctgtgccacgggatcgagtatcagaacatgaggttgcctaatctcttaggtcacgagaccatgaaggaggtgctggagcaggcaggagcatggatccctctggtgatgaaacagtgtcatcccgacacaaaaaagtttttgtgttccctttttgccccagtgtgtttggatgacctggatgagactatccagccctgccacagcctctgtgtccaggtgaaagacagatgtgccccagtgatgtctgctttcggctttccgtggcccgacatgctggagtgtgaccgattcccccaggacaatgacttatgcattcccctggcaagctctgatcacttacttcctgccaccgaagaggcacctaaggtgtgcgaagcttgtaaaaataagaacgacgatgataatgatattatggaaactctctgcaagaatgactttgctctcaagataaaagtaaaggagattacctatataaatagagataccaaaattattctcgaaaccaagtcaaagactatctacaaactgaatggagtctctgagcgtgacctaaaaaagagcgtgctttggctcaaggatagcctgcaatgtacatgtgaggagatgaatgacataaatgccccttatctggtcatgggccagaaacaggggggagagctggtcatcaccagcgtgaaaaggtggcaaaaggggcaaagggaattcaagcgtatttctcggtctataaggaagctgcagtgctag

SEQ ID NO: 134362 - DNA, 2032 bp, Artificial Sequence
  derived and/or modified sequence
agatttgcataaaaaaggccaagaaaactctggctgtgccccagcaacggctcattctgctcccccgggtcggagccccccggagctgcgcgcgggcttgcagcgcctcgcccgcgctgtcctcccggtgtcccgcttctccgcgccccagccgccggctgccagcttttcggggccccgagtcgcacccagcgaagagagcgggcccgggacaagctcgaactccggccgcctcgcccttccccggctccgctccctctgccccctcggggtcgcgcgcccacgatgctgcagggccctggctcgctgctgctgctcttcctcgcctcgcactgctgcctgggctcggcgcgcgggctcttcctctttggccagcccgacttctcctacaagcgcagcaattgcaagcccatccctgccaacctgcagctgtgccacggcatcgaataccagaacatgcggctgcccaacctgctgggccacgagaccatgaaggaggtgctggagcaggccggcgcttggatcccgctggtcatgaagcagtgccacccggacaccaagaagttcctgtgctcgctcttcgcccccgtctgcctcgatgacctagacgagaccatccagccatgccactcgctctgcgtgcaggtgaaggaccgctgcgccccggtcatgtccgccttcggcttcccctggcccgacatgcttgagtgcgaccgtttcccccaggacaacgacctttgcatccccctcgctagcagcgaccacctcctgccagccaccgaggaagctccaaaggtatgtgaagcctgcaaaaataaaaatgatgatgacaacgacataatggaaacgctttgtaaaaatgattttgcactgaaaataaaagtgaaggagataacctacatcaaccgagataccaaaatcatcctggagaccaagagcaagaccatttacaagctgaacggtgtgtccgaaagggacctgaagaaatcggtgctgtggctcaaagacagcttgcagtgcacctgtgaggagatgaacgacatcaacgcgccctatctggtcatgggacagaaacagggtggggagctggtgatcacctcggtgaagcggtggcagaaggggcagagagagttcaagcgcatctcccgcagcatccgcaagctgcagtgctagtcccggcatcctgatggctccgacaggcctgctccagagcacggctgaccatttctgctccgggatctcagctcccgttccccaagcacactcctagctgctccagtctcagcctgggcagcttccccctgccttttgcacgtttgcatccccagcatttcctgagttataaggccacaggagtggatagctgttttcacctaaaggaaaagcccacccgaatcttgtagaaatattcaaactaataaaatcatgaatatttttatgaagtttaaaaatagctcactttaaagctagttttgaataggtgcaactgtgacttgggtctggttggttgttgtttgttgttttgagtcagctgattttcacttcccactgaggttgtcataacatgcaaattgcttcaattttctctgtggcccaaacttgtgggtcacaaaccctgttgagataaagctggctgttatctcaacatcttcatcagctccagactgagactcagtgtctaagtcttacaacaattcatcattttataccttcaatgggaacttaaactgttacatgtatcacattccagctacaatacttccatttattagaagcacattaaccatttctatagcatgatttcttcaagtaaaaggcaaaagatataaattttataattgacttgagtactttaagccttgtttaaaacatttcttacttaacttttgcaaattaaacccattgtagcttacctgtaatatacatagtagtttacctttaaaagttgtaaaaatattgctttaaccaacactgtaaatatttcagataaacattatattcttgtatataaactttacatcctgttttacct

SEQ ID NO: 134363 - DNA, 888 bp, Artificial Sequence
  derived and/or modified sequence
atgctgcagggccccggcagcctgctgctgctgttcctggccagccactgctgcctgggcagcgccagaggcctgttcctgttcggccagcccgacttcagctacaagagaagcaactgcaagcccatccccgccaacctgcagctgtgccacggcatcgagtaccagaacatgagactgcccaacctgctgggccacgagaccatgaaggaggtgctggagcaggccggcgcctggatccccctggtgatgaagcagtgccaccccgacaccaagaagttcctgtgcagcctgttcgcccccgtgtgcctggacgacctggacgagaccatccagccctgccacagcctgtgcgtgcaggtgaaggacagatgcgcccccgtgatgagcgccttcggcttcccctggcccgacatgctggagtgcgacagattcccccaggacaacgacctgtgcatccccctggccagcagcgaccacctgctgcccgccaccgaggaggcccccaaggtgtgcgaggcctgcaagaacaagaacgacgacgacaacgacatcatggagaccctgtgcaagaacgacttcgccctgaagatcaaggtgaaggagatcacctacatcaacagagacaccaagatcatcctggagaccaagagcaagaccatctacaagctgaacggcgtgagcgagagagacctgaagaagagcgtgctgtggctgaaggacagcctgcagtgcacctgcgaggagatgaacgacatcaacgccccctacctggtgatgggccagaagcagggcggcgagctggtgatcaccagcgtgaagagatggcagaagggccagagagagttcaagagaatcagcagaagcatcagaaagctgcagtgctag

SEQ ID NO: 134364 - protein, 346 aa, Artificial Sequence
  derived and/or modified sequence
MFLSILVALCLWLHLALGVRGAPCEAVRIPMCRHMPWNITRMPNHLHHSTQENAILAIEQYEELVDVNCSAVLRFFLCAMYAPICTLEFLHDPIKPCKSVCQRARDDCEPLMKMYNHSWPESLACDELPVYDRGVCISPEAIVTDLPEDVKWIDITPDMMVQERPLDVDCKRLSPDRCKCKKVKPTLATYLSKNYSYVIHAKIKAVQRSGCNEVTTVVDVKEIFKSSSPIPRTQVPLITNSSCQCPHILPHQDVLIMCYEWRSRMMLLENCLVEKWRDQLSKRSIQWEERLQEQRRTVQDKKKTAGRTSRSNPPKPKGKPPAPKPASPKKNIKTRSAQKRTNPKRV

SEQ ID NO: 134365 - protein, 343 aa, Artificial Sequence
  derived and/or modified sequence
MRVAGREGRFLSAGVAAREGSAMFLSILVALCLWLHLALGVRGAPCEAVRIPMCRHMPWNITRMPNHLHHSTQENAMYAPICTLEFLHDPIKPCKSVCQRARDDCEPLMKMYNHSWPESLACDELPVYDRGVCISPEAIVTDLPEDVKWIDITPDMMVQERPLDVDCKRLSPDRCKCKKVKPTLATYLSKNYSYVIHAKIKAVQRSGCNEVTTVVDVKEIFKSSSPIPRTQVPLITNSSCQCPHILPHQDVLIMCYEWRSRMMLLENCLVEKWRDQLSKRSIQWEERLQEQRRTVQDKKKTAGRTSRSNPPKPKGKPPAPKPASPKKNIKTRSAQKRTNPKRV

SEQ ID NO: 134366 - DNA, 1041 bp, Artificial Sequence
  derived and/or modified sequence
atgttcctgagcatcctggtggccctgtgcctgtggctgcacctggccctgggcgtgagaggcgccccctgcgaggccgtgagaatccccatgtgcagacacatgccctggaacatcaccagaatgcccaaccacctgcaccacagcacccaggagaacgccatcctggccatcgagcagtacgaggagctggtggacgtgaactgcagcgccgtgctgagattcttcctgtgcgccatgtacgcccccatctgcaccctggagttcctgcacgaccccatcaagccctgcaagagcgtgtgccagagagccagagacgactgcgagcccctgatgaagatgtacaaccacagctggcccgagagcctggcctgcgacgagctgcccgtgtacgacagaggcgtgtgcatcagccccgaggccatcgtgaccgacctgcccgaggacgtgaagtggatcgacatcacccccgacatgatggtgcaggagagacccctggacgtggactgcaagagactgagccccgacagatgcaagtgcaagaaggtgaagcccaccctggccacctacctgagcaagaactacagctacgtgatccacgccaagatcaaggccgtgcagagaagcggctgcaacgaggtgaccaccgtggtggacgtgaaggagatcttcaagagcagcagccccatccccagaacccaggtgcccctgatcaccaacagcagctgccagtgcccccacatcctgccccaccaggacgtgctgatcatgtgctacgagtggagaagcagaatgatgctgctggagaactgcctggtggagaagtggagagaccagctgagcaagagaagcatccagtgggaggagagactgcaggagcagagaagaaccgtgcaggacaagaagaagaccgccggcagaaccagcagaagcaacccccccaagcccaagggcaagccccccgcccccaagcccgccagccccaagaagaacatcaagaccagaagcgcccagaagagaaccaaccccaagagagtgtag

SEQ ID NO: 134367 - DNA, 1032 bp, Artificial Sequence
  derived and/or modified sequence
atgagagtggccggcagagagggcagattcctgagcgccggcgtggccgccagagagggcagcgccatgttcctgagcatcctggtggccctgtgcctgtggctgcacctggccctgggcgtgagaggcgccccctgcgaggccgtgagaatccccatgtgcagacacatgccctggaacatcaccagaatgcccaaccacctgcaccacagcacccaggagaacgccatgtacgcccccatctgcaccctggagttcctgcacgaccccatcaagccctgcaagagcgtgtgccagagagccagagacgactgcgagcccctgatgaagatgtacaaccacagctggcccgagagcctggcctgcgacgagctgcccgtgtacgacagaggcgtgtgcatcagccccgaggccatcgtgaccgacctgcccgaggacgtgaagtggatcgacatcacccccgacatgatggtgcaggagagacccctggacgtggactgcaagagactgagccccgacagatgcaagtgcaagaaggtgaagcccaccctggccacctacctgagcaagaactacagctacgtgatccacgccaagatcaaggccgtgcagagaagcggctgcaacgaggtgaccaccgtggtggacgtgaaggagatcttcaagagcagcagccccatccccagaacccaggtgcccctgatcaccaacagcagctgccagtgcccccacatcctgccccaccaggacgtgctgatcatgtgctacgagtggagaagcagaatgatgctgctggagaactgcctggtggagaagtggagagaccagctgagcaagagaagcatccagtgggaggagagactgcaggagcagagaagaaccgtgcaggacaagaagaagaccgccggcagaaccagcagaagcaacccccccaagcccaagggcaagccccccgcccccaagcccgccagccccaagaagaacatcaagaccagaagcgcccagaagagaaccaaccccaagagagtgtag

SEQ ID NO: 134368 - DNA, 1041 bp, Artificial Sequence
  derived and/or modified sequence
atgtttctctccattctggttgccctgtgtttatggctacatctcgccctgggggtgcgcggcgcaccctgcgaagccgtgagaatccccatgtgtcgccacatgccttggaacataaccagaatgccaaatcacctccaccactctacccaggagaacgctatccttgcaattgagcagtatgaagagcttgtggacgtaaactgttctgcagttctcagattcttcctttgtgccatgtacgccccgatttgtaccctagagtttctgcacgatccaattaagccatgcaaatcggtatgccaaagggccagggatgattgtgagccgctgatgaagatgtacaaccacagctggccggagtcactggcctgtgatgaacttcctgtctacgaccgaggcgtctgtatcagtcccgaagcaatcgtgacagatctccctgaggatgtcaaatggattgatatcacacctgatatgatggtgcaggagagaccactcgacgttgattgcaaaagactgagccctgacaggtgtaaatgcaaaaaggtaaaaccaaccctggctacttacctgagtaaaaactactcctacgtgatacatgcaaagattaaagctgtgcagcgctctggatgcaacgaagtgaccacagtggttgacgtaaaagagatctttaaaagctcctctccaattcctaggacacaagtgccattgattacaaacagtagctgccaatgcccacatatcctgccacaccaggatgtcctcattatgtgttacgaatggagatcgagaatgatgttgctcgagaactgtcttgtcgagaagtggcgtgaccagctctccaaaagaagcattcagtgggaggagcggctacaggagcaacgtaggacagttcaagataaaaaaaaaaccgccggtcggacctcgcgatccaacccaccgaagcccaaaggcaaacctccagcacccaaaccagcaagtcctaagaaaaacattaagaccagaagcgcccagaaacggaccaaccccaaacgggtgtag

SEQ ID NO: 134369 - DNA, 1032 bp, Artificial Sequence
  derived and/or modified sequence
atgcgcgtggcaggccgggaaggccggttcctgtccgcaggagttgctgcgagggaaggtagcgccatgttcctgtccatacttgtcgcactctgtctctggctgcacctggccctcggggtcagaggcgcaccttgtgaagctgtgcggatcccgatgtgccggcacatgccttggaatataacaaggatgccaaatcatcttcaccattcgacgcaggaaaacgctatgtatgcccccatctgtactctggagtttcttcacgaccctatcaagccttgtaaaagtgtctgccagcgagcccgtgatgattgtgaacctttaatgaaaatgtataaccatagttggccggaatccctggcctgcgacgagttgccggtctatgatcgcggagtatgcattagtcccgaagccattgtgaccgacctgccagaagacgttaaatggatcgacatcacccctgatatgatggtacaggagaggcctctcgatgtggactgcaaaagactaagtcctgacagatgcaagtgcaaaaaggtgaaaccaaccctcgcgacatatttgagtaaaaactacagttatgtcatccacgcaaaaatcaaagcagtccaacgttcgggctgcaacgaagtgactacagtggtagacgtgaaagaaatcttcaagtcaagtagtcccatccctcggacacaggtgccgctgattaccaattctagctgccagtgccctcatatcctaccccatcaggacgtcctgatcatgtgctatgagtggaggtctcgcatgatgctcctggaaaattgtcttgtagagaaatggagggaccagttatccaagcggagcatccaatgggaggaacggctgcaagagcaacgtagaaccgtgcaggataagaagaaaaccgccggaaggacttctagaagcaaccctccaaaaccgaaagggaagccgcccgctccaaagcctgccagtcctaagaagaacataaagactagaagcgcgcaaaagcggactaatcccaaaagagtgtag

SEQ ID NO: 134370 - DNA, 1041 bp, Artificial Sequence
  derived and/or modified sequence
atgttcctgagcatcctggtggccctgtgcctgtggctgcacctggccctgggcgtgcggggggccccctgtgaggccgtgcgcatccccatgtgccgccacatgccctggaacatcaccaggatgcccaaccacctgcaccacagcacccaggagaatgccatcctggccatcgagcagtatgaggagctggtggatgtgaactgcagcgctgtgctgcgcttcttcctgtgtgccatgtatgcccccatctgcaccctggagttcctgcatgaccccatcaagccctgcaagtctgtgtgccagagggccagagatgactgtgagcccctgatgaagatgtacaaccacagctggccagagagcctggcctgtgatgagctgcctgtgtatgaccggggcgtgtgcatcagccctgaggccatcgtgacagacctgcctgaagatgtgaagtggattgacatcaccccagacatgatggtgcaggagcggcccctggatgtggactgcaagaggctgagcccagaccgctgcaagtgcaagaaggtgaagcccaccctggccacctacctgagcaagaactacagctatgtgatccacgccaagatcaaggctgtgcagaggagcggctgcaatgaggtgaccaccgtggtggatgtgaaggagatcttcaagagcagcagccccatccccaggacccaggtgcccctcatcaccaacagcagctgccagtgcccccacatcctgccccaccaggatgtgctgatcatgtgctatgagtggaggagcaggatgatgctgctggagaactgcctggtggagaagtggagggaccagctgagcaagaggagcatccagtgggaggagcggctgcaggagcagaggagaacagtgcaggacaagaagaagacagctggccgcaccagccgcagcaacccccccaagcccaagggcaagcccccagcccccaagccagccagccccaagaagaacatcaagaccaggtctgcccagaagaggaccaaccccaagagggtgtag

SEQ ID NO: 134371 - DNA, 1032 bp, Artificial Sequence
  derived and/or modified sequence
atgagggtggccggccgggagggccgcttcctgtctgctggggtggccgcccgggagggcagcgccatgttcctgagcatcctggtggccctgtgcctgtggctgcacctggccctgggcgtgcggggggccccctgtgaggccgtgcgcatccccatgtgccgccacatgccctggaacatcaccaggatgcccaaccacctgcaccacagcacccaggagaatgccatgtatgcccccatctgcaccctggagttcctgcatgaccccatcaagccctgcaagtctgtgtgccagagggccagagatgactgtgagcccctgatgaagatgtacaaccacagctggccagagagcctggcctgtgatgagctgcctgtgtatgacagaggagtgtgcatcagccctgaggccatcgtgacagacctgcctgaagatgtgaagtggattgacatcaccccagacatgatggtgcaggagcggcccctggatgtggactgcaagaggctgagcccagaccgctgcaagtgcaagaaggtgaagcccaccctggccacctacctgagcaagaactacagctatgtgattcatgccaagatcaaggctgtgcagaggagcggctgcaatgaggtgaccaccgtggtggatgtgaaggagatcttcaagagcagcagccccatccccaggacccaggtgcccctcatcaccaacagcagctgccagtgcccccacatcctgccccaccaggatgtgctgatcatgtgctatgagtggaggagcaggatgatgctgctggagaactgcctggtggagaagtggagggaccagctgagcaagaggagcatccagtgggaggagcggctgcaggagcagaggagaacagtgcaggacaagaagaagacagctggccgcaccagccgcagcaacccccccaagcccaagggcaagcccccagcccccaagccagccagccccaagaagaacatcaagaccaggtctgcccagaagaggaccaaccccaagagggtgtag

SEQ ID NO: 134372 - DNA, 1041 bp, Artificial Sequence
  derived and/or modified sequence
atgttcctgagcatcctggtggccctgtgcctgtggctgcacctggccctcggagtgcgaggtgcgccctgtgaggcagtcagaataccaatgtgcaggcacatgccctggaatatcacccggatgcctaaccacttacaccacagtactcaggaaaacgccatcctggcaatcgagcaatatgaggaacttgtagacgtgaactgtagtgcagtcttgcgattttttttatgcgccatgtatgcaccaatatgtactctggaatttttgcacgatccaattaagccatgcaagagtgtgtgccaaagagccagggatgattgtgaaccactgatgaaaatgtataaccacagctggcccgaaagcttggcgtgcgacgagctgcccgtgtatgaccgcggcgtgtgtatttcaccggaggccatagtgactgacctgccagaagatgtgaagtggattgacataacccctgacatgatggtgcaggagagacccctggatgttgactgcaaacggctctcacccgaccggtgcaaatgtaagaaagttaagccaacattagcaacctacctatccaagaactatagttatgtcatccacgctaaaatcaaggccgtgcagcgaagcgggtgcaacgaagtgaccaccgtagtagacgtcaaggaaatcttcaagtccagcagcccaatcccccgcacacaggtgccgctgattaccaactcttcctgtcagtgcccacacatcctgcctcatcaggacgtgctgatcatgtgttacgagtggcgctcccgcatgatgctgctcgagaattgcctggtggagaagtggagagaccagctgtccaagcgctccatccagtgggaggagcgtttgcaggagcagcgtagaacagtacaggacaaaaagaaaaccgctggccggacttctagaagcaatccaccaaaacctaagggaaagcctcccgcacccaaaccagcgagcccaaagaagaacataaaaacgcggtccgctcaaaagcgcacaaaccccaagcgggtgtag

SEQ ID NO: 134373 - DNA, 1032 bp, Artificial Sequence
  derived and/or modified sequence
atgcgggtggccggccgggagggccggttcctgagcgccggcgtggcagccagggagggaagtgcaatgtttctctcaattctggtggccctgtgcctgtggcttcacttggccctgggcgttcggggggccccctgtgaggctgtgcggatcccgatgtgcagacatatgccatggaatatcacgcggatgcccaaccatctccatcactccacccaggaaaatgcaatgtacgccccaatctgtacactggagttcctgcatgaccccataaagccttgtaaaagtgtctgtcaaagagcacgggatgactgcgagcccttaatgaagatgtataaccatagttggcctgagagccttgcctgtgacgaactgccagtctatgaccgcggtgtttgcatctcaccggaggccatcgtgacagacctccctgaggatgtgaagtggatagatattacgccagacatgatggtgcaggagagaccattagatgtggactgcaagcgactctctccggatcggtgtaaatgtaagaaggtgaaacccaccctggctacatatctctcgaagaattattcatacgtgatccatgctaagatcaaggccgtgcagcggtccggctgcaacgaggtcactactgttgtcgacgtgaaagagatctttaaatctagttcacccatacctcggactcaggtcccccttatcaccaatagttcctgccagtgtccgcacattctcccccaccaagatgtcttgatcatgtgctacgaatggcgctcacgcatgatgctgttagagaactgcctagtcgaaaagtggagggatcagttaagtaagcggtctatacaatgggaggagaggctgcaggagcagcgccgaaccgtacaggataagaagaagaccgctgggaggacttcccggtcgaacccacccaaacccaaaggaaaaccccccgcccccaaacccgccagtcctaagaagaacattaaaactaggagcgcccaaaagcgtaccaaccctaaacgtgtgtag

SEQ ID NO: 134374 - DNA, 1041 bp, Artificial Sequence
  derived and/or modified sequence
atgttcctgtcgatccttgtggcactatgcctgtggctgcacctcgcactcggtgttcgaggcgcaccctgcgaagctgtcaggattccaatgtgtaggcatatgccgtggaacatcacaaggatgccaaatcacttgcatcactcgacccaggaaaatgcaattttagcaattgagcagtatgaggagttggtggatgtgaattgttccgcagttttgaggtttttcctctgcgccatgtatgctcccatttgtacactggagtttctacacgacccaatcaaaccttgcaaatccgtgtgtcagcgcgctcgggacgactgtgaaccactgatgaagatgtacaaccattcttggccagaatccttagcatgtgacgaattgcccgtctacgatagaggggtgtgcatctctcctgaggccatcgtgacagatctgcccgaggacgttaagtggatcgacataacaccagacatgatggttcaggaacggccactggacgtggactgtaaacgcctttcccctgatagatgcaagtgtaaaaaggtgaaacctacattggccacctatctatccaaaaactactcgtatgtgatccacgctaaaattaaggccgtgcaacgatctggttgtaacgaggtgaccacagtggtagacgtaaaagaaatattcaagagttcttcccctataccgaggacgcaggtacctttgatcacaaatagcagttgtcagtgccctcacattttgccacaccaggatgtgcttattatgtgctacgaatggcgttcgagaatgatgctgctggaaaactgcctggtcgaaaaatggcgcgatcaattaagcaaaagaagcatccaatgggaggagaggctacaagaacaacggcgaaccgtgcaggataaaaaaaaaacagccggtcggacctctagatctaatccccctaaacccaaaggcaagccaccagcacccaagcctgcttcacccaaaaagaatatcaagacaagatccgcccaaaagcggacaaacccaaaaagagtatag

SEQ ID NO: 134375 - DNA, 1032 bp, Artificial Sequence
  derived and/or modified sequence
atgcgtgtggccggacgtgagggcagatttctctcggccggtgtcgccgcaagagaaggatctgctatgttcttgtctatcctggtggccctgtgtctctggcttcacttagcactgggagtgcgcggtgccccttgcgaagccgtgcgcatacctatgtgccgacatatgccatggaatattacccgcatgcctaaccacctgcatcattctacacaggaaaatgccatgtacgccccaatctgtacgttggagtttctgcatgatcccatcaaaccctgcaaaagcgtttgccagcgcgcaagagacgactgcgaaccactgatgaaaatgtataatcacagttggcccgaatccctggcatgtgacgagctcccggtctatgaccggggtgtgtgtatttcccccgaagctattgtaaccgatctcccagaggacgtcaagtggattgacatcaccccagatatgatggtccaagagcgaccccttgacgttgactgcaagcgcctgtcgcctgataggtgcaaatgtaagaaggttaaacctacacttgccacatatctgagcaaaaattatagttacgttatccacgccaaaatcaaggccgttcagcgatccggctgtaacgaagtgacaacggtggtcgatgtaaaagaaatatttaaatccagctcgcccattcccagaacccaggtgcccctgatcaccaatagttcctgtcagtgtcctcacatcctcccacaccaagacgtcctcataatgtgttacgagtggcggagccggatgatgctgctcgagaactgtttagttgagaaatggcgcgaccaattgagcaaaagatcgattcaatgggaggagaggcttcaggagcaaaggagaacagttcaagacaaaaaaaagacggcaggccgtacctcccggtccaacccacccaaacctaagggcaaacctcctgctcctaagcctgcgtctcccaagaaaaatatcaagactcgcagtgctcagaagcgcaccaacccaaagcgtgtctag

SEQ ID NO: 134376 - DNA, 1041 bp, Artificial Sequence
  derived and/or modified sequence
atgtttctctctattttggtggccctgtgtttatggctccacctcgccctgggagtgcggggcgcgccatgcgaagcagttagaatccctatgtgtaggcacatgccctggaatatcacccggatgcccaaccatcttcatcatagtacccaggagaacgccatcttggcaattgaacaatacgaggaactggtagacgttaactgttctgcagttttgaggttcttcttatgcgcgatgtacgctccaatctgtactttggagttcctgcatgacccgattaagccgtgcaagagcgtgtgccagcgagccagggacgattgtgagcccctcatgaagatgtataaccacagctggcccgagtctttggcttgtgacgaactgccagtctacgataggggagtttgcatcagccctgaagctatagtcacggacttgcctgaagacgtgaaatggattgacatcacgcccgacatgatggtccaggaaagaccgctcgatgttgactgtaagcgactttctcctgaccgctgtaaatgtaagaaagtgaagccaaccctggcaacctacctgtctaaaaactactcctatgtgattcatgctaagatcaaagcggtgcagcgcagtggatgcaacgaagtgacaaccgtggtagatgttaaagaaattttcaagagctcctctcccatccctaggacacaggtccccttgattactaattcttcttgccagtgcccccacatcctcccccatcaagatgtgttgataatgtgttacgaatggcggagtaggatgatgctcctcgagaactgtctggtcgagaaatggcgtgaccagctgtctaaaagatcgattcagtgggaagagaggctgcaggaacagcgccggacggttcaagataagaagaagacagctgggcgcacaagtcgctctaacccgcctaagcctaagggaaaaccgcccgctccaaagcccgcttcaccaaaaaaaaacattaagactcggtctgcccaaaaacgcaccaatcccaaacgggtgtag

SEQ ID NO: 134377 - DNA, 1032 bp, Artificial Sequence
  derived and/or modified sequence
atgagggtagccggcagggaaggtagatttctgtccgctggggtcgcagctcgggagggatcggccatgttcctgagcattttagttgctttgtgcctgtggctgcatctcgccctgggcgtaaggggggctccatgcgaagctgtgcgtattccgatgtgccggcatatgccatggaacattactcgcatgcccaatcaccttcatcattcaacacaagagaatgccatgtacgcacccatctgcaccctcgaattcttgcatgaccccattaaaccttgtaagagtgtctgccagagggcccgggatgactgtgagcctttgatgaaaatgtataaccattcctggccagaatcacttgcatgcgacgaactgccagtgtacgaccggggtgtttgcatctctcccgaggccatcgttaccgacctgccagaggacgtgaagtggatcgacatcacccctgacatgatggttcaagaacgcccattagatgttgactgcaaacgcttgagtccagaccgatgtaaatgcaaaaaggtgaaacctacgttagcgacctatttgagcaaaaattacagctacgtcatccacgccaagattaaagcggtgcaaagatccggatgcaacgaagtgacaacagtcgttgacgttaaagaaatttttaaaagcagctccccgatcccccggactcaagtcccactcattacaaacagctcctgtcaatgtcctcatatactgccccaccaggatgttctgattatgtgttacgaatggaggagtagaatgatgctgttagaaaactgtctggtggaaaagtggcgcgaccagttgtcgaagcgcagtattcagtgggaggagcggctccaggagcagcgcaggaccgtccaggacaaaaagaagacagccggaagaactagtcgttccaacccccccaaaccaaaagggaagcctcccgcaccaaaaccagctagcccaaaaaaaaacataaaaactcgctccgcgcagaaaagaacaaacccgaaaagagtgtag

SEQ ID NO: 134378 - DNA, 1041 bp, Artificial Sequence
  derived and/or modified sequence
atgtttctctcaatccttgtggccctgtgcctgtggttacatcttgctcttggcgttcggggtgcaccctgtgaggcagtaaggattcctatgtgtagacatatgccatggaatatcacaagaatgcccaatcacttacatcactcaacccaggagaacgccatcctcgcgatcgagcagtatgaagagctggtggacgtcaactgttcggctgttctacgcttcttcttatgtgccatgtatgcccccatctgcaccctggaattcctccacgatcctatcaaaccctgtaaaagcgtctgccagcgtgctagagacgattgcgaacccctaatgaagatgtataaccattcctggcccgagtccctcgcctgcgatgagctgcccgtgtacgacagaggagtctgcattagtcccgaggccatcgtgaccgacttgccggaagacgtcaagtggatcgatattactccagatatgatggtgcaggaacgtcccctggatgtcgattgtaagcgcctttctcccgacagatgcaagtgtaaaaaagtcaagcccactttagccacttacttatcgaagaattacagctatgttatacatgccaagataaaggctgtgcagcgctctgggtgtaacgaggtgactacagttgttgatgtgaaagaaatcttcaagagttcttcccctatccctagaacccaggtgccactcattacgaactcctcatgtcagtgccctcacatacttccacatcaggacgtgctaattatgtgctatgaatggcgatcgagaatgatgctgctggaaaactgtttagtcgagaaatggcgcgatcagctgtccaaacggtcgattcaatgggaagaaagattgcaagaacaacgaaggaccgtgcaggacaagaagaaaactgccggccggacaagccgatctaatccccctaaacctaaaggcaagccacccgcccccaagcccgccagccccaaaaaaaatattaagacaagatctgcccagaagcgtacaaatccaaagagagtgtag

SEQ ID NO: 134379 - DNA, 1032 bp, Artificial Sequence
  derived and/or modified sequence
atgcgggtcgcaggaagggaggggagattcctttctgcaggtgtggcagctagagagggcagcgcaatgttcctgtctattttagttgcgctctgcttgtggcttcatctcgccctgggggttagaggcgcaccctgtgaagcagtcagaatccctatgtgcagacatatgccatggaacattaccagaatgcccaaccacttacaccattccactcaggagaacgcaatgtatgccccgatttgtacgttggagtttctgcacgatccaatcaaaccctgtaagtcagtgtgccagcgggcccgagatgattgtgaaccgctaatgaaaatgtacaaccactcctggccagaaagtttagcctgcgatgagctgcctgtgtatgatcgcggcgtgtgcattagtcccgaggccatcgtgactgatttaccggaagatgttaaatggatagatattactcccgacatgatggtgcaggagcgcccgctggacgtagattgcaaaagactctcgcctgaccggtgtaaatgcaagaaagtgaagcctacactcgccacatacctctccaagaattacagctacgtaatccacgctaaaatcaaggcggtgcagagaagcgggtgcaatgaggttacaaccgtggttgacgtcaaggagatattcaagtcctcgagccctattcctcgaacccaggtcccccttattactaatagcagttgccaatgtccccatatccttccccatcaagatgttctgattatgtgctacgaatggcgatccaggatgatgttgttagaaaactgcctggtggagaaatggagggatcagctatccaaacgctctatacagtgggaagagaggttgcaggaacagagaagaacagtgcaggataagaaaaaaaccgccggccgcacctctagaagtaatccacctaagcccaaagggaagccaccagcaccaaagccagcaagtccaaaaaaaaatatcaaaactagatcagcccaaaaacgtaccaatccaaaacgcgtctag

SEQ ID NO: 134380 - DNA, 2957 bp, Artificial Sequence
  derived and/or modified sequence
gggggagcccgcgccgcggctgcagctgccaagggagcgttccgagcccacgtcaggggaggtgtcgggataaatagggtcccgcaatggccgtggctggctgcgctccgagctgcggagtccgggactggagctgcccgggcgggttcgcgccccgaaggctgagagctggcgctgctcgtgccctgtgtgccagacggcggagctccgcggccggaccccgcggccccgctttgctgccgactggagtttgggggaagaaactctcctgcgccccagaggatttcttcctcggcgaagggacagcgaaagatgagggtggcaggaagagaagggcgctttctgtctgccggggtcgcagcgcgagagggcagtgccatgttcctctccatcctagtggcgctgtgcctgtggctgcacctggcgctgggcgtgcgcggcgcgccctgcgaggcggtgcgcatccctatgtgccggcacatgccctggaacatcacgcggatgcccaaccacctgcaccacagcacgcaggagaacgccatcctggccatcgagcagtacgaggagctggtggacgtgaactgcagcgccgtgctgcgcttcttcctctgtgccatgtacgcgcccatttgcaccctggagttcctgcacgaccctatcaagccgtgcaagtcggtgtgccaacgcgcgcgcgacgactgcgagcccctcatgaagatgtacaaccacagctggcccgaaagcctggcctgcgacgagctgcctgtctatgaccgtggcgtgtgcatctcgcctgaagccatcgtcacggacctcccggaggatgttaagtggatagacatcacaccagacatgatggtacaggaaaggcctcttgatgttgactgtaaacgcctaagccccgatcggtgcaagtgtaaaaaggtgaagccaactttggcaacgtatctcagcaaaaactacagctatgttattcatgccaaaataaaagctgtgcagaggagtggctgcaatgaggtcacaacggtggtggatgtaaaagagatcttcaagtcctcatcacccatccctcgaactcaagtcccgctcattacaaattcttcttgccagtgtccacacatcctgccccatcaagatgttctcatcatgtgttacgagtggcgctcaaggatgatgcttcttgaaaattgcttagttgaaaaatggagagatcagcttagtaaaagatccatacagtgggaagagaggctgcaggaacagcggagaacagttcaggacaagaagaaaacagccgggcgcaccagtcgtagtaatccccccaaaccaaagggaaagcctcctgctcccaaaccagccagtcccaagaagaacattaaaactaggagtgcccagaagagaacaaacccgaaaagagtgtgagctaactagtttccaaagcggagacttccgacttccttacaggatgaggctgggcattgcctgggacagcctatgtaaggccatgtgccccttgccctaacaactcactgcagtgctcttcatagacacatcttgcagcatttttcttaaggctatgcttcagtttttctttgtaagccatcacaagccatagtggtaggtttgccctttggtacagaaggtgagttaaagctggtggaaaaggcttattgcattgcattcagagtaacctgtgtgcatactctagaagagtagggaaaataatgcttgttacaattcgacctaatatgtgcattgtaaaataaatgccatatttcaaacaaaacacgtaatttttttacagtatgttttattaccttttgatatctgttgttgcaatgttagtgatgttttaaaatgtgatcgaaaatataatgcttctaagaaggaacagtagtggaatgaatgtctaaaagatctttatgtgtttatggtctgcagaaggatttttgtgatgaaaggggattttttgaaaaatctagagaagtagcatatggaaaactataatgtgtcttttttacaatgacttcagctctgtttttagctagaaactctaaaaacaaaaataataataaagaaaaataaataaaaaggagaggcagacaatgtctggattcctgttttttggttacctgatttcatgatcatgatgcttcttgtcaacaccctcttaagcagcaccagaaacagtgagtttgtctgtaccattaggagttaggtactaattagttggctaatgctcaagtattttatacccacaagagaggtatgtcactcatcttacttcccaggacatccaccctgagaataatttgacaagcttaaaaatggccttcatgtgagtgccaaattttgttttcttcatttaaatattttctttgcctaaatacatgtgagaggagttaaatataaatgtacagagaggaaagttgaggttccacctctgaaatgagaattacttgacagttgggatactttaatcagaaaaaaagaacttatcttgcagcattttatcaacaaatttcataattgtggacaattggaggcatttattttaaaaaacaattttattggccttttgctaacacagtaagcatgtattctctataaggcattcaataaatgcacaacgcccaaaggaaataaaatcctatctaatcctactctccactacacagaggtaatcactattagtattttggcatattattctccaggtgtttcttatgcacttataaaatgatttgaacaaataaaactaggaacctgctatacatgtgtttcataacctgcctcctttgcttggccctttattgagataagttttcctgtcaagaaagcagaaaccatctcatttctaacagctgtgttatattccatagtatgcattactcaacaaactgttgtgctattggatacttaggtggtttcttcactgacaatactgaataaacatctca

SEQ ID NO: 134381 - DNA, 1532 bp, Artificial Sequence
  derived and/or modified sequence
tggctgcgctccgagctgcggagtccgggactggagctgcccgggcgggttcgcgccccgaaggctgagagctggcgctgctcgtgccctgtgtgccagacggcggagctccgcggccggaccccgcggccccgctttgctgccgactggagtttgggggaagaaactctcctgcgccccagaggatttcttcctcggcgaagggacagcgaaagatgagggtggcaggaagagaagggcgctttctgtctgccggggtcgcagcgcgagagggcagtgccatgttcctctccatcctagtggcgctgtgcctgtggctgcacctggcgctgggcgtgcgcggcgcgccctgcgaggcggtgcgcatccctatgtgccggcacatgccctggaacatcacgcggatgcccaaccacctgcaccacagcacgcaggagaacgccatgtacgcgcccatttgcaccctggagttcctgcacgaccctatcaagccgtgcaagtcggtgtgccaacgcgcgcgcgacgactgcgagcccctcatgaagatgtacaaccacagctggcccgaaagcctggcctgcgacgagctgcctgtctatgaccgtggcgtgtgcatctcgcctgaagccatcgtcacggacctcccggaggatgttaagtggatagacatcacaccagacatgatggtacaggaaaggcctcttgatgttgactgtaaacgcctaagccccgatcggtgcaagtgtaaaaaggtgaagccaactttggcaacgtatctcagcaaaaactacagctatgttattcatgccaaaataaaagctgtgcagaggagtggctgcaatgaggtcacaacggtggtggatgtaaaagagatcttcaagtcctcatcacccatccctcgaactcaagtcccgctcattacaaattcttcttgccagtgtccacacatcctgccccatcaagatgttctcatcatgtgttacgagtggcgctcaaggatgatgcttcttgaaaattgcttagttgaaaaatggagagatcagcttagtaaaagatccatacagtgggaagagaggctgcaggaacagcggagaacagttcaggacaagaagaaaacagccgggcgcaccagtcgtagtaatccccccaaaccaaagggaaagcctcctgctcccaaaccagccagtcccaagaagaacattaaaactaggagtgcccagaagagaacaaacccgaaaagagtgtgagctaactagtttccaaagcggagacttccgacttccttacaggatgaggctgggcattgcctgggacagcctatgtaaggccatgtgccccttgccctaacaactcactgcagtgctcttcatagacacatcttgcagcatttttcttaaggctatgcttcagtttttctttgtaagccatcacaagccatagtggtaggtttgccctttggtacagaaggtgagttaaagctggtggaaaaggcttattgcattgcattcagagtaacctgtgtgcatactcta

SEQ ID NO: 134382 - RNA, 1041 nt, Artificial Sequence
  derived and/or modified sequence
auguuucucucuauuuugguggcccuguguuuauggcuccaccucgcccugggagugcggggcgcgccaugcgaagcaguuagaaucccuauguguaggcacaugcccuggaauaucacccggaugcccaaccaucuucaucauaguacccaggagaacgccaucuuggcaauugaacaauacgaggaacugguagacguuaacuguucugcaguuuugagguucuucuuaugcgcgauguacgcuccaaucuguacuuuggaguuccugcaugacccgauuaagccgugcaagagcgugugccagcgagccagggacgauugugagccccucaugaagauguauaaccacagcuggcccgagucuuuggcuugugacgaacugccagucuacgauaggggaguuugcaucagcccugaagcuauagucacggacuugccugaagacgugaaauggauugacaucacgcccgacaugaugguccaggaaagaccgcucgauguugacuguaagcgacuuucuccugaccgcuguaaauguaagaaagugaagccaacccuggcaaccuaccugucuaaaaacuacuccuaugugauucaugcuaagaucaaagcggugcagcgcaguggaugcaacgaagugacaaccgugguagauguuaaagaaauuuucaagagcuccucucccaucccuaggacacagguccccuugauuacuaauucuucuugccagugcccccacauccucccccaucaagauguguugauaauguguuacgaauggcggaguaggaugaugcuccucgagaacugucuggucgagaaauggcgugaccagcugucuaaaagaucgauucagugggaagagaggcugcaggaacagcgccggacgguucaagauaagaagaagacagcugggcgcacaagucgcucuaacccgccuaagccuaagggaaaaccgcccgcuccaaagcccgcuucaccaaaaaaaaacauuaagacucggucugcccaaaaacgcaccaaucccaaacggguguag

SEQ ID NO: 134383 - RNA, 1032 nt, Artificial Sequence
  derived and/or modified sequence
augaggguagccggcagggaagguagauuucuguccgcuggggucgcagcucgggagggaucggccauguuccugagcauuuuaguugcuuugugccuguggcugcaucucgcccugggcguaaggggggcuccaugcgaagcugugcguauuccgaugugccggcauaugccauggaacauuacucgcaugcccaaucaccuucaucauucaacacaagagaaugccauguacgcacccaucugcacccucgaauucuugcaugaccccauuaaaccuuguaagagugucugccagagggcccgggaugacugugagccuuugaugaaaauguauaaccauuccuggccagaaucacuugcaugcgacgaacugccaguguacgaccgggguguuugcaucucucccgaggccaucguuaccgaccugccagaggacgugaaguggaucgacaucaccccugacaugaugguucaagaacgcccauuagauguugacugcaaacgcuugaguccagaccgauguaaaugcaaaaaggugaaaccuacguuagcgaccuauuugagcaaaaauuacagcuacgucauccacgccaagauuaaagcggugcaaagauccggaugcaacgaagugacaacagucguugacguuaaagaaauuuuuaaaagcagcuccccgaucccccggacucaagucccacucauuacaaacagcuccugucaauguccucauauacugccccaccaggauguucugauuauguguuacgaauggaggaguagaaugaugcuguuagaaaacugucugguggaaaaguggcgcgaccaguugucgaagcgcaguauucagugggaggagcggcuccaggagcagcgcaggaccguccaggacaaaaagaagacagccggaagaacuagucguuccaacccccccaaaccaaaagggaagccucccgcaccaaaaccagcuagcccaaaaaaaaacauaaaaacucgcuccgcgcagaaaagaacaaacccgaaaagaguguag

SEQ ID NO: 134384 - RNA, 1041 nt, Artificial Sequence
  derived and/or modified sequence
auguuucucucaauccuuguggcccugugccugugguuacaucuugcucuuggcguucggggugcacccugugaggcaguaaggauuccuauguguagacauaugccauggaauaucacaagaaugcccaaucacuuacaucacucaacccaggagaacgccauccucgcgaucgagcaguaugaagagcugguggacgucaacuguucggcuguucuacgcuucuucuuaugugccauguaugcccccaucugcacccuggaauuccuccacgauccuaucaaacccuguaaaagcgucugccagcgugcuagagacgauugcgaaccccuaaugaagauguauaaccauuccuggcccgagucccucgccugcgaugagcugcccguguacgacagaggagucugcauuagucccgaggccaucgugaccgacuugccggaagacgucaaguggaucgauauuacuccagauaugauggugcaggaacguccccuggaugucgauuguaagcgccuuucucccgacagaugcaaguguaaaaaagucaagcccacuuuagccacuuacuuaucgaagaauuacagcuauguuauacaugccaagauaaaggcugugcagcgcucuggguguaacgaggugacuacaguuguugaugugaaagaaaucuucaagaguucuuccccuaucccuagaacccaggugccacucauuacgaacuccucaugucagugcccucacauacuuccacaucaggacgugcuaauuaugugcuaugaauggcgaucgagaaugaugcugcuggaaaacuguuuagucgagaaauggcgcgaucagcuguccaaacggucgauucaaugggaagaaagauugcaagaacaacgaaggaccgugcaggacaagaagaaaacugccggccggacaagccgaucuaaucccccuaaaccuaaaggcaagccacccgcccccaagcccgccagccccaaaaaaaauauuaagacaagaucugcccagaagcguacaaauccaaagagaguguag

SEQ ID NO: 134385 - RNA, 1032 nt, Artificial Sequence
  derived and/or modified sequence
augcgggucgcaggaagggaggggagauuccuuucugcagguguggcagcuagagagggcagcgcaauguuccugucuauuuuaguugcgcucugcuuguggcuucaucucgcccuggggguuagaggcgcacccugugaagcagucagaaucccuaugugcagacauaugccauggaacauuaccagaaugcccaaccacuuacaccauuccacucaggagaacgcaauguaugccccgauuuguacguuggaguuucugcacgauccaaucaaacccuguaagucagugugccagcgggcccgagaugauugugaaccgcuaaugaaaauguacaaccacuccuggccagaaaguuuagccugcgaugagcugccuguguaugaucgcggcgugugcauuagucccgaggccaucgugacugauuuaccggaagauguuaaauggauagauauuacucccgacaugauggugcaggagcgcccgcuggacguagauugcaaaagacucucgccugaccgguguaaaugcaagaaagugaagccuacacucgccacauaccucuccaagaauuacagcuacguaauccacgcuaaaaucaaggcggugcagagaagcgggugcaaugagguuacaaccgugguugacgucaaggagauauucaaguccucgagcccuauuccucgaacccaggucccccuuauuacuaauagcaguugccaauguccccauauccuuccccaucaagauguucugauuaugugcuacgaauggcgauccaggaugauguuguuagaaaacugccugguggagaaauggagggaucagcuauccaaacgcucuauacagugggaagagagguugcaggaacagagaagaacagugcaggauaagaaaaaaaccgccggccgcaccucuagaaguaauccaccuaagcccaaagggaagccaccagcaccaaagccagcaaguccaaaaaaaaauaucaaaacuagaucagcccaaaaacguaccaauccaaaacgcgucuag

SEQ ID NO: 134386 - protein, 317 aa, Artificial Sequence
  derived and/or modified sequence
MRAAAAGGGVRTAALALLLGALHWAPARCEEYDYYGWQAEPLHGRSYSKPPQCLDIPADLPLCHTVGYKRMRLPNLLEHESLAEVKQQASSWLPLLAKRCHSDTQVFLCSLFAPVCLDRPIYPCRSLCEAVRAGCAPLMEAYGFPWPEMLHCHKFPLDNDLCIAVQFGHLPATAPPVTKICAQCEMEHSADGLMEQMCSSDFVVKMRIKEIKIENGDRKLIGAQKKKKLLKPGPLKRKDTKRLVLHMKNGAGCPCPQLDSLAGSFLVMGRKVDGQLLLMAVYRWDKKNKEMKFAVKFMFSYPCSLYYPFFYGAAEPH

SEQ ID NO: 134387 - DNA, 954 bp, Artificial Sequence
  derived and/or modified sequence
atgagagccgccgccgccggcggcggcgtgagaaccgccgccctggccctgctgctgggcgccctgcactgggcccccgccagatgcgaggagtacgactactacggctggcaggccgagcccctgcacggcagaagctacagcaagcccccccagtgcctggacatccccgccgacctgcccctgtgccacaccgtgggctacaagagaatgagactgcccaacctgctggagcacgagagcctggccgaggtgaagcagcaggccagcagctggctgcccctgctggccaagagatgccacagcgacacccaggtgttcctgtgcagcctgttcgcccccgtgtgcctggacagacccatctacccctgcagaagcctgtgcgaggccgtgagagccggctgcgcccccctgatggaggcctacggcttcccctggcccgagatgctgcactgccacaagttccccctggacaacgacctgtgcatcgccgtgcagttcggccacctgcccgccaccgccccccccgtgaccaagatctgcgcccagtgcgagatggagcacagcgccgacggcctgatggagcagatgtgcagcagcgacttcgtggtgaagatgagaatcaaggagatcaagatcgagaacggcgacagaaagctgatcggcgcccagaagaagaagaagctgctgaagcccggccccctgaagagaaaggacaccaagagactggtgctgcacatgaagaacggcgccggctgcccctgcccccagctggacagcctggccggcagcttcctggtgatgggcagaaaggtggacggccagctgctgctgatggccgtgtacagatgggacaagaagaacaaggagatgaagttcgccgtgaagttcatgttcagctacccctgcagcctgtactaccccttcttctacggcgccgccgagccccactag

SEQ ID NO: 134388 - DNA, 954 bp, Artificial Sequence
  derived and/or modified sequence
atgagagccgccgccgcgggaggtggcgttcgaaccgctgccctagcactgttactgggtgctcttcactgggcacctgctcgttgcgaggagtacgactactatggctggcaggcggagcctctgcacggacgtagttattctaagcctccccagtgtctggatatcccagctgacctgccactgtgtcatacagttggctacaagcggatgcggctaccgaatctcctggagcatgaatccttagcagaggtgaaacaacaagcatccagctggcttcctctcttggctaagcgttgccacagtgatacccaggtttttctctgctcactctttgcccccgtctgcctggatcgccctatctacccatgccgcagtctgtgcgaggccgtccgggccgggtgcgcccccctgatggaggcatacgggtttccttggccagaaatgctgcactgccacaaatttcccctggataatgatctatgtatcgccgtgcaatttggccatctgccagccaccgctccgcctgtgacaaagatctgcgcccaatgcgaaatggaacacagcgctgacggactcatggagcagatgtgttccagcgatttcgtagtcaagatgcgaatcaaggagattaaaatcgagaatggagaccgcaaactcataggggcccagaagaaaaagaaactcttgaaacccggtccccttaaaaggaaagataccaagcgactggtgttacatatgaagaatggcgctggctgcccgtgtccccaactggatagtctggccgggtcattcctggtgatgggtaggaaggtcgatggacagctgctgctcatggccgtctatagatgggacaaaaagaataaggagatgaaatttgcagtgaagtttatgttcagctacccatgttccctctattacccttttttctacggggcggcggaacctcactag

SEQ ID NO: 134389 - DNA, 954 bp, Artificial Sequence
  derived and/or modified sequence
atgagagctgctgctgctgggggcggcgtgaggacagctgccctggccctgctgctgggcgccctgcactgggccccagcccgctgtgaggagtatgactactacggctggcaggccgagcccctgcacggccgcagctacagcaagccaccccagtgcctggacatcccagctgacctgcccctgtgccacacagtgggctacaagaggatgaggctgcccaacctgctggagcacgagagcctggccgaggtgaagcagcaggccagctcctggctgcccctgctggccaagcgctgccacagcgacacccaggtgttcctgtgcagcctgtttgcccctgtgtgcctggaccggcccatctacccctgccgcagcctgtgtgaggccgtgcgggccggctgtgcccccctgatggaggcctacggcttcccctggccagagatgctgcactgccacaagttccccctggacaatgacctgtgcatcgctgtgcagtttggccacctgcctgccacagcccctcctgtgaccaagatctgtgcccagtgtgagatggagcacagcgcagatggcctgatggagcagatgtgcagcagtgactttgtggtgaagatgaggatcaaggagatcaagattgaaaatggagacaggaagctgattggagcccagaagaagaagaagctgctgaagccaggccccctgaagaggaaggacaccaagaggctggtgctgcacatgaagaatggagctggctgcccctgcccccagctggacagcctggccggcagcttcctggtgatgggcaggaaggtggatggccagctgctgctgatggctgtgtaccgctgggacaagaagaacaaggagatgaagtttgctgtgaagttcatgttctcctacccctgcagcctgtactaccccttcttctatggagctgctgagccccactag

SEQ ID NO: 134390 - DNA, 954 bp, Artificial Sequence
  derived and/or modified sequence
atgcgggccgccgccgccggcggcggcgtgcggaccgccgccctggcattactccttggtgccctccactgggctcccgcaagatgcgaagagtacgactactatgggtggcaggcggagccgctgcatggaagatcctattcgaagccgccccagtgtctagacatcccagcggatctgcccctgtgccacaccgttggctataaacgaatgagactgccaaatctactagagcacgagagtctggccgaagtaaagcaacaggcctcttcttggcttccactgctagccaagaggtgccacagcgacacacaggtattcttgtgctccctctttgctcctgtatgtttggacaggcctatctatccctgcaggtctctctgtgaagcggtgagggccggatgcgctcctttaatggaagcttacggctttccatggccagagatgttgcactgtcacaaattcccacttgataacgacctctgcattgccgtccagttcggacacctaccagctactgctcccccagtcacgaaaatctgtgcccaatgtgaaatggagcacagcgccgacgggttgatggagcagatgtgctcctccgacttcgttgttaagatgagaattaaggagatcaagattgaaaacggagaccgtaaactgattggggcccagaagaaaaagaagttgctgaagccggggcctctaaaacggaaagacacaaagcggctggtgctgcacatgaagaacggagcaggatgtccatgtccccagcttgactcccttgcggggagtttcctggtgatgggccgtaaagtggacggtcagcttctcttgatggctgtctatcgatgggataagaagaacaaagaaatgaagttcgccgtgaaattcatgttctcttatccctgttccctgtactaccctttcttttacggcgcggctgagcctcactag

SEQ ID NO: 134391 - DNA, 954 bp, Artificial Sequence
  derived and/or modified sequence
atgcgcgctgccgctgccggtggcggagtcagaaccgccgctttagctctccttctgggtgcccttcactgggctcccgctcgatgtgaggaatatgactactatggttggcaggcagaacccctccatgggcgaagctattctaagccgccacaatgcctggacattccagctgatctgcctctctgccataccgtcggttacaaaaggatgcgtcttcctaatctgcttgaacatgaatcactcgcggaagtgaaacagcaggccagtagctggttgcctctcctggctaaaagatgtcactccgacacccaggtgttcctctgcagcttattcgctcccgtgtgcctagatcgacccatctacccttgccggagtctttgcgaggcagtccgggctggatgcgcccctctgatggaggcgtatggcttcccctggcccgaaatgcttcactgccacaaatttccgttagacaatgatctttgtatcgcagtgcagttcggacatctgcccgctaccgccccaccagtgactaaaatctgcgcccagtgtgaaatggaacatagcgcagatggcctgatggaacagatgtgcagctctgattttgtagtgaaaatgcgaattaaggagatcaaaattgagaacggggataggaaactgattggtgcccagaaaaagaaaaagctgttaaagcccggacccttaaaaaggaaagatacaaaacgcctagtcctgcacatgaagaatggtgctgggtgcccctgtcctcagttagacagcttagctggttcattcctggtgatggggagaaaagttgatggtcaactgctcctcatggcggtgtaccggtgggataaaaaaaacaaggagatgaaatttgcagtgaagttcatgttctcctacccctgcagtctgtactaccctttcttctacggagccgctgaaccccattag

SEQ ID NO: 134392 - DNA, 1836 bp, Artificial Sequence
  derived and/or modified sequence
gcggcggcggcggcggcggctgggtagagtcagggccgggggcgcacgccggaacacctgggccgccgggcaccgagcgtcggggggctgcgcggcgcgcacctggagagggcgcagccatgcgggcggcggcggcgggggggggcgtgcggacggccgcgctggcgctgctgctgggggcgctgcactgggcgccggcgcgctgcgaggagtacgactactatggctggcaggccgagccgctgcacggccgctcctactccaagccgccgcagtgccttgacatccctgccgacctgccgctctgccacacggtgggctacaagcgcatgcggctgcccaacctgctggagcacgagagcctggccgaagtgaagcagcaggcgagcagctggctgccgctgctggccaagcgctgccactcggatacgcaggtcttcctgtgctcgctctttgcgcccgtctgtctcgaccggcccatctacccgtgccgctcgctgtgcgaggccgtgcgcgccggctgcgcgccgctcatggaggcctacggcttcccctggcctgagatgctgcactgccacaagttccccctggacaacgacctctgcatcgccgtgcagttcgggcacctgcccgccaccgcgcctccagtgaccaagatctgcgcccagtgtgagatggagcacagtgctgacggcctcatggagcagatgtgctccagtgactttgtggtcaaaatgcgcatcaaggagatcaagatagagaatggggaccggaagctgattggagcccagaaaaagaagaagctgctcaagccgggccccctgaagcgcaaggacaccaagcggctggtgctgcacatgaagaatggcgcgggctgcccctgcccacagctggacagcctggcgggcagcttcctggtcatgggccgcaaagtggatggacagctgctgctcatggccgtctaccgctgggacaagaagaataaggagatgaagtttgcagtcaaattcatgttctcctacccctgctccctctactaccctttcttctacggggcggcagagccccactgaagggcactcctccttgccctgccagctgtgccttgcttgccctctggccccgccccaacttccaggctgacccggccctactggagggtgttttcacgaatgttgttactggcacaaggcctaagggatgggcacggagcccaggctgtcctttttgacccaggggtcctggggtccctgggatgttgggcttcctctctcaggagcagggcttcttcatctgggtgaagacctcagggtctcagaaagtaggcaggggaggagagggtaagggaaaggtggaggggctcagggcaccctgaggcggaggtttcagagtagaaggtggtgtcagctccagctcccctctgtcggtggtggggcctcaccttgaagagggaagtctcaatattaggctaagctatttgggaaagttctccccaccgcccctgtacgcgtcatcctagccccccttaggaaaggagttagggtctcagtgcctccagccacaccccctgccttccccagcttgcccatttccctgccccaaggcccagagctccccccagactggagagcaagcccagcccagcctcggcatagacccccttctggtccgcccgcggctcgattcccgggattcattcctcagcctctgcttctcccttttatcccaataagttattgctactgctgtgaggccataggtactagacaaccaatacatgcagggttgggttttctaatttttttaactttttaattaaatcaaagaaaacaataa

SEQ ID NO: 134393 - protein, 124 aa, Artificial Sequence
  derived and/or modified sequence
MHRDSCPLDCKVYVGNLGNNGNKTELERAFGYYGPLRSVWVARNPPGFAFVEFEDPRDAADAVRELDGRTLCGCRVRVELSNGEKRSRNRGPPPSWGRRPRDDYRRRSPPPRRRVTIMSLLTTL

SEQ ID NO: 134394 - protein, 164 aa, Artificial Sequence
  derived and/or modified sequence
MHRDSCPLDCKVYVGNLGNNGNKTELERAFGYYGPLRSVWVARNPPGFAFVEFEDPRDAADAVRELDGRTLCGCRVRVELSNGEKRSRNRGPPPSWGRRPRDDYRRRSPPPRRRSPRRRSFSRSRSRSLSRDRRRERSLSRERNHKPSRSFSRSRSRSRSNERK

SEQ ID NO: 134395 - DNA, 375 bp, Artificial Sequence
  derived and/or modified sequence
atgcacagggatagttgcccactggactgtaaggtatacgtcggaaacttgggaaacaatggaaataaaacagagctggagcgggctttcggctactacggacctctgagatccgtgtgggtggcacgcaatcctcccggctttgcttttgttgagtttgaggatccccgagacgctgccgacgcagtgagggaattagatggccgcacgctttgtggatgtcgcgtgagagtcgaactctcgaatggggagaagaggtcacgcaatcgggggccgcctccttcatgggggcgccgccctcgcgatgactaccgacgacggtcacccccaccgagacgcagagtaacaatcatgtcattacttaccactctgtag

SEQ ID NO: 134396 - DNA, 495 bp, Artificial Sequence
  derived and/or modified sequence
atgcacagggacagttgtccccttgactgtaaagtttatgtagggaatttggggaacaatggtaacaagactgagctggagcgcgcattcggctattatggcccattaagatctgtgtgggttgctaggaatccccctgggtttgcgtttgtggaattcgaagacccaagagatgccgccgatgccgtccgggagctggacggacggactttatgcgggtgcagagtgcgggtcgagttgagcaacggcgagaaaagaagtcggaataggggacctcctccctcctggggacgccgtcctcgcgatgattaccgcagaagatctccccctcctaggaggagaagccctagaagaaggtctttctcccgctctagatcacgttccctgagcagggacaggcgcagggagagaagccttagccgagagcgcaatcataaaccttctcgatccttctcccgctctaggagccgttctagatctaacgaaaggaaatag

SEQ ID NO: 134397 - DNA, 375 bp, Artificial Sequence
  derived and/or modified sequence
atgcaccgggacagctgccccctggactgcaaggtgtatgtgggcaacctgggcaacaacggcaacaagacagagctggagcgggccttcggctactacggccccctgcggtctgtgtgggtggccagaaatcctcctggctttgcctttgtggagtttgaggaccccagagatgctgctgatgctgtgcgggagctggatggccgcaccctgtgtggctgccgggtgcgggtggagctgagcaatggagagaagaggagcaggaacagaggccccccacccagctggggccggcggcccagagatgactacagaagaagaagccccccacccaggagaagagtgaccatcatgagcctgctgaccaccctgtag

SEQ ID NO: 134398 - DNA, 495 bp, Artificial Sequence
  derived and/or modified sequence
atgcaccgggacagctgccccctggactgcaaggtgtatgtgggcaacctgggcaacaacggcaacaagacagagctggagcgggccttcggctactacggccccctgcggtctgtgtgggtggccagaaatcctcctggctttgcctttgtggagtttgaggaccccagagatgctgctgatgctgtgcgggagctggatggccgcaccctgtgtggctgccgggtgcgggtggagctgagcaatggagagaagaggagcaggaacagaggccccccacccagctggggccggcggcccagagatgactacagaagaagaagccccccacccaggagaagaagcccccggcggcgctccttcagccgcagccgcagccgcagcctgagccgggacagaagaagagagaggagcctgagccgggagaggaaccacaagcccagccgctccttcagccgcagccgcagccgcagccgcagcaatgaaaggaagtag

SEQ ID NO: 134399 - DNA, 375 bp, Artificial Sequence
  derived and/or modified sequence
atgcaccgggacagctgccccctggactgcaaggtgtacgtgggcaacctggggaataatggcaacaagactgagttggagagagcctttggatactatggccccctgcggtctgtttgggtagccagaaatccccctggattcgcctttgtagagtttgaggaccccagagacgcagccgacgcagtcagggaactggatggccgcacactgtgcggatgccgggtgagagttgagctctcaaacggagaaaagcgaagtcgcaaccgcggcccccctccatcttgggggaggaggccaagagacgattatagaagacgctccccacccccaaggaggagggttacgatcatgagtctactgacgacactctag

SEQ ID NO: 134400 - DNA, 495 bp, Artificial Sequence
  derived and/or modified sequence
atgcaccgggacagctgccccctggactgcaaggtgtacgtgggcaatctgggaaacaacggaaataagactgagcttgagcgggctttcggttattacggtccccttagatccgtttgggtcgcgcgtaacccacccggattcgccttcgtggagttcgaagatcctcgggatgccgccgatgccgtgcgggagctggacggacggacactgtgtgggtgccgcgtccgcgtggaactgtctaacggagagaaacggagtcgaaatagggggcccccaccatcctgggggaggcgccctcgggatgactaccgtcgtcgttctccgccccccaggagacggagcccccgccgcaggtcattttccagaagtagatcacggtccttgtctcgagaccggcgccgtgagaggagcctctctagggaacgcaaccacaagccaagtaggtctttctcacgcagccggtccaggtccaggtccaatgaacgcaagtag

SEQ ID NO: 134401 - DNA, 375 bp, Artificial Sequence
  derived and/or modified sequence
atgcaccgggattcctgcccattggattgcaaggtgtacgtaggcaatcttgggaacaacgggaataaaaccgaattggagagagctttcgggtactacgggccacttcggagtgtgtgggtagcaaggaatcccccaggcttcgcgttcgtggagttcgaagacccacgggacgcagccgatgccgttcgggagctcgacggcagaacactttgtggttgtcgggtcagggtggaactgtctaacggcgaaaagcgtagcaggaatcgcggtcctccccctagttggggcaggcggccacgcgacgattatcgaagaagatcccctccaccacggagaagggtgactataatgagcctgctcactaccttatag

SEQ ID NO: 134402 - DNA, 495 bp, Artificial Sequence
  derived and/or modified sequence
atgcaccgagattcttgccccctggactgtaaggtgtacgtaggcaacttaggcaataacggaaataaaaccgaactcgaacgggcttttggctactacggcccattacggagtgtgtgggtcgctcggaatccgccaggattcgcctttgtggaatttgaagatcctcgcgacgcggctgacgctgtccgagagttggacggccgaaccttgtgcggctgcagggtccgggtggaactttctaatggggaaaaaagatcccgcaatcgcggtcctcccccatcttggggtagaagaccaagggatgactaccgcagacgatccccaccaccacgcaggaggtcacctagacgacggagtttttctcggtcacgtagccggagtctcagccgtgacagacggagggaacgctccctctcgcgggaacggaaccataagccgtctcggtctttctctagatcacgttctcgaagtagaagcaacgagaggaagtag

SEQ ID NO: 134403 - DNA, 1518 bp, Artificial Sequence
  derived and/or modified sequence
tttcgtggacgccgggtgagtgagagagttggttggtgttgggccggaggaaagcgggaagactcatcggagcgtgtggatttgagccgccgcattttttaaccctagatctcgaaatgcatcgtgattcctgtccattggactgtaaggtttatgtaggcaatcttggaaacaatggcaacaagacggaattggaacgggcttttggctactatggaccactccgaagtgtgtgggttgctagaaacccacccggctttgcttttgttgaatttgaagatccccgagatgcagctgatgcagtccgagagctagatggaagaacactatgtggctgccgtgtaagagtggaactgtcgaatggtgaaaaaagaagtagaaatcgtggcccacctccctcttggggtcgtcgccctcgagatgattatcgtaggaggagtcctccacctcgtcgcagagtcaccatcatgtctcttctcaccaccctctgaatctgcattagccagtcaactagccctttcagcgtcatgtgaccagcgcgccccattcagcttggctggtgtcgtttcacatgacccaggctggccagtcgtcaggttgcaccgccctttggttcccgagcatgctgttttctctcagccttctctccaaccttaaccaaatcggcagcagccacctcgaccgcccacacattcctggccaatcagctcagctgtttatttaccaaatgtcttcacaacaactacagcagcagccttcggctaacaaaaaagcaggaaaaatccacaacacccccttcgccaaccaactaaatccaacgcaacatctggcaaaaccttttcagcaaattcttcctggccgtcagtccggcagcctcacctcaccatttctagcttgttgaaacccaaaactagtaagtttttcctgcttatacagtttactgctggttaaaataaggagtaagcggcttaaagtaattcttttttctggatcaaaggctggctgtgcataattgaatggtaacgtacatatatattgcttgaaaaacttttaagggtgatagggaactcgtaatgtaactaggccttcaagtgaaacttatttgcatgtgcaagatgccaaactaaaaattttaatatctctaacagattagcttttctggcaaaaatttgttgaatcctatcacctttaaatggttttactaacagtttcaaaatttaaaattttggggttgaagtgtgggccaagctaaggtaattttggtaagcctaaacacactcttaaatgtgacgatcacaaatgcagttctaatgtagcacttaatggcatcaatatttacacctaccgcgttttcacaaaattacactatccacctggtacctaagtcttgtcatggacttacaggtttgcatgggttccaaatactggtttatggtactgtttttggaactacttgtgggactatattttggtgtggtgtttgggtagtgaagttagtttgacatgaagttttgcatt

SEQ ID NO: 134404 - DNA, 2054 bp, Artificial Sequence
  derived and/or modified sequence
tttcgtggacgccgggtgagtgagagagttggttggtgttgggccggaggaaagcgggaagactcatcggagcgtgtggatttgagccgccgcattttttaaccctagatctcgaaatgcatcgtgattcctgtccattggactgtaaggtttatgtaggcaatcttggaaacaatggcaacaagacggaattggaacgggcttttggctactatggaccactccgaagtgtgtgggttgctagaaacccacccggctttgcttttgttgaatttgaagatccccgagatgcagctgatgcagtccgagagctagatggaagaacactatgtggctgccgtgtaagagtggaactgtcgaatggtgaaaaaagaagtagaaatcgtggcccacctccctcttggggtcgtcgccctcgagatgattatcgtaggaggagtcctccacctcgtcgcagatctccaagaaggagaagcttctctcgcagccggagcaggtccctttctagagataggagaagagagagatcgctgtctcgggagagaaatcacaagccgtcccgatccttctctaggtctcgtagtcgatctaggtcaaatgaaaggaaatagaagacagtttgcaagagaagtggtgtacaggaaattacttcatttgacaggagtatgtacagaaaattcaagttttgtttgagacttcataagcttggtgcatttttaagatgttttagctgttcaaatctgtttgtctcttgaaacagtgacacaaaggtgtaattctctatggtttgaaatggatcatacgaggcatgtaataccaagaattgttactttacaatgttcccttaagcaaaattgaatttgctttgaacttttagttatgcacagactgataataaacctctaaacctgcccagcggaagtgtgtttttttttaaatttaaatacagaaacaactggcaaaaattgaactaagatttacttttttttccatagctgggatataggctgcagctatagttgaacaagcagtctttaaaaactgctgtgaaacacaggccatcagggaaaacgaaatgctgcactattaaattagaggtttttgaaaaatccaactctcatcctgggcagaggttgcctagttggtatagaatgttaagtttcaagaaagtttacctttgctttaggtcataagttccttatttgattgctgtatatggatacatggctgttcgtgacattctttatgtgcaaatttgtgatttcaaaaatgtcctgccagtttaagggtacattgtagagccgaactttgagttactgtgcaagatttttttttcatgctgtcatttgtaatatgttttgtgagaatccttgggattaaagttttggttacaaattgttctttaacttgaaagcctgtttttccttgcaaactcaaatctgtgagcttggtaccaagtccaggtataacattcctattggaagccatacttatattttcttgtaaagtgcttttgaattaataaaatattagcataattgtgtatagtcagttgaacccactgttaccattgttcttatcccatgggaagcagttggttacacgattcttattttataagaaacagctgagaggcactatggattagtcttctgaagtgaaggaaatatagatgtcacctaagtgatagttaacccattttttttttttttaggcatagaagccagttcagggtccataatatttagtgaccaacattttaaagtatagcagcaacctggttcttaaacacaaagtaagttgcccattaacaaatggcttttatctttagcatgaaaactttccacaggtctaaaaattgcttccattttataatttgaggtgttgcatgggaattctaagctgatccatcatgatgtaaaagttcacaatatggttcaaatgtaacagtgcagaattgaatatggaggcatgcataaccttcctcttagaaaatggcaggtgttgtaatttcaaatttttgtgcaattagattaaatcataatgcaacagtc

SEQ ID NO: 134405 - DNA, 375 bp, Artificial Sequence
  derived and/or modified sequence
atgcacagagacagctgccccctggactgcaaggtgtacgtgggcaacctgggcaacaacggcaacaagaccgagctggagagagccttcggctactacggccccctgagaagcgtgtgggtggccagaaacccccccggcttcgccttcgtggagttcgaggaccccagagacgccgccgacgccgtgagagagctggacggcagaaccctgtgcggctgcagagtgagagtggagctgagcaacggcgagaagagaagcagaaacagaggccccccccccagctggggcagaagacccagagacgactacagaagaagaagccccccccccagaagaagagtgaccatcatgagcctgctgaccaccctgtag

SEQ ID NO: 134406 - DNA, 495 bp, Artificial Sequence
  derived and/or modified sequence
atgcacagagacagctgccccctggactgcaaggtgtacgtgggcaacctgggcaacaacggcaacaagaccgagctggagagagccttcggctactacggccccctgagaagcgtgtgggtggccagaaacccccccggcttcgccttcgtggagttcgaggaccccagagacgccgccgacgccgtgagagagctggacggcagaaccctgtgcggctgcagagtgagagtggagctgagcaacggcgagaagagaagcagaaacagaggccccccccccagctggggcagaagacccagagacgactacagaagaagaagccccccccccagaagaagaagccccagaagaagaagcttcagcagaagcagaagcagaagcctgagcagagacagaagaagagagagaagcctgagcagagagagaaaccacaagcccagcagaagcttcagcagaagcagaagcagaagcagaagcaacgagagaaagtag

SEQ ID NO: 134407 - protein, 375 aa, Artificial Sequence
  derived and/or modified sequence
MLLFLLSALVLLTQPLGYLEAEMKTYSHRTMPSACTLVMCSSVESGLPGRDGRDGREGPRGEKGDPGLPGAAGQAGMPGQAGPVGPKGDNGSVGEPGPKGDTGPSGPPGPPGVPGPAGREGPLGKQGNIGPQGKPGPKGEAGPKGEVGAPGMQGSAGARGLAGPKGERGVPGERGVPGNTGAAGSAGAMGPQGSPGARGPPGLKGDKGIPGDKGAKGESGLPDVASLRQQVEALQGQVQHLQAAFSQYKKVELFPNGQSVGEKIFKTAGFVKPFTEAQLLCTQAGGQLASPRSAAENAALQQLVVAKNEAAFLSMTDSKTEGKFTYPTGESLVYSNWAPGEPNDDGGSEDCVEIFTNGKWNDRACGEKRLVVCEF

SEQ ID NO: 134408 - protein, 218 aa, Artificial Sequence
  derived and/or modified sequence
MFLSTSKHGRQEAMLLFLLSALVLLTQPLGYLEAEMKTYSHRTMPSACTLVMCSSVESGLPGRDGRDGREGPRGEKGDPGLPGAAGQAGMPGQAGPVGPKGDNGSVGEPGPKGDTGPSGPPGPPGVPGPAGREGPLGKQGNIGPQGKPGPKGEAGPKGEVGAPGMQGSAGARGLAGPKGERGVPGERGVPGNTGAAGSAGAMGPQGSPGARGPPGLKG

SEQ ID NO: 134409 - DNA, 1128 bp, Artificial Sequence
  derived and/or modified sequence
atgctgctgttcctgctgagcgccctggtgctgctgacccagcccctgggctacctggaggccgagatgaagacctacagccacagaaccatgcccagcgcctgcaccctggtgatgtgcagcagcgtggagagcggcctgcccggcagagacggcagagacggcagagagggccccagaggcgagaagggcgaccccggcctgcccggcgccgccggccaggccggcatgcccggccaggccggccccgtgggccccaagggcgacaacggcagcgtgggcgagcccggccccaagggcgacaccggccccagcggcccccccggcccccccggcgtgcccggccccgccggcagagagggccccctgggcaagcagggcaacatcggcccccagggcaagcccggccccaagggcgaggccggccccaagggcgaggtgggcgcccccggcatgcagggcagcgccggcgccagaggcctggccggccccaagggcgagagaggcgtgcccggcgagagaggcgtgcccggcaacaccggcgccgccggcagcgccggcgccatgggcccccagggcagccccggcgccagaggcccccccggcctgaagggcgacaagggcatccccggcgacaagggcgccaagggcgagagcggcctgcccgacgtggccagcctgagacagcaggtggaggccctgcagggccaggtgcagcacctgcaggccgccttcagccagtacaagaaggtggagctgttccccaacggccagagcgtgggcgagaagatcttcaagaccgccggcttcgtgaagcccttcaccgaggcccagctgctgtgcacccaggccggcggccagctggccagccccagaagcgccgccgagaacgccgccctgcagcagctggtggtggccaagaacgaggccgccttcctgagcatgaccgacagcaagaccgagggcaagttcacctaccccaccggcgagagcctggtgtacagcaactgggcccccggcgagcccaacgacgacggcggcagcgaggactgcgtggagatcttcaccaacggcaagtggaacgacagagcctgcggcgagaagagactggtggtgtgcgagttctag

SEQ ID NO: 134410 - DNA, 657 bp, Artificial Sequence
  derived and/or modified sequence
atgttcctgagcaccagcaagcacggcagacaggaggccatgctgctgttcctgctgagcgccctggtgctgctgacccagcccctgggctacctggaggccgagatgaagacctacagccacagaaccatgcccagcgcctgcaccctggtgatgtgcagcagcgtggagagcggcctgcccggcagagacggcagagacggcagagagggccccagaggcgagaagggcgaccccggcctgcccggcgccgccggccaggccggcatgcccggccaggccggccccgtgggccccaagggcgacaacggcagcgtgggcgagcccggccccaagggcgacaccggccccagcggcccccccggcccccccggcgtgcccggccccgccggcagagagggccccctgggcaagcagggcaacatcggcccccagggcaagcccggccccaagggcgaggccggccccaagggcgaggtgggcgcccccggcatgcagggcagcgccggcgccagaggcctggccggccccaagggcgagagaggcgtgcccggcgagagaggcgtgcccggcaacaccggcgccgccggcagcgccggcgccatgggcccccagggcagccccggcgccagaggcccccccggcctgaagggctag

SEQ ID NO: 134411 - DNA, 1128 bp, Artificial Sequence
  derived and/or modified sequence
atgttactgtttcttctgtccgccctggtgctgctcactcaacccctcggatacttggaagctgagatgaaaacatatagccatagaaccatgccgtctgcgtgcaccctggtgatgtgctcttccgtcgagtctggcctgcctgggcgcgacgggcgcgacgggcgcgaaggacccagaggggagaaaggggaccccggtctgcccggcgccgccggccaagccgggatgccagggcaggctggccccgtgggcccaaaaggcgacaatggatccgtgggtgagcccgggccgaagggggacactgggccatctggcccgccgggtccgccaggagtccctggccccgcaggtcgcgaaggcccactaggaaaacagggcaatatcggtccccaaggtaagcccggtcctaaaggcgaggcaggaccgaaaggagaagtgggcgcccccggaatgcagggcagcgccggagcccgcggcctggccggacctaagggcgaaaggggggttcccggtgagcgaggagtgcctggtaatactggggcagccggtagcgcgggcgcaatggggcctcagggctctcccggcgccagaggccccccgggcctcaagggcgataagggcatccccggagataagggcgccaagggcgagagcgggctgcctgatgtggcaagtctgcgccagcaggtcgaggctctccagggtcaggtccaacacctgcaggcagcctttagccagtacaaaaaggtggagttgttccccaacgggcagagcgtgggggagaagatcttcaagacggcagggtttgtaaagcctttcactgaagcccagctgctctgcacacaggccggaggacagcttgcgtcgcctagaagcgccgcagaaaacgcggccctgcaacagctagttgtggcaaagaatgaggccgcctttttatcaatgacggacagcaagacagagggtaagtttacctaccccaccggcgaaagcctagtatactccaattgggcccccggggagccaaacgatgacggtgggtcggaagactgtgtggagatcttcaccaacggcaagtggaatgatagagcctgtggcgagaagaggcttgtagtatgcgagttttag

SEQ ID NO: 134412 - DNA, 657 bp, Artificial Sequence
  derived and/or modified sequence
atgttcttgtccactagcaagcacggacgtcaagaagcgatgttattattcctcctgagcgctttggtcctgctgactcagccactcggctacctggaagctgaaatgaagacctatagccaccgcactatgccctccgcctgtactctcgtgatgtgctcttccgtagaaagcggactacccgggcgggacggaagagatgggcgggagggcccccgcggggagaagggcgacccagggctacccggggctgctggacaggccggcatgccggggcaggcaggccctgttggtcccaaaggcgataatgggagcgtcggcgaacccggccccaagggggatactggaccaagcggccctccaggcccacccggcgtgccgggccccgctggacgggaaggacctctcgggaagcaggggaacatcggaccacaaggtaaacccggcccgaagggagaggctggtcccaagggtgaagtgggcgcacccggtatgcagggtagtgcaggggcacggggtcttgccggtcctaagggggagcgtggagtaccaggtgagcggggtgttccgggaaatacaggggcagcgggtagtgccggagctatgggacctcaaggctcccccggggcgcgtggtccgcccgggctgaaaggctag

SEQ ID NO: 134413 - DNA, 1128 bp, Artificial Sequence
  derived and/or modified sequence
atgctgctcttcctgctgagcgccctggtgctgctgacccagcccctgggctacctggaggccgagatgaagacctacagccacaggaccatgcccagcgcctgcaccctggtgatgtgcagctctgtggagagcggcctgcccggcagagatggaagagatggccgggagggccccagaggagagaagggggaccccggcctgcctggagctgctggccaggccggcatgcctggccaggccggccctgtgggccccaagggggacaatggatctgtgggggagcccggccccaagggggacaccggccccagcggccccccaggccccccaggagtgcccggccctgctggccgggagggccccctgggcaagcagggcaacatcggcccccagggcaagccaggccccaagggggaggccggccccaagggggaggtgggcgcccctggcatgcagggcagcgctggggcccggggcctggccggccccaagggggagcggggcgtgcctggagagcggggcgtgcccggcaacacaggagctgctggcagcgctggggccatgggcccccagggcagccctggggcccggggccccccaggcctgaagggggacaagggcatccctggggacaagggggccaagggggagagcggcctgcctgatgtggccagcctgcggcagcaggtggaggccctgcagggccaggtgcagcacctgcaggccgccttcagccagtacaagaaggtggagctgttccccaacggccagagcgtgggggagaagatcttcaagacagctggctttgtgaagcccttcacagaggcccagctgctgtgcacccaggccggcggccagctggccagccccaggtctgctgctgaaaatgctgccctgcagcagctggtggtggccaagaatgaggccgccttcctgtccatgacagacagcaagacagagggcaagttcacctaccccaccggggagagcctggtgtacagcaactgggcccctggagagcccaatgatgatggcggcagcgaggactgtgtggagatcttcaccaacgggaagtggaatgaccgggcctgtggggagaagaggctggtggtgtgtgagttctag

SEQ ID NO: 134414 - DNA, 657 bp, Artificial Sequence
  derived and/or modified sequence
atgttcctgagcaccagcaagcacggccggcaggaggccatgctgctcttcctgctgagcgccctggtgctgctgacccagcccctgggctacctggaggccgagatgaagacctacagccacaggaccatgcccagcgcctgcaccctggtgatgtgcagctctgtggagagcggcctgcccggcagagatggaagagatggccgggagggccccagaggagagaagggggaccccggcctgcccggggctgctggccaggccggcatgcctggccaggccggccctgtgggccccaagggggacaatggatctgtgggggagcccggccccaagggggacaccggccccagcggccccccaggccccccaggagtgcccggccctgctggccgggagggccccctgggcaagcagggcaacatcggcccccagggcaagccaggccccaagggggaggccggccccaagggggaggtgggcgcccctggcatgcagggcagcgctggggcccggggcctggccggccccaagggggagcggggcgtgcctggagagcggggcgtgcccggcaacacaggagctgctggcagcgctggggccatgggcccccagggcagccctggggcccggggccccccaggcctgaagggctag

SEQ ID NO: 134415 - DNA, 1128 bp, Artificial Sequence
  derived and/or modified sequence
atgctgctgttcctgctgagcgccctggtgctgctgacccagcccctaggatatctggaggctgaaatgaagacatattcgcacagaaccatgcctagcgcatgcacactcgtaatgtgttcaagcgtcgaatcaggcctccccggcagggacggccgggatggacgggaaggcccccgcggcgagaaaggagaccccgggctgccaggcgctgccggacaagctggcatgccagggcaggcaggaccggtcggccctaagggagataatggcagcgtgggagaaccaggccccaaaggagatacagggcctagcggcccacctggaccccccggcgtacctggtcccgccggcagggagggaccactgggaaagcaaggaaacatcggaccacagggtaagccaggacccaagggcgaagcaggccctaaaggtgaggtgggagctcccgggatgcagggtagcgcaggcgctaggggcctggctgggcctaagggagagcgaggcgtccccggcgaaagaggtgttccggggaacaccggagctgctggatccgcaggtgctatgggaccccaagggtctcctggcgccagggggccccccggtctgaagggcgacaaagggatcccaggggacaagggcgcaaaaggtgaatctggtctgcctgatgttgcttctcttcggcaacaggttgaagccctgcaaggccaggtgcaacacctgcaggcggccttcagccagtacaaaaaagttgagttgttcccaaatggccagtctgtaggcgagaaaatttttaaaaccgcaggctttgtgaagcccttcacggaggctcaactcctgtgcacccaggcagggggacagcttgcttccccccggtcagcagctgagaacgctgcactccagcaattggtggttgccaaaaacgaagctgcctttctaagtatgaccgatagcaaaaccgagggaaaattcacatatcccactggagagagccttgtgtatagtaattgggctcctggggagcccaatgatgatgggggttctgaggattgcgtcgaaattttcacaaacgggaagtggaacgaccgcgcctgcggtgagaagcggctcgtagtgtgcgagttctag

SEQ ID NO: 134416 - DNA, 657 bp, Artificial Sequence
  derived and/or modified sequence
atgttcctgagcaccagcaagcacggccggcaggaggccatgctgctgttcctcttaagtgccttggttctgctcacacaacctttgggttatctagaagccgagatgaaaacttacagccatcgaacaatgccatccgcttgtacactggtaatgtgtagttccgttgagagcggccttcctggccgggacggtcgagacggccgggagggcccccgcggcgaaaagggcgatcccggcctgcctggcgccgccggacaggccgggatgccggggcaagctggtcctgtggggcctaagggggataacggatccgtcggtgaaccgggccccaaaggggacaccggtcccagcggtccaccaggcccaccgggagttcctggtcccgcggggagggaaggaccactgggcaaacagggaaatatcggcccgcaaggcaagccagggccaaagggcgaggcaggccccaagggtgaggtaggggcacccggaatgcaaggctccgcgggggcccgaggtttggctggccccaagggtgaacggggtgtgccaggggaacgaggtgttcctggtaataccggggccgccggaagcgccggggctatgggaccccaggggagtcccggcgcccgggggcccccaggtctgaagggctag

SEQ ID NO: 134417 - DNA, 1128 bp, Artificial Sequence
  derived and/or modified sequence
atgctcctcttcctcctatctgccctggttctgctgacacagcctctgggctatctggaagccgagatgaaaacttactcacatcggactatgccaagtgcctgcaccctggtcatgtgttcctctgtggagtctgggctccccggtagagacggaagggacggtcgagaggggccacggggagaaaaaggcgatcctggtctcccaggggctgcgggtcaggccggaatgcctggtcaggccggaccggttgggcctaagggcgacaatggctccgtaggagagccaggcccaaagggcgatactgggccttctggtccaccaggccctccaggcgttcctggtcccgctgggagagaggggcctctcggaaaacagggcaatattggcccacaaggaaaaccaggcccaaagggcgaagccggacctaagggtgaagtgggggcacccggaatgcagggatccgctggggctcggggtctcgccggtccgaagggcgagcgcggagttccgggagaacggggagttcctggaaacaccggtgctgccggttcagccggagctatggggccacagggctcgcccggagcacggggaccacctggtttgaaaggtgataaaggaatccccggagacaagggtgccaaaggcgaaagcggactgcccgacgtcgccagcttgcggcaacaggtggaggcattacaggggcaagtgcagcatctgcaggccgcatttagccagtacaagaaggttgaactgttcccgaacggtcagagcgtgggggagaagatcttcaaaactgctggtttcgtcaagcccttcacagaagctcagctactgtgtacccaggcagggggtcagttagccagccctcgcagcgccgcagagaacgctgctttacagcaactagtggtcgctaagaatgaagctgccttcctcagcatgaccgactcgaaaacggagggaaagtttacttaccccacaggtgagtccctggtgtatagtaattgggccccaggcgagccaaacgacgacggtggcagcgaagactgtgttgagatattcaccaatgggaaatggaatgatagggcttgtggtgaaaaacggctggtggtgtgtgaattttag

SEQ ID NO: 134418 - DNA, 657 bp, Artificial Sequence
  derived and/or modified sequence
atgtttttgtccacttccaagcatggaagacaagaggcaatgcttttgtttctgctcagcgcccttgtgctactgacccagcccctcggatatcttgaggccgagatgaaaacgtattcgcaccgcacaatgccgtcggcctgcacattagtgatgtgttccagcgtcgaaagtggtcttcctgggagagacggacgcgacggtcgggaagggccacgcggagagaaaggcgaccctggcttgcctggagccgctggccaagcaggcatgcctggccaagctggcccagtcgggcctaagggggacaacgggagcgttggagaaccgggaccaaagggggacacaggtcccagcggacctcccggtcccccaggcgtaccgggtcccgctggtcgagaagggccactgggcaaacaagggaacatcggtccccagggcaaacccggtccaaaaggagaggccggtcccaagggagaggtgggcgcacccggaatgcaggggtcagcaggggctaggggcctcgctggaccgaagggggaacgaggggtgcccggagaaagaggtgtgcctgggaatactggcgcagcaggttctgctggcgctatggggccacagggctctccgggtgcgaggggcccacccggtctgaagggctag

SEQ ID NO: 134419 - DNA, 1281 bp, Artificial Sequence
  derived and/or modified sequence
tttgcttggagctcctggggcctaacaaaaagaaacctgccatgctgctcttcctcctctctgcactggtcctgctcacacagcccctgggctacctggaagcagaaatgaagacctactcccacagaacaatgcccagtgcttgcaccctggtcatgtgtagctcagtggagagtggcctgcctggtcgcgatggacgggatgggagagagggccctcggggcgagaagggggacccaggtttgccaggagctgcagggcaagcagggatgcctggacaagctggcccagttgggcccaaaggggacaatggctctgttggagaacctggaccaaagggagacactgggccaagtggacctccaggacctcccggtgtgcctggtccagctggaagagaaggtcccctggggaagcaggggaacataggacctcagggcaagccaggcccaaaaggagaagctgggcccaaaggagaagtaggtgccccaggcatgcagggctcggcaggggcaagaggcctcgcaggccctaagggagagcgaggtgtccctggtgagcgtggagtccctggaaacacaggggcagcagggtctgctggagccatgggtccccagggaagtccaggtgccaggggacccccgggattgaagggggacaaaggcattcctggagacaaaggagcaaagggagaaagtgggcttccagatgttgcttctctgaggcagcaggttgaggccttacagggacaagtacagcacctccaggctgctttctctcagtataagaaagttgagctcttcccaaatggccaaagtgtcggggagaagattttcaagacagcaggctttgtaaaaccatttacggaggcacagctgctgtgcacacaggctggtggacagttggcctctccacgctctgccgctgagaatgccgccttgcaacagctggtcgtagctaagaacgaggctgctttcctgagcatgactgattccaagacagagggcaagttcacctaccccacaggagagtccctggtctattccaactgggccccaggggagcccaacgatgatggcgggtcagaggactgtgtggagatcttcaccaatggcaagtggaatgacagggcttgtggagaaaagcgtcttgtggtctgcgagttctgagccaactggggtgggtggggcagtgcttggcccaggagtttggccagaagtcaaggcttagaccctcatgctgccaatatcctaataaaaaggtgaccatctgtgccgggaa

SEQ ID NO: 134420 - DNA, 659 bp, Artificial Sequence
  derived and/or modified sequence
agacatgtttctcagcacctccaaacatgggcggcaagaggccatgctgctcttcctcctctctgcactggtcctgctcacacagcccctgggctacctggaagcagaaatgaagacctactcccacagaacaatgcccagtgcttgcaccctggtcatgtgtagctcagtggagagtggcctgcctggtcgcgatggacgggatgggagagagggccctcggggcgagaagggggacccaggtttgccaggagctgcagggcaagcagggatgcctggacaagctggcccagttgggcccaaaggggacaatggctctgttggagaacctggaccaaagggagacactgggccaagtggacctccaggacctcccggtgtgcctggtccagctggaagagaaggtcccctggggaagcaggggaacataggacctcagggcaagccaggcccaaaaggagaagctgggcccaaaggagaagtaggtgccccaggcatgcagggctcggcaggggcaagaggcctcgcaggccctaagggagagcgaggtgtccctggtgagcgtggagtccctggaaacacaggggcagcagggtctgctggagccatgggtccccagggaagtccaggtgccaggggacccccgggattgaaggggg

SEQ ID NO: 134421 - protein, 211 aa, Artificial Sequence
  derived and/or modified sequence
MVSRMVSTMLSGLLFWLASGWTPAFAYSPRTPDRVSEADIQRLLHGVMEQLGIARPRVEYPAHQAMNLVGPQSIEGGAHEGLQHLGPFGNIPNIVAELTGDNIPKDFSEDQGYPDPPNPCPVGKTDDGCLENTPDTAEFSREFQLHQHLFDPEHDYPGLGKWNKKLLYEKMKGGERRKRRSVNPYLQGQRLDNVVAKKSVPHFSDEDKDPE

SEQ ID NO: 134422 - DNA, 636 bp, Artificial Sequence
  derived and/or modified sequence
atggtgagcaggatggtgtccactatgttatcaggcttactcttttggctggcatccgggtggacccccgcttttgcatatagccctcggacccctgatcgggtaagcgaggccgatatccagaggctgctgcacggcgttatggagcagcttggtattgcacggccacgagttgagtaccccgctcaccaggccatgaatctggttggccctcaatctattgagggcggagctcacgaggggctccagcacctcgggccatttggaaacattccaaatattgtggcagaactgactggggataacattcccaaagactttagtgaggaccaaggctatcctgacccacccaacccttgtcccgttgggaaaaccgatgatggctgcctggaaaatactcctgacactgctgagtttagtagggaattccagttgcaccagcacctctttgacccagagcacgactaccccggactgggcaaatggaataagaagttgctgtacgagaagatgaagggcggagaaagacgcaagaggaggtccgtaaacccgtacttgcagggtcagcgccttgacaacgtggtggctaagaagtcagttccccacttttcagatgaagataaagatcctgagtag

SEQ ID NO: 134423 - DNA, 1235 bp, Artificial Sequence
  derived and/or modified sequence
taagatgcggaggagggtgacgcactagctctccagttcgcccgttcctggcctgacccccaccaaggcccataccgcagtaggctcctcgggctgcccctcggttgacaatggtctccaggatggtctctaccatgctatctggcctactgttttggctggcatctggatggactccagcatttgcttacagcccccggacccctgaccgggtctcagaagcagatatccagaggctgcttcatggtgttatggagcaattgggcattgccaggccccgagtggaatatccagctcaccaggccatgaatcttgtgggcccccagagcattgaaggtggagctcatgaaggacttcagcatttgggtccttttggcaacatccccaacatcgtggcagagttgactggagacaacattcctaaggactttagtgaggatcaggggtacccagaccctccaaatccctgtcctgttggaaaaacagatgatggatgtctagaaaacacccctgacactgcagagttcagtcgagagttccagttgcaccagcatctctttgatccggaacatgactatccaggcttgggcaagtggaacaagaaactcctttacgagaagatgaagggaggagagagacgaaagcggaggagtgtcaatccatatctacaaggacagagactggataatgttgttgcaaagaagtctgtcccccatttttcagatgaggataaggatccagagtaaagagaagatgctagacgaaaacccacattacctgttaggcctcagcatggcttatgtgcacgtgtaaatggagtccctgtgaatgacagcatgtttcttacatagataattatggatacaaagcagctgtatgtagatagtgtattgtcttcacaccgatgattctgctttttgctaaattagaataagagcttttttgtttcttgggtttttaaaatgtgaatctgcaatgatcataaaaattaaaatgtgaatgtcaacaataaaaagcaagactatgaaaggctcagatttcttgcagtttaaaatggtgtctgaggttgtactattttggccaagtctgtagaaagctgtcatttgattttgattatgtagttcatccagcccttgggcattgttatacaccagtaaagaaggctgtactcaagaggaggagctgacacatttcacttggctgcgtcttaataaacatgaatgcaagcattggca

SEQ ID NO: 134424 - DNA, 636 bp, Artificial Sequence
  derived and/or modified sequence
atggtctcaagaatggtctccaccatgcttagcggcctcctgttctggcttgcttccggctggacccccgcattcgcttactccccacggaccccagaccgtgtttccgaggccgacatccaaaggctgctacacggcgtcatggaacagttaggaattgcccgcccaagggtggaatatccagctcaccaagcaatgaatcttgtgggaccgcagtctatcgaaggtggcgctcacgaaggcctgcaacatctgggaccatttggcaatatacctaatatagtggcagagctcacaggtgacaatattcctaaagacttctctgaagaccagggttatcccgatccacccaacccttgtccagtagggaaaaccgacgacggctgtttagagaacacacctgatacggctgagttctcccgggagttccagctccaccagcacctttttgatccggaacatgactacccagggctcggcaagtggaataaaaagttactgtacgaaaagatgaaaggcggcgagaggaggaaacgcagatccgtgaatccgtacctgcagggccaacgcttggataacgtagtcgcaaaaaaatccgttccccatttctccgacgaggataaagatcccgaatag

SEQ ID NO: 134425 - DNA, 636 bp, Artificial Sequence
  derived and/or modified sequence
atggtgagtagaatggtgtctacaatgctgtccgggctgctgttctggttagcgtccggctggactccagccttcgcctactcccctaggacccccgatcgggtgagcgaggccgatatccaacgtctgttacacggagtgatggaacaacttgggattgcgcgacctagagtggaataccccgcccaccaagccatgaacctggtaggaccacagagtatagaaggaggcgctcacgaaggattgcagcatctgggcccatttgggaacattccgaacatagttgccgagctgactggggacaatattcctaaagacttctctgaagaccagggttatcccgatccacccaacccttgtccagtagggaaaaccgacgacggctgtttagagaacacacctgatacggctgagttctcccgggagttccagctccaccagcacctttttgatccggaacatgactacccagggctcggcaagtggaataaaaagttactgtacgaaaagatgaaaggcggcgagaggaggaaacgcagatccgtgaatccgtacctgcagggccaacgcttggataacgtagtcgcaaaaaaatccgttccacattttagcgacgaagataaggatcccgaatag

SEQ ID NO: 134426 - DNA, 636 bp, Artificial Sequence
  derived and/or modified sequence
atggtgagcagaatggtgagcaccatgctgagcggcctgctgttctggctggccagcggctggacccccgccttcgcctacagccccagaacccccgacagagtgagcgaggccgacatccagagactgctgcacggcgtgatggagcagctgggcatcgccagacccagagtggagtaccccgcccaccaggccatgaacctggtgggcccccagagcatcgagggcggcgcccacgagggcctgcagcacctgggccccttcggcaacatccccaacatcgtggccgagctgaccggcgacaacatccccaaggacttcagcgaggaccagggctaccccgacccccccaacccctgccccgtgggcaagaccgacgacggctgcctggagaacacccccgacaccgccgagttcagcagagagttccagctgcaccagcacctgttcgaccccgagcacgactaccccggcctgggcaagtggaacaagaagctgctgtacgagaagatgaagggcggcgagagaagaaagagaagaagcgtgaacccctacctgcagggccagagactggacaacgtggtggccaagaagagcgtgccccacttcagcgacgaggacaaggaccccgagtag

SEQ ID NO: 134427 - DNA, 636 bp, Artificial Sequence
  derived and/or modified sequence
atggtgtcgagaatggtgagtaccatgcttagcggcctcctcttctggctggcctctggttggactccagcctttgcgtattccccgcggactcccgatagggtctccgaagccgacatccagcgcctccttcacggcgtcatggaacagctcggaatcgcgaggccccgagtcgagtatcccgcgcaccaagctatgaatctagtcggcccacagtccatcgaaggcggagctcacgaaggacttcagcacctaggtcctttcggcaacattcccaatatcgttgctgaattgaccggcgacaacattccaaaggatttcagtgaggatcagggttatcccgacccgccaaatccctgtcctgtgggaaaaacagatgatggatgcctcgaaaacacaccggacactgccgagttttctcgggaatttcaactccaccagcatctgtttgatcccgaacacgactatcccgggcttgggaagtggaacaagaaactgctttatgagaaaatgaaggggggggagaggcggaaacggcgctcggtcaatccctatttgcagggccagaggctggataatgttgtggccaagaagagcgtgccccacttctccgatgaggacaaagatccagaatag

SEQ ID NO: 134428 - DNA, 636 bp, Artificial Sequence
  derived and/or modified sequence
atggtgtccaggatggtgtccaccatgctgagcggcctgctcttctggctggccagcggctggaccccagcctttgcctacagccccaggaccccagacagagtgtctgaggccgacatccagaggctgctgcatggagtgatggagcagctgggcatcgcccggccccgggtggagtacccagcccaccaggccatgaacctggtgggcccccagagcattgagggcggggcccacgagggcctgcagcacctgggccccttcggcaacatccccaacatcgtggccgagctgactggagacaacatccccaaggacttcagcgaggaccagggctacccagacccccccaacccctgccctgtgggcaagacagatgatggctgcctggagaacaccccagacacagctgagttcagccgggagttccagctgcaccagcacctgtttgatcctgagcatgactacccaggcctgggcaagtggaacaagaagctgctgtatgagaagatgaagggcggggagaggaggaagagaagatctgtgaacccctacctgcagggccagaggctggacaacgtggtggccaagaagtctgtgccccacttcagtgatgaggacaaggaccctgagtag

SEQ ID NO: 134429 - DNA, 636 bp, Artificial Sequence
  derived and/or modified sequence
atggtgagccggatggtgagcaccatgctgagcggcctgctgttctggctggcttctggatggacaccagctttcgcctactctccccgtacacctgaccgtgttagcgaagcggacatacagcggctgctccatggcgtgatggaacagttaggtatcgcaaggccacgagtggaatatccagcgcaccaggccatgaacttggtgggccctcagtccatcgaagggggggcccatgagggcctgcaacatctcggaccttttggcaatatccctaatatcgtagcagaattgacaggggataacattcccaaggatttctccgaggaccaaggttacccagatcctccaaacccctgtcctgtcggaaaaaccgacgacgggtgcttggagaatacgccagataccgccgagttctcccgggagttccaactccatcagcacctgttcgacccagagcacgattaccccggattgggcaaatggaacaaaaaactgctctacgagaagatgaagggcggggagcggcggaaacggcggtctgttaatccctaccttcagggccagcggctggataacgtggtggccaagaagtcagtaccacatttttctgatgaagacaaagatccagagtag

SEQ ID NO: 134430 - RNA, 636 nt, Artificial Sequence
  derived and/or modified sequence
auggucucaagaauggucuccaccaugcuuagcggccuccuguucuggcuugcuuccggcuggacccccgcauucgcuuacuccccacggaccccagaccguguuuccgaggccgacauccaaaggcugcuacacggcgucauggaacaguuaggaauugcccgcccaaggguggaauauccagcucaccaagcaaugaaucuugugggaccgcagucuaucgaagguggcgcucacgaaggccugcaacaucugggaccauuuggcaauauaccuaauauaguggcagagcucacaggugacaauauuccuaaagacuucucugaagaccaggguuaucccgauccacccaacccuuguccaguagggaaaaccgacgacggcuguuuagagaacacaccugauacggcugaguucucccgggaguuccagcuccaccagcaccuuuuugauccggaacaugacuacccagggcucggcaaguggaauaaaaaguuacuguacgaaaagaugaaaggcggcgagaggaggaaacgcagauccgugaauccguaccugcagggccaacgcuuggauaacguagucgcaaaaaaauccguuccccauuucuccgacgaggauaaagaucccgaauag

SEQ ID NO: 134431 - RNA, 636 nt, Artificial Sequence
  derived and/or modified sequence
auggugaguagaauggugucuacaaugcuguccgggcugcuguucugguuagcguccggcuggacuccagccuucgccuacuccccuaggacccccgaucgggugagcgaggccgauauccaacgucuguuacacggagugauggaacaacuugggauugcgcgaccuagaguggaauaccccgcccaccaagccaugaaccugguaggaccacagaguauagaaggaggcgcucacgaaggauugcagcaucugggcccauuugggaacauuccgaacauaguugccgagcugacuggggacaauauuccuaaagacuucucugaagaccaggguuaucccgauccacccaacccuuguccaguagggaaaaccgacgacggcuguuuagagaacacaccugauacggcugaguucucccgggaguuccagcuccaccagcaccuuuuugauccggaacaugacuacccagggcucggcaaguggaauaaaaaguuacuguacgaaaagaugaaaggcggcgagaggaggaaacgcagauccgugaauccguaccugcagggccaacgcuuggauaacguagucgcaaaaaaauccguuccacauuuuagcgacgaagauaaggaucccgaauag

SEQ ID NO: 134432 - protein, 114 aa, Artificial Sequence
  derived and/or modified sequence
MVIRVYIASSSGSTAIKKKQQDVLGFLEANKIGFEEKDIAANEENRKWMRENVPENSRPATGYPLPPQIFNESQYRGDYDAFFEARENNAVYAFLGLTAPPGSKEAEVQAKQQA

SEQ ID NO: 134433 - DNA, 345 bp, Artificial Sequence
  derived and/or modified sequence
atggtgatcagagtgtacatcgccagcagcagcggcagcaccgccatcaagaagaagcagcaggacgtgctgggcttcctggaggccaacaagatcggcttcgaggagaaggacatcgccgccaacgaggagaacagaaagtggatgagagagaacgtgcccgagaacagcagacccgccaccggctaccccctgcccccccagatcttcaacgagagccagtacagaggcgactacgacgccttcttcgaggccagagagaacaacgccgtgtacgccttcctgggcctgaccgccccccccggcagcaaggaggccgaggtgcaggccaagcagcaggcctag

SEQ ID NO: 134434 - DNA, 345 bp, Artificial Sequence
  derived and/or modified sequence
atggttatacgcgtgtatattgcctcttcatctggcagcacggctattaaaaagaagcagcaggacgtgttgggattcctggaggctaataagataggctttgaggaaaaagacatcgctgctaacgaggagaacagaaaatggatgcgcgagaatgttcccgagaactctcgaccggccactggctaccctttacctcctcagatcttcaatgagtctcagtacagaggagactacgatgctttcttcgaggccagagaaaacaatgctgtttacgccttcctcggactgactgccccccccgggagtaaagaagccgaagtccaggcgaaacagcaggcttag

SEQ ID NO: 134435 - DNA, 1923 bp, Artificial Sequence
  derived and/or modified sequence
cgagattccctattaaaaaaaaatagaattgatgcaaacagcctgttccttccggggttttgggctggaactgcagcgcttagagagctcggtggaagctgctaaaggcggaggcggggctctggcgagttctccttccaccttcccccacccttctctgccaaccgctgtttcagcccctagctggattccagccattgctgcagctgctccacagcccttttcaggacccaaacaaccgcagccgctgttcccaggatggtgatccgtgtatatattgcatcttcctctggctctacagcgattaagaagaaacaacaagatgtgcttggtttcctagaagccaacaaaataggatttgaagaaaaagatattgcagccaatgaagagaatcggaagtggatgagagaaaatgtacctgaaaatagtcgaccagccacaggttaccccctgccacctcagattttcaatgaaagccagtatcgcggggactatgatgccttctttgaagccagagaaaataatgcagtgtatgccttcttaggcttgacagccccacctggttcaaaggaagcagaagtgcaagcaaagcagcaagcatgaaccttaagcactgtgctttaagcatcctgaaaaatgagtctccattgcttttataaaatagcagaattagctttgcttcaaaagaaataggcttaatgttgaaataatagattagttgggttttcacatgcaaacattcaaaatgaatacaaaattaaaatttgaacattatggtgattatggtgaggagaatgggatattaacataaaattatattaataagtagatatcgtagaaatagtgttgttacctgccaagccatcctgtatacaccaatgattttacaaagaaaacacccttccctccttctgccattactatggcaacttaagtgtatctgcagctctacattaaaaaggagaaagagaaataacctgtctctcattcctaagttgcctcattaattttcatgaacaagaatatgtacctttttgatgctatattactgcgattaaaaagttcttgcaggtaatgtttatgatatgttaaacgttgtaatttcctatcgtaattataacattcccattcttttgtagatgaaacttctacatattgaaccacagattttctgagcttctaaatgtagcctttcattgcacatttcagtgatcagaatagatatccttttacacgcacaaaagcaatagattcattcagtggacaagttccttgtttaactacacagctatgatggaatgatatatccaagttccttgcctcagtgaaatatgcatatgtatatcatgaaagtgggatgccaagtaagcttaaaatggcattctctagcaaagagattagacttttaaataactcttataaaacaggttggcgatcatttcccaagattggtttcccttgagtttttgctaaaacaaatcttagtagttttgcccgtttaaaacaactcacaatcgtaaatgctactattcctaagatatcttacctttttatttcagtttagccatgtattgtatgagtgtattagtctaagcagtgagaatcttttctatgcctctattccagcaaaaagtagaagtatcaaataaaaagggcaacttttaaaatattaagcctgaagacttctaaaaagacaagaaacatggcctaaataaccaacatagatttacatagtaagtttcacactaccttattaccaaaagcaaacacctcttactttaaactacattatcatgtatatctattgtatgctggtctttactttttgccaaaatcaacatataatgaagagatgcctttgtttcatgagattcaaacttgatgctatgctttaaaataaactcagtacttttagaaacataa

SEQ ID NO: 134436 - DNA, 345 bp, Artificial Sequence
  derived and/or modified sequence
atggtgatccgggtgtacatcgccagcagcagcggcagcacagccatcaagaagaagcagcaggatgtgctgggcttcctggaggccaacaagattggatttgaggagaaggacattgctgccaatgaggagaacaggaagtggatgagagaaaatgtgcctgagaacagcaggcctgccaccggctaccccctgcccccccagatcttcaatgaaagccagtacagaggagactatgatgccttctttgaggccagagaaaataatgctgtgtatgccttcctgggcctgacagcccctcctggcagcaaggaggccgaggtgcaggccaagcagcaggcctag

SEQ ID NO: 134437 - DNA, 345 bp, Artificial Sequence
  derived and/or modified sequence
atggtgatccgggtgtacatcgccagcagcagcggcagcaccgccatcaagaaaaagcagcaggatgtccttggctttttagaagctaataagattggattcgaagaaaaggatatcgcggcaaacgaggagaataggaagtggatgcgcgaaaatgttcccgagaacagtcgacccgcgacaggctatccactccccccacagatcttcaatgaaagccagtacagaggtgactatgacgcttttttcgaagcccgcgagaacaacgccgtctatgcatttctagggctgacagctccccctgggtcaaaagaagctgaggttcaggctaaacagcaggcttag

SEQ ID NO: 134438 - DNA, 345 bp, Artificial Sequence
  derived and/or modified sequence
atggtgatcagggtctatattgcaagcagctctgggtccaccgccataaaaaaaaagcagcaagacgttctggggttcttagaggcaaacaagattggattcgaagagaaggatatcgctgcaaatgaagagaacagaaagtggatgagagagaacgtcccagaaaattctaggcctgcgacagggtaccctctcccaccacagatttttaacgagagtcaataccgcggtgactatgatgcattcttcgaagccagagaaaataacgcggtttacgcatttctggggctgacggcgccacctgggtccaaagaagccgaggtccaggccaagcaacaggcctag

SEQ ID NO: 134439 - protein, 317 aa, Artificial Sequence
  derived and/or modified sequence
  misc_feature (1)..(1): Xaa can be any naturally occurring amino acid
XPLMESELLTEKEVAMIFVNWKELIMCNIKLLKALRVRKKMSGEKMPVKMIGDILSAQLPHMQPYIRFCSRQLNGAALIQQKTDEAPDFKEFVKRLAMDPRCKGMPLSSFILKPMQRVTRYPLIIKNQLVFNSVTNCLGPRKFLHSGKLYKAKSNKELYGFLFNDFLLLTQITKPLGSSGTDKVFSPKSNLQYKMYKTPIFLNEVLVKLPTDPSGDEPIFHISHIDRVYTLRAESINERTAWVQKIKAASELYIETEKKKREKAYLVRSQRATGIGRLMVNVVEGIELKPCRSHGKSNPYCEVTMGSQCHITKTIQD

SEQ ID NO: 134440 - protein, 1721 aa, Artificial Sequence
  derived and/or modified sequence
MAQFPTPFGGSLDIWAITVEERAKHDQQFHSLKPISGFITGDQARNFFFQSGLPQPVLAQIWALADMNNDGRMDQVEFSIAMKLIKLKLQGYQLPSALPPVMKQQPVAISSAPAFGMGGIASMPPLTAVAPVPMGSIPVVGMSPTLVSSVPTAAVPPLANGAPPVIQPLPAFAHPAATLPKSSSFSRSGPGSQLNTKLQKAQSFDVASVPPVAEWAVPQSSRLKYRQLFNSHDKTMSGHLTGPQARTILMQSSLPQAQLASIWNLSDIDQDGKLTAEEFILAMHLIDVAMSGQPLPPVLPPEYIPPSFRRVRSGSGISVISSTSVDQRLPEEPVLEDEQQQLEKKLPVTFEDKKRENFERGNLELEKRRQALLEQQRKEQERLAQLERAEQERKERERQEQERKRQLELEKQLEKQRELERQREEERRKEIERREAAKRELERQRQLEWERNRRQELLNQRNKEQEDIVVLKAKKKTLEFELEALNDKKHQLEGKLQDIRCRLTTQRQEIESTNKSRELRIAEITHLQQQLQESQQMLGRLIPEKQILNDQLKQVQQNSLHRDSLVTLKRALEAKELARQHLRDQLDEVEKETRSKLQEIDIFNNQLKELREIHNKQQLQKQKSMEAERLKQKEQERKIIELEKQKEEAQRRAQERDKQWLEHVQQEDEHQRPRKLHEEEKLKREESVKKKDGEEKGKQEAQDKLGRLFHQHQEPAKPAVQAPWSTAEKGPLTISAQENVKVVYYRALYPFESRSHDEITIQPGDIVMVIGCWVDESQTGEPGWLGGELKGKTGWFPANYAEKIPENEVPAPVKPVTDSTSAPAPKLALRETPAPLAVTSSEPSTTPNNWADFSSTWPTSTNEKPETDNWDAWAAQPSLTVPSAGQLRQRSAFTPATATGSSPSPVLGQGEKVEGLQAQALYPWRAKKDNHLNFNKNDVITVLEQQDMWWFGEVQGQKGWFPKSYVKLISGPIRKSTSMDSGSSESPASLKRVASPAAKPVVSGEEFIAMYTYESSEQGDLTFQQGDVILVTKKDGDWWTGTVGDKAGVFPSNYVRLKDSEGSGTAGKTGSLGKKPEIAQVIASYTATGPEQLTLAPGQLILIRKKNPGGWWEGELQARGKKRQIGWFPANYVKLLSPGTSKITPTEPPKSTALAAVCQVIGMYDYTAQNDDELAFNKGQIINVLNKEDPDWWKGEVNGQVGLFPSNYVKLTTDMDPSQQWCSDLHLLDMLTPTERKRQGYIHELIVTEENYVNDLQLVTEIFQKPLMESELLTEKEVAMIFVNWKELIMCNIKLLKALRVRKKMSGEKMPVKMIGDILSAQLPHMQPYIRFCSRQLNGAALIQQKTDEAPDFKEFVKRLAMDPRCKGMPLSSFILKPMQRVTRYPLIIKNILENTPENHPDHSHLKHALEKAEELCSQVNEGVREKENSDRLEWIQAHVQCEGLSEQLVFNSVTNCLGPRKFLHSGKLYKAKSNKELYGFLFNDFLLLTQITKPLGSSGTDKVFSPKSNLQYKMYKTPIFLNEVLVKLPTDPSGDEPIFHISHIDRVYTLRAESINERTAWVQKIKAASELYIETEKKKREKAYLVRSQRATGIGRLMVNVVEGIELKPCRSHGKSNPYCEVTMGSQCHITKTIQDTLNPKWNSNCQFFIRDLEQEVLCITVFERDQFSPDDFLGRTEIRVADIKKDQGSKGPVTKCLLLHEVPTGEIVVRLDLQLFDEP

SEQ ID NO: 134441 - protein, 1220 aa, Artificial Sequence
  derived and/or modified sequence
MAQFPTPFGGSLDIWAITVEERAKHDQQFHSLKPISGFITGDQARNFFFQSGLPQPVLAQIWALADMNNDGRMDQVEFSIAMKLIKLKLQGYQLPSALPPVMKQQPVAISSAPAFGMGGIASMPPLTAVAPVPMGSIPVVGMSPTLVSSVPTAAVPPLANGAPPVIQPLPAFAHPAATLPKSSSFSRSGPGSQLNTKLQKAQSFDVASVPPVAEWAVPQSSRLKYRQLFNSHDKTMSGHLTGPQARTILMQSSLPQAQLASIWNLSDIDQDGKLTAEEFILAMHLIDVAMSGQPLPPVLPPEYIPPSFRRVRSGSGISVISSTSVDQRLPEEPVLEDEQQQLEKKLPVTFEDKKRENFERGNLELEKRRQALLEQQRKEQERLAQLERAEQERKERERQEQERKRQLELEKQLEKQRELERQREEERRKEIERREAAKRELERQRQLEWERNRRQELLNQRNKEQEDIVVLKAKKKTLEFELEALNDKKHQLEGKLQDIRCRLTTQRQEIESTNKSRELRIAEITHLQQQLQESQQMLGRLIPEKQILNDQLKQVQQNSLHRDSLVTLKRALEAKELARQHLRDQLDEVEKETRSKLQEIDIFNNQLKELREIHNKQQLQKQKSMEAERLKQKEQERKIIELEKQKEEAQRRAQERDKQWLEHVQQEDEHQRPRKLHEEEKLKREESVKKKDGEEKGKQEAQDKLGRLFHQHQEPAKPAVQAPWSTAEKGPLTISAQENVKVVYYRALYPFESRSHDEITIQPGDIVMVKGEWVDESQTGEPGWLGGELKGKTGWFPANYAEKIPENEVPAPVKPVTDSTSAPAPKLALRETPAPLAVTSSEPSTTPNNWADFSSTWPTSTNEKPETDNWDAWAAQPSLTVPSAGQLRQRSAFTPATATGSSPSPVLGQGEKVEGLQAQALYPWRAKKDNHLNFNKNDVITVLEQQDMWWFGEVQGQKGWFPKSYVKLISGPIRKSTSMDSGSSESPASLKRVASPAAKPVVSGEEFIAMYTYESSEQGDLTFQQGDVILVTKKDGDWWTGTVGDKAGVFPSNYVRLKDSEGSGTAGKTGSLGKKPEIAQVIASYTATGPEQLTLAPGQLILIRKKNPGGWWEGELQARGKKRQIGWFPANYVKLLSPGTSKITPTEPPKSTALAAVCQVIGMYDYTAQNDDELAFNKGQIINVLNKEDPDWWKGEVNGQVGLFPSNYVKLTTDMDPSQQ

SEQ ID NO: 134442 - protein, 1721 aa, Artificial Sequence
  derived and/or modified sequence
MAQFPTPFGGSLDIWAITVEERAKHDQQFHSLKPISGFITGDQARNFFFQSGLPQPVLAQIWALADMNNDGRMDQVEFSIAMKLIKLKLQGYQLPSALPPVMKQQPVAISSAPAFGMGGIASMPPLTAVAPVPMGSIPVVGMSPTLVSSVPTAAVPPLANGAPPVIQPLPAFAHPAATLPKSSSFSRSGPGSQLNTKLQKAQSFDVASVPPVAEWAVPQSSRLKYRQLFNSHDKTMSGHLTGPQARTILMQSSLPQAQLASIWNLSDIDQDGKLTAEEFILAMHLIDVAMSGQPLPPVLPPEYIPPSFRRVRSGSGISVISSTSVDQRLPEEPVLEDEQQQLEKKLPVTFEDKKRENFERGNLELEKRRQALLEQQRKEQERLAQLERAEQERKERERQEQERKRQLELEKQLEKQRELERQREEERRKEIERREAAKRELERQRQLEWERNRRQELLNQRNKEQEDIVVLKAKKKTLEFELEALNDKKHQLEGKLQDIRCRLTTQRQEIESTNKSRELRIAEITHLQQQLQESQQMLGRLIPEKQILNDQLKQVQQNSLHRDSLVTLKRALEAKELARQHLRDQLDEVEKETRSKLQEIDIFNNQLKELREIHNKQQLQKQKSMEAERLKQKEQERKIIELEKQKEEAQRRAQERDKQWLEHVQQEDEHQRPRKLHEEEKLKREESVKKKDGEEKGKQEAQDKLGRLFHQHQEPAKPAVQAPWSTAEKGPLTISAQENVKVVYYRALYPFESRSHDEITIQPGDIVMVKGEWVDESQTGEPGWLGGELKGKTGWFPANYAEKIPENEVPAPVKPVTDSTSAPAPKLALRETPAPLAVTSSEPSTTPNNWADFSSTWPTSTNEKPETDNWDAWAAQPSLTVPSAGQLRQRSAFTPATATGSSPSPVLGQGEKVEGLQAQALYPWRAKKDNHLNFNKNDVITVLEQQDMWWFGEVQGQKGWFPKSYVKLISGPIRKSTSMDSGSSESPASLKRVASPAAKPVVSGEEFIAMYTYESSEQGDLTFQQGDVILVTKKDGDWWTGTVGDKAGVFPSNYVRLKDSEGSGTAGKTGSLGKKPEIAQVIASYTATGPEQLTLAPGQLILIRKKNPGGWWEGELQARGKKRQIGWFPANYVKLLSPGTSKITPTEPPKSTALAAVCQVIGMYDYTAQNDDELAFNKGQIINVLNKEDPDWWKGEVNGQVGLFPSNYVKLTTDMDPSQQWCSDLHLLDMLTPTERKRQGYIHELIVTEENYVNDLQLVTEIFQKPLMESELLTEKEVAMIFVNWKELIMCNIKLLKALRVRKKMSGEKMPVKMIGDILSAQLPHMQPYIRFCSRQLNGAALIQQKTDEAPDFKEFVKRLAMDPRCKGMPLSSFILKPMQRVTRYPLIIKNILENTPENHPDHSHLKHALEKAEELCSQVNEGVREKENSDRLEWIQAHVQCEGLSEQLVFNSVTNCLGPRKFLHSGKLYKAKSNKELYGFLFNDFLLLTQITKPLGSSGTDKVFSPKSNLQYKMYKTPIFLNEVLVKLPTDPSGDEPIFHISHIDRVYTLRAESINERTAWVQKIKAASELYIETEKKKREKAYLVRSQRATGIGRLMVNVVEGIELKPCRSHGKSNPYCEVTMGSQCHITKTIQDTLNPKWNSNCQFFIRDLEQEVLCITVFERDQFSPDDFLGRTEIRVADIKKDQGSKGPVTKCLLLHEVPTGEIVVRLDLQLFDEP

SEQ ID NO: 134443 - DNA, 5166 bp, Artificial Sequence
  derived and/or modified sequence
atggctcaattccccacaccgttcggagggtccctcgatatctgggctattacagtcgaggaaagggctaagcacgatcaacagttccattctttgaaacccattagtgggtttatcactggagatcaggcgaggaatttctttttccagagcggcctcccacagcccgttctcgcccaaatttgggcccttgccgacatgaacaatgatgggcgaatggatcaggtcgagttttcaatagcaatgaaactcatcaagctcaaactccagggctatcagttaccaagcgccctccctccagtgatgaagcagcaacctgtcgccatctcctccgcacccgctttcggaatgggtggtattgcatctatgccgcctctgactgctgtggcccctgtgcccatgggttctatcccggtggtgggaatgagccctactttggtatcgtccgtgcccaccgcggcagtacctccactggctaatggcgccccacccgttatacagcctctgcccgctttcgcacaccctgcagccaccctgccgaaatctagctctttctcacggagcgggcctggaagtcagttaaacacgaagctacagaaggcccagtcattcgatgtagcctccgttcccccggtcgcagaatgggctgtgccacagtctagtcgccttaagtacaggcagctattcaattcccacgacaagacgatgagtgggcacctgactgggccgcaggccagaaccatcctgatgcagtcttccttgccacaggctcagttggcgtccatctggaatctgtcagacattgaccaggatggtaaattaacagcggaggagttcatactagcaatgcacctcatcgacgtggcaatgtccggccaacctttgccacccgtgcttccccctgaatacattccgcccagcttccggagggtgcgatccggctccggaatttccgttatttcgtctacctcagtggatcagcgactccctgaagaacctgtcctggaggacgagcagcagcaattagagaaaaaactgcctgtgacattcgaggacaaaaagcgcgaaaacttcgagcgtggaaatctggaactcgagaagagaaggcaagcattactcgagcagcagagaaaggagcaggaacggctggcccagttggaacgggcagaacaagagcggaaagagagagagcggcaagaacaagaacggaaacgacagttggaactagaaaaacaactggagaagcaacgagaactggaaagacagcgagaagaagagagaagaaaggagatcgagcggagggaggccgcgaagcgagaactcgagcggcaacgccaattggaatgggaacgcaaccgcagacaggagcttttaaatcagaggaacaaagagcaggaggacatcgtcgtgctaaaggctaagaagaagaccctggaattcgagctggaggctcttaacgacaagaaacaccagctggaagggaagctgcaagatatccggtgcaggctcactacacaacgacaggaaatcgagtccaccaacaagtcacgggaactccggatagcggagattacccatctacagcagcagttgcaggagtcacaacagatgctgggacgactcattccggagaagcaaatccttaatgatcaacttaagcaggtacagcagaactccctccatcgagatagtctggttactctaaaaagagctctggaggcgaaagagcttgcccggcagcatctgcgggaccagctggatgaagtggagaaagagacccgcagcaaactccaggaaattgacattttcaacaaccagctgaaggaactcagggagatccataacaaacagcagctgcagaagcagaaaagcatggaggccgagcgcctgaagcagaaggagcaggagcgcaagataattgagttagagaagcagaaggaagaagcgcagcgccgtgctcaagagcgcgacaaacagtggctggaacatgttcagcaagaggacgagcatcaaagacctcgcaaactgcatgaggaagaaaagctgaaacgcgaggaatccgttaaaaagaaggatggtgaggagaagggtaaacaggaggctcaagataaactcggaaggctgttccaccagcatcaagaaccagcaaagccagcggttcaggccccatggagcaccgctgagaaaggtcccttaaccatttccgcccaggaaaatgtgaaggttgtctactaccgtgctctctacccttttgagtcaaggagccacgacgaaataaccatccagcctggcgatattgtgatggtcatcggttgctgggtggatgagtcccaaaccggcgagcccgggtggctaggcggtgaactgaaaggcaagacgggatggttccccgcgaactatgccgagaagatccctgaaaatgaggttccggcgcctgttaagcctgttacagattccacatcagcccccgccccgaaactggcactgcgggagacgcctgctcctctcgctgtgaccagcagtgaaccatccaccacgccaaataattgggcagacttttcctcaacttggccaacgagtacgaatgaaaaacctgaaacggacaattgggacgcttgggcagcccaacccagcctaaccgtgccctcagcgggccaacttagacaaaggtcagccttcaccccagccaccgccacagggagctcaccaagcccagtcctgggtcagggtgagaaagtggaggggttacaggctcaggcactctacccttggagggccaaaaaagacaatcacttgaactttaataagaacgatgttatcactgttctggagcagcaggacatgtggtggtttggggaggtacaaggacagaaaggctggttccccaaaagctacgtgaaactgattagtggaccaatcagaaaatctaccagcatggacagcggatcctctgagtcacctgcgtccctgaagcgggtcgcttctccagctgcaaagccagtggtctccggggaagagttcattgcgatgtacacttacgaaagctcagagcaaggcgatctcacattccagcagggtgacgtcatcctcgtaactaaaaaggatggggattggtggaccgggactgttggagacaaggccggtgtctttccttcaaactatgtgagacttaaagacagcgaggggtcgggcactgccgggaaaacaggttctctaggcaagaaaccagagatcgcccaagtgatcgcctcctacaccgcgacagggcccgaacagctgaccctggcccccgggcaacttatactcattcgtaagaagaatcctggaggctggtgggaaggcgaactgcaggctcgcgggaaaaaaagacagatcgggtggttcccagccaattacgtgaaactcctgtccccaggaacatctaagataacacctaccgaacccccgaagagcactgcactggccgcggtgtgtcaggtaataggcatgtacgactacacagcacagaacgacgacgaactagccttcaacaagggtcaaattattaacgtcttaaataaagaagatccggattggtggaagggagaggtcaatggccaggttgggctgtttccctccaactacgtgaagttaaccactgacatggatccatctcagcaatggtgctccgacctgcatttgctggacatgcttaccccgactgagagaaagagacagggatacattcacgagctcattgttacggaagagaactatgtgaatgatctgcagctggtgacagaaatattccaaaaacctcttatggagtccgagctgctcaccgagaaagaggttgcaatgatcttcgtgaactggaaggagctaataatgtgtaatattaagctgctcaaagccctcagagtcaggaagaaaatgagtggagagaagatgccggtgaaaatgatcggggacatcctatctgcacagttgccccacatgcagccatacatacgtttctgctctcggcagctgaatggggctgctcttattcagcagaagaccgatgaagccccagattttaaagaattcgtgaaaaggcttgctatggatccccggtgcaagggcatgccactgagttcctttatcctcaagccaatgcagcgcgtgacaagatatccgctgattataaaaaacatcctcgagaacaccccagagaatcaccccgatcattcccatctcaagcatgcccttgaaaaggctgaggaactatgttcccaggtcaacgagggggtacgtgagaaagaaaacagcgatcgattggagtggattcaagcgcacgtacagtgcgaaggattatctgaacagctggtgttcaactccgtgacaaattgtcttggcccgcgtaagtttctgcacagcgggaagctgtacaaggcgaagtcgaacaaggaactgtacgggttcctatttaatgacttccttctgctgactcagattactaagcctcttggatccagtgggactgataaagtgttttcaccaaaatcgaatttacagtataaaatgtataagactcccatatttctgaacgaagtgctagtgaaactccctaccgatccaagtggcgatgaaccaatttttcatattagtcatattgaccgggtatacactctgagagctgaatctataaatgaacgcacagcctgggtccagaaaattaaagccgcgtccgaattgtatattgagacagagaagaagaagagagagaaggcatacctcgttcgttcccagcgggcgacaggaattggacgattaatggtgaacgtggtagaaggtatcgaattgaaaccatgccggtcccatggcaaatcgaatccctattgtgaggtgacgatgggatctcaatgccacattacaaaaactatacaagacacactcaaccctaagtggaacagcaactgtcagtttttcatcagagatttggagcaggaagtgctctgtatcacagtgttcgagagagatcagtttagtcccgacgattttctgggccgtacagagatccgggtggcagacattaaaaaagatcaaggtagcaaggggcccgttactaaatgtctcctcctccatgaagtgcctactggtgagatcgtggttagactcgatcttcagctcttcgacgagccatag

SEQ ID NO: 134444 - DNA, 4953 bp, Artificial Sequence
  derived and/or modified sequence
atggctcaattcccaacgccttttggtggcagtctggacatttgggcaataaccgttgaggagcgcgccaagcatgaccaacagtttcactcgctgaaacctatctccgggtttataacgggtgaccaggcgcggaatttttttttccaaagcggacttccgcagcccgtactggcccagatctgggctctcgctgatatgaacaatgatgggcgcatggatcaagtggaattcagcattgctatgaaattgatcaagctgaaacttcagggataccagcttccgagcgcgttgccaccagtcatgaagcagcaacctgtggccatctcatctgcccctgcatttggtatggggggcatcgcgtcaatgccacctctgactgcagtcgcccctgtgcccatgggctctatcccagtcgtaggcatgtcacctaccttagtcagcagcgtacctaccgcagccgtccctcccttagctaatggcgctccacccgtaatccagcctcttcccgcttttgctcacccggccgccaccttgccgaagtcctccagcttttcccgcagcgggccaggaagccaactcaacacaaagcttcagaaggcccagagttttgacgtcgccagtgtccccccagtcgccgagtgggcggtgccgcaaagttccaggcttaagtaccgccagctgtttaactctcacgacaaaacaatgtctggccacctgacaggccctcaggcacgcactattcttatgcaaagttcgctaccgcaagcccagctggcatcaatttggaatctgtcggacatagatcaggatggaaaactgacagccgaagagtttattctcgccatgcacctgatcgacgtggcaatgagcggacagcccctcccaccggtgctaccccccgagtacattccacccagctttagaagggtgagaagtgggagtggcatttcagtcatctcctccaccagtgttgatcagaggctgccggaggaacctgtgttggaggatgagcagcagcagctggagaaaaagctgcccgtaacttttgaagacaagaaacgggaaaacttcgagcgtgggaatctggaactggagaagcgacgccaggcactgctcgagcagcagaggaaagagcaggagcgcctggcacagctggaacgagcagaacaagagagaaaggaaagggagcgccaggaacaggagaggaagcgtcagcttgagttagagaaacagctcgagaaacagagggaactggagcgccaaagggaagaggagagacgcaaagaaattgaaagaagagaagccgcaaagagagagttggagcgacagcgccaattagagtgggagaggaaccgaagacaggagctcttaaatcagaggaacaaggagcaggaggatatcgtcgttctgaaagccaagaaaaagacacttgagttcgagctggaggcattgaatgataaaaagcaccagctggaagggaaactgcaggatatcaggtgtcgcctgacgacacaacgccaggagatcgagtcgaccaataaatcacgggaactgaggatcgctgagatcacacatctgcagcaacagcttcaggagagtcagcagatgctgggtcgattaatccccgagaagcagattctgaacgatcaactaaagcaggtgcagcagaattctttgcatagggattcactcgtgacactgaagcgagccttagaagctaaagagctcgcccgccaacacctcagagaccagcttgatgaagtggaaaaagagacaagatccaagcttcaggaaattgacatcttcaataaccagctcaaggaactgagggagatccacaataagcagcagttacaaaagcaaaagtcaatggaagccgagcggctcaagcagaaggagcaggagcggaaaatcattgaactggagaagcaaaaggaagaagcgcagcgcagggctcaggagcgcgataaacagtggcttgaacacgtgcagcaggaagacgaacaccagagaccacggaagcttcatgaagaagagaaactgaagagagaagagagcgtgaagaaaaaagacggggaggaaaaagggaagcaggaagcccaggacaaactgggtcggctgtttcaccaacaccaggaacccgctaagccagccgtccaagctccatggtccaccgccgagaagggcccactaaccatctccgcccaggagaacgtgaaggttgtgtactaccgtgcgctgtacccatttgaatcaagaagtcacgatgagattactattcagcccggtgatattgtgatggttattggctgctgggtggacgaaagtcaaactggtgagcctggttggttaggtggagagctgaaagggaaaaccggatggttccccgctaattacgccgagaaaatccctgaaaatgaggtgcctgcccccgtaaaaccggttaccgacagtactagtgcccctgcccccaagctggcacttcgagagacacccgcccctttggctgtgacctcttccgaaccgagtactacaccaaacaactgggcagacttttcgagcacctggcccactagtactaacgagaagccagagaccgacaactgggacgcctgggccgcacagcccagcctgactgttcccagtgctggccagctccgccagaggagcgcatttacccccgccaccgccactggctcatccccttccccagtattaggccagggagagaaagtggaaggcctgcaagcccaagccctgtacccatggagagccaagaaggacaaccatcttaattttaacaagaatgacgtgatcactgtgctggagcagcaggacatgtggtggtttggcgaggtgcagggtcagaaagggtggtttccaaagtcatatgtgaagcttatatctgggccaattaggaaaagcactagtatggatagcggttcttcagagtctcctgccagtctcaagcgggttgcgtcaccagccgccaaaccggtagtgagtggcgaggagatcgcccaagtgatcgcttcctacactgccacgggtcctgagcaactcacactggcccccggccagctgatactgatccggaaaaagaacccgggcggctggtgggaaggcgagcttcaggccaggggcaagaaacgccaaatcggctggtttcctgcaaactatgtaaagttactctcacctggcacttcaaagatcacaccgacggagccacctaagtcaaccgcactggccgccgtttgtcaggtgatcggcatgtacgactataccgcacaaaacgacgatgagctggccttcaacaagggacagatcataaacgtgctaaataaggaggatccagattggtggaagggagaggttaacgggcaagtcggacttttcccatcaaattacgtcaaattgacaaccgacatggacccatctcaacagtggtgttctgatctccatctcctggacatgctgaccccgacggaaaggaagagacagggctacatccacgagctgattgtgactgaggagaattacgtcaatgacctccagctcgtgacagagatcttccagaagcctctaatggaatcagaacttcttaccgagaaagaagtcgcaatgatctttgtcaattggaaagagctaatcatgtgtaacattaagctgctgaaagccctccgcgtcaggaaaaaaatgtctggggagaagatgccggttaagatgatcggggacatactatcggcccagctgcctcacatgcagccgtacatcaggttttgttctcggcaactcaatggagccgctcttatacagcagaagaccgacgaggcccccgattttaaggaatttgttaaaagactggcaatggaccctcgctgcaaaggtatgccactgagtagttttattctgaagcctatgcaacgggtcaccagatacccgctgattattaagaacatactggaaaatactccggagaaccaccctgatcactcccacttgaagcatgcccttgagaaggcagaagaactctgtagtcaggtgaacgaaggagtgagagagaaagaaaacagtgatcggttagaatggattcaagctcacgtccaatgcgaaggactttccgagcagctggttttcaactcagtgacaaattgtttaggaccgcggaagtttcttcactccgggaaactgtacaaagccaagagtaataaagaactatacgggttcctgtttaacgattttctgctgctgacccagattacaaaacctttaggttcttctggaacagacaaggtgttctcacctaagagcaacctccagtacaagatgtacaaaacacctatcttccttaatgaggtcctggtgaagttacccacagatcccagcggtgacgaaccaatttttcacattagccatatcgacagggtttataccctcagggccgagtctatcaacgagaggaccgcctgggtgcagaagattaaagctgctagcgaattgtatattgagactgaaaagaagaagagagaaaaggcttacctcgtgcggtctcagcgcgccaccgggattggccggctgatggttaatgtggttgagggaatcgagcttaagccatgtaggagccacggaaagagtaacccctattgcgaagtgacgatgggtagtcagtgccacatcactaaaacgatacaggacacactgaaccccaagtggaatagtaattgccaattttttatccgagatcttgaacaggaagtgctgtgtattaccgtgttcgaacgggaccagttctcacctgatgacttccttgggagaaccgagatccgggtggctgacatcaagaaagaccaaggctccaaggggcccgtcacaaagtgtctgctgctgcacgaagtgcccacgggagagatcgtggtgaggttggatttgcaattgtttgatgagccctag

SEQ ID NO: 134445 - DNA, 5166 bp, Artificial Sequence
  derived and/or modified sequence
atggcacagttccctacaccattcgggggctcactagatatctgggcaatcaccgttgaggaacgggctaagcatgatcaacagttccattctcttaagcccattagcggttttattacaggggatcaggcccggaattttttctttcagtcagggcttccccagccggtactcgcacagatctgggcattagcagatatgaataacgacgggagaatggaccaggtcgagttcagtattgccatgaaacttataaagcttaagctgcagggctaccaactcccgtcggccctgccgcctgtaatgaaacagcaacccgtggctattagcagtgctccggcatttggcatggggggcattgcaagtatgccccctcttaccgccgtggccccagtgccaatgggctccatccccgtggtcgggatgagcccaactctggtttcctccgtgcctacagccgccgtgcctcccctggcaaatggcgcccctcctgtaattcaacccctacctgcattcgctcatcccgcggctacattgcctaagagctcttcctttagcaggtccgggccaggatcccagctgaacaccaaactgcagaaagcccagagtttcgatgtggcgtctgtgccgccggttgccgaatgggcagttccacaaagtagtagactcaagtataggcagctgtttaactcacatgacaagactatgagcggccacctgacaggcccccaggcacgtacaatcctcatgcagagttcactaccacaagcacagcttgcatcaatctggaacttatctgatattgatcaggacgggaagctgactgcagaggagttcatcctggctatgcatctgattgacgtggcaatgagtgggcagcccttgcctcccgtgctccctccggaatatattcccccttcatttaggagagtccgctctggcagcggaatcagcgtcatcagtagcacatccgtagaccaacgattacccgaggagcccgtactagaggatgagcagcagcagcttgagaaaaagctgcccgtgaccttcgaggacaaaaaacgtgagaattttgagcggggtaacttagaactggaaaagaggcggcaggcgttactggagcagcaaaggaaggagcaagagagactcgcccaacttgagcgcgctgaacaggagcgcaaggaaagggaaaggcaggaacaggaacgaaagagacagctcgagctggagaaacaactggagaagcaaagagaactggagagacagcgcgaagaagagcgcagaaaggaaattgagcgccgcgaggccgccaaacgggaattggagagacagcgccaactggaatgggagcggaacagacgccaggaattattaaatcagaggaacaaggaacaggaggacattgtcgttctgaaagctaagaaaaaaaccctggaatttgagctggaggctctcaacgacaagaaacaccaactggagggaaagctgcaggacattcggtgccggttgacaacccagcgccaggagattgaatctacaaataagtcacgcgaactgcgtatcgccgagattacacatttacagcagcaacttcaggaatctcagcagatgttaggccgcttaatcccggagaaacagattctcaacgaccaactcaaacaagtgcagcagaactcactgcacagagattccttggtgactcttaaacgagccttggaagcgaaggagctggcacggcagcaccttcgggatcagttggatgaagtggaaaaagaaacaaggagtaaactccaggagattgacattttcaataatcagctgaaagagctgagggagatccataataaacaacagctccagaagcagaagagcatggaggctgagcgccttaagcaaaaagagcaggagcgaaagatcatcgagctggagaaacagaaggaggaggcccagcgacgtgcacaggaaagggacaagcagtggctggaacatgtgcaacaggaggatgagcaccagcgtcctcggaagttgcacgaggaggagaagcttaagcgtgaggaatcagtcaagaagaaggatggggaagaaaaagggaagcaagaagctcaggataagctcgggagactgttccatcagcatcaggaacccgccaaacccgccgtgcaggcaccatggtccactgcagagaaaggccccctcaccatttctgcccaggagaacgttaaggtggtgtactaccgggccttgtaccctttcgaaagtaggtcacacgacgagatcacaatacagcccggggacattgtgatggttaaaggcgaatgggtggatgagtcccagacgggagagcccggatggctcggtggtgagctgaaaggaaagacaggatggtttcccgcaaactacgctgaaaaaatccccgagaacgaggtgccagcacccgtgaaacccgtgacagactccacaagcgcccctgctcccaaactcgccttgcgcgaaaccccggcccctctggccgtaacgtcatccgagccatctactactcctaacaactgggctgacttttcctctacctggcccacctcaaccaatgaaaagcccgagactgacaactgggatgcgtgggccgctcagccctctctcacagtgccaagcgccggacagttacggcagagatcagcattcacccccgcaactgccactggctcatctcctagccccgttctgggccagggggagaaggtagagggcctgcaggcacaggccctgtacccatggcgcgccaaaaaagacaaccacctgaacttcaacaaaaacgatgtaatcaccgtgttagagcagcaggatatgtggtggtttggagaggtacaaggtcaaaagggttggtttccgaagagctatgtgaagctcatcagtggccctatacggaaaagcacaagcatggactcgggcagctccgagtcccctgcaagtctcaagagggtggctagtcccgccgcaaaaccagtggttagcggcgaagaatttatcgcgatgtacacatacgagtctagtgagcagggggaccttactttccagcaaggagacgtaatcctcgtgacaaagaaggacggtgactggtggactggaacagttggtgacaaagcgggcgtgtttcccagcaactacgtgcgcctcaaggattcggaagggtccggaaccgccggaaaaacgggctctttaggaaaaaagccagagatcgcgcaggtgatagcttcctacactgctaccggccccgaacagctcaccctcgcgcctggacagttgattctgattagaaagaaaaaccctggaggttggtgggagggagagcttcaggcccgcgggaaaaagcgccagatcgggtggtttccagctaactatgttaaactgctgtctccaggaacaagcaaaatcacacccacagagcctcccaaatccacggctctggccgctgtctgccaggttatcgggatgtatgattatacagcccaaaatgacgacgagctggctttcaacaagggccagatcatcaatgttttaaacaaggaagatccagactggtggaagggcgaggtcaacggccaggtcggcctgtttcctagcaactacgtcaaactcaccaccgacatggatccctcccagcaatggtgcagtgatctgcacctgcttgatatgctgacacctacagagaggaaacgacaaggatacattcatgagctgatcgtgacagaagagaattacgtgaatgatctccagctcgtcactgagatctttcagaaaccacttatggagagtgagttactgactgagaaagaagttgccatgatatttgtgaattggaaagaactgatcatgtgtaacataaaactgctaaaggcactgagagtgcgcaagaagatgagcggggagaaaatgcccgtgaagatgatcggagacatactaagtgcccagttgccgcatatgcaaccttatatccgtttctgctctagacagctgaatggtgcagcgttgattcagcagaagaccgacgaggcgcccgatttcaaagaattcgtcaagcggctagccatggacccccggtgcaaagggatgcccctgagctcttttatcctaaagccgatgcagcgggtgactaggtaccccttgattattaagaacattctcgagaatacacctgagaaccacccggaccactctcacctgaagcatgcccttgagaaagcagaagaactatgttcgcaagtgaatgaaggggttagggaaaaggaaaacagcgatagacttgagtggattcaagcccacgtgcagtgtgagggtttatccgagcaactcgtcttcaattctgtcactaattgtctgggccccagaaagtttttgcatagtgggaagctgtacaaagcaaagtctaacaaggagctctacggctttctgttcaatgatttcctcctgctgacccaaattaccaaacccctcggtagctcagggaccgacaaggtgttctctcctaagtcaaacctgcagtacaagatgtacaagacgccgatatttttgaatgaggtgttagtaaagctgcctacagaccctagcggagacgagcccatctttcacatttcacacatcgatcgagtttatacgctgcgtgctgaatccatcaacgaacgtaccgcctgggtccagaagataaaagctgcttcagagctgtacatcgaaacagaaaaaaaaaagcgcgaaaaagcctacctggttcggagccagcgtgcaaccggaatcggacgtttaatggtgaacgtggtagagggaatcgagctaaagccttgccgtagtcacggcaagtctaatccctattgcgaggttacaatggggagccagtgtcatattaccaagacaatccaggacacactcaaccctaagtggaactccaactgtcaattttttatcagggatctggagcaagaggttttatgtattactgtatttgagagggatcaatttagtccagacgatttcctgggacgcaccgagatccgagtcgctgacatcaaaaaggaccagggtagcaagggcccagtgacaaagtgcctactgctccatgaggtgcctaccggggaaattgtagttaggttggacctgcagctattcgatgagccatag

SEQ ID NO: 134446 - DNA, 237 bp, Artificial Sequence
  derived and/or modified sequence
atggcacagttccctacacctttcggggggagtctggatatctgggctattaccgtggaagaaagggccaagcacgatcagcagttccactctctgaagccaatctccggatttattaccggagaccaggcccggaattttttcttccaaagcggcctgccacagcctgtgttagctcagatctgggcacttgcagacatgaataatgacgggcggatggaccaggtagagttctag

SEQ ID NO: 134447 - DNA, 6439 bp, Artificial Sequence
  derived and/or modified sequence
gagcgagggagggagcgaaggaggtagagaagagtggaggcgccaggggagggagcgtagcttggttgctccgtagtacggcggctcgcgaggaagaatcccgagcgggctccgggacggacagagaggcgggcggggatggtgtgcggggctgcggctcctgcgtccctcccagcggcgcgtgagcggcactgatttgtccctggggcggcagcgcggacccgcccggagatgaggcgtcgattagcaaggtaaaagtaacagaaccatggctcagtttccaacaccttttggtggcagcctggatatctgggccataactgtagaggaaagagcgaagcatgatcagcagttccatagtttaaagccaatatctggattcattactggtgatcaagctagaaactttttttttcaatctgggttacctcaacctgttttagcacagatatgggcactagctgacatgaataatgatggaagaatggatcaagtggagttttccatagctatgaaacttatcaaactgaagctacaaggatatcagctaccctctgcacttccccctgtcatgaaacagcaaccagttgctatttctagcgcaccagcatttggtatgggaggtatcgccagcatgccaccgcttacagctgttgctccagtgccaatgggatccattccagttgttggaatgtctccaaccctagtatcttctgttcccacagcagctgtgccccccctggctaacggggctccccctgttatacaacctctgcctgcatttgctcatcctgcagccacattgccaaagagttcttcctttagtagatctggtccagggtcacaactaaacactaaattacaaaaggcacagtcatttgatgtggccagtgtcccaccagtggcagagtgggctgttcctcagtcatcaagactgaaatacaggcaattattcaatagtcatgacaaaactatgagtggacacttaacaggtccccaagcaagaactattcttatgcagtcaagtttaccacaggctcagctggcttcaatatggaatctttctgacattgatcaagatggaaaacttacagcagaggaatttatcctggcaatgcacctcattgatgtagctatgtctggccaaccactgccacctgtcctgcctccagaatacattccaccttcttttagaagagttcgatctggcagtggtatatctgtcataagctcaacatctgtagatcagaggctaccagaggaaccagttttagaagatgaacaacaacaattagaaaagaaattacctgtaacgtttgaagataagaagcgggagaactttgaacgtggcaacctggaactggagaaacgaaggcaagctctcctggaacagcagcgcaaggagcaggagcgcctggcccagctggagcgggcggagcaggagaggaaggagcgtgagcgccaggagcaagagcgcaaaagacaactggaactggagaagcaactggaaaagcagcgggagctagaacggcagagagaggaggagaggaggaaagaaattgagaggcgagaggctgcaaaacgggaacttgaaaggcaacgacaacttgagtgggaacggaatcgaaggcaagaactactaaatcaaagaaacaaagaacaagaggacatagttgtactgaaagcaaagaaaaagactttggaatttgaattagaagctctaaatgataaaaagcatcaactagaagggaaacttcaagatatcagatgtcgattgaccacccaaaggcaagaaattgagagcacaaacaaatctagagagttgagaattgccgaaatcacccatctacagcaacaattacaggaatctcagcaaatgcttggaagacttattccagaaaaacagatactcaatgaccaattaaaacaagttcagcagaacagtttgcacagagattcacttgttacacttaaaagagccttagaagcaaaagaactagctcggcagcacctacgagaccaactggatgaagtggagaaagaaactagatcaaaactacaggagattgatattttcaataatcagctgaaggaactaagagaaatacacaataagcaacaactccagaagcaaaagtccatggaggctgaacgactgaaacagaaagaacaagaacgaaagatcatagaattagaaaaacaaaaagaagaagcccaaagacgagctcaggaaagggacaagcagtggctggagcatgtgcagcaggaggacgagcatcagagaccaagaaaactccacgaagaggaaaaactgaaaagggaggagagtgtcaaaaagaaggatggcgaggaaaaaggcaaacaggaagcacaagacaagctgggtcggcttttccatcaacaccaagaaccagctaagccagctgtccaggcaccctggtccactgcagaaaaaggtccacttaccatttctgcacaggaaaatgtaaaagtggtgtattaccgggcactgtacccctttgaatccagaagccatgatgaaatcactatccagccaggagacatagtcatggtaattgggtgctgggtggatgaaagccaaactggagaacccggctggcttggaggagaattaaaaggaaagacagggtggttccctgcaaactatgcagagaaaatcccagaaaatgaggttcccgctccagtgaaaccagtgactgattcaacatctgcccctgcccccaaactggccttgcgtgagacccccgcccctttggcagtaacctcttcagagccctccacgacccctaataactgggccgacttcagctccacgtggcccaccagcacgaatgagaaaccagaaacggataactgggatgcatgggcagcccagccctctctcaccgttccaagtgccggccagttaaggcagaggtccgcctttactccagccacggccactggctcctccccgtctcctgtgctaggccagggtgaaaaggtggaggggctacaagctcaagccctatatccttggagagccaaaaaagacaaccacttaaattttaacaaaaatgatgtcatcaccgtcctggaacagcaagacatgtggtggtttggagaagttcaaggtcagaagggttggttccccaagtcttacgtgaaactcatttcagggcccataaggaagtctacaagcatggattctggttcttcagagagtcctgctagtctaaagcgagtagcctctccagcagccaagccggtcgtttcgggagaagaatttattgccatgtacacttacgagagttctgagcaaggagatttaacctttcagcaaggggatgtgattttggttaccaagaaagatggtgactggtggacaggaacagtgggcgacaaggccggagtcttcccttctaactatgtgaggcttaaagattcagagggctctggaactgctgggaaaacagggagtttaggaaaaaaacctgaaattgcccaggttattgcctcatacaccgccaccggccccgagcagctcactctcgcccctggtcagctgattttgatccgaaaaaagaacccaggtggatggtgggaaggagagctgcaagcacgtgggaaaaagcgccagataggctggttcccagctaattatgtaaagcttctaagccctgggacgagcaaaatcactccaacagagccacctaagtcaacagcattagcggcagtgtgccaggtgattgggatgtacgactacaccgcgcagaatgacgatgagctggccttcaacaagggccagatcatcaacgtcctcaacaaggaggaccctgactggtggaaaggagaagtcaatggacaagtggggctcttcccatccaattatgtgaagctgaccacagacatggacccaagccagcaatggtgttcagacttacatctcttggatatgttgaccccaactgaaagaaagcgacaaggatacatccacgagctcattgtcaccgaggagaactatgtgaatgacctgcagctggtcacagagatttttcaaaaacccctgatggagtctgagctgctgacagaaaaagaggttgctatgatttttgtgaactggaaggagctgattatgtgtaatatcaaactactaaaagcgctgagagtccgcaagaagatgtccggggagaagatgcctgtgaagatgattggagacatcctgagcgcacagctgccgcacatgcagccctacatccgcttctgcagccgccagctcaacggggctgccctgatccagcagaagacggatgaggccccagacttcaaggagttcgtcaaaagattggcaatggatcctcggtgtaaagggatgccactctctagttttatactgaagcctatgcaacgggtaacaagatacccactgatcattaaaaatatcctggaaaacacccctgaaaaccacccggaccacagccacttgaagcacgccctggagaaggcggaagagctctgttcccaggtgaacgaaggggtgcgggagaaggagaactctgaccggctggagtggatccaggcccacgtgcagtgtgaaggcctgtctgagcaacttgtgttcaattcagtgaccaattgcttggggccgcgcaaatttctgcacagtgggaagctctacaaggccaagagcaacaaggagctgtatggcttccttttcaacgacttcctcctgctgactcagatcacgaagcctttggggtcttctggcaccgacaaagtcttcagccccaaatcaaacctgcagtataaaatgtataaaacacctattttcctaaatgaggttctagtaaaattacccaccgacccttctggagacgagcccatcttccacatctcccacattgaccgcgtctatactctccgagcagaaagcataaatgaaaggactgcctgggtgcagaaaatcaaagctgcttctgaactctacatagagactgagaaaaagaagcgcgagaaagcgtacctggtccgttcccaaagggcaacaggcattggaaggttgatggtgaacgtggttgaaggcatcgagttgaaaccctgtcggtcacatggaaagagcaacccgtactgtgaggtgaccatgggttcccagtgccacatcaccaagacgatccaggacactctgaaccccaagtggaattccaactgccagttcttcatccgagacctggagcaggaagtcctctgcatcactgtgttcgagagggaccagttctcaccagatgattttttgggtcggacggagatccgtgtggcggacatcaagaaagaccagggctccaaaggtccagttacgaagtgtcttctgctgcacgaagtccccacgggagagattgtggtccgcttggacctgcagttgtttgatgagccgtaggcagcgggctcagggtgtgctcagcagggtcccagcccacggccacacatgctgtctggaaattgtattccttttctaagaaaccaccatttggtattcagtcacagggatatgggatggcaaagacaggcccctcaaagctcctaggaatcattctcgacaatcctccctgccccgaaacaatttcctgtttcatgaaacaaagctgtgttttcctttgtcctcactacaggtctcattatggcttctagggtcgctgaaatcccatagccctcaacagggtgcagctgggagtctagccccttcccgggcttgagggatgggtctggttactataaaatagatttataaatgcaatgtctatatttttggagaactcatgtaaccctcctgtttcttacatccaccagtccccaagtagacttcttggcctacaatgcccagtccttggtgtgagtttagaaacaattatgacggtcctgtcattgcttcagaatcccatctctcctgcagggaaatgctgcctagagctgatcactcggtgagacggtctgatcaggccctggcttagctctttgaagagctggtctatggaagtttccagcatgtgcaccgttatagccgttccttccccctctaggccttgtattaatatatgtcaatgaaaacacactggtgtattgttgcgtggattcagttctgattcccagcatgcttagaatatggtcacagaaagtcattatctagaaagtcacccctctgctggatcagatcactacaggtcactggaaaggcaactttacaatgttgggtcactgggtctcggttggcagccatgttggaaaaatctcttttggctcggaggcctgtgatatttcatagcagcagtcgttgctggtgacctgttctgtgcttgaatgtgctgaatcctgattgttgtaggacatttcaacagctctttttggtacgttccccaaaaagccatgtcctagatccccaaggcgt

SEQ ID NO: 134448 - DNA, 6226 bp, Artificial Sequence
  derived and/or modified sequence
gagcgagggagggagcgaaggaggtagagaagagtggaggcgccaggggagggagcgtagcttggttgctccgtagtacggcggctcgcgaggaagaatcccgagcgggctccgggacggacagagaggcgggcggggatggtgtgcggggctgcggctcctgcgtccctcccagcggcgcgtgagcggcactgatttgtccctggggcggcagcgcggacccgcccggagatgaggcgtcgattagcaaggtaaaagtaacagaaccatggctcagtttccaacaccttttggtggcagcctggatatctgggccataactgtagaggaaagagcgaagcatgatcagcagttccatagtttaaagccaatatctggattcattactggtgatcaagctagaaactttttttttcaatctgggttacctcaacctgttttagcacagatatgggcactagctgacatgaataatgatggaagaatggatcaagtggagttttccatagctatgaaacttatcaaactgaagctacaaggatatcagctaccctctgcacttccccctgtcatgaaacagcaaccagttgctatttctagcgcaccagcatttggtatgggaggtatcgccagcatgccaccgcttacagctgttgctccagtgccaatgggatccattccagttgttggaatgtctccaaccctagtatcttctgttcccacagcagctgtgccccccctggctaacggggctccccctgttatacaacctctgcctgcatttgctcatcctgcagccacattgccaaagagttcttcctttagtagatctggtccagggtcacaactaaacactaaattacaaaaggcacagtcatttgatgtggccagtgtcccaccagtggcagagtgggctgttcctcagtcatcaagactgaaatacaggcaattattcaatagtcatgacaaaactatgagtggacacttaacaggtccccaagcaagaactattcttatgcagtcaagtttaccacaggctcagctggcttcaatatggaatctttctgacattgatcaagatggaaaacttacagcagaggaatttatcctggcaatgcacctcattgatgtagctatgtctggccaaccactgccacctgtcctgcctccagaatacattccaccttcttttagaagagttcgatctggcagtggtatatctgtcataagctcaacatctgtagatcagaggctaccagaggaaccagttttagaagatgaacaacaacaattagaaaagaaattacctgtaacgtttgaagataagaagcgggagaactttgaacgtggcaacctggaactggagaaacgaaggcaagctctcctggaacagcagcgcaaggagcaggagcgcctggcccagctggagcgggcggagcaggagaggaaggagcgtgagcgccaggagcaagagcgcaaaagacaactggaactggagaagcaactggaaaagcagcgggagctagaacggcagagagaggaggagaggaggaaagaaattgagaggcgagaggctgcaaaacgggaacttgaaaggcaacgacaacttgagtgggaacggaatcgaaggcaagaactactaaatcaaagaaacaaagaacaagaggacatagttgtactgaaagcaaagaaaaagactttggaatttgaattagaagctctaaatgataaaaagcatcaactagaagggaaacttcaagatatcagatgtcgattgaccacccaaaggcaagaaattgagagcacaaacaaatctagagagttgagaattgccgaaatcacccatctacagcaacaattacaggaatctcagcaaatgcttggaagacttattccagaaaaacagatactcaatgaccaattaaaacaagttcagcagaacagtttgcacagagattcacttgttacacttaaaagagccttagaagcaaaagaactagctcggcagcacctacgagaccaactggatgaagtggagaaagaaactagatcaaaactacaggagattgatattttcaataatcagctgaaggaactaagagaaatacacaataagcaacaactccagaagcaaaagtccatggaggctgaacgactgaaacagaaagaacaagaacgaaagatcatagaattagaaaaacaaaaagaagaagcccaaagacgagctcaggaaagggacaagcagtggctggagcatgtgcagcaggaggacgagcatcagagaccaagaaaactccacgaagaggaaaaactgaaaagggaggagagtgtcaaaaagaaggatggcgaggaaaaaggcaaacaggaagcacaagacaagctgggtcggcttttccatcaacaccaagaaccagctaagccagctgtccaggcaccctggtccactgcagaaaaaggtccacttaccatttctgcacaggaaaatgtaaaagtggtgtattaccgggcactgtacccctttgaatccagaagccatgatgaaatcactatccagccaggagacatagtcatggtaattgggtgctgggtggatgaaagccaaactggagaacccggctggcttggaggagaattaaaaggaaagacagggtggttccctgcaaactatgcagagaaaatcccagaaaatgaggttcccgctccagtgaaaccagtgactgattcaacatctgcccctgcccccaaactggccttgcgtgagacccccgcccctttggcagtaacctcttcagagccctccacgacccctaataactgggccgacttcagctccacgtggcccaccagcacgaatgagaaaccagaaacggataactgggatgcatgggcagcccagccctctctcaccgttccaagtgccggccagttaaggcagaggtccgcctttactccagccacggccactggctcctccccgtctcctgtgctaggccagggtgaaaaggtggaggggctacaagctcaagccctatatccttggagagccaaaaaagacaaccacttaaattttaacaaaaatgatgtcatcaccgtcctggaacagcaagacatgtggtggtttggagaagttcaaggtcagaagggttggttccccaagtcttacgtgaaactcatttcagggcccataaggaagtctacaagcatggattctggttcttcagagagtcctgctagtctaaagcgagtagcctctccagcagccaagccggtcgtttcgggagaagaaattgcccaggttattgcctcatacaccgccaccggccccgagcagctcactctcgcccctggtcagctgattttgatccgaaaaaagaacccaggtggatggtgggaaggagagctgcaagcacgtgggaaaaagcgccagataggctggttcccagctaattatgtaaagcttctaagccctgggacgagcaaaatcactccaacagagccacctaagtcaacagcattagcggcagtgtgccaggtgattgggatgtacgactacaccgcgcagaatgacgatgagctggccttcaacaagggccagatcatcaacgtcctcaacaaggaggaccctgactggtggaaaggagaagtcaatggacaagtggggctcttcccatccaattatgtgaagctgaccacagacatggacccaagccagcaatggtgttcagacttacatctcttggatatgttgaccccaactgaaagaaagcgacaaggatacatccacgagctcattgtcaccgaggagaactatgtgaatgacctgcagctggtcacagagatttttcaaaaacccctgatggagtctgagctgctgacagaaaaagaggttgctatgatttttgtgaactggaaggagctgattatgtgtaatatcaaactactaaaagcgctgagagtccgcaagaagatgtccggggagaagatgcctgtgaagatgattggagacatcctgagcgcacagctgccgcacatgcagccctacatccgcttctgcagccgccagctcaacggggctgccctgatccagcagaagacggatgaggccccagacttcaaggagttcgtcaaaagattggcaatggatcctcggtgtaaagggatgccactctctagttttatactgaagcctatgcaacgggtaacaagatacccactgatcattaaaaatatcctggaaaacacccctgaaaaccacccggaccacagccacttgaagcacgccctggagaaggcggaagagctctgttcccaggtgaacgaaggggtgcgggagaaggagaactctgaccggctggagtggatccaggcccacgtgcagtgtgaaggcctgtctgagcaacttgtgttcaattcagtgaccaattgcttggggccgcgcaaatttctgcacagtgggaagctctacaaggccaagagcaacaaggagctgtatggcttccttttcaacgacttcctcctgctgactcagatcacgaagcctttggggtcttctggcaccgacaaagtcttcagccccaaatcaaacctgcagtataaaatgtataaaacacctattttcctaaatgaggttctagtaaaattacccaccgacccttctggagacgagcccatcttccacatctcccacattgaccgcgtctatactctccgagcagaaagcataaatgaaaggactgcctgggtgcagaaaatcaaagctgcttctgaactctacatagagactgagaaaaagaagcgcgagaaagcgtacctggtccgttcccaaagggcaacaggcattggaaggttgatggtgaacgtggttgaaggcatcgagttgaaaccctgtcggtcacatggaaagagcaacccgtactgtgaggtgaccatgggttcccagtgccacatcaccaagacgatccaggacactctgaaccccaagtggaattccaactgccagttcttcatccgagacctggagcaggaagtcctctgcatcactgtgttcgagagggaccagttctcaccagatgattttttgggtcggacggagatccgtgtggcggacatcaagaaagaccagggctccaaaggtccagttacgaagtgtcttctgctgcacgaagtccccacgggagagattgtggtccgcttggacctgcagttgtttgatgagccgtaggcagcgggctcagggtgtgctcagcagggtcccagcccacggccacacatgctgtctggaaattgtattccttttctaagaaaccaccatttggtattcagtcacagggatatgggatggcaaagacaggcccctcaaagctcctaggaatcattctcgacaatcctccctgccccgaaacaatttcctgtttcatgaaacaaagctgtgttttcctttgtcctcactacaggtctcattatggcttctagggtcgctgaaatcccatagccctcaacagggtgcagctgggagtctagccccttcccgggcttgagggatgggtctggttactataaaatagatttataaatgcaatgtctatatttttggagaactcatgtaaccctcctgtttcttacatccaccagtccccaagtagacttcttggcctacaatgcccagtccttggtgtgagtttagaaacaattatgacggtcctgtcattgcttcagaatcccatctctcctgcagggaaatgctgcctagagctgatcactcggtgagacggtctgatcaggccctggcttagctctttgaagagctggtctatggaagtttccagcatgtgcaccgttatagccgttccttccccctctaggccttgtattaatatatgtcaatgaaaacacactggtgtattgttgcgtggattcagttctgattcccagcatgcttagaatatggtcacagaaagtcattatctagaaagtcacccctctgctggatcagatcactacaggtcactggaaaggcaactttacaatgttgggtcactgggtctcggttggcagccatgttggaaaaatctcttttggctcggaggcctgtgatatttcatagcagcagtcgttgctggtgacctgttctgtgcttgaatgtgctgaatcctgattgttgtaggacatttcaacagctctttttggtacgttccccaaaaagccatgtcctagatccccaaggcgt

SEQ ID NO: 134449 - DNA, 17015 bp, Artificial Sequence
  derived and/or modified sequence
ggagataggcgggagcgagggagcgagggagggagcgaaggaggtagagaagagtggaggcgccaggggagggagcgtagcttggttgctccgtagtacggcggctcgcgaggaagaatcccgagcgggctccgggacggacagagaggcgggcggggatggtgtgcggggctgcggctcctgcgtccctcccagcggcgcgtgagcggcactgatttgtccctggggcggcagcgcggacccgcccggagatgaggcgtcgattagcaaggtaaaagtaacagaaccatggctcagtttccaacaccttttggtggcagcctggatatctgggccataactgtagaggaaagagcgaagcatgatcagcagttccatagtttaaagccaatatctggattcattactggtgatcaagctagaaactttttttttcaatctgggttacctcaacctgttttagcacagatatgggcactagctgacatgaataatgatggaagaatggatcaagtggagttttccatagctatgaaacttatcaaactgaagctacaaggatatcagctaccctctgcacttccccctgtcatgaaacagcaaccagttgctatttctagcgcaccagcatttggtatgggaggtatcgccagcatgccaccgcttacagctgttgctccagtgccaatgggatccattccagttgttggaatgtctccaaccctagtatcttctgttcccacagcagctgtgccccccctggctaacggggctccccctgttatacaacctctgcctgcatttgctcatcctgcagccacattgccaaagagttcttcctttagtagatctggtccagggtcacaactaaacactaaattacaaaaggcacagtcatttgatgtggccagtgtcccaccagtggcagagtgggctgttcctcagtcatcaagactgaaatacaggcaattattcaatagtcatgacaaaactatgagtggacacttaacaggtccccaagcaagaactattcttatgcagtcaagtttaccacaggctcagctggcttcaatatggaatctttctgacattgatcaagatggaaaacttacagcagaggaatttatcctggcaatgcacctcattgatgtagctatgtctggccaaccactgccacctgtcctgcctccagaatacattccaccttcttttagaagagttcgatctggcagtggtatatctgtcataagctcaacatctgtagatcagaggctaccagaggaaccagttttagaagatgaacaacaacaattagaaaagaaattacctgtaacgtttgaagataagaagcgggagaactttgaacgtggcaacctggaactggagaaacgaaggcaagctctcctggaacagcagcgcaaggagcaggagcgcctggcccagctggagcgggcggagcaggagaggaaggagcgtgagcgccaggagcaagagcgcaaaagacaactggaactggagaagcaactggaaaagcagcgggagctagaacggcagagagaggaggagaggaggaaagaaattgagaggcgagaggctgcaaaacgggaacttgaaaggcaacgacaacttgagtgggaacggaatcgaaggcaagaactactaaatcaaagaaacaaagaacaagaggacatagttgtactgaaagcaaagaaaaagactttggaatttgaattagaagctctaaatgataaaaagcatcaactagaagggaaacttcaagatatcagatgtcgattgaccacccaaaggcaagaaattgagagcacaaacaaatctagagagttgagaattgccgaaatcacccatctacagcaacaattacaggaatctcagcaaatgcttggaagacttattccagaaaaacagatactcaatgaccaattaaaacaagttcagcagaacagtttgcacagagattcacttgttacacttaaaagagccttagaagcaaaagaactagctcggcagcacctacgagaccaactggatgaagtggagaaagaaactagatcaaaactacaggagattgatattttcaataatcagctgaaggaactaagagaaatacacaataagcaacaactccagaagcaaaagtccatggaggctgaacgactgaaacagaaagaacaagaacgaaagatcatagaattagaaaaacaaaaagaagaagcccaaagacgagctcaggaaagggacaagcagtggctggagcatgtgcagcaggaggacgagcatcagagaccaagaaaactccacgaagaggaaaaactgaaaagggaggagagtgtcaaaaagaaggatggcgaggaaaaaggcaaacaggaagcacaagacaagctgggtcggcttttccatcaacaccaagaaccagctaagccagctgtccaggcaccctggtccactgcagaaaaaggtccacttaccatttctgcacaggaaaatgtaaaagtggtgtattaccgggcactgtacccctttgaatccagaagccatgatgaaatcactatccagccaggagacatagtcatggttaaaggggaatgggtggatgaaagccaaactggagaacccggctggcttggaggagaattaaaaggaaagacagggtggttccctgcaaactatgcagagaaaatcccagaaaatgaggttcccgctccagtgaaaccagtgactgattcaacatctgcccctgcccccaaactggccttgcgtgagacccccgcccctttggcagtaacctcttcagagccctccacgacccctaataactgggccgacttcagctccacgtggcccaccagcacgaatgagaaaccagaaacggataactgggatgcatgggcagcccagccctctctcaccgttccaagtgccggccagttaaggcagaggtccgcctttactccagccacggccactggctcctccccgtctcctgtgctaggccagggtgaaaaggtggaggggctacaagctcaagccctatatccttggagagccaaaaaagacaaccacttaaattttaacaaaaatgatgtcatcaccgtcctggaacagcaagacatgtggtggtttggagaagttcaaggtcagaagggttggttccccaagtcttacgtgaaactcatttcagggcccataaggaagtctacaagcatggattctggttcttcagagagtcctgctagtctaaagcgagtagcctctccagcagccaagccggtcgtttcgggagaagaatttattgccatgtacacttacgagagttctgagcaaggagatttaacctttcagcaaggggatgtgattttggttaccaagaaagatggtgactggtggacaggaacagtgggcgacaaggccggagtcttcccttctaactatgtgaggcttaaagattcagagggctctggaactgctgggaaaacagggagtttaggaaaaaaacctgaaattgcccaggttattgcctcatacaccgccaccggccccgagcagctcactctcgcccctggtcagctgattttgatccgaaaaaagaacccaggtggatggtgggaaggagagctgcaagcacgtgggaaaaagcgccagataggctggttcccagctaattatgtaaagcttctaagccctgggacgagcaaaatcactccaacagagccacctaagtcaacagcattagcggcagtgtgccaggtgattgggatgtacgactacaccgcgcagaatgacgatgagctggccttcaacaagggccagatcatcaacgtcctcaacaaggaggaccctgactggtggaaaggagaagtcaatggacaagtggggctcttcccatccaattatgtgaagctgaccacagacatggacccaagccagcaatggtgttcagacttacatctcttggatatgttgaccccaactgaaagaaagcgacaaggatacatccacgagctcattgtcaccgaggagaactatgtgaatgacctgcagctggtcacagagatttttcaaaaacccctgatggagtctgagctgctgacagaaaaagaggttgctatgatttttgtgaactggaaggagctgattatgtgtaatatcaaactactaaaagcgctgagagtccgcaagaagatgtccggggagaagatgcctgtgaagatgattggagacatcctgagcgcacagctgccgcacatgcagccctacatccgcttctgcagccgccagctcaacggggctgccctgatccagcagaagacggatgaggccccagacttcaaggagttcgtcaaaagattggcaatggatcctcggtgtaaagggatgccactctctagttttatactgaagcctatgcaacgggtaacaagatacccactgatcattaaaaatatcctggaaaacacccctgaaaaccacccggaccacagccacttgaagcacgccctggagaaggcggaagagctctgttcccaggtgaacgaaggggtgcgggagaaggagaactctgaccggctggagtggatccaggcccacgtgcagtgtgaaggcctgtctgagcaacttgtgttcaattcagtgaccaattgcttggggccgcgcaaatttctgcacagtgggaagctctacaaggccaagagcaacaaggagctgtatggcttccttttcaacgacttcctcctgctgactcagatcacgaagcctttggggtcttctggcaccgacaaagtcttcagccccaaatcaaacctgcagtataaaatgtataaaacacctattttcctaaatgaggttctagtaaaattacccaccgacccttctggagacgagcccatcttccacatctcccacattgaccgcgtctatactctccgagcagaaagcataaatgaaaggactgcctgggtgcagaaaatcaaagctgcttctgaactctacatagagactgagaaaaagaagcgcgagaaagcgtacctggtccgttcccaaagggcaacaggcattggaaggttgatggtgaacgtggttgaaggcatcgagttgaaaccctgtcggtcacatggaaagagcaacccgtactgtgaggtgaccatgggttcccagtgccacatcaccaagacgatccaggacactctgaaccccaagtggaattccaactgccagttcttcatccgagacctggagcaggaagtcctctgcatcactgtgttcgagagggaccagttctcaccagatgattttttgggtcggacggagatccgtgtggcggacatcaagaaagaccagggctccaaaggtccagttacgaagtgtcttctgctgcacgaagtccccacgggagagattgtggtccgcttggacctgcagttgtttgatgagccgtaggcagcgggctcagggtgtgctcagcagggtcccagcccacggccacacatgctgtctggaaattgtattccttttctaagaaaccaccatttggtattcagtcacagggatatgggatggcaaagacaggcccctcaaagctcctaggaatcattctcgacaatcctccctgccccgaaacaatttcctgtttcatgaaacaaagctgtgttttcctttgtcctcactacaggtctcattatggcttctagggtcgctgaaatcccatagccctcaacagggtgcagctgggagtctagccccttcccgggcttgagggatgggtctggttactataaaatagatttataaatgcaatgtctatatttttggagaactcatgtaaccctcctgtttcttacatccaccagtccccaagtagacttcttggcctacaatgcccagtccttggtgtgagtttagaaacaattatgacggtcctgtcattgcttcagaatcccatctctcctgcagggaaatgctgcctagagctgatcactcggtgagacggtctgatcaggccctggcttagctctttgaagagctggtctatggaagtttccagcatgtgcaccgttatagccgttccttccccctctaggccttgtattaatatatgtcaatgaaaacacactggtgtattgttgcgtggattcagttctgattcccagcatgcttagaatatggtcacagaaagtcattatctagaaagtcacccctctgctggatcagatcactacaggtcactggaaaggcaactttacaatgttgggtcactgggtctcggttggcagccatgttggaaaaatctcttttggctcggaggcctgtgatatttcatagcagcagtcgttgctggtgacctgttctgtgcttgaatgtgctgaatcctgattgttgtaggacatttcaacagctctttttggtacgttccccaaaaagccatgtcctagatccccaaggcgtgaaaaggaaaaatatcaagctggaggttgggaaagaaaatgaaggcagtccattatgtggtgggtgaaagaccctaggaggatgcaagccccgcacatcccggggcaaagacctaagacacttttccaccctccaccaccccaacctcacataatatgcttgttgcaagagtcaggactttatgactatgtgccaagctgtttggtttgagttctttaatttttttttcccttaaatgccaggagatcatctggttagttagatagtaacttgatttgctaatgaaaagtgggggccgtgttttgtttgcatgttaatattctcataatcctagtttgttgtggtcatgaaatgtcctttgcatgttctgttggtactggagtctagctttcctgtactagatggtgttctctttgattgtaggtccttagactttaattagggttatcaaagtgctttctaaatgatagcatcagcgttgtggcagagtacctcctttgctgggaactgaatgtgtagtgttatcatttcccatgagagcccggtcatacttcaagcaatttttttaaaagtgtgtgttggaaaggacaacaaagtttacatttcatacttttaagaaatactttattatttatttattgaagatagtgtagaattttgtatcaagaacaacagacataagtattttttgaaacaagcaaatataccctgtagttagaaactttcaactgaacatgttagagaccaagtttaacttcaggcatgcatttgtttaccatttcccagcagaaaacatggttaaaatactttaagtttatattttttgatgttgttaagaaacttttaaattaaatctataaatagacatgcaactcatgctttcctatttctataaccaacaccgtttgtttagtgtatttatgaaagatatgctaccatggtagaaagaaaagtattcaatgtgtaaatggggtagtgtgggtcaccattccgatctctttttgttttctgtcctgtcttttcttcattgactttatttgcgtgttaatgttggacatcattgttcatgtaggtagcgtatggtatgcacaatgacaaacaatcgttttaggtcccaggtcacccactcatagtgtcctattattggaattaatgtagcatgagaaagcaatatgtgactctttttcctcaagtgactctgttgagcatccttgagatgctcctgccatgtagcaagttctggattagtgtccttgtatttactggtgtaatttgtaatgtaaccaattgtccgtatggaggagtcgggctggccctcggacccagctgtgattcatgagttgtgtcacagggattgagaaacatgggtgatgcatggagtctcaaaccattgggcctctctgttccttcacctctaccttcttgaccacctgggctatatttcatagaaattaaatgctccttgccaacaaggagtctgtctcctagctctttgttttctaaatataggagttctctaggccactgcatcccggcatcctgatcccagccttttagacacccctgcaagcgttcctctgctctgagccacactgctagcttctcctgcacactctgatctcctttagcccaagaaggggctgtgctggtcatagggttatgctgtaaccctcagtcttccctgagaactgaactatcctgggacctcttgggctgagccttcttcacagagcagttctctagaaggcagagtccacatcctggtccctctggggcagggcctgtctggctgctggcatcaccctggcaggtggatggacagcatcatctcctggaaccaggtttgctgtgaccatgagagcctgaagatgtggctcattcggatccaggcctggactaatctggaaagagggactttctaggtgcaggtcaccagggatgcttgagaaactagagccagacttccttgtttgtttggataatatgtccctgtcctctgatagcagaggaaagagctctgctcccaaagaacattcatgtaagaggaggcatttttttcttctttgctttttttaaacaacctaaagtatgacctaagtgtatgaaactaactgatttctttgggtagagtagccctgaatttaactggggaaaaaatcccatcagactatgagtaaattgaccacccacattaagtcttatctcggtgacctggtaccaaagcccaggtgtcctccaggggagtattctggggtggcagggggattaggtgctagcgccagcagggaaggacacttgcaggtctgccttccaaggctaagcaggccggctgtctctccaggaactggctaggacaagtgtaaagccactgaccacacagaaccaggatgttctagaatctgatggggctgaagatgaagggagaaatggacaaggcacttctggctttattgaaaaggtgaagctcttggagtatattttagagtaggccagtaccttgtataagcagaaaaagacttctctatctccactccaagtcgtttttttctagttgattgggcctttttgattgataagaagaaaatgtgttttgtacgtgtaacaactttaagaatttccattggaaacaaagtatgatttgatttgatttgatttctaagttctcccttccttttcaaggttagcgatgtgctttatagcagacactagcacttttacatgaatacctggtgtgctttggatgtaacagggtcattttgggctcgaggtgagtgtgcaattagcagcaggtctgcttggtccagatatgcttgtttacaagtttagagcatcctatgccagaaagtgagatgaaaacaaaggcacctggattgctttgttttgcttttagataaaagagctttagctcacaccaggcagaagcataaccagtagccccagaaaccggtagcatgatgaagccctcagacagtatagtctgagccaccataagaggcattagggaaaactaacacctccttctttttgcaccgtggggtgctgaaattcctgctagagacttccccttacttccatgaatggcccaggggctgcttagtatatcattagaatgttcattctcctccttttccctggagtggaccagtgagaccaaatgcttgtgtttctctatgttttcagttcatttgttcaaatgacccagaagatgaatccatttctgggaaggctgagctcagatgaggattgctaggccagcctaggttctggggcggatctcagggacagaaacaggcttgtattaagtatgagtggcaggtacttctctagaacagccctaacctgcactagtgaggggggctcaggaattcccatgacattgatctagcagcctcctgcacgtagacactcagttcattttagggacgttcaatgcttgatcaaatggggggcattttctttctttctttttttccccagctacagtgtaattgcctacctgcctgggccccttctagaggaaggtgggctttccttgtccgtcaggctgcactcatgaggtgatatcgtaaagcagcagaaagactgagggtgcaaagaaaccacagctgccattcacggggcagctccctctagctcttctgcccagtgaccttacaggctttagaggagcctgatgagagctatcctgggggccaagggatgcattccctgcagcttcctcctgggggacccacaggtcagcccattccaggagaagcagtcttaggcccgtttgcatcccctgccactgccatgtgcctgccagcccggtttctgatgaagacgtggctcagtccctgctctccttgtcgcagtggcttgtacttcatgtgcagtagcccagggcccgccttctagagtgaatgtttccctcgagcccttggatatttttattctattttgaatggttccgatcaattaatgttgctttgtgtggggttcttcagagaaataatgcaaaccggccaggtgcggtggctcacacctgtaatcccaacactttgaggggctgaggcaggtggatcacctgaggtcaggagttcgagaacagcctggccaacgtggcgaaaccttgtctctactaaaaatacaaaaattagccaggggtggtggcaggcacctgtaatcccagctactcaggaggctgaggcaggagaatcactcgaacctgggaggcggaggttgcagtgagccgagatcacgccactgcactccagcctgggtaacagagcgagagtccttctcaaaacaaacaaaaaaagagctaatgcagacctcttctggttagacctgacacggaggaagtaattggctggtcaacttaatggcgccccacagcttcctctggatcctgcttctttgtacttggaacacagtttatttgagctagaggaaaggaaagttctagaattcctgtttcctcagcctgcactgtatcagatccaggatatgtctgcatttcatcaggatcaagtaagatacataaccttatatctgtaggagccagaaaaaaaaaaatctattcctgataggcatggaaacttagtccacatgaaagacagaagacatctaacagctgtctgtcttgggagcattaaaacccagacaccaagacacactagacagtccatctctgggttgtgatctctcagaaacatcttagtagttaatgcactgttcatttagggagtccccatcctggtccaggccaccctcctagaagctgggcggcagctggacgggcctgccttggtggcattcaagcaagcctaattggattaggttggtgcaaaagtgattgcggtttttgccattgcttttgatggcaaactaactttaagtcattaaaataagacccaacgcttataaaagagttcatatccacctcccaataacttctttagttccatgcagcctcaatcagttcctccattcaaaggaaccctctttaccctggccctgggggagccatattacacccacatcataatttttctgacactatgtgtgcttgtcaaatttcagggtcagtttccccttattggatgtcaggggtgttttgtgagttgtgttttaataggattctgttcgattttctataccagcctatattgttactatcatctgcctagtatgaatattttagtattcaaagcccaccagataaagctgtgttcagaagtggactttttggtcagccttgaaaaaaaaaaaatcagcatttctctgatatttcctgaggattaaccagaaactaaggtttctttttaggcagtggtaagaatgcgtattttcttcttccagaagttctggttttatacttttatcttttgaaagaataacattcctgtgcgactctgcttctcttcgcttttgcatttctcttttttaactcaaatctcttatttcctgccgttcctgtatctaaacagaatgggggcctcaggcagacaggaaccaaagaaagggtgtagtggctttgcagcgttgggtgagcagcagccgctgccattctgtgcactgtcaccggcgggggtggagggtctccctgtaggaggaggaaactcgctgttttcactggcagatttcaaggtgccggctccacctaccgcagctgctaggcattgctcttgtgtagatcgcagaaggagttattggtgatgtggggtgtaggggaagacaggaaaacggactcagagctaggaatgtgggcctggcagagaccgaaggctgggtgggaaggaagctcgcggcgagcctagggttcaagcctagcgcgccaggggtctccagtgagaccttgctcttccctgccgctgaggctggggctgcacggaggtcctcaggcttcccaccctttctgcatcagctttagtgtctgtcggctgggtggactgcagggcaggtgacctggaggaggccctgctccccagcaagcgttctaggagttacggtgtgctctattgggattggattacagtctctacttgtagactttgacttctggaattttaggtggaagggaatttttgttggtgggacgcagcagctcagtgcgtggtgtgtgcatgcgtgtttgtgcgtgcgtgtgcatgtatgtgtttgtgcgtgcacgtgtgcgtgtgtgtgcatgggtttgcgtgcatgcatgtgtgtgcgtgcgcgtgtttgtgtgtgcatgtgtgtgtgtctacgtgtgtgtgcacgcatgtgtgtgcgtgtatgtgtgcgtgtgtgcatgtttgtgagtgcatgtgtttgtgcgtgtgtgcgtatttgtgtgtgtgcgtgtgtgtgcgtgtgtatgtgcgtgtatgcatgtgcatgtttgtgtgtgcgtgcatatgtgtatgtgtgtgcgcgtgcgtgtgcgtgcatgtgtgcgcatgcgtgtgtacctacccacacctagggggatgcatggctctgtgccttggagagggaaacaggaaatacgttgctccacagtcctgtcatcctggtcaggactagtcgcgtggtttgcggacagagtgcaaaatgaaaatgcgaggccccttgttcaggtgatgaagcatttctagacagtgagaggagagcattaagccaagctcaggtcccttctgagtgcatagccccttgtggctgccaggcagcacacccaggaggccggccctgaccacactgttctctgctggttcccgaagctgatgggctctgtcttaggtcttcttactttgaaaggtctcccggcaggctgtggcaagctgcgcggatacacttttctaaacgtctgcatttatttcctaaaagcacaaatggcctggactagctagtgggtgtggaaccgagcccctagttcacagctgtaccccaaggctggagagggggttgccggtggtggcaggagctctgggctcccagttcaggatgggccacagggcgtcaagcagctgtgagcctttaccattgagctcactgcttggaaataaaacccttcctctgggccttgggcatccactgggagcttttctcccctttcctgggaggacagcaagccttttccaaccttctgccttcaaagagaagcagggtcatagaagtgctcagtgtcccttccccagtggctggacacttgctcctccagccttcaccccctggagagaaggggagtctgcggagccagtgcctccctgcccagctgggccacacgatctggtctgcgggtgtctgggaggaacctgcttcggagaggctgcgacctcccagctagactctccccttaggatcccatgtatggggatggtaggagagaaaagatccctctgtgtaagtagcctcaagttctagaagaccatggccccgggaggcagctgaccatgaagctgggcttcctgttgttgctttctttcacgagcttttacttttcctgggctggacgctccaaaatgtttgcagttccatttgctttttgcaagtaggtccccatctccatatacattgagcaataatcctcactatgtttcctgattctgtctgggattatatttgctaagtaaaaatgttgacagaaattgcaaactcatctcacctggatttgattgagtcaccttgaatgacataacaaattatggctttgttttcatgcgtcatgcaatcttccggactacgggaagttctgcaagtgttctccaggggcatttcattaatagcgtgtcagcattagttttaatgaatgaacatttgaggtacattctataaatcaatatccttaaaatgtcatctgctaaacattcactgtgacagaaagtagatattttagcaagatctatgttaatgctacttaattttagacatgcatttaaagcctacatggccaatagcccaagtatctttgaactgtgaaatcaacctcagatctcatctgctgtagccccgcaagccggagtctgtgccctccatgacccttcttatcccttggtggccctgcatagataggggagttggcccctgcccaccccgtgttgtattgccttagctccatcagctttgtaccctcacacgtataggtggtgaacttatgtgtaaatacatgtgtacagatgagaaactgcaacaaaaatgtcctgtggatgataatcagctcagtttccggttttctacattctgtgctgtttccagctaagaaaaaggcgaactcccactatataaagggaaaaggttgtattcatttcatgttcctcatgaaatctctgctgtatgtttatggaatggccatgactaaatgtatatatggtatgtaagaggccatgctgttaaatgttgcataaactaacacagattctgtagtcaaaaatatttaacttgttattgtaaaatgtgatttgtcattgagagattatttttctgtatgtatatgagagtattttaggaatctaatttaagtgcataaaactatagaaaaaaatttaaaacctattccaagagtagaaaatgcttaatgagattacttgggttcaactcaactaaatttcttatattaaaaaaaaattccaagttgtatatgttagaaatcaaatgagtcattttttttcctgcaggaaatatgataaatttcagtgtaatggatggtggcgtgatcaaatgaaaagtatcctgtagctatgacctcgcatgggaccttggtgttgcattaaaaatggatttttgcagatcacatatctgagagggtacttgtgtcaggaaggatgagaggatagggagcctgtttttcatcagatccatgtgccacgcaggcttccttgggttctagtggatttgttagggatctggggctgacgcagctatcccactagagaggccactctctgacttccaggtcgccctttctacttctgtatctggattgattcagtttatccctaattagcgtttgcgttttccatgaaatttcctgatgcatcctcactgtcttcaactgttgcatagccaggtgggtggatggatggtttagggtttctgagttaagccgttttggggcaggcttctggatgcccatgtttccatggagaccccagggggaagatgccttcctcccgtctgcattcccagaaaaggatcagaagtccaggctgcttctggggcacagactttctgtacttggccaccagaagtgccccttaggccacctaaggaggattctgtgaaactcaatgtctaaacccctgagaaaggcattcagaaatgatttcaggagggggcaaccccaggagtccagcctcccctggcagcctggaaatactgcagtaacaaaaagagctggtttctggtgatctgaatgcattgtgtttgggggtgacaccgctggtggaaggttgagggcctgtggtctgaaaagacatctgaagaatgtgttaggttttcaacatttctttgaacaggctgcgtgcatcttaatgctgtcaaccagcaactggagccccttttttgagaggcccgaaccagtaaagctgctgacttcaggagtatgggaagctgtgatttctggaagcttcctggaatctatttaggtgcatgaataatctgcaaatcacttagaggcactgtccatgtggtccataactggctttattcccaaagatggagctgttcagagatttctttgttcaggcgcagccttggaaggccacctaaggcctgccagcagaggagatgagctctggtctaccaaccccaaacaggccctgactctccttccttagaacgatgccctctggctggggtggcaagagggctgtgagtggaaacaagtcagccagtcaactgtcccttgggccttggttgtttcaaaaaagtctggggacaagaaaagctagaacatggggccctcccttcccaggagtgctagcgaaccctcccagatagcctttgcctgtttggaaaagaatgtaatccatcagaacgtgagctccttgtgcttccagtgacaagcgggccacagtgctggtggcatgttgcttccctcacagccctgcccaggggtaggaccaggcccgccccttgatggatgtgctgttgattgtaatatacttctgttgccaaataatggtactgtttaattttccataaaagagagactatattgtctgatatgtaatgttaatggaattctaagaattactagacactattataaattgtagacttacgtatttgtctaaaggtttgatgaagcagggccaaaacattgtttcttcttttttgtttgaaagaagctgaggtttgtttttgctgtttgagtgttcctttggcaacttattatgtgtgaaatgttaaattttaccgattaagatgatggtaactgagacctttctttaaaccagtagcaacatcagtacaaattgctcttcctgtgtatcttgaacctaaaaagaacaatctcttcaaaaacaaaaacaaaaacaaaaaacaactctttggtcattttgacctgtgtggtttaaattcaaatagttcatgaataaaaggagaaaagccaa

SEQ ID NO: 134450 - DNA, 4993 bp, Artificial Sequence
  derived and/or modified sequence
catggctcagtttccaacaccttttggtggcagcctggatatctgggccataactgtagaggaaagagcgaagcatgatcagcagttccatagtttaaagccaatatctggattcattactggtgatcaagctagaaactttttttttcaatctgggttacctcaacctgttttagcacagatatgggcactagctgacatgaataatgatggaagaatggatcaagtggagttttccatagctatgaaacttatcaaactgaagctacaaggatatcagctaccctctgcacttccccctgtcatgaaacagcaaccagttgctatttctagcgcaccagcatttggtatgggaggtatcgccagcatgccaccgcttacagctgttgctccagtgccaatgggatccattccagttgttggaatgtctccaaccctagtatcttctgttcccacagcagctgtgccccccctggctaacggggctccccctgttatacaacctctgcctgcatttgctcatcctgcagccacattgccaaagagttcttcctttagtagatctggtccagggtcacaactaaacactaaattacaaaaggcacagtcatttgatgtggccagtgtcccaccagtggcagagtgggctgttcctcagtcatcaagactgaaatacaggcaattattcaatagtcatgacaaaactatgagtggacacttaacaggtccccaagcaagaactattcttatgcagtcaagtttaccacaggctcagctggcttcaatatggaatctttctgacattgatcaagatggaaaacttacagcagaggaatttatcctggcaatgcacctcattgatgtagctatgtctggccaaccactgccacctgtcctgcctccagaatacattccaccttcttttagaagagttcgatctggcagtggtatatctgtcataagctcaacatctgtagatcagaggctaccagaggaaccagttttagaagatgaacaacaacaattagaaaagaaattacctgtaacgtttgaagataagaagcgggagaactttgaacgtggcaacctggaactggagaaacgaaggcaagctctcctggaacagcagcgcaaggagcaggagcgcctggcccagctggagcgggcggagcaggagaggaaggagcgtgagcgccaggagcaagagcgcaaaagacaactggaactggagaagcaactggaaaagcagcgggagctagaacggcagagagaggaggagaggaggaaagaaattgagaggcgagaggctgcaaaacgggaacttgaaaggcaacgacaacttgagtgggaacggaatcgaaggcaagaactactaaatcaaagaaacaaagaacaagaggacatagttgtactgaaagcaaagaaaaagactttggaatttgaattagaagctctaaatgataaaaagcatcaactagaagggaaacttcaagatatcagatgtcgattgaccacccaaaggcaagaaattgagagcacaaacaaatctagagagttgagaattgccgaaatcacccatctacagcaacaattacaggaatctcagcaaatgcttggaagacttattccagaaaaacagatactcaatgaccaattaaaacaagttcagcagaacagtttgcacagagattcacttgttacacttaaaagagccttagaagcaaaagaactagctcggcagcacctacgagaccaactggatgaagtggagaaagaaactagatcaaaactacaggagattgatattttcaataatcagctgaaggaactaagagaaatacacaataagcaacaactccagaagcaaaagtccatggaggctgaacgactgaaacagaaagaacaagaacgaaagatcatagaattagaaaaacaaaaagaagaagcccaaagacgagctcaggaaagggacaagcagtggctggagcatgtgcagcaggaggacgagcatcagagaccaagaaaactccacgaagaggaaaaactgaaaagggaggagagtgtcaaaaagaaggatggcgaggaaaaaggcaaacaggaagcacaagacaagctgggtcggcttttccatcaacaccaagaaccagctaagccagctgtccaggcaccctggtccactgcagaaaaaggtccacttaccatttctgcacaggaaaatgtaaaagtggtgtattaccgggcactgtacccctttgaatccagaagccatgatgaaatcactatccagccaggagacatagtcatggtggatgaaagccaaactggagaacccggctggcttggaggagaattaaaaggaaagacagggtggttccctgcaaactatgcagagaaaatcccagaaaatgaggttcccgctccagtgaaaccagtgactgattcaacatctgcccctgcccccaaactggccttgcgtgagacccccgcccctttggcagtaacctcttcagagccctccacgacccctaataactgggccgacttcagctccacgtggcccaccagcacgaatgagaaaccagaaacggataactgggatgcatgggcagcccagccctctctcaccgttccaagtgccggccagttaaggcagaggtccgcctttactccagccacggccactggctcctccccgtctcctgtgctaggccagggtgaaaaggtggaggggctacaagctcaagccctatatccttggagagccaaaaaagacaaccacttaaattttaacaaaaatgatgtcatcaccgtcctggaacagcaagacatgtggtggtttggagaagttcaaggtcagaagggttggttccccaagtcttacgtgaaactcatttcagggcccataaggaagtctacaagcatggattctggttcttcagagagtcctgctagtctaaagcgagtagcctctccagcagccaagccggtcgtttcgggagaagggctctggaactgctgggaaaacagggagtttaggaaaaaaacctgaaattgcccaggttattgcctcatacaccgccaccggccccgagcagctcactctcgcccctggtcagctgattttgatccgaaaaaagaacccaggtggatggtgggaaggagagctgcaagcacgtgggaaaaagcgccagataggctggttcccagctaattatgtaaagcttctaagccctgggacgagcaaaatcactccaacagagccacctaagtcaacagcattagcggcagtgtgccaggtgattgggatgtacgactacaccgcgcagaatgacgatgagctggccttcaacaagggccagatcatcaacgtcctcaacaaggaggaccctgactggtggaaaggagaagtcaatggacaagtggggctcttcccatccaattatgtgaagctgaccacagacatggacccaagccagcaatggtgttcagacttacatctcttggatatgttgaccccaactgaaagaaagcgacaaggatacatccacgagctcattgtcaccgaggagaactatgtgaatgacctgcagctggtcacagagatttttcaaaaacccctgatggagtctgagctgctgacagaaaaagaggttgctatgatttttgtgaactggaaggagctgattatgtgtaatatcaaactactaaaagcgctgagagtccgcaagaagatgtccggggagaagatgcctgtgaagatgattggagacatcctgagcgcacagctgccgcacatgcagccctacatccgcttctgcagccgccagctcaacggggctgccctgatccagcagaagacggatgaggccccagacttcaaggagttcgtcaaaagattggcaatggatcctcggtgtaaagggatgccactctctagttttatactgaagcctatgcaacgggtaacaagatacccactgatcattaaaaatatcctggaaaacacccctgaaaaccacccggaccacagccacttgaagcacgccctggagaaggcggaagagctctgttcccaggtgaacgaaggggtgcgggagaaggagaactctgaccggctggagtggatccaggcccacgtgcagtgtgaaggcctgtctgagcaacttgtgttcaattcagtgaccaattgcttggggccgcgcaaatttctgcacagtgggaagctctacaaggccaagagcaacaaggagctgtatggcttccttttcaacgacttcctcctgctgactcagatcacgaagcctttggggtcttctggcaccgacaaagtcttcagccccaaatcaaacctgcagtataaaatgtataaaacacctattttcctaaatgaggttctagtaaaattacccaccgacccttctggagacgagcccatcttccacatctcccacattgaccgcgtctatactctccgagcagaaagcataaatgaaaggactgcctgggtgcagaaaatcaaagctgcttctgaactctacatagagactgagaaaaagaagcgcgagaaagcgtacctggtccgttcccaaagggcaacaggcattggaaggttgatggtgaacgtggttgaaggcatcgagttgaaaccctgtcggtcacatggaaagagcaacccgtactgtgaggtgaccatgggttcccagtgccacatcaccaagacgatccaggacactctgaaccccaagtggaattccaactgccagttcttcatccgagacctggagcaggaagtcctctgcatcactgtgttcgagagggaccagttctcaccagatgattttttgggtcggacggagatccgtgtggcggacatcaagaaagaccagggctccaaaggtccagttacgaagtgtcttctgctgcacgaagtccccacgggagagattgtggtccgcttggacctgcagttgtttgatgagccgtaggcagcggg

SEQ ID NO: 134451 - DNA, 5166 bp, Artificial Sequence
  derived and/or modified sequence
atggcccagttccccaccccatttggaggcagcctggacatctgggccatcaccgtggaggagcgggccaagcatgaccagcagttccacagcctgaagcccatcagcggcttcatcaccggggaccaggccaggaacttcttcttccagagcggcctgccccagcctgtgctggcccagatctgggccctggccgacatgaacaatgatggccgcatggaccaggtggagttcagcatcgccatgaagctgatcaagctgaagctgcagggctaccagctgcccagcgccctgccccctgtgatgaagcagcagcctgtggccatcagcagcgccccagccttcggcatgggcggcatcgcctccatgccacccctgacagctgtggcccctgtgcccatgggcagcatccctgtggtgggcatgagccccaccctggtgtcctctgtgcccacagctgctgtgccccccctggccaacggggcccctcctgtgatccagcccctgcctgcctttgcccaccctgctgccaccctgcccaagagcagcagcttcagccgcagcggccctggcagccagctgaacaccaagctgcagaaggcccagagctttgatgtggcctctgtgccccctgtggccgagtgggccgtgccccagagcagccggctgaagtaccggcagctgttcaacagccatgacaagaccatgagcggccacctgaccggcccccaggcccggaccatcctgatgcagagcagcctgccccaggcccagctggccagcatctggaacctgagtgacatcgaccaggacggcaagctgacagctgaggagttcatcctggccatgcacctgattgatgtggccatgagcggccagcccctgccccctgtgctgcccccagagtacatccccccatccttcagaagagtgcgcagcggcagcggcatcagcgtcatcagcagcacctctgtggaccagaggctgcctgaggagcctgtgctggaggatgagcagcagcagctggagaagaagctgcctgtgacctttgaggacaagaagcgggagaactttgagcggggcaacctggagctggagaagaggcggcaggccctgctggagcagcagaggaaggagcaggagcggctggcccagctggagagagctgagcaggagaggaaggagcgggagcggcaggagcaggagaggaagaggcagctggagctggagaagcagctggagaagcagcgggagctggagcggcagcgggaggaggagaggaggaaggagattgaaagaagagaggccgccaagcgggagctggagcggcagaggcagctggagtgggagaggaacagacggcaggagctgctgaaccagaggaacaaggagcaggaggacatcgtggtgctgaaggccaagaagaagaccctggagtttgagctggaggccctgaatgacaagaagcaccagctggagggcaagctgcaggacatccgctgccgcctgaccacccagaggcaggagattgagagcaccaacaagagccgggagctgagaattgctgagatcacccacctgcagcagcagctgcaggagagccagcagatgctgggccgcctcatccctgagaagcagatcctgaatgaccagctgaagcaggtgcagcagaacagcctgcaccgggacagcctggtgaccctgaagagggccctggaggccaaggagctggcccggcagcacctgcgggaccagctggatgaggtggagaaggagaccaggagcaagctgcaggagattgacatcttcaacaaccagctgaaggagctgcgggagatccacaacaagcagcagctgcagaagcagaagtccatggaggccgagcggctgaagcagaaggagcaggagaggaagatcatcgagctggagaagcagaaggaggaggcccagaggcgggcccaggagcgggacaagcagtggctggagcacgtgcagcaggaggatgagcaccagaggcccaggaagctgcacgaggaggagaagctgaagcgggaggagagcgtgaagaagaaggatggagaggagaagggcaagcaggaggcccaggacaagctgggccgcctcttccaccagcaccaggagcccgccaagccagctgtgcaggccccctggagcacagctgagaagggccccctgaccatcagcgcccaggagaatgtgaaggtggtgtactaccgggccctgtacccctttgagagccgcagccatgatgagatcaccatccagcccggggacatcgtgatggtgattggctgctgggtggatgagagccagacaggagagcccggctggctgggcggggagctgaagggcaagacaggctggttccctgccaactatgcagagaagatcccagaaaatgaggtgcctgcccctgtgaagcctgtgacagacagcaccagcgccccagcccccaagctggccctgcgggagaccccagcccccctggccgtgaccagcagcgagcccagcaccacccccaacaactgggccgacttcagcagcacctggcccaccagcaccaatgagaagccagagacagacaactgggatgcctgggccgcccagcccagcctgactgtgcccagcgctggccagctgcggcagaggtctgccttcaccccagccacagccaccggcagcagccccagccctgtgctgggccagggcgagaaggtggagggcctgcaggcccaggccctgtacccctggagggccaagaaggacaaccacctgaacttcaacaagaatgatgtgatcaccgtgctggagcagcaggacatgtggtggtttggagaggtgcagggccagaagggctggttccccaagagctatgtgaagctgatcagcggccccatcaggaagagcacctccatggattctggcagcagcgagagccctgccagcctgaagagggtggccagccctgctgccaagcctgtggtgtctggagaggagttcatcgccatgtacacctatgagagcagcgagcagggcgacctgaccttccagcagggagatgtgatcctggtgaccaagaaggatggagactggtggacaggcaccgtgggggacaaggccggggtcttccccagcaactacgtgcggctgaaggacagcgagggcagcggcacagctgggaagacaggcagcctgggcaagaagccagagatcgcccaggtgattgccagctacacagccaccggccctgagcagctgaccctggcccctggccagctgatcctgatcaggaagaagaaccctgggggctggtgggagggggagctgcaggcccggggcaagaagaggcagatcggctggttccctgccaactacgtgaagctgctgagccctggcaccagcaagatcacccccacagagccccccaagagcacagccctggccgctgtgtgccaggtgattggcatgtatgactacacagcccagaatgatgatgagctggccttcaacaagggccagatcatcaacgtgctgaacaaggaggaccctgactggtggaagggggaggtgaatggccaggtgggcctcttccccagcaactacgtgaagctgaccacagacatggaccccagccagcagtggtgcagcgacctgcacctgctggacatgctgacccccacagagaggaagaggcagggctacatccacgagctgattgtgacagaggagaactacgtgaatgacctgcagctggtgacagagatcttccagaagcccctgatggagagcgagctgctgacagagaaggaggtggccatgatctttgtgaactggaaggagctgatcatgtgcaacatcaagctgctgaaggccctgcgggtgaggaagaagatgtctggagagaagatgcctgtgaagatgattggagacatcctgagcgcccagctgccccacatgcagccctacatccgcttctgcagccggcagctgaatggagctgccctgatccagcagaagacagatgaggccccagacttcaaggagtttgtgaagaggctggccatggacccccgctgcaagggcatgcccctgagcagcttcatcctgaagcccatgcagagggtgacccgctaccccctcatcatcaagaacatcctggagaacaccccagagaaccacccagaccacagccacctgaagcacgccctggagaaggccgaggagctgtgcagccaggtgaatgaaggagtgcgggagaaggagaacagcgaccggctggagtggatccaggcccacgtgcagtgtgagggcctgtctgagcagctggtgttcaacagcgtgaccaactgcctgggccccaggaagttcctgcacagcggcaagctgtacaaggccaagagcaacaaggagctgtatggcttcctgttcaatgacttcctgctgctgacccagatcaccaagcccctgggcagcagcggcacagacaaggtgttcagccccaagagcaacctgcagtacaagatgtacaagacccccatcttcctgaatgaggtgctggtgaagctgcccacagaccccagcggagatgagcccatcttccacatcagccacatcgacagagtgtacaccctgcgggcagagagcatcaatgaaagaacagcctgggtgcagaagatcaaggccgccagcgagctgtacatcgagacagagaagaagaagcgggagaaggcctacctggtgcgcagccagagggccactggaattggccgcctgatggtgaatgtggtggagggcatcgagctgaagccctgccgcagccacggcaagagcaacccctactgtgaggtgaccatgggcagccagtgccacatcaccaagaccatccaggacaccctgaaccccaagtggaacagcaactgccagttcttcatccgggacctggagcaggaggtgctgtgcatcaccgtgtttgagcgggaccagttctccccagatgacttcctgggccgcacagagatccgggtggccgacatcaagaaggaccagggcagcaagggccctgtgaccaagtgcctgctgctgcacgaggtgcccaccggggagatcgtggtgcggctggacctgcagctgtttgatgagccctag

SEQ ID NO: 134452 - DNA, 4953 bp, Artificial Sequence
  derived and/or modified sequence
atggcccagttccccaccccatttggaggcagcctggacatctgggccatcaccgtggaggagcgggccaagcatgaccagcagttccacagcctgaagcccatcagcggcttcatcaccggggaccaggccaggaacttcttcttccagagcggcctgccccagcctgtgctggcccagatctgggccctggccgacatgaacaatgatggccgcatggaccaggtggagttcagcatcgccatgaagctgatcaagctgaagctgcagggctaccagctgcccagcgccctgccccctgtgatgaagcagcagcctgtggccatcagcagcgccccagccttcggcatgggcggcatcgcctccatgccacccctgacagctgtggcccctgtgcccatgggcagcatccctgtggtgggcatgagccccaccctggtgtcctctgtgcccacagctgctgtgccccccctggccaacggggcccctcctgtgatccagcccctgcctgcctttgcccaccctgctgccaccctgcccaagagcagcagcttcagccgcagcggccctggcagccagctgaacaccaagctgcagaaggcccagagctttgatgtggcctctgtgccccctgtggccgagtgggccgtgccccagagcagccggctgaagtaccggcagctgttcaacagccatgacaagaccatgagcggccacctgaccggcccccaggcccggaccatcctgatgcagagcagcctgccccaggcccagctggccagcatctggaacctgagtgacatcgaccaggacggcaagctgacagctgaggagttcatcctggccatgcacctgattgatgtggccatgagcggccagcccctgccccctgtgctgcccccagagtacatccccccatccttcagaagagtgcgcagcggcagcggcatcagcgtcatcagcagcacctctgtggaccagaggctgcctgaggagcctgtgctggaggatgagcagcagcagctggagaagaagctgcctgtgacctttgaggacaagaagcgggagaactttgagcggggcaacctggagctggagaagaggcggcaggccctgctggagcagcagaggaaggagcaggagcggctggcccagctggagagagctgagcaggagaggaaggagcgggagcggcaggagcaggagaggaagaggcagctggagctggagaagcagctggagaagcagcgggagctggagcggcagcgggaggaggagaggaggaaggagattgaaagaagagaggccgccaagcgggagctggagcggcagaggcagctggagtgggagaggaacagacggcaggagctgctgaaccagaggaacaaggagcaggaggacatcgtggtgctgaaggccaagaagaagaccctggagtttgagctggaggccctgaatgacaagaagcaccagctggagggcaagctgcaggacatccgctgccgcctgaccacccagaggcaggagattgagagcaccaacaagagccgggagctgagaattgctgagatcacccacctgcagcagcagctgcaggagagccagcagatgctgggccgcctcatccctgagaagcagatcctgaatgaccagctgaagcaggtgcagcagaacagcctgcaccgggacagcctggtgaccctgaagagggccctggaggccaaggagctggcccggcagcacctgcgggaccagctggatgaggtggagaaggagaccaggagcaagctgcaggagattgacatcttcaacaaccagctgaaggagctgcgggagatccacaacaagcagcagctgcagaagcagaagtccatggaggccgagcggctgaagcagaaggagcaggagaggaagatcatcgagctggagaagcagaaggaggaggcccagaggcgggcccaggagcgggacaagcagtggctggagcacgtgcagcaggaggatgagcaccagaggcccaggaagctgcacgaggaggagaagctgaagcgggaggagagcgtgaagaagaaggatggagaggagaagggcaagcaggaggcccaggacaagctgggccgcctcttccaccagcaccaggagcccgccaagccagctgtgcaggccccctggagcacagctgagaagggccccctgaccatcagcgcccaggagaatgtgaaggtggtgtactaccgggccctgtacccctttgagagccgcagccatgatgagatcaccatccagcccggggacatcgtgatggtgattggctgctgggtggatgagagccagacaggagagcccggctggctgggcggggagctgaagggcaagacaggctggttccctgccaactatgcagagaagatcccagaaaatgaggtgcctgcccctgtgaagcctgtgacagacagcaccagcgccccagcccccaagctggccctgcgggagaccccagcccccctggccgtgaccagcagcgagcccagcaccacccccaacaactgggccgacttcagcagcacctggcccaccagcaccaatgagaagccagagacagacaactgggatgcctgggccgcccagcccagcctgactgtgcccagcgctggccagctgcggcagaggtctgccttcaccccagccacagccaccggcagcagccccagccctgtgctgggccagggcgagaaggtggagggcctgcaggcccaggccctgtacccctggagggccaagaaggacaaccacctgaacttcaacaagaatgatgtgatcaccgtgctggagcagcaggacatgtggtggtttggagaggtgcagggccagaagggctggttccccaagagctatgtgaagctgatcagcggccccatcaggaagagcacctccatggattctggcagcagcgagagccctgccagcctgaagagggtggccagccctgctgccaagcctgtggtgtctggagaggagatcgcccaggtgattgccagctacacagccactggacctgagcagctgaccctggcccctggccagctgatcctgatcaggaagaagaaccctgggggctggtgggagggggagctgcaggcccggggcaagaagaggcagatcggctggttccctgccaactacgtgaagctgctgagccctggcaccagcaagatcacccccacagagccccccaagagcacagccctggccgctgtgtgccaggtgattggcatgtatgactacacagcccagaatgatgatgagctggccttcaacaagggccagatcatcaacgtgctgaacaaggaggaccctgactggtggaagggggaggtgaatggccaggtgggcctcttccccagcaactacgtgaagctgaccacagacatggaccccagccagcagtggtgcagcgacctgcacctgctggacatgctgacccccacagagaggaagaggcagggctacatccacgagctgattgtgacagaagaaaattatgtgaatgacctgcagctggtgacagagatcttccagaagcccctgatggagagcgagctgctgacagagaaggaggtggccatgatctttgtgaactggaaggagctgatcatgtgcaacatcaagctgctgaaggccctgcgggtgaggaagaagatgtctggagagaagatgcctgtgaagatgattggagacatcctgagcgcccagctgccccacatgcagccctacatccgcttctgcagccggcagctgaatggagctgccctgatccagcagaagacagatgaggccccagacttcaaggagtttgtgaagaggctggccatggacccccgctgcaagggcatgcccctgagcagcttcatcctgaagcccatgcagagggtgacccgctaccccctcatcatcaagaacatcctggagaacaccccagagaaccacccagaccacagccacctgaagcacgccctggagaaggccgaggagctgtgcagccaggtgaatgaaggagtgcgggagaaggaaaattctgaccggctggagtggatccaggcccacgtgcagtgtgagggcctgtctgagcagctggtgttcaacagcgtgaccaactgcctgggccccaggaagttcctgcacagcggcaagctgtacaaggccaagagcaacaaggagctgtatggcttcctgttcaatgacttcctgctgctgacccagatcaccaagcccctgggcagcagcggcacagacaaggtgttcagccccaagagcaacctgcagtacaagatgtacaagacccccatcttcctgaatgaggtgctggtgaagctgcccacagaccccagcggagatgagcccatcttccacatcagccacatcgacagagtgtacaccctgcgggcagagagcatcaatgaaagaacagcctgggtgcagaagatcaaggccgccagcgagctgtacattgaaacagagaagaagaagcgggagaaggcctacctggtgcgcagccagagggccaccggcatcggccgcctgatggtgaatgtggtggagggcatcgagctgaagccctgccgcagccacggcaagagcaacccctactgtgaggtgaccatgggcagccagtgccacatcaccaagaccatccaggacaccctgaaccccaagtggaacagcaactgccagttcttcatccgggacctggagcaggaggtgctgtgcatcaccgtgtttgagcgggaccagttctccccagatgacttcctgggccgcacagagatccgggtggccgacatcaagaaggaccagggcagcaaaggacctgtgaccaagtgcctgctgctgcacgaggtgcccactggagagatcgtggtgcggctggacctgcagctgtttgatgagccctag

SEQ ID NO: 134453 - DNA, 5166 bp, Artificial Sequence
  derived and/or modified sequence
atggcccagttccccaccccatttggaggcagcctggacatctgggccatcaccgtggaggagcgggccaagcatgaccagcagttccacagcctgaagcccatcagcggcttcatcaccggggaccaggccaggaacttcttcttccagagcggcctgccccagcctgtgctggcccagatctgggccctggccgacatgaacaatgatggccgcatggaccaggtggagttcagcatcgccatgaagctgatcaagctgaagctgcagggctaccagctgcccagcgccctgccccctgtgatgaagcagcagcctgtggccatcagcagcgccccagccttcggcatgggcggcatcgcctccatgccacccctgacagctgtggcccctgtgcccatgggcagcatccctgtggtgggcatgagccccaccctggtgtcctctgtgcccacagctgctgtgccccccctggccaacggggcccctcctgtgatccagcccctgcctgcctttgcccaccctgctgccaccctgcccaagagcagcagcttcagccgcagcggccctggcagccagctgaacaccaagctgcagaaggcccagagctttgatgtggcctctgtgccccctgtggccgagtgggccgtgccccagagcagccggctgaagtaccggcagctgttcaacagccatgacaagaccatgagcggccacctgaccggcccccaggcccggaccatcctgatgcagagcagcctgccccaggcccagctggccagcatctggaacctgagtgacatcgaccaggacggcaagctgacagctgaggagttcatcctggccatgcacctgattgatgtggccatgagcggccagcccctgccccctgtgctgcccccagagtacatccccccatccttcagaagagtgcgcagcggcagcggcatcagcgtcatcagcagcacctctgtggaccagaggctgcctgaggagcctgtgctggaggatgagcagcagcagctggagaagaagctgcctgtgacctttgaggacaagaagcgggagaactttgagcggggcaacctggagctggagaagaggcggcaggccctgctggagcagcagaggaaggagcaggagcggctggcccagctggagagagctgagcaggagaggaaggagcgggagcggcaggagcaggagaggaagaggcagctggagctggagaagcagctggagaagcagcgggagctggagcggcagcgggaggaggagaggaggaaggagattgaaagaagagaggccgccaagcgggagctggagcggcagaggcagctggagtgggagaggaacagacggcaggagctgctgaaccagaggaacaaggagcaggaggacatcgtggtgctgaaggccaagaagaagaccctggagtttgagctggaggccctgaatgacaagaagcaccagctggagggcaagctgcaggacatccgctgccgcctgaccacccagaggcaggagattgagagcaccaacaagagccgggagctgagaattgctgagatcacccacctgcagcagcagctgcaggagagccagcagatgctgggccgcctcatccctgagaagcagatcctgaatgaccagctgaagcaggtgcagcagaacagcctgcaccgggacagcctggtgaccctgaagagggccctggaggccaaggagctggcccggcagcacctgcgggaccagctggatgaggtggagaaggagaccaggagcaagctgcaggagattgacatcttcaacaaccagctgaaggagctgcgggagatccacaacaagcagcagctgcagaagcagaagtccatggaggccgagcggctgaagcagaaggagcaggagaggaagatcatcgagctggagaagcagaaggaggaggcccagaggcgggcccaggagcgggacaagcagtggctggagcacgtgcagcaggaggatgagcaccagaggcccaggaagctgcacgaggaggagaagctgaagcgggaggagagcgtgaagaagaaggatggagaggagaagggcaagcaggaggcccaggacaagctgggccgcctcttccaccagcaccaggagcccgccaagccagctgtgcaggccccctggagcacagctgagaagggccccctgaccatcagcgcccaggagaatgtgaaggtggtgtactaccgggccctgtacccctttgagagccgcagccatgatgagatcaccatccagcccggggacatcgtgatggtgaagggggagtgggtggatgagagccagacaggagagcccggctggctgggcggggagctgaagggcaagacaggctggttccctgccaactatgcagagaagatcccagaaaatgaggtgcctgcccctgtgaagcctgtgacagacagcaccagcgccccagcccccaagctggccctgcgggagaccccagcccccctggccgtgaccagcagcgagcccagcaccacccccaacaactgggccgacttcagcagcacctggcccaccagcaccaatgagaagccagagacagacaactgggatgcctgggccgcccagcccagcctgactgtgcccagcgctggccagctgcggcagaggtctgccttcaccccagccacagccaccggcagcagccccagccctgtgctgggccagggcgagaaggtggagggcctgcaggcccaggccctgtacccctggagggccaagaaggacaaccacctgaacttcaacaagaatgatgtgatcaccgtgctggagcagcaggacatgtggtggtttggagaggtgcagggccagaagggctggttccccaagagctatgtgaagctgatcagcggccccatcaggaagagcacctccatggattctggcagcagcgagagccctgccagcctgaagagggtggccagccctgctgccaagcctgtggtgtctggagaggagttcatcgccatgtacacctatgagagcagcgagcagggcgacctgaccttccagcagggagatgtgatcctggtgaccaagaaggatggagactggtggacaggcaccgtgggggacaaggccggggtcttccccagcaactacgtgcggctgaaggacagcgagggcagcggcacagctgggaagacaggcagcctgggcaagaagccagagatcgcccaggtgattgccagctacacagccaccggccctgagcagctgaccctggcccctggccagctgatcctgatcaggaagaagaaccctgggggctggtgggagggggagctgcaggcccggggcaagaagaggcagatcggctggttccctgccaactacgtgaagctgctgagccctggcaccagcaagatcacccccacagagccccccaagagcacagccctggccgctgtgtgccaggtgattggcatgtatgactacacagcccagaatgatgatgagctggccttcaacaagggccagatcatcaacgtgctgaacaaggaggaccctgactggtggaagggggaggtgaatggccaggtgggcctcttccccagcaactacgtgaagctgaccacagacatggaccccagccagcagtggtgcagcgacctgcacctgctggacatgctgacccccacagagaggaagaggcagggctacatccacgagctgattgtgacagaggagaactacgtgaatgacctgcagctggtgacagagatcttccagaagcccctgatggagagcgagctgctgacagagaaggaggtggccatgatctttgtgaactggaaggagctgatcatgtgcaacatcaagctgctgaaggccctgcgggtgaggaagaagatgtctggagagaagatgcctgtgaagatgattggagacatcctgagcgcccagctgccccacatgcagccctacatccgcttctgcagccggcagctgaatggagctgccctgatccagcagaagacagatgaggccccagacttcaaggagtttgtgaagaggctggccatggacccccgctgcaagggcatgcccctgagcagcttcatcctgaagcccatgcagagggtgacccgctaccccctcatcatcaagaacatcctggagaacaccccagagaaccacccagaccacagccacctgaagcacgccctggagaaggccgaggagctgtgcagccaggtgaatgaaggagtgcgggagaaggagaacagcgaccggctggagtggatccaggcccacgtgcagtgtgagggcctgtctgagcagctggtgttcaacagcgtgaccaactgcctgggccccaggaagttcctgcacagcggcaagctgtacaaggccaagagcaacaaggagctgtatggcttcctgttcaatgacttcctgctgctgacccagatcaccaagcccctgggcagcagcggcacagacaaggtgttcagccccaagagcaacctgcagtacaagatgtacaagacccccatcttcctgaatgaggtgctggtgaagctgcccacagaccccagcggagatgagcccatcttccacatcagccacatcgacagagtgtacaccctgcgggcagagagcatcaatgaaagaacagcctgggtgcagaagatcaaggccgccagcgagctgtacatcgagacagagaagaagaagcgggagaaggcctacctggtgcgcagccagagggccactggaattggccgcctgatggtgaatgtggtggagggcatcgagctgaagccctgccgcagccacggcaagagcaacccctactgtgaggtgaccatgggcagccagtgccacatcaccaagaccatccaggacaccctgaaccccaagtggaacagcaactgccagttcttcatccgggacctggagcaggaggtgctgtgcatcaccgtgtttgagcgggaccagttctccccagatgacttcctgggccgcacagagatccgggtggccgacatcaagaaggaccagggcagcaagggccctgtgaccaagtgcctgctgctgcacgaggtgcccaccggggagatcgtggtgcggctggacctgcagctgtttgatgagccctag

SEQ ID NO: 134454 - DNA, 237 bp, Artificial Sequence
  derived and/or modified sequence
atggcccagttccccaccccatttggaggcagcctggacatctgggccatcaccgtggaggagcgggccaagcatgaccagcagttccacagcctgaagcccatcagcggcttcatcaccggggaccaggccaggaacttcttcttccagagcggcctgccccagcctgtgctggcccagatctgggccctggccgacatgaacaatgatggccgcatggaccaggtggagttctag

SEQ ID NO: 134455 - DNA, 5166 bp, Artificial Sequence
  derived and/or modified sequence
atggcccagttccccacccccttcggcggcagcctggacatctgggccatcacagttgaggaaagggctaagcatgaccaacaattccactcactgaaaccaatcagtggcttcattactggtgatcaggcaagaaatttcttttttcaatccggcctgcctcaacccgttttagcacaaatctgggcgcttgctgacatgaataatgacggtcgaatggatcaagtggagttctcaatagctatgaaattaattaaactgaagctgcagggataccagctgccgagcgctctaccaccggtcatgaagcagcaacccgtggctatctcctctgctccagcgttcgggatggggggtatcgcaagtatgcccccactgacagcagtggcacctgtaccgatgggcagcattccagtggtcggtatgtccccgacgttagtctccagtgtacctaccgccgccgtgcccccactggccaatggtgctccacctgtgattcagcctctacccgctttcgcccatcccgctgcaaccctcccaaagagctctagcttcagtagatcagggccagggagccagctgaacaccaaactgcagaaggctcagagctttgatgtagcctctgtgccacctgtggctgagtgggccgtcccgcagtcctctagactgaagtatcggcagctgttcaacagccatgataagaccatgagtggtcatctgactggaccacaggcgagaacgatcctcatgcaaagttcactcccgcaagcccagttggccagcatatggaatttgagcgacatcgaccaagacggtaaacttaccgctgaagaattcatcctggccatgcaccttatcgacgtcgccatgtcagggcagccactgccaccagtattgcctcccgagtacatccccccttcttttcggagagtgcgtagtggatctgggatttccgtgatctcgtccacgtctgtggatcagcgactgccggaggagcccgtgcttgaagacgagcaacaacaactggagaaaaagctgcctgtaacctttgaagataagaagcgtgaaaactttgaacgtggcaacctggagcttgaaaagcgacgccaggcgttgctagagcaacagcggaaggagcaggaaagactggcgcagttggagagggcggagcaggaaagaaaggaaagagaaagacaggagcaggaacggaagcgccagctggagctggagaagcagctcgaaaagcagagagaactcgaaaggcagcgtgaagaggagcggagaaaggagattgagagacgagaggcagcaaagcgcgagttagagcggcaaagacaactggagtgggaaagaaaccgccgccaggaacttctcaatcagagaaataaggagcaggaggatatcgtcgttctaaaagccaaaaaaaagaccctggaattcgagctcgaggcattgaacgacaagaagcatcagttggagggcaagttgcaggacattaggtgtcgtttgacaacccagagacaggagatcgagagcacaaacaagtcccgtgaattgcgcatcgccgaaattacccatctgcagcagcaactccaggaaagccagcagatgcttggtcgtttgataccagaaaaacaaatactgaacgaccaattgaagcaggtgcagcagaactctctgcaccgagattcccttgtgacactgaaacgcgcactggaggctaaagagttagccagacaacatctgagggatcaactggatgaggttgagaaggaaacacgctcaaagctgcaggagatcgatatctttaataatcaacttaaagaactgcgcgaaatccacaataagcaacagctccagaagcagaagtccatggaggctgagaggcttaagcagaaggagcaggagcgtaagatcatcgagctcgagaaacagaaagaggaggctcagagacgcgcccaagaaagggataaacagtggctcgaacatgtacagcaagaggacgaacaccagcgaccgcggaagctacatgaagaagagaaactcaagagagaagaatctgttaagaaaaaagacggtgaagagaaggggaagcaagaggcacaggacaagctaggccggttatttcaccaacaccaggagccagctaagccagctgtccaggccccttggtctaccgccgagaagggtccactcactatatcagctcaggagaacgttaaggtggtgtactatagggccctatatccattcgagtctcggtcacacgatgagataaccatacagccgggggacatcgtgatggtgatagggtgttgggtggatgaaagtcagactggagagcccggatggctgggaggagagttgaagggcaaaaccggatggttcccagctaactatgccgaaaaaatcccggaaaatgaagtaccagccccggttaagcccgtgacagactctacaagcgctccggcccccaaactcgccctcagagagactcctgctcccctcgccgttacgtcgtccgagccctctaccactcccaacaactgggccgacttctcttcaacttggcccacttctacaaacgaaaagccagagacagacaattgggacgcctgggctgcccagccaagcctgactgttcctagtgccgggcagctgaggcagcgctctgctttcactcccgccaccgcaacgggttcctccccgagcccagttctcgggcagggcgagaaggtcgaaggcctccaggcacaggctctgtatccctggagagctaaaaaagacaaccacctgaacttcaacaagaatgacgtgattactgtccttgagcagcaagatatgtggtggtttggcgaagtacagggtcaaaagggctggtttccgaagagttacgtgaagctcatcagtgggccaatcaggaagtccacttccatggatagcggctcatccgagtcccccgcatcactaaagcgcgttgcttccccagccgccaagccagtggtgtcgggagaagagtttattgcaatgtacacgtatgaaagctccgagcagggagatctgacattccagcagggagacgtgattttggtcactaaaaaagatggcgactggtggacagggacagtgggggataaagctggggtgttcccttctaactatgtgcgcctaaaagattccgaagggtctggcacagcaggcaaaactggttctctcggaaaaaaacccgagatcgctcaagtaatcgcctcctatacagccaccggaccggagcagctcactctggccccgggacagctgatcctgatccgcaaaaagaaccctggaggttggtgggaaggcgagctgcaagcacgcggcaagaaacgacaaatcggctggttcccagccaattatgtaaagctactgtcccccggaacatctaagatcacaccaaccgaacctccaaaatccaccgccttagcggccgtgtgtcaggtgatcgggatgtacgattataccgcccagaacgatgacgagctagcctttaacaagggccagataatcaacgtgctaaataaggaggaccccgattggtggaaaggagaggttaatggccaggtcgggctattccctagcaactatgtgaaactaaccacagacatggatccttcacaacagtggtgttccgatctccacttactcgatatgctgactcctaccgaaaggaagaggcagggatacatccatgaactgatcgtgactgaagagaattatgtgaacgatttgcagttagtgacggagatcttccagaaaccgctgatggagtcggagttgctcacagagaaggaagtggcaatgattttcgttaactggaaagaactcattatgtgtaacattaaactgctgaaggcactccgtgtgcgtaaaaaaatgagtggcgagaagatgccggtcaagatgattggtgatattctgagtgcccaactccctcatatgcagccttacattcgtttctgcagcaggcagctgaatggtgctgccctgatccagcaaaagactgacgaggcacctgactttaaggaattcgttaaacgcctagccatggacccacgatgtaagggcatgcccctctcatcgttcatactgaaaccaatgcaaagggtcacgcgatatcccctgatcatcaagaatattctggagaataccccagagaatcaccctgatcactcccatctcaaacacgctcttgagaaggcggaggaattgtgttctcaggttaacgaaggagtgagggagaaagagaactccgaccgtctcgaatggatacaagcccacgtgcagtgtgaaggtttaagtgaacaacttgtgttcaactccgtaaccaactgtttgggtccccgcaaatttctgcatagtgggaagttgtataaggccaaaagtaacaaagagctctatggattcctgttcaatgactttttgcttttgacacaaatcacaaaacccctcggttcctctggtaccgataaggtatttagccccaagtcgaacctgcagtacaagatgtataaaacacccatcttcctgaacgaggtgcttgtaaaactgcccaccgacccttctggggacgaaccaatcttccatatcagtcatattgatcgcgtgtatacgttgcgggccgaatcaatcaatgagaggacagcctgggttcagaagatcaaagccgcaagcgaattatacatcgaaaccgagaagaaaaaacgggaaaaggcttacttagttcgcagccaaagagcaactggcataggccgtttgatggtgaatgtagtggaagggattgaactcaagccctgtagaagccacggaaagtcaaacccctactgtgaggtgaccatggggtctcaatgccacattaccaaaaccattcaggatacattaaacccaaaatggaactcaaactgccagttcttcatccgcgatttggagcaagaagtgctgtgcattactgtgttcgagagggaccagttctctccagatgatttcctgggtcgaaccgagataagagtggcagacatcaaaaaagatcaagggagtaagggtcctgtcacgaagtgtctcctgctgcatgaagttcctactggcgaaattgttgtgcgcctcgacctgcaattgttcgacgaaccctag

SEQ ID NO: 134456 - DNA, 4953 bp, Artificial Sequence
  derived and/or modified sequence
atggcccagttccccacccccttcggcggcagcctggacatctgggccatcacggtggaggagcgcgccaagcatgaccagcagtttcatagccttaagcctatctcgggatttattacaggcgaccaggcaaggaatttcttcttccagagcgggttgccacagcctgtactggcccagatctgggccctcgccgacatgaataacgacggccgaatggaccaggtggaattttcgatcgctatgaaattgattaagctgaagttgcagggataccagctgccttctgcgctgcctcccgtaatgaagcagcagcccgtggcaatctcctcagcgcctgcgttcggcatggggggaatagccagtatgcctccacttacagctgtcgcacctgtcccaatggggtctatcccagtcgtcgggatgtcccctaccctcgtctcttccgtgcctaccgcagctgtgccaccgctggccaatggagccccaccagtgattcaacctctgcccgccttcgcccatccagcggccacactaccaaagagctccagcttcagccgctccgggccaggctcacaactgaataccaaactccagaaggcccagtccttcgatgtagcttcagtgccccccgttgctgagtgggccgtcccacaaagcagcagattgaagtacaggcagctttttaattcccacgataagactatgtcaggccacctgacggggcctcaagcgagaacaattctgatgcagagcagcctgccccaggcccaattggcctcaatatggaacctttccgacatcgaccaggacggtaagcttaccgcggaagaatttattctcgcgatgcacctgatcgatgtggccatgtcaggccagccgctgccaccggtcctgccacccgaatacatccccccttctttccggcgtgtccggtcagggagcggcatctcagtcatctccagcactagcgtggaccagcgcttacctgaggaaccagtgctagaggatgaacagcaacagctggaaaagaaacttccagtgacgttcgaggacaaaaagcgtgaaaattttgagcggggaaatctagagctagagaaacgcagacaggctttgctcgagcagcagcggaaggaacaagagcggctcgcccagcttgaaagggcggaacaggaaagaaaagagcgagagagacaggagcaagagcggaagagacaacttgagttggaaaagcagttggagaaacagagggagctggagcgacagagggaagaggaaagaagaaaggaaatagaacgcagagaggcggcaaaacgggaactggaacgtcagcggcagctcgaatgggaacggaataggcggcaggagttgctgaaccagagaaataaagagcaagaggatattgtggtgctgaaggccaagaagaagaccctcgagtttgaactggaggctttgaacgacaaaaaacaccaactggaaggtaaacttcaggacataaggtgtcgtctgaccacacagaggcaggagattgagagcactaataagagtcgcgagctgcggatcgcggagataacacatctgcaacagcaactgcaggaatcgcaacagatgttgggccggctcataccggaaaagcagattttaaacgaccagctgaaacaggtgcaacagaactctctgcacagagactccctagtcaccctgaagcgggcattagaggccaaggaattagcccgacaacatttacgggaccagctggatgaggttgaaaaggagacccggagcaagctacaagaaatcgatatttttaacaatcagctcaaggagttgcgcgagatacataacaaacaacagctccagaagcagaagtcgatggaggccgagagactgaagcagaaggaacaagagaggaagattattgaactggaaaagcagaaggaggaggctcagaggcgtgcccaggagagagataaacagtggctcgagcatgtccagcaggaagacgagcaccagaggcctcggaagctgcatgaggaagaaaagctcaagagagaggagtccgtgaaaaagaaggatggcgaggaaaagggaaagcaggaagctcaagacaagctgggccgactttttcaccagcaccaggagccagccaaacccgcggttcaggccccatggagcacagccgagaagggtcccttaacaatctccgcccaagagaacgtgaaggtcgtgtattatagagcgttatacccttttgaatcaagatcacatgacgaaattactattcagccaggcgatattgtaatggtgattgggtgttgggtcgatgaatcccagaccggtgaaccagggtggttaggcggagagcttaagggcaagacaggctggttccctgccaactatgccgagaaaatcccagaaaatgaagtccccgctcccgtgaaacctgtgacagactctacaagcgctcctgctcctaaattagcccttagggagacgcctgctccactggctgtgactagctctgagccctcgaccactcctaataattgggccgactttagctcaacctggccgacatccactaacgaaaaaccagaaactgacaactgggatgcgtgggccgctcaaccctctctcactgtgcctagtgcagggcaattgaggcagaggagcgctttcacacctgcaaccgccaccggaagcagtccctcacccgttctgggtcagggggaaaaggttgagggcctccaggcacaggcactgtacccctggcgtgcaaagaaagataaccatctgaactttaacaaaaacgatgtgataaccgtcctggagcaacaggacatgtggtggttcggtgaggtgcaggggcaaaaggggtggttcccaaagagctacgtcaagcttatttcgggccccatcagaaagagcactagcatggacagcggctccagcgaaagccctgcaagtctgaagcgcgtggccagtccggctgcgaagcctgttgtctccggggaggagatcgcacaagttatagctagttacactgctacgggccccgaacaattaactctggcgccaggtcagctgatcctgatacgcaaaaagaatcctggcggatggtgggaaggggagctgcaggccaggggcaaaaaacgccaaatcggctggttccctgccaattatgtgaagctgctttcccccgggacgtccaaaataacaccaaccgagcccccaaagtccacggctctcgcagctgtgtgtcaggtgattggtatgtatgactacaccgctcaaaatgatgacgaactagcgtttaacaaaggccaaataattaatgtgttaaataaagaggatcctgattggtggaagggagaggtgaacggtcaagtcggacttttcccaagcaactacgtcaagctgactactgatatggatccatcccagcagtggtgcagcgacctccacttactagacatgctcactcccaccgagcgaaaaaggcaaggatatattcatgagctgattgtgacggaagaaaactatgtgaacgacctgcaactcgttaccgagatcttccagaaacccctgatggagtcagagttgctgacggagaaggaagtggccatgatttttgtgaattggaaggagcttataatgtgcaatataaaactcctgaaagccctgcgagttagaaagaagatgtctggagagaagatgcccgtaaaaatgattggggatatattgagcgcccagctaccacacatgcagccgtacatccgattctgtagcagacagctgaacggggccgcactcattcagcagaaaacagatgaggcccctgatttcaaagaatttgtcaaacgtctggccatggacccaagatgcaaagggatgcctctgagttcttttattctgaaacccatgcagagggtcacgcgctatcctcttatcattaagaacatcctggaaaatacacctgaaaatcacccagaccactcgcatttgaagcatgcactagagaaggccgaagagttgtgctcccaggtgaacgagggtgtgagggagaaggagaacagtgaccgcctggagtggattcaggctcatgtacagtgtgaagggctgagcgaacagctggtctttaactcagtgactaactgcctgggaccacggaagttcttgcactccggcaagctgtacaaggccaagagcaacaaagaattgtacgggttcctgtttaatgattttctgttgctgacccagatcactaagcctctaggctcttctggtacagacaaggtcttttccccgaaatcaaacctgcagtacaaaatgtataagacaccgattttcctcaacgaggtcctagtgaagttgccaaccgacccttctggcgatgaaccaatcttccacatctcacacattgatcgggtgtacactctgcgggctgagagcattaacgaaagaactgcttgggtgcaaaagatcaaagccgcctccgagctctatatcgagaccgaaaagaaaaagcgcgagaaggcatacctggtgcggagccagagggcaactggcattggaagactgatggtaaacgtggtcgagggcatagagttgaagccatgtaggtctcatggcaagtctaacccatactgcgaagtgaccatggggtctcaatgccacatcactaaaacaattcaggatacactgaaccccaagtggaattcaaactgccagttctttatccgtgatctggaacaggaagtgttatgtatcaccgtgtttgagagagatcagttttccccagatgatttcctggggcgcaccgagatcagggtcgctgacattaaaaaggatcagggctcgaagggaccagtcaccaagtgtcttctcctccacgaggtgcctaccggggaaatcgtagtcaggctggacctgcaactgtttgacgaaccatag

SEQ ID NO: 134457 - DNA, 5166 bp, Artificial Sequence
  derived and/or modified sequence
atggcccagttccccacccccttcggcggcagcctggacatctgggcaatcacagtggaggaacgcgctaaacacgaccaacagtttcactccctgaaaccaatttctggctttattactggtgatcaggcacgcaactttttcttccagtctgggctgcctcagcccgtcctcgcccaaatctgggcactggccgacatgaacaatgatggaagaatggaccaggtcgagttctccatcgctatgaagttgatcaagctgaaactgcagggctaccaactcccgtcagctctgccgcctgtaatgaagcagcagcccgtggccatttcttctgcaccggcttttgggatgggcggcattgccagcatgccccctctcactgccgtggctcccgtcccaatggggtccattcccgtagtcggaatgtcgcctacattggtgtcttccgtccctacagctgccgttcccccacttgcaaacggcgctccacctgtgattcagccacttcccgcttttgcacacccggccgctactcttcccaaaagcagttcattttcaaggagcgggcctgggtctcaactcaatacaaagctccagaaggctcagtcattcgatgtggccagtgtgcctcccgtcgctgaatgggcagtgcctcagtcttcgaggttgaagtataggcagctgttcaattcgcatgataagacgatgtcggggcacctgactggtccccaagcaaggaccattctcatgcaatcttcactccctcaggcacaactggcctctatatggaacctttcagacatcgatcaggacgggaagcttactgcagaagagttcatactggcaatgcatttgattgatgttgccatgtcagggcagcctttacccccggtgctgccgccagaatacattccaccatccttcaggcgcgtgcgttcaggatccggcatcagcgtgatttcctcaactagcgtggaccagcggctgcctgaggagccagtgttggaagacgagcagcagcagctggaaaagaaacttcccgtcacatttgaggacaagaagcgagagaacttcgagcggggcaacttggagctggagaagcgccgacaggccctgctggagcagcagcggaaggagcaagaacggctggcccagctggagcgcgcggagcaggaacggaaggagagggagcgacaggagcaagaacggaaacgccagttggagctcgagaagcagttagaaaagcagagagaattggagagacaacgggaagaggaaagaaggaaggaaatagaacggcgcgaagccgcgaaacgagagctcgaaaggcaacgacagctggagtgggagaggaacaggcgacaggagctgctgaatcagcggaataaggagcaggaggatattgtggtattgaaagctaaaaaaaagacactggaatttgagttggaggccctgaatgataagaagcaccagttggaagggaaacttcaggacattcgctgtcgcctgaccactcagaggcaggaaatcgaatcaaccaataagtctcgggagctccgtattgccgagatcactcacttgcaacagcagctgcaggaatcacagcagatgcttggtcgcctcatccctgaaaaacaaatcctgaatgaccagctaaagcaagtccagcagaacagtctgcatcgagattctctggtaaccttaaagcgcgccttggaggccaaagagcttgcaagacaacatctgagagatcagttagacgaggtggagaaggagacaaggagcaaactccaggagatcgacatctttaataatcagctgaaggagctgcgggagatccacaataaacaacagctccagaagcagaaaagtatggaggctgagaggctgaagcagaaagaacaggagagaaaaatcatagagctggaaaaacaaaaagaggaggcccagcgcagagcccaggagagggataagcagtggctggagcacgtccaacaggaggacgaacaccagagaccacgaaaattacatgaggaagagaaactaaagagagaggaatcggtgaaaaagaaggacggcgaggaaaagggaaaacaggaagcacaggataagctgggtaggctttttcaccagcatcaagagccagctaagccagccgtgcaggccccctggtcaaccgcagaaaagggtccactgacgattagcgctcaggaaaatgtcaaagttgtgtactaccgtgctctgtatccattcgaaagccgctcacacgatgagattacaatacaaccaggcgacattgtaatggtgaagggggagtgggttgatgaaagtcagacaggagagccagggtggctaggcggcgagctgaaaggtaaaacagggtggtttcctgcaaattatgccgaaaagattcctgagaatgaggtccctgcccctgtgaaaccagtgactgattccacgtcagccccggcccctaagctcgccctgagggagacccccgcccccttggcggtcacatcaagcgaaccctccaccactcctaataattgggccgacttttcaagtacctggcctacttccacaaacgagaagcctgagaccgacaattgggatgcatgggccgcacagccctcattgacagtcccatccgccggacaattacggcagaggtccgcgttcactcccgctacagctacagggtctagcccctcaccagtactgggacagggtgaaaaagtagagggcctgcaggctcaggccctgtatccatggcgtgctaagaaggacaaccatcttaatttcaacaaaaacgatgtcatcaccgtcttagaacaacaagacatgtggtggttcggcgaggtgcaggggcagaaggggtggtttcccaagtcatatgtgaagctgatcagtggtccaattcgtaagagcacatcgatggattcaggctcttctgagagccccgctagcttaaaaagagtggccagccctgccgcaaagccagtcgtctccggagaggagttcattgcaatgtacacgtatgaatcttccgagcagggcgacttaacattccaacagggtgacgtgattctggtgaccaaaaaggacggagattggtggacagggacagtgggtgataaggccggggtttttccgagtaactatgttcggctgaaagattccgaggggagcggcactgcaggaaagactggaagcctcggtaagaaacctgagattgctcaagttattgctagttacaccgccactggccctgagcagttgaccctggcccctgggcagctgatactgataagaaagaaaaacccaggaggctggtgggagggtgagctgcaagcacggggtaaaaaaagacagatcgggtggttcccggcgaattacgtcaagttactgagccccggtacttctaaaattaccccaacggagcctcccaagtctacagccctggcagcagtctgtcaggttatcggcatgtatgattacacagcgcagaacgatgacgaactggccttcaataaggggcagatcattaatgtgctgaacaaagaggatcctgactggtggaaaggtgaagttaatggacaggtaggcctgttcccatcaaactatgtgaagctgaccaccgatatggacccctcccagcagtggtgtagcgacctgcatttgctcgatatgctcacccctacagaacgcaaacgtcagggttatattcacgaactgatcgtcactgaggagaactatgtgaatgacctacagctcgtcactgaaatttttcagaagcctctgatggagagtgaactcctgactgaaaaggaggtggccatgatctttgtgaattggaaggagttgatcatgtgtaatatcaagcttctgaaagccctgagagttaggaagaagatgtccggagagaaaatgcctgtgaagatgataggagacatcctgagcgctcagctcccacacatgcaaccttatattcgattctgctctcgccagctaaacggcgcagcacttattcagcagaagacggacgaggcccccgatttcaaagaatttgttaagagactggccatggatcctcgctgtaaaggcatgccgctctcctcgttcatcctgaaaccaatgcagcgagtgacccgttatcccctgatcattaaaaacatattggaaaacactcccgagaatcaccccgaccattcccacctgaagcacgcgctggaaaaggcagaggagctgtgcagtcaggtaaatgagggtgtccgggagaaagaaaactccgacaggctggagtggattcaggcccatgtgcagtgcgaagggttgtcggagcagctggtgtttaacagtgtgacgaattgtctcggtccaaggaagttcctgcatagcgggaagctgtacaaggctaaatcaaacaaagaactatacggctttctctttaatgacttccttctcctcactcagattacaaagcccctgggatcttcggggacagacaaagtcttttccccaaagtccaacttgcagtacaagatgtacaaaacacctatcttccttaatgaagtgttagttaaactgcctaccgacccatctggtgatgaaccgatatttcatatatctcacatagacagagtttatacactgcgcgcggaaagtataaatgagcggaccgcctgggtgcagaaaataaaagcggctagcgaactttatatcgagacagagaagaagaaaagagaaaaagcttacctcgtgaggtcacagagagctactgggattggccgactgatggtgaatgtggtggagggcattgagctgaagccatgcagatcgcatggcaaaagtaacccgtactgcgaggtgacaatgggatctcagtgtcatattacgaagacgatccaggacacacttaatccaaagtggaatagcaattgtcagttttttattagagacttggaacaagaggttctatgtataactgtgtttgagcgagaccagttctcaccggacgactttttgggccgtacggagattcgggttgccgatattaagaaagatcaaggaagtaagggtcccgtgactaaatgcttgctgctgcacgaggttccaaccggggaaattgtggtacgactggacctgcagttgtttgacgagccatag

SEQ ID NO: 134458 - DNA, 237 bp, Artificial Sequence
  derived and/or modified sequence
atggcccagttccccacccccttcggcggcagcctggacatctgggcgatcacagtcgaagagcgggctaaacatgatcagcagtttcatagtctcaaacccattagcggattcataacaggagatcaggcccgcaatttcttttttcaatcgggccttccccaaccagtcctcgcccagatttgggcccttgcagatatgaataatgacggccggatggaccaggtcgagttctag

SEQ ID NO: 134459 - DNA, 5165 bp, Artificial Sequence
  derived and/or modified sequence
atggcccaatttcccactcctttcggaggcagtctggacatttgggctattacagttgaggaaagagccaaacacgaccaacagttccatagcctgaagccaattagcggatttataacaggagatcaggccagaaactttttcttccagagcggccttccacagcccgttctcgctcagatttgggccctcgccgatatgaacaacgatggcagaatggaccaggtcgagttctcaatcgcaatgaagctgatcaagctgaaactgcagggctaccaactgccctcggccctccctccagtgatgaaacagcaaccggtcgcgatctccagcgcgccagccttcggtatgggtggcatagcgtcaatgcctcccctaactgctgttgccccagtacccatgggatcgattcctgtagtcggaatgtctccaacactggtcagctcagtacctaccgccgcagtcccccctctagcaaacggcgctccgcctgtgatacagccgttacctgcatttgcccaccctgccgcaaccctgcctaagtcctcctcctttagtcgatctggtcctgggtcccagctcaacactaaactccagaaggcacagagttttgacgtggcatccgttcccccagtggctgaatgggcagtgccacagtctagtcggctgaagtaccgccaactttttaacagtcacgacaaaactatgtccggccatctgaccggcccacaagcaagaacaattctaatgcagagcagcctcccacaagcccaactcgcctctatttggaacctatctgacatagaccaggacgggaagctgacagcagaggaatttattttggcaatgcacttaatagacgtcgctatgagtggacagcccctacctcctgtactgcctcctgagtacatcccaccttctttccgaagggtcaggagtggtagcggcatttcagtgatctcatcaaccagcgtcgatcaacgattgcccgaagagccagtcctggaagacgaacagcagcagttagagaagaagttgcctgtgacattcgaggataaaaagagagagaactttgagcgcggtaatctggagcttgagaagcggaggcaagccttgctggaacagcagcggaaagagcaggaaagactggcccagctcgagagagcagagcaggaaaggaaagaaagagagaggcaggaacaggagcggaagagacaactggagctcgaaaagcagctggagaagcaaagggagctggagcgccagcgagaggaggagcgcaggaaagaaattgagcggcgagaagctgccaagcgggagctagaaagacagcgccagctggaatgggaacggaatagaaggcaggaactgctgaatcagagaaacaaggaacaggaagatatcgttgtcctcaaggccaaaaaaaagaccctggaatttgaactagaagctttgaacgataaaaaacaccaactggaaggtaagttgcaggacattcggtgtcgcctaaccacacagcggcaggagattgagtccacaaataagtcccgggaactgaggattgctgaaattacgcatttgcagcagcagcttcaagaaagtcagcagatgctcggcagactgattcctgaaaaacagattttgaatgaccagctaaagcaagtccagcagaacagccttcatcgggattcgttagtgacactgaagagagccttggaagccaaggaattggcacgacaacacctgagggaccagctggatgaggtcgagaaggaaacccgtagcaaactccaggaaatagatattttcaataaccagctgaaggagctgcgggaaatacacaacaagcagcagttgcagaaacagaaatcaatggaggctgaacgactgaaacagaaagagcaggagcgcaagatcattgagctggagaaacagaaggaggaggcacagcggagggcccaagagcgagacaaacagtggctcgagcatgtacaacaggaagacgaacaccagcggcctaggaaactgcatgaggaggaaaaactgaaacgcgaagagtccgtgaagaaaaaggatggggaggaaaaaggcaagcaggaggcacaggataagctgggacgactcttccaccagcaccaggagcccgctaaacctgcagtccaagccccttggtcaactgctgaaaagggacctttgacgatctcagcgcaggaaaacgtgaaggtggtgtactacagagcactttacccctttgaaagccggagtcacgacgaaatcaccatccagcctggggacatcgtgatggtcatcggctgctgggtggatgagtcacaaaccggcgagccaggctggctagggggagagttgaaaggcaaaactggctggttccctgctaattacgctgagaagatacccgagaacgaagttccggcacccgtgaagcctgtcacagatagcacttccgcaccggcacctaaactcgccttaagggagacacccgctcctctagccgtaacaagctctgaaccctcaaccacacctaataactgggcagacttcagtagcacatggcccacaagtacaaacgaaaagcctgagaccgacaattgggatgcttgggccgctcagccctctttgactgtccctagtgccggacaactgcggcagcgcagcgcatttacaccagcaacagccaccggttctagcccctcacctgtgctgggacaaggtgagaaggtggagggcttgcaggctcaggcactctatccctggcgtgcgaagaaggataaccatctaaatttcaataaaaacgacgtcatcacagtgctggaacagcaggatatgtggtggttcggcgaggtgcagggccagaagggctggttcccaaagagctatgtgaagttgatcagcggtcctatccgcaagtccacaagtatggactctggcagttctgaatcccctgcgagcctgaagagggtcgctagtccagcagccaaacctgtggtcagtggagaggagttcatagcaatgtatacctacgagtccagcgagcagggagaccttactttccagcagggagacgtgatcctcgttaccaagaaggatggagactggtggacaggtacagttggcgacaaagctggggtttttccaagcaactatgtgcggctaaaggactctgagggctccggaaccgctggcaaaactggcagcctaggcaaaaagcctgagattgcccaggtcattgcctcttatacagccactggaccagaacagctgaccttggccccagggcagctgattcttattcggaagaagaaccctggaggttggtgggagggagaactgcaggcgcgaggcaaaaagaggcaaatcggttggttccctgcaaattatgtcaagctcctctctccaggaacgtccaagatcacccctacagaacccccaaagtcgacagctctcgcagccgtctgccaggtgatagggatgtacgattatactgcccagaacgatgacgagctcgcatttaacaagggccagattataaatgtattgaacaaagaagaccctgattggtggaaaggtgaggtgaacggacaggtgggtctgtttccttcaaactatgtcaagctcactaccgatatggatccctctcaacagtggtgtagtgacctacatttgctcgatatgctcacgcccactgagagaaaacgacagggatacattcatgagctgatcgtgacggaagagaattacgtgaatgatttgcagctggtgacggagattttccagaagcctctcatggagtctgagctgttaaccgagaaagaagtagcaatgatctttgtcaattggaaggaattaatcatgtgcaacatcaaactgcttaaagcactgcgggtccgcaagaagatgtccggagaaaagatgcctgtaaaaatgattggtgacatcctgtccgcccagctcccccatatgcagccgtatataaggttctgcagtcgccagttgaatggagccgctttgattcaacagaagacggatgaggctccagatttcaaagaattcgtgaaacgcctggcgatggacccacggtgcaagggcatgccactgtcctcgttcatcctcaagcccatgcagagagtgaccagataccccttaattataaaaaatatcctggaaaataccccagagaaccaccccgaccacagtcacctgaagcacgctctggagaaagccgaggaactatgctcccaggttaatgaaggggtaagagagaaagaaaatagtgacagactggagtggatccaggcacacgtccaatgcgaaggactcagtgagcagctggttttcaacagtgtcacaaactgcctgggaccccgaaagtttctgcatagtgggaagttatacaaggccaagtccaacaaggaactgtatgggttcttgttcaacgacttcctcctgctgacccagattacaaagccgctcggatctagcggcacagataaagttttttcccctaaaagcaatttgcagtacaaaatgtataaaacacccatctttttgaacgaggtgctggtgaagctgccaacggacccctccggagatgagccaatctttcacatcagccacattgatcgagtgtatactctgcgcgctgaaagcattaatgaacgcacagcctgggttcagaagattaaagcagcttcggaactctatatagagactgaaaaaaagaaacgagagaaggcttaccttgtgcgtagccaaagagccaccggaattggcagactcatggtgaatgtagtggagggaattgagctcaagccctgccgctctcatgggaagtctaatccttactgcgaagttacaatggggagccaatgtcatattactaagacaattcaggacacgctcaatcctaagtggaactcaaattgtcaattctttattagggatctggaacaggaagtattgtgtattaccgtcttcgagagagaccagttttcccccgacgattttctcggtagaaccgaaatcagagtcgccgacatcaagaaggatcagggtagcaagggcccagttaccaagtgcctgctgctgcatgaagttcctaccggcgaaatcgtcgtgcgcctggatttgcaactgtttgacgaaccata

SEQ ID NO: 134460 - DNA, 4953 bp, Artificial Sequence
  derived and/or modified sequence
atggcccagttcccgactccattcggtggctccctggatatttgggccattacagtggaagagcgggcaaagcatgaccaacagttccacagtctcaaaccgatctccggcttcatcacaggggaccaggcacggaacttttttttccagtccggtctcccgcagcccgtgctggcacagatatgggctctggcagacatgaataatgatggtaggatggatcaggtcgagtttagcatcgccatgaagctcattaagctgaaactccagggataccagttgccttctgctcttcctccagtcatgaaacagcaacccgtggccatttcttcagcccctgcgtttggtatggggggaatcgctagcatgcctcctctgactgccgtcgccccagtgcccatggggagtatacctgttgtgggcatgagtcccacactggtgtcatccgtgccgacagctgccgttccacctcttgctaacggagcccctcctgttatccaacccttgccagcttttgcacaccccgctgccacactcccaaagtcctcctcattctcccgctccgggccaggatcgcagctgaacactaaacttcaaaaagctcagagctttgacgtcgcatcagtgcctcccgtggccgaatgggcagtcccccaaagctctcggctgaaatatagacagctgttcaacagccatgataagaccatgtcaggtcacctgacaggtccccaggctcgcacgattttaatgcagagtagcctcccccaggcccagctcgcgtcaatatggaatctatctgacatcgatcaagatggaaaattgacagccgaggaattcatattggccatgcatctgattgacgtcgccatgtctggtcagcctctgccccctgttttgccgccagagtatatccccccatcattcaggagggttcgctctggctccggcattagtgttatatcgtctacttccgttgatcagaggcttcctgaggagcccgtcttggaagacgagcaacaacagcttgaaaagaaactgcctgtgacgtttgaggacaagaagagggagaacttcgagcgcggtaacctggaactagaaaagaggaggcaagctttgctggaacagcagcgcaaggaacaagagagactagctcagctagaacgcgcagaacaggagaggaaggaaagagagcgccaggaacaggaaagaaagaggcaactggagctcgaaaaacagttggagaagcagcgggaactcgagcggcagagggaggaggaacgcaggaaggaaatcgaaagaagggaagcagcgaagcgggagctcgagcggcagcgccagcttgagtgggagcgtaatcgacggcaagaactgcttaaccagcgcaacaaggagcaagaagacatagtcgtgctgaaggccaaaaagaaaaccctagagtttgaactggaggcattaaatgataaaaagcaccagctcgagggcaagttgcaggatataaggtgtcgactaacaacccagcggcaggagattgagtccactaacaagtctcgagagttgcgaattgcagaaatcacgcacctacagcaacaactgcaggagagccagcagatgcttgggagacttattccagaaaagcagatcctcaacgaccagctaaagcaggtacagcagaactctctccacagagattcactagtgaccttgaagcgggctctggaggcaaaggagctggcacgtcagcacctacgggatcagctggacgaagtcgagaaggagacgcgtagcaaacttcaggagatagatattttcaacaaccagcttaaggagctgcgagaaatccacaacaaacagcaattgcaaaaacaaaagtccatggaagcagagaggctgaaacagaaagagcaggagagaaaaattattgaactggagaagcagaaagaggaggcccagaggcgggcacaagagcgggacaagcagtggctcgaacacgtacagcaggaggacgagcaccagcggcctcggaaacttcacgaggaggagaagctcaagcgcgaagaaagcgttaagaaaaaagatggcgaggagaaggggaaacaagaggctcaagataaactggggcgactgttccatcagcatcaggaacctgcgaagcctgctgttcaggccccttggtccacagcggagaaaggtcctctgacaatctccgcccaggaaaatgtgaaggttgtctactacagggcattgtacccctttgagagtaggagtcacgatgagatcacaattcagccaggggacattgtcatggtcatcggatgctgggtggatgagtcacaaactggggagccagggtggctggggggagagctcaaaggcaaaaccggttggttccccgctaattacgccgagaagatccccgaaaatgaagtccctgctcctgtaaagcctgtcaccgacagcacgtctgcacccgctccaaaattggctttacgggagacgcccgcacctctggcggtgacaagctccgagcctagcacaacacccaacaactgggccgacttcagctcgacttggccaacatccacaaatgaaaagccagagacggacaactgggacgcttgggcagcacagccctctctgacagtgccctccgcaggccagcttcggcagcgcagtgcatttacacccgctaccgcgacaggctcctctccatcgccggtactgggccaaggggaaaaggtggaaggtctgcaggcccaagctttgtatccttggcgcgctaagaaagacaatcatcttaacttcaataagaatgacgtcatcacggttttggagcaacaagacatgtggtggttcggagaggtgcagggtcagaagggatggttccccaaaagctacgttaagcttatctccggtcctatcagaaaatcaacatctatggattcaggctcaagtgagtcacctgcttctttgaagagggttgcctcccccgctgccaaaccagtggtctctggagaggagatcgctcaagtgatcgcttcctacacagccactggccctgaacaattgaccctagcccctggccagctgattctgataagaaaaaaaaaccccggtgggtggtgggagggcgaactgcaggccagaggaaagaaaagacagatcgggtggttccctgccaactatgtgaagttactgtcgccagggacgtccaagatcacccccactgagccaccaaagtcaaccgctctcgctgccgtgtgccaggtgatcggcatgtatgactatactgctcagaatgatgacgaattagctttcaacaagggccaaatcattaatgttcttaataaagaggacccggactggtggaaaggcgaggtcaatggccaggtcggactgttcccaagtaactacgttaaactgacaacagacatggacccatcccagcagtggtgttctgacctgcaccttttagatatgctgacgcctactgaacggaaaaggcaggggtatattcacgagctgattgttactgaggaaaattacgtgaatgatctccaactcgtcaccgagatctttcaaaagcctctgatggaatccgagctgctgacggagaaagaagtcgcaatgatttttgtgaactggaaggaactgataatgtgcaatattaagctattgaaggcattgcgagtgcggaagaagatgtctggagagaagatgccagtgaagatgataggggatattctcagcgcccagttgccgcatatgcaaccgtatatccgtttttgctctagacaactgaacggtgctgcactgattcagcaaaagaccgatgaggccccagacttcaaagaattcgtcaagagactggccatggatccaagatgtaagggaatgcccctctcttcgtttatcttaaaacctatgcagcgggtcacccgctatccactgattattaagaacatcctggagaacactccagagaaccatccagatcactctcacctgaaacacgcactggaaaaggcggaagaactgtgcagtcaagtgaatgaaggcgtgagggaaaaagaaaattcagatcggttagagtggatccaagcccatgtgcaatgcgaggggctgagcgagcagttagtctttaactcagttactaattgtcttggccctcggaagtttctgcacagcggaaagctgtataaagcgaaatcaaacaaggagttgtacggcttcttgttcaatgatttcctgttattaactcagattaccaagccccttggctcaagtgggaccgataaggtgttctcccccaagtcaaatctgcaatataagatgtacaaaacccccatatttctcaatgaagtgttagtgaaactgcccacagatcccagtggggacgaacctattttccacatttcacacatagatcgcgtttacactctgagagctgagagcatcaacgaaaggacggcatgggtgcagaaaattaaagccgcaagtgagttgtatatcgagaccgagaagaagaagagagagaaggcctacctggtcaggtctcagcgggctactgggattggacgactgatggtcaacgttgtagaaggtattgagttaaagccctgtcgctcccacggtaaatccaacccctactgcgaggtgacaatggggagccagtgccatattactaagactatccaagatacacttaaccctaagtggaactccaattgtcagttttttatcagggacctggagcaggaagttctgtgcataactgtgtttgaaagagatcagttttcccctgatgactttctcggtaggacagagattcgagtggccgacatcaagaaggaccaaggcagcaagggtccggtgacaaagtgcctcctccttcatgaggttccaactggagaaatagttgtgcggcttgatctgcagctgttcgacgaaccttat

SEQ ID NO: 134461 - DNA, 5165 bp, Artificial Sequence
  derived and/or modified sequence
atggcccaatttcctacaccttttggcggaagccttgacatctgggccatcacagtggaggagcgtgcaaagcatgaccagcaattccatagcctcaagccaattagtggatttatcactggagatcaagctcgaaactttttctttcagtctggcctgcctcagcctgtcctggcccaaatttgggccttggccgacatgaacaatgatggacgtatggaccaggtggagttttccatcgccatgaaattaataaagctcaagctgcaggggtaccaactgccatccgccctcccccctgtgatgaagcagcagccagtagccataagcagtgctccagcgttcggcatgggagggatcgcgtccatgccaccccttaccgcagtagcacctgtgccaatgggctcaatccccgtggtagggatgtctcctacactcgtgagttccgttccgactgcagctgttccaccattggcaaacggcgcaccacccgtaatccagcctttgcctgcttttgcacacccagcggctaccctcccaaagagctctagcttctccagaagtggcccaggttcgcagctaaacaccaaattacaaaaggcacaaagctttgacgttgccagcgtacccccagtcgcagagtgggccgtgccccagtcatccaggcttaaatacagacagctcttcaatagccacgacaaaacaatgtcagggcatctgacagggccacaggccagaaccattctaatgcagagtagcttgccacaggctcagctggcctccatctggaacctcagcgatattgaccaggatggaaaactcaccgcagaagagttcattttggcaatgcacttgattgacgttgccatgtcagggcagccacttccccctgtgctcccccctgaatacataccaccatcgttccgaagggtgaggtccggaagtggaattagcgtcattagctccaccagtgtagaccagcggctgcccgaggagccggttttagaggatgagcagcaacagctagagaaaaaactgccagtgacttttgaggataaaaagagagagaactttgaacgcggaaatcttgagttagagaagcgccgtcaagccctgcttgagcagcaaagaaaggagcaagagagattggctcagctggagcgcgctgagcaggagagaaaggagcgagagcgtcaggaacaggaacgtaagcgtcagctggaactcgagaagcaactggagaaacaaagagagttagaacgccagcgggaagaggagcggcgaaaagaaatcgaaagacgagaagccgcaaaacgagagcttgaacggcagaggcagctggagtgggagcgcaaccgcaggcaagaactattaaaccagcgaaacaaggaacaagaagatatagtcgtgctgaaagccaagaagaaaaccctggaattcgagctggaagctttgaacgataaaaagcaccagctggaaggcaagttacaagatatccggtgcagactcaccacacagagacaggagatagagtccacaaataaaagtagggagttacggatcgccgaaattactcatttgcagcagcagctgcaggaatcacagcagatgctcggtcgactgatccccgaaaagcagatactgaacgatcagctgaagcaagtgcagcagaactctctgcacagagatagcctcgtgaccctcaagcgtgcgctcgaagctaaggaactagctagacagcacttgagagaccagctggatgaggtggagaaggagacacggtcgaagctccaggagattgacatattcaataatcaacttaaagaactgagagagatccacaacaaacagcaattgcagaagcaaaagagtatggaagccgaaaggctgaagcaaaaagagcaggaacgcaagattattgagctggagaagcagaaggaggaggcgcaaagaagggcccaggaaagagataagcagtggctcgagcacgtacagcaggaggacgagcaccagcgccctcgaaagctgcacgaagaagaaaaactgaagagagaagagagcgttaagaaaaaggacggagaagaaaagggaaagcaggaggcacaggataagctgggccgtctttttcatcagcatcaggagcctgcaaagcccgctgtgcaagccccatggtccactgccgaaaaggggccactgactatcagcgcccaggagaacgtcaaggtagtttattatagagcgctctacccattcgagtcccggtcacatgacgaaatcacaatccagcccggagatattgtcatggttaagggcgagtgggtggacgagtcccaaacaggtgagccaggttggctggggggtgagttgaagggaaagaccggctggtttccagcaaattacgcagagaagatccctgaaaacgaggtgcctgccccagtgaaacccgtgaccgacagcacaagcgctcccgcacctaagctggctctgagggaaacgcccgcaccacttgccgtgacatcatcagaacctagcacaactccaaataattgggctgacttctcctccacttggccaaccagcacgaacgagaagcctgaaacggacaattgggacgcctgggcggcacagccatccttaactgtccctagcgcgggacagcttcgacagcgtagcgcttttacgcctgcaaccgcaactggttcctcccctagtcctgtgctgggacaaggggaaaaggtggaaggtctgcaggcccaggcactgtacccctggcgagccaagaaggataatcatcttaacttcaacaagaatgacgtgatcaccgttctggagcaacaggatatgtggtggtttggagaggtccaagggcaaaaagggtggtttcccaaatcatatgtgaagcttatcagcggccctatccggaagagcacgagcatggattccggcagttccgaatcacctgctagcctgaagcgggtggcctctcccgctgcgaagcccgttgtgtccggtgaggagttcattgccatgtatacatacgaatcatcagagcagggcgacctgacattccagcaaggcgacgtgatcctcgttaccaaaaaggatggggattggtggaccgggacagtgggcgacaaagcaggggtctttccaagcaactacgtccgcctgaaagacagcgagggtagcggcacagccggaaagaccgggtcattaggtaaaaaacctgagattgcccaggtgattgccagctataccgccaccgggccagagcaactcaccctcgctccaggccagctgattcttatacgcaagaagaaccctggcggatggtgggagggcgagcttcaggcacgaggcaagaaaaggcaaattggttggttccccgcaaactacgtcaagttgctgtcgcccggtacctcaaagatcactcccacagaaccaccaaaatccactgcccttgcggctgtgtgccaggtgatcggaatgtacgactacacagcccagaatgacgacgagctcgcttttaacaaagggcagattataaacgtgctgaataaggaagaccccgattggtggaagggtgaggttaacggccaggtgggtctcttcccgagtaactatgtgaagctgactaccgatatggacccaagtcagcagtggtgcagtgatctacacctactggacatgctaactccaaccgagcggaaacgtcaaggctatatacatgaacttattgttaccgaagagaactacgtcaatgatcttcaactcgttaccgaaatttttcagaagccactgatggagtccgaactactcacagagaaggaggtggctatgatcttcgtgaactggaaggagttaattatgtgcaatatcaaactcctcaaagcattgcgggtgcgcaaaaaaatgagcggggaaaaaatgcccgtaaagatgattggcgatatcctaagtgctcagctcccacacatgcagccttatattcgattctgttctcggcagctgaatggagccgctctgatacaacagaaaactgatgaggccccagatttcaaggaattcgtcaagagactcgccatggatcctcggtgcaaaggtatgcctctctcgtcgtttattctgaaacccatgcaaagagtgactcgctaccccctcataataaagaacatcctcgaaaacacccccgagaaccatccagatcactcacacttaaagcatgcccttgaaaaagctgaggaactttgttctcaggtaaacgagggagtccgagaaaaggagaactccgatagactggagtggattcaggcgcatgtgcagtgcgaagggctctccgagcagctggtgtttaattccgtgactaactgtctgggtcccagaaaatttcttcactccggtaaattgtacaaggcaaaaagtaataaggaactttatgggttcctgttcaacgattttctgctgttgacccagattacaaagcctttaggctccagcggaactgacaaggttttcagtcctaagtccaatttgcaatataaaatgtacaaaactccgattttcctgaatgaagtcctcgtaaagctgcctacagatccctcaggagacgaacctatcttccacatctcccacatcgatcgcgtgtacacccttcgtgccgagtccatcaacgagagaaccgcatgggtgcaaaagataaaggctgcgagcgaactgtacatagaaacggagaaaaagaaacgtgaaaaggcttacttagtccgctcacaaagagccaccgggatcggacgtctgatggtgaacgtggttgaagggatcgaactgaagccctgcaggagccatggcaaatctaacccttattgcgaggttaccatggggagtcagtgtcacattaccaagactatacaggatacactgaatcccaaatggaattcaaattgtcagttctttatacgagacctcgaacaggaggtcctgtgcattacggtgtttgagcgcgaccaatttagtccagacgacttcctgggtcggacggaaatcagggttgctgacattaaaaaagatcagggctcgaaagggccagtgaccaaatgcctcctccttcatgaggtccctactggagagatagtggtcagattggatctgcaactgttcgatgagccata

SEQ ID NO: 134462 - DNA, 237 bp, Artificial Sequence
  derived and/or modified sequence
atggcccagtttccaacgcccttcggagggagccttgatatatgggcaatcacagtggaggagcgcgcaaaacatgatcagcagtttcacagtctgaagccgataagcggattcatcacaggagatcaagcaaggaacttcttcttccagtccgggctcccacaaccagtactagcccagatttgggcactggccgatatgaacaatgatggcaggatggatcaggtagagttttag

SEQ ID NO: 134463 - DNA, 5166 bp, Artificial Sequence
  derived and/or modified sequence
atggcccagttccccacccccttcggcggcagcctggacatctgggccatcaccgtggaggagagagccaagcacgaccagcagttccacagcctgaagcccatcagcggcttcatcaccggcgaccaggccagaaacttcttcttccagagcggcctgccccagcccgtgctggcccagatctgggccctggccgacatgaacaacgacggcagaatggaccaggtggagttcagcatcgccatgaagctgatcaagctgaagctgcagggctaccagctgcccagcgccctgccccccgtgatgaagcagcagcccgtggccatcagcagcgcccccgccttcggcatgggcggcatcgccagcatgccccccctgaccgccgtggcccccgtgcccatgggcagcatccccgtggtgggcatgagccccaccctggtgagcagcgtgcccaccgccgccgtgccccccctggccaacggcgccccccccgtgatccagcccctgcccgccttcgcccaccccgccgccaccctgcccaagagcagcagcttcagcagaagcggccccggcagccagctgaacaccaagctgcagaaggcccagagcttcgacgtggccagcgtgccccccgtggccgagtgggccgtgccccagagcagcagactgaagtacagacagctgttcaacagccacgacaagaccatgagcggccacctgaccggcccccaggccagaaccatcctgatgcagagcagcctgccccaggcccagctggccagcatctggaacctgagcgacatcgaccaggacggcaagctgaccgccgaggagttcatcctggccatgcacctgatcgacgtggccatgagcggccagcccctgccccccgtgctgccccccgagtacatcccccccagcttcagaagagtgagaagcggcagcggcatcagcgtgatcagcagcaccagcgtggaccagagactgcccgaggagcccgtgctggaggacgagcagcagcagctggagaagaagctgcccgtgaccttcgaggacaagaagagagagaacttcgagagaggcaacctggagctggagaagagaagacaggccctgctggagcagcagagaaaggagcaggagagactggcccagctggagagagccgagcaggagagaaaggagagagagagacaggagcaggagagaaagagacagctggagctggagaagcagctggagaagcagagagagctggagagacagagagaggaggagagaagaaaggagatcgagagaagagaggccgccaagagagagctggagagacagagacagctggagtgggagagaaacagaagacaggagctgctgaaccagagaaacaaggagcaggaggacatcgtggtgctgaaggccaagaagaagaccctggagttcgagctggaggccctgaacgacaagaagcaccagctggagggcaagctgcaggacatcagatgcagactgaccacccagagacaggagatcgagagcaccaacaagagcagagagctgagaatcgccgagatcacccacctgcagcagcagctgcaggagagccagcagatgctgggcagactgatccccgagaagcagatcctgaacgaccagctgaagcaggtgcagcagaacagcctgcacagagacagcctggtgaccctgaagagagccctggaggccaaggagctggccagacagcacctgagagaccagctggacgaggtggagaaggagaccagaagcaagctgcaggagatcgacatcttcaacaaccagctgaaggagctgagagagatccacaacaagcagcagctgcagaagcagaagagcatggaggccgagagactgaagcagaaggagcaggagagaaagatcatcgagctggagaagcagaaggaggaggcccagagaagagcccaggagagagacaagcagtggctggagcacgtgcagcaggaggacgagcaccagagacccagaaagctgcacgaggaggagaagctgaagagagaggagagcgtgaagaagaaggacggcgaggagaagggcaagcaggaggcccaggacaagctgggcagactgttccaccagcaccaggagcccgccaagcccgccgtgcaggccccctggagcaccgccgagaagggccccctgaccatcagcgcccaggagaacgtgaaggtggtgtactacagagccctgtaccccttcgagagcagaagccacgacgagatcaccatccagcccggcgacatcgtgatggtgatcggctgctgggtggacgagagccagaccggcgagcccggctggctgggcggcgagctgaagggcaagaccggctggttccccgccaactacgccgagaagatccccgagaacgaggtgcccgcccccgtgaagcccgtgaccgacagcaccagcgcccccgcccccaagctggccctgagagagacccccgcccccctggccgtgaccagcagcgagcccagcaccacccccaacaactgggccgacttcagcagcacctggcccaccagcaccaacgagaagcccgagaccgacaactgggacgcctgggccgcccagcccagcctgaccgtgcccagcgccggccagctgagacagagaagcgccttcacccccgccaccgccaccggcagcagccccagccccgtgctgggccagggcgagaaggtggagggcctgcaggcccaggccctgtacccctggagagccaagaaggacaaccacctgaacttcaacaagaacgacgtgatcaccgtgctggagcagcaggacatgtggtggttcggcgaggtgcagggccagaagggctggttccccaagagctacgtgaagctgatcagcggccccatcagaaagagcaccagcatggacagcggcagcagcgagagccccgccagcctgaagagagtggccagccccgccgccaagcccgtggtgagcggcgaggagttcatcgccatgtacacctacgagagcagcgagcagggcgacctgaccttccagcagggcgacgtgatcctggtgaccaagaaggacggcgactggtggaccggcaccgtgggcgacaaggccggcgtgttccccagcaactacgtgagactgaaggacagcgagggcagcggcaccgccggcaagaccggcagcctgggcaagaagcccgagatcgcccaggtgatcgccagctacaccgccaccggccccgagcagctgaccctggcccccggccagctgatcctgatcagaaagaagaaccccggcggctggtgggagggcgagctgcaggccagaggcaagaagagacagatcggctggttccccgccaactacgtgaagctgctgagccccggcaccagcaagatcacccccaccgagccccccaagagcaccgccctggccgccgtgtgccaggtgatcggcatgtacgactacaccgcccagaacgacgacgagctggccttcaacaagggccagatcatcaacgtgctgaacaaggaggaccccgactggtggaagggcgaggtgaacggccaggtgggcctgttccccagcaactacgtgaagctgaccaccgacatggaccccagccagcagtggtgcagcgacctgcacctgctggacatgctgacccccaccgagagaaagagacagggctacatccacgagctgatcgtgaccgaggagaactacgtgaacgacctgcagctggtgaccgagatcttccagaagcccctgatggagagcgagctgctgaccgagaaggaggtggccatgatcttcgtgaactggaaggagctgatcatgtgcaacatcaagctgctgaaggccctgagagtgagaaagaagatgagcggcgagaagatgcccgtgaagatgatcggcgacatcctgagcgcccagctgccccacatgcagccctacatcagattctgcagcagacagctgaacggcgccgccctgatccagcagaagaccgacgaggcccccgacttcaaggagttcgtgaagagactggccatggaccccagatgcaagggcatgcccctgagcagcttcatcctgaagcccatgcagagagtgaccagataccccctgatcatcaagaacatcctggagaacacccccgagaaccaccccgaccacagccacctgaagcacgccctggagaaggccgaggagctgtgcagccaggtgaacgagggcgtgagagagaaggagaacagcgacagactggagtggatccaggcccacgtgcagtgcgagggcctgagcgagcagctggtgttcaacagcgtgaccaactgcctgggccccagaaagttcctgcacagcggcaagctgtacaaggccaagagcaacaaggagctgtacggcttcctgttcaacgacttcctgctgctgacccagatcaccaagcccctgggcagcagcggcaccgacaaggtgttcagccccaagagcaacctgcagtacaagatgtacaagacccccatcttcctgaacgaggtgctggtgaagctgcccaccgaccccagcggcgacgagcccatcttccacatcagccacatcgacagagtgtacaccctgagagccgagagcatcaacgagagaaccgcctgggtgcagaagatcaaggccgccagcgagctgtacatcgagaccgagaagaagaagagagagaaggcctacctggtgagaagccagagagccaccggcatcggcagactgatggtgaacgtggtggagggcatcgagctgaagccctgcagaagccacggcaagagcaacccctactgcgaggtgaccatgggcagccagtgccacatcaccaagaccatccaggacaccctgaaccccaagtggaacagcaactgccagttcttcatcagagacctggagcaggaggtgctgtgcatcaccgtgttcgagagagaccagttcagccccgacgacttcctgggcagaaccgagatcagagtggccgacatcaagaaggaccagggcagcaagggccccgtgaccaagtgcctgctgctgcacgaggtgcccaccggcgagatcgtggtgagactggacctgcagctgttcgacgagccctag

SEQ ID NO: 134464 - DNA, 4953 bp, Artificial Sequence
  derived and/or modified sequence
atggcccagttccccacccccttcggcggcagcctggacatctgggccatcaccgtggaggagagagccaagcacgaccagcagttccacagcctgaagcccatcagcggcttcatcaccggcgaccaggccagaaacttcttcttccagagcggcctgccccagcccgtgctggcccagatctgggccctggccgacatgaacaacgacggcagaatggaccaggtggagttcagcatcgccatgaagctgatcaagctgaagctgcagggctaccagctgcccagcgccctgccccccgtgatgaagcagcagcccgtggccatcagcagcgcccccgccttcggcatgggcggcatcgccagcatgccccccctgaccgccgtggcccccgtgcccatgggcagcatccccgtggtgggcatgagccccaccctggtgagcagcgtgcccaccgccgccgtgccccccctggccaacggcgccccccccgtgatccagcccctgcccgccttcgcccaccccgccgccaccctgcccaagagcagcagcttcagcagaagcggccccggcagccagctgaacaccaagctgcagaaggcccagagcttcgacgtggccagcgtgccccccgtggccgagtgggccgtgccccagagcagcagactgaagtacagacagctgttcaacagccacgacaagaccatgagcggccacctgaccggcccccaggccagaaccatcctgatgcagagcagcctgccccaggcccagctggccagcatctggaacctgagcgacatcgaccaggacggcaagctgaccgccgaggagttcatcctggccatgcacctgatcgacgtggccatgagcggccagcccctgccccccgtgctgccccccgagtacatcccccccagcttcagaagagtgagaagcggcagcggcatcagcgtgatcagcagcaccagcgtggaccagagactgcccgaggagcccgtgctggaggacgagcagcagcagctggagaagaagctgcccgtgaccttcgaggacaagaagagagagaacttcgagagaggcaacctggagctggagaagagaagacaggccctgctggagcagcagagaaaggagcaggagagactggcccagctggagagagccgagcaggagagaaaggagagagagagacaggagcaggagagaaagagacagctggagctggagaagcagctggagaagcagagagagctggagagacagagagaggaggagagaagaaaggagatcgagagaagagaggccgccaagagagagctggagagacagagacagctggagtgggagagaaacagaagacaggagctgctgaaccagagaaacaaggagcaggaggacatcgtggtgctgaaggccaagaagaagaccctggagttcgagctggaggccctgaacgacaagaagcaccagctggagggcaagctgcaggacatcagatgcagactgaccacccagagacaggagatcgagagcaccaacaagagcagagagctgagaatcgccgagatcacccacctgcagcagcagctgcaggagagccagcagatgctgggcagactgatccccgagaagcagatcctgaacgaccagctgaagcaggtgcagcagaacagcctgcacagagacagcctggtgaccctgaagagagccctggaggccaaggagctggccagacagcacctgagagaccagctggacgaggtggagaaggagaccagaagcaagctgcaggagatcgacatcttcaacaaccagctgaaggagctgagagagatccacaacaagcagcagctgcagaagcagaagagcatggaggccgagagactgaagcagaaggagcaggagagaaagatcatcgagctggagaagcagaaggaggaggcccagagaagagcccaggagagagacaagcagtggctggagcacgtgcagcaggaggacgagcaccagagacccagaaagctgcacgaggaggagaagctgaagagagaggagagcgtgaagaagaaggacggcgaggagaagggcaagcaggaggcccaggacaagctgggcagactgttccaccagcaccaggagcccgccaagcccgccgtgcaggccccctggagcaccgccgagaagggccccctgaccatcagcgcccaggagaacgtgaaggtggtgtactacagagccctgtaccccttcgagagcagaagccacgacgagatcaccatccagcccggcgacatcgtgatggtgatcggctgctgggtggacgagagccagaccggcgagcccggctggctgggcggcgagctgaagggcaagaccggctggttccccgccaactacgccgagaagatccccgagaacgaggtgcccgcccccgtgaagcccgtgaccgacagcaccagcgcccccgcccccaagctggccctgagagagacccccgcccccctggccgtgaccagcagcgagcccagcaccacccccaacaactgggccgacttcagcagcacctggcccaccagcaccaacgagaagcccgagaccgacaactgggacgcctgggccgcccagcccagcctgaccgtgcccagcgccggccagctgagacagagaagcgccttcacccccgccaccgccaccggcagcagccccagccccgtgctgggccagggcgagaaggtggagggcctgcaggcccaggccctgtacccctggagagccaagaaggacaaccacctgaacttcaacaagaacgacgtgatcaccgtgctggagcagcaggacatgtggtggttcggcgaggtgcagggccagaagggctggttccccaagagctacgtgaagctgatcagcggccccatcagaaagagcaccagcatggacagcggcagcagcgagagccccgccagcctgaagagagtggccagccccgccgccaagcccgtggtgagcggcgaggagatcgcccaggtgatcgccagctacaccgccaccggccccgagcagctgaccctggcccccggccagctgatcctgatcagaaagaagaaccccggcggctggtgggagggcgagctgcaggccagaggcaagaagagacagatcggctggttccccgccaactacgtgaagctgctgagccccggcaccagcaagatcacccccaccgagccccccaagagcaccgccctggccgccgtgtgccaggtgatcggcatgtacgactacaccgcccagaacgacgacgagctggccttcaacaagggccagatcatcaacgtgctgaacaaggaggaccccgactggtggaagggcgaggtgaacggccaggtgggcctgttccccagcaactacgtgaagctgaccaccgacatggaccccagccagcagtggtgcagcgacctgcacctgctggacatgctgacccccaccgagagaaagagacagggctacatccacgagctgatcgtgaccgaggagaactacgtgaacgacctgcagctggtgaccgagatcttccagaagcccctgatggagagcgagctgctgaccgagaaggaggtggccatgatcttcgtgaactggaaggagctgatcatgtgcaacatcaagctgctgaaggccctgagagtgagaaagaagatgagcggcgagaagatgcccgtgaagatgatcggcgacatcctgagcgcccagctgccccacatgcagccctacatcagattctgcagcagacagctgaacggcgccgccctgatccagcagaagaccgacgaggcccccgacttcaaggagttcgtgaagagactggccatggaccccagatgcaagggcatgcccctgagcagcttcatcctgaagcccatgcagagagtgaccagataccccctgatcatcaagaacatcctggagaacacccccgagaaccaccccgaccacagccacctgaagcacgccctggagaaggccgaggagctgtgcagccaggtgaacgagggcgtgagagagaaggagaacagcgacagactggagtggatccaggcccacgtgcagtgcgagggcctgagcgagcagctggtgttcaacagcgtgaccaactgcctgggccccagaaagttcctgcacagcggcaagctgtacaaggccaagagcaacaaggagctgtacggcttcctgttcaacgacttcctgctgctgacccagatcaccaagcccctgggcagcagcggcaccgacaaggtgttcagccccaagagcaacctgcagtacaagatgtacaagacccccatcttcctgaacgaggtgctggtgaagctgcccaccgaccccagcggcgacgagcccatcttccacatcagccacatcgacagagtgtacaccctgagagccgagagcatcaacgagagaaccgcctgggtgcagaagatcaaggccgccagcgagctgtacatcgagaccgagaagaagaagagagagaaggcctacctggtgagaagccagagagccaccggcatcggcagactgatggtgaacgtggtggagggcatcgagctgaagccctgcagaagccacggcaagagcaacccctactgcgaggtgaccatgggcagccagtgccacatcaccaagaccatccaggacaccctgaaccccaagtggaacagcaactgccagttcttcatcagagacctggagcaggaggtgctgtgcatcaccgtgttcgagagagaccagttcagccccgacgacttcctgggcagaaccgagatcagagtggccgacatcaagaaggaccagggcagcaagggccccgtgaccaagtgcctgctgctgcacgaggtgcccaccggcgagatcgtggtgagactggacctgcagctgttcgacgagccctag

SEQ ID NO: 134465 - DNA, 5166 bp, Artificial Sequence
  derived and/or modified sequence
atggcccagttccccacccccttcggcggcagcctggacatctgggccatcaccgtggaggagagagccaagcacgaccagcagttccacagcctgaagcccatcagcggcttcatcaccggcgaccaggccagaaacttcttcttccagagcggcctgccccagcccgtgctggcccagatctgggccctggccgacatgaacaacgacggcagaatggaccaggtggagttcagcatcgccatgaagctgatcaagctgaagctgcagggctaccagctgcccagcgccctgccccccgtgatgaagcagcagcccgtggccatcagcagcgcccccgccttcggcatgggcggcatcgccagcatgccccccctgaccgccgtggcccccgtgcccatgggcagcatccccgtggtgggcatgagccccaccctggtgagcagcgtgcccaccgccgccgtgccccccctggccaacggcgccccccccgtgatccagcccctgcccgccttcgcccaccccgccgccaccctgcccaagagcagcagcttcagcagaagcggccccggcagccagctgaacaccaagctgcagaaggcccagagcttcgacgtggccagcgtgccccccgtggccgagtgggccgtgccccagagcagcagactgaagtacagacagctgttcaacagccacgacaagaccatgagcggccacctgaccggcccccaggccagaaccatcctgatgcagagcagcctgccccaggcccagctggccagcatctggaacctgagcgacatcgaccaggacggcaagctgaccgccgaggagttcatcctggccatgcacctgatcgacgtggccatgagcggccagcccctgccccccgtgctgccccccgagtacatcccccccagcttcagaagagtgagaagcggcagcggcatcagcgtgatcagcagcaccagcgtggaccagagactgcccgaggagcccgtgctggaggacgagcagcagcagctggagaagaagctgcccgtgaccttcgaggacaagaagagagagaacttcgagagaggcaacctggagctggagaagagaagacaggccctgctggagcagcagagaaaggagcaggagagactggcccagctggagagagccgagcaggagagaaaggagagagagagacaggagcaggagagaaagagacagctggagctggagaagcagctggagaagcagagagagctggagagacagagagaggaggagagaagaaaggagatcgagagaagagaggccgccaagagagagctggagagacagagacagctggagtgggagagaaacagaagacaggagctgctgaaccagagaaacaaggagcaggaggacatcgtggtgctgaaggccaagaagaagaccctggagttcgagctggaggccctgaacgacaagaagcaccagctggagggcaagctgcaggacatcagatgcagactgaccacccagagacaggagatcgagagcaccaacaagagcagagagctgagaatcgccgagatcacccacctgcagcagcagctgcaggagagccagcagatgctgggcagactgatccccgagaagcagatcctgaacgaccagctgaagcaggtgcagcagaacagcctgcacagagacagcctggtgaccctgaagagagccctggaggccaaggagctggccagacagcacctgagagaccagctggacgaggtggagaaggagaccagaagcaagctgcaggagatcgacatcttcaacaaccagctgaaggagctgagagagatccacaacaagcagcagctgcagaagcagaagagcatggaggccgagagactgaagcagaaggagcaggagagaaagatcatcgagctggagaagcagaaggaggaggcccagagaagagcccaggagagagacaagcagtggctggagcacgtgcagcaggaggacgagcaccagagacccagaaagctgcacgaggaggagaagctgaagagagaggagagcgtgaagaagaaggacggcgaggagaagggcaagcaggaggcccaggacaagctgggcagactgttccaccagcaccaggagcccgccaagcccgccgtgcaggccccctggagcaccgccgagaagggccccctgaccatcagcgcccaggagaacgtgaaggtggtgtactacagagccctgtaccccttcgagagcagaagccacgacgagatcaccatccagcccggcgacatcgtgatggtgaagggcgagtgggtggacgagagccagaccggcgagcccggctggctgggcggcgagctgaagggcaagaccggctggttccccgccaactacgccgagaagatccccgagaacgaggtgcccgcccccgtgaagcccgtgaccgacagcaccagcgcccccgcccccaagctggccctgagagagacccccgcccccctggccgtgaccagcagcgagcccagcaccacccccaacaactgggccgacttcagcagcacctggcccaccagcaccaacgagaagcccgagaccgacaactgggacgcctgggccgcccagcccagcctgaccgtgcccagcgccggccagctgagacagagaagcgccttcacccccgccaccgccaccggcagcagccccagccccgtgctgggccagggcgagaaggtggagggcctgcaggcccaggccctgtacccctggagagccaagaaggacaaccacctgaacttcaacaagaacgacgtgatcaccgtgctggagcagcaggacatgtggtggttcggcgaggtgcagggccagaagggctggttccccaagagctacgtgaagctgatcagcggccccatcagaaagagcaccagcatggacagcggcagcagcgagagccccgccagcctgaagagagtggccagccccgccgccaagcccgtggtgagcggcgaggagttcatcgccatgtacacctacgagagcagcgagcagggcgacctgaccttccagcagggcgacgtgatcctggtgaccaagaaggacggcgactggtggaccggcaccgtgggcgacaaggccggcgtgttccccagcaactacgtgagactgaaggacagcgagggcagcggcaccgccggcaagaccggcagcctgggcaagaagcccgagatcgcccaggtgatcgccagctacaccgccaccggccccgagcagctgaccctggcccccggccagctgatcctgatcagaaagaagaaccccggcggctggtgggagggcgagctgcaggccagaggcaagaagagacagatcggctggttccccgccaactacgtgaagctgctgagccccggcaccagcaagatcacccccaccgagccccccaagagcaccgccctggccgccgtgtgccaggtgatcggcatgtacgactacaccgcccagaacgacgacgagctggccttcaacaagggccagatcatcaacgtgctgaacaaggaggaccccgactggtggaagggcgaggtgaacggccaggtgggcctgttccccagcaactacgtgaagctgaccaccgacatggaccccagccagcagtggtgcagcgacctgcacctgctggacatgctgacccccaccgagagaaagagacagggctacatccacgagctgatcgtgaccgaggagaactacgtgaacgacctgcagctggtgaccgagatcttccagaagcccctgatggagagcgagctgctgaccgagaaggaggtggccatgatcttcgtgaactggaaggagctgatcatgtgcaacatcaagctgctgaaggccctgagagtgagaaagaagatgagcggcgagaagatgcccgtgaagatgatcggcgacatcctgagcgcccagctgccccacatgcagccctacatcagattctgcagcagacagctgaacggcgccgccctgatccagcagaagaccgacgaggcccccgacttcaaggagttcgtgaagagactggccatggaccccagatgcaagggcatgcccctgagcagcttcatcctgaagcccatgcagagagtgaccagataccccctgatcatcaagaacatcctggagaacacccccgagaaccaccccgaccacagccacctgaagcacgccctggagaaggccgaggagctgtgcagccaggtgaacgagggcgtgagagagaaggagaacagcgacagactggagtggatccaggcccacgtgcagtgcgagggcctgagcgagcagctggtgttcaacagcgtgaccaactgcctgggccccagaaagttcctgcacagcggcaagctgtacaaggccaagagcaacaaggagctgtacggcttcctgttcaacgacttcctgctgctgacccagatcaccaagcccctgggcagcagcggcaccgacaaggtgttcagccccaagagcaacctgcagtacaagatgtacaagacccccatcttcctgaacgaggtgctggtgaagctgcccaccgaccccagcggcgacgagcccatcttccacatcagccacatcgacagagtgtacaccctgagagccgagagcatcaacgagagaaccgcctgggtgcagaagatcaaggccgccagcgagctgtacatcgagaccgagaagaagaagagagagaaggcctacctggtgagaagccagagagccaccggcatcggcagactgatggtgaacgtggtggagggcatcgagctgaagccctgcagaagccacggcaagagcaacccctactgcgaggtgaccatgggcagccagtgccacatcaccaagaccatccaggacaccctgaaccccaagtggaacagcaactgccagttcttcatcagagacctggagcaggaggtgctgtgcatcaccgtgttcgagagagaccagttcagccccgacgacttcctgggcagaaccgagatcagagtggccgacatcaagaaggaccagggcagcaagggccccgtgaccaagtgcctgctgctgcacgaggtgcccaccggcgagatcgtggtgagactggacctgcagctgttcgacgagccctag

SEQ ID NO: 134466 - DNA, 237 bp, Artificial Sequence
  derived and/or modified sequence
atggcccagttccccacccccttcggcggcagcctggacatctgggccatcaccgtggaggagagagccaagcacgaccagcagttccacagcctgaagcccatcagcggcttcatcaccggcgaccaggccagaaacttcttcttccagagcggcctgccccagcccgtgctggcccagatctgggccctggccgacatgaacaacgacggcagaatggaccaggtggagttctag

SEQ ID NO: 134467 - protein, 368 aa, Artificial Sequence
  derived and/or modified sequence
MSVAGLKKQFYKASQLVSEKVGGAEGTKLDDDFKEMEKKVDVTSKAVTEVLARTIEYLQPNPASRAKLTMLNTVSKIRGQVKNPGYPQSEGLLGECMIRHGKELGGESNFGDALLDAGESMKRLAEVKDSLDIEVKQNFIDPLQNLCEKDLKEIQHHLKKLEGRRLDFDYKKKRQGKIPDEELRQALEKFEESKEVAETSMHNLLETDIEQVSQLSALVDAQLDYHRQAVQILDELAEKLKRRMREASSRPKREYKPKPREPFDLGEPEQSNGGFPCTTAPKIAASSSFRSSDKPIRTPSRSMPPLDQPSCKALYDFEPENDGELGFHEGDVITLTNQIDENWYEGMLDGQSGFFPLSYVEVLVPLPQ

SEQ ID NO: 134468 - DNA, 1107 bp, Artificial Sequence
  derived and/or modified sequence
atgtctgtggcaggtcttaagaagcaattttataaagcatcccagctggtgtcagagaaggtgggaggagccgagggcacaaagctggacgacgacttcaaggagatggaaaaaaaagtggacgtgaccagcaaagcagtaactgaagtcttagctaggaccatcgagtacctgcagcccaaccctgcatccagggcaaaacttacaatgctgaacaccgtaagcaagatcagagggcaagtcaaaaatcctggctacccccaatcagaaggcctgcttggggaatgtatgatacggcacggaaaggagttgggcggcgaatccaactttggtgacgcgctcctcgatgcaggcgagagcatgaaacgcttggctgaggtgaaggattcccttgatatagaggtcaaacaaaacttcatcgaccctctccagaacctttgcgaaaaggatttaaaagagatacagcaccatttaaagaaacttgaaggcaggcgtcttgactttgactataaaaagaagagacagggaaagattcctgatgaggagctccgacaggccctggagaagtttgaagaaagcaaggaagtagcagaaacatccatgcacaacttactagaaaccgatattgagcaggtctctcagctgagtgccctagtggatgctcaactcgattatcatcgccaagctgtgcaaattcttgacgaattggctgagaagctgaagcgaaggatgagagaggccagctctcggcctaaaagggaatataagccgaaaccacgagagccgttcgacctcggggaacccgagcagtccaatgggggcttcccctgcacgactgcaccaaagatagcagcgtcttcttcctttaggtcctccgacaagcctatccggacgccgagtagatcaatgcctccattagatcagccttcttgtaaggccctctatgatttcgaaccagagaacgatggtgagctggggttccacgaaggggatgtcataaccttgacgaatcagatcgacgagaactggtatgagggaatgcttgatggacagagcggatttttccccctgagctacgtggaggtgcttgttcctcttccacaatag

SEQ ID NO: 134469 - DNA, 1107 bp, Artificial Sequence
  derived and/or modified sequence
atgtctgtggccggcctgaagaagcagttctacaaggccagccagctggtgtctgagaaggtgggcggcgctgagggcaccaagctggatgatgacttcaaggagatggagaagaaggtggatgtgaccagcaaggctgtgacagaggtgctggcccggaccatcgagtacctgcagcccaacccagccagccgggccaagctgaccatgctgaacacagtgtccaagatccggggccaggtgaagaaccctggctacccccagagcgagggcctgctgggggagtgcatgatccgccacggcaaggagctgggcggggagagcaactttggagatgccctgctggatgctggggagagcatgaagaggctggccgaggtgaaggacagcctggacatcgaggtgaagcagaacttcatcgaccccctgcagaacctgtgtgagaaggacctgaaggagatccagcaccacctgaagaagctggagggccggcggctggactttgactacaagaagaagaggcagggcaagatcccagatgaggagctgcggcaggccctggagaagtttgaggagagcaaggaggtggccgagacctccatgcacaacctgctggagacagacatcgagcaggtgtcccagctgagcgccctggtggatgcccagctggactaccaccggcaggccgtgcagatcctggatgagctggccgagaagctgaagaggaggatgagggaggccagcagccggcccaagcgggagtacaagcccaagccccgggagccctttgacctgggggagcctgagcagagcaatggaggcttcccctgcaccacagcccccaagattgctgccagcagcagcttccgcagcagtgacaagcccatccgcacccccagccgctccatgccacccctggaccagcccagctgcaaggccctgtatgactttgagccagaaaatgatggagagctgggcttccacgagggagatgtgatcaccctgaccaaccagattgatgagaactggtatgagggcatgctggatggccagagcggcttcttccccctgtcctatgtggaggtgctggtgcccctgccccagtag

SEQ ID NO: 134470 - DNA, 1107 bp, Artificial Sequence
  derived and/or modified sequence
atgagcgtggccggcctgaagaagcagttctacaaggccagccagctggtttctgaaaaagtcgggggcgcagagggcaccaagcttgatgatgatttcaaggaaatggaaaagaaggtcgacgttacctctaaggcagtgaccgaggtcttagctcgcacgattgaatatttgcagccaaacccggcaagtagagctaagctgaccatgctcaacaccgttagcaagatccgcggccaggtgaaaaatcccggttacccccaatctgaagggcttcttggggagtgcatgatcaggcacggtaaggagctggggggagaaagcaacttcggcgatgcactgctagatgccggcgagagtatgaagaggctcgccgaggtcaaagacagcctcgacattgaggtgaaacagaatttcatagatcctctacaaaacctctgtgagaaagacctgaaggagatccagcatcatttaaagaaacttgagggtcgaaggctggactttgactacaaaaaaaagcgacaggggaagatcccagacgaggagctaagacaggcgctggagaagtttgaagaaagcaaggaggtcgccgagacctcaatgcacaacctcctggaaaccgacatagagcaggtatcccaactctctgcactggtggatgcacagctcgattatcataggcaagctgttcagattcttgatgagctggccgagaagctcaagcggcgcatgcgcgaggccagctctaggcctaagcgcgagtataagcccaaaccccgggaaccgtttgacctaggggagcctgagcagtccaatggcggctttccatgtaccacagcccccaagatcgctgccagttcaagcttccgaagctcagacaaacccattcggacaccctcccgctctatgccgcccttagaccagccatcatgtaaggccttatacgacttcgaacctgagaacgacggcgaacttggattccatgaaggcgacgtaattaccctgactaaccagatcgatgaaaattggtatgaagggatgctggatggccagagcgggttcttccctctgagctacgtggaagtcctggtccccctgccacaatag

SEQ ID NO: 134471 - DNA, 1107 bp, Artificial Sequence
  derived and/or modified sequence
atgagtgtcgccggattgaaaaagcaattttacaaggctagtcagctcgtgtcggagaaagtcggcggtgcggagggcaccaaattagatgatgactttaaggagatggaaaaaaaagtagatgtgacaagcaaagcagttaccgaggtgctagccagaaccatcgagtacctgcagcctaatcccgctagccgcgcaaagcttacaatgctgaatactgtgagcaagatccgaggtcaggttaaaaacccaggttatccccagtcggagggacttctgggtgaatgcatgatccggcatgggaaagaactaggtggcgagagcaattttggagatgcgctgctggatgctggtgagagtatgaagagactggcggaagtgaaggacagcctcgatattgaagtcaagcagaacttcatcgatccactccagaatctgtgcgaaaaggacctgaaggaaatccagcaccatctgaaaaagctcgagggaaggagactggattttgactacaaaaaaaaaaggcaagggaagattcctgacgaagagctccgccaagccctggagaaattcgaggaatccaaggaggtagcagagacttctatgcataatctgcttgagactgacatagaacaagtcagccagttatctgccctcgtcgacgcccagctcgattatcaccggcaggccgtccagattttagacgagttggccgagaaactgaaaagaaggatgagagaggcaagttcgagacccaagcgcgagtacaagccaaagcctcgggaacctttcgatctgggagaacctgaacagtcaaacggcggatttccatgcacaacagcgccaaaaatcgccgctagctcatcctttaggagttccgacaaacccatccgaaccccatcacgaagtatgccaccactcgatcagcccagctgcaaggcgctctacgatttcgagcccgaaaacgacggtgaattgggcttccacgaaggtgacgtaattacgctcaccaaccagattgacgaaaattggtacgaggggatgctggacggccaatcaggcttttttccactgagctacgtggaggtcctggtcccattacctcagtag

SEQ ID NO: 134472 - DNA, 2465 bp, Artificial Sequence
  derived and/or modified sequence
gggcgcggagctggcaagcgggtggcggaggcggcgccgacggggactgctgaggcgcgcagagggtcggcggcgcccgggagcctgtcgctggcgcggtccgggcgggaggctcggcggcgggcggcagcatgtcggtggcggggctgaagaagcagttctacaaggcgagccagctggtcagtgagaaggtcggaggggccgaggggaccaagctggatgatgacttcaaagagatggagaagaaggtggatgtcaccagcaaggcggtgacagaagtgctggccaggaccatcgagtacctgcagcccaacccagcctcgcgggctaagctgaccatgctcaacacggtgtccaagatccggggccaggtgaagaaccccggctacccgcagtcggaggggcttctgggcgagtgcatgatccgccacgggaaggagctgggcggcgagtccaactttggtgacgcattgctggatgccggcgagtccatgaagcgcctggcagaggtgaaggactccctggacatcgaggtcaagcagaacttcattgaccccctccagaacctgtgcgagaaagacctgaaggagatccagcaccacctgaagaaactggagggccgccgcctggactttgactacaagaagaagcggcagggcaagatccccgatgaggagctacgccaggcgctggagaagttcgaggagtccaaggaggtggcagaaaccagcatgcacaacctcctggagactgacatcgagcaggtgagtcagctctcggccctggtggatgcacagctggactaccaccggcaggccgtgcagatcctggacgagctggcggagaagctcaagcgcaggatgcgggaagcttcctcacgccctaagcgggagtataagcccaagccccgggagccctttgaccttggagagcctgagcagtccaacgggggcttcccctgcaccacagcccccaagatcgcagcttcatcgtctttccgatcttccgacaagcccatccggacccctagccggagcatgccgcccctggaccagccgagctgcaaggcgctgtacgacttcgagcccgagaacgacggggagctgggcttccatgagggcgacgtcatcacgctgaccaaccagatcgatgagaactggtacgagggcatgctggacggccagtcgggcttcttcccgctcagctacgtggaggtgcttgtgcccctgccgcagtgactcacccgtgtccccgccccgcccctccgtccacactggccggcaccccctgctgggtctcctgcattccacggagcccctgctgccagggcggtgtctgagcctgccggcgccacctgggccccggcccttgaggtactccctgagcaggaccccacacttgggtgggggggcttatctgggtgggtggggatgcctgtttacactagcgctgactcccaacggtgacggctcccttccccactccatggcgccagcctcctcccccgctccccaacttctcgcccagctggccgaggcggggcaacactaaggtgctcttagaaacactaatgttcctctggggcagcccccacctccgtcctgacccgacgggggcccggcccactgcctaccctcgagtcccgcagccttaacaggatgggatcgagggtccccatggggtggctcagagataggaccctggttttaaatccctcccagcctggtgctggtgatgggccctggccctactccagggccaatgcacccccgcctcacacacgcactccttctcctcaaggccagggcagagggcctcaccgcctcccgggcctgctgtcagcttgcagcccggggacagaggccagctgggatctgcctgaggacagagaacatggtctcctgcagggccctgcctcccaagccccgccctcagaaagccaagtaccttttcagctttttaactgcccccatcccaacccagggaggcctgtgtcactctggcacaagctgccaccaccagccacccacacccaccccagcacacctcacacgggaccacagccgcgctgccgagggccaagcacaaaggttccagtgagcgcatgtcccagcccctggtggccaggctccccttgctgagccgctgccacttcaccctgtgggaagtggccccagccatctcctctagaccaaggcaggcagccccgacatctgcttcctctatcgcccaatgcaaaatcgatgaaatggggagttctctgggccaggccacattcacattcccctccccctgtggtccagtgaagcctccggaccccaggctctgctctgccctgccctgcacccccctcgtcagaagtacatgaggggcgcagagatgagcacacagctttgggcacggtccagggcaaactgaaatgtacgcctgaattttgtaaacagaagtattaaatgtctctttct

SEQ ID NO: 134473 - DNA, 1107 bp, Artificial Sequence
  derived and/or modified sequence
atgagcgtggccggcctgaagaagcagttctacaaggccagccagctggtgagcgagaaggtgggcggcgccgagggcaccaagctggacgacgacttcaaggagatggagaagaaggtggacgtgaccagcaaggccgtgaccgaggtgctggccagaaccatcgagtacctgcagcccaaccccgccagcagagccaagctgaccatgctgaacaccgtgagcaagatcagaggccaggtgaagaaccccggctacccccagagcgagggcctgctgggcgagtgcatgatcagacacggcaaggagctgggcggcgagagcaacttcggcgacgccctgctggacgccggcgagagcatgaagagactggccgaggtgaaggacagcctggacatcgaggtgaagcagaacttcatcgaccccctgcagaacctgtgcgagaaggacctgaaggagatccagcaccacctgaagaagctggagggcagaagactggacttcgactacaagaagaagagacagggcaagatccccgacgaggagctgagacaggccctggagaagttcgaggagagcaaggaggtggccgagaccagcatgcacaacctgctggagaccgacatcgagcaggtgagccagctgagcgccctggtggacgcccagctggactaccacagacaggccgtgcagatcctggacgagctggccgagaagctgaagagaagaatgagagaggccagcagcagacccaagagagagtacaagcccaagcccagagagcccttcgacctgggcgagcccgagcagagcaacggcggcttcccctgcaccaccgcccccaagatcgccgccagcagcagcttcagaagcagcgacaagcccatcagaacccccagcagaagcatgccccccctggaccagcccagctgcaaggccctgtacgacttcgagcccgagaacgacggcgagctgggcttccacgagggcgacgtgatcaccctgaccaaccagatcgacgagaactggtacgagggcatgctggacggccagagcggcttcttccccctgagctacgtggaggtgctggtgcccctgccccagtag

SEQ ID NO: 134474 - protein, 352 aa, Artificial Sequence
  derived and/or modified sequence
MSVAGLKKQFHKATQKVSEKVGGAEGTKLDDDFKEMERKVDVTSRAVMEIMTKTIEYLQPNPASRAKLSMINTMSKIRGQEKGPGYPQAEALLAEAMLKFGRELGDDCNFGPALGEVGEAMRELSEVKDSLDIEVKQNFIDPLQNLHDKDLREIQHHLKKLEGRRLDFDYKKKRQGKIPDEELRQALEKFDESKEIAESSMFNLLEMDIEQVSQLSALVQAQLEYHKQAVQILQQVTVRLEERIRQASSQPRREYQPKPRMSLEFPTGDSTQPNGGLSHTGTPKPSGVQMDQPCCRALYDFEPENEGELGFKEGDIITLTNQIDENWYEGMLHGHSGFFPINYVEILVALPH

SEQ ID NO: 134475 - protein, 225 aa, Artificial Sequence
  derived and/or modified sequence
MSVAGLKKQFHKATQKVSEKVGGAEGTKLDDDFKEMERKVDVTSRAVMEIMTKTIEYLQPNPGSLEAEALLAEAMLKFGRELGDDCNFGPALGEVGEAMRELSEVKDSLDIEVKQNFIDPLQNLHDKDLREIQHHLKKLEGRRLDFDYKKKRQGKIPDEELRQALEKFDESKEIAESSMFNLLEMDIEQVSQLSALVQAQLEYHKQAVQILQQVTVRLEERIRQA

SEQ ID NO: 134476 - protein, 305 aa, Artificial Sequence [sequence omitted]

SEQ ID NO: 134477 - protein, 181 aa, Artificial Sequence
  derived and/or modified sequence
MSVAGLKKQFHKATQKVSEKVGGAEGTKLDDDFKEMEIEQVSQLSALVQAQLEYHKQAVQILQQVTVRLEERIRQASSQPRREYQPKPRMSLEFPTGDSTQPNGGLSHTGTPKPSGVQMDQPCCRALYDFEPENEGELGFKEGDIITLTNQIDENWYEGMLHGHSGFFPINYVEILVALPH

SEQ ID NO: 134478 - DNA, 1059 bp, Artificial Sequence
  derived and/or modified sequence
atgtccgtggctgggctcaaaaaacagttccacaaagcaacccaaaaagtttcggaaaaggtgggcggagcggaaggaacaaagttggacgacgatttcaaagagatggaacgtaaagtggatgtgacctcccgggcggtaatggaaattatgactaaaactattgagtatctgcaacccaaccccgcttccagagccaagctcagcatgataaatacaatgtcgaagattagaggacaggagaaagggccgggttacccccaggccgaggccttacttgccgaggccatgctgaaatttggaagagagctgggagacgactgcaactttgggcctgcccttggggaggtgggagaggccatgagagagttaagcgaagtcaaagacagtctagacattgaagtcaagcagaacttcatcgatcctctccagaatctccatgacaaggaccttcgtgagattcagcatcacctgaaaaagctggaggggaggcggctggatttcgactataaaaagaagaggcaggggaagattcccgatgaggaactccggcaagctttggagaaattcgatgagagcaaagagattgccgagagctcaatgtttaatttattggagatggacatcgaacaggtgtcccagcttagcgccctcgtgcaagcgcaactggaataccacaagcaagctgtgcagatcctccagcaagttacagtccggctggaagagcggatcagacaggcctcctcccagcctcgtagagagtatcaaccgaaaccccggatgagcctggaatttccaaccggcgactccactcagccaaacggcggtctaagtcacacaggcacccctaaacccagcggtgtgcagatggaccaaccctgttgtagggctctctatgatttcgagcctgagaacgagggcgagctcggttttaaagaaggcgacatcattactctgaccaatcagatagacgagaattggtacgaggggatgctccacgggcactccgggtttttcccgatcaactacgtcgaaattctggtcgcactcccccattag

SEQ ID NO: 134479 - DNA, 678 bp, Artificial Sequence
  derived and/or modified sequence
atgagcgtggcgggtctgaagaagcagttccacaaagccacccaaaaggtcagcgagaaagttgggggcgcagagggaacaaagctggacgacgactttaaggaaatggaaaggaaggtcgatgtgaccagtcgggcagtaatggagattatgacaaagacgattgaataccttcagcctaaccccgggtccctcgaggcggaggccctcctagcagaagccatgctcaaatttggccgcgaactcggagatgattgcaatttcggccccgccctgggggaagtgggggaagctatgagggaattgagcgaagtgaaagatagcctggatatcgaggtaaaacagaacttcatcgatcccctgcagaatctccacgataaagatctgagggaaatacagcatcatcttaaaaagctggaggggcgccgcttagacttcgattataaaaaaaaacggcagggaaagattcccgatgaggaactcagacaggctttagaaaagttcgatgaaagcaaagaaattgctgagagtagcatgtttaatctgttggagatggatatcgagcaagtatctcagctgagtgccctagtacaagcccagctcgaataccataaacaggccgtgcaaatcttgcagcaggttaccgtgcgtttggaggagcgcatcaggcaggcctag

SEQ ID NO: 134480 - DNA, 1059 bp, Artificial Sequence
  derived and/or modified sequence
atgtctgtggccggcctgaagaagcagttccacaaggccacccagaaggtgtctgagaaggtgggcggcgctgagggcaccaagctggatgatgacttcaaggagatggagaggaaggtggatgtgaccagcagagctgtgatggagatcatgaccaagaccatcgagtacctgcagcccaacccagccagccgggccaagctgtccatgatcaacaccatgagcaagatccggggccaggagaagggccctggctacccccaggccgaggccctgctggccgaggccatgctgaagtttggccgggagctgggagatgactgcaactttggacctgccctgggggaggtgggggaggccatgagggagctgtctgaggtgaaggacagcctggacatcgaggtgaagcagaacttcatcgaccccctgcagaacctgcatgacaaggacctgcgggagatccagcaccacctgaagaagctggagggccggcggctggactttgactacaagaagaagaggcagggcaagatcccagatgaggagctgcggcaggccctggagaagtttgatgagagcaaggagattgctgagagctccatgttcaacctgctggagatggacatcgagcaggtgtcccagctgagcgccctggtgcaggcccagctggagtaccacaagcaggccgtgcagatcctgcagcaggtgacagtgcggctggaggagcgcatccggcaggccagcagccagccccggcgggagtaccagcccaagcccaggatgagcctggagttccccactggagacagcacccagcccaacggcggcctgagccacacaggcacccccaagcccagcggcgtgcagatggaccagccctgctgccgggccctgtatgactttgagccagaaaatgaaggagagctgggcttcaaggagggggacatcatcaccctgaccaaccagattgatgagaactggtatgagggcatgctgcacggccacagcggcttcttccccatcaactacgtggagatcctggtggccctgccccactag

SEQ ID NO: 134481 - DNA, 678 bp, Artificial Sequence
  derived and/or modified sequence
atgtctgtggccggcctgaagaagcagttccacaaggccacccagaaggtgtctgagaaggtgggcggcgctgagggcaccaagctggatgatgacttcaaggagatggagaggaaggtggatgtgaccagcagagctgtgatggagatcatgaccaagaccatcgagtacctgcagcccaaccctggcagcctggaggccgaggccctgctggccgaggccatgctgaagtttggccgggagctgggagatgactgcaactttggacctgccctgggggaggtgggggaggccatgagggagctgtctgaggtgaaggacagcctggacatcgaggtgaagcagaacttcatcgaccccctgcagaacctgcatgacaaggacctgcgggagatccagcaccacctgaagaagctggagggccggcggctggactttgactacaagaagaagaggcagggcaagatcccagatgaggagctgcggcaggccctggagaagtttgatgagagcaaggagattgctgagagctccatgttcaacctgctggagatggacatcgagcaggtgtcccagctgagcgccctggtgcaggcccagctggagtaccacaagcaggccgtgcagatcctgcagcaggtgacagtgcggctggaggagcgcatccggcaggcctag

SEQ ID NO: 134482 - DNA, 1059 bp, Artificial Sequence
  derived and/or modified sequence
atgagcgtggccggcctgaagaagcagttccacaaggccacccagaaagtgtcggaaaaagtcggaggggccgagggcacgaagctagatgacgactttaaagaaatggagaggaaggtcgatgtcacttccagagcagtgatggaaatcatgactaagaccatcgaatatctccagccaaatccagcctctcgagctaaactaagcatgatcaacactatgagtaaaatcagaggccaagagaaaggcccagggtacccccaagcagaagctctgctggccgaagccatgcttaaatttggaagagagcttggggacgattgtaacttcggaccagccctcggcgaggtgggcgaggctatgagggaactgagtgaggtcaaggattctctggacatcgaagttaagcagaacttcatcgatccgttacagaatctgcatgacaaggacctgcgcgaaattcagcaccatctgaagaagttggaggggcgaaggctggattttgactacaagaagaaaagacagggtaagatccctgatgaagaactccgccaggctctggagaagtttgacgaaagtaaagaaattgcagagagctctatgttcaatctgctggagatggacatcgagcaagtttcccaactgtccgcgttagtgcaggcccagctggagtaccacaaacaagccgtgcagattttgcagcaggtcactgtgagactggaggagcggatacgtcaggcgtcaagccagcctagacgggagtatcaacccaaacctaggatgtctttagagtttcccaccggggatagtactcagcctaacggggggctgagccacactgggacacctaagccttcaggcgtgcagatggatcagccctgttgtagagccctttacgacttcgagcctgaaaatgaaggtgaactggggttcaaggagggcgatatcatcaccttgactaatcagatagatgaaaattggtacgagggaatgctacacggtcatagtgggtttttccccatcaactacgtcgaaatacttgtcgccttgccacactag

SEQ ID NO: 134483 - DNA, 678 bp, Artificial Sequence
  derived and/or modified sequence
atgagcgtggccggcctgaagaagcagttccacaaggccacccagaaggtgtcggagaaggtcgggggggcagaagggaccaagctggacgatgactttaaggaaatggagagaaaggtagatgtaaccagccgggcagttatggagattatgaccaagaccatcgagtatctgcagcctaatccgggcagtctggaagccgaggccctccttgccgaagccatgctgaagttcggtagagagctcggtgacgattgcaattttggccccgccctgggggaggtcggcgaagcaatgagggaattgagcgaggtcaaagactcactggacattgaagtgaaacaaaacttcatcgatcccctgcaaaacctgcatgacaaggacttaagggagattcagcatcacctgaagaaactcgaaggtcggaggttggattttgactataaaaaaaaaaggcagggcaaaatccccgatgaagagcttagacaggccctagagaaattcgacgagtctaaggagatcgcagaaagtagcatgtttaacctcctggaaatggatatcgagcaagtgtcccagctgagcgcgcttgtgcaggcccaactggaatatcataaacaggctgttcaaattctgcagcaggtgactgtaagacttgaggaacgtatcaggcaggcatag

SEQ ID NO: 134484 - DNA, 1059 bp, Artificial Sequence
  derived and/or modified sequence
atgtccgtcgccggattaaaaaagcagttccataaggccactcagaaggttagcgagaaagtgggcggagccgagggcacaaagttggatgatgattttaaagaaatggagcggaaggtggatgtcacaagtagagccgtgatggagatcatgactaagactattgagtacctccagcctaatccagcaagtagggcgaagctctctatgatcaatactatgtctaagattcggggtcaagaaaagggtccaggctatccacaggcagaagccttgctggccgaggctatgttgaaatttggtcgggagcttggtgatgattgcaacttcggtcccgctctgggagaggtgggtgaggcgatgcgggaactgtccgaagtgaaagatagtcttgacatagaagtcaagcagaatttcatcgacccacttcagaacttgcacgataaagatctcagagaaatccaacaccatctcaagaaattagaggggcgacgcctggactttgactacaaaaaaaagcgtcaggggaaaatccccgatgaagaattaaggcaggctcttgagaaatttgatgaatctaaggagattgccgaatcttctatgtttaatctgttggagatggacattgagcaagtgagccagttatctgccctggtgcaggctcagcttgaataccacaaacaagctgtccagattttgcagcaggtgactgtgcgcttagaggaacgcatccgccaggcttccagtcaacccagacgggagtaccagccaaaaccccgaatgtcactggagttccctactggggactccactcaacccaacggcggactctctcatacagggacacctaaaccatcaggagtccagatggatcagccttgttgcagagctttatatgacttcgaacctgaaaatgaaggcgaacttggcttcaaagagggggatattatcacccttaccaaccaaatagacgaaaattggtatgaaggtatgctgcacggccattctggtttctttcctattaattacgtggagattctggtggcattaccccactag

SEQ ID NO: 134485 - DNA, 678 bp, Artificial Sequence
  derived and/or modified sequence
atgtctgttgctggcctgaaaaaacagttccacaaggccactcagaaagtgagcgagaaagtcggcggagcagaggggaccaaactggatgacgatttcaaggaaatggaaagaaaggtggatgttacgtccagagcagttatggagattatgacgaaaaccatcgaatacttgcaaccaaatcccggatctctggaggcagaggccctattggccgaagccatgctcaaattcgggagggagttaggcgatgactgtaactttggccctgctcttggtgaggtcggtgaagcaatgagagaattgtctgaagtaaaagacagtctagacatcgaagtgaaacagaatttcattgatcccctccaaaacctacacgataaggacctgcgggaaattcagcaccacctcaaaaaactcgaaggcagaagacttgacttcgattataagaagaagcgacagggaaagattccagacgaggagctgaggcaagccctggaaaagttcgacgagtccaaggaaatcgctgagagctctatgttcaatctgcttgagatggacatcgaacaggtgtctcagctctcagccctggtacaggctcaactggaataccacaagcaggccgttcagattttgcagcaagttacagtgagactggaagagcggatccgacaggcgtag

SEQ ID NO: 134486 - DNA, 2565 bp, Artificial Sequence
  derived and/or modified sequence
atagccccggcggcggcacgaccagaggcggccaggggagcgcgccgccccgctcggccctccagtccccctccgcctcctccctcccgcacagcagccgccagcgcggcctcctgcaccatgtcggtggccggcctcaagaagcagttccataaagccactcagaaagtgagtgagaaggttggaggagctgaaggaaccaagctagatgatgacttcaaagagatggaaaggaaagtggatgtcaccagcagggctgtgatggaaataatgactaaaacaattgaataccttcaacccaatccagcttccagagctaagctcagcatgatcaacaccatgtcaaaaatccgtggccaggagaaggggccaggctatcctcaggcagaggcgctgctggcagaggccatgctcaaatttggaagagagcttggagatgattgcaactttggcccagcacttggtgaggtcggggaggccatgcgggaactgtcggaggtcaaagactctttggacatagaagtgaagcagaacttcattgaccctcttcagaatcttcatgacaaagatcttagggaaattcaacatcatctaaagaagttggagggtcgacgcctggattttgattataagaagaaacgacaaggcaagattccggatgaagagcttcgtcaagctctagagaaatttgatgagtctaaggaaattgctgagtcaagcatgttcaatctcttggagatggatattgaacaagtgagccagctctctgcacttgtgcaagctcagctggagtaccacaagcaggcagtccagatcctgcagcaagtcacggtcagactggaagaaagaataagacaggcttcatctcagcctagaagggaatatcaacctaaaccacgaatgagcctggagtttccaactggagacagtactcagcccaatgggggtctctcccacacaggcactcccaaaccttcaggtgtccaaatggatcagccctgctgccgagctctgtacgactttgaacctgaaaatgaaggggagttgggatttaaagagggcgatatcatcacactcactaaccaaattgatgagaactggtatgaggggatgctgcatggccattcaggcttcttccccatcaattatgtggaaattctggttgccctgccccattaggatgttatgctggctggctcgcctcctcttgacccagatagttacggttaaccactgctttggcaatgctgcttataacacatcccaagtgcaggccgcagtggtccacgtcatccagccccaccaagtgactttggttgacttgtgggctcccacaggagtcatggtgatggatgatatcctcttagcctggtgggcgtggcatgtgctttttaaaacatcatctgagaccagccagtagtcacagaactgctgtttacacagttctcaggaggctgtggtttcttagaatatgaccatgagccatttcacagaaaaaccatcccaccgaagatattgtctatcaccccaggggccatctgaaggtctctttgcatttctccatgcaaagaggagaaagcttttgctttcacactgtcccttcccaaatatgtgagtcatggaattgtcaaagtaagccttccctcaccagcaaattgtctcctgatctgaatgaatttgtctcttaatgcatccatagaaaagtgttaattgtgggttcaaagcattctctgcaaataggcatctcagctcctcacacttatggctatttctgacgtatagccagttttcttccctccttgctattaaagccagagcggtaattccaaattatttttcagtaagacagttaatcagcattattgtgagagggactgaaaagaaattctccattatgaggaattgggaagaaatctggtatccaagcttaaatttcttgctatacagaaactatgtatgtatttaggctatttctgaagggcacagggaagggggaacaaatatcttcacttcagttttatttgtgaattacatgtttcatgaatccatttggcacagagacacaaggaagaaaacactagtaaccatctttccactagttcatatactgagaaacagtaaatacctttcctttccacttttaccctgtgttctttgaacatcatttgtgcagattctgccctcaatgaggaccaaataaagatgatttttgtgcttagcagtttaaggtatatggctgcatatgcaaaactctttcccaattcagtcgctacttttacttctgccctttctatccatcgtcttcattttgtgtgtacagtgctgtgtgtaagcttatcagtgtgtttttttatttgtatcagtcatgaaagtcctgttaggtatgcagagttctatttatctagctgtacagactctttcagaggtttaacgtgctgcttccgatgtgccacctgcagtagtggatcatgtggagtgaaaggcaaatcttactgcttaatgtataaactctcaccacaggaagcatcgctgtttccaataaatattgctgaagacagaaccaaa

SEQ ID NO: 134487 - DNA, 2658 bp, Artificial Sequence
  derived and/or modified sequence
gttggcgccagcatccaggtaccgcgcgccacagcacctgcctgggcgttcccgcgcttggggcggggcttcccgcgtcccctttaagaggccgcatcacccgcccttgacgtcagagtgtttctccgcaagagcccgtgtcccgctaggctccgcgccctcgcgcccatagccccggcggcggcacgaccagaggcggccaggggagcgcgccgccccgctcggccctccagtccccctccgcctcctccctcccgcacagcagccgccagcgcggcctcctgcaccatgtcggtggccggcctcaagaagcagttccataaagccactcagaaagtgagtgagaaggttggaggagctgaaggaaccaagctagatgatgacttcaaagagatggaaaggaaagtggatgtcaccagcagggctgtgatggaaataatgactaaaacaattgaataccttcaacccaatccaggatccctcgaggcagaggcgctgctggcagaggccatgctcaaatttggaagagagcttggagatgattgcaactttggcccagcacttggtgaggtcggggaggccatgcgggaactgtcggaggtcaaagactctttggacatagaagtgaagcagaacttcattgaccctcttcagaatcttcatgacaaagatcttagggaaattcaacatcatctaaagaagttggagggtcgacgcctggattttgattataagaagaaacgacaaggcaagattccggatgaagagcttcgtcaagctctagagaaatttgatgagtctaaggaaattgctgagtcaagcatgttcaatctcttggagatggatattgaacaagtgagccagctctctgcacttgtgcaagctcagctggagtaccacaagcaggcagtccagatcctgcagcaagtcacggtcagactggaagaaagaataagacaggcttcatctcagcctagaagggaatatcaacctaaaccacgaatgagcctggagtttccaactggagacagtactcagcccaatgggggtctctcccacacaggcactcccaaaccttcaggtgtccaaatggatcagccctgctgccgagctctgtacgactttgaacctgaaaatgaaggggagttgggatttaaagagggcgatatcatcacactcactaaccaaattgatgagaactggtatgaggggatgctgcatggccattcaggcttcttccccatcaattatgtggaaattctggttgccctgccccattaggatgttatgctggctggctcgcctcctcttgacccagatagttacggttaaccactgctttggcaatgctgcttataacacatcccaagtgcaggccgcagtggtccacgtcatccagccccaccaagtgactttggttgacttgtgggctcccacaggagtcatggtgatggatgatatcctcttagcctggtgggcgtggcatgtgctttttaaaacatcatctgagaccagccagtagtcacagaactgctgtttacacagttctcaggaggctgtggtttcttagaatatgaccatgagccatttcacagaaaaaccatcccaccgaagatattgtctatcaccccaggggccatctgaaggtctctttgcatttctccatgcaaagaggagaaagcttttgctttcacactgtcccttcccaaatatgtgagtcatggaattgtcaaagtaagccttccctcaccagcaaattgtctcctgatctgaatgaatttgtctcttaatgcatccatagaaaagtgttaattgtgggttcaaagcattctctgcaaataggcatctcagctcctcacacttatggctatttctgacgtatagccagttttcttccctccttgctattaaagccagagcggtaattccaaattatttttcagtaagacagttaatcagcattattgtgagagggactgaaaagaaattctccattatgaggaattgggaagaaatctggtatccaagcttaaatttcttgctatacagaaactatgtatgtatttaggctatttctgaagggcacagggaagggggaacaaatatcttcacttcagttttatttgtgaattacatgtttcatgaatccatttggcacagagacacaaggaagaaaacactagtaaccatctttccactagttcatatactgagaaacagtaaatacctttcctttccacttttaccctgtgttctttgaacatcatttgtgcagattctgccctcaatgaggaccaaataaagatgatttttgtgcttagcagtttaaggtatatggctgcatatgcaaaactctttcccaattcagtcgctacttttacttctgccctttctatccatcgtcttcattttgtgtgtacagtgctgtgtgtaagcttatcagtgtgtttttttatttgtatcagtcatgaaagtcctgttaggtatgcagagttctatttatctagctgtacagactctttcagaggtttaacgtgctgcttccgatgtgccacctgcagtagtggatcatgtggagtgaaaggcaaatcttactgcttaatgtataaactctcaccacaggaagcatcgctgtttccaataaatattgctgaagac

SEQ ID NO: 134488 - DNA, 1282 bp, Artificial Sequence
  derived and/or modified sequence
acagagttgattgaggcagtaggaaatgggaagataaagctggcagctctttccacacatggaaagcataataggaaagaagggcttaagttagcagaaagtgagtgagaaggttggaggagctgaaggaaccaagctagatgatgacttcaaagagatggaaaggtccttttgttgctccacaaacaacgccacgctgttcacgagtccttacacctaagttcaggaaataccaacttttcttcagggaagaaagaaagtggatgtcaccagcagggctgtgatggaaataatgactaaaacaattgaataccttcaacccaatccagcttccagagctaagctcagcatgatcaacaccatgtcaaaaatccgtggccaggagaaggggccaggctatcctcaggcagaggcgctgctggcagaggccatgctcaaatttggaagagagcttggagatgattgcaactttggcccagcacttggtgaggtcggggaggccatgcgggaactgtcggaggtcaaagactctttggacatagaagtgaagcagaacttcattgaccctcttcagaatcttcatgacaaagatcttagggaaattcaacatcatctaaagaagttggagggtcgacgcctggattttgattataagaagaaacgacaaggcaagattccggatgaagagcttcgtcaagctctagagaaatttgatgagtctaaggaaattgctgagtcaagcatgttcaatctcttggagatggatattgaacaagtgagccagctctctgcacttgtgcaagctcagctggagtaccacaagcaggcagtccagatcctgcagcaagtcacggtcagactggaagaaagaataagacaggcttcatctcagcctagaagggaatatcaacctaaaccacgaatgagcctggagtttccaactggagacagtactcagcccaatgggggtctctcccacacaggcactcccaaaccttcaggtgtccaaatggatcagccctgctgccgagctctgtacgactttgaacctgaaaatgaaggggagttgggatttaaagagggcgatatcatcacactcactaaccaaattgatgagaactggtatgaggggatgctgcatggccattcaggcttcttccccatcaattatgtggaaattctggttgccctgccccattaggatgttatgctggctggctcgcctcctcttgacccagatagttacggttaaccactgctttggcaatgctgcttataacac

SEQ ID NO: 134489 - DNA, 1059 bp, Artificial Sequence
  derived and/or modified sequence
atgagcgtggccggcctgaagaagcagttccacaaggccacccagaaggtgagcgagaaggtgggcggcgccgagggcaccaagctggacgacgacttcaaggagatggagagaaaggtggacgtgaccagcagagccgtgatggagatcatgaccaagaccatcgagtacctgcagcccaaccccgccagcagagccaagctgagcatgatcaacaccatgagcaagatcagaggccaggagaagggccccggctacccccaggccgaggccctgctggccgaggccatgctgaagttcggcagagagctgggcgacgactgcaacttcggccccgccctgggcgaggtgggcgaggccatgagagagctgagcgaggtgaaggacagcctggacatcgaggtgaagcagaacttcatcgaccccctgcagaacctgcacgacaaggacctgagagagatccagcaccacctgaagaagctggagggcagaagactggacttcgactacaagaagaagagacagggcaagatccccgacgaggagctgagacaggccctggagaagttcgacgagagcaaggagatcgccgagagcagcatgttcaacctgctggagatggacatcgagcaggtgagccagctgagcgccctggtgcaggcccagctggagtaccacaagcaggccgtgcagatcctgcagcaggtgaccgtgagactggaggagagaatcagacaggccagcagccagcccagaagagagtaccagcccaagcccagaatgagcctggagttccccaccggcgacagcacccagcccaacggcggcctgagccacaccggcacccccaagcccagcggcgtgcagatggaccagccctgctgcagagccctgtacgacttcgagcccgagaacgagggcgagctgggcttcaaggagggcgacatcatcaccctgaccaaccagatcgacgagaactggtacgagggcatgctgcacggccacagcggcttcttccccatcaactacgtggagatcctggtggccctgccccactag

SEQ ID NO: 134490 - DNA, 678 bp, Artificial Sequence
  derived and/or modified sequence
atgagcgtggccggcctgaagaagcagttccacaaggccacccagaaggtgagcgagaaggtgggcggcgccgagggcaccaagctggacgacgacttcaaggagatggagagaaaggtggacgtgaccagcagagccgtgatggagatcatgaccaagaccatcgagtacctgcagcccaaccccggcagcctggaggccgaggccctgctggccgaggccatgctgaagttcggcagagagctgggcgacgactgcaacttcggccccgccctgggcgaggtgggcgaggccatgagagagctgagcgaggtgaaggacagcctggacatcgaggtgaagcagaacttcatcgaccccctgcagaacctgcacgacaaggacctgagagagatccagcaccacctgaagaagctggagggcagaagactggacttcgactacaagaagaagagacagggcaagatccccgacgaggagctgagacaggccctggagaagttcgacgagagcaaggagatcgccgagagcagcatgttcaacctgctggagatggacatcgagcaggtgagccagctgagcgccctggtgcaggcccagctggagtaccacaagcaggccgtgcagatcctgcagcaggtgaccgtgagactggaggagagaatcagacaggcctag

SEQ ID NO: 134491 - protein, 347 aa, Artificial Sequence
  derived and/or modified sequence
MSVAGLKKQFHKASQLFSEKISGAEGTKLDDEFLDMERKIDVTNKVVAEILSKTTEYLQPNPAYRAKLGMLNTVSKIRGQVKTTGYPQTEGLLGDCMLKYGKELGEDSTFGNALIEVGESMKLMAEVKDSLDINVKQTFIDPLQLLQDKDLKEIGHHLKKLEGRRLDYDYKKKRVGKIPDEEVRQAVEKFEESKELAERSMFNFLENDVEQVSQLAVFIEAALDYHRQSTEILQELQSKLQMRISAASSVPRREYKPRPVKRSSSELNGVSTTSVVKTTGSNIPMDQPCCRGLYDFEPENQGELGFKEGDIITLTNQIDENWYEGMIHGESGFFPINYVEVIVPLPQ

SEQ ID NO: 134492 - protein, 288 aa, Artificial Sequence
  derived and/or modified sequence
MSVAGLKKQFHKASQLFSEKISGAEGTKLDDEFLDMERKIDVTNKVVAEILSKTTEYLQPNPAYRAKLGMLNTVSKIRGQVKTTGYPQTEGLLGDCMLKYGKELGEDSTFGNALIEVGESMKLMAEVKDSLDINVKQTFIDPLQLLQDKDLKEIGHHLKKLEGRRLDYDYKKKRVGKIPDEEVRQAVEKFEESKELAERSMFNFLENDVEQVSQLAVFIEAALDYHRQSTEILQELQSKLQMRISAASSVPRREYKPRPVKRSSSELNGVSTTSVVKTTAYSRLEPAD

SEQ ID NO: 134493 - DNA, 1044 bp, Artificial Sequence
  derived and/or modified sequence
atgtcagtggccggcctgaagaagcaattccataaggcctcgcagctgttctctgagaaaatctccggcgctgaaggtaccaagctggatgatgagttcctcgatatggaacgaaaaatcgatgtcaccaataaagttgtggcagaaatactctcaaagaccactgaatacctgcagccaaacccggcttacagagctaagttgggcatgcttaatacagtgagtaagatcagagggcaggtcaaaacgaccggataccctcagaccgagggccttttgggcgattgtatgctgaaatacggcaaggagctaggcgaggactctacctttggcaatgcacttatcgaagtgggggagagcatgaaactgatggctgaggtcaaagattccctggacattaatgtaaagcagaccttcatcgacccactgcaactgctgcaagacaaggaccttaaggaaattggtcaccacttaaagaaactggaggggcgtcgtctagactacgactacaagaaaaaacgagtaggaaagatcccagatgaagaggtacgtcaggctgtggaaaagtttgaggaatcaaaggagttggccgaaagatccatgtttaacttcctcgaaaacgacgtagagcaggtctcccagctggccgtattcatcgaggctgccctggactatcatagacagtcaaccgaaatactgcaggagttgcagagtaagctgcaaatgcggatatccgccgctagctccgtgcctagaagagaatacaaacctcgcccagtgaagagatcctcttccgaattgaatggggtgtcaacgacctctgtggtaaagactactggttccaatatacccatggatcaaccatgttgtcgcggtctgtacgacttcgaacccgagaatcagggagaactcggtttcaaggagggggacataatcacgttaactaatcagatcgacgagaattggtatgagggaatgattcacggcgagtcaggatttttcccaatcaattatgtcgaggttatcgttccactgccacaatag

SEQ ID NO: 134494 - DNA, 867 bp, Artificial Sequence
  derived and/or modified sequence
atgagcgtggccggactgaagaaacagttccacaaggcctctcagctgttcagtgaaaaaatcagcggggctgagggcaccaagctggatgatgagttcctcgatatggagcgtaaaatcgacgtgaccaacaaagttgtggcggaaatcttatccaagactaccgaatacctccaacctaaccccgcctatagggcaaaactgggaatgttgaacactgtgagcaagattaggggtcaggtgaaaacaacgggctacccgcagaccgaggggttgctcggagactgcatgttgaagtatggcaaggagctcggagaggattcaacattcggaaacgcactgatcgaggtaggagagtccatgaaactgatggcagaggtgaaagatagcctcgacatcaacgtgaagcagactttcattgacccactccagctgctacaagacaaggatctgaaggagattggccaccacctaaaaaagcttgaaggcagacgactggactatgattataagaaaaaaagggttgggaagattccagacgaggaagtgcgccaagcagtcgagaaatttgaagagtccaaagaactggccgagagatccatgttcaattttttggagaatgacgtggaacaagtatcccagctcgctgtattcatcgaagctgcccttgactatcaccggcagtcaaccgaaattctgcaggaactgcagagcaagctccagatgcggatctctgccgctagctccgtacccaggagggaatataaacctcgaccagtcaagagaagcagctccgagttaaatggcgtctcaactacatccgttgtcaagaccactgcttatagcaggttggaacctgctgattag

SEQ ID NO: 134495 - DNA, 1044 bp, Artificial Sequence
  derived and/or modified sequence
atgtctgtggccggcctgaagaagcagttccacaaggccagccagctgttcagcgagaagatcagcggggctgagggcaccaagctggatgatgagttcctggacatggagaggaagattgatgtgaccaacaaggtggtggccgagatcctgagcaagaccacagagtacctgcagcccaacccagcctaccgggccaagctgggcatgctgaacacagtgtccaagatccggggccaggtgaagaccaccggctacccccagacagagggcctgctgggggactgcatgctgaagtatggcaaggagctgggggaggacagcacctttggaaatgccctgattgaggtgggggagagcatgaagctgatggccgaggtgaaggacagcctggacatcaacgtgaagcagaccttcatcgaccccctgcagctgctgcaggacaaggacctgaaggagatcggccaccacctgaagaagctggagggccggcggctggactatgactacaagaagaagagggtgggcaagatcccagatgaggaggtgcggcaggccgtggagaagtttgaggagagcaaggagctggccgagaggtccatgttcaacttcctggagaatgatgtggagcaggtgtcccagctggccgtgttcattgaagctgccctggactaccaccggcagagcacagagatcctgcaggagctgcagagcaagctgcagatgaggatctctgctgccagctctgtgccccggcgggagtacaagcccaggcctgtgaagaggagcagcagcgagctgaatggagtgtccaccacctctgtggtgaagaccaccggcagcaacatccccatggaccagccctgctgccggggcctgtatgactttgagcctgagaaccagggcgagctgggcttcaaggagggggacatcatcaccctgaccaaccagattgatgagaactggtatgagggcatgatccacggggagagcggcttcttccccatcaactacgtggaggtgattgtgcccctgccccagtag

SEQ ID NO: 134496 - DNA, 867 bp, Artificial Sequence
  derived and/or modified sequence
atgtctgtggccggcctgaagaagcagttccacaaggccagccagctgttcagcgagaagatcagcggggctgagggcaccaagctggatgatgagttcctggacatggagaggaagattgatgtgaccaacaaggtggtggccgagatcctgagcaagaccacagagtacctgcagcccaacccagcctaccgggccaagctgggcatgctgaacacagtgtccaagatccggggccaggtgaagaccaccggctacccccagacagagggcctgctgggggactgcatgctgaagtatggcaaggagctgggggaggacagcacctttggaaatgccctgattgaggtgggggagagcatgaagctgatggccgaggtgaaggacagcctggacatcaacgtgaagcagaccttcatcgaccccctgcagctgctgcaggacaaggacctgaaggagatcggccaccacctgaagaagctggagggccggcggctggactatgactacaagaagaagagggtgggcaagatcccagatgaggaggtgcggcaggccgtggagaagtttgaggagagcaaggagctggccgagaggtccatgttcaacttcctggagaatgatgtggagcaggtgtcccagctggccgtgttcattgaagctgccctggactaccaccggcagagcacagagatcctgcaggagctgcagagcaagctgcagatgaggatctctgctgccagctctgtgccccggcgggagtacaagcccaggcctgtgaagaggagcagcagcgagctgaatggagtgtccaccacctctgtggtgaagaccacagcctacagccggctggagcctgctgactag

SEQ ID NO: 134497 - DNA, 1044 bp, Artificial Sequence
  derived and/or modified sequence
atgagcgtggccggcctgaagaagcagttccacaaggccagccagttgttttcagaaaaaatcagtggcgccgaaggaactaagctggacgacgaattcctggacatggaaagaaaaatcgatgtgacaaacaaagtggtcgcagaaatcctgtccaagactaccgagtacctccagcctaatccggcttacagagccaaattgggaatgctgaacactgtgtctaagattcgaggccaggttaaaacaacgggctaccctcaaacagaaggactgctgggtgattgcatgcttaaatatggtaaggagttaggagaggattccacgtttggaaatgccctgatagaagtgggtgagtccatgaaacttatggccgaagttaaggactccctagatatcaacgtcaaacaaacattcattgatcctttgcagctgctgcaggacaaagacttgaaggagatcgggcaccatctgaaaaagctcgaggggaggcgtctcgactacgactacaagaagaaacgagtgggtaaaatccctgacgaggaagtgaggcaagctgtggaaaagtttgaagaatctaaagaactcgcagagcggagcatgttcaattttctggagaacgatgtcgagcaggtatctcagcttgctgtgttcattgaagcggcccttgattatcatcggcaatccacagaaatcctccaggaactccagtccaaactccagatgaggatcagcgctgcgagctcggtgcccagacgggagtacaaaccccgcccagtgaaaaggagctcgagcgaactcaatggagtctccaccaccagcgtggtgaagacaacagggtcaaacattccaatggaccagccttgttgtagagggctgtatgacttcgagccggagaatcagggggagctggggttcaaagagggcgacattatcactcttacaaaccaaatagacgagaactggtatgaaggtatgattcatggagagtctgggttcttccccattaattacgtggaagtgatagtacctctgccccagtag

SEQ ID NO: 134498 - DNA, 867 bp, Artificial Sequence
  derived and/or modified sequence
atgagcgtggccggcctgaagaagcagttccacaaggccagccagctgttcagcgagaagatcagtggggcagaggggaccaaactggatgatgagttcctggatatggagcgaaaaattgacgttactaacaaggttgtggctgagattctgagcaagaccactgagtatctccagcccaacccagcctatcgtgcgaagctaggtatgttgaatactgtcagtaagatccgtggccaagttaagactactggataccctcagactgagggactgcttggagattgcatgcttaaatatggaaaagagcttggggaagattctacattcggaaacgctctgatcgaggtgggcgaaagtatgaaacttatggcagaggtgaaagattccttggacattaatgtcaaacagaccttcatcgatcccctacagttgttgcaggataaagacctgaaggaaattggacatcatctcaaaaaactggagggacgtaggctggactatgattataagaaaaaacgtgtcggcaagattcccgacgaagaagtacgccaggctgtggagaagttcgaggagtctaaagaacttgcagagcgatctatgtttaattttctcgagaatgacgtcgaacaggtgtctcaactggcagtatttattgaagcggccctcgactatcacagacagtctacagaaattcttcaagagctgcagtccaagttacagatgcggatcagtgctgcaagttccgtcccccgacgcgaatataagccgcgccctgtgaagagatccagcagcgaactgaatggcgtcagtaccacttccgtggtcaagaccacggcctacagcagattggaacctgccgattag

SEQ ID NO: 134499 - DNA, 1044 bp, Artificial Sequence
  derived and/or modified sequence
atgtccgtagccggactgaaaaaacagttccataaagcctcacagttatttagcgaaaagatttcgggggctgagggcacaaaactggacgacgagtttctagatatggaacgcaaaattgacgtgacaaacaaggtcgtcgccgagatattgagcaaaaccaccgaatacctgcagcctaacccagcgtacagagctaagctgggaatgctaaataccgtttcaaaaatccgcggtcaggtgaaaaccacgggctatccccagacagaaggcttacttggagactgtatgctgaagtacggaaaggagcttggggaggactctaccttcggcaacgcgcttatagaggtgggtgaaagcatgaaattgatggccgaagtaaaagactctctcgacataaacgttaaacagacatttattgaccctcttcaattacttcaggacaaggacctaaaagaaatcggccaccacctgaaaaagttggagggacggaggctcgattatgattataagaagaagcgggtcggcaagatcccagacgaagaagtaagacaggctgtggagaaattcgaggagtccaaggagctcgccgagcgtagcatgttcaatttcctcgagaacgatgtggagcaggtcagccaattggccgtgttcatcgaggccgcactggattaccaccgtcaatctaccgaaattctgcaggagctgcaatctaaactgcaaatgaggattagtgcagcctcctccgttcccaggagagaatacaagcctcgacctgtaaagcgttcaagctctgagcttaacggtgtttcaaccacaagcgtggttaagaccaccgggtcaaatatcccaatggaccaaccgtgttgcagaggtctgtatgacttcgagccagaaaatcagggagagctgggtttcaaagagggcgatattatcacattgaccaaccagatcgatgaaaactggtacgagggcatgattcatggcgagtctgggttttttcctatcaattacgtggaggtgattgtgccccttccacagtag

SEQ ID NO: 134500 - DNA, 867 bp, Artificial Sequence
  derived and/or modified sequence
atgagcgttgctggacttaagaaacagttccataaagcaagccaacttttttctgagaagatttcaggcgctgaaggcacaaagctggacgatgaatttctggacatggaacgcaagatcgacgttactaataaagtggttgccgagattctttcaaagacaacagagtacctacaacctaaccctgcataccgagctaagctcggtatgttgaatacagtgtcaaaaatcaggggacaagtgaagacaacaggatacccccagaccgaaggactgcttggggattgtatgctcaagtatgggaaagagttaggggaggacagcacttttggtaatgctcttatcgaagttggggagtcgatgaaactcatggcagaggtcaaagattccttggatatcaatgtcaaacagacttttatcgatcccctgcaacttttgcaggacaaagatctgaaggagatcggtcaccacctgaagaagcttgaggggcgtagactggactacgactacaaaaaaaagagggttggaaaaatccccgatgaagaggtgcgacaggccgtggaaaagttcgaggaatcgaaagagctcgccgagagaagtatgttcaatttccttgaaaacgatgttgagcaggtctctcagttagccgttttcattgaggctgcactggactaccaccgacaaagtaccgagattctccaggagctacagtctaaactccagatgagaatcagtgcggcatcttctgtgccaagacgcgagtataagcccagacctgtgaagcgaagctcttctgagttgaatggcgtaagtactacttccgtggtgaagaccacagcgtattctcgattagagcctgctgactag

SEQ ID NO: 134501 - DNA, 1806 bp, Artificial Sequence
  derived and/or modified sequence
gcggctcaagtagcccaggtctccacgcaacaatgaagcgtgggcggccccagcagcttcatttgcatatcgccgcggcttggccaatgggctgcgcaggggctttggaacgcagtgttgccatcggcgtgcgcgcgtgtgtgcgagtgtgacagcggctgtggctgtggccgtggccgtgggaggcgggcccggcggagcccagccgcggggggaccggcccgggctcccgctccccgagcgcgtcgcggccgcgtggcccagccgagccttgagaccaccccgcccctgccggtcgcagtcgcgatgtcggtggccgggctgaagaagcagttccacaaagccagccagctatttagtgaaaaaataagtggtgctgaaggaactaaactagacgatgaatttcttgacatggaaaggaaaatagatgttaccaataaagttgttgcagaaattctttcaaaaaccactgaatatcttcagccaaatccagcatacagagctaagctaggaatgctgaacactgtgtcgaagatccgagggcaggtgaagaccacaggatacccgcagacggaaggcttgctgggggactgtatgctgaaatacgggaaggagctcggggaagactccacctttggcaatgcattgatagaagttggtgaatccatgaagctaatggctgaggtgaaagactctcttgatattaatgtaaagcaaacttttattgatccacttcagttactacaagataaagatttaaaagagatcgggcatcacctgaaaaagctggaaggccgccgcctggattacgattataaaaagaaacgagtaggtaagataccagacgaagaagtcagacaagcggtagaaaaatttgaagagtcaaaggagttggctgaaagaagcatgtttaactttttagaaaatgatgtagaacaagtcagccagttggctgtgttcatagaggcagcattagactatcacagacagtccacagagattctgcaggagctgcagagcaagctacagatgcgaatatcagctgcatccagtgtccccagacgagaatacaagccaaggcctgtgaaaaggagttctagtgagctcaatggagtttccaccacctctgtagtgaagacgacaggttctaacattcccatggaccagccctgctgtcgtggtctctatgactttgagccagaaaaccaaggagaattaggatttaaagaaggggacatcattacattaaccaatcaaatagatgaaaactggtatgaaggaatgatacacggagaatcgggattcttccccattaattacgtggaagtgatcgtgcctttacctcagtaaatgtgtaacacaaactctggacatactttcgtaactgaaatgaattcacaccagtgtgctctcagtgcggtgttctgtgacatcctttgctctctgaccaacttaatgacttttgtatgtgtgctctctttataatgtattttatatcactttaatttgtataaatgattttcttgtccttgctacatgaaaatattttcttttttgcttcctgtcctaaaagtcattggttaaatgtatttgcttcctgtggctaaaaataagtctcacccattgcagttatgtcaacgaatggcctatattcctcagctgcaatgaaatggtaacatttgaaactaagaaatgctaaatattttgtttctcgacattcctgatgacgtctggtcttttcttttcattgtattttaagcttacctgtgaatagcccaataaacatgacacactgtgttggcaaaa

SEQ ID NO: 134502 - DNA, 1752 bp, Artificial Sequence
  derived and/or modified sequence
tgtggctgtggccgtggccgtgggaggcgggcccggcggagcccagccgcggggggaccggcccgggctcccgctccccgagcgcgtcgcggccgcgtggcccagccgagccttgagaccaccccgcccctgccggtcgcagtcgcgatgtcggtggccgggctgaagaagcagttccacaaagccagccagctatttagtgaaaaaataagtggtgctgaaggaactaaactagacgatgaatttcttgacatggaaaggaaaatagatgttaccaataaagttgttgcagaaattctttcaaaaaccactgaatatcttcagccaaatccagcatacagagctaagctaggaatgctgaacactgtgtcgaagatccgagggcaggtgaagaccacaggatacccgcagacggaaggcttgctgggggactgtatgctgaaatacgggaaggagctcggggaagactccacctttggcaatgcattgatagaagttggtgaatccatgaagctaatggctgaggtgaaagactctcttgatattaatgtaaagcaaacttttattgatccacttcagttactacaagataaagatttaaaagagatcgggcatcacctgaaaaagctggaaggccgccgcctggattacgattataaaaagaaacgagtaggtaagataccagacgaagaagtcagacaagcggtagaaaaatttgaagagtcaaaggagttggctgaaagaagcatgtttaactttttagaaaatgatgtagaacaagtcagccagttggctgtgttcatagaggcagcattagactatcacagacagtccacagagattctgcaggagctgcagagcaagctacagatgcgaatatcagctgcatccagtgtccccagacgagaatacaagccaaggcctgtgaaaaggagttctagtgagctcaatggagtttccaccacctctgtagtgaagacgacagcctacagcagactggaaccagcagattaggaaggcccaagggactgcttcgggaaggccattgacagcaggaaaaagtgacaggtcgcagccagactacaagggaggcaagagaaaaactataaaaagcaggaacaaaaacactcaaaagacacagcagtctgggggatttactaaaagacaaagagccctactcaggttctaacattcccatggaccagccctgctgtcgtggtctctatgactttgagccagaaaaccaaggagaattaggatttaaagaaggggacatcattacattaaccaatcaaatagatgaaaactggtatgaaggaatgatacacggagaatcgggattcttccccattaattacgtggaagtgatcgtgcctttacctcagtaaatgtgtaacacaaactctggacatactttcgtaactgaaatgaattcacaccagtgtgctctcagtgcggtgttctgtgacatcctttgctctctgaccaacttaatgacttttgtatgtgtgctctctttataatgtattttatatcactttaatttgtataaatgattttcttgtccttgctacatgaaaatattttcttttttgcttcctgtcctaaaagtcattggttaaatgtatttgcttcctgtggctaaaaataagtctcacccattgcagttatgtcaacgaatggcctatattcctcagctgcaatgaaatggtaacatttgaaactaagaaatgctaaatattttgtttctcg

SEQ ID NO: 134503 - DNA, 1044 bp, Artificial Sequence
  derived and/or modified sequence
atgagcgtggccggcctgaagaagcagttccacaaggccagccagctgttcagcgagaagatcagcggcgccgagggcaccaagctggacgacgagttcctggacatggagagaaagatcgacgtgaccaacaaggtggtggccgagatcctgagcaagaccaccgagtacctgcagcccaaccccgcctacagagccaagctgggcatgctgaacaccgtgagcaagatcagaggccaggtgaagaccaccggctacccccagaccgagggcctgctgggcgactgcatgctgaagtacggcaaggagctgggcgaggacagcaccttcggcaacgccctgatcgaggtgggcgagagcatgaagctgatggccgaggtgaaggacagcctggacatcaacgtgaagcagaccttcatcgaccccctgcagctgctgcaggacaaggacctgaaggagatcggccaccacctgaagaagctggagggcagaagactggactacgactacaagaagaagagagtgggcaagatccccgacgaggaggtgagacaggccgtggagaagttcgaggagagcaaggagctggccgagagaagcatgttcaacttcctggagaacgacgtggagcaggtgagccagctggccgtgttcatcgaggccgccctggactaccacagacagagcaccgagatcctgcaggagctgcagagcaagctgcagatgagaatcagcgccgccagcagcgtgcccagaagagagtacaagcccagacccgtgaagagaagcagcagcgagctgaacggcgtgagcaccaccagcgtggtgaagaccaccggcagcaacatccccatggaccagccctgctgcagaggcctgtacgacttcgagcccgagaaccagggcgagctgggcttcaaggagggcgacatcatcaccctgaccaaccagatcgacgagaactggtacgagggcatgatccacggcgagagcggcttcttccccatcaactacgtggaggtgatcgtgcccctgccccagtag

SEQ ID NO: 134504 - DNA, 867 bp, Artificial Sequence
  derived and/or modified sequence
atgagcgtggccggcctgaagaagcagttccacaaggccagccagctgttcagcgagaagatcagcggcgccgagggcaccaagctggacgacgagttcctggacatggagagaaagatcgacgtgaccaacaaggtggtggccgagatcctgagcaagaccaccgagtacctgcagcccaaccccgcctacagagccaagctgggcatgctgaacaccgtgagcaagatcagaggccaggtgaagaccaccggctacccccagaccgagggcctgctgggcgactgcatgctgaagtacggcaaggagctgggcgaggacagcaccttcggcaacgccctgatcgaggtgggcgagagcatgaagctgatggccgaggtgaaggacagcctggacatcaacgtgaagcagaccttcatcgaccccctgcagctgctgcaggacaaggacctgaaggagatcggccaccacctgaagaagctggagggcagaagactggactacgactacaagaagaagagagtgggcaagatccccgacgaggaggtgagacaggccgtggagaagttcgaggagagcaaggagctggccgagagaagcatgttcaacttcctggagaacgacgtggagcaggtgagccagctggccgtgttcatcgaggccgccctggactaccacagacagagcaccgagatcctgcaggagctgcagagcaagctgcagatgagaatcagcgccgccagcagcgtgcccagaagagagtacaagcccagacccgtgaagagaagcagcagcgagctgaacggcgtgagcaccaccagcgtggtgaagaccaccgcctacagcagactggagcccgccgactag

SEQ ID NO: 134505 - protein, 297 aa, Artificial Sequence
  derived and/or modified sequence
MAKWLNKYFSLGNSKTKSPPQPPRPDYREQRRRGERPSQPPQAVPQASSAASASCGPATASCFSASSGSLPDDSGSTSDLIRAYRAQKERDFEDPYNGPGSSLRKLRAMCRLDYCGGSGEPGGVQRAFSASSASGAAGCCCASSGAGAAASSSSSSGSPHLYRSSSERRPATPAEVRYISPKHRLIKVESAAGGGAGDPLGGACAGGRTWSPTACGGKKLLNKCAASAAEESGAGKKDKVTIADDYSDPFDAKNDLKSKAGKGESAGYMEPYEAQRIMTGLQEAWRHSPSGCFPVGP

SEQ ID NO: 134506 - protein, 509 aa, Artificial Sequence
  derived and/or modified sequence
MAKWLNKYFSLGNSKTKSPPQPPRPDYREQRRRGERPSQPPQAVPQASSAASASCGPATASCFSASSGSLPDDSGSTSDLIRAYRAQKERDFEDPYNGPGSSLRKLRAMCRLDYCGGSGEPGGVQRAFSASSASGAAGCCCASSGAGAAASSSSSSGSPHLYRSSSERRPATPAEVRYISPKHRLIKVESAAGGGAGDPLGGACAGGRTWSPTACGGKKLLNKCAASAAEESGAGKKDKVTIADDYSDPFDAKNDLKSKAGKGESAGYMEPYEAQRIMTEFQRQESVRSQHKGIQLYDTPYEPEGQSVDSDSESTVSPRLRESKLPQDDDRPADEYDQPWEWNRVTIPALAAQFNGNEKRQSSPSPSRDRRRQLRAPGGGFKPIKHGSPEFCGILGERVDPAVPLEKQIWYHGAISRGDAENLLRLCKECSYLVRNSQTSKHDYSLSLRSNQGFMHMKLAKTKEKYVLGQNSPPFDSVPEVIHYYTTRKLPIKGAEHLSLLYPVAVRTL

SEQ ID NO: 134507 - DNA, 690 bp, Artificial Sequence
  derived and/or modified sequence
cggagctccggagccgcagggctggatccactttatctgagacgaggcgcctgcggccgacggcggaaaacaccaaaggaacctggccactgctccttggtccttggcattatgacgggattcccttgtcacctctgacagttcctggctgcggtgtccgcggactggctggggagtgatgacagactttcagcctccatgctctgagacaactgtggaagggatggaaaccctattttcttttctccaagaccatggttggtctgcttccctcactcgggctccttgacagtcttctagaagagagaaggaggaaaagaagcagttcctgatgttacaaatgaacaaggatctcccagccttagtctttgagaaaagatggctgaaagagaggaactctccaagtcattccgcaaacaaatgcccatttaaacatcatccttgtcttgtgaagaaaacaggaagaatgtcatgtaccatgtggatcaccttcagttcaaagttgcagcaaagtgaagaaagaaactactggaagccacccagcaatgcactgtttagtcatcaattaggagcccatgggaggataatagggagactgggtggaggctcagtgtgtaataatctcttgtctaatgtatgtgtgtcactgccatgttgtatgaacaatagtgagggctcacatttacttaa

SEQ ID NO: 134508 - DNA, 894 bp, Artificial Sequence
  derived and/or modified sequence
atggccaagtggctgaacaagtacttcagcctgggcaacagcaagaccaagagccccccccagccccccagacccgactacagagagcagagaagaagaggcgagagacccagccagcccccccaggccgtgccccaggccagcagcgccgccagcgccagctgcggccccgccaccgccagctgcttcagcgccagcagcggcagcctgcccgacgacagcggcagcaccagcgacctgatcagagcctacagagcccagaaggagagagacttcgaggacccctacaacggccccggcagcagcctgagaaagctgagagccatgtgcagactggactactgcggcggcagcggcgagcccggcggcgtgcagagagccttcagcgccagcagcgccagcggcgccgccggctgctgctgcgccagcagcggcgccggcgccgccgccagcagcagcagcagcagcggcagcccccacctgtacagaagcagcagcgagagaagacccgccacccccgccgaggtgagatacatcagccccaagcacagactgatcaaggtggagagcgccgccggcggcggcgccggcgaccccctgggcggcgcctgcgccggcggcagaacctggagccccaccgcctgcggcggcaagaagctgctgaacaagtgcgccgccagcgccgccgaggagagcggcgccggcaagaaggacaaggtgaccatcgccgacgactacagcgaccccttcgacgccaagaacgacctgaagagcaaggccggcaagggcgagagcgccggctacatggagccctacgaggcccagagaatcatgaccggcctgcaggaggcctggagacacagccccagcggctgcttccccgtgggcccctag

SEQ ID NO: 134509 - DNA, 1530 bp, Artificial Sequence
  derived and/or modified sequence
atggccaagtggctgaacaagtacttcagcctgggcaacagcaagaccaagagccccccccagccccccagacccgactacagagagcagagaagaagaggcgagagacccagccagcccccccaggccgtgccccaggccagcagcgccgccagcgccagctgcggccccgccaccgccagctgcttcagcgccagcagcggcagcctgcccgacgacagcggcagcaccagcgacctgatcagagcctacagagcccagaaggagagagacttcgaggacccctacaacggccccggcagcagcctgagaaagctgagagccatgtgcagactggactactgcggcggcagcggcgagcccggcggcgtgcagagagccttcagcgccagcagcgccagcggcgccgccggctgctgctgcgccagcagcggcgccggcgccgccgccagcagcagcagcagcagcggcagcccccacctgtacagaagcagcagcgagagaagacccgccacccccgccgaggtgagatacatcagccccaagcacagactgatcaaggtggagagcgccgccggcggcggcgccggcgaccccctgggcggcgcctgcgccggcggcagaacctggagccccaccgcctgcggcggcaagaagctgctgaacaagtgcgccgccagcgccgccgaggagagcggcgccggcaagaaggacaaggtgaccatcgccgacgactacagcgaccccttcgacgccaagaacgacctgaagagcaaggccggcaagggcgagagcgccggctacatggagccctacgaggcccagagaatcatgaccgagttccagagacaggagagcgtgagaagccagcacaagggcatccagctgtacgacaccccctacgagcccgagggccagagcgtggacagcgacagcgagagcaccgtgagccccagactgagagagagcaagctgccccaggacgacgacagacccgccgacgagtacgaccagccctgggagtggaacagagtgaccatccccgccctggccgcccagttcaacggcaacgagaagagacagagcagccccagccccagcagagacagaagaagacagctgagagcccccggcggcggcttcaagcccatcaagcacggcagccccgagttctgcggcatcctgggcgagagagtggaccccgccgtgcccctggagaagcagatctggtaccacggcgccatcagcagaggcgacgccgagaacctgctgagactgtgcaaggagtgcagctacctggtgagaaacagccagaccagcaagcacgactacagcctgagcctgagaagcaaccagggcttcatgcacatgaagctggccaagaccaaggagaagtacgtgctgggccagaacagcccccccttcgacagcgtgcccgaggtgatccactactacaccaccagaaagctgcccatcaagggcgccgagcacctgagcctgctgtaccccgtggccgtgagaaccctgtag

SEQ ID NO: 134510 - DNA, 894 bp, Artificial Sequence
  derived and/or modified sequence
atggctaaatggcttaataagtatttttctctgggaaattctaaaacgaagagccctccccagccacctcgcccagactaccgggaacagagacgcagaggcgagcgcccgtcccagcctccacaggctgttccccaggcctcttctgccgctagcgctagttgtggtcctgcaacagcatcctgtttttccgcttcctctggcagtttgcctgacgatagcggcagtacgtccgatctgattcgtgcataccgggcacaaaaagaacgggacttcgaggacccatacaacggtcccggttctagcctaagaaaactccgcgctatgtgccgtttggattattgcggcgggagcggggagccgggcggcgtgcaaagggctttcagcgcaagctccgcttcgggagccgctggatgctgctgcgccagcagtggagccggagccgccgcatcatcctcctcaagttctggctctccacacctataccgatcatcttccgagcggaggccagccacacctgccgaagtgcgctacatctcacccaagcacaggcttattaaagtagaatcagctgctggcggtggagccggcgatcctctgggcggcgcctgcgccggaggaagaacctggtcaccaacagcttgtggaggaaaaaagctgttgaataagtgtgctgcatcagcggctgaggaatccggtgccggcaagaaagacaaggttaccatagccgatgactattctgacccctttgatgctaaaaatgacctgaaatcaaaagccgggaagggtgagtccgctggctacatggagccatatgaggcccagcggattatgaccggtctccaagaggcatggcgacatagcccaagcgggtgctttcccgtgggtccatag

SEQ ID NO: 134511 - DNA, 1530 bp, Artificial Sequence
  derived and/or modified sequence
atggctaagtggctgaataagtactttagcctgggcaattctaagaccaagtccccccctcagcccccacgccctgactaccgtgagcagagacggcgcggcgaacgcccaagtcagcccccacaagccgtgcctcaggctagcagcgcagctagtgcaagctgtggaccagcaaccgccagctgctttagcgcctccagcggcagtctgccggacgatagcggatctacctccgatttgatccgcgcttacagggctcagaaagaaagagactttgaggatccgtataatgggccagggtctagtttgagaaagctgcgcgccatgtgtcgcttagactattgtggaggaagcggagaacccggaggcgtacaacgcgcattcagtgcctcatccgccagtggcgccgcaggatgctgttgtgcctcgtccggagcaggcgctgcagcctcctcctcttcctcaagcggaagcccgcacttgtataggagctcaagcgagcgacgaccggccacgcccgccgaggttaggtatatttcccccaaacaccgacttatcaaggtggaaagtgctgccggtggtggggccggggatccgctcggcggggcatgcgcagggggcagaacctggtcccctactgcctgtgggggtaagaaactgctgaataagtgcgccgcgagtgctgcagaggagtctggggcaggaaagaaggacaaagtgaccattgccgacgactacagcgatccattcgacgcaaagaacgacctcaaatcgaaggcgggtaagggggagagcgctgggtacatggaaccctatgaggcacagcgcataatgactgagttccagagacaggagtctgttagatctcagcataaaggcattcagctatacgataccccatacgagcctgagggacagagcgtagattccgatagcgaaagcaccgttagcccacgattacgagagagcaagttgccccaggacgacgatagacctgctgatgagtacgatcaaccgtgggagtggaacagagtcactataccagccttggcagcccagttcaacggaaacgagaagcgccagtcttctcctagcccctctagggatagacggcggcaactccgcgccccaggagggggatttaagcctatcaagcacgggtcacccgaattttgtggaatcctcggagaacgcgtggaccctgcagtgccactggagaagcagatctggtaccacggagccattagtcgaggcgatgcagaaaacttgctgagactgtgcaaggaatgctcatatttggtgcgcaattcccaaacatcaaagcacgattactctctctcactccgcagcaatcagggctttatgcatatgaagctcgccaagacgaaggagaaatatgtcttggggcagaattcaccgccattcgactctgtacccgaagtgattcactattacaccaccaggaaactgccaataaaaggtgctgaacacctcagtctgctgtatccagtcgcagtgcgcactctgtag

SEQ ID NO: 134512 - DNA, 894 bp, Artificial Sequence
  derived and/or modified sequence
atggccaagtggctgaacaagtacttcagcctgggcaacagcaagaccaagagccccccccagccccccaggccagactaccgggagcagaggcggcggggggagcggcccagccagcccccccaggccgtgccccaggccagcagcgctgccagcgccagctgtggccctgccacagccagctgcttcagcgccagcagcggcagcctgcctgatgacagcggcagcaccagtgacctgatccgggcctaccgggcccagaaggagcgggactttgaggacccctacaatggacctggcagcagcctgaggaagctgcgggccatgtgccgcctggactactgcggcggcagcggggagcctggaggagtgcagagggccttcagcgccagcagcgccagcggggctgctggctgctgctgtgccagcagcggggccggggctgctgccagcagcagcagcagcagcggcagcccccacctgtaccgcagcagcagcgagcggcggcctgccaccccagctgaggtgcgctacatcagccccaagcacaggctcatcaaggtggagagcgctgctgggggcggggccggggaccccctgggcggggcctgtgccggcggccgcacctggagccccacagcctgtggcggcaagaagctgctgaacaagtgtgccgccagcgctgctgaggagagcggggccggcaagaaggacaaggtgaccatcgcagatgactacagcgacccctttgatgccaagaatgacctgaagagcaaggccggcaagggggagagcgctggctacatggagccctatgaggcccagaggatcatgacaggcctgcaggaggcctggaggcacagccccagcggctgcttccctgtgggcccctag

SEQ ID NO: 134513 - DNA, 1530 bp, Artificial Sequence
  derived and/or modified sequence
atggccaagtggctgaacaagtacttcagcctgggcaacagcaagaccaagagccccccccagccccccaggccagactaccgggagcagaggcggcggggggagcggcccagccagcccccccaggccgtgccccaggccagcagcgctgccagcgccagctgtggccctgccacagccagctgcttcagcgccagcagcggcagcctgcctgatgacagcggcagcaccagtgacctgatccgggcctaccgggcccagaaggagcgggactttgaggacccctacaatggacctggcagcagcctgaggaagctgcgggccatgtgccgcctggactactgcggcggcagcggggagcctggaggagtgcagagggccttcagcgccagcagcgccagcggggctgctggctgctgctgtgccagcagcggggccggggctgctgccagcagcagcagcagcagcggcagcccccacctgtaccgcagcagcagcgagcggcggcctgccaccccagctgaggtgcgctacatcagccccaagcacaggctcatcaaggtggagagcgctgctgggggcggggccggggaccccctgggcggggcctgtgccggcggccgcacctggagccccacagcctgtggcggcaagaagctgctgaacaagtgtgccgccagcgctgctgaggagagcggggccggcaagaaggacaaggtgaccatcgcagatgactacagcgacccctttgatgccaagaatgacctgaagagcaaggccggcaagggggagagcgctggctacatggagccctatgaggcccagaggatcatgacagagttccagaggcaggagagcgtgcgcagccagcacaagggcatccagctgtatgacaccccctatgagcctgagggccagagcgtggacagcgacagcgagagcacagtgagcccccggctgcgggagagcaagctgccccaggatgatgacaggcctgcagatgaatatgaccagccctgggagtggaacagagtgaccatcccagccctggccgcccagttcaatggaaatgagaagaggcagagcagccccagccccagccgggacagaagacggcagctgcgggcccctgggggcggcttcaagcccatcaagcacggcagccctgagttctgtggcatcctgggggagcgggtggaccctgctgtgcccctggagaagcagatctggtaccacggggccatcagcagaggagatgctgagaacctgctgcggctgtgcaaggaatgttcctacctggtgaggaacagccagaccagcaagcatgactacagcctgagcctgcggagcaaccagggcttcatgcacatgaagctggccaagaccaaggagaagtatgtgctgggccagaacagccccccatttgattctgtgcctgaggtgatccactactacaccaccaggaagctgcccatcaagggagctgagcacctgagcctgctgtaccctgtggccgtgaggaccctgtag

SEQ ID NO: 134514 - DNA, 894 bp, Artificial Sequence
  derived and/or modified sequence
atggccaagtggctgaacaagtacttcagcctgggcaacagcaagacaaagtcccctccacagcctcctcggcccgactacagagaacagcgcagaaggggtgaaagaccctctcagccaccccaggctgtgccacaagcctcatcagcagccagcgcctcctgcggaccagccaccgcttcttgcttttcagcttcatctgggtcactaccagacgacagtggttctactagcgatcttattcgagcatatagggctcagaaggaacgcgattttgaagatccctataacggtccaggttctagcttgcgcaagcttcgggcaatgtgtaggctggattattgcggaggatccggcgagcctggtggcgttcagcgagcctttagtgctagctctgctagcggcgcagccggttgctgttgcgcgagttctggggccggggccgccgcatcaagctccagctccagtgggtcaccgcacctataccggtcgagcagtgaacgaagacctgccacgccggcggaagttcgctacatctcacctaaacaccgtctcatcaaggtggaaagcgctgctgggggcggtgccggtgatcccctcggcggggcctgtgcgggagggcggacatggtctcctaccgcttgcggcggcaagaagctcctgaacaagtgtgctgcgtccgctgcagaagagtcaggggccggaaaaaaggataaagtcacgatagcggatgattatagtgacccattcgatgctaaaaacgatctgaaatcgaaagccggcaagggggagtccgccggctatatggagccttatgaggcccagaggatcatgaccgggctgcaggaagcctggaggcattcccccagtggatgctttccggtgggcccctag

SEQ ID NO: 134515 - DNA, 1530 bp, Artificial Sequence
  derived and/or modified sequence
atggccaagtggctgaacaagtacttcagcctgggcaacagcaagactaaatcacctcctcagccccctcggcccgattatcgtgagcaacgcaggcgcggtgaacgcccaagccaacctccccaggcagtcccccaggccagtagtgctgcctctgcaagttgcgggcctgctacagccagttgcttctcagcttccagcggatcactgccggacgattctggctcaacttccgacctcattagggcttacagagctcagaaagagagagactttgaggacccctacaatggccctggtagctcactccgaaagttgcgggccatgtgccgtctggactattgtggcggcagcggagaacccggaggcgttcagagggctttcagcgctagttccgcatccggggctgccgggtgctgctgcgcgtcttcaggggccggcgctgccgcttcctcgtcctcttctagcggcagtcctcatctgtatagatccagttctgagcgacgacctgcaactccagctgaagtgaggtatatctccccgaaacatcgcctgattaaagtggagtccgccgcaggggggggtgccggcgaccccttgggaggggcatgtgcaggtgggagaacctggagccctaccgcgtgcgggggaaagaagctcctcaataagtgcgccgctagtgccgcagaagaaagtggcgctggaaagaaagacaaagttactattgctgacgattactccgatccgttcgacgctaagaacgatctgaagtcaaaggccggaaaaggcgaaagcgccggctacatggagccctatgaggcccagaggatcatgaccgagttccagcgccaggaatccgtcagatcccagcacaaaggcatacagctctacgataccccatacgagccggaaggccagtccgtcgacagcgatagtgaatccacagtgagtccccggctccgagagagtaaactgccccaggacgacgaccggcccgctgatgagtacgaccagccatgggaatggaacagagtgacaattccagcacttgccgcacaatttaatggaaatgaaaaacgacagtcatcacccagcccctcccgggacaggcggcggcagctgagagcccctggaggaggattcaagcctataaagcacgggtcaccagagttttgtggtatccttggcgagcgggtcgaccccgctgtccccctggagaaacaaatctggtaccatggcgcaatatccagaggtgatgccgaaaaccttctacgtctctgcaaggaatgttcctatctggtgaggaactcccagacaagcaagcacgattatagcttgtccctgaggagcaatcagggttttatgcatatgaaattagccaaaacgaaggagaagtatgtgctcggacagaacagcccacccttcgactctgtgccggaggtgatacattattacaccacccggaaactgcctatcaagggcgccgaacacctcagcttgctttaccctgtggctgtgaggactctgtag

SEQ ID NO: 134516 - DNA, 894 bp, Artificial Sequence
  derived and/or modified sequence
atggcgaaatggctgaataagtattttagtttaggcaactccaagaccaagtcgcccccacagcccccaaggcccgactatagagaacaacgaagacgaggtgagcgtccctcccagccccctcaggcagtgccacaggcttcgtcagccgctagtgcttcatgtggacccgcaaccgccagttgcttttcagcctccagtggatctcttcctgacgatagcgggtctacctcagatttaattcgagcctacagggctcaaaaggaacgtgattttgaagatccctataatgggcctggctcatcccttcgcaaactgagggcaatgtgtcgccttgattattgtggcggttccggggagccagggggagtccaacgagcctttagcgcaagctctgcttcaggggcagccggttgttgttgcgcctccagcggggcaggcgctgctgccagtagtagctcctcatccggctccccccacctctatagatcaagtagtgagcgtcgacccgcaaccccagccgaagtgaggtatatttcacctaaacatagactcataaaagtagaatcagccgcaggcggtggagccggtgatcctttaggaggcgcttgcgcaggaggccgtacttggtctccaaccgcatgcggtggcaagaagttactcaacaagtgcgccgcatccgcggctgaagaaagtggagcagggaaaaaagataaggtgaccattgccgatgattatagcgatccctttgatgctaaaaatgaccttaagtccaaggccggtaaaggggagtccgccggatatatggagccttacgaggctcaacgcattatgaccggcctgcaagaagcatggagacactctcccagcggctgcttccccgtcggcccttag

SEQ ID NO: 134517 - DNA, 1530 bp, Artificial Sequence
  derived and/or modified sequence
atggccaagtggcttaacaaatatttcagcctgggaaattcaaagactaaatcgcctccacagccaccacgaccagattacagagaacagagaagacgcggagaacgtccttcacagccccctcaggcggttcctcaagctagttctgcagcctctgcaagctgtggccctgctacagccagctgtttctcagcatccagcggcagtctcccagacgactccgggtcgacgagtgatttaattagggcctacagagcacagaaggagcgggacttcgaagacccttacaatggccctggttcgtcacttagaaaacttcgcgctatgtgccggcttgactactgtggcggaagtggtgaacccggaggcgtccagcgcgctttctcggcttcttccgcaagtggggctgccggttgttgctgtgcatcttcaggagcgggtgcagccgctagctcatctagctccagtggtagtccgcacctgtatcgaagctcatctgaaagaagaccagctacacctgccgaggtccgatatataagtcctaagcacagactgattaaggtcgagagtgccgctggtgggggagcaggggaccccctaggcggagcctgtgctggcggaaggacatggagccctacagcttgcggtggtaagaagctgcttaacaagtgcgccgcaagtgcggcagaagagtccggggctggaaaaaaagacaaagtgactattgcagatgattactcagatcccttcgacgctaagaatgacctcaaaagcaaggcaggaaagggggagtccgctggttacatggagccctacgaggcccaaaggatcatgaccgagttccagcgacaggagtcggtccgtagccagcacaaaggtatccagttgtatgacacaccatatgaacctgaggggcagagtgtcgactctgactctgaaagcacggtaagcccccgtttaagggaatcgaaattaccccaggatgatgaccggcctgccgacgagtacgatcagccgtgggagtggaatagagttaccatccctgccctggccgctcaattcaatgggaacgagaagaggcaatcgtccccatccccctcgcgtgaccgcaggcggcagttgcgcgcacccggaggcggatttaagcctatcaaacacggctcgcccgaattttgcggtatccttggagagagagtggatcctgcagtgcccttggaaaagcagatttggtaccacggagcaatatctcggggagacgcggagaacttactgcgcctctgcaaagagtgtagttatctagttcgcaatagccaaacgtcaaaacatgactatagcctgtccctaaggtctaaccagggattcatgcacatgaaactggcgaagaccaaagagaaatatgtccttggccagaatagcccaccattcgactctgtccccgaggtcatccactactatacgaccaggaaattaccgatcaagggtgctgagcatctgtcgttactttacccggtagctgttcggacactttag

SEQ ID NO: 134518 - DNA, 1462 bp, Artificial Sequence
  derived and/or modified sequence
gcgccgccgggacgggcacgggcgcgcgggctccggcgggcgccggctgccttcctccgtcgctcgctgtctctcccggccgcattctcctccgctgcggggccgagctctccccagcgctcgcaggaaggaagaagggagccgaggacgccgagaagttcccgcggcagccgcggatcccggccaaggcggaggctgcggctccgacggggcaggagcgcgatccacggcgaggggcgtacggccaaagggtccgcggcgtggagcgctcggaccttccgctctcccccgggcgtgggccgggaccccatgagacgcgcccacgaggggcgcgagattcctagcttgggcggcgctaggcggagggaggtgttgcagccgccggagccagagagctgccggcaggaggcggcggcggcaagaacttgaacttggcgtcgggagcgggcgccccggacgccccccgccggggccggggcgccgagggacctgcgccgcagcgctgccccccgaatggccgcggcggcggaccgggctcccgcgccgcggccctaggcggcctctcgccatggccaagtggctaaacaagtacttcagcttgggcaacagcaagaccaagagccccccgcagccgccgcggccagactaccgcgagcagcggcgccgaggcgagcggccttcgcagcccccccaggccgtgccgcaggcctcctccgccgcctcggcgtcctgcggtccggccaccgcctcctgcttctcagcctcttcgggctcgctgcccgacgacagcggcagcaccagcgacctcatccgcgcctaccgcgcgcagaaggagcgagacttcgaggacccctacaacgggcctggctcgtcgctgcgcaaactgcgcgccatgtgccgcctggactactgcggcggcagcggggagccaggcggggtccagcgcgccttctcggcctcgtccgcgtcgggcgccgcgggctgttgctgcgcctcctcgggcgcgggggccgccgcgtcctcgtcctcgtcctccggctctccgcatctctaccgcagcagcagcgagcggcggcccgccacgccggccgaggtgcgctacatctcccccaagcaccgcctcatcaaagtggagagcgccgcgggcggtggggccggggaccccctggggggcgcctgcgcgggcggccgcacctggagcccgacggcctgcggaggcaagaaactgctcaacaagtgcgccgcctcagccgcggaggagagcggggccggcaagaaggacaaggtgaccatagccgatgactactcagatccctttgatgccaagaatgatctcaagagcaaagcaggaaagggggagagtgctggctacatggagccctatgaggcacagaggatcatgacaggtttacaggaagcatggagacattcccccagtggctgttttcctgttggcccttga

SEQ ID NO: 134519 - DNA, 2783 bp, Artificial Sequence
  derived and/or modified sequence
gccgccgggacgggcacgggcgcgcgggctccggcgggcgccggctgccttcctccgtcgctcgctgtctctcccggccgcattctcctccgctgcggggccgagctctccccagcgctcgcaggaaggaagaagggagccgaggacgccgagaagttcccgcggcagccgcggatcccggccaaggcggaggctgcggctccgacggggcaggagcgcgatccacggcgaggggcgtacggccaaagggtccgcggcgtggagcgctcggaccttccgctctcccccgggcgtgggccgggaccccatgagacgcgcccacgaggggcgcgagattcctagcttgggcggcgctaggcggagggaggtgttgcagccgccggagccagagagctgccggcaggaggcggcggcggcaagaacttgaacttggcgtcgggagcgggcgccccggacgccccccgccggggccggggcgccgagggacctgcgccgcagcgctgccccccgaatggccgcggcggcggaccgggctcccgcgccgcggccctaggcggcctctcgccatggccaagtggctaaacaagtacttcagcttgggcaacagcaagaccaagagccccccgcagccgccgcggccagactaccgcgagcagcggcgccgaggcgagcggccttcgcagcccccccaggccgtgccgcaggcctcctccgccgcctcggcgtcctgcggtccggccaccgcctcctgcttctcagcctcttcgggctcgctgcccgacgacagcggcagcaccagcgacctcatccgcgcctaccgcgcgcagaaggagcgagacttcgaggacccctacaacgggcctggctcgtcgctgcgcaaactgcgcgccatgtgccgcctggactactgcggcggcagcggggagccaggcggggtccagcgcgccttctcggcctcgtccgcgtcgggcgccgcgggctgttgctgcgcctcctcgggcgcgggggccgccgcgtcctcgtcctcgtcctccggctctccgcatctctaccgcagcagcagcgagcggcggcccgccacgccggccgaggtgcgctacatctcccccaagcaccgcctcatcaaagtggagagcgccgcgggcggtggggccggggaccccctggggggcgcctgcgcgggcggccgcacctggagcccgacggcctgcggaggcaagaaactgctcaacaagtgcgccgcctcagccgcggaggagagcggggccggcaagaaggacaaggtgaccatagccgatgactactcagatccctttgatgccaagaatgatctcaagagcaaagcaggaaagggggagagtgctggctacatggagccctatgaggcacagaggatcatgacagaatttcagaggcaggaaagtgtccggtcccagcataaaggtatccagttatatgacaccccttacgaacctgaaggccaaagtgttgactcagactcggagagcacagtcagcccccgactgcgggagagcaagctgccccaggatgacgacaggcccgccgatgagtacgaccagccttgggagtggaaccgggtcaccatcccagccctggcagcacagtttaatggcaacgagaagcggcagtcatccccctcaccttcgcgggaccggcggcgccagcttcgtgcccctggagggggctttaagcctatcaaacatgggagccctgagttctgcgggatcctaggagaaagggtggatcctgccgtccccctggagaagcaaatatggtatcacggagccatcagcagaggagacgccgagaacctgctgcgactctgcaaggagtgtagctaccttgtccggaacagccagaccagcaagcatgactactccctctccctgaggagcaaccagggttttatgcacatgaaactggccaaaaccaaagagaaatacgttctgggtcagaacagccctccgttcgacagtgtcccggaagtcatccactactacaccaccagaaagctacccatcaaaggggctgagcacttgtccctcctctatcccgtggctgtgaggaccctgtgagcggaccagacctgccctgctctgtgacagagcctgagacttggaggtgccagaggccccccaccaaccagcccagccactgttgctggctgtgtcgtttgtgttgtgtgtatggtactagcacaccactgcatgtctctagaatgctgttgccacttacgggggctggagaaggcctggataaagacagaagggcggcaacacaccaccccagcccccacccccaccctctccttgagtttctgtgaattaaaatatttgcaaatccaaagagatgccttccaggatgaacaaaggcagaccagctccgaggggcggggtagggtggggcgggagctccctggctgacatctctttgttctccagctgtctcaaattcacacctctgtacagggcaaagttttcccacaggagcccccctactgatgctgggagccaaatgctggtgctttgagagtcccggaggccccggggttcccgccccgctggtgtgtatatgtgtgtctgtgtgagtgtgtgtgtgagtacagatgtgagaaggtggtcacacacagatgggtaagcccactgatctacttgtagtcactcagtgtaatcattaggctatcttcaaggaatcattgtgcagtcaaaaagaggattcaattatttatgaatagggtgtgtaaataaaatagtcatttaata

SEQ ID NO: 134520 - protein, 474 aa, Artificial Sequence
  derived and/or modified sequence
MNKLSGGGGRRTRVEGGQLGGEEWTRHGSFVNKPTRGWLHPNDKVMGPGVSYLVRYMGCVEVLQSMRALDFNTRTQVTREAISLVCEAVPGAKGATRRRKPCSRPLSSILGRSNLKFAGMPITLTVSTSSLNLMAADCKQIIANHHMQSISFASGGDPDTAEYVAYVAKDPVNQRACHILECPEGLAQDVISTIGQAFELRFKQYLRNPPKLVTPHDRMAGFDGSAWDEEEEEPPDHQYYNDFPGKEPPLGGVVDMRLREGAAPGAARPTAPNAQTPSHLGATLPVGQPVGGDPEVRKQMPPPPPCPAGRELFDDPSYVNVQNLDKARQAVGGAGPPNPAINGSAPRDLFDMKPFEDALRVPPPPQSVSMAEQLRGEPWFHGKLSRREAEALLQLNGDFLVRESTTTPGQYVLTGLQSGQPKHLLLVDPEGVVRTKDHRFESVSHLISYHMDNHLPIISAGSELCLQQPVERKL

SEQ ID NO: 134521 - DNA, 3062 bp, Artificial Sequence
  derived and/or modified sequence
gagtgtaataaagtttctccagggaggcagggcccggggagaaagttggagcggtaacctaagctggcagtggcgtgatccggcaccaaatcggcccgcggtgcggtgcggagactccatgaggccctggacatgaacaagctgagtggaggcggcgggcgcaggactcgggtggaagggggccagcttgggggcgaggagtggacccgccacgggagctttgtcaataagcccacgcggggctggctgcatcccaacgacaaagtcatgggacccggggtttcctacttggttcggtacatgggttgtgtggaggtcctccagtcaatgcgtgccctggacttcaacacccggactcaggtcaccagggaggccatcagtctggtgtgtgaggctgtgccgggtgctaagggggcgacaaggaggagaaagccctgtagccgcccgctcagctctatcctggggaggagtaacctgaaatttgctggaatgccaatcactctcaccgtctccaccagcagcctcaacctcatggccgcagactgcaaacagatcatcgccaaccaccacatgcaatctatctcatttgcatccggcggggatccggacacagccgagtatgtcgcctatgttgccaaagaccctgtgaatcagagagcctgccacattctggagtgtcccgaagggcttgcccaggatgtcatcagcaccattggccaggccttcgagttgcgcttcaaacaatacctcaggaacccacccaaactggtcacccctcatgacaggatggctggctttgatggctcagcatgggatgaggaggaggaagagccacctgaccatcagtactataatgacttcccggggaaggaaccccccttggggggggtggtagacatgaggcttcgggaaggagccgctccaggggctgctcgacccactgcacccaatgcccagacccccagccacttgggagctacattgcctgtaggacagcctgttgggggagatccagaagtccgcaaacagatgccacctccaccaccctgtccagcaggcagagagctttttgatgatccctcctatgtcaacgtccagaacctagacaaggcccggcaagcagtgggtggtgctgggccccccaatcctgctatcaatggcagtgcaccccgggacctgtttgacatgaagcccttcgaagatgctcttcgcgtgcctccacctccccagtcggtgtccatggctgagcagctccgaggggagccctggttccatgggaagctgagccggcgggaggctgaggcactgctgcagctcaatggggacttcctggtacgggagagcacgaccacacctggccagtatgtgctcactggcttgcagagtgggcagcctaagcatttgctactggtggaccctgagggtgtggttcggactaaggatcaccgctttgaaagtgtcagtcaccttatcagctaccacatggacaatcacttgcccatcatctctgcgggcagcgaactgtgtctacagcaacctgtggagcggaaactgtgatctgccctagcgctctcttccagaagatgccctccaatcctttccaccctattccctaactctcgggacctcgtttgggagtgttctgtgggcttggccttgtgtcagagctgggagtagcatggactctgggtttcatatccagctgagtgagagggtttgagtcaaaagcctgggtgagaatcctgcctctccccaaacattaatcaccaaagtattaatgtacagagtggcccctcacctgggcctttcctgtgccaacctgatgccccttccccaagaaggtgagtgcttgtcatggaaaatgtcctgtggtgacaggcccagtggaacagtcacccttctgggcaagggggaacaaatcacacctctgggcttcagggtatcccagacccctctcaacacccgccccccccatgtttaaactttgtgcctttgaccatctcttaggtctaatgatattttatgcaaacagttcttggacccctgaattcaatgacagggatgccaacaccttcttggcttctgggacctgtgttcttgctgagcaccctctccggtttgggttgggataacagaggcaggagtggcagctgtcccctctccctggggatatgcaacccttagagattgccccagagccccactcccggccaggcgggagatggacccctcccttgctcagtgcctcctggccggggcccctcaccccaaggggtctgtatatacatttcataaggcctgccctcccatgttgcatgcctatgtactctacgccaaagtgcagcccttcctcctgaagcctctgccctgcctccctttctgggagggcggggtgggggtgactgaatttgggcctcttgtacagttaactctcccaggtggattttgtggaggtgagaaaaggggcattgagactataaagcagtagacaatccccacataccatctgtagagttggaactgcattcttttaaagttttatatgcatatattttagggctgtagacttactttcctattttcttttccattgcttattcttgagcacaaaatgataatcaattattacatttatacatcacctttttgacttttccaagcccttttacagctcttggcattttcctcgcctaggcctgtgaggtaactgggatcgcaccttttataccagagacctgaggcagatgaaatttatttccatctaggactagaaaaacttgggtctcttaccgcgagactgagaggcagaagtcagcccgaatgcctgtcagtttcatggaggggaaacgcaaaacctgcagttcctgagtaccttctacaggcccggcccagcctaggcccggggtggccacaccacagcaagccggccccccctcttttggccttgtggataagggagagttgaccgttttcatcctggcctccttttgctgtttggatgtttccacgggtctcacttataccaaagggaaaactcttcattaaagtccgtatttcttcta

SEQ ID NO: 134522 - protein, 355 aa, Artificial Sequence
  derived and/or modified sequence
MEELTAFVSKSFDQKVKEKKEAITYREVLESGPLRGAKEPTGCTEAGRDDRSSPAVRAAGGGGGGGGGGGGGGGGGGVGGGGAGGGAGGGRSPVRELDMGAAERSREPGSPRLTEGRRKPTKAEVQATLLLPGEAFRFLVSPELKDRKEDAKGMEDEGQTKIKQRRSRTNFTLEQLNELERLFDETHYPDAFMREELSQRLGLSEARVQVWFQNRRAKCRKQENQLHKGVLIGAASQFEACRVAPYVNVGALRMPFQQDSHCNVTPLSFQVQAQLQLDSAVAHAHHHLHPHLAAHAPYMMFPAPPFGLPLATLAADSASAASVVAAAAAAKTTSKNSSIADLRLKAKKHAAALGL

SEQ ID NO: 134523 - DNA, 3233 bp, Artificial Sequence
  derived and/or modified sequence
cctcctccctctcctcccccacctcctgtcccattgatgtgttattattgggggggctggagcagtaaaaaaagaagaaggaaaaaaagagcggggctctgctggcagaggttgagcgccgggctgacgtgcggcggcgatggaagaacttacggcgttcgtctccaagtcttttgaccagaaagtgaaggagaagaaggaggcgatcacgtaccgggaggtgctggagagcgggccgctgcgcggggccaaggagccgaccggctgcaccgaggcgggccgcgacgaccgcagcagcccggcagtccgggcggccggcggaggcggcggcggaggaggcggaggcggcggcggaggaggcggaggaggtgtaggaggaggaggagcaggcggaggagctggaggagggcgctctcccgtccgggagctggacatgggcgccgccgagagaagcagggagccgggcagcccgcgactgacggagggtagaaggaagccaacgaaagctgaggtccaggctacgctgcttctcccgggcgaggcgtttcggtttcttgtgtccccggagctgaaagatcgcaaagaggatgcgaaagggatggaggacgaaggccagaccaaaatcaagcagaggcgaagtcggaccaatttcaccctggaacaactcaatgagctggagaggctttttgacgagacccactatcccgacgccttcatgcgagaggaactgagccagcgactgggcctgtcggaggcccgagtgcaggtttggtttcaaaatcgaagagctaaatgtagaaaacaagaaaatcaactccataaaggtgttctcataggggccgccagccagtttgaagcttgtagagtcgcaccttatgtcaacgtaggtgctttaaggatgccatttcagcaggatagtcattgcaacgtgacgcccttgtcctttcaggttcaggcgcagctgcagctggacagcgctgtggcgcacgcgcaccaccacctgcatccgcacctggccgcgcacgcgccctacatgatgttcccagcaccgcccttcggactgccgctcgccacgctggccgcggattcggcttccgccgcctcggtagtggcggccgcagcagccgccaagaccaccagcaagaactccagcatcgccgatctcagactgaaagccaaaaagcacgccgcagccctgggtctgtgacgccaacgccagcaccaatgtcgcgcctgtcccgcggcactcagcctgcacgccctccgcgccccgctgcttctccgttacccctttgagacctcgggagccggccctcttcccgcctcactgaccatccctcgtcccctatcgcatcttggactcggaaagccagactccacgcaggaccagggatctcacgaggcacgcaggctccgtggctcctgcccgttttcctactcgagggcctagaattgggttttgtaggagcgggtttgggggagtctggagagagactggacaggggagtgctggaaccgcggagtttggctcaccgcaaagctgcaacgatggactcttgcatagaaaaaaaaatcttgttaacaatgaaaaaatgagcaaacaaaaaaatcgaaagacaaacgggagagaaaaagaggaagggaacttatttcttaactgctatttggcagaagctgaaattggagaaccaaggagcaaaaacaaattttaaaattaaagtattttatacatttaaaaatatggaaaaacaacccagacgattctcgagagactggggggagttaccaacttaaatgtgtgtttttaaaaatgcgctaagaaggcaaagcagaaagaagaggtatacttatttaaaaaactaagatgaaaaaagtgcgcagctgggaagttcacaggttttgaaactgacctttttctgcgaagttcacgttaacacgagaaatttgatgagagaggcgggcctccttttacgttgaatcagatgctttgagtttaaacccaccatgtatggaagagcaagaaaagagaaaatattaaaacgaggagagagaaaaataatattaacacaaaaaaatgccacagacaatgatttctctgagaaattattatggcaaaactgtctggactgctgacagtaaattccggtttgcatgttacttgtattccattgatggtgtgtctcctcccacccccttatctcccatgcactcactccattttcatcttcactatgaaaaacaataccaaaagtatctggaaattgatatatatatatccatatatatatatcatatatttgccatatatatatatatatatatatatatatatatatatatatatttgccctgtctttgatcctggggaacaaaagaaaaaagtcagaaagggaaaaaattacactcattgtcctaagaagacagaggtgggcagaatatgtggggaaaggaaaaagaaaacaagaccaccaaatgaaataatgaaggtacagcgcctcgctgtgccagacacagtaggcgctcaatcagtattagttcccaccattccccttttcttgtgttccttcttgttggtttcctgaagtcctatttgaagacagtggtttatttccccctctctatcccgtcaaattcaccttaaataacacccagctagatacaggcactaggtttgtgtaagatatgttgatacacacgaacaaagtttattttgactataatgtgtggactgactttcaacatttgcattttatctcacaaaggtgtatctattcaagtaaccttttttttttgtttgtttgtttcttttttgtttttttttttcttttggttgtttgtttcaattcatgtagctatttaaactgggataccttggactaagccagtctgtatcccaattcgctagcaagcctaagtttgtggggttttgtttttgtttttgttttaccttctaatttacaagaaagaggaaaagctcttctaactgaactttggtatgcggttgagctttgtaactatttgttctccatgaaaacaaaattatttatatttgacatatttttttctagtgtattaagttattttaaacaaaagatgttatctcatgacgtgttgtcagtacaaaatgtgtcgcctccaattctgttaaaccttttaaataagtgccaagttattaattgaagacactttgcgatcaattgaatgaaaatatcgtttcatttgaaaaaaaaaaa

SEQ ID NO: 134524 - DNA, 1068 bp, Artificial Sequence
  derived and/or modified sequence
atggaagaactaaccgcttttgtatcaaagagcttcgatcagaaggtcaaggaaaagaaggaggcaattacttatcgggaagtgttggaatccgggcccttgaggggagccaaagagcctacgggatgtacggaggcagggcgagacgaccgatcaagccctgccgtcagggcggccggtggcggtggcggtgggggtggcggtggtggtggcgggggcggcggcgggggggttggcggcgggggggctggagggggggcgggcggggggcgttcgccggtgcgggagttggatatgggggccgcagaaaggagccgggagcctggatctccaaggttgacagaaggtagacgaaagccaacaaaggccgaggtgcaagctaccctgctgctgccaggtgaagcgttcaggttcctcgtttctcctgaactcaaggacagaaaagaggatgcgaagggaatggaggacgaggggcagaccaaaatcaagcaacgcagaagccgcactaactttacgcttgagcagcttaacgaattggaaaggctgttcgatgaaacccactatccagacgccttcatgagagaagagctcagccaaagactgggtctttctgaggctagagtgcaggtgtggttccagaatcgaagagccaagtgccgcaaacaggagaatcagctgcacaagggcgtgttgatcggagctgcgagccagtttgaagcctgtagggtggcaccgtatgtaaacgttggcgcacttcgcatgccctttcagcaggactctcactgcaatgtaacccccctgagttttcaggtccaggcacagctgcagctagattctgctgtggcccatgcccaccaccacctgcatccccatttagcggcccatgcgccttatatgatgttcccagcgcccccgttcggcctgcctttggcaacactggccgccgacagcgcgtccgcagcctcagttgtggctgcagcagccgccgccaaaaccacgtctaagaattcatctatagctgatctacgcctgaaggctaagaagcatgctgctgcgctggggttatag

SEQ ID NO: 134525 - DNA, 1068 bp, Artificial Sequence
  derived and/or modified sequence
atggaggagctgacagcctttgtgtccaagagctttgaccagaaggtgaaggagaagaaggaggccatcacctaccgggaggtgctggagagcggccccctgcggggggccaaggagcccaccggctgcacagaggccggcagagatgacaggagcagccctgctgtgcgggctgctgggggcggcggcggcggcggcggcggcggcggcggcggcggcggcggcggcggcgtgggcggcggcggggccggcggcggggccggcggcggccgcagccctgtgcgggagctggacatgggcgctgctgagaggagccgggagcccggcagcccccggctgacagagggccgcaggaagcccaccaaggccgaggtgcaggccaccctgctgctgcccggggaggccttccgcttcctggtgtccccagagctgaaggacagaaaagaagatgccaagggcatggaggatgagggccagaccaagatcaagcagaggaggagcaggaccaacttcaccctggagcagctgaatgagctggagcggctgtttgatgagacccactacccagatgccttcatgagggaggagctgagccagaggctgggcctgtctgaggcccgggtgcaggtgtggttccagaacagaagagccaagtgcaggaagcaggagaaccagctgcacaagggcgtgctgattggagctgccagccagtttgaggcctgccgggtggccccctacgtgaatgtgggcgccctgaggatgcccttccagcaggacagccactgcaatgtgacccccctgtccttccaggtgcaggcccagctgcagctggacagcgctgtggcccacgcccaccaccacctgcacccccacctggccgcccacgccccctacatgatgtttcctgccccacccttcggcctgcccctggccaccctggccgctgacagcgccagcgctgcctctgtggtggccgctgctgctgctgccaagaccaccagcaagaacagcagcattgctgacctgcggctgaaggccaagaagcacgccgccgccctgggcctgtag

SEQ ID NO: 134526 - DNA, 1068 bp, Artificial Sequence
  derived and/or modified sequence
atggaggagctgaccgccttcgtgagcaagagcttcgaccagaaggtgaaagaaaagaaggaagctatcacttaccgtgaggtcctggagtctggccccctgaggggagccaaggaaccaactggctgcaccgaggccggcagggatgaccggagcagccctgctgtgagggccgctggtggaggcggtggcggagggggcggggggggcgggggaggtggaggaggaggggtgggcggcgggggagctggaggtggcgcaggaggaggccgcagtccagtgcgtgaactcgacatgggtgcggcggaacgaagccgcgagcctggaagccccaggcttaccgaaggcagaaggaaaccaaccaaggccgaagtgcaggccactctgttactcccaggcgaagcttttcgcttcctggtctcccctgaacttaaggaccgaaaggaggatgcaaaggggatggaggatgaggggcagactaagatcaagcagaggagaagtcggacaaattttaccctcgaacaactgaatgaattagagcgcctgtttgacgagacacattacccggacgcattcatgcgagaagaattgtcacaaagactgggactatccgaagcccgcgtacaagtctggtttcagaataggagagccaaatgtagaaaacaagaaaaccagttacacaagggcgtgctcattggcgcagcctcgcagtttgaggcctgtagagtcgccccctacgtgaacgtcggagctctgcggatgccattccagcaggattcacactgcaacgtgacacctctgtcctttcaggtccaggctcagctgcaattagatagtgctgtggcacatgcacatcatcacctgcacccacacctggccgcccacgcaccgtacatgatgttccctgcgcccccattcggactgcctctggctacgctcgcagcagactctgcaagtgctgcatccgtcgtggctgccgccgccgccgcaaaaactacatcgaagaactcttcaatcgccgacttgagactgaaggcaaaaaaacacgccgctgccctcggtctgtag

SEQ ID NO: 134527 - DNA, 1068 bp, Artificial Sequence
  derived and/or modified sequence
atggaggagctgactgcgttcgtcagcaaaagcttcgaccagaaagttaaggaaaagaaggaagcaatcacctatcgcgaagtattggaatccgggcctttgcggggtgccaaggaacctacagggtgcactgaagcgggacgtgacgataggtccagtccagcggtgcgggcagcaggtgggggagggggagggggtggcggtggaggcggtggcggaggcggtggtggtgtcggaggtgggggtgccggaggcggagcgggaggtggtcggagtcctgtccgagagctggatatgggcgcagccgagcgtagtcgcgagcccggttcacccagactgaccgaagggcgtagaaagccaaccaaagcagaagtgcaggctactctcctcctgccgggtgaggcttttagattcctagtatctccggagctcaaggacagaaaagaggatgccaaaggcatggaagacgaaggccaaactaaaatcaaacaaaggcgctcacggacgaactttacgctggaacagctgaacgaactggagcggctgtttgatgagacccattatccggacgctttcatgcgcgaggagcttagccagaggttgggcctgagcgaggctagggtccaggtgtggttccagaatcggagagccaaatgtaggaagcaagaaaaccagctgcataagggggtgctgattggagctgcatcccagtttgaagcctgcagggttgcgccttacgttaacgtgggcgcattacgaatgcccttccagcaggatagccattgcaatgtaacaccgctttcatttcaggtccaggcacagcttcagctggactctgcggtggcgcatgctcaccaccacctccatccgcacctcgccgcacacgcaccgtacatgatgttccctgcccctccattcggactgccactggcaacattggcagccgacagcgccagcgccgcatcagtggtggcggcagccgctgcggcaaaaaccacatccaagaactcctcaatcgccgacctgcggttgaaggctaagaagcacgctgcagcacttggcctgtag

SEQ ID NO: 134528 - DNA, 3277 bp, Artificial Sequence
  derived and/or modified sequence
cctccctctcctcccccacctcctgtcccattgatgtgttattattgggggggctggagcagtaaaaaaagaagaaggaaaaaaagagcggggctctgctggcagaggttgagcgccgggctgacgtgcggcggcgatggaagaacttacggcgttcgtctccaagtcttttgaccagaaagtgaaggagaagaaggaggcgatcacgtaccgggaggtgctggagagcgggccgctgcgcggggccaaggagccgaccggctgcaccgaggcgggccgcgacgaccgcagcagcccggcagtccgggcggccggcggaggcggcggcggaggaggcggaggcggcggcggaggaggcggaggaggtgtaggaggaggaggagcaggcggaggagctggaggagggcgctctcccgtccgggagctggacatgggcgccgccgagagaagcagggagccgggcagcccgcgactgacggagggtagaaggaagccaacgaaagctgaggtccaggctacgctgcttctcccgggcgaggcgtttcggtttcttgtgtccccggagctgaaagatcgcaaagaggatgcgaaagggatggaggacgaaggccagaccaaaatcaagcagaggcgaagtcggaccaatttcaccctggaacaactcaatgagctggagaggctttttgacgagacccactatcccgacgccttcatgcgagaggaactgagccagcgactgggcctgtcggaggcccgagtgcaggtttggtttcaaaatcgaagagctaaatgtagaaaacaagaaaatcaactccataaaggtgttctcataggggccgccagccagtttgaagcttgtagagtcgcaccttatgtcaacgtaggtgctttaaggatgccatttcagcaggatagtcattgcaacgtgacgcccttgtcctttcaggttcaggcgcagctgcagctggacagcgctgtggcgcacgcgcaccaccacctgcatccgcacctggccgcgcacgcgccctacatgatgttcccagcaccgcccttcggactgccgctcgccacgctggccgcggattcggcttccgccgcctcggtagtggcggccgcagcagccgccaagaccaccagcaagaactccagcatcgccgatctcagactgaaagccaaaaagcacgccgcagccctgggtctgtgacgccaacgccagcaccaatgtcgcgcctgtcccgcggcactcagcctgcacgccctccgcgccccgctgcttctccgttacccctttgagacctcgggagccggccctcttcccgcctcactgaccatccctcgtcccctatcgcatcttggactcggaaagccagactccacgcaggaccagggatctcacgaggcacgcaggctccgtggctcctgcccgttttcctactcgagggcctagaattgggttttgtaggagcgggtttgggggagtctggagagagactggacaggggagtgctggaaccgcggagtttggctcaccgcaaagctgcaacgatggactcttgcatagaaaaaaaaatcttgttaacaatgaaaaaatgagcaaacaaaaaaatcgaaagacaaacgggagagaaaaagaggaagggaacttatttcttaactgctatttggcagaagctgaaattggagaaccaaggagcaaaaacaaattttaaaattaaagtattttatacatttaaaaatatggaaaaacaacccagacgattctcgagagactggggggagttaccaacttaaatgtgtgtttttaaaaatgcgctaagaaggcaaagcagaaagaagaggtatacttatttaaaaaactaagatgaaaaaagtgcgcagctgggaagttcacaggttttgaaactgacctttttctgcgaagttcacgttaacacgagaaatttgatgagagaggcgggcctccttttacgttgaatcagatgctttgagtttaaacccaccatgtatggaagagcaagaaaagagaaaatattaaaacgaggagagagaaaaataatattaacacaaaaaaatgccacagacaatgatttctctgagaaattattatggcaaaactgtctggactgctgacagtaaattccggtttgcatgttacttgtattccattgatggtgtgtctcctcccacccccttatctcccatgcactcactccattttcatcttcactatgaaaaacaataccaaaagtatctggaaattgatatatatatatccatatatatatatcatatatttgccatatatatatatatatatatatatatatatatatatatatatttgccctgtctttgatcctggggaacaaaagaaaaaagtcagaaagggaaaaaattacactcattgtcctaagaagacagaggtgggcagaatatgtggggaaaggaaaaagaaaacaagaccaccaaatgaaataatgaaggtacagcgcctcgctgtgccagacacagtaggcgctcaatcagtattagttcccaccattccccttttcttgtgttccttcttgttggtttcctgaagtcctatttgaagacagtggtttatttccccctctctatcccgtcaaattcaccttaaataacacccagctagatacaggcactaggtttgtgtaagatatgttgatacacacgaacaaagtttattttgactataatgtgtggactgactttcaacatttgcattttatctcacaaaggtgtatctattcaagtaaccttttttttttgtttgtttgtttcttttttgtttttttttttcttttggttgtttgtttcaattcatgtagctatttaaactgggataccttggactaagccagtctgtatcccaattcgctagcaagcctaagtttgtggggttttgtttttgtttttgttttaccttctaatttacaagaaagaggaaaagctcttctaactgaactttggtatgcggttgagctttgtaactatttgttctccatgaaaacaaaattatttatatttgacatatttttttctagtgtattaagttattttaaacaaaagatgttatctcatgacgtgttgtcagtacaaaatgtgtcgcctccaattctgttaaaccttttaaataagtgccaagttattaattgaagacactttgcgatcaattgaatgaaaatatcgtttcatttgatggggttcgagtcatctttgttcctgttactattaaaatatccgggatagtctttcc

SEQ ID NO: 134529 - DNA, 1068 bp, Artificial Sequence
  derived and/or modified sequence
atggaggagctgaccgccttcgtgagcaagagcttcgaccagaaggtgaaggagaagaaggaggccatcacctacagagaggtgctggagagcggccccctgagaggcgccaaggagcccaccggctgcaccgaggccggcagagacgacagaagcagccccgccgtgagagccgccggcggcggcggcggcggcggcggcggcggcggcggcggcggcggcggcggcggcgtgggcggcggcggcgccggcggcggcgccggcggcggcagaagccccgtgagagagctggacatgggcgccgccgagagaagcagagagcccggcagccccagactgaccgagggcagaagaaagcccaccaaggccgaggtgcaggccaccctgctgctgcccggcgaggccttcagattcctggtgagccccgagctgaaggacagaaaggaggacgccaagggcatggaggacgagggccagaccaagatcaagcagagaagaagcagaaccaacttcaccctggagcagctgaacgagctggagagactgttcgacgagacccactaccccgacgccttcatgagagaggagctgagccagagactgggcctgagcgaggccagagtgcaggtgtggttccagaacagaagagccaagtgcagaaagcaggagaaccagctgcacaagggcgtgctgatcggcgccgccagccagttcgaggcctgcagagtggccccctacgtgaacgtgggcgccctgagaatgcccttccagcaggacagccactgcaacgtgacccccctgagcttccaggtgcaggcccagctgcagctggacagcgccgtggcccacgcccaccaccacctgcacccccacctggccgcccacgccccctacatgatgttccccgccccccccttcggcctgcccctggccaccctggccgccgacagcgccagcgccgccagcgtggtggccgccgccgccgccgccaagaccaccagcaagaacagcagcatcgccgacctgagactgaaggccaagaagcacgccgccgccctgggcctgtag

SEQ ID NO: 134530 - protein, 356 aa, Artificial Sequence
  derived and/or modified sequence
MSPCGRARRQTSRGAMAVLAWKFPRTRLPMGASALCVVVLCWLYIFPVYRLPNEKEIVQGVLQQGTAWRRNQTAARAFRKQMEDCCDPAHLFAMTKMNSPMGKSMWYDGEFLYSFTIDNSTYSLFPQATPFQLPLKKCAVVGNGGILKKSGCGRQIDEANFVMRCNLPPLSSEYTKDVGSKSQLVTANPSIIRQRFQNLLWSRKTFVDNMKIYNHSYIYMPAFSMKTGTEPSLRVYYTLSDVGANQTVLFANPNFLRSIGKFWKSRGIHAKRLSTGLFLVSAALGLCEEVAIYGFWPFSVNMHEQPISHHYYDNVLPFSGFHAMPEEFLQLWYLHKIGALRMQLDPCEDTSLQPTS

SEQ ID NO: 134531 - DNA, 1071 bp, Artificial Sequence
  derived and/or modified sequence
atgagcccctgcggcagagccagaagacagaccagcagaggcgccatggccgtgctggcctggaagttccccagaaccagactgcccatgggcgccagcgccctgtgcgtggtggtgctgtgctggctgtacatcttccccgtgtacagactgcccaacgagaaggagatcgtgcagggcgtgctgcagcagggcaccgcctggagaagaaaccagaccgccgccagagccttcagaaagcagatggaggactgctgcgaccccgcccacctgttcgccatgaccaagatgaacagccccatgggcaagagcatgtggtacgacggcgagttcctgtacagcttcaccatcgacaacagcacctacagcctgttcccccaggccacccccttccagctgcccctgaagaagtgcgccgtggtgggcaacggcggcatcctgaagaagagcggctgcggcagacagatcgacgaggccaacttcgtgatgagatgcaacctgccccccctgagcagcgagtacaccaaggacgtgggcagcaagagccagctggtgaccgccaaccccagcatcatcagacagagattccagaacctgctgtggagcagaaagaccttcgtggacaacatgaagatctacaaccacagctacatctacatgcccgccttcagcatgaagaccggcaccgagcccagcctgagagtgtactacaccctgagcgacgtgggcgccaaccagaccgtgctgttcgccaaccccaacttcctgagaagcatcggcaagttctggaagagcagaggcatccacgccaagagactgagcaccggcctgttcctggtgagcgccgccctgggcctgtgcgaggaggtggccatctacggcttctggcccttcagcgtgaacatgcacgagcagcccatcagccaccactactacgacaacgtgctgcccttcagcggcttccacgccatgcccgaggagttcctgcagctgtggtacctgcacaagatcggcgccctgagaatgcagctggacccctgcgaggacaccagcctgcagcccaccagctag

SEQ ID NO: 134532 - DNA, 1071 bp, Artificial Sequence
  derived and/or modified sequence
atgagtccttgtggccgggcaaggaggcaaaccagtcgaggggcaatggctgttctcgcctggaaattcccacggacccgcctcccaatgggcgccagtgcactttgcgttgttgtgctgtgttggctgtatatctttccagtctatcgcctgcctaacgagaaggagatagtacagggtgtgctgcagcagggcactgcctggcggaggaatcagacagctgcacgggcgttcaggaaacagatggaagactgttgcgaccccgctcacctgtttgccatgaccaaaatgaactctcctatgggaaaaagcatgtggtatgacggtgaatttctgtatagttttactatcgacaatagcacttactcactatttccacaggccactccttttcaacttccccttaaaaaatgtgccgttgtcgggaatggaggcatactcaagaagagcggctgcgggcggcagatcgatgaggccaacttcgttatgcgatgtaacctgccgccactcagcagcgagtatactaaggacgtgggatctaaaagtcaactggtgacggctaacccgagtatcatcagacagaggtttcaaaatctcttatggagtcggaaaacctttgtggataatatgaaaatatataatcactcctatatctatatgccagccttctccatgaaaacgggcacagaaccaagcctgcgcgtttactatactctttctgacgtgggcgctaatcaaaccgtgctattcgctaaccccaattttcttcgatctatcggaaagttctggaagtcgaggggcatccacgccaaaagactgagcacgggcttatttcttgtatccgccgccctagggctctgtgaagaggtggccatctacgggttttggccctttagcgtcaatatgcacgagcaacctattagtcaccactattacgataatgtgctgcccttttcaggatttcatgccatgccagaggagttcttgcagctttggtatctgcacaagattggcgccctgaggatgcagttagatccctgcgaggatacatccctgcagcctaccagctag

SEQ ID NO: 134533 - DNA, 1071 bp, Artificial Sequence
  derived and/or modified sequence
atgagcccctgtggccgggcccggcggcagaccagcagaggagccatggctgtgctggcctggaagttccccaggacccggctgcccatgggcgccagcgccctgtgtgtggtggtgctgtgctggctgtacatcttccctgtgtaccgcctgcccaatgagaaggagatcgtgcagggcgtgctgcagcagggcacagcctggaggaggaaccagacagctgcccgggccttcaggaagcagatggaggactgctgtgaccctgcccacctgtttgccatgaccaagatgaacagccccatgggcaagtccatgtggtatgatggagagttcctgtacagcttcaccatcgacaacagcacctacagcctcttcccccaggccacccccttccagctgcccctgaagaagtgtgctgtggtgggcaatggaggcatcctgaagaagagcggctgcggccggcagattgatgaggccaactttgtgatgcgctgcaacctgccccccctgagcagcgagtacaccaaggatgtgggcagcaagagccagctggtgacagccaaccccagcatcatccggcagcgcttccagaacctgctgtggagcaggaagacctttgtggacaacatgaagatctacaaccacagctacatctacatgcctgccttctccatgaagacaggaacagagcccagcctgcgggtgtactacaccctgagtgatgtgggcgccaaccagacagtgctgtttgccaaccccaacttcctgcggagcatcggcaagttctggaagagccggggcatccacgccaagaggctgagcacaggcctcttcctggtgtctgctgccctgggcctgtgtgaggaggtggccatctacggcttctggcccttctctgtgaacatgcatgagcagcccatcagccaccactactatgacaacgtgctgcccttcagcggcttccacgccatgcctgaggagttcctgcagctgtggtacctgcacaagattggagccctgaggatgcagctggacccctgtgaggacaccagcctgcagcccaccagctag

SEQ ID NO: 134534 - DNA, 1071 bp, Artificial Sequence
  derived and/or modified sequence
atgagcccctgcggccgggcccggcggcagaccagccggggcgccatggcagtgttggcttggaagtttccaaggacaagactgccaatgggggcttcagctctgtgcgtggtagtgctttgttggctgtatatcttcccggtgtacaggctgcccaacgagaaagagatagtacagggcgtcttacagcaaggcaccgcctggcgcagaaaccagactgcagcgagggcttttcggaaacagatggaagattgctgtgaccctgcacacctgttcgccatgaccaaaatgaacagtcccatggggaaatctatgtggtatgatggggaatttctttacagctttactatagacaattctacctactctctctttccacaagcaaccccgtttcagctgcccctgaagaaatgcgctgtagtgggcaatggaggcattctgaagaagtctggttgtgggaggcagatagatgaggccaatttcgttatgcgttgcaatctccccccgctgagctctgagtataccaaagacgtggggtctaagagtcagctcgttaccgcaaaccctagcataatcagacagaggttccaaaatctgctctggtcaaggaaaaccttcgtggataatatgaagatttacaatcattcttacatttatatgccagccttctccatgaaaaccgggactgaaccgtccctgagggtatactacacattatcagatgtgggcgctaaccagacagtcctgtttgcgaatccaaattttctgcggagtattggaaagttttggaagagcagaggcatacacgcaaagaggttgtcgaccggtctgttcctggtcagcgcagccctgggcctctgcgaagaagtagcaatctacggcttttggcctttctcggtgaacatgcatgagcaaccgatatctcaccactattacgacaacgtgctgccctttagcggctttcacgctatgccagaggagtttctgcagttatggtacctgcacaagattggcgcactgcggatgcaactcgacccatgtgaggatacctctttacaaccaactagctag

SEQ ID NO: 134535 - DNA, 1071 bp, Artificial Sequence
  derived and/or modified sequence
atgagtccatgcggaagggctaggagacaaactagccgcggagccatggcggtgcttgcgtggaaatttccaaggacccgattaccaatgggtgcgagtgccctctgtgttgtggttctgtgttggctctacatttttcctgtgtatcgcctgcccaacgagaaggagatcgtgcagggagtgctgcaacagggtactgcatggaggaggaaccagaccgccgctagggctttcaggaagcagatggaggactgctgtgatcccgctcacctgtttgcaatgacaaagatgaatagccctatgggaaaaagtatgtggtacgatggtgagtttctctactcctttacaattgataactcaacatatagcctgttcccccaggccactcccttccagttgccccttaagaaatgcgcagtagtcggtaatggcggaattctcaagaaatcaggttgcggcaggcagattgacgaggccaatttcgttatgcggtgcaatctgccccctctctcatccgaatatacaaaagacgtgggctctaagtctcagctcgtgactgccaacccaagcatcattaggcaacgtttccagaatctcctctggagtaggaaaacctttgttgataacatgaagatctacaatcattcatacatctacatgcctgccttctcaatgaaaactgggaccgagcctagcctgcgcgtctattacacattgtctgatgtgggtgcgaaccaaacagtgcttttcgccaacccgaactttcttagatctatcggaaagttctggaagtccagaggcatacacgccaaacggcttagcactggcctctttctggtgtctgcagccctggggctgtgcgaagaggtcgcgatctacggcttctggcccttctctgttaatatgcacgagcagcccatcagccaccattattacgacaacgttctgccattcagtggatttcacgccatgcctgaagagtttctccagctctggtacctgcataagatcggcgcactgcggatgcaactggacccatgtgaagacactagtttacagcctacttcttag

SEQ ID NO: 134536 - DNA, 2106 bp, Artificial Sequence
  derived and/or modified sequence
ggggggggttgcctggcggcgcagcagcgcgggaggcggcgaagggcgcaggagcatcgctcggaggggacaaggggacgccacgggccacatgtttaggagggagccgagccttctcccggaccctcgccgagggcgaccgtgatgctgcagaaccggcgggagcgactcgccgccgccgctctctgcgcactcggagaccccagcgcccgccttctgcaggggaagcgaccatggccatagatcgtgacttcacccccagccacttcccctagaaagaaatccttggaaaagttgcatttgaaaaaatccttgcgctgacctttggggccgacggggccgaagaagcgtgcgtgcgtttgcaagtaagagaaccaaaggtgtgtgtgcatggggggctggcggtgggggaccctccgctgccacttcgcctagctttgtgctgaggccccggcccccgcccctgggacgccggggctgcgatgagcccctgcgggcgggcccggcgacaaacgtccagaggggccatggctgtactggcgtggaagttcccgcggacccggctgcccatgggagccagtgccctctgtgtcgtggtcctctgttggctctacatcttccccgtctaccggctgcccaacgagaaagagatcgtgcagggggtgctgcaacagggcacggcgtggaggaggaaccagaccgcggccagagcgttcaggaaacaaatggaagactgctgcgaccctgcccatctctttgctatgactaaaatgaattcccctatggggaagagcatgtggtatgacggggagtttttatactcattcaccattgacaattcaacttactctctcttcccacaggcaaccccattccagctgccattgaagaaatgcgcggtggtgggaaatggtgggattctgaagaagagtggctgtggccgtcaaatagatgaagcaaattttgtcatgcgatgcaatctccctcctttgtcaagtgaatacactaaggatgttggatccaaaagtcagttagtgacagctaatcccagcataattcggcaaaggtttcagaaccttctgtggtccagaaagacatttgtggacaacatgaaaatttataaccacagttacatctacatgcctgccttttctatgaagacaggaacagagccatctttgagggtttattatacactgtcagatgttggtgccaatcaaacagtgctgtttgccaaccccaactttctgcgtagcattggaaagttctggaaaagtagaggaatccatgccaagcgcctgtccacaggactttttctggtgagcgcagctctgggtctctgtgaagaggtggccatctatggcttctggcccttctctgtgaatatgcatgagcagcccatcagccaccactactatgacaacgtcttacccttttctggcttccatgccatgcccgaggaatttctccaactctggtatcttcataaaatcggtgcactgagaatgcagctggacccatgtgaagatacctcactccagcccacttcctaggaacaatggaagaagaaaggactgaaccagggtatttttgttaggttttctatgtgactccaagagggaatggtcaagttgtttcatgagtttgcatgggcccttggaaaaacaggaaaggagcaatgaagatccaagcaaaactttactttcagcgttggcttggaggacaaataagaaatgaaacatcctatgaaatactttatagcacatggcagatttgcaactagtaaaatgctggtgaaatgctgttggtaaagcacatggttcaaatctagaagatgcagttcaaaaacaagacagactcgagttgttagggctgaggaaccaatcaaggtagaacaaagaaaatgttggggtaaaagtgttgctgattgtcaacacaaactggcttaataatattaataagaacctgtcttattaagactggctttagaaccgtaggtttttttaaaaaattattatttatttttgccctctttggggaagtgggtgggtagatttaaaaaatcccttcctgagtaataaagatacaaaatgttactgctgataa

SEQ ID NO: 134537 - DNA, 1336 bp, Artificial Sequence
  derived and/or modified sequence
cagaggggccatggctgtactggcgtggaagttcccgcggacccggctgcccatgggagccagtgccctctgtgtcgtggtcctctgttggctctacatcttccccgtctaccggctgcccaacgagaaagagatcgtgcagggggtgctgcaacagggcacggcgtggaggaggaaccagaccgcggccagagcgttcaggaaacaaatggaagactgctgcgaccctgcccatctctttgctatgactaaaatgaattcccctatggggaagagcatgtggtatgacggggagtttttatactcattcaccattgacaattcaacttactctctcttcccacagatgcaatctccctcctttgtcaagtgaatacactaaggatgttggatccaaaagtcagttagtgacagctaatcccagcataattcggcaaaggtttcagaaccttctgtggtccagaaagacatttgtggacaacatgaaaatttataaccacagttacatctacatgcctgccttttctatgaagacaggaacagagccatctttgagggtttattatacactgtcagatgttggtgccaatcaaacagtgctgtttgccaaccccaactttctgcgtagcattggaaagttctggaaaagtagaggaatccatgccaagcgcctgtccacaggactttttctggtgagcgcagctctgggtctctgtgaagaggtggccatctatggcttctggcccttctctgtgaatatgcatgagcagcccatcagccaccactactatgacaacgtcttacccttttctggcttccatgccatgcccgaggaatttctccaactctggtatcttcataaaatcggtgcactgagaatgcagctggacccatgtgaagatacctcactccagcccacttcctaggaacaatggaagaagaaaggactgaaccagggtatttttgttaggttttctatgtgactccaagagggaatggtcaagttgtttcatgagtttgcatgggcccttggaaaaacaggaaaggagcaatgaagatccaagcaaaactttactttcagcgttggcttggaggacaaataagaaatgaaacatcctatgaaatactttatagcacatggcagatttgcaactagtaaaatgctggtgaaatgctgttggtaaagcacatggttcaaatctagaagatgcagttcaaaaacaagacagactcgagttgttagggctgaggaaccaatcaaggtagaacaaagaaaatgttggggtaaaagtgttgctgattgtcaacacaaactggcttaataatattaataaga

SEQ ID NO: 134538 - protein, 335 aa, Artificial Sequence
  derived and/or modified sequence
MDPKGLLSLTFVLFLSLAFGASYGTGGRMMNCPKILRQLGSKVLLPLTYERINKSMNKSIHIVVTMAKSLENSVENKIVSLDPSEAGPPRYLGDRYKFYLENLTLGIRESRKEDEGWYLMTLEKNVSVQRFCLQLRLYEQVSTPEIKVLNKTQENGTCTLILGCTVEKGDHVAYSWSEKAGTHPLNPANSSHLLSLTLGPQHADNIYICTVSNPISNNSQTFSPWPGCRTDPSETKPWAVYAGLLGGVIMILIMVVILQLRRRGKTNHYQTTVEKKSLTIYAQVQKPGPLQKKLDSFPAQDPCTTIYVAATEPVPESVQETNSITVYASVTLPES

SEQ ID NO: 134539 - protein, 298 aa, Artificial Sequence
  derived and/or modified sequence
MDPKGLLSLTFVLFLSLAFGASYGTGGRMMNCPKILRQLGSKVLLPLTYERINKSMNKSIHIVVTMAKSLENSVENKIVSLDPSEAGPPRYLGDRYKFYLENLTLGIRESRKEDEGWYLMTLEKNVSVQRFCLQLRLYEQVSTPEIKVLNKTQENGTCTLILGCTVEKGDHVAYSWSEKAGTHPLNPANSSHLLSLTLGPQHADNIYICTVSNPISNNSQTFSPWPGCRTDPSETKPWAVYAGLLGGVIMILIMVVILQLRRRGKTNHYQTTVEKKSLTIYAQVQKPGDSHHQTSDLF

SEQ ID NO: 134540 - protein, 269 aa, Artificial Sequence
  derived and/or modified sequence
MDPKGLLSLTFVLFLSLAFGASYGTGGRMMNCPKILRQLGSKVLLPLTYERINKSMNKSIHIVVTMAKSLENSVENKIVSLDPSEAGPPRYLGDRYKFYLENLTLGIRESRKEDEGWYLMTLEKNVSVQRFCLQLRLYEQVSTPEIKVLNKTQENGTCTLILGCTVEKGDHVAYSWSEKAGTHPLNPANSSHLLSLTLGPQHADNIYICTVSNPISNNSQTFSPWPGCRTDPSETKPWAVYAGLLGGVIMILIMVVILQLRRRASSEET

SEQ ID NO: 134541 - DNA, 1008 bp, Artificial Sequence
  derived and/or modified sequence
atggacccaaaggggttgctgagcctcacatttgtcctcttcttatcactggccttcggggcatcttacggcacaggagggagaatgatgaactgtccaaaaattcttcgccaattagggtctaaggtgctactcccactcacctacgaacggatcaacaagtccatgaacaagagcatacacatcgttgtaaccatggcaaagtccctcgagaactctgttgaaaacaaaattgtttctctggacccatctgaagctggacctcctaggtatctgggtgatcggtataagttctaccttgaaaacttgaccctaggcatcagggaatctagaaaagaggatgaaggctggtatttgatgactcttgagaagaacgtgtcagtccagcgattttgcctgcagctgcgactgtatgaacaggtttccacgcccgagatcaaggtgctcaacaaaactcaagaaaatgggacatgcactctcatcctgggatgtacagtggagaaaggggatcacgtagcctattcatggagtgagaaagccgggacccatccgttaaatcctgccaattcttcacacctgttgtcactcaccttagggcctcaacacgccgataatatttatatctgtacggtgtctaatccaattagtaacaacagccagacgttcagcccctggccagggtgccgcacagaccccagcgagacaaaaccttgggctgtctacgctggcctcctgggcggcgtgattatgattctcattatggtggttattctgcagctgagacggaggggcaaaaccaatcactatcagactaccgtggagaagaagagtctgaccatttacgcccaggtgcagaagccgggccctctgcagaaaaaattggatagtttccccgcccaggatccctgcactacaatatacgtcgccgccacagaaccagttccagaatctgtccaggagactaactcgatcactgtgtacgctagcgtaaccctgcctgagtcttag

SEQ ID NO: 134542 - DNA, 897 bp, Artificial Sequence
  derived and/or modified sequence
atggatcctaaaggcctcctcagtctaactttcgtactgtttctctctttggcattcggcgcatcctacggaactggaggtagaatgatgaactgccctaaaattcttagacagctgggtagcaaagtgcttcttccactaacttatgagcgtataaataaatccatgaataaatccatccacatcgtggtgaccatggccaaatccttagagaactcagtggaaaacaagatcgtgtccttggacccaagcgaagccggtccccccaggtacctcggggacaggtacaagttctatctcgaaaacttaacactgggtatccgggagtcgcggaaggaagacgaggggtggtacctgatgacacttgaaaagaacgtcagtgtacagcgtttttgcctgcagctgagattgtatgagcaggtgtccaccccagagattaaggtgttgaataaaacgcaggagaacggaacatgtaccctcatccttggctgtaccgtggaaaagggcgatcacgttgcttactcctggtccgaaaaggcaggtacccatccactcaaccctgctaactcctcacatctcctgagcctaaccctgggccctcagcacgcagacaacatctacatatgtacggtgtccaatcctatcagtaacaattctcagaccttttccccatggccagggtgtaggactgatccttctgaaactaagccttgggctgtatatgccgggctcctcggtggtgtcataatgatccttatcatggtcgttattctgcagcttagacgcagaggaaagaccaatcactaccagacaacagtcgagaaaaaatccttgaccatttacgctcaggtgcagaagcccggtgattcgcaccatcagactagtgatctgttttag

SEQ ID NO: 134543 - DNA, 810 bp, Artificial Sequence
  derived and/or modified sequence
atggaccctaaaggcctactgagcctgaccttcgtattgtttcttagcctggccttcggggcctcgtacggtactgggggcaggatgatgaattgtcccaagatcctgcgtcagctgggcagcaaggtgctcttgcctctgacctatgagagaatcaacaaatctatgaataaaagcattcacattgtggttaccatggccaagagtttggagaacagtgtagagaataagatcgtatctctcgatccatctgaagccggacctcctcggtacttgggcgataggtataaattctatctcgaaaaccttactctcgggattcgcgagagtcgcaaagaggacgagggctggtatctaatgaccctggaaaagaatgtcagtgtgcagcgtttctgtctgcagctgcggctgtacgaacaggtgagcactcctgagatcaaggtcttgaacaagacccaggagaacgggacatgtaccttgatcctcggctgcaccgtggagaaaggcgaccacgtggcatactcttggtcggaaaaagcaggaacacacccgcttaatccggccaactcatcacatctgcttagccttacattgggaccgcagcacgccgataacatatatatctgcaccgtgagcaatcctatctcaaacaactctcagacattcagcccatggccaggttgccgtaccgatcctagtgaaacgaaaccatgggccgtttacgcagggctgctcgggggagtgattatgatactgattatggtcgtcatactgcagctgcgtcggagggcctcttcggaagagacttag

SEQ ID NO: 134544 - DNA, 1008 bp, Artificial Sequence
  derived and/or modified sequence
atggaccccaagggcctgctgagcctgacctttgtgctcttcctgagcctggcctttggagccagctatggaactggaggccgcatgatgaactgccccaagatcctgcggcagctgggcagcaaggtgctgctgcccctgacctatgagcgcatcaacaagtccatgaacaagagcatccacatcgtggtgaccatggccaagagcctggagaacagcgtggagaacaagatcgtgtccctggaccccagcgaggccggccccccacgctacctgggggaccgctacaagttctacctggagaacctgaccctgggcatccgggagagcaggaaagaagatgagggctggtacctgatgaccctggagaagaatgtgtctgtgcagcgcttctgcctgcagctgcggctgtatgagcaggtgtccaccccagagatcaaggtgctgaacaagacccaggagaatggcacctgcaccctcatcctgggctgcaccgtggagaagggggaccacgtggcctacagctggagcgagaaggccggcacccaccccctgaacccagccaacagcagccacctgctgagcctgaccctgggcccccagcacgccgacaacatctacatctgcaccgtgagcaaccccatcagcaacaacagccagaccttcagcccctggccaggctgcaggacagaccccagcgagaccaagccctgggccgtgtatgccggcctgctgggcggcgtcatcatgatcctgatcatggtggtgatcctgcagctgcggcggcggggcaagaccaaccactaccagaccaccgtggagaagaagagcctgaccatctatgcccaggtgcagaagccaggccccctgcagaagaagctggacagcttccctgcccaggacccctgcaccaccatctacgtggccgccacagagcctgtgcctgagagcgtgcaggagaccaacagcatcaccgtgtatgcctctgtgaccctgcctgagagctag

SEQ ID NO: 134545 - DNA, 897 bp, Artificial Sequence
  derived and/or modified sequence
atggaccccaagggcctgctgagcctgacctttgtgctcttcctgagcctggcctttggagccagctatggaactggaggccgcatgatgaactgccccaagatcctgcggcagctgggcagcaaggtgctgctgcccctgacctatgagcgcatcaacaagtccatgaacaagagcatccacatcgtggtgaccatggccaagagcctggagaacagcgtggagaacaagatcgtgtccctggaccccagcgaggccggccccccacgctacctgggggaccgctacaagttctacctggagaacctgaccctgggcatccgggagagcaggaaagaagatgagggctggtacctgatgaccctggagaagaatgtgtctgtgcagcgcttctgcctgcagctgcggctgtatgagcaggtgtccaccccagagatcaaggtgctgaacaagacccaggagaatggcacctgcaccctcatcctgggctgcaccgtggagaagggggaccacgtggcctacagctggagcgagaaggccggcacccaccccctgaacccagccaacagcagccacctgctgagcctgaccctgggcccccagcacgccgacaacatctacatctgcaccgtgagcaaccccatcagcaacaacagccagaccttcagcccctggccaggctgcaggacagaccccagcgagaccaagccctgggccgtgtatgccggcctgctgggcggcgtcatcatgatcctgatcatggtggtgatcctgcagctgcggcggcggggcaagaccaaccactaccagaccaccgtggagaagaagagcctgaccatctatgcccaggtgcagaagccaggggacagccaccaccagaccagtgacctcttctag

SEQ ID NO: 134546 - DNA, 810 bp, Artificial Sequence
  derived and/or modified sequence
atggaccccaagggcctgctgagcctgacctttgtgctcttcctgagcctggcctttggagccagctatggaactggaggccgcatgatgaactgccccaagatcctgcggcagctgggcagcaaggtgctgctgcccctgacctatgagcgcatcaacaagtccatgaacaagagcatccacatcgtggtgaccatggccaagagcctggagaacagcgtggagaacaagatcgtgtccctggaccccagcgaggccggccccccacgctacctgggggaccgctacaagttctacctggagaacctgaccctgggcatccgggagagcaggaaagaagatgagggctggtacctgatgaccctggagaagaatgtgtctgtgcagcgcttctgcctgcagctgcggctgtatgagcaggtgtccaccccagagatcaaggtgctgaacaagacccaggagaatggcacctgcaccctcatcctgggctgcaccgtggagaagggggaccacgtggcctacagctggagcgagaaggccggcacccaccccctgaacccagccaacagcagccacctgctgagcctgaccctgggcccccagcacgccgacaacatctacatctgcaccgtgagcaaccccatcagcaacaacagccagaccttcagcccctggccaggctgcaggacagaccccagcgagaccaagccctgggccgtgtatgccggcctgctgggcggcgtcatcatgatcctgatcatggtggtgatcctgcagctgcggcggcgggccagcagcgaggagacctag

SEQ ID NO: 134547 - DNA, 1008 bp, Artificial Sequence
  derived and/or modified sequence
atggaccccaagggcctgctgagcctgaccttcgtgctgttcctgtccttggcatttggcgcaagctatggcactggggggcgcatgatgaattgcccgaagatcctccgccagctgggcagcaaggtcctcttgcctctcacctacgaacgaatcaacaagtcgatgaacaaatccatccatattgttgtcaccatggccaagtctctggagaattccgttgagaataagatcgtcagtcttgatccctccgaggcagggcctcctagatatctgggcgatagatacaagttttatctcgagaatcttacattgggcatcagagagtcccggaaggaagatgaaggatggtaccttatgacgcttgagaagaacgtatcagttcagcgcttctgtctccagctgcgactgtatgaacaggtgtccacaccagagattaaggtgctgaacaagacccaggagaatgggacatgtacccttatcctcgggtgtacagtggagaaaggcgaccatgtggcctactcctggtcagagaaggccgggactcaccccctcaaccctgccaactcttcccacctgctgtccctcactctgggcccccagcacgccgataatatctatatctgcactgtttcgaatcccatttctaataactcacagacgttcagcccttggccgggctgcagaaccgatccatcggagactaaaccctgggcagtttatgcagggcttctggggggtgtcattatgatcctcatcatggtagtaatactgcagctgagaaggagaggcaagactaaccattatcagactaccgttgagaagaagagtcttaccatttatgcacaagtgcagaaacccggacccctccaaaagaagctggattctttccctgcccaggatccatgtacaaccatctatgtggccgccaccgaacctgtgcccgaatcagtacaggaaacaaacagtatcactgtttatgcgtccgttacactgccagagtcttag

SEQ ID NO: 134548 - DNA, 897 bp, Artificial Sequence
  derived and/or modified sequence
atggaccccaagggcctgctgagcctgaccttcgtgctgttcctgagccttgctttcggggccagctatggaacggggggaagaatgatgaactgccctaagatactcagacagttgggctctaaggttctgctccctctgacttatgaaagaatcaataagtctatgaataagtccatacacatcgtcgtgacaatggcgaagtctctggagaattccgtcgagaacaaaatagttagtctcgaccccagtgaggccgggcctccccggtacctgggagaccgctacaaattctacttagagaatctgacacttggcatcagagagagccggaaagaagacgaaggatggtatctaatgacactggaaaaaaatgtgtcagtccaaagattttgcttacagcttcggctttacgagcaggttagtactcctgaaatcaaagtactgaacaagactcaggaaaatgggacgtgtacactcattctcgggtgcaccgtcgagaagggggaccacgtcgcttatagttggagtgaaaaggccggtactcaccccctcaaccccgctaacagctcccacctactgtccctgacgctcggcccccaacatgcagataacatttacatttgtaccgtgtccaaccctatatcaaacaactctcagactttcagtccctggcctggctgcagaacagaccctagcgaaactaagccgtgggctgtctatgccggtttgctggggggcgtcataatgatcctcatcatggtcgtgattctacaacttcggcggcgggggaagactaaccattatcagaccactgtggagaagaaaagcctgacaatctacgctcaagtgcagaagcccggcgacagccatcaccagacgagtgatttattttag

SEQ ID NO: 134549 - DNA, 810 bp, Artificial Sequence
  derived and/or modified sequence
atggaccccaagggcctgctgagcctgaccttcgtgctgttcctgtccttggccttcggtgcctcatacgggaccggggggcggatgatgaattgccccaaaatacttcgacaattgggctccaaggtgttgttgccactgacctatgaacgaattaataagtcaatgaacaagtctatccatatcgtcgttaccatggctaaaagcctcgagaacagcgtggagaacaagattgtgtcactggaccccagtgaggcagggcccccaaggtacctgggcgatagatataagttctacctcgagaacctcacgttagggattagagagagcagaaaggaagacgagggatggtacctgatgactcttgagaagaacgtatctgtgcagagattttgtttgcagctgagactgtatgaacaggttagcactcctgaaatcaaggtcttaaataaaactcaggaaaacggtacctgtacattgatcttagggtgtacggtggaaaagggggatcacgtcgcatactcttggagcgaaaaggccggtacgcatcccctaaacccagccaactcttctcatttactgtcactcacacttggaccccaacatgcagataacatatatatttgtaccgtatctaacccaatctccaacaactcccagaccttctcgccatggcccggatgcagaaccgatccttcagagacaaagccatgggctgtgtacgccggcctgttaggaggggtgattatgatactgatcatggtggtcattctgcagctgcggcggcgagcttcttctgaggagacatag

SEQ ID NO: 134550 - DNA, 1008 bp, Artificial Sequence
  derived and/or modified sequence
atggaccctaaagggctactctcactgacttttgtgctgttcttaagcctggccttcggagcaagttacggcaccgggggtagaatgatgaattgtccaaaaattctgagacagctggggtccaaggtacttctacccctgacatacgaacgcatcaacaagagcatgaataagagcatccatatcgtcgtgacaatggcaaaatccctcgagaattccgtggaaaataaaattgttagtttagacccatcagaagcgggacctcctcggtacctgggggatcgttataagttctacttggaaaacctcactttgggtattcgggagagcagaaaagaggacgaagggtggtacctgatgacactggaaaagaacgtgagtgtacagagattctgcctgcaactgagactctatgagcaagtaagtacacctgagataaaggtactgaacaagacacaagagaatggaacctgcaccctgattctgggatgtaccgtcgagaagggagaccatgtagcttattcatggtctgagaaagctggaacacatcccttgaatcctgcaaattctagccatttgttatcactgacactgggtccgcagcacgcagacaatatctatatatgcactgtttctaacccgatctctaacaattctcagaccttttccccatggccagggtgcagaaccgatcccagcgagactaagccttgggcagtatatgctggcctccttgggggagtcattatgattttgatcatggtcgtgatcctgcagctccgtagaagagggaaaacaaaccattatcagactaccgtagaaaaaaaatctctaaccatctacgcccaggtgcagaagccaggacctcttcaaaagaaactggatagtttcccagcccaggatccatgtactacgatctacgtggctgctacagagcctgtcccagagagtgttcaggaaaccaattcgatcacagtctatgcttctgttaccctgcctgagtcctag

SEQ ID NO: 134551 - DNA, 897 bp, Artificial Sequence
  derived and/or modified sequence
atggaccccaaggggctgctgagcctgacttttgtgctgttcctctcgcttgcattcggagctagctacgggaccggaggacggatgatgaactgtccaaagattctacggcaactaggaagcaaggttctgctgccgctgacttatgaaaggattaacaagtccatgaacaagagcatccacatagtggtgacgatggcgaagtcactggagaatagcgtggagaataagatcgtctccctcgatcctagtgaagctggtcccccacggtacttgggcgaccgatacaagttctatctcgaaaacttaaccctggggatcagagagtccagaaaggaagacgagggctggtaccttatgactctggagaaaaatgtgtcagtgcagcgcttttgccttcagttaaggctttacgagcaagtttccacacccgagataaaagttctgaataagactcaggagaacggaacttgtacgttgatccttggatgcaccgtggagaaaggtgaccacgttgcctacagttggtccgaaaaagccggaacccatcctctcaaccctgcaaactcttctcacttgctgagtctaaccctgggcccacagcacgccgacaatatctatatctgtaccgttagtaatcctataagcaataattcccagaccttctcaccttggccaggctgtcgcaccgatccgtccgaaacaaagccatgggcggtatacgcgggacttctgggtggcgttataatgatccttatcatggttgtcatcctgcaattgcggcgacgagggaaaaccaaccattatcaaacaaccgtggaaaaaaagtccctcaccatttacgcccaggttcagaaacctggcgacagtcaccaccagacttcagacttgttttag

SEQ ID NO: 134552 - DNA, 810 bp, Artificial Sequence
  derived and/or modified sequence
atggatccaaagggcctgttaagcttaacgttcgtgttgttcctgtctctggcttttggggcttcctatggcacagggggaaggatgatgaattgccccaagattctgcgacagctgggatccaaggtcctgctcccactaacatacgaacgcataaacaagtcaatgaacaaatcgatccacattgtcgtcaccatggctaagagcctggaaaattcagtggagaataagattgtatcactcgatccgtcagaagctggacctcccagatatctcggtgatagatataagttttacctggagaatcttactctggggattcgcgagtctaggaaagaagatgaaggctggtatctaatgacactcgagaagaatgttagcgtacagcggttctgtctgcagctccggttgtacgaacaggtctcgacccctgagattaaagtcctgaacaagacacaggagaatggcacatgcacacttattcttggatgcactgtcgaaaagggtgatcacgtagcgtactcatggtccgaaaaagcgggaacccatcctctcaaccccgcaaacagcagccacctccttagtctgactctgggtcctcagcacgcagacaacatctatatctgtaccgtgtctaaccccatctcaaacaattcccagactttctctccctggcccggttgccgtaccgacccttccgagactaagccctgggctgtatacgcgggactcctaggaggggttatcatgatcttaattatggttgtaatactccagttgcggaggagggccagtagcgaggagacatag

SEQ ID NO: 134553 - DNA, 4006 bp, Artificial Sequence
  derived and/or modified sequence
ggagacagctaaggaaagaagctggggcgcatgtttctgcccaaagccgggttttggccgaggtgactacacaccccctttcctggctcccataggctaagtgcctggcttcttgagaagcctgcttcttgagaacaaaaaagtgatttaaagcctcatgggagatgagcaatcctcaagacacaagcagaaaaagtcccagtgatacaggaagcgggttcaggaacctgctggttcctgatacataaatcagacagcctctgctgcatgacacgaagcttgcttctgcctggcatctgtgagcagctgccaggctccggccaggatcccttccttctcctcattggctgatggatcccaaggggctcctctccttgaccttcgtgctgtttctctccctggcttttggggcaagctacggaacaggtgggcgcatgatgaactgcccaaagattctccggcagttgggaagcaaagtgctgctgcccctgacatatgaaaggataaataagagcatgaacaaaagcatccacattgtcgtcacaatggcaaaatcactggagaacagtgtcgagaacaaaatagtgtctcttgatccatccgaagcaggccctccacgttatctaggagatcgctacaagttttatctggagaatctcaccctggggatacgggaaagcaggaaggaggatgagggatggtaccttatgaccctggagaaaaatgtttcagttcagcgcttttgcctgcagttgaggctttatgagcaggtctccactccagaaattaaagttttaaacaagacccaggagaacgggacctgcaccttgatactgggctgcacagtggagaagggggaccatgtggcttacagctggagtgaaaaggcgggcacccacccactgaacccagccaacagctcccacctcctgtccctcaccctcggcccccagcatgctgacaatatctacatctgcaccgtgagcaaccctatcagcaacaattcccagaccttcagcccgtggcccggatgcaggacagacccctcagaaacaaaaccatgggcagtgtatgctgggctgttagggggtgtcatcatgattctcatcatggtggtaatactacagttgagaagaagaggtaaaacgaaccattaccagacaacagtggaaaaaaaaagccttacgatctatgcccaagtccagaaaccaggtcctcttcagaagaaacttgactccttcccagctcaggacccttgcaccaccatatatgttgctgccacagagcctgtcccagagtctgtccaggaaacaaattccatcacagtctatgctagtgtgacacttccagagagctgacaccagagaccaacaaagggactttctgaaggaaaatggaaaaaccaaaatgaacactgaacttggccacaggccccaagtttcctctggcagacatgctgcacgtctgtacccttctcagatcaactccctggtgatgtttcttccacatacatctgtgaaatgaacaaggaagtgaggcttcccaagaatttagcttgctgtgcagtggctgcaggcgcagaacagagcgttacttgataacagcgttccatctttgtgttgtagcagatgaaatggacagtaatgtgagttcagactttgggcatcttgctcttggctggaactggataataaaaatcagactgaaagccaggacatctgagtacctatctcacacactggaccaccagtcacaaagtctggaaaagtttacattttggctatctttactttgttctgggagctgatcatgataacctgcagacctgatcaagcctctgtgcctcagtttctctctcaggataaagagtgaatagaggctgaagggtgaatttcttattatacataaaacactctgatattattgtataaaggaagctaagaatattattttatttgcaaaacccagaagctaaaaagtcaataaacagaaagaatgattttgagatctctgagttttgaacagtggactggaaaccatgtaagagccttaaaagtacagttctgtgcaaatggcattcagttttaaagaaaaacgtagcaaatgtttgatggtgctgttacaaaggagcttggaatactcagaggaacttgtcccatggtgatttttcacttctcaaaatgatgtttaaatcccagttctctgttgattcccttgaacaacaaacctggaacctcagctaagactctctgtgaccagattctgaacctcttatatccagggcttcaaggggtattgcaggtcaaggtctttcctaggcactttctactccctgcatacctctcctcacactaaatttatcctctagtagaaaattaagttattttggtctaacagcttcaaatctttgaatgctcaataacttattttgcaagctgcaggcagaaagagactttttaagtaaagtcctttgttttttcctattctctgcttttagacaggctgtcctcaatttaagccctgctttttcttattgtttcttatataaacttggtaagtactgtaagaaacagccactatcataccattgcataataaggagcaccaacttcccagctcaaaactcaggtccttattgccttgtatcttacctcctctatgaggtcaattcacattgtaagcctgttgcttagtgcatctcgtttcctggtaccagcttctttaatagagttcttagttgcaatcaacagaagctggctttggcttttttatgtagaaaaggaacctattgaaaagatactgattggttccaataactgctagaagtttctgcaaaaccatgctttgaaagtgagcaggaaaagaagagactaggctgtggctgggagcacagccaaaattacaaaaccagcccagggatgatgatcctgttcatgcacagccactgtccccagcactaggcacagactctaccactgcctcactgtctctgctggacttggaaacttgatattactgttactgctgcactgtctgccatgaaaatgaattctccagggtcccttcttcatcctttcatctctagcttataattcaaagtctgggattgagtggccaatcctaggtcacatgtccatgtcctatctccaaggggggctgggaattgaatatctggcattttccactttcacttcttatgaattaaggaattctacaaataatagaagtgggattcaggtggtaggcagacaaaaaagcctcacaattatccactacgccacccttgtataaccttaccctcattcactgtctactctcaaaactgtggagctactaatgaagatttgtaaacccgggcttatgagcacccattcctttactacaactcagattgctctagaagctcagttcccagcacttggatttttccagtagctgaattctacctgaaggaagggcagaaacaaagggtgaagaagaggctatcacttccaagtatcctgcacccctgggctcaagacctcactggggagggagtcttttgggccacccaccaaacagcactggcattatgcctctcaccctagaccatggttacacgtggtaaaacaaccccttctggtgatacattcacaactctctagtttcccccaaatggcactatggggagcgggagcttgccttttcctcagacttaaaacaataagttttccccgtgtttcccctctaatgctgttttcttttgaccaagcatgtctgaattctagagaagtcaggaggaacacacccattctcggtttgaagggactgatgttctgaagtacaactgggcacagtcccaggctcttcaggacgcttcctccattcacacagcggggatgtgattgttacagcgggtggtgtgtgctggctgagaagccactgtgaattgattcttcttctgaagtttatgtttctactttttggaaatgaataaattacagccagtccatcaaggaaattgcaa

SEQ ID NO: 134554 - DNA, 1243 bp, Artificial Sequence
  derived and/or modified sequence
acagctaaggaaagaagctggggcgcatgtttctgcccaaagccgggttttggccgaggtgactacacaccccctttcctggctcccataggctaagtgcctggcttcttgagaagcctgcttcttgagaacaaaaaagtgatttaaagcctcatgggagatgagcaatcctcaagacacaagcagaaaaagtcccagtgatacaggaagcgggttcaggaacctgctggttcctgatacataaatcagacagcctctgctgcatgacacgaagcttgcttctgcctggcatctgtgagcagctgccaggctccggccaggatcccttccttctcctcattggctgatggatcccaaggggctcctctccttgaccttcgtgctgtttctctccctggcttttggggcaagctacggaacaggtgggcgcatgatgaactgcccaaagattctccggcagttgggaagcaaagtgctgctgcccctgacatatgaaaggataaataagagcatgaacaaaagcatccacattgtcgtcacaatggcaaaatcactggagaacagtgtcgagaacaaaatagtgtctcttgatccatccgaagcaggccctccacgttatctaggagatcgctacaagttttatctggagaatctcaccctggggatacgggaaagcaggaaggaggatgagggatggtaccttatgaccctggagaaaaatgtttcagttcagcgcttttgcctgcagttgaggctttatgagcaggtctccactccagaaattaaagttttaaacaagacccaggagaacgggacctgcaccttgatactgggctgcacagtggagaagggggaccatgtggcttacagctggagtgaaaaggcgggcacccacccactgaacccagccaacagctcccacctcctgtccctcaccctcggcccccagcatgctgacaatatctacatctgcaccgtgagcaaccctatcagcaacaattcccagaccttcagcccgtggcccggatgcaggacagacccctcagaaacaaaaccatgggcagtgtatgctgggctgttagggggtgtcatcatgattctcatcatggtggtaatactacagttgagaagaagaggtaaaacgaaccattaccagacaacagtggaaaaaaaaagccttacgatctatgcccaagtccagaaaccaggtgacagtcatcatcagacttcggacttattctaa

SEQ ID NO: 134555 - DNA, 1021 bp, Artificial Sequence
  derived and/or modified sequence
gaagcttgcttctgcctggcatctgtgagcagctgccaggctccggccaggatcccttccttctcctcattggctgatggatcccaaggggctcctctccttgaccttcgtgctgtttctctccctggcttttggggcaagctacggaacaggtgggcgcatgatgaactgcccaaagattctccggcagttgggaagcaaagtgctgctgcccctgacatatgaaaggataaataagagcatgaacaaaagcatccacattgtcgtcacaatggcaaaatcactggagaacagtgtcgagaacaaaatagtgtctcttgatccatccgaagcaggccctccacgttatctaggagatcgctacaagttttatctggagaatctcaccctggggatacgggaaagcaggaaggaggatgagggatggtaccttatgaccctggagaaaaatgtttcagttcagcgcttttgcctgcagttgaggctttatgagcaggtctccactccagaaattaaagttttaaacaagacccaggagaacgggacctgcaccttgatactgggctgcacagtggagaagggggaccatgtggcttacagctggagtgaaaaggcgggcacccacccactgaacccagccaacagctcccacctcctgtccctcaccctcggcccccagcatgctgacaatatctacatctgcaccgtgagcaaccctatcagcaacaattcccagaccttcagcccgtggcccggatgcaggacagacccctcagaaacaaaaccatgggcagtgtatgctgggctgttagggggtgtcatcatgattctcatcatggtggtaatactacagttgagaagaagagcctcttcagaagaaacttgactccttcccagctcaggacccttgcaccaccatatatgttgctgccacagagcctgtcccagagtctgtccaggaaacaaattccatcacagtctatgctagtgtgacacttccagagagctgacaccagagacc

SEQ ID NO: 134556 - DNA, 1008 bp, Artificial Sequence
  derived and/or modified sequence
atggaccccaagggcctgctgagcctgaccttcgtgctgttcctgagcctggccttcggcgccagctacggcaccggcggcagaatgatgaactgccccaagatcctgagacagctgggcagcaaggtgctgctgcccctgacctacgagagaatcaacaagagcatgaacaagagcatccacatcgtggtgaccatggccaagagcctggagaacagcgtggagaacaagatcgtgagcctggaccccagcgaggccggcccccccagatacctgggcgacagatacaagttctacctggagaacctgaccctgggcatcagagagagcagaaaggaggacgagggctggtacctgatgaccctggagaagaacgtgagcgtgcagagattctgcctgcagctgagactgtacgagcaggtgagcacccccgagatcaaggtgctgaacaagacccaggagaacggcacctgcaccctgatcctgggctgcaccgtggagaagggcgaccacgtggcctacagctggagcgagaaggccggcacccaccccctgaaccccgccaacagcagccacctgctgagcctgaccctgggcccccagcacgccgacaacatctacatctgcaccgtgagcaaccccatcagcaacaacagccagaccttcagcccctggcccggctgcagaaccgaccccagcgagaccaagccctgggccgtgtacgccggcctgctgggcggcgtgatcatgatcctgatcatggtggtgatcctgcagctgagaagaagaggcaagaccaaccactaccagaccaccgtggagaagaagagcctgaccatctacgcccaggtgcagaagcccggccccctgcagaagaagctggacagcttccccgcccaggacccctgcaccaccatctacgtggccgccaccgagcccgtgcccgagagcgtgcaggagaccaacagcatcaccgtgtacgccagcgtgaccctgcccgagagctag

SEQ ID NO: 134557 - DNA, 897 bp, Artificial Sequence
  derived and/or modified sequence
atggaccccaagggcctgctgagcctgaccttcgtgctgttcctgagcctggccttcggcgccagctacggcaccggcggcagaatgatgaactgccccaagatcctgagacagctgggcagcaaggtgctgctgcccctgacctacgagagaatcaacaagagcatgaacaagagcatccacatcgtggtgaccatggccaagagcctggagaacagcgtggagaacaagatcgtgagcctggaccccagcgaggccggcccccccagatacctgggcgacagatacaagttctacctggagaacctgaccctgggcatcagagagagcagaaaggaggacgagggctggtacctgatgaccctggagaagaacgtgagcgtgcagagattctgcctgcagctgagactgtacgagcaggtgagcacccccgagatcaaggtgctgaacaagacccaggagaacggcacctgcaccctgatcctgggctgcaccgtggagaagggcgaccacgtggcctacagctggagcgagaaggccggcacccaccccctgaaccccgccaacagcagccacctgctgagcctgaccctgggcccccagcacgccgacaacatctacatctgcaccgtgagcaaccccatcagcaacaacagccagaccttcagcccctggcccggctgcagaaccgaccccagcgagaccaagccctgggccgtgtacgccggcctgctgggcggcgtgatcatgatcctgatcatggtggtgatcctgcagctgagaagaagaggcaagaccaaccactaccagaccaccgtggagaagaagagcctgaccatctacgcccaggtgcagaagcccggcgacagccaccaccagaccagcgacctgttctag

SEQ ID NO: 134558 - DNA, 810 bp, Artificial Sequence
  derived and/or modified sequence
atggaccccaagggcctgctgagcctgaccttcgtgctgttcctgagcctggccttcggcgccagctacggcaccggcggcagaatgatgaactgccccaagatcctgagacagctgggcagcaaggtgctgctgcccctgacctacgagagaatcaacaagagcatgaacaagagcatccacatcgtggtgaccatggccaagagcctggagaacagcgtggagaacaagatcgtgagcctggaccccagcgaggccggcccccccagatacctgggcgacagatacaagttctacctggagaacctgaccctgggcatcagagagagcagaaaggaggacgagggctggtacctgatgaccctggagaagaacgtgagcgtgcagagattctgcctgcagctgagactgtacgagcaggtgagcacccccgagatcaaggtgctgaacaagacccaggagaacggcacctgcaccctgatcctgggctgcaccgtggagaagggcgaccacgtggcctacagctggagcgagaaggccggcacccaccccctgaaccccgccaacagcagccacctgctgagcctgaccctgggcccccagcacgccgacaacatctacatctgcaccgtgagcaaccccatcagcaacaacagccagaccttcagcccctggcccggctgcagaaccgaccccagcgagaccaagccctgggccgtgtacgccggcctgctgggcggcgtgatcatgatcctgatcatggtggtgatcctgcagctgagaagaagagccagcagcgaggagacctag

SEQ ID NO: 134559 - protein, 532 aa, Artificial Sequence
  derived and/or modified sequence
MEKSNETNGYLDSAQAGPAAGPGAPGTAAGRARRCAGFLRRQALVLLTVSGVLAGAGLGAALRGLSLSRTQVTYLAFPGEMLLRMLRMIILPLVVCSLVSGAASLDASCLGRLGGIAVAYFGLTTLSASALAVALAFIIKPGSGAQTLQSSDLGLEDSGPPPVPKETVDSFLDLARNLFPSNLVVAAFRTYATDYKVVTQNSSSGNVTHEKIPIGTEIEGMNILGLVLFALVLGVALKKLGSEGEDLIRFFNSLNEATMVLVSWIMWYVPVGIMFLVGSKIVEMKDIIVLVTSLGKYIFASILGHVIHGGIVLPLIYFVFTRKNPFRFLLGLLAPFATAFATCSSSATLPSMMKCIEENNGVDKRISRFILPIGATVNMDGAAIFQCVAAVFIAQLNNVELNAGQIFTILVTATASSVGAAGVPAGGVLTIAIILEAIGLPTHDLPLILAVDWIVDRTTTVVNVEGDALGAGILHHLNQKATKKGEQELAEVKVEAIPNCKSEEETSPLVTHQNPAGPVASAPELESKESVL

SEQ ID NO: 134560 - protein, 452 aa, Artificial Sequence
  derived and/or modified sequence
MLLRMLRMIILPLVVCSLVSGAASLDASCLGRLGGIAVAYFGLTTLSASALAVALAFIIKPGSGAQTLQSSDLGLEDSGPPPVPKETVDSFLDLARNLFPSNLVVAAFRTYATDYKVVTQNSSSGNVTHEKIPIGTEIEGMNILGLVLFALVLGVALKKLGSEGEDLIRFFNSLNEATMVLVSWIMWYVPVGIMFLVGSKIVEMKDIIVLVTSLGKYIFASILGHVIHGGIVLPLIYFVFTRKNPFRFLLGLLAPFATAFATCSSSATLPSMMKCIEENNGVDKRISRFILPIGATVNMDGAAIFQCVAAVFIAQLNNVELNAGQIFTILVTATASSVGAAGVPAGGVLTIAIILEAIGLPTHDLPLILAVDWIVDRTTTVVNVEGDALGAGILHHLNQKATKKGEQELAEVKVEAIPNCKSEEETSPLVTHQNPAGPVASAPELESKESVL

SEQ ID NO: 134561 - DNA, 1599 bp, Artificial Sequence
  derived and/or modified sequence
atggagaagtctaacgaaacgaacggctatttggatagcgcccaagctggccctgccgccggcccaggagcccccggcaccgctgccggaagggccagacgctgcgcaggattcctgcgaaggcaagccctggtgttacttactgtttctggcgtgttggcaggtgcaggcttgggggccgccctcagaggtctgtcgctctccaggacacaggtcacatacctcgcctttcccggggaaatgttactgcggatgctaagaatgatcattcttcctcttgttgtgtgttcactagtgtctggggcagccagtttggatgcgtcctgtcttgggagactcggtgggattgcagttgcgtacttcggcctcaccacactgagtgcatccgccctcgccgtggccctcgcttttatcatcaagcccggctctggcgctcagaccctgcagagtagcgacctgggattggaggactccggtccgccgccagtgcccaaagaaacagtggactctttccttgacttggcccggaatctttttccatccaatctggtcgttgccgccttccgaacctacgctactgattataaggtggtgacacagaactccagtagcggcaatgtgactcatgaaaagattcccataggcaccgagatcgaaggaatgaatattttaggattggtcctcttcgccctggtgttaggcgtcgccctgaagaagctggggagcgagggggaagacttaataaggttctttaacagcctgaacgaagcaactatggtgctcgtctcatggataatgtggtacgtccccgtaggtatcatgttcctcgtggggtcaaaaatagtagaaatgaaagacatcattgtgttagtgacttcattgggcaaatatatattcgctagtattctagggcatgtcatccatggaggcatcgttcttccattgatctacttcgtcttcacaaggaaaaaccctttccggtttctgctgggccttctcgccccctttgccacagcattcgcaacctgttctagttctgccaccctgccttcaatgatgaagtgtatcgaagaaaacaatggtgttgataagcggatttctcgcttcattctgccgataggggccactgtaaacatggacggcgcagcgatcttccagtgcgtcgcagctgtctttattgcgcaactgaacaatgttgaattgaatgctggacagattttcacgattctggtgaccgccacggcctcatcagtaggcgcagctggagtcccagcaggtggggtcctgacgattgcaatcattcttgaagcaataggcttgccgacccacgacttacccctcatccttgctgttgattggatcgtggaccgtacaaccaccgtggtaaatgtggagggggatgccctaggtgcaggaattctacaccaccttaaccagaaagccaccaagaagggggaacaggagctggcggaagtaaaggtggaggccatccctaactgtaagtctgaagaggagacgtcacctctggtgacccaccagaatccagcgggcccggttgcatccgcccccgagttggaatctaaggagtctgtgctctag

SEQ ID NO: 134562 - DNA, 1359 bp, Artificial Sequence
  derived and/or modified sequence
atgctgcttaggatgctcagaatgataatcctcccactagttgtgtgttcattggtgtctggtgcggctagccttgatgcctcttgtcttggacgattgggaggaatcgctgtggcctatttcgggctcacaacgttatcagccagcgcgctggctgtcgccctggcctttataataaagccagggtccggcgcacagaccctccagagcagcgacctggggttggaagatagtgggccgccgccggtgcccaaggagaccgtcgacagcttcctggacttggctaggaatctgtttccctccaatttagtggttgctgcattcagaacatacgccaccgattacaaggtcgtgacgcagaactcgtcctcaggaaatgttacgcatgaaaagatcccaatagggactgaaatcgagggcatgaacattctgggactggttctgttcgccctggtgctgggtgtggcattaaagaaacttggttccgaaggcgaagacttaatcaggttttttaactctttaaatgaagccaccatggtgttagtgagttggattatgtggtatgtgcctgtgggaattatgttcctggttggatcgaaaattgtcgagatgaaagacatcatcgtgctggtgacatcgctgggaaaatacattttcgcgagtatccttgggcatgtcattcatggagggattgtgcttccgcttatttactttgtgttcactagaaagaacccttttcgcttcctcctggggctgctggccccatttgcaaccgcgttcgctacctgcagtagtagcgcaacccttccctccatgatgaagtgtattgaggagaacaacggcgtggataaacgcatcagcaggttcattctgcccatcggcgccacagtcaacatggacggagcagcaatattccaatgcgttgcagctgtattcattgcacagcttaataacgtagagctaaatgcgggccagatcttcaccatcctcgtcactgccaccgctagctccgtgggcgcagcaggagtccccgctggcggcgtgttaacaatcgccatcatcctagaagccatcgggctgcccacccacgacttgccactgatattggccgtggactggatcgtagatagaaccacaaccgtcgtgaacgtcgagggagacgctctgggggctggtatactgcaccatctgaaccaaaaggctacaaagaaaggcgaacaggaactggccgaagtaaaggttgaggctatccccaactgtaaaagcgaagaagaaaccagtcccttggttacacaccagaatcctgctggcccagtggcttccgcccccgaattggagagcaaagaatcggtcctttag

SEQ ID NO: 134563 - DNA, 1599 bp, Artificial Sequence
  derived and/or modified sequence
atggagaagagcaatgagaccaacggctacctggacagcgcccaggccggccctgctgctggccctggggcccctggaacagctgctggccgggcccggcgctgtgccggcttcctgcggcggcaggccctggtgctgctgactgtgtctggagtgctggccggggccggcctgggcgccgccctgcggggcctgagcctgagcaggacccaggtgacctacctggccttccctggagagatgctgctgaggatgctgaggatgatcatcctgcccctggtggtgtgcagcctggtgtctggggccgccagcctggatgccagctgcctgggccgcctgggcggcattgctgtggcctacttcggcctgaccaccctgagcgccagcgccctggccgtggccctggccttcatcatcaagccaggcagcggggcccagaccctgcagagcagtgacctgggcctggaggacagcggccccccacctgtgcccaaggagaccgtggacagcttcctggacctggccaggaacctcttccccagcaacctggtggtggccgccttccgcacctacgccacagactacaaggtggtgacccagaacagcagcagtggaaatgtgacccatgagaagatccccatcggcacagaaattgagggcatgaacatcctgggcctggtgctgtttgccctggtgctgggcgtggccctgaagaagctgggctctgaaggagaagatctcatccgcttcttcaacagcctgaatgaggccaccatggtgctggtgtcctggatcatgtggtacgtgcctgtgggcatcatgttcctggtgggcagcaagatcgtggagatgaaggacatcatcgtgctggtgaccagcctgggcaagtacatctttgccagcatcctgggccacgtgatccacggcggcatcgtgctgcccctcatctactttgtgttcaccaggaagaaccccttccgcttcctgctgggcctgctggccccctttgccacagcctttgccacctgcagcagcagcgccaccctgcccagcatgatgaagtgcatcgaggagaacaacggggtggacaagaggatcagccgcttcatcctgcccatcggggccaccgtgaacatggatggagctgccatcttccagtgtgtggccgctgtgttcatcgcccagctgaacaacgtggagctgaatgccggccagatcttcaccatcctggtgacagccacagccagctctgtgggcgctgctggggtgcctgctggaggagtgctgaccatcgccatcatcctggaggccatcggcctgcccacccatgacctgcccctcatcctggccgtggactggatcgtggacaggaccaccaccgtggtgaatgtggagggagatgccctgggcgccggcatcctgcaccacctgaaccagaaggccaccaagaagggggagcaggagctggccgaggtgaaggtggaggccatccccaactgcaagtctgaggaggagaccagccccctggtgacccaccagaacccagctggccctgtggccagcgcccctgagctggagagcaaggagagcgtgctgtag

SEQ ID NO: 134564 - DNA, 1359 bp, Artificial Sequence
  derived and/or modified sequence
atgctgctgaggatgctgaggatgatcatcctgcccctggtggtgtgcagcctggtgtctggggccgccagcctggatgccagctgcctgggccgcctgggcggcattgctgtggcctacttcggcctgaccaccctgagcgccagcgccctggccgtggccctggccttcatcatcaagccaggcagcggggcccagaccctgcagagcagtgacctgggcctggaggacagcggccccccacctgtgcccaaggagaccgtggacagcttcctggacctggccaggaacctcttccccagcaacctggtggtggccgccttccgcacctacgccacagactacaaggtggtgacccagaacagcagcagtggaaatgtgacccatgagaagatccccatcggcacagaaattgagggcatgaacatcctgggcctggtgctgtttgccctggtgctgggcgtggccctgaagaagctgggctctgaaggagaagatctcatccgcttcttcaacagcctgaatgaggccaccatggtgctggtgtcctggatcatgtggtacgtgcctgtgggcatcatgttcctggtgggcagcaagatcgtggagatgaaggacatcatcgtgctggtgaccagcctgggcaagtacatctttgccagcatcctgggccacgtgatccacggcggcatcgtgctgcccctcatctactttgtgttcaccaggaagaaccccttccgcttcctgctgggcctgctggccccctttgccacagcctttgccacctgcagcagcagcgccaccctgcccagcatgatgaagtgcatcgaggagaacaacggggtggacaagaggatcagccgcttcatcctgcccatcggggccaccgtgaacatggatggagctgccatcttccagtgtgtggccgctgtgttcatcgcccagctgaacaacgtggagctgaatgccggccagatcttcaccatcctggtgacagccacagccagctctgtgggcgctgctggggtgcctgctggaggagtgctgaccatcgccatcatcctggaggccatcggcctgcccacccatgacctgcccctcatcctggccgtggactggatcgtggacaggaccaccaccgtggtgaatgtggagggagatgccctgggcgccggcatcctgcaccacctgaaccagaaggccaccaagaagggggagcaggagctggccgaggtgaaggtggaggccatccccaactgcaagtctgaggaggagaccagccccctggtgacccaccagaacccagctggccctgtggccagcgcccctgagctggagagcaaggagagcgtgctgtag

SEQ ID NO: 134565 - DNA, 1599 bp, Artificial Sequence
  derived and/or modified sequence
atggagaagagcaacgagaccaacggctacctggacagcgcccaggcgggccccgccgccggccctggcgcccctgggaccgccgcaggacgggcaagaaggtgcgcaggcttcctacgtcgtcaggcgctcgtgctactgaccgtgtctggtgttttggctggcgccgggctgggcgcggccttgcgcgggctgtccctgtctaggacacaggtgacttatctggcgttccctggagagatgctgcttcgtatgctcaggatgatcatcctcccattggtggtatgctccctggttagtggtgccgccagcttggacgcctcctgcctcgggcgtctggggggaattgccgtggcgtattttggactaacaacgttatcagcttctgccctcgccgtggctctggccttcatcatcaagcctggtagcggcgcgcaaacgcttcagagctccgatctggggcttgaggacagcggtcctcccccagtcccgaaggagaccgtggatagctttctggacctggcacgcaacctgttcccctcaaatctagtcgtcgcagccttcagaacatacgccactgattacaaggttgtcacacagaattcatccagtggaaacgtgacacacgagaagatccccatcggaactgaaatcgagggaatgaatatactgggtttagttctgtttgcccttgtgctcggtgtcgctctaaaaaagctgggcagcgagggagaagatctgattaggttcttcaactctttgaacgaggctactatggtcctggtaagctggattatgtggtacgtccccgtaggtattatgtttctggtggggtcgaagattgtagaaatgaaagacataatcgtgctggtcacctctcttggaaaatacatcttcgcaagcattctgggccacgtaatccacggaggcatcgtactgccgcttatctacttcgtgttcaccaggaaaaatccctttcgatttttactgggtctactcgcaccattcgcgacggcttttgcgacatgtagcagcagtgccaccctacctagtatgatgaaatgcatcgaagagaataacggagtcgacaaaaggatcagccgttttatcctgcctatcggcgcaaccgtgaacatggatggtgctgccatcttccagtgcgtggccgccgtgtttattgctcagctgaataacgtcgaacttaacgccggccagatcttcactattttggttaccgcaacagcgtcttccgtcggagcagcaggcgtgcccgccggaggagtgctgaccatagccattattctggaagccatagggctccccacccacgatctcccccttatcctggccgtcgactggatagtggaccgtacaactacagtcgtgaatgtggaaggggatgccctgggagctggaattctgcaccacctgaatcagaaagctaccaagaagggggagcaggagttagctgaagttaaagtggaggcaataccgaactgtaagtccgaagaggagaccagccccctggtgacccaccagaatcccgcaggccctgtggcaagcgcacccgagttagaaagcaaggagtctgtgctctag

SEQ ID NO: 134566 - DNA, 1359 bp, Artificial Sequence
  derived and/or modified sequence
atgctgctgcggatgctgcggatgatcatcctgcccctggtggtgtgttcacttgtttctggcgctgcatccctggatgccagttgcctgggtaggttggggggcatcgcggtcgcctattttgggctcacgaccctgtctgctagcgcgcttgccgtggcactcgccttcattatcaaaccagggagtggagcccagactctgcagagctcagacctggggctagaagatagtggaccccccccagtgccaaaagagaccgtagattccttcctggacctggcccgcaatttattcccatctaatttggtggttgccgccttcagaacttatgccacagactataaagtcgtgacacagaacagtagctcaggcaatgtgacacacgaaaagattcctatcggaacagagattgaaggcatgaacatcctggggttggtgctattcgcactcgtgcttggcgtggctctgaaaaaactgggatccgagggcgaagaccttatccgtttcttcaatagccttaacgaagcaacaatggtgctggtatcatggattatgtggtatgtgcccgtaggaatcatgtttctggttggttcaaaaatcgtggagatgaaggacatcatcgtcctagtcaccagcctgggaaagtacattttcgcctccatactcggacacgtgatccacgggggcatagttcttcccctgatatacttcgttttcacacggaagaatccattcaggttcttgctcggcctactggccccctttgccacggcttttgccacctgttccagctccgcaacactgccaagcatgatgaagtgcatagaggagaataacggcgtggataagaggatcagccgctttattctgcctattggagccacggtgaacatggacggtgcagccatttttcaatgtgtagccgctgtgtttattgcacaactgaacaatgtggaactgaatgctggacagatctttactatccttgtgaccgccactgcatcttcagtaggtgcggccggcgtgcctgctggaggcgtgctgactattgctattatccttgaagcaatcggccttcctacccatgatcttcctctcatactggcggtggactggatagtggatcgcactactaccgtggtcaatgttgagggggacgcgcttggggccggaatcctgcatcacttaaaccagaaggctaccaaaaaaggcgaacaggagttggctgaggtgaaggtcgaagccataccaaattgcaagagcgaagaggagacctcccctctggtcacccaccagaatcccgcaggtccagttgcatcagcaccagagttagagagtaaagaaagtgtgttgtag

SEQ ID NO: 134567 - DNA, 1599 bp, Artificial Sequence
  derived and/or modified sequence
atggagaagagcaacgagaccaatggctatctggactctgcgcaggccggacccgctgcaggacccggagcccctggtacagctgcagggcgagctagaagatgcgcaggttttctgaggaggcaggctctggtgttattaactgtttcaggcgtgctagcgggtgctgggttaggcgctgctctgcgagggctctcactcagcaggacccaggtcacatatttggccttccccggtgagatgctgctgcgcatgctgagaatgattatccttccactcgtggtctgttccttagtcagcggagcagcaagtttagacgcctcgtgcctgggtcgcctgggtggcatcgctgtcgcctattttggactcacgacactttctgcttctgctctcgcagttgctctggcctttataatcaagcccggaagcggcgcacagacacttcaatccagtgaccttggcctggaggatagtggccctcctcctgtcccaaaggagactgtagattcctttcttgatctcgccaggaacttatttccctcaaacttggttgtcgcggcttttcggacgtatgcaacagattacaaagtggtgacgcagaactcaagttcgggaaacgtcacacacgagaaaattccgattgggactgagatcgagggcatgaacatcctgggtcttgttctctttgcgctggtgctcggcgtcgccctcaaaaagttgggttcggagggggaggatctgatcagattcttcaactcgcttaacgaggctaccatggtgttggtgtcctggattatgtggtacgtgcctgtcggcatcatgtttttggtcggttcgaagatcgtggaaatgaaagacattattgtattagtgactagcctgggaaagtacatctttgcctctattctaggacacgtgatccatggagggatcgtcctgccactgatctacttcgtcttcaccaggaagaacccctttcgttttctgctcgggctgctggccccatttgcgaccgccttcgcgacctgttctagctcagctactcttccttctatgatgaagtgcattgaggagaacaatggtgttgacaagagaatatcccgtttcatcctccctatcggggcaacggtgaacatggacggggctgccatctttcagtgtgtggctgcagtctttattgcccagcttaataacgttgagctaaacgcgggacagatttttacaatcctcgtgaccgccactgctagttccgtgggagctgcaggagtccccgctgggggagtgctcacgatcgctatcatactggaggcaattgggctgcccacccacgacttgcccttaattctcgctgtcgactggattgtggataggacaaccacagtggtgaacgtcgaaggggatgctctgggggcaggtattctccatcaccttaatcagaaagcgaccaagaaaggggaacaggaactcgctgaggtgaaagtggaagccataccgaattgtaagagcgaagaagagacgagtccactcgtgactcatcagaaccccgcagggcctgttgcctcagcgcctgagttggagagtaaagaaagcgtcctctag

SEQ ID NO: 134568 - DNA, 1359 bp, Artificial Sequence
  derived and/or modified sequence
atgctgctgagaatgctccgtatgattattctccctctggtcgtctgttctctggtgtcaggggcagcctccctcgatgcctcttgcctcggaagactgggagggattgctgtagcatacttcgggctcacaacgttgtccgcctctgcactcgccgtggcactcgcctttattataaaacccggatctggcgctcagactcttcagagttccgacctgggacttgaggatagcggcccacctccagtcccaaaggagactgttgactcattcctcgaccttgcaaggaacctttttccttcaaacctggttgttgctgcttttcgaacttacgccaccgactataaggttgtgacacagaactcatcctctggtaatgtgacccacgagaaaatccctatcggcactgagatcgagggtatgaatatactgggtctggtgctgtttgccctagtgctaggcgtggctctgaagaaactgggcagcgaaggagaagatctcattcgcttctttaactctctgaatgaggctacgatggtcctcgttagctggattatgtggtatgtcccagtgggtattatgttccttgtcggatctaaaatcgtggaaatgaaggacatcatagttcttgtcacatcactgggcaagtatattttcgcatcaatactaggccatgtcatccacggtggaatcgtcctgccattgatctattttgtctttacaaggaaaaaccccttcagatttctgctggggctgttagctcctttcgccacagccttcgccacgtgttcttcttctgctactttgccctccatgatgaaatgtatagaggaaaataacggcgtcgataagcggatctcccgtttcattttgccaattggggcaaccgtgaacatggatggcgcagccattttccaatgtgtcgccgcagtctttatcgcccagctgaataacgttgagttgaacgccggacagatcttcacgatccttgtgacagccactgcatcgtctgtcggcgctgcaggcgtgccagccggaggtgtgctgacaatcgcgatcatcctggaagccatcgggcttcccacacacgacttgcccctgatacttgctgtggattggatcgtcgatcgcaccaccactgttgtgaacgtggagggcgatgccctcggagcaggaatcttgcaccacctgaaccagaaggccaccaaaaagggtgagcaggaactggctgaagttaaggttgaggccatacccaattgtaaatctgaggaagagacctcgcccctggtgactcaccagaaccccgctggtccagttgctagtgcccctgagttagagagcaaggaaagtgtgctctag

SEQ ID NO: 134569 - DNA, 4561 bp, Artificial Sequence
  derived and/or modified sequence
ctccagccggcggctgctccagggaggctgggcgcgatcctctccgcccgcggctccaacccgcactctgcgcctctcctcgcctttctcgcacctgctcctgcgccaggcccggagacccccggggcggcttcccagaacctgcggagcacaactggccgaccgacccattcattgggaaccccgtcttttgccagagcccacgtcccctgccacctctagctcggagcggcgtgtagcgccatggagaagagcaacgagaccaacggctaccttgacagcgctcaggcggggcctgcggccgggcccggagctccggggaccgcggcgggacgcgcacggcgttgcgcgggcttcctgcggcgccaagcgctggtgctgctcaccgtgtccggggtgctggcgggcgcgggcctgggcgcggcgttgcgcgggctcagcctgagccgcacgcaggtcacctacctggccttccccggcgagatgctgctccgcatgctgcgcatgatcatcctgccgctggtggtctgcagcctggtgtcgggcgccgcctcgctcgatgccagctgcctcgggcgtctgggcggcatcgctgtcgcctactttggcctcaccacactgagtgcctcggcgctcgccgtggccttggcgttcatcatcaagccaggatccggtgcgcagacccttcagtccagcgacctggggctggaggactcggggcctcctcctgtccccaaagagacggtggactctttcctcgacctggccagaaacctgtttccctccaatcttgtggttgcagctttccgtacgtatgcaaccgattataaagtcgtgacccagaacagcagctctggaaatgtaacccatgaaaagatccccataggcactgagatagaagggatgaacattttaggattggtcctgtttgctctggtgttaggagtggccttaaagaaactaggctccgaaggagaagacctcatccgtttcttcaattccctcaacgaggcgacgatggtgctggtgtcctggattatgtggtacgtacctgtgggcatcatgttccttgttggaagcaagatcgtggaaatgaaagacatcatcgtgctggtgaccagcctggggaaatacatcttcgcatctatattgggccatgttattcatggaggaattgttctgccacttatttattttgttttcacacgaaaaaacccattcagattcctcctgggcctcctcgccccatttgcgacagcatttgctacctgctccagctcagcgacccttccctctatgatgaagtgcattgaagagaacaatggtgtggacaagaggatcagcaggtttattctccccatcggggccaccgtgaacatggacggagcagccatcttccagtgtgtggccgcggtgttcattgcgcaactcaacaacgtagagctcaacgcaggacagattttcaccattctagtgactgccacagcgtccagtgttggagcagcaggcgtgccagctggaggggtcctcaccattgccattatcctggaggccattgggctgcctactcatgacctgcctctgatcctggctgtggactggattgtggaccggaccaccacggtggtgaatgtggaaggggatgccctgggtgcaggcattctccaccacctgaatcagaaggcaacaaagaaaggcgagcaggaacttgctgaggtgaaagtggaagccatccccaactgcaagtctgaggaggagacatcgcccctggtgacacaccagaaccccgctggccccgtggccagtgccccagaactggaatccaaggagtcggttctgtgatggggctgggctttgggcttgcctgccagcagtgatgtcccaccctgttcacccagccgccagtcatggacacagggcactgcccttgccaacttttaccctcccaagcaatgctttggcccagtcgctggcctgaggcttacctctcggcactggcattgggctccccagccggaactggttaccaaggacaaggacactctgacattcggcttgatccatgtccaggtgcaactgtgtgtacaccagggatctgtttggaaacaaccccttgagctgccaggctcaagaaatcatggactcacagggtcctgtgtggttacatcttggaaaaaatgcagatgtatttcactctccccggtcagctctgcatcaggtgttttctgagcaaaccaagggggtttatagtcatctgtcgcattgcctcgagttgcagtaattgaaaaaatgctcaaattcttagccatggctggcctttgctgagctgggactcaggtgtttaaagagtttgtgctatagctaggtgtggatagcttctgatccctgggttctgggagactgcaggtgccgcacattgtcaagttagaaatactccaggtgggtgttagcactgtggtggtctctggtccacagccttaggtaaacaacttagattctgaggtcaaagaaaaaaggagagggaatgcagccttgtgggggagaagcggggcagagggttctctaatctaatcaggacaggacaggtttcacatacaattgtcccagttcgcatcccagccctggggcacttttctgcttccttccagaggcctgggcctctgataacactttggctttttctccattcacgctgatttggcaaaaggccagagatgggcctccttccctggggaggtgtgatgtagttatcacattcaggacccttgttgatttatcatctattatttgaattcaactggacactctgtaaaatgctgcactgcagcaaaaacaaaaccaccaccaccccagagaaaaccatgtactaattggagtggggtacccccattcacaggttcccaggtcccctggctttggctgatttcaaaatatagagccctttcttgccagtacatccaagtttaaaattatcagcgaaatggtccatgtttttccaattacctgctgacacggttctaagctaagtgaaggggaagatctgagagcgtgctgtttgtggctgttgatgcatattcgtgatgtaacaggtcctggggcctcactttaccccatttgtaaaatggggctaatgtcacctgcctcttacctacctcagagggatttggtgaagcaaactgttaatcttcgaaaacgaccatttcacttcttggatatcaagtgctaacccagtatgttcttcttttttatgtaagggacagctttctccacagagtcctttctgctggtgaggacagcatttctgagcagggctttgttctctatgtgcattaggacttttatcatgcccttgttctgtgtgtagttacttgacagcatcaaatgccgcctcttcctaatgtccttcaagttttcatgaactagcaaccccaccttccaccatggttctgggcgcctgattttgctgtgactcccagacccagccactgtttctgccaccctgtaacaggccattaaagctccccagtgttcagcctccttcactcccttgttttccctgttgctatgtgtcacctgggccctacagacaggggcacacgcttatggatgtgtgtaccattgagatgagaatgggtagatggaacggagaccatcaagccacacccccttcttaaaactggggacatgagcctgagcagaaagggtgaagaagagccatgggacacagagttgacccagccagggggaaagcccagctctctttaaaccagctaagccattccagtctcctgtgaagccaaaagggaccaggaaccgtgcaaaggaaactggaaacttttccccgctgggtagagcatgttgctgatactcttctgttttcaagggaaacaatcacattgtttgattccaaatggtaaatgaacactcactattcttcaggcttcagtaaatctttttttcttccttcatatatatatacacaacacacacacacatatgtatatctatacacacatgtgtgttgtgtatatgcatgtgtgtgtgtgcgtgtgtgtatagttttagctccaagccaagcaagtttgtgtttggatagaggggaacttaactattaactacaagttgtatgtctgtggtatcttgattttcccatttctaaagatgaatttcacaaagccataaagcgtgaaattagagctggacttaagactcattggccgaccatcctgtgtcctggcctggccctgcagtaagaagcgtgtctgggtctggagaagggtgcttccgagagtgtgcaggtggcccttccccttggaggcgagaagagagaatgtgctgtctatcttcctggttttcagtccacagagtcggtagaccaggggttacgtgactggggaaaatctcacatctccttgtctgaaaacatttcccctgctgttctctttctaacatgttgtggtaaatctgttcagatactgctcatctgactgttttgtacatgtgacaattgccttaaaacctagcacagtcctcagaaatgaataccgtgtttccactggaa

SEQ ID NO: 134570 - DNA, 2693 bp, Artificial Sequence
  derived and/or modified sequence
acttccccgtctgcgtccgcgttcgcggctcccgtttgcatcatctccagccggcggctgctccagggaggctgggcgcgatcctctccgcccgcggctccaacccgcactctgcgcctctcctcgcctttctcgcacctgctcctgcgccaggcccggagacccccggggcggcttcccagaacctgcggagcacaactggccgaccgacccattcattgggaaccccgtcttttgccagagcccacgtcccctgccacctctagctcggagcggcgtgtagcgccatggagaagagcaacgagaccaacggctaccttgacagcgctcaggcggggcctgcggccgggcccggagctccggggaccgcggcgggacgcgcacggcgttgcgcgggctcagcctgagccgcacgcaggtcacctacctggccttccccggcgagatgctgctccgcatgctgcgcatgatcatcctgccgctggtggtctgcagcctggtgtcgggcgccgcctcgctcgatgccagctgcctcgggcgtctgggcggcatcgctgtcgcctactttggcctcaccacactgagtgcctcggcgctcgccgtggccttggcgttcatcatcaagccaggatccggtgcgcagacccttcagtccagcgacctggggctggaggactcggggcctcctcctgtccccaaagagacggtggactctttcctcgacctggccagaaacctgtttccctccaatcttgtggttgcagctttccgtacgtatgcaaccgattataaagtcgtgacccagaacagcagctctggaaatgtaacccatgaaaagatccccataggcactgagatagaagggatgaacattttaggattggtcctgtttgctctggtgttaggagtggccttaaagaaactaggctccgaaggagaagacctcatccgtttcttcaattccctcaacgaggcgacgatggtgctggtgtcctggattatgtggtacgtacctgtgggcatcatgttccttgttggaagcaagatcgtggaaatgaaagacatcatcgtgctggtgaccagcctggggaaatacatcttcgcatctatattgggccatgttattcatggaggaattgttctgccacttatttattttgttttcacacgaaaaaacccattcagattcctcctgggcctcctcgccccatttgcgacagcatttgctacctgctccagctcagcgacccttccctctatgatgaagtgcattgaagagaacaatggtgtggacaagaggatcagcaggtttattctccccatcggggccaccgtgaacatggacggagcagccatcttccagtgtgtggccgcggtgttcattgcgcaactcaacaacgtagagctcaacgcaggacagattttcaccattctagtgactgccacagcgtccagtgttggagcagcaggcgtgccagctggaggggtcctcaccattgccattatcctggaggccattgggctgcctactcatgacctgcctctgatcctggctgtggactggattgtggaccggaccaccacggtggtgaatgtggaaggggatgccctgggtgcaggcattctccaccacctgaatcagaaggcaacaaagaaaggcgagcaggaacttgctgaggtgaaagtggaagccatccccaactgcaagtctgaggaggagacatcgcccctggtgacacaccagaaccccgctggccccgtggccagtgccccagaactggaatccaaggagtcggttctgtgatggggctgggctttgggcttgcctgccagcagtgatgtcccaccctgttcacccagccgccagtcatggacacagggcactgcccttgccaacttttaccctcccaagcaatgctttggcccagtcgctggcctgaggcttacctctcggcactggcattgggctccccagccggaactggttaccaaggacaaggacactctgacattcggcttgatccatgtccaggtgcaactgtgtgtacaccagggatctgtttggaaacaaccccttgagctgccaggctcaagaaatcatggactcacagggtcctgtgtggttacatcttggaaaaaatgcagatgtatttcactctccccggtcagctctgcatcaggtgttttctgagcaaaccaagggggtttatagtcatctgtcgcattgcctcgagttgcagtaattgaaaaaatgctcaaattcttagccatggctggcctttgctgagctgggactcaggtgtttaaagagtttgtgctatagctaggtgtggatagcttctgatccctgggttctgggagactgcaggtgccgcacattgtcaagttagaaatactccaggtgggtgttagcactgtggtggtctctggtccacagccttaggtaaacaacttagattctgaggtcaaagaaaaaaggagagggaatgcagccttgtgggggagaagcggggcagagggttctctaatctaatcaggacaggacaggtttcacatacaattgtcccagttcgcatcccagccctggggcacttttctgcttccttccagaggcctgggcctctgataacactttggctttttctccattcacgctgatttggcaaaaggccagagatgggcctccttccctg

SEQ ID NO: 134571 - DNA, 1599 bp, Artificial Sequence
  derived and/or modified sequence
atggagaagagcaacgagaccaacggctacctggacagcgcccaggccggccccgccgccggccccggcgcccccggcaccgccgccggcagagccagaagatgcgccggcttcctgagaagacaggccctggtgctgctgaccgtgagcggcgtgctggccggcgccggcctgggcgccgccctgagaggcctgagcctgagcagaacccaggtgacctacctggccttccccggcgagatgctgctgagaatgctgagaatgatcatcctgcccctggtggtgtgcagcctggtgagcggcgccgccagcctggacgccagctgcctgggcagactgggcggcatcgccgtggcctacttcggcctgaccaccctgagcgccagcgccctggccgtggccctggccttcatcatcaagcccggcagcggcgcccagaccctgcagagcagcgacctgggcctggaggacagcggccccccccccgtgcccaaggagaccgtggacagcttcctggacctggccagaaacctgttccccagcaacctggtggtggccgccttcagaacctacgccaccgactacaaggtggtgacccagaacagcagcagcggcaacgtgacccacgagaagatccccatcggcaccgagatcgagggcatgaacatcctgggcctggtgctgttcgccctggtgctgggcgtggccctgaagaagctgggcagcgagggcgaggacctgatcagattcttcaacagcctgaacgaggccaccatggtgctggtgagctggatcatgtggtacgtgcccgtgggcatcatgttcctggtgggcagcaagatcgtggagatgaaggacatcatcgtgctggtgaccagcctgggcaagtacatcttcgccagcatcctgggccacgtgatccacggcggcatcgtgctgcccctgatctacttcgtgttcaccagaaagaaccccttcagattcctgctgggcctgctggcccccttcgccaccgccttcgccacctgcagcagcagcgccaccctgcccagcatgatgaagtgcatcgaggagaacaacggcgtggacaagagaatcagcagattcatcctgcccatcggcgccaccgtgaacatggacggcgccgccatcttccagtgcgtggccgccgtgttcatcgcccagctgaacaacgtggagctgaacgccggccagatcttcaccatcctggtgaccgccaccgccagcagcgtgggcgccgccggcgtgcccgccggcggcgtgctgaccatcgccatcatcctggaggccatcggcctgcccacccacgacctgcccctgatcctggccgtggactggatcgtggacagaaccaccaccgtggtgaacgtggagggcgacgccctgggcgccggcatcctgcaccacctgaaccagaaggccaccaagaagggcgagcaggagctggccgaggtgaaggtggaggccatccccaactgcaagagcgaggaggagaccagccccctggtgacccaccagaaccccgccggccccgtggccagcgcccccgagctggagagcaaggagagcgtgctgtag

SEQ ID NO: 134572 - DNA, 1359 bp, Artificial Sequence
  derived and/or modified sequence
atgctgctgagaatgctgagaatgatcatcctgcccctggtggtgtgcagcctggtgagcggcgccgccagcctggacgccagctgcctgggcagactgggcggcatcgccgtggcctacttcggcctgaccaccctgagcgccagcgccctggccgtggccctggccttcatcatcaagcccggcagcggcgcccagaccctgcagagcagcgacctgggcctggaggacagcggccccccccccgtgcccaaggagaccgtggacagcttcctggacctggccagaaacctgttccccagcaacctggtggtggccgccttcagaacctacgccaccgactacaaggtggtgacccagaacagcagcagcggcaacgtgacccacgagaagatccccatcggcaccgagatcgagggcatgaacatcctgggcctggtgctgttcgccctggtgctgggcgtggccctgaagaagctgggcagcgagggcgaggacctgatcagattcttcaacagcctgaacgaggccaccatggtgctggtgagctggatcatgtggtacgtgcccgtgggcatcatgttcctggtgggcagcaagatcgtggagatgaaggacatcatcgtgctggtgaccagcctgggcaagtacatcttcgccagcatcctgggccacgtgatccacggcggcatcgtgctgcccctgatctacttcgtgttcaccagaaagaaccccttcagattcctgctgggcctgctggcccccttcgccaccgccttcgccacctgcagcagcagcgccaccctgcccagcatgatgaagtgcatcgaggagaacaacggcgtggacaagagaatcagcagattcatcctgcccatcggcgccaccgtgaacatggacggcgccgccatcttccagtgcgtggccgccgtgttcatcgcccagctgaacaacgtggagctgaacgccggccagatcttcaccatcctggtgaccgccaccgccagcagcgtgggcgccgccggcgtgcccgccggcggcgtgctgaccatcgccatcatcctggaggccatcggcctgcccacccacgacctgcccctgatcctggccgtggactggatcgtggacagaaccaccaccgtggtgaacgtggagggcgacgccctgggcgccggcatcctgcaccacctgaaccagaaggccaccaagaagggcgagcaggagctggccgaggtgaaggtggaggccatccccaactgcaagagcgaggaggagaccagccccctggtgacccaccagaaccccgccggccccgtggccagcgcccccgagctggagagcaaggagagcgtgctgtag

SEQ ID NO: 134573 - protein, 672 aa, Artificial Sequence
  derived and/or modified sequence
MEEHTEAGSAPEMGAQKALIDNPADILVIAAYFLLVIGVGLWSMCRTNRGTVGGYFLAGRSMVWWPVGASLFASNIGSGHFVGLAGTGAASGLAVAGFEWNALFVVLLLGWLFAPVYLTAGVITMPQYLRKRFGGRRIRLYLSVLSLFLYIFTKISVDMFSGAVFIQQALGWNIYASVIALLGITMIYTVTGGLAALMYTDTVQTFVILGGACILMGYAFHEVGGYSGLFDKYLGAATSLTVSEDPAVGNISSFCYRPRPDSYHLLRHPVTGDLPWPALLLGLTIVSGWYWCSDQVIVQRCLAGKSLTHIKAGCILCGYLKLTPMFLMVMPGMISRILYPDEVACVVPEVCRRVCGTEVGCSNIAYPRLVVKLMPNGLRGLMLAVMLAALMSSLASIFNSSSTLFTMDIYTRLRPRAGDRELLLVGRLWVVFIVVVSVAWLPVVQAAQGGQLFDYIQAVSSYLAPPVSAVFVLALFVPRVNEQGAFWGLIGGLLMGLARLIPEFSFGSGSCVQPSACPAFLCGVHYLYFAIVLFFCSGLLTLTVSLCTAPIPRKHLHRLVFSLRHSKEEREDLDADEQQGSSLPVQNGCPESAMEMNEPQAPAPSLFRQCLLWFCGMSRGGVGSPPPLTQEEAAAAARRLEDISEDPSWARVVNLNALLMMAVAVFLWGFYA

SEQ ID NO: 134574 - DNA, 2019 bp, Artificial Sequence
  derived and/or modified sequence
atggaggagcacaccgaggccggcagcgcccccgagatgggcgcccagaaggccctgatcgacaaccccgccgacatcctggtgatcgccgcctacttcctgctggtgatcggcgtgggcctgtggagcatgtgcagaaccaacagaggcaccgtgggcggctacttcctggccggcagaagcatggtgtggtggcccgtgggcgccagcctgttcgccagcaacatcggcagcggccacttcgtgggcctggccggcaccggcgccgccagcggcctggccgtggccggcttcgagtggaacgccctgttcgtggtgctgctgctgggctggctgttcgcccccgtgtacctgaccgccggcgtgatcaccatgccccagtacctgagaaagagattcggcggcagaagaatcagactgtacctgagcgtgctgagcctgttcctgtacatcttcaccaagatcagcgtggacatgttcagcggcgccgtgttcatccagcaggccctgggctggaacatctacgccagcgtgatcgccctgctgggcatcaccatgatctacaccgtgaccggcggcctggccgccctgatgtacaccgacaccgtgcagaccttcgtgatcctgggcggcgcctgcatcctgatgggctacgccttccacgaggtgggcggctacagcggcctgttcgacaagtacctgggcgccgccaccagcctgaccgtgagcgaggaccccgccgtgggcaacatcagcagcttctgctacagacccagacccgacagctaccacctgctgagacaccccgtgaccggcgacctgccctggcccgccctgctgctgggcctgaccatcgtgagcggctggtactggtgcagcgaccaggtgatcgtgcagagatgcctggccggcaagagcctgacccacatcaaggccggctgcatcctgtgcggctacctgaagctgacccccatgttcctgatggtgatgcccggcatgatcagcagaatcctgtaccccgacgaggtggcctgcgtggtgcccgaggtgtgcagaagagtgtgcggcaccgaggtgggctgcagcaacatcgcctaccccagactggtggtgaagctgatgcccaacggcctgagaggcctgatgctggccgtgatgctggccgccctgatgagcagcctggccagcatcttcaacagcagcagcaccctgttcaccatggacatctacaccagactgagacccagagccggcgacagagagctgctgctggtgggcagactgtgggtggtgttcatcgtggtggtgagcgtggcctggctgcccgtggtgcaggccgcccagggcggccagctgttcgactacatccaggccgtgagcagctacctggccccccccgtgagcgccgtgttcgtgctggccctgttcgtgcccagagtgaacgagcagggcgccttctggggcctgatcggcggcctgctgatgggcctggccagactgatccccgagttcagcttcggcagcggcagctgcgtgcagcccagcgcctgccccgccttcctgtgcggcgtgcactacctgtacttcgccatcgtgctgttcttctgcagcggcctgctgaccctgaccgtgagcctgtgcaccgcccccatccccagaaagcacctgcacagactggtgttcagcctgagacacagcaaggaggagagagaggacctggacgccgacgagcagcagggcagcagcctgcccgtgcagaacggctgccccgagagcgccatggagatgaacgagccccaggcccccgcccccagcctgttcagacagtgcctgctgtggttctgcggcatgagcagaggcggcgtgggcagccccccccccctgacccaggaggaggccgccgccgccgccagaagactggaggacatcagcgaggaccccagctgggccagagtggtgaacctgaacgccctgctgatgatggccgtggccgtgttcctgtggggcttctacgcctag

SEQ ID NO: 134575 - DNA, 2019 bp, Artificial Sequence
  derived and/or modified sequence
atggaggagcacactgaggctgggagtgcccccgaaatgggtgcacaaaaggcattgattgataaccccgcagacattcttgtgatcgcagcctatttcttgcttgtgatcggagtgggattatggtccatgtgccgaaccaacaggggaacagtgggcggctattttttggctggccgcagtatggtgtggtggcccgtgggggctagtcttttcgcttctaacatcgggtctggccatttcgtaggactggcaggaacaggagctgctagcggtctggcagtggcaggcttcgaatggaatgctctgtttgttgtattattactaggatggctttttgctcccgtataccttactgcgggcgtgattaccatgccccagtacctgcgcaaacgctttggaggccgccgcataaggctttatctatctgtgttatccctatttctgtatatattcaccaaaatcagtgtagatatgttcagcggcgctgtgttcatccagcaggccctaggatggaacatttacgcctccgtgattgcattgcttggtatcaccatgatttacaccgtaaccgggggacttgcagcattgatgtatactgacaccgtccagaccttcgtgattctgggtggggcctgtattttgatggggtacgcgttccatgaagtcggggggtactccggcctgtttgacaaatacttgggtgctgccacctccttgacggtctctgaggaccccgcggttgggaatattagttcgttctgttaccgcccaagaccagacagctatcacctgcttaggcacccagtcaccggcgatcttccctggccggctctactgcttggccttaccattgtgtctggatggtactggtgttctgatcaggtcattgtgcagcgttgcttggctgggaaatctctcacacacattaaggccggatgtatcctgtgtggatatctgaaactcactccgatgttcctgatggtaatgccaggcatgattagtcgcatcctctatcctgacgaggtggcctgtgtggtgccggaggtctgtcgccgagtttgtgggaccgaggtggggtgctccaatattgcttatccccggctggtcgtcaagttaatgcctaacggactcagaggccttatgcttgccgtgatgctggcagctctcatgtccagtctggcctctatttttaacagttcatccacattattcactatggatatctatacaagattgcggcctcgggcgggcgaccgggagttattgctggtggggcgtttgtgggtggtgttcattgtggtggtgtctgttgcctggcttcctgtggtccaagcggcgcaggggggtcagctgttcgactatattcaggccgtcagcagctatctcgctccccccgtatccgcagtgttcgtcttggcgctctttgtccctcgagtgaacgagcagggggccttctggggcctcattggagggctgctgatggggcttgctcggttgatccctgagttttcattcgggtctgggtcctgtgtgcagccatctgcctgtcccgccttcctgtgtggcgtgcattacttgtatttcgctattgtactcttcttttgctctgggcttctgacacttaccgtgtccctgtgtacggctccaattccaagaaagcatctgcacagactggtgttcagtctgagacattctaaggaggagcgtgaggacttagacgcggatgaacagcagggttcttcgttgcccgttcagaacgggtgccccgagtcggccatggagatgaacgaaccccaggcacccgctcccagtttgtttaggcagtgtctgctgtggttctgcggcatgagtcggggtggcgtggggtcccctcctccactgactcaggaggaagctgctgctgccgcccggcgtcttgaagacattagcgaggaccctagttgggcgcgcgtggtgaatctgaacgctctgttgatgatggcagtcgctgtgttcctgtgggggttctatgcctag

SEQ ID NO: 134576 - DNA, 2019 bp, Artificial Sequence
  derived and/or modified sequence
atggaggagcacacagaagctggcagcgcccctgagatgggcgcccagaaggccctgattgacaacccagctgacatcctggtgattgctgcctacttcctgctggtgattggagtgggcctgtggagcatgtgcaggaccaacagaggaacagtgggcggctacttcctggccggccgctccatggtgtggtggcctgtgggcgccagcctgtttgccagcaacatcggcagcggccactttgtgggcctggccggcactggagctgccagcggcctggccgtggccggctttgagtggaatgccctgtttgtggtgctgctgctgggctggctgtttgcccctgtgtacctgacagctggggtcatcaccatgccccagtacctgaggaagagatttggaggccgccgcatccggctgtacctgtctgtgctgagcctcttcctgtacatcttcaccaagatctctgtggacatgttttctggagctgtgttcatccagcaggccctgggctggaacatctatgcctctgtgattgccctgctgggcatcaccatgatctacacagtgactggaggcctggccgccctgatgtacacagacacagtgcagaccttcgtcatcctgggcggggcctgcatcctgatgggctacgccttccacgaggtgggcggctacagcggcctgtttgacaagtacctgggcgccgccaccagcctgactgtgtctgaggaccctgctgtgggcaacatcagcagcttctgctaccggcccaggccagacagctaccacctgctgcggcaccctgtgactggagacctgccctggccagccctgctgctgggcctgaccatcgtgtctggctggtactggtgcagcgaccaggtgattgtgcagcgctgcctggccggcaagagcctgacccacatcaaggccggctgcatcctgtgtggctacctgaagctgacccccatgttcctgatggtgatgcctggcatgatcagccgcatcctgtacccagatgaggtggcctgtgtggtgcctgaggtgtgccggcgggtgtgtggcacagaggtgggctgcagcaacatcgcctacccccggctggtggtgaagctgatgcccaacggcctgcggggcctgatgctggccgtgatgctggccgccctgatgagcagcctggccagcatcttcaacagcagcagcaccctcttcaccatggacatctacacccggctgcggcccagggctggggaccgggagctgctgctggtgggccgcctgtgggtggtgttcatcgtggtggtgtctgtggcctggctgcctgtggtgcaggccgcccagggcggccagctgtttgactacatccaggccgtgtcctcctacctggcccctcctgtgtctgctgtgtttgtgctggccctgtttgtgccccgggtgaatgagcagggcgccttctggggcctcatcggcggcctgctgatgggcctggcccggctcatccctgagttctcctttggcagcggcagctgtgtgcagcccagcgcctgcccagccttcctgtgtggggtgcactacctgtactttgccatcgtgctcttcttctgcagcggcctgctgaccctgactgtgtccctgtgcacagcccccatccccaggaagcacctgcaccggctggtgttcagcctgcggcacagcaaggaggagcgggaggacctggatgctgatgagcagcagggcagcagcctgcctgtgcagaatggctgcccagagagcgccatggagatgaatgagccccaggccccagcccccagcctcttccggcagtgcctgctgtggttctgtggcatgagccggggcggcgtgggcagccccccacccctgacccaggaggaggccgctgctgctgcccggcggctggaggacatcagcgaggaccccagctgggcccgggtggtgaacctgaatgccctgctgatgatggctgtggccgtgttcctgtggggcttctacgcctag

SEQ ID NO: 134577 - DNA, 2019 bp, Artificial Sequence
  derived and/or modified sequence
atggaggagcacaccgaggccggcagcgcccccgagatgggcgcccagaaagcccttatcgacaacccagccgacattctcgtaatcgccgcatatttcctattggtgattggcgtgggcctgtggagcatgtgtagaaccaatcgcggcaccgtaggcggctattttctggccggacgctctatggtctggtggccagtgggagcgtctctgttcgcatcaaacattggctcaggccacttcgttggtctagctggcactggagcagctagtggactggctgttgcaggattcgaatggaacgccctgttcgttgtcctgttactgggatggttatttgcgcccgtctatctgaccgccggagtgataactatgccgcagtacttgcggaagaggttcggggggcgaaggattcgtctgtatctgagcgtccttagtctcttcctttatattttcactaagattagcgtcgatatgttttcaggagcagtattcatacagcaggcccttggctggaatatttatgcttcggtaatagccctgctgggtattaccatgatttataccgttacaggggggttggctgctctgatgtatacagataccgttcaaacattcgtcatcttagggggggcctgcatactcatgggatatgcattccatgaagtgggcggatacagtggattgtttgataagtacctcggtgccgcgacttccctcacagtttctgaagaccccgccgtgggcaacattagcagcttttgctatagaccgaggcccgattcctatcatctcctgaggcaccctgtgactggagacttaccctggccggcgctcctcctgggactgacgattgtttctggctggtactggtgttcagatcaggtaatagtgcagaggtgtttagccggaaaatccctgacacacataaaggctggctgcattctctgtggctatctgaaactgacaccaatgttcctgatggtgatgccgggcatgatttcccgaatactataccctgacgaggtcgcctgtgtagttcccgaggtgtgcaggagagtttgtggtaccgaggtgggttgcagcaacattgcatatccacgtctagtcgtaaaattgatgccgaatggactcagagggctcatgctggccgtcatgctcgccgcgctgatgtcttctttagcaagcatttttaactctagctccacactattcacaatggatatctacacccggctgagaccgcgggccggagaccgtgagctacttctggtcggcagactctgggttgtgttcattgtggtggtttccgtggcctggctcccagttgtacaggctgcccagggcggtcagctgtttgattacattcaggccgtgtcttcctacttggctcccccagtgtccgctgtgttcgttcttgctctatttgtaccccgggtgaacgagcaaggcgctttctggggactgatcggtggccttctgatggggcttgctagactgatacccgagttttcctttggatccggcagctgtgtccagccttccgcctgtccagctttcctgtgcggtgtccactacctgtattttgctatcgtactattcttttgctcaggactcttaaccctgaccgtgagcttgtgtacagcccccataccaaggaaacacctccaccgcctggtcttcagcctgagacattccaaggaagagcgcgaggatctggacgctgatgaacaacaggggagttctctccctgtgcagaacggttgtcctgagtcagccatggaaatgaacgagccacaggcccccgctccctccctgttcagacagtgcctgttgtggttctgtggaatgtcacgagggggggtgggctcccctcctcctctcacccaggaagaggctgccgccgctgcacgcaggctcgaggacattagcgaagaccccagttgggcccgcgttgtcaacttaaacgcactcctcatgatggctgtggcagtgtttctgtggggcttttacgcatag

SEQ ID NO: 134578 - DNA, 2019 bp, Artificial Sequence
  derived and/or modified sequence
atggaagagcataccgaggccggatctgcccctgaaatgggcgcacaaaaagcccttatcgacaatccagctgacatcctcgtgatcgcagcatattttcttctcgtgataggggtggggttatggtccatgtgtagaacaaacaggggcaccgttggagggtatttcttagcaggcaggtcgatggtgtggtggcctgtgggagcgtcactgttcgctagcaacatcggcagcgggcacttcgtgggcctggctggaaccggcgctgctagtggcctggccgttgcaggatttgagtggaatgccctgtttgtcgtgctgctcttgggatggctatttgccccagtgtacctgactgctggggtgatcaccatgccccagtacctgcgcaaacgattcggaggaaggaggatcagactctacttgtcagtcctgtctttgtttttgtacattttcacgaaaatctccgtcgatatgttctccggggctgttttcatccagcaagcccttggttggaatatctatgcatcggtcatcgctttgctgggtatcactatgatttataccgtaaccggtggactggcggcactgatgtataccgatacggtgcaaaccttcgttatactggggggagcttgtatcctgatgggatatgctttccatgaggtaggtggttattctggccttttcgataaatatctgggcgcagccaccagtctgacagtgtccgaggaccctgctgtgggtaacatttccagtttttgttacaggccgaggcccgattcttatcacttgctgagacacccggtgacaggcgatttgccatggcctgctctcctgttaggtttgaccatcgtctccggatggtattggtgttcagatcaagtgatcgtccagaggtgcctggctggcaagtcgctgacccacattaaagcagggtgtatcctgtgtggttatctgaagttgacccccatgttcttgatggtgatgcctggcatgattagtagaatcctttatcctgatgaggtcgcttgcgtggtgccagaagtttgcaggcgtgtgtgcggaacagaggtcggctgctccaatattgcatatcctaggttagtagtgaaactcatgcctaatggcttaagagggctcatgttggccgtaatgttggccgctctgatgtcgtcgctggcgagcatattcaactcatcttcaactctgtttacaatggacatctatacccgcttgcgcccacgggctggggaccgtgagctccttctagtgggcagactgtgggttgtgttcatcgtcgttgttagtgttgcttggttgcctgtggtccaggcagcccagggaggccaactgtttgactacatccaagcagtgtcgtcttacctggcccctcctgtctccgccgtcttcgttttggctctcttcgttccccgagtgaacgagcaaggagccttttggggtctaatcggtgggctgctgatgggactggccaggttaattcctgaattttccttcgggtccggctcctgcgtacagccaagtgcttgtcccgctttcctgtgcggtgtccattacctttattttgccatagtgctgttcttttgttcaggcctgcttactttgactgtttctctgtgtacagctccaatacctagaaagcacctgcatagactggtgttttccctcagacacagtaaagaggaacgggaggacctcgatgcagatgaacagcaagggtcgtctttgcccgttcagaatggctgtcctgagagcgccatggaaatgaatgagcctcaggccccagcgcctagtctgttccggcagtgtctgctctggttctgtggcatgtctagaggcggagtgggatcacctccacctcttacacaagaagaggctgcagccgcagccagacggttggaagacatctcagaggacccttcatgggccagagtcgtgaatttgaacgctctgctgatgatggctgtggcagtgttcctctgggggttctatgcttag

SEQ ID NO: 134579 - DNA, 2271 bp, Artificial Sequence
  derived and/or modified sequence
ggggcagatcctggggagaatggaggagcacacagaggcaggctcggcaccagagatgggggcccagaaggccctgattgacaatcctgctgacatcctagtcattgctgcatatttcctgctggtcattggcgttggcttgtggtccatgtgcagaaccaacagaggcactgtgggcggctacttcctggcaggacgcagcatggtgtggtggccggttggggcctctctcttcgccagcaacatcggcagtggccactttgtgggcctggcagggactggcgctgcaagtggcttggctgttgctggattcgagtggaatgcgctcttcgtggtgctgctactgggctggctgtttgcacccgtgtacctgacagcgggggtcatcacgatgccacagtacctgcgcaagcgcttcggcggccgccgcatccgcctctacctgtctgtgctctcccttttcctgtacatcttcaccaagatctcagtggacatgttctccggagctgtattcatccagcaggctctgggctggaacatctatgcctccgtcatcgcgcttctgggcatcaccatgatttacacggtgacaggagggctggccgcgctgatgtacacggacacggtacagaccttcgtcattctggggggcgcctgcatcctcatgggttacgccttccacgaggtgggcgggtattcgggtctcttcgacaaatacctgggagcagcgacttcgctgacggtgtccgaggatccagccgtgggaaacatctccagcttctgctatcgaccccggcccgactcctaccacctgctccggcaccccgtgaccggggatctgccgtggcccgcgctgctcctcggactcacaatcgtctcgggctggtactggtgcagcgaccaggtcatcgtgcagcgctgcctggccgggaagagcctgacccacatcaaggcgggctgcatcctgtgtgggtacctgaagctgacgcccatgtttctcatggtcatgccaggcatgatcagccgcattctgtacccagacgaggtggcgtgcgtggtgcctgaggtgtgcaggcgcgtgtgcggcacggaggtgggctgctccaacatcgcctacccgcggctcgtcgtgaagctcatgcccaacggtctgcgcggactcatgctggcggtcatgctggccgcgctcatgtcctcgctggcctccatcttcaacagcagcagcacgctcttcaccatggacatctacacgcgcctgcggccacgcgccggcgaccgcgagctgctgctggtgggacggctctgggtggtgttcatcgtggtagtgtcggtggcctggcttcccgtggtgcaggcggcacagggcgggcagctcttcgattacatccaggcagtctctagctacctggcaccgcccgtgtccgccgtcttcgtgctggcgctcttcgtgccgcgcgttaatgagcagggcgccttctggggactcatcgggggcctgctgatgggcctggcacgcctgattcccgagttctccttcggctcgggcagctgtgtgcagccctcggcgtgcccagctttcctctgcggcgtgcactacctctacttcgccattgtgctgttcttctgctctggcctcctcaccctcacggtctccctgtgcaccgcgcccatccccagaaagcacctccaccgcctggtcttcagtctccggcatagcaaggaggaacgggaggacctggatgctgatgagcagcaaggctcctcactccctgtacagaatgggtgcccagagagtgccatggagatgaatgagccccaggccccggcaccaagcctcttccgccagtgcctgctctggttttgtggaatgagcagaggtggggtgggcagtcctccgccccttacccaggaggaggcagcggcagcagccaggcggctggaggacatcagcgaggacccgagctgggcccgtgtggtcaacctcaatgccctgctcatgatggcagtggccgtgttcctctggggcttctatgcctaagaccaactgcgttggacaccataagccacagcctcacaggaagtgggggtgaggagcctgcggtgctccccagaaaaggggaaggggcagtggggtgagaaggtcctggctccccttctcccggccttcctctgcctggggcccactgcatctgattggcagtcacttcccatgagggcctggcccacccgctgcagttgccctaaggaaaaataaagctgcctttcccctgt

SEQ ID NO: 134580 - protein, 599 aa, Artificial Sequence [sequence omitted]

SEQ ID NO: 134581 - protein, 39 aa, Artificial Sequence
  derived and/or modified sequence
MATNGSKVADGQISTEVSEAPVANDKPKTLVVKVQKKAA

SEQ ID NO: 134582 - protein, 421 aa, Artificial Sequence
  derived and/or modified sequence
MVNTTNMTSAVVEFWERNMHQMTDGLDKPGQIRWPLAITLAIAWILVYFCIWKGVGWTGKVVYFSATYPYIMLIILFFRGVTLPGAKEGILFYITPNFRKLSDSEVWLDAATQIFFSYGLGLGSLIALGSYNSFHNNVYRDSIIVCCINSCTSMFAGFVIFSIVGFMAHVTKRSIADVAASGPGLAFLAYPEAVTQLPISPLWAILFFSMLLMLGIDSQFCTVEGFITALVDEYPRLLRNRRELFIAAVCIISYLIGLSNITQGGIYVFKLFDYYSASGMSLLFLVFFECVSISWFYGVNRFYDNIQEMVGSRPCIWWKLCWSFFTPIIVAGVFIFSAVQMTPLTMGNYVFPKWGQGVGWLMALSSMVLIPGYMAYMFLTLKGSLKQRIQVMVQPSEDIVRPENGPEQPQAGSSTSKEAYI

SEQ ID NO: 134583 - DNA, 1800 bp, Artificial Sequence
  derived and/or modified sequence
atggccaccaacggcagcaaggtggccgacggccagatcagcaccgaggtgagcgaggcccccgtggccaacgacaagcccaagaccctggtggtgaaggtgcagaagaaggccgccgacctgcccgacagagacacctggaagggcagattcgacttcctgatgagctgcgtgggctacgccatcggcctgggcaacgtgtggagattcccctacctgtgcggcaagaacggcggcggcgccttcctgatcccctacttcctgaccctgatcttcgccggcgtgcccctgttcctgctggagtgcagcctgggccagtacaccagcatcggcggcctgggcgtgtggaagctggcccccatgttcaagggcgtgggcctggccgccgccgtgctgagcttctggctgaacatctactacatcgtgatcatcagctgggccatctactacctgtacaacagcttcaccaccaccctgccctggaagcagtgcgacaacccctggaacaccgacagatgcttcagcaactacagcatggtgaacaccaccaacatgaccagcgccgtggtggagttctgggagagaaacatgcaccagatgaccgacggcctggacaagcccggccagatcagatggcccctggccatcaccctggccatcgcctggatcctggtgtacttctgcatctggaagggcgtgggctggaccggcaaggtggtgtacttcagcgccacctacccctacatcatgctgatcatcctgttcttcagaggcgtgaccctgcccggcgccaaggagggcatcctgttctacatcacccccaacttcagaaagctgagcgacagcgaggtgtggctggacgccgccacccagatcttcttcagctacggcctgggcctgggcagcctgatcgccctgggcagctacaacagcttccacaacaacgtgtacagagacagcatcatcgtgtgctgcatcaacagctgcaccagcatgttcgccggcttcgtgatcttcagcatcgtgggcttcatggcccacgtgaccaagagaagcatcgccgacgtggccgccagcggccccggcctggccttcctggcctaccccgaggccgtgacccagctgcccatcagccccctgtgggccatcctgttcttcagcatgctgctgatgctgggcatcgacagccagttctgcaccgtggagggcttcatcaccgccctggtggacgagtaccccagactgctgagaaacagaagagagctgttcatcgccgccgtgtgcatcatcagctacctgatcggcctgagcaacatcacccagggcggcatctacgtgttcaagctgttcgactactacagcgccagcggcatgagcctgctgttcctggtgttcttcgagtgcgtgagcatcagctggttctacggcgtgaacagattctacgacaacatccaggagatggtgggcagcagaccctgcatctggtggaagctgtgctggagcttcttcacccccatcatcgtggccggcgtgttcatcttcagcgccgtgcagatgacccccctgaccatgggcaactacgtgttccccaagtggggccagggcgtgggctggctgatggccctgagcagcatggtgctgatccccggctacatggcctacatgttcctgaccctgaagggcagcctgaagcagagaatccaggtgatggtgcagcccagcgaggacatcgtgagacccgagaacggccccgagcagccccaggccggcagcagcaccagcaaggaggcctacatctag

SEQ ID NO: 134584 - DNA, 120 bp, Artificial Sequence
  derived and/or modified sequence
atggccaccaacggcagcaaggtggccgacggccagatcagcaccgaggtgagcgaggcccccgtggccaacgacaagcccaagaccctggtggtgaaggtgcagaagaaggccgcctag

SEQ ID NO: 134585 - DNA, 1266 bp, Artificial Sequence
  derived and/or modified sequence
atggtgaacaccaccaacatgaccagcgccgtggtggagttctgggagagaaacatgcaccagatgaccgacggcctggacaagcccggccagatcagatggcccctggccatcaccctggccatcgcctggatcctggtgtacttctgcatctggaagggcgtgggctggaccggcaaggtggtgtacttcagcgccacctacccctacatcatgctgatcatcctgttcttcagaggcgtgaccctgcccggcgccaaggagggcatcctgttctacatcacccccaacttcagaaagctgagcgacagcgaggtgtggctggacgccgccacccagatcttcttcagctacggcctgggcctgggcagcctgatcgccctgggcagctacaacagcttccacaacaacgtgtacagagacagcatcatcgtgtgctgcatcaacagctgcaccagcatgttcgccggcttcgtgatcttcagcatcgtgggcttcatggcccacgtgaccaagagaagcatcgccgacgtggccgccagcggccccggcctggccttcctggcctaccccgaggccgtgacccagctgcccatcagccccctgtgggccatcctgttcttcagcatgctgctgatgctgggcatcgacagccagttctgcaccgtggagggcttcatcaccgccctggtggacgagtaccccagactgctgagaaacagaagagagctgttcatcgccgccgtgtgcatcatcagctacctgatcggcctgagcaacatcacccagggcggcatctacgtgttcaagctgttcgactactacagcgccagcggcatgagcctgctgttcctggtgttcttcgagtgcgtgagcatcagctggttctacggcgtgaacagattctacgacaacatccaggagatggtgggcagcagaccctgcatctggtggaagctgtgctggagcttcttcacccccatcatcgtggccggcgtgttcatcttcagcgccgtgcagatgacccccctgaccatgggcaactacgtgttccccaagtggggccagggcgtgggctggctgatggccctgagcagcatggtgctgatccccggctacatggcctacatgttcctgaccctgaagggcagcctgaagcagagaatccaggtgatggtgcagcccagcgaggacatcgtgagacccgagaacggccccgagcagccccaggccggcagcagcaccagcaaggaggcctacatctag

SEQ ID NO: 134586 - DNA, 1800 bp, Artificial Sequence
  derived and/or modified sequence
atggcgaccaacggttccaaggtggctgatggccagatatcgactgaagtctccgaggcccctgtggcaaatgacaaaccaaaaacccttgttgtcaaggtccagaagaaggcagccgaccttcctgacagggatacctggaaagggaggtttgatttcctcatgagttgcgtgggatacgccatcggtctggggaatgtctggaggtttccctacttgtgtggtaaaaatggtggcggcgcttttttaatcccatatttcctcactcttatttttgctggcgtgccactgtttctgctggagtgtagcctcggacagtacacgagtattggaggactgggcgtgtggaagctggccccaatgtttaaaggtgtgggattagcagccgctgtgctttcattctggcttaatatctactacatcgtgatcatatcttgggctatctattacttatacaactcttttaccacaaccctcccctggaagcagtgcgacaacccctggaacaccgaccgctgcttttccaactactctatggtgaacactaccaatatgacttcagctgtggtggagttctgggagaggaatatgcaccagatgaccgacgggctcgataagcccggccagatccggtggcctcttgctatcacactggcgatcgcctggatccttgtatacttttgtatttggaaaggggtggggtggactgggaaagttgtttacttttcagcgacctatccctacattatgctgatcatccttttcttccgtggcgtgacgctccctggcgccaaagagggtatccttttttacatcactcccaacttccgaaaactgtctgacagcgaagtctggctggacgctgccacccagatttttttttcctacgggctggggctgggatccctcattgctctcggttcgtataacagcttccataataacgtgtatagagatagcattattgtgtgctgcattaactcctgcacctcgatgttcgcaggtttcgtcatttttagtatagtgggctttatggctcatgtaactaagcgtagcatcgctgatgttgcagcatctggaccaggattagccttcctggcatacccagaggctgtaacccaactgcctatttctcctctatgggcaatcttattcttctctatgctcctcatgttgggtatcgactcgcagttttgcacagttgaagggttcatcacagccctcgtagacgagtacccccgcttactgcggaaccggagagagctcttcatagccgcagtgtgtatcatcagttatctcatcgggttgtcgaatataacccaaggcggaatatatgtctttaagctgtttgactactacagcgctagtggcatgtcactcttgttcttagtgttttttgagtgtgtgtccatttcttggttttacggggtgaataggttttacgataacatccaagaaatggtcggctcccggccatgcatatggtggaagctctgctggagctttttcactcccattattgttgccggggttttcattttctctgcagtgcagatgacacccctgacaatgggaaattacgtcttccccaagtggggccagggcgttggctggctgatggctttgagcagtatggtgttaattccgggatatatggcgtacatgtttctgacgcttaaaggaagcctgaagcagcgaatacaggtgatggtgcagccaagtgaggatattgtccgtcctgagaacgggcccgaacagccccaggcaggttcctctacaagcaaggaagcatatatttag

SEQ ID NO: 134587 - DNA, 120 bp, Artificial Sequence
  derived and/or modified sequence
atggcaaccaatggctccaaggtggccgatggtcagattagtacagaagtgtctgaagcgccagtagctaacgataaacctaagaccctggtcgttaaggtccaaaaaaaagcggcttag

SEQ ID NO: 134588 - DNA, 1266 bp, Artificial Sequence
  derived and/or modified sequence
atggttaatacaaccaacatgacatccgcagtggtggagttctgggaacggaatatgcatcaaatgaccgatggcctagacaaacctggccaaattaggtggcctctcgcaatcactctggccattgcttggatcctggtgtacttttgcatctggaagggcgtgggctggacggggaaggtagtgtatttctctgccacgtatccatatataatgctaattatactgttttttagaggtgtgaccttacccggagctaaagagggaatcctgttctacataacgcctaattttagaaagctgtccgactcagaggtgtggctcgatgctgctacacaaatctttttttcatatggattgggtttagggagcctcatagctctggggagttacaatagctttcacaataacgtatacagggacagtatcatagtgtgttgcatcaactcttgcacctcaatgttcgccgggttcgtgattttttcaatcgtggggtttatggcccacgtgactaaaaggagtattgccgatgtagccgccagtggccccggtctcgcatttctcgcctaccctgaggctgtgacccagctgccaatctctcctttatgggccatcctgttcttctccatgcttcttatgcttggcatcgactcgcagttttgtaccgtcgaggggtttattaccgcactggtggatgaatatccccgattgctgcgaaatcggcgggagctgttcattgcagcagtttgcataatcagctacctgatcggcctgagtaacattacacagggcggcatatacgtttttaagttgtttgactactattccgcctcaggtatgtccctgctttttctggtcttcttcgaatgtgtgagcatttcatggttctacggcgttaaccggttctatgacaacatccaggaaatggtgggctcacgtccttgcatttggtggaaactctgctggtctttcttcactccgataatcgtggctggcgtgttcatattctctgcagtgcagatgactcccctaaccatgggcaattacgttttcccaaaatggggacagggagtgggatggctcatggcactttcctctatggtgctgattcccggttatatggcctacatgtttttaactttgaagggctcactcaagcagagaatccaggtcatggtgcagcccagtgaggacattgtgcgaccagaaaacgggcccgaacagcctcaagccgggagttctaccagcaaggaggcctacatctag

SEQ ID NO: 134589 - DNA, 1800 bp, Artificial Sequence
  derived and/or modified sequence
atggccaccaacggcagcaaggtggctgatggccagatcagcacagaggtgtctgaggcccctgtggccaatgacaagcccaagaccctggtggtgaaggtgcagaagaaggctgctgacctgcctgaccgggacacctggaagggccgctttgacttcctgatgagctgtgtgggctacgccatcggcctgggcaatgtgtggaggttcccctacctgtgtgggaagaatggaggaggagccttcctgatcccctacttcctgaccctcatctttgctggggtgcccctcttcctgctggagtgcagcctgggccagtacaccagcatcggcggcctgggcgtgtggaagctggcccccatgtttaaaggagtgggcctggccgctgctgtgctgtccttctggctgaacatctactacatcgtcatcatctcctgggccatctactacctgtacaacagcttcaccaccaccctgccctggaagcagtgtgacaacccctggaacacagaccgctgcttcagcaactacagcatggtgaacaccaccaacatgaccagcgctgtggtggagttctgggagaggaacatgcaccagatgacagatggcctggacaagccaggccagatccgctggcccctggccatcaccctggccatcgcctggatcctggtgtacttctgcatctggaagggcgtgggctggacaggcaaggtggtgtacttcagcgccacctacccctacatcatgctgatcatcctcttcttccggggcgtgaccctgcccggggccaaggagggcatcctcttctacatcacccccaacttcaggaagctgagtgacagcgaggtgtggctggatgctgccacccagatcttcttctcctatggcctgggcctgggcagcctcatcgccctgggcagctacaacagcttccacaacaacgtgtacagagacagcatcatcgtgtgctgcatcaacagctgcacctccatgtttgctggcttcgtcatcttcagcatcgtgggcttcatggcccacgtgaccaagaggagcattgctgatgtggccgccagcggccctggcctggccttcctggcctacccagaggccgtgacccagctgcccatcagccccctgtgggccatcctcttcttctccatgctgctgatgctgggcatcgacagccagttctgcaccgtggagggcttcatcacagccctggtggatgagtacccccggctgctgaggaacagaagagagctgttcatcgctgctgtgtgcatcatctcctacctgattggcctgagcaacatcacccagggcggcatctacgtgttcaagctgtttgactactacagcgccagcggcatgagcctgctcttcctggtgttctttgaatgtgtgtccatctcctggttctatggagtgaaccgcttctatgacaacatccaggagatggtgggcagccggccctgcatctggtggaagctgtgctggagcttcttcacccccatcatcgtggccggggtcttcatcttctctgctgtgcagatgacccccctgaccatgggcaactacgtgttccccaagtggggccagggcgtgggctggctgatggccctgagctccatggtgctgatccctggctacatggcctacatgttcctgaccctgaagggcagcctgaagcagaggatccaggtgatggtgcagcccagtgaagatattgtgcggccagaaaatggacctgagcagccccaggccggcagcagcaccagcaaggaggcctacatctag

SEQ ID NO: 134590 - DNA, 120 bp, Artificial Sequence
  derived and/or modified sequence
atggccaccaacggcagcaaggtggctgatggccagatcagcacagaggtgtctgaggcccctgtggccaatgacaagcccaagaccctggtggtgaaggtgcagaagaaggccgcctag

SEQ ID NO: 134591 - DNA, 1266 bp, Artificial Sequence
  derived and/or modified sequence
atggtgaacaccaccaacatgaccagcgctgtggtggagttctgggagaggaacatgcaccagatgacagatggcctggacaagccaggccagatccgctggcccctggccatcaccctggccatcgcctggatcctggtgtacttctgcatctggaagggcgtgggctggacaggcaaggtggtgtacttcagcgccacctacccctacatcatgctgatcatcctcttcttccggggcgtgaccctgcccggggccaaggagggcatcctcttctacatcacccccaacttcaggaagctgagtgacagcgaggtgtggctggatgctgccacccagatcttcttctcctatggcctgggcctgggcagcctcatcgccctgggcagctacaacagcttccacaacaacgtgtacagagacagcatcatcgtgtgctgcatcaacagctgcacctccatgtttgctggcttcgtcatcttcagcatcgtgggcttcatggcccacgtgaccaagaggagcattgctgatgtggccgccagcggccctggcctggccttcctggcctacccagaggccgtgacccagctgcccatcagccccctgtgggccatcctcttcttctccatgctgctgatgctgggcatcgacagccagttctgcaccgtggagggcttcatcacagccctggtggatgagtacccccggctgctgaggaacagaagagagctgttcatcgctgctgtgtgcatcatctcctacctgattggcctgagcaacatcacccagggcggcatctacgtgttcaagctgtttgactactacagcgccagcggcatgagcctgctcttcctggtgttctttgaatgtgtgtccatctcctggttctatggagtgaaccgcttctatgacaacatccaggagatggtgggcagccggccctgcatctggtggaagctgtgctggagcttcttcacccccatcatcgtggccggggtcttcatcttctctgctgtgcagatgacccccctgaccatgggcaactacgtgttccccaagtggggccagggcgtgggctggctgatggccctgagctccatggtgctgatccctggctacatggcctacatgttcctgaccctgaagggcagcctgaagcagaggatccaggtgatggtgcagcccagtgaagatattgtgcggccagaaaatggacctgagcagccccaggccggcagcagcaccagcaaggaggcctacatctag

SEQ ID NO: 134592 - DNA, 1800 bp, Artificial Sequence
  derived and/or modified sequence
atggccaccaacggcagcaaggtggccgacggccagatcagcaccgaggtgtctgaagcgcccgtggcaaacgacaagcctaagactctggtcgttaaagtacagaagaaagctgctgacctccctgaccgagacacgtggaaagggcgctttgatttcctgatgagttgcgttggatacgcaatcggactcggcaacgtgtggaggttcccgtatctgtgtggaaagaatgggggtggagccttcctgatcccttacttcctcacactcatcttcgctggagttcccctctttctgttggaatgttccctgggccagtacacctccattggaggactcggcgtttggaagctcgctcctatgtttaagggagtcggcctggcagctgcagtgctgagtttttggctgaacatatattacatcgtcatcatttcttgggccatatactatttgtacaacagcttcacaaccacgctgccctggaagcagtgtgacaacccatggaacaccgatagatgtttttccaactatagtatggttaatactactaatatgacctcagccgtggtcgaattctgggagagaaacatgcaccagatgactgatggtctggataagccgggccagattcggtggcctttggctatcactctagcaatcgcctggatcctcgtctatttctgtatttggaagggagtgggttggaccggaaaagtggtttacttcagcgcaacctacccttacattatgttaatcatactgtttttccggggagtgactctcccaggagccaaagaaggaattctgttttatatcacaccaaacttccggaagctgtccgacagcgaggtctggctggacgccgccacccagatctttttttcatacggcctgggcctcggaagtctgattgcactgggtagctacaactcctttcacaacaacgtgtaccgggactccatcatcgtgtgttgtattaacagttgtacaagtatgttcgctgggttcgtgatcttttcaatagtgggattcatggctcacgttaccaagaggtccatagcagacgttgctgctagcggtcccggcttggcttttcttgcttacccagaagcagtgactcagctgcctattagtccgctgtgggcaatcctattcttttcaatgttgctgatgctgggaatcgatagccagttttgcaccgtcgaaggctttatcactgcccttgtggatgagtatcctagacttttgcggaacagacgtgaattatttattgcagcagtgtgcatcattagctatctgattggattgagcaatatcactcagggcggcatctatgtctttaaactgttcgattactactctgcttctggcatgtctctcctgtttctagtgttcttcgagtgtgtgtccatctcatggttttacggggtcaacagattctacgataatatccaggaaatggttggctccagaccttgcatctggtggaagctctgctggagcttctttacaccaattatcgtggccggcgttttcatcttctccgccgttcagatgacccctctgaccatggggaactacgtttttcccaagtgggggcagggcgtagggtggctaatggctctgtcctcaatggtgctgatcccaggatacatggcctatatgtttcttacactgaaagggtctctaaaacaacgtatccaggtgatggtacagccgtcggaggatatcgtacgccccgaaaatgggccagagcagcctcaggcagggtcatccaccagtaaagaggcctacatttag

SEQ ID NO: 134593 - DNA, 120 bp, Artificial Sequence
  derived and/or modified sequence
atggccaccaacggcagcaaggtggccgacggccagatcagcaccgaagtgtccgaagcccccgtcgcgaatgataagcctaagactctggtggtcaaggtccagaagaaggcggcatag
